United States Patent Application Publication US 2008/0050393 A1 - sequence listing, part 16

SEQ ID NO: 58966 - DNA, 1776 bp, Homo sapiens
  misc_feature (1)...(1776): n = a,t,c or g
gcctgagtgccacagccagggcctctgctctgtacacagaccgggcaaggtcccccaggccaggatgtcaggcctggtgttggggcagcgggatgagcctgcaggccaccggctcagccaagaggagatcctggggagcacacggctggtcagccaagggctagaggccctacgcagtgaacaccaggccgtgctgcaaagcctgtcccagaccattgagtgtctgcagcagggaggccatgaggaagggctggtgcatgagaaggcccggcagcttcgccgttctatggaaaacattgagctcgggctgagtgaggcccaggtgatgctggctctagccagccacctgagcacagtggagtcggagaaacagaagctgcgggctcaggtgcggcggctatgccaggagaaccagtggctgcgggatgagctggctggcacccagcagcggctacagcgcagtgaacaggctgtggctcagctggaggaggaaaagaagcacctggagttcctggggcagctgcggcagtatgatgaggatggacatacctcggaggagaaagaaggcgatgccaccaaggattccctggatgacctctttcctaatgaggaggaagaggaccccagcaatggcttgtcccgtggtcaaggtgctacagcagctcagcagggtggatatgagatcccagcaaggttgcggacgttgcacaacctggtgatccagtacgcagcccaaggtcgctatgaggtggccgtgccactctgtaagcaggcactagaggacctggagcgcacatcaggccgtggccaccctgatgtcgccaccatgctcaacatccttgctttggtgtatcgtgaccagaataagtataaggaagctgcccacctgctgaatgatgcccttagcatccgggagagcaccttgggacctgaccatcctgctgtggctgccacactcaacaatttggctgtgctctatggcaaaaggggcaagtacaaggaggcagagcctctgtgccagcgggcactggagattcgagaaaaggtcctgggcacgaatcatccagatgtggcaaaacagctgaacaacctggccctcttgtgccaaaaccagggcaagtatgaggccgtggaacgctactaccagcgagcactggccatctacgaggggcagctggggccggacaaccctaatgtagcccggaccaagaacaacctggcttcctgttacctgaaacagggcaaatatgctgaggctgagacactatacaaagagatcctgacccgtgcccatgtacaggagtttgggtctgtggatgatgaccacaagcccatctggatgcatgcagaggagcgggaggaaatgagcaaaagccggcaccatgagggtgggacaccctatgctgagtatggaggctggtacaaggcctgcaaagtgagcagccccacagtgaacactactctgagaaacctgggagctctgtataggcgccagggaaagctggaggctgctgagaccctggaggaatgtgccctgcggtcccggagacagggcactgaccctatcagccagacgaaggtggcagagctgcttggggagagtgatggtagaaggacctcccaggagggccctggagacagtgtgaaattcgagggaggtgaagatgcttctgtggctgtggagtggtccggggatggcagtgggaccctgcagaggagtggctctcttggcaagatccgggatgtgctccgcagatncagtgaactctttgtgag

SEQ ID NO: 58967 - DNA, 1588 bp, Homo sapiens
  misc_feature (1)...(1588): n = a,t,c or g
ttttttttttttgcatttcaaatattttaatagttttatttcgcaaagagaagcctaagaatttttttaaaaacatttccagagagaacactttataccataaaataaacttgtataatttgggaggacaaatcatctcaaatgtatatttttgaattatgtgccaattttataattagtacaaaaatgacagctgaaatattttaaaaatgtaaaaaccagtccaggcaacataactataccatcttgctgtaaaagtacttatatcgaattccgcacaaaatatttttgcaatatgctaaatttagttcttcaagtcactcttcactgccggctggcttttccattttctgttgtctccatcccattttcctctttaagatgttgatatagttcagctctgttattaacagagttcaaacgtccagcaaattcctgatgttttctggaattggcagtattgattctattactccacaaggataataacgacactggcccttttgatttttccacttgtggagtttcatccatttcaacaaggggttttttgtttggaggttctggggaatcaggcgaatcttttataatctcagcttcagccaattcttcttttccacgttctaagattccttttaatctctctgagtcttgccaagacttttcctgttcataatctttcactgctttctctgacttgtcctctttgtcttccctctttcttcctcgtttctttcgttcttcctcttctgggggtttgctcctgcatgccatcagacattccaagactctttgatgtttctctgagttgttgatatgggctctgacaagggtttctaattcattccacatgatacggtattgttcatctcttttagggccctttcctcttgtaccaactgtggaaataggtagaggatcattttttctttccatatcaactaagttgtatattgttttttgacagtttaacacatcttcttctgtcagagattctttcacaataacactggctaatggaactaccgcttgcatgttaaaaatggtggtttgtgaaatgatcataggccagtaacgggtatgtttttctaactgatcttttgctcgttccaaagggacctcaagacttccatcgattttatatctggggtctagaaaaggagttaatctgttttccctcataaattcaccaaaatcctaatgataaccaaataagataaaattagaaactatgtctaatgtttcagtatggattacatgtactagtctgtttccctgatgtcttctgtcctgtgatgtgcaacaaaacattttttctaacagtatcccttaactccactacttttttatcctttctgaacttgaaacctatcagcctttatatgatgaaaatgaagaaagcctcaaacataaatgcattcatggtatgttttccccaccttttgtaaaaaccaaggaacactttttttccccttctgtaatttaacttttctatcacacacagataaaagagtcagttaatcacattagaagacccatttgcttatataaaaactacattgagcgnacgcgtgggcggacgcgtggg

SEQ ID NO: 58968 - DNA, 1213 bp, Homo sapiens
acccctccatttctcgccatggcccctgcactgctcctgatccctgctgccctcgcctctttcatcctggcctttggcaccggagtggagttcgtgcgctttacctcccttcggccacttcttggagggatcccggagtctggtggtccggatgcccgccagggatggctggctgccctgcaggaccgcagcatccttgcccccctggcatgggatctggggctcctgcttctatttgttgggcagcacagcctcatggcagctgaaagagtgaaggcatggacatcccggtactttggggtccttcagaggtcactgtatgtggcctgcactgccctggccttgcagctggtgatgcggtactgggagcccatacccaaaggccctgtgttgtgggaggctcgggctgagccatgggccacctgggtgccgctcctctgctttgtgctccatgtcatctcctggctcctcatctttagcatccttctcgtctttgactatgctgagctcatgggcctcaaacaggtatactaccatgtgctggggctgggcgagcctctggccctgaagtctccccgggctctcagactcttctcccacctgcgccacccagtgtgtgtggagctgctgacagtgctgtgggtggtgcctaccctgggcacggaccgtctcctccttgctttcctccttaccctctacctgggcctggctcacgggcttgatcagcaagacctccgctacctccgggcccagctacaaagaaaactccacctgctctctcggccccaggatggggaggcagagtgaggagctcactctggttacaagccctgttcttcctctcccactgaattctaaatccttaacatccaggccctggctgcttcatgccagaggcccaaatccatggactgaaggagatgccccttctactacttgagactttattctctgggtccagctccataccctaaattctgagtttcagccactgaactccaaggtccacttctaaccagaaaggaagagtggggtatggaagtcatctgccccttcactgttgagagcatgacactcttcccctcaacagcctccctgagaagaaagggatctgcccgggccagtccctgggaatatgaaattgcactggggcgaagggggtcccttttagacggcggcgttacccccagagggggtccacggttgcaagtag

SEQ ID NO: 58969 - DNA, 971 bp, Homo sapiens
aagggggaagccaggggcccatttgggggcccagcccccaatcccacccagcagaggaagccaaggtcggggcagctgtgattgctccctggtcctggagaggaaactggccatctgctttatctgaagattttcagctgatgaagaactaggaggctcaaacactatcttacctgagtccaggacaagtgacttggagagtgtgctcttctgtggcaggatcaggtctgtctagggcaggatggcccaggatctcagcgagaaggacctgttgaagatggaggtggagcagctgaagaaagaagtgaaaaacacaagaattccgatttccaaagcgggaaaggaaatcaaggagtacgtggaggcccaagcaggaaacgatccttttctcaaaggcatccctgaggacaagaatcccttcaaggagaaaggtggctgtctgataagctgatggcatggagccctgccctgagtgtctgtccctcttcagccaagcccaagtctcctagacccccagggagccagtgaactgtcaccttctcttcatcacagaatgagtaaagatccctgaacaaatgcattgtgaacccattccccactcccaccttcaactcttttctcccattatttcctccacctgctgggtctctgctgaccttgctgggaacactctgaggacagtgtggctggccgagcggttggccccatgggtggtggggtgtgagaagcctgcaataccccaagaccccagaggacagtccttaggaagcacttacaccacctgggaacccctccgtcttttccctctactctcatcctaggaataaagcatttccacgccagagtagtttgggctgggggccagggttgggtggtcctgtccctccatatcatgtcctaccctatggtcctgttcctagtcatttagatcaccccagatggcctgatgacaacaagagtttgtgaagtta

SEQ ID NO: 58970 - DNA, 2683 bp, Homo sapiens
cccacgcgtccgcgcacgcttggtgcgtgcgcggcgactgcgacgggcagtggcagtcatggcggctcagtgcgtgaggttggcgcggcgcagtcttcctgctttggcgttgtctctcaggccatctccccggttgttgtgcacagccacgaaacaaaagaacagtggccagaacctggaagaggacatgggtcagagtgaacagaaggcagatcctcctgctacagagaagaccctcctggaagagaaggtcaagttggaggaacagctgaaggagactgtggaaaaatataaacgagctttggcagacactgagaacttacggcagaggagccagaaattggtggaggaggcaaaattatacggcattcaagccttctgcaaggacttgttggaggtggcagacgttctggagaaggcaacacagtgtgttccaaaagaagaaattaaagacgataaccctcacctgaagaacctctatgaggggctggtcatgactgaagtccagatccagaaggtgttcacaaagcatggcttgctcaagttgaaccctgtcggagccaagttcgacccttatgaacatgaggccttgttccacacaccggttgaggggaaggagccaggcacagtggccctagttagcaaagtggggtacaagctgcatgggcgcactctgagacccgccctggtgggggtggtgaaggaagcttagctgctgttgatggggtgggtgtttttaaactcacttgatgtaactctcaaggctggttcattgtttctcatctatgagtacgtgtgaccttttcccaaaccttattggaaaccttaagtaaccagtggctaaacagaaaagccggttgcccaactgcattaatgaactctaattcgggagtctgttcccttttagtgccacgcgttgaatagttccacatactttcagaagagctcagcagggccctgcctggtctcccgagcatcatgagtaacgtgtctgctcagactctgctgacaccaaagtattttaaacaaataaaaggtcttggggaattctgtttggctacctgggcacgccagtctgcaccatgtgtccctgcggcgcatgagtgactggcgtatttagcccgtcacatttcattcgctgaaggaaaggcaagagagttgaaacatttttcttacttaaaaaaaatgatctttgtgaagaacatagtgagttcgtttgtcttcagtcaacagcggctgaaactgaccactgagaaatgggtgtgggcactgacagttctcccccattatttggccaggaattgagcttggcttggcaaagttccttttaccctgttctgttcatctaaatgcagacatatttaaatcatattcaactagttactaatgacctcaagttgtattccctggcaaaatggactttctcaaaataggactgcacgcttggtgtactttaaatgttaatgtttaatttaaaatttttatttaagaggattaaagccctaatgtttattttcctactttctgaaaacaattttgtgtcctctcatggagatccttgccgctgaggcaagcatggcttagccttcccattctctactccagcccagaagctgtcagcttgacacgtgcgtgcgtgcacattcacgtacacacatatacaggcttctacacagaaagggagagccacactcccccagtgcagctgcagcccgtccggtaagaatacgaaacacccaggagccacagcaagggcacaggatttgcaaaatcatcttgccaaagggctgttcctcatttacacggtcatccagggcttagaaaaaggctgaatgattggcgtctgttacaaaaaagagaaaagaacctttcgctgcctttgcttctagaatggaagatacttgtgaaagccatttgctgcacaggaaagatggggcagtttatttcacttctaattttaaaagacgcaagtaatggtcccataatacttcatcttgggataccattcccaaacatgttccacctttaagatgccttaagttaatttggtcagaaacaactaaaggcagcatcgtgtattggagaaaacatgactgggagctccagcgctgcctgttttcacgctgtggggttgtgagtgcatcatcacccctggagctcccgagttaaatggaggctaagaaaagtaatttatcaactcatttctgtgaatgtttgcagtctcctaccgtctcaactacagctgcagttgctaaaaagcacttaactcgtaacctagaggcaatatagcttaagtagcaaaatatttttttacagtaagcttcagtcatccatagtcactataagttggttatcatctgaaatggttagaaccagaattgtttcaaacttggggggttttcggattttggaatatagtcaagcatggcttaaccacagggatgtgttctgagaaatgcgctgtcaggcagtttttcctgtgaacaccatgtgtacctacatggacctaaaaaacaggtggtggagcctcctccacacctaggctatatggtgtatgtagcctgttgctctagactggagggcacgttactgtactgatactgtaggcaactgttaacacaatggtatctgtgtatctgaacataacatagtaaaggtacagtgcaaactgtgaaaaaaaaaa

SEQ ID NO: 58971 - DNA, 1260 bp, Homo sapiens
cccacgcgtccgctttctctctcagctctccgtctctctttctctctcagcctctttctttctccctgtctcccccactgtcagcacctcttctgtgtggtgagtggaccgcttaccccactaggtgaagatgtcagcccaggagagctgcctcagcctcatcaagtacttcctcttcgttttcaacctcttcttcttcgtcctcggcagcctgatcttctgcttcggcatctggatcctcatcgacaagaccagcttcgtgtcctttgtgggcttggccttcgtgcctctgcagatctggtccaaagtcctggccatctcaggaatcttcaccatgggcatcgccctcctgggttgtgtgggggccctcaaggagctccgctgcctcctgggcctgtattttgggatgctgctgctcctgtttgccacacagatcaccctgggaatcctcatctccactcagcgggcccagctggagcgaagcttgcgggacgtcgtaaagaaaaccatccaaaagtacggcaccaaccccgaggagaccgcggccgaggagagctgggactatgtgcagttccagctgcgctgctgcggctggcactacccgcaggactggttccaagtcctcatcctgagaggtaacgggtcggaggcgcaccgcgtgccctgctcctgctacaacttgtcggcgaccaacgactccacaatcctagataaggtgatcttgccccagctcagcaggcttggacacctggcgcggtccagacacagtgcagacatctgcgctgtccctgcagagagccacatctaccgcgagggctgcgcgcagggcctccagaagtggctgcacaacaaccttatttccatagtgggcatttgcctgggcgtcggcctactcgagctcgggttcatgacgctctcgatattcctgtgcagaaacctggaccacgtctacaaccggctcgctcgataccgttaggccccgccctccccaaagtcccgccccgcccccgtcacgtgcgctgggcacttccctgctgcctgtaaatatttgtttaatccccagttcgcctggagccctccgccttcacattcccctggggacccacgtggctgcgtgcccctgctgctgtcacctctcccacgggacctggggctttcgtccacagcttcctgtccccatctgtcggcctaccaccacccacaagattatttttcacccaaacctcaaataaatcccctgcgtttttggtaaaaaaaaaa

SEQ ID NO: 58972 - DNA, 1682 bp, Homo sapiens
ggcaagatggcgcttgccgagtgattctcctcgaatacctcctgccggcgcggagacaccggggcgggggtcctgccgcaactacctcccttcctcctctcccccgcccccggagccttcatccttcccttccccccccacctcgaggggcgggcctggttcccgggacaccatgtcggactctgaggaggagagccaggaccggcaactgaaaatcgtcgtgctgggggacggcgcctccgggaagacctccttaactacgtgttttgctcaagaaacttttgggaaacagtacaaacaaactataggactggatttctttttgagaaggataacattgccaggaaacttgaatgttacccttcaaatttgggatataggagggcagacaataggaggcaaaatgttggataaatatatctatggagcacagggagtcctcttggtatatgatattacaaattatcaaagctttgagaatttagaagattggtatactgtggtgaagaaagtgagcgaggagtcagaaactcagccactggttgccttggtaggcaataaaattgatttggagcatatgcgaacaataaaacctgaaaaacacttacggttttgccaggaaaatggttttagtagccactttgtctcagccaagacaggagactctgtcttcctgtgctttcagaaagttgctgctgaaatccttgggatcaaattaaacaaagcagaaatagaacagtcacagagggtggtgaaggcagatattgtaaactacaaccaggaacctatgtcaaggactgttaaccctcctagaagctctatgtgtgcagttcagtgagcgcatttttcttttgtgttgatagttctggctgcccttcacctctgggtgggcccgaggacttctaggaacttgttttatcagtgaccatctctgtagttcagttaacactttactcccaacttgcttcatcattgctattgcctcacagtggcaggcagctccttggatttgaaagaattcaactttgggaccacacactttgaattcaaaatggaaaacccattccctggaattagactgcttcattgcaaaagaatgatgttgtttctttgtatgtccttgcttcttttttcattgatgtaaatttttttaacttaatatgaaaactctccaagtcttgatcatcagccaggattttgccacagcaatttcattctcttatcggaacttgtatgtgtcaaagtatacttcagagtgcaaacattaagcaagtaatatattttacctacagatacttatgaagacattctttcgctatcgtgagtaaaagtatataaagctgtttctaactgaaaatgcttgaaataagcctgtaatagaaatattttttcattttttaaaaaagggcctaaattgtttatattgtagtttgtaactcacaaagtaatatttgatattgtatttttattactgtatcgttgtcgttatgtattgtgtaatactcaggtttgaaggctttctgaattctgataaatgttcagctgatgctccacgtggaatttctcttgcaaactgcataagagtactcccgagaatgagttatgacattgtggatccagactgtacctggatgttcagatgtttttctttcacaaataaacttatttaaattaaaaaaaaa

SEQ ID NO: 58973 - DNA, 6899 bp, Homo sapiens
tttcgtgcggctcgcggttcctccaccgcctccgccgccgcatcctccgcttgtgctaccgccgcgggcgctgggccgctctgctggtccggcatgagaccgtgagacgagagacgggtcggggccgccgacatgtttggccgctcgcggagctgggtgggcgggggccatggcaagacttcccgcaacatccactccttggaccacctcaagtatctgtaccacgttttgaccaaaaacaccacagtcacagaacagaaccggaacctgctagtggagaccatccgttccatcactgagatcctgatctggggagatcaaaatgacagctctgtatttgacttcttcctggagaagaatatgtttgttttcttcttgaacatcttgcggcaaaagtcgggccgttacgtgtgcgttcagctgctgcagaccttgaacatcctctttgagaacatcagtcacgagacctcactttattatttgctctcaaataactacgtaaattctatcatcgttcataaatttgacttttctgatgaggagattatggcctattatatatcgttcctgaaaacactttcgttaaaactcaacaaccacactgtccatttcttttataatgagcacaccaatgactttgccctgtacacagaagccatcaagtttttcaaccaccctgaaagcatggttagaattgctgtaagaaccataactttgaatgtctataaagtgtcattggataaccaggccatgctgcactacatccgagataaaactgctgttccttacttctccaatttggtctggttcattgggagccatgtgatcgaactcgatgactgcgtgcagactgatgaggagcatcggaatcggggtaaactgagtgatctggtggcagagcacctagaccacctgcactatctcaatgacatcctgatcatcaactgtgagttcctcaacgatgtgctcactgaccacctgctcaacaggctcttcctgcccctctacgtgtactcactggagaaccaggacaagggaggagaacggccgaaaattagcctgccggtgtctctttatcttctgtcacaggtcttcttaattatacatcatgcaccgctggtgaactcgttagctgaagtcattctgaatggtgatctgtctgagatgtacgctaagactgaacaggatattcagagaagttctgccaagcccagcattcggtgcttcattaaacccaccgagacactcgagcggtcccttgagatgaacaagcacaagggcaagaggcgggtgcaaaagagacccaactacaaaaacgttggggaagaagaagatgaggagaaagggcccaccgaggatgcccaagaagacgccgagaaggctaaaggtacagagggtggttcaaaaggcatcaagacgagtggggagagtgaagagatcgagatggtgatcatggagcgtagcaagctctcagagctggccgccagcacctccgtgcaggagcagaacaccacggacgaggagaaaagcgccgccgccacctgctctgagagcacgcaatggagcagacccttcctggatatggtgtaccacgcgctggacagcccggatgatgattaccatgccctgttcgtgctctgcctcctctatgccatgtctcataataaaggcatggatcctgaaaaattagagcgaatccagctccccgtgccaaatgcggccgagaagaccacctacaaccacccgctagctgaaagactcatcaggatcatgaacaacgctgcccagccagatgggaagatccggctggcgacgctggagctgagctgcctgcttctgaagcagcaagtcctgatgagtgctggctgcatcatgaaggacgtgcacctggcatgcctggagggtgcgagagaagaaagtgttcaccttgtacgacatttttataagggagaagacatttttttggacatgtttgaagatgagtataggagcatgacaatgaagcccatgaacgtggaatatctcatgatggacgcctccatcctgctgcccccaacaggcacgccactgacgggcattgacttcgtgaagcggctgccgtgtggcgatgtggagaagacccggcgggccatccgggtgttcttcatgctgcgttccctgtcactgcaattgcgaggggagcctgagacacagttgccgctgactcgggaggaggacctgatcaagactgatgatgtcctggatctgaataacagcgacttgattgcatgtacagtgatcaccaaggatggcggcatggtccagcgatccctggctgtggatatttaccagatgagtttggtggagcctgatgtgtccaggcttggctggggagtggtcaagtttgcaggcctattgcaggacatgcaggtgactggcgtggaggacgacagccgtgccctgaacatcaccatccacaagcctgcgtccagcccccattccaagcccttccccatcctccaggccaccttcatcttctcagaccacatccgctgcatcatcgccaagcagcgcctggccaaaggccgcatccaggcaaggcgcatgaagatgcagagaatagctgccctcctggacctcccaatccagcccaccactgaagtcctggggtttggactcggctcctccacctccactcagcacctgcctttccgcttctacgaccaggggcgccggggcagcagcgaccccacagtgcagcgctccgtgtttgcatcggtggacaaggtgccaggcttcgccgtggcccagtgcataaacgagcacagctccccgtccctgtcctcacagtccccaccctccgccagcgggagccccagcggcagcgggagcaccagccactgcgactctggaggcaccagctcgtcctccaccccctccacagcccagagtccagcagtcaggagtggcaggaaaggacgccgacgagtgttcagcctgtcggaggccgacagtcatggcggccactgggtttagtgctccgaacggcagctgccacggcacctcacgcacagtcaattcagatgcccccatgagtccagaactgcctaagcctcaccttcctgaccagttggtaatcgtcaacgaaacggaagcagactctaagcccagcaagaacgtggccaggagcgcagccgtggagacagccagcctgtcccccagcctcgtccctgcccggcagcccaccatttccctgacccttgtccccccagttgacccccacagcctccgcagcctcaccggcatgcccccgctgtccacgccggctgccgcctgcacagagcccgtgggcgaagaggctgcatgtgctgagcctgtgggcaccgctgaggactgagtcagtgccggggcctccctttgtgtgtgtggccccgctggtagggaccccagtgccgctgactggcaagacacactgggagcacccaccattctgtgcggcccccagcagccatctcaaccacctatccctgcgctcccttgaatgggaagaagccccacgttgtccttgaattcctttttcactttgcatctcttcacgtgcaggctgggaccagcggagacaccgcggcgaatgcagatgactgcaccggccactcagggagctgcctgggctccgtgtctctgagccccgggtggcaggacccaccggcacctctttcttcctctgtcatatggctcctctgtcaccagccccagtgtgcacagaagaattggaccaggtcactgtacgtagaaatttgtagaaaagcagacttagataaacatctcctttggatatttatttccgcttttggcagcaggtgaacatttatttttaaaacttctatttaaaagaagtccaaaaacatcaacactaaggtttgatgtcatgtgaaaagtgtaataataacagttaagatttcatgatcattttcactggacctttcctgatattttgtttcagagttcttagtgtggctttttccatttatttaagtgattctttgttactcactaactctgcaagcctgtggaataatgaagtaccttcctggaaagtttggattattttttaaacaaaaacaagggagatacatgtattctcaggtacacacagagctgagagggctgaatggttttctgctatagcagccgagaggcctcccatcatggaaagatttctccaggaaaaggaggaatgtagccagctccccactcaggacgcttcctcatttctcttcaccaaaaccaaacagagacagcttccagcaccttcttcagtgttaccatctctaagaaggaaccagttgggaccgtgaagactcccgaccctgtggccatgatggaaatcaaaggaagacaccctctacgtcacctgccctcgactgtgtgtgcccacatgtgccgagagatggcccagagccagttcccctccagctgcaagggcatggtgtccccagagctctgagtctgtcactctccctctgctactgctgctgatctgaatatggaaaccccatggttcccttccccattcggactgggtgtgtacaagcaaggacccagatgcatcagacacagcccccaagatgttcctttctactcggccagctcgggagccagacacagcactcacagcccaggccgtgatccaccctccccaagtccaccagggccagcggcccctcacctctctggtcactggtgagaccttccacaactttcctccagacctgccagcagatgtgcccaccaggggcattaggtatccgccggagcctggccatagggtagtctcgggagccgcgctgagatcttttgccacctgcattttagaagaacatggtctctgtctcctcggcccagccagctgtcccggcaaggcctgccgagggcagttttcaacctcatgaaggaaacacagtcctgccaaggagggggagtggcgcccatggggacaggcctcagtccttagaagccctctgggtagctgtgcccacccagccttcatggctgcaggtacaaggacctttgcttccatagagaaaacgcacagctcagaaagggggccacatgggcagaaacccaaaggaaggacaaaccacgaccaccgtggccatctgcagaatccctggaagagaaggaaggcagggtggagcggggggaagaccatcatggagagaaggaccacagcatcaggagacgggacacgccacacccagcaggcagcctgtgtgttgcttaattttttaagagcaagaggggtagagaggatcaagctggccctggctggagatggctagcccctgagacatgcacttctggttttgaaatgactctgtctgtggggcagcagaaactagagaaggcaagtggctgccccaccccaaggcgtgaccaggaggaacagcctgcagctcactccatgccacacgggtgggccaccagcctgctgtcagaagtctctgggctccaactggtcttgtaaccactgagcactgaaggagagaggtcttggtcagggctggacagcatgcccgggaggaccagcagaggattaaaggtgactgggaggaccagcggaggataaaagacactgctcagggcagggcttctaccctgcatccctggccaagaaaagggcagtccccatgtgggcttgcagggtcactctcaggggcctctttcagctggggctggcaacttgcgtctgggggacacctccaggtgtgtggggtgaggatttcctataaccagggctcccagaagctttgcttatgtaaggaggtctgggagccagcccattggaggccaccagccattttggcttcaaaggaccccacctcacccaggtctcagcggcagtgggcacagctatgtcttcaggagctcccgtcaaacctcatagctggggcgctcccagacaggccagtccagacaggacacgctgggcccctggcatccagaggaagagccaggagtgtgggaaggcccacagtgggggctgtggcttctgacactcaggtcatagcctcagaggtctgaggtcagcccccacagacccatccggcccgccccccaagtccctgcagagagcacttagagttatggcccaggccctggtccacccttcccctgtgcacctccggctgggtttgccaagtcagggagcagggctggccgcaggaactcccaaaccttggctttgaatattgttgtggaggtgtgctcgtccctttctggacgtgcaaggtacctgtcccagcaggtcagatggggccagctgaggcgctcccccaggcaggaagggccagccttcaccatcgcgtgggattgggaggaggggcctccgtgagcagcccctcctctgccgctgtcccagcccagtccctctcccggagccttggcagcctcccacaacccagacacttgcgttcacaagcaacctaaggggcaggtgacagaaaccgcaagcccctgcccagaacgcgcctagaattccctctaaggtcctctgagatgcacccgttttttaaaaaagcgcgtggggtgaacctgattttggacctccttgtcctagatgccaataaataaatctgaaggcatttaatgttagtcaactttgacattggggcctacactgttacggagttccttatgtttccttgagctaaaaataatgtaaaataatttttgtcccagtgaggaaccgaggggttaggaaaacctcggtggcctttgaggcctcggggaccgctctagggaagtacctgctttcgcccagcatgactcatgcttcgtgggtactgaacacgagggtggaaatgaaaactggaacttccttgtaaatttaaacttggcaataaaagagaaaaaaagtt

SEQ ID NO: 58974 - DNA, 1624 bp, Homo sapiens
ttcatttatattctagcaccaaaatacatagattaatttatttctcattgggactgcaacataaacaagtataattccatggtcaaggagttacaaatagtagcaagcccagtaaccttgagcatatctataaggcaaataaaacaaatatttctttcatagtgtgggcatccaactttagataatctggaaaaaaatcactctagcccctgaataccatgatgtgcatgatgtgcaaaatgaaagtatcacccaaaatattttcaaagctaaaaagaaaatatttaaattcaaatactttaaccaaattggaaatgcaaacagtacacttagagtcatccttagccagctgttctccaaacaaaagatcgagaaacaaaaccaagaacaaagacaatgtaaaaaagaaaaggtttatctagaaaaactggaagctcatcaaagtcacatttcttcttctgattcttgttctcgttcagcatttttcagaagtccaacttctgaggagcagagcctcttaagtctagatttaaccaaccaggtaatgaaagcataattcattccaacgatgacaatggttactgcataatgccaacaaaagcatatggtgagaaacaaaatattttcatgatccatcagatcccatgcaggacctccactggggggatacaggacaaatccaatctgaaagaaccagctcccctgaagcagaatgagacttgaccgcaatagctccagaagtacattgttccgaacaaggaactctaggaaggcaacgaggcctgtcagaaagacgaccaaaaccagcagctggtgcacaaagatgtccagcatttcccggccatgagtgtggttgtagaagataaaggcctccacaaataaggcatttgacaacattaacttggttaaggacacaggaagtgaactgatggtgaaacataagatatctgccacacccaacagcccaaagaagaaatacatggtgaaatgatgccagcccaggagttgattccagtgaccttgtttatagtcatataacatcagatggggccctccaggaataaactgctccccagccatgccagttaaagccatgccaactattgtaattccctccaaaatttccaatcgatagaataatgttttggaaccaagatagcaggttcgcttttgctttttgcagatatacttcagaatactctttgtacaccaccaaagaccaataataaaaaagaaggttccagggagggcatgacctctgaaattccccatgatccaacttggtctgtttactcaacactttatttttcccactttgccagcttaaaatcagacagcggctgggcttttgttgttgctgtttctgttcttttgatcccagagccccatgaaaattaaaccgtgtgttggatgggatctggccacgtctcgcattgggtgggggggggggaatttttaaacttgggtccctagtcgcttctttgggaaaacgaataaataataagtggcgagaaggagaggacgtgggggacgtgctcggctgacgtcggcccgcgaggaggtcgcacagctgtccagatgtgcttcatctgttacccccgcggggcactggctcggcggccgc

SEQ ID NO: 58975 - DNA, 2522 bp, Homo sapiens
ttttttttttttatgggaggatgggcaggttgttagctgtcgagtgctattgagatgagagagaactcacaatgcaggggggtaaggattgctgagtaatgtggagggcctgtttgaggtaaatggcagtggtaagaggttgctccattatgaaagccctcttccagagttcctgatagggccccagaagttcatttctgattgctttgattttttttcaggggagcaggaagccagtttatcatttgagagtgagaataggggagaggaaatatctttcaggcccacagtgcatagaaatacccagtcagggcaaaatgatttatctgtttacctctcctcatcacttgggcccagagcaatcagcagtgattaggtagagaggagccgaggagagggaagagcataccaatcactcctccctttcccagtgcaggctcctagacttagctggggcagagctgggagaggaaaaagggatttaaaactgcaacaggtgcagattattgttacacaggattagacattctaattaattgagattatgtttgttccttaaactgatcacaggactatctattaagaacatcacaacctcgctgcagcttttctccatagcagggagagtacctcccagtgaataaaatttggagggtggtaagagacaagaataaaattgggtttggttatccgtgcctcatgcttgttcagcatccctttgagagttctccaaataaatagttactgcttctgcagttattggtgtgctccagcttctgttcccataatatagtccagtcctaagggaacacagttctaaaagaaacaacatgatcttggcagagacaccgctcagctccaaacccaaccatttatgtaactgcacaaaactctctacagcttttcacagagaccagtaattagaacctttcatcccctggtcatcctccttcccaggtgaattctctgaccagccatctggttttaggatacccaactcctgcagtaactgccttactggtggtctaattgcttctactcgtgtccctaaagcaattaattttccacacagccatgtgatctttttaaaatgtaaatcagcttatgtcacttctctgcttaaaatccttcaatggattctcactgcctcgagaacaaaagacaaacttttcaggccccgtgtgatcttgcccaggcctccgtcaccatcaccatctgcatcttaacccactcctcccctttcacaaaactccagccacacagacttgctttttattcctcaagctttccaaactgtttctactgagagtctttgcacatgctccatcttccttgaatactctttccccagtgagctcattttcatcttcctgaattcataccactattacctttgcttctgtggaagaaactggccagatgctcacccaaatgtcctctttctggacacaggtaaactgcatttcccagctccatgcatctaggcctatgtgagtagttctcaacagtggaaaatgagtggaagtgatgtttcaatactagaccaaggcagttaaagggtggctgagccatttccattattctcttcctccttcctcttcaaggtaaccttgaagcacatgttttgacggtgatggagtcatagcatagaagaagtctgaatacctgagttactatttagggcataatagctacttgaccaaaaacatccatattggactttgaacaagaaaataaacttgattacattctgctagtgagttttgagggtgttttagcagttatcattatatacactggatatatcttctatggtatcctgtccaccttactcttgaccacagtaccctctttgtttccttcagggtgtttcagatatttaattatcttgccagatgccagtcaacactttctttttgtcccatgagtttaaaatcaggggaaaacatgtactcccaataggaagttgagatactcttttttttttaaatccgtcattgtgactgtgaccagaaaaacaaatcccactaaagaatgtcctaaacagatgtttttttttgtcatataacctggagttaggtgatttggcattggttctggagctgaaggatgttagggatgaagtctctgtagttttcttgtctcatggtcacgaaatgaagtgttattgattaagcagggatgccctacttagtattagacttcttggaagtctccttaattgccacagctcctatctttttggcttcgtttcaagggtccttctacattgttaatactctggtataaatacgttccattattccctataacatgactgaaaccaatctaaagtattaacattttaaatatgtttttgggccaagtgcagtggctcttatctgtgatcccagctactaggaaggctgaggtgggaggattgcttgagcccaggaatttcaggctgtagtgagctatgattgtgccactgtactccggcctggataactgagatcctgtctcaataaataaataaaacaatt

SEQ ID NO: 58976 - DNA, 3219 bp, Homo sapiens
gaaagaaaagctaaacctgcaacaaagtgttctgtgcccagaacgcggttaggaagtgtgtgcatacgtctgaaccctaaatggttctcagttctgtaaacttctcctcccactgggtggagtacggcctttaagagcagctggaatgcagttcccctgatcagcgtagccagttgttgcctgtctgaacctctgccagtcctggagactggtgccctgagctccaaccagcgggcctcatcctacaccctcaccaccgcaacttctcacccgagcaagaagcagctcccagagagaaagaacgttcccacctgcctagccatgggagaggacgctgcacaggccgaaaagttccagcaccctgggtctgacatgcggcaggaaaagccctcgagccccagcccgatgccttcctccacaccaagccccagcctgaacctagggaacacagaggaggccatccgggacaactcacaggtgaacgcagtcacggtgctcacgctcctggacaagctggtgaacatgctagacgctgtgcaggagaaccagcacaagatggagcagcgacagatcagtttggagggctccgtgaagggcatccagaatgacctcaccaagctctccaagtaccaggcctccaccagcaacacggtgagcaagctgctggagaagtcccgcaaggtcagcgcccacacgcgcgcggtcaaagagcgcatggataggcagtgcgcacaggtgaagcggctggagaacaaccacgcccagctcctccgacgcaaccatttcaaagtgctcatcttccaggaggaaaatgagatccctgccagcgtgtttgtgaaacagcccgtttccggtgccgtggaagggaaggaggagcttccggatgaaaacaaatccctggaggaaaccctgcacaccgtggacctctcctcagatgatgatttgccccacgatgaggaggccctggaagacagtgccgaggaaaaggtggaagaaagtagggcagagaaaataaaaagatccagcctgaagaaagtggatagcctcaagaaagcattttctcgccagaacatcgagaaaaagatgaacaagctggggacaaagatcgtatctgtagagaggagagagaagattaagaaatctctcacgtcaaatcaccagaaaatatcctcaggaaaaagctcccccttcaaggtttctcccctcactttcgggcggaagaaagtccgagagggagaaagccatgcagaaaatgagaccaagtcagaagacctgcctagcagtgagcagatgccaaatgaccaggaagaggagtcctttgcagagggtcattccgaagcgtccctcgccagcgctctggtggaaggggaaattgcagaggaggctgctgagaaggcgacctccagggggagtaactcggggatggacagcaacatcgacttgactattgtggaagatgaagaggaggagtcagtggccctggaacaggcacagaaggtacgctatgagggtagctacgcgctaacatccgaggaggcggagcgctccgatggggaccccgtgcagcccgccgtgctccaggtgcaccagacctcctgagcttagagccaccgtgccatcctgtgctgtgctcaagcgggcagccagggctgaagaacaaactcttgcacatctccagcacgactcacccactcctgcgttcctgtccaggcagtaatcattgaccatatagtcatagtaagacacacgagaccaggctttaccatgaaagcgacctgtcacggactccacttttaatttgctcttaggttctatctctgtagaatgtctccaagattgaagaagaagctgagcagttgaaaaatgctaatctctttgacttagtcagaaaaaaacagaggataattaagatactagtcatgaaaagtgattcattcttttttgtcattccataagcttgctgaatagtgtaccggtaatatattgtatttccaccgtactctgtgaatctaattattattctttaagtgttgatatataatatacataaatatgtaagctaaacatataactatatgttttaagaagaaaacatctacgaaaggtaaaaagagatgatcagttggttgtttacttgctagaaaccattgttttattgcaaacgaaggaaaaatgaagagattataaaagtcagctaatgaagtaagatacgtagtaaagtcaggactattcaaaaagtaagaaagaaaatttggaaaatgagagaaacaggaaacaaagaatgccgaaaagaatgaaaacagagaaaaaatgtatgtgcttgaaagtaaaatacttacaatagtagcttaactatttcactctttaaataaaaatactaaagaagttcgtatatcctggaataacatgtcatcttcaaaatatttttattttctaatatttttaataataaacattttatagtgttaaagctgtatttttcttaataaataaaggacattacaaatatttctttaaggaagttcaaaaggatgttgtcttgttaacattggaacgaatataaatcttcaaaatacaattaatatatactgttttgtggaaacttagctcatactattctttaatgctcttcaaatttaaactaacccttacattccatgtgatgtgatgtaggcttataagatgctaaaatctataggttttggaagtgaaagattctattttttctttttttgtacataatgggaatttcattccagattatattttatttacatattaatttcacagaatattaatatttcttaacttcttaaagcatgctagcgttttatgtatatgtacacatatattcagacagggtaattttatctgctgcctaacattgtactaaaatattgctttatctgtttttaattacaaaatgctaatgatttcttaaattatagtttataggacaaatgggcccagggaagcaaatcccctgcctttagtatgaaccactataagtaaccttacaaatagagttaatccaagacaatattaacaaactgtgctttgtctttaataaaagggataggattaacaaacatattgatggcataacctattcagctatgtccttatttttgcaataatgtaacctcaaatattggattgttgaaccaacaatggctgtgttaaagaagattaaataaaccgaaaaataaaaagcatgaa

SEQ ID NO: 58977 - DNA, 5054 bp, Homo sapiens
agggaattggacagcctggctgacttgccggagcggattaaaccaccatatgcaaacggactttcaacatcccatcttaggtcatcttctgtagaagatgttaaactaattataagcgaggggagacctaccatagaagttcgaagatgtagcatgccttctgtcatttgtgaacataccaaacaattccaaacaatatcagaagagagcaatcaaggtagcttattaactgtgccaggagatactagtccttctcccaaacctgaggtattctcaaatgtgcctgaaagagacctttcaaatgtatctaacatacattccagttttgcaacttctccaactggagcttcaaacagcaagtatgtttcagctgatagaaatctcatcaagaatactgccccagtgaacactgtaatggacagtccagtgcatttagagccatctagtcaggttggtgtgatccagaataaatcatgggagatgcctgttgatagactagagacattaagcaccagagactttatctgcccaaattctaacatacctgatcaagaatcctctcttcagagtttttgtaattctgaaaataaggtattgaaagaaaatgctgattttttatccctgcgccagactgaactgccaggaaactcttgtgctcaggatccggcatcctttatgcctccacagcagccttgctctttccccagccaatcactttcagatgctgaatcgatttctaaacatatgtctttgtcatatgttgctaatcaagagccaggtattttacaacaaaaaaatgcagttcagattattagttctgctttagatactgataatgaatctacaaaagatacagaaaatacttttgtcctaggagatgttcaaaaaacagatgcctttgtcccagtgtactctgacagcactattcaagaagcatcaccaaactttgagaaagcttatactttacctgtgttaccatcagaaaaggactttaatggaagtgatgcctctacccagctaaatacacattatgcatttagcaaactaacttacaagtcttccagtggccatgaagttgagaatagcacaactgatactcaggtcatttcacatgaaaaagaaaacaaactggagagtttggttttaactcatttgagtaggtgtgattctgatttatgtgaaatgaatgcagggatgccaaaaggaaacctaaatgaacaagatccaaaacattgtcctgaaagtgaaaagtgtttgctttccatagaagatgaggaatctcaacaaagcattttatcaagtctggaaaaccattcacagcagtcaactcaaccagaaatgcataaatatggtcagttagttaaagtagaattagaagaaaatgccgaagatgataaaactgaaaaccaaatccctcaaagaatgactagaaacaaagcaaatacaatggcaaatcaaagcaaacagattcttgctagctgtacactattatcagaaaaagacagtgaatcctcatctcctagaggaagaataagattaactgaagatgacgatcctcaaattcaccatccacggaaaaggaaagtgtcacgtgtacctcagcctgtgcaagtgagtccctctttactacaagcaaaagagaaaactcagcaatctctggcagccattgtagattctctaaaactagatgagattcagccatacagttcagagagagcaaatccatattttgaatacttgcacataaggaaaaaaatagaagaaaaacgcaaattactgtgtagtgtgattcctcaagcacctcagtactatgacgaatatgtaacatttaacggatcatatctcctggatggaaaccccttaagcaagatttgtattcccacaattacaccaccaccttcactgtcagatccacttaaagagctttttcgacaacaggaagttgtaaggatgaaactacgtttgcaacacagtattgaaagggaaaaactcattgtatccaacgaacaagaagttttgcgagttcattacagagctgcaagaacattggcaaatcaaacactgccatttagtgcttgtactgttttgctggatgccgaagtatacaatgtaccattggactctcagtctgatgacagtaaaacttctgtgagggatcgctttaatgcaagacaattcatgtcttggttacaagatgtggatgataaatttgacaaattaaagacctgtcttttaatgaggcaacaacatgaagctgcggctttaaatgctgtccagaggttagaatggcagctcaaactccaggaacttgatcctgccacctataaatctatcagcatttacgaaatccaggagttttatgttccccttgttgatgttaacgacgactttgaattgactcctatatagcagtcagtacttcctgatggtattgtcctaaactggtgatgctcaagcattatactgtggaatactgccttttgacaaaaatactcatgcctttacaattgttagtaaagttcgattatagttggttatgtagtaaacactgtcattttataaaaaatgagaattattttggatcttagatccaaacacagtttctaatagaaaactattatttatattgggaaaggtaactattgcattagagcatgttggcagactggtaggtatttaaaaagttgagaatctgctaacagcgctggaagttgttagcgctctaagtaataagataaccactagtattcaaatctctttcaggttttattaaaaaatatatatcaataaactaaaaggttcaattcctaccaaatagtttctaatgtgggagaaaaacttggcacaaaatttcttcagtttattatctgtaaattgtacagttttctttttgaaagttttaatattgtcttcctttttaataacttattttatacatattgtgcagatgtaaatcttgtaattaatggtcaaactggtataaagggattggtaagtcaaaacattgtacaaagaaataccctgtaaaactggttttgtctcatgttttattggaccaaaggttgtgggtttgtatgggagtgtagtaagtagtgtgtacaggtagaaaacttttaaatacagcatgcaggtgtttcagttagcttgttttcatcaccataactgcaaaggatgtggcttagttgtattgcatgcttcctataatttaactctccataattgatgcctgcagtagtgtaaggcatttcatactagtctcctctagtagacctgtgacttactgtgttggacatattatttagacttagtcatacaaagaaacttagctcttttttcatctcacagtaaagcctatttccccaggaaaaaaaataaatgcctttgaatgaaaattctgaaattgtaaatgtctattttaatattcacctatgacagaatctgtgaatatatgtaaatacgtttaataaattttattggtcatgttaaatcattgtaaaacttttttacattgcttaatgttttaagcttaatagcctttgcacttttaaaataaaaaccaagtatgcaaatcaaagatatttggtagtcaaaataagtaaaagaaatataggaatattccagtcaatctctgaaatgtttatgaaaaacaggttaatatgttgtatttttttccttgtatcaagatgcaaaacataatttgcaaaattttataattgaaataaaacttggtatgctgttttataataaattagcaatatactttaaaaaaaatccagtttctcctataacatgatgtaaattaaatattcaggaatatttcaggtctgaaatctgctgctgaacttgttagacatttttgaaaggaaaattaggttagcgtacaatttatcataaatatatgaggtaaaatttgcaaaactttccacagtactttcttgaattataatactgaatgttttctgttccgatagagaaaagtgaagcaaatatgtgaggaatgaagtgatctagtgcaagttggtaattccagctaatgggagagaatgtaaatgtgcaaaggtacatattaagcttagggatttttgaatttttacgtcagtttatattttaattcttactgtacttggcatgcgcaataaagcagcacatgtaaaaaaaaaaatacacagtgcaaggactttattataaaggttggatgtagttttccttaaaaatttaggtgagagattttggccttttttattggataaattgggccagaaaggcagggtagatttcgaagcactggttctgttgaagttaagtttattaagcctgggaacattaaaagctaatttataaaagcaatactttttaatatgaaaacttactgcaaagtttgtttatacttttgcctaaaaaggaaattggatgggatactgtggcaaatcataaaaaaccagataattgaactttgaagttatagaaaatcagagaggggtaagtttatagggcattttgttctgatggttcaaccagaggtctgggaaatagcactgttggcccaaacagaacaggcttttagaagataaaagcgacaagaaggaatctggtgaattttagtcatcccagctttttagtcttaaccacagttctcactctcttaaatggtacctcaaaaagctggagcctctctgccatgattatgcttctacaaatttcttttataaagagactcaaagctaatgatagcttaaaagaaaagttaatgccttctcattggaaatgtataatcaaataagtagttaagggcttttggtattaaagatattctgaagctctgaaatgctagaaaaaaatttggaatggagtatatgcctgaaaaggttttggattcagaaagaaaaaggatggttagtttaatcagtgattctttttaaactcttcaaatatcatgaacaagatactaaattgtacctaaggatttgtatttctttacaatttgttctaaatatctgtttaatgactagttgatatttgtgcatgttatttaataaagagttatatttttatag

SEQ ID NO: 58978 - DNA, 3179 bp, Homo sapiens
ccatctgagcgagaagagcagacaccgtgctcctggaatcacccagcatgttgcaaggtctcctgccagtcagtctcctcctctctgttgcagtaagtgctataaaagaactccctggggtgaagaagtatgaagtggtttatcctataagacttcatccactgcataaaagagaggccaaagagccagagcaacaggaacaatttgaaactgaattaaagtataaaatgacaattaatggaaaaattgcagtgctttatttgaaaaaaaacaagaacctccttgcaccaggctacacggaaacatattataattccactggaaaggagatcaccacaagcccacaaattatggatgattgttattatcaaggacatattcttaatgaaaaggtttctgacgctagcatcagcacatgtaggggtctaaggggctacttcagtcagggggatcaaagatactttattgaacctttaagccccatacatcgggatggacaggagcatgcactcttcaagtataaccctgatgaaaagaattatgacagcacctgtgggatggatggtgtgttgtgggcccacgatttgcagcagaacattgccctacctgccaccaaactagtaaaattgaaagacaggaaggttcaggaacatgagaaatacatagaatattatttggtcctggataatggtgagtttaaaaggtacaatgagaatcaagatgagatcagaaagagggtatttgagatggctaattatgtcaacatgctttataaaaagctcaatactcatgtggccttagttggtatggaaatctggactgacaaggataagataaagataaccccaaatgcaagcttcaccttggagaatttttctaaatggagggggagtgttctctcaagaagaaagcgtcatgatattgctcagttaatcacagcaacagaacttgctggaacgactgtgggtcttgcatttatgtctacaatgtgttctccttattctgttggcgttgttcaggaccacagcgataatcttcttagagttgcagggacaatggcacatgaaatgggccacaactttggaatgtttcatgacgactattcttgcaagtgtccttctacaatatgtgtgatggacaaagcactgagcttctatatacccacagacttcagttcctgcagccgtctcagctatgacaagttttttgaagataaattatcaaattgcctctttaatgctccattgcctacagatatcatatccactccaatttgtgggaaccagttggtggaaatgggagaggactgtgattgtgggacatctgaggaatgtaccaatatttgctgtgatgctaagacatgtaaaatcaaagcaacttttcaatgtgcattaggagaatgttgtgaaaaatgccaatttaaaaaggctgggatggtgtgcagaccagcaaaagatgagtgcgacctgcctgaaatgtgtaatggtaaatctggtaattgtcctgatgatagattccaagtcaatggcttcccttgccatcacgggaagggccactgcttgatggggacatgccccacactgcaggagcagtgcacagagctgtggggaccaggaactgaggttgcagataagtcatgttacaacaggaatgaaggtgggtcaaagtacgggtactgtcgcagagtggatgacacactcattccctgcaaagcaaatgataccatgtgtgggaagttgttctgtcaaggtgggtcggataatttgccctggaaaggacggatagtgactttcctgacatgtaaaacatttgatcctgaagacacaagtcaagaaataggcatggtggccaatggaactaagtgtggcgataacaaggtttgcattaatgcagaatgtgtggatattgagaaagcctacaaatcaaccaattgctcatctaagtgcaaaggacatgctgtgtgtgaccatgagctccagtgtcaatgtgaggaaggatggatccctcccgactgcgatgactcctcagtggtcttccacttctccattgtggttggggtgctgttcccaatggcggtcatttttgtggtggttgctatggtaatccggcaccagagctccagagaaaagcagaagaaagatcagaggccactatctaccactggcaccaggccacacaaacagaagaggaaaccccagatggtaaaggctgttcaaccccaagagatgagtcagatgaagccccatgtgtatgatctgccagtagaaggcaatgagcccccagcctcttttcataaagacacaaacgcacttccccctactgttttcaaggataatccaatgtctacacctaaggactcaaatccaaaagcatgaagcaacagctaagcaagaactaatggctaaattatcaacttggaaaactggaaaatctggatggcagagaaatatactatctcaccagtatttgctctcgactcaagaaggttaacattttctgattcatgttagactttgaagagactaaagaaaattttcaagaggaacatatgcctgagaacctttgcatgaatttaaaatttcaattatccattcttataagaaggaagatgattgtaaagaaatatctccgaagttaaaatctgtaataggaattgattcattctctaatgaaaacaaaacataaaaacatcacactaatcttggaggaataagaaaaattgtacatccattaaatgtacaattgattgcaacatcttgattgttttaaccattaacttgtcaaattacaatcacagttaagaaaatgatgtaaaattctgttttgtggatctctttcctagattagcttctgaaatcattattagctatatcatttgaggttttctacaatttggtataactaagaatttaaaaatgttttatcatatatatttgtataattaattactggcatggttaaagtggtatttcactttttaaatggagaaaatttcagttaaattaataggataaaccaggttgcgaactgatgacctgtaggccatgttagcactgcaaatatatttggtctgaatgatattgatattggacacatagtacttttacatgttttgaatgtattgctaatatttaaaaattgagagatcttgcataaacaatagattcccaaaaaaaaaa

SEQ ID NO: 58979 - DNA, 1438 bp, Homo sapiens
cgactccgccgactacgcgccttggggtccgggtcgctttccccgggacctggccggaaactgagccgttcacttccgccaccagccggaagttttctgtcactggacgccaaggagttttcggtggctcagctgggtaaccggggatcaccatggcggcctcattggtggggaagaagatcgtgtttgtaacggggaacgccaagaagctggaggaggtcgttcagattctaggagataagtttccatgcactttggtggcacagaaaattgacctgccggagtaccaaggggagccggatgagatttccatacagaaatgtcaggaggcagttcgccaggtacaggggcccgtgctggttgaggacacttgtctgtgcttcaatgcccttggagggctccccggcccctacataaagtggtttctggagaagttaaagcctgaaggtctccaccagctcctggccgggttcgaggacaagtcagcctatgcgctctgcacgtttgcactcagcaccggggacccaagccagcccgtgcgcctgttcaggggccggacctcgggccggatcgtggcacccagaggctgccaggactttggctgggacccctgctttcagcctgatggatatgagcagacgtacgcagagatgcctaaggcggagaagaacgctgtctcccatcgcttccgggccctgctggagctgcaggagtactttggcagtttggcagcttgacttctgcagctggaggaggcccctcaggccggggatctggggagggctagcccaaaacctcccgcatcgggcaggcaccccctgaagtacttccttcagggtttcccctttgtgagggtgtcgagtagcctcaccggcctgtctggaggagcagctggctctgctctgagaaactctggcaagtggacgccattctcttgcccttaggattcactgctctctcctacagccgccaggcctggggtcctgaaaggaccttgggtggtaaagctgtacttggtgggagtgagggcgtggggaggaaccatgcaaatcgccttccatggtttttaaatgcagtaaataacatttctggatgagacttgtttccaaaataaaccagctatatctgttttgaaaaaaaaaaaaaagggggggcccgttttaaagaacccttggggggcccaaattttacccgggctggcaaggaaaaatttttttccttatggggggcctttttaaaccctacttgggaatttttggaaagaaccttttttttggggggggaacatattggcccaacctccctccaaaatttaaaggctttagggaaaaaaaaaatttttaaggggaaaagggggaaaaacaacctcaatatccttgctgttgaaaagttttttttccgggttttgttttaaaaaaattttttccccgggacttgg

SEQ ID NO: 58980 - DNA, 2392 bp, Homo sapiens
gcgactcgtcccgccttctggggcactagtttgactttgtgattggctactagtatcaaggaatcccggcgtggacagcgcgaggagaaagatggcggcgatggcggtcgggggtgctggtgggagccgcgtgtccagcgggagggacctgaattgcgtccccgaaatagctgacacactaggggctgtggccaagcaggggtttgatttcctctgcatgcctgtcttccatccgcgtttcaagagggagttcattcaggaacctgctaagaatcggcccggtccccagacacgatcagacctactgctgtcaggaagggactggaatacgctaattgtgggaaagctttctccatggattcgtccagactcaaaagtggagaagattcgcaggaactccgaggcggccatgttacaggagctgaattttggtgcatatttgggtcttccagctttcctgctgccccttaatcaggaagataacaccaacctggccagagttttgaccaaccacatccacactggccatcactcttccatgttctggatgcgggtacccttggtggcaccagaggacctgagagatgatataattgagaatgcaccaactacacacacagaggagtacagtggggaggagaaaacgtggatgtggtggcacaacttccggactttgtgtgactatagtaagaggattgcagtggctcttgaaattggggctgacctcccatctaatcatgtcattgatcgctggcttggggagcccatcaaagcagccattctccccactagcattttcctgaccaataagaagggatttcctgttctttctaagatgcaccagaggctcatcttccggctcctcaagttggaggtgcagttcatcatcacaggcaccaaccaccactcagagaaggagttctgctcctacctccaatacctggaatacttaagccagaaccgtcctccacctaatgcctatgaactctttgccaagggctatgaagactatctgcagtccccgcttcagccactgatggacaatctggaatctcagacatatgaagtgtttgaaaaggaccccatcaaatactctcagtaccagcaggccatctataaatgtctgctagaccgagtaccagaagaggagaaggataccaatgtccaggtactgatggtgctgggagcaggacggggacccctggtgaacgcttccctgcgggcagccaagcaggccgaccggcggataaagctgtatgctgtggagaaaaacccaaatgccgtggtgacgctagagaactggcagtttgaagaatggggaagccaagtgaccgtagtctcatcagacatgagggaatgggtggctccagagaaagcagacatcattgtcagtgagcttctgggctcatttgctgacaatgaattgtcgcctgagtgcctggatggagcccagcacttcctaaaagatgatggtgtgagcatccccggggagtacacttcctttctggctcccatctcttcctccaagctgtacaatgaggtccgagcctgtagggagaaggaccgtgaccctgaggcccagtttgagatgccttatgtggtacggctgcacaacttccaccagctctctgcaccccagccctgtttcaccttcagccatcccaacagagatcctatgattgacaacaaccgctattgcaccttggaatttcctgtggaggtgaacacagtactacatggctttgccggctactttgagactgtgctttatcaggacatcactctgagtatccgtccagagactcactctcctgggatgttctcatggtttcccatcctcttccctattaagcagcccataacggtacgtgaaggccaaaccatctgtgtgcgtttctggcgatgcagcaattccaagaaggtgtggtatgagtgggctgtgacagcaccagtctgttctgctattcataaccccacaggccgctcatataccattggcctctagccctgcgtgccaagtgtccagagccttggaagcagcttcaggttctgctcctgtagtacagaaggtgcagtacatctatgggctgtgattccccttgcccatcagagaggagcatttcaatctgctttcctgccttacatcaaggtgggcaagggattataattaattgcagggctcaagccaccaatctatgaagacctcaggccagggggtgaggaattagtgctggatttgaagctacgcactcagcctcaagaactccctggaatatccctgagaacatggggtttgaacggattttcagcctttttctgttcttgttttgatgggtttgtgtaagaggaaatacaaataaagttatagccctttactgcacgaaaaaaaaaa

SEQ ID NO: 58981 - DNA, 1430 bp, Homo sapiens
atctggtaaagctcccatcctgccctgaccctgccatgggcaccagcctcctctgctggatggccctgtgtctcctgggggcagatcacgcagatactggagtctcccagaaccccagacacaagatcacaaagaggggacagaatgtaactttcaggtgtgatccaatttctgaacacaaccgcctttattggtaccgacagaccctggggcagggcccagagtttctgacttacttccagaatgaagctcaactagaaaaatcaaggctgctcagtgatcggttctctgcagagaggcctaagggatctttctccaccttggagatccagcgcacagagcagggggactcggccatgtatctctgtgccagcaccaaacggctaggacggttgagctcctacaatgagcagtattttggcccaggcacccggctgacagtgctcgaggacctgaaaaacgtgttcccacccgaggtcgctgtgtttgagccatcagaagcagagatctcccacacccaaaaggccacactggtgtgcctggccacaggcttctaccccgaccacgtggagctgagctggtgggtgaatgggaaggaggtgcacagtggggtcagcacagacccgcagcccctcaaggagcagcccgccctcaatgactccagatactgcctgagcagccgcctgagggtctcggccaccttctggcagaacccccgcaaccacttccgctgtcaagtccagttctacgggctctcggagaatgacgagtggacccaggatagggccaaacctgtcacccagatcgtcagcgccgaggcctggggtagagcagactgtggcttcacctccgagtcttaccagcaaggggtcctgtctgccaccatcctctatgagatcttgctagggaaggccaccttgtatgccgtgctggtcagtgccctcgtgctgatggccatggtcaagagaaaggattccagaggctagctccaaaaccatcccaggtcattcttcatcctcacccaggattctcctgtacctgctcccaatctgtgttcctaaaagtgattctcactctgcttctcatctcctacttacatgaatacttctctcttttttctgtttccctgaagattgagctcccaacccccaagtacgaaataggctaaaccaataaaaaattgtgtgttgggcctggttgcatttcaggagtgtctgtggagttctgctcatcactgacctatcttctgatttagggaaagcagcattcccttggacatctgaagtgacagccctctttctctccacccaatgctgctttctcctgttcatcctgatggaagtcctcaaacaccatttccatacccaggcattctgggtccccactggagggttagtctgaagggcaatggctgggctttggaaaaccag

SEQ ID NO: 58982 - DNA, 2307 bp, Homo sapiens
ggcacgaggatgaaaggaaaaatatttcaacccggctgtcggtctaaaagaggagagaatgctttctttaaaaaagggtctgtgaattagttttcctgatctaacttctaattttctgtatgttctgccatttgtgggaaatatttcttcgtttcagattgttgatgttattgttgggaaagacgaaaaaggcagaaagatcccagaatatctgatccattttaatggttggaacagaagctgggatagatgggcagcagaagatcatgtgcttcgtgataccgatgaaaatcgtagattacagcgtaaattggcaagaaaagctgtagctcgcctgaggagcacaggaagaaagaagaagcgctgcaggttgcctggtgtggactctgtcttaaaaggcctccccactgaagaaaaagatgaaaatgatgaaaactcattaagcagttcctctgactgtagtgaaaacaaggatgaagaaataagtgaagaaagtgatattgaagaaaagactgaagtgaaagaagaaccagagcttcaaacaagaagggaaatggaagaaagaacaataactatagaaatccctgaagttctgaagaagcagctggaggatgattgttactacattaacaggaggaaacggttagtgaaacttccatgccagaccaacatcataacgattttggaatcctatgtgaagcattttgctatcaatgcagccttttcagccaatgagaggcctcgtcaccatcacgttatgccacatgccaacatgaacgtgcattatatcccagcagaaaagaatgttgacctttgtaaggagatggtggatggattaagaataacctttgattacactctcccgttggttttactctatccatatgaacaagctcagtataaaaaggtgacttcgtctaaattttttcttccaattaaggaaagtgccacaagcactaacaggagccaggaggaactctctcccagtccgcctttgttgaatccatccacgccacagtccacagagagtcagccgaccaccggtgaaccagccacccccaaaaggcgcaaagctgagccagaagcattgcagtctctgaggcggtccacgcgccacagtgccaactgtgacaggctttctgagagcagcgcttcacctcagcccaagcgccggcagcaggacacatccgccagcatgcccaagctcttcctgcacctggaaaagaagacacctgtgcatagcagatcatcttcacctattcctctgactcctagcaaggaagggagtgctgtgtttgctggctttgaagggagaagaactaatgaaataaacgaggtcctctcctggaagcttgtgcctgacaattaccccccaggtgaccagccgcctccaccctcttacatttatggggcacaacatttgctgcgattgtttgtgaaacttccagaaatccttggaaagatgtccttttctgagaagaatctgaaggctttattgaagcactttgatctctttttgaggtttttagcagaataccacgatgacttcttcccagagtcggcttatgtcgctgcctgtgaggcacattacagcaccaagaacccccgggcaatttattaaaatgttgttggttctgtaagagcaactgctctgtctagtttggcgctctgggttccaggtgaataactaacaaggtggtgggtctttacccacagcgcaaacacaatgcccaccttggggctctgttgtttgagttgcccacatactgcagttattctgttaggaatgattccctgggtgcctgaaagtgctctgacacgacacttgttactttgcaggccatctgtgatggcaaggaaaaagcaactatgttcacagtgaaatattcgtggaataggttaggccatttcagtagacattgcagttagttagcaagaaccacattgtctctttatttgttagcattaaacaaatttttttttgcaaattggttttatttttttgatgaagccgagcaactctgtccaaaaaggtttagtttgtactcggaaaccacaaagtagtctcaaagtattttagagggaatcgatattgatggcaaaagaaaatttgcagctatgcatttgcttctaacggttccctctctgtgaaacattatttttggtgatctaaagaaagcattgcctttcttatttgagattttacagctatactttgttgtgtaatgttatggttccctttctgtaaaatgttatttttggtgatctaaataaagcctgtcttgtttgaaagaaaaaaaaaaaaaa

SEQ ID NO: 58983 - DNA, 2425 bp, Homo sapiens
tttcgtggaagaggcggcggcggcggcagaagcggcggcggcggcggcggcgggagccgaggaggaggttccggacgctgcttaggaaccggggactcaggagtgcccgcgccctgagcgctcagctccagaggcgtcatggctgagtacgggaccctcctgcaagacctgaccaacaacatcacccttgaagatctagaacagctcaagtcggcctgcaaggaagacatccccagcgaaaagagtgaggagatcactactggcagtgcctggtttagcttcctggagagccacaacaagctggacaaagacaacctctcctacattgagcacatctttgagatctcccgccgtcctgacctactcactatggtggttgactacagaacccgtgtgctgaagatctctgaggaggatgagctggacaccaagctaacccgtatccccagtgccaagaagtacaaagacattatccggcagccctctgaggaagagatcatcaaattggctcccccaccgaagaaggcctgagcaagggggaggaagaggaggaaggttggaccttcatcagaccactcccttcccccatcctccaggagagggggcaagggcaacccaccatctacccacttactaacctggtcctaacccccttactgtgcgcgtgtgtgtgcgtgtgcgcacgctctggctgtttgtctatatgtctagctcatctagttcctcttcttaaggggatgggggtcaggggctaggggagggggctgagtttccccactttaggaggaggtgggggctatttctatgcaaatagaaatcagcacattcctcctacttccctttcctccactccccccatatctttaaagtgtggaagcagaaaggacctgcattttcctacattgaggagctgacataggggtaaggtatgggagaggtaggtggatccagggaaaagcagtggggacggaaggcaaagagaccactcaacccccacctggaaggggcaaagaaaagccagagttccatgtttgtactcctgtgctggactgtttcctgagtaccagcaggtccctttttgtctctcatgggcctagcataggtatgagccagggatcctttcctggtccctaagatcaaaccccatggagcagccagcgttagatgcccccacccacctgtactctggagagagtgtgctgggaacatgtaccactgagcctgagatggggatgagggcagagagaggggagccccctcttccactcagttgttcctactcagactgttgcactctaaacctagggaggttgaagaatgagacccttaggttttaacacgaatcctgacaccaccatctatagggtcccaacttggttattgtaggcaaccttccctctctccttggtgaagaacatcccaagccagaaagaagttaactacagtgttttcctttgcaccgatccccaccccaattcaatcccggaagggacttacttaggaaacccttctttactagatatcctggccccctgggcttgtgaacacctcctagccacatcactacagtacagtgagtgaccccagcctcctgcctaccccaagatgcccctccccaccctgaccgtgctaactgtgtgtacatatatattctacatatatgtatattaaaactgcactgccatgtctgcccttttttgtggtgtctagcattaacttattgtctaggccagagcgggggtgggaggggaatgccacagtgaagggagtggcagaatcaaattgctacatagtccaaacaaaaaagaaggctttttcaaaaaacattaaattcacatgcagtctcagagactatttagacaaagttcaagttaggagcttttaggatgtgggagtaaaactttaatgggaggggagggctggctgctggaagaaggaagaagccagactggttagacagtactcttaactcctagcccagcctagcgtgccctgcccctctggccactgctgcagacacctgccttaacacacacacctctaggactccacagttttgccttaaaggaccttcccaagtctccctttccctgtctggcttctcccttaagaagagagagatacttgtagaattgggtggggggaatgagcatgaactgtccttccatttgggatatgttacattagagtgagagagagaataaggagcctttcttatggaagaaatgggagaagagagacagggttcttttcagcagagtctagtagtttctctgtaaggcaaaataatctaaaaagactaacctgcccacccactccttatattgctgtgagattgcccctatcttgtgctcttctgtctgcagtgtgcacggccttgttctaacccggaataaaggtgattgattgtattgcaaaaaaaaaa

SEQ ID NO: 58984 - DNA, 791 bp, Homo sapiens
aacagtgttctaactattaacgctacgatgcctgaacctaccaagtctgctcctgccccaaagaagggctccaagaaggcggtgactaaggctcagaagaaggacgggaagaagcgcaagcgcagccgcaaggagagctattcagtgtatgtgtacaaggtgctgaagcaggtccatcccgacaccggcatctcttccaaggcaatggggatcatgaattccttcgtcaacgacatcttcgagcgcatcgcaggcgaggcttcccgcctggcgcattacaacaagcgctcgaccatcacctccagggagatccagacggccgtgcgcctgctgcttccgggggagctggccaagcacgccgtgtcggagggcaccaaggccgtcaccaagtacaccagttccaagtaactttgccaagggagagacatgaagacagaggagaaatgaatgcataaaataactgacaatatgaatctatacatagaacttaggaagtctcatctgcctgaaaatgactgtgtggatcccacccaaatccaactcatcctggtttgctgcacactggttcatcaaaagaaggttaccgaggggaaggaactaaaggtgtttgcacttcatgttactttttgagtttataaacataaaaaccagaatttactytctgttacagacctagttactgggaattcattacttgccatggactacctttgctaagaaaagtctgaatgagaagatggcaggacgtctgaaaaaaaaagttataattaataaaatctgcggagaattgt

SEQ ID NO: 58985 - DNA, 2352 bp, Homo sapiens
  misc_feature (1)...(2352): n = a,t,c or g
aaagggtgcttaacttctaattatttgatcactgaggaaaatccagaaagctacacaacactgaaggggtgaaataaaagtccagcgatccagcgaaagaaaagagaagtgacagaaacaactttacctggactgaagataaaagcacagacaagagaacaatgccctggacatggctccagagatccacatgacaggcccaatgtgcctcattgagaacactaatggggaactggtggcgaatccagaagctctgaaaatcctgtctgccattacacagcctgtggtggtggtggcaattgtgggcctctaccgcacaggaaaatcctacctgatgaacaagctagctgggaagaataagggcttctctctgggctccacagtgaaatctcacaccaaaggaatctggatgtggtgtgtgcctcaccccaaaaagccagaacacaccttagtcctgcttgacactgagggcctgggagatgtaaagaagggtgacaaccagaatgactcctggatcttcaccctggccgtcctcctgagcagcactctcgtgtacaatagcatgggaaccatcaaccagcaggctatggaccaactgtactatgtgacagagctgacacatcgaatccgatcaaaatcctcacctgatgagaatgagaatgaggattcagctgactttgtgagcttcttcccagattttgtgtggacactgagagatttctccctggacttggaagcagatggacaacccctcacaccagatgagtacctggagtattccctgaagctaacgcaaggtaccagtcaaaaagataaaaattttaatctgccccgactctgtatccggaagttcttcccaaagaaaaaatgttttgtcttcgatctgcccattcaccgcaggaagcttgcccagcttgagaaactacaagatgaagagctggaccctgaatttgtgcaacaagtagcagacttctgttcctacatctttagcaattccaaaactaaaactctttcaggaggcatcaaggtcaatgggcctcgtctagagagcctagtgctgacctatatcaatgctatcagcagaggggatctgccctgcatggagaacgcagtcctggccttggcccagatagagaactcagccgcagtgcaaaaggctattgcccactatgaccagcagatgggccagaaggtgcagctgcccgcagaaaccctccaggagctgctggacctgcacagggttagtgagagggaggccactgaagtctatatgaagaactctttcaaggatgtggaccatctgtttcaaaagaaattagcggcccagctagacaaaaagcgggatgacttttgtaaacagaatcaagaagcatcatcagatcgttgctcagctttacttcaggtcattttcagtcctctagaagaagaagtgaaggcgggaatttattcgaaaccagggggctattgtctctttattcagaagctacaagacctggagaaaaagtactatgaggaaccaaggaaggggatacaggctgaagagattctgcagacatacttgaaatccaaggagtctgtgaccgatgcaattctacagacagaccagattctcacagaaaaggaaaaggagattgaagtggaatgtgtaaaagctgaatctgcacaggcttcagcaaaaatggtggaggaaatgcaaataaagtatcagcagatgatggaagagaaagagaagagttatcaagaacatgtgaaacaattgactgagaagatggagagggagagggcccagttgctggaagagcaagagaagaccctcactagtaaacttcaggaacaggcccgagtactaaaggagagatgccaaggtgaaagtacccaacttcaaaatgagatacaaaagctacagaagaccctgaaaaaaaaaaccaagagatatatgtcgcataagctaaagatctaaacaacagagcttttctgtcatcctaacccaaggcataactgaaacaattttagaatttggaacaagtgtcactatatttgataataattagatcttgcatcataacactaaaagtttacaagaacatgcagttcaatgatcaaaatcatgttttttccttaaaaagattgtaaattgtgcaacaaagatgcatttacctctgtaccaacagaggagggatcatgagttgccgccactcagaagtttattcttccagacgaccagtggatactaaggaaagtcttaggtaaaaatcttgggacatatttgggcactggtttggccaagtgtacaatgggtcccaatatcaaaaacaaccatcctagcttcctagggaagacagngtacagttc

SEQ ID NO: 58986 - DNA, 5078 bp, Homo sapiens
cgggtcgacccacgcgtccggatgaacctaaacatttaaaatgtgaaatgaaaggaggaaaaacagtacagatgggccaagagcttcaaggagaagtagttataataattacggatcagtacggaaatcagattcaagcattttcaccaagttctttatcttctttgtcaattgctggggttggacttgatagctcaaatttgaaaacaacctttcaggaaaacacacagagtataagtgtaagaggcatcaaatttattccaggtcctcctggaaataaggatctttgttttacttggcgtgagttttctgactttattcgagtgcaactaatttctggacctcctgctaaacttctccttatagactggccagaactaaaggagtccattccagtgattaatggaagagatttacagaaccctattattgttcaactttgtgatcagtgggataatccagcaccggtacaacatgttaaaataagtcttacaaaagctagcaatttaaagctcatgccttcaaaccaacagcataaaacagatgagaaaggcagggctaatttgggagtattcagtgtttttgcccctaggggagagcatactcttcaggttaaagccatctataacaaaagtatcatagaaggacctataattaagttaatgattcttccagacccagaaaaacccgttcgtctcaatgttaaatatgacaaagatgcatccttcttagcagggggtcttttcactgattttatgattagtgttatttctgaagatgacagtatcattaaaaacattaatccagcacgtatttccatgaaaatgtggaagctgtctaccagtgggaaccgacccccagcaaatgcagaaacatttagttgtaataaaataaaagataatgacaaagaagatggctgcttctatttcagggataaagtaattcctaataaagtggggacatattgtatccagtttggttttatgatggataaaacaaatattctcaacagtgaacaggttatagttgaagtcctgcctaatcaacctgtgaagttagtacctaaaattaaaccacctacaccagctgtttcaaatgttcgctcagttgccagtaggaccttggtcagagatctacatcttagtatcacggatgactacgacaaccatactggaattgatttggttggcactataatagccaccattaaaggctctaatgaggaagatactgataccccactttttattgggaaagttagaacacttgaattccccttcgtgaatggttcggctgaaatcatgagtctggtgctggcagaaagtagtcctggaagggatagtactgaatattttattgtatttgagccccggctaccacttttatcaagaaccttagaaccatatatcctaccgttcatgttttacaatgatgttaagaagcagcaacaaatggcagcacttacaaaagaaaaggaccaattatctcagtctattgttatgtataaaagtttatttgaagccagccaacagcttcttaatgaaatgaaatgtcaagttgaagaagcaagattaaaagaggcccaattgcgaaatgaactaaaaatacataatattgacattcctacaacacaacaggtgccacacattgaagcacttctgaaaagaaagctatcagaacaagaagaactgaagaaaaaacctagaagatcgtgtactcttccaaactatactaaaggcagtggagatgttttgggaaagattgcacatctagcacaaattgaagatgatagagctgcgatggttatttcttggcatctggcaagtgacatggactgtgtagtcaccctaaccactgacgctgcacgtcgtatctatgatgaaacccaaggtcgtcagcaggtgttgccccttgattctatttacaagaagactcttccagattggaaaagatctctacctcatttccgaaatggaaaattgtattttaaacccattggagatccagtctttgctcgagacttgttaacatttccagataatgtagaacattgtgaaacagtatttggtatgctgttaggagacaccattattttggataatctggatgcggccaatcattatagaaaagaggttgttaaaattacacactgtcctacactgctgaccagagatggagatcgaattcgaagtaatggaaagtttgggggccttcagaataaagctcctccaatggataaacttcggggaatggtatttggagctccagttccaaaacagtgtctgatcttaggggaacaaatagatcttcttcagcagtatcgttctgctgtgtgcaaactagacagtgtgaataaggatcttaacagtcaattagagtaccttcgcactccggatatgaggaagaaaaagcaagaacttgatgaacatgagaaaaatctcaaactaatagaggaaaaactaggtatgactcccatacgtaagtgtaatgactcattgcgtcattcaccaaaggttgagacgacagattgtccagttcctcctaaaagaatgagacgagaagctacaagacaaaataggattataaccaaaacagatgtatgagaggtgacagagagaagaggccattggtctcagtaagaatgccctgctttctgcatctctgtttcagaagaccaagagggtgacttaccagactgagtatttctggggacaatacaagtacctgggcatgaatttccatttcgattcagatgggactggaaacaaccattcaattttatgaatcttactggacattatggatttactggaattattccagacattatgccctttggttgtcactaccttgcaaatgtgtaagaggaaaatgtgctaatgtggcagtgactgtaaaactggcacatggcatttattaatcctgaagaaaagtacatgtactatttttcagtataaatataatgaacatgtcagaactatttcttgaaaacctttttattacttttgcgtgaatttatttaacaaagatgttttgtcttttgtgtaagggaggttctagaggctagatgtttaattgtaaatatgtgaggaaactcaatgcagaattcaggataaaaattttaaaagcacaggtatttgggaattgaaatgttaagatacccagaacaacattaaatcaatgagtgaacttgtgacagtggtagcatttcaaatttcaaaagacttatcctgtgtgtgtgtgtgtgtgtatatatatatatatatatataaatatatatatataaaatattcagcagcaccaagttttataactattgtttgtttgactttaattaatactagaatatgtagtctcaagccttaattttacatttacattattttgtaattttttattactatttttaaggggttaaagagaacatacattctcacattagtgtactttctggtagaaagttgctgcaaaaacatttgaaatgtatattaacctaatgtatgtcatatatatgtctttgtgtaagttcaagactattgatctgtgaagttattttgtaaggacatacatttggtaagtaagtttgtgtcccaggaaatgtatgtgtttttaaaccctttctaaatatgcaggccattaataaataagattgtttcttccctactgaatagataagtgtttttcttttttaaaattggaagcttcataaaagttatcttgttaaaaaacgatgatgatgttaacctatctttataattggaaattatttaaactgtttgttgttacagaagaaacaaaatggtaattacagaattagctgtggggaagattggctcccatggtactacaggttgagtatcccttattcaaaatggttgggacctgaagtgttttggattttggttttttgtggggtttttaaattattattttggaatatttgcattatatttaccaatttagcatccctaatccaaaaatctttcattagaaattggaaatgcttcaatgagcatttcccttatgtgtcatatctgcgctcaaatgttttgaattttggaacatttcttgtttctgacttttagattagggatactcaccccgtaccaatatttggagtccttagacattagattatatgaaaatgattgattgataggtaagaaaggttaaagagaaataactttttaggaactagacttgaacgtataattaatatgtggaactagtttgcttttataattcattgtatcaagaaggagtcatgttttaaatccaaggcattgagactatctagaagcaaaaaagttggttttaaaaattctttttattagaagtgtgtttaaaaacatgtctttttttcccttgagcgacagtggcctcactacattgcccaggctagtcttgaactcctgggttcaagcagtcttcctgccttggcctcctaagtagcagggattacaggcatgcacccacatgccaatttttattgcttaaaatggcgagttctatggatattatctagccccaagcccatatctgtacacttttgttcattttataataccagaaagaatgttctatcagtaaaagaaggttttaagtatgaatctccatttttgtggagtttttctaccctgtaaaaattaactttgtggttcccagtaattacagtaaggagtttttctatattttcacagttggatttatctaaggatatttctcagcatattaaggaatccttttctacatttgagcaaatactgaggttcatgttgtaccaaataataataaattgcttttgtgtttaatatgtaacacgtaagaacaattgaaattttcttctaagatttaatactagtcttttagtataaaggaatgtaactggagaaaaaaattaatgctacagcccatttatcctgtgttatgtgttatataatctgaaatttgtcacaatgttacaatcaggaagttttttttctggtttcttcttccaaaggaaaataatagcctacttgtatatttgaagtaactgaaataaaactctctacgagcactttttgcataaaaaaaaaaaa

SEQ ID NO: 58987 - DNA, 1805 bp, Homo sapiens
acccctccaaatctcatgttgaaatttaatcctcagtgttggaggtagggcctaatggggggtgtttgggtcatgggggcagacccctcatgaatagattaatgtcctccctggagagtgagagtgactgagttctcactctgttctttcctgagaaagctgattgttaaaaagatcctggcatctcccttctctctcttacttcctctctcaccatgtgatctctgcatacactggctccccttctccttctgccatgagtggaagcagcctgaggctctcatcagaagcagatgctggtgccatgcttcttgtacagtctgcagaaccggaaaccatctttgtatggcagcctgacttgtcaaggaattggcctagatggcatcccagaggttacagcttcagaaggatttactgtgaatgaaataaacaagaaaagcattcatatttcatgtccaaaggaaaatgcatcttctaagtttttggcaccatatactactttttccagaattcatacaaagagtataacatgcctggacatttccagcagaggaggtcttggtgtgtcttctagtactgacgggaccatgaaaatctggcaggcttccaatggagaactcaggagagtattggaaggacatgtgtttgatgtgaattgttgcaggtttttcccatcaggccttgtggtcctgagtgggggaatggatgcccagctgaagatatggtcagctgaagatgctagctgcgtggtgaccttcaaaggtcacaaaggaggtatcctggatacagccatcgttgatcgggggaggaatgtggtgtctgcttctcgagatgggacagcacgactttgggattgtgggcgctcagcctgcttgggagtccttgcagattgtggttcttctatcaatggagtggcggtgggtgctgctgacaactccataaaccttggctcccctgagcagatgcccagtgaacgggaggttggaacagaggccaaaatgctgctcttggcccgggaagataagaaacttcagtgcttgggactacagagcaggcagctggtgttcctctttattggctcagacgctttcaactgctgtacttttctctctggcttcttgctattggctgggactcaagatggaaacatttatcagctggatgtgaggagtccaagggctccggtacaagtcatccacagatcaggagcaccagttctatccctgctaagtgtcagagatggattcattgctagccaaggtgatggaagctgttttattgtccagcaagacttagactatgtcactgagctcactggggctgactgtgaccctgtgtacaaggtagccacatgggagaagcagatctacacatgctgtcgagacggtcttgtacgacgctaccagctttctgacctctgacttcttggaaagagcagtcccggttagtgaaaaggtttgaccctgatcaacaatgagcagaaacatcatcagtccttcccaaggaccatggcgtttaatgtcttgggcaccccttggaaatcacagaaagtcagctgtactggccgtgtggaactctcatcccaagacctactttgaactgagtaagaaggtcattgtgcccactgcatttgttccaacttctccttgtataaactcaccccagcaacacagggcaaggatatagatgcttttagtttgttcttaaaccagttttgttaaatgtttacaaggacctcagtactaaagcctgttctctggaggaaataaagaaaatatgtttggaggtgcctgaaaaaaaaaaaa

SEQ ID NO: 58988 - DNA, 1831 bp, Homo sapiens
  misc_feature (1)...(1831): n = a,t,c or g
ttttttttttttcgtttaaaattagaaacaacgtttattgtttattgtgtaaaatagtgagcgtcttcantgagaaaagagtatgtaaaaagggccttcctacaccctgggctttctcacgttatcccagcagacgtgggactgtcctcactgtgtaggagggaaagttctccccctgctcccagaaaattaggctactccagttttacttttgattatttgcaggcataaaaaaaaaaaaatcaaaatccaacgattaacagtctatctcctcctaggcatatatgctcaatccacttggacacagaggtgggcctcaagtccatatccacatgtacagcccaggattagatggcaccctggaaatcaaatgggtattcctggctagggactgaagaagatctcagctcctggtgatctggttgaaaatatgcacagtgcctccagtgagaacctgagattctctctttaatgaggaatactttgactgtggtaggaccagcagttaactggtaggcagcattcttgccacaggtagtatctggtctggaagctacttgttccatttccaaatccttttaagatcccttaaattgataagaatgaattcaagtttcaaaatgacacactaagttatacacggtgcaggatgtcattaaggcaacagtctcaccaagtccatgcacagggctcggatctcaccattcccctccccttgccctccaagactgcttagttctgcttactactccttctcctcaacgacagcttccagcatccagaagtgaacttgagcagccttcagcctcacaagttgggggtggcccaattaaggaacttcatggcaacttcaaagccaaggaaacaggccgcattggctgggaaggctcggatcatcactgcattgaaccctttgtacaaggatgtgactccttcatcccggatcagctccctcagcacatctctgaaaccattaggatatttcccaggaggtgcagtctggaatcgagacttgagcacatctggggggattgccacagcccagttgaagatccctgcaatgcccccagccaccaagatccgaggggcactgagctcactgaccctctttccctccggagtgaagatatttttcagccattcatatgtcatgaaatacattccactagctgggacatctcgcataagggtaagcacagtccctttgtagatgcctcggatcccaaactcctggtacagcttctttgcacagtccaaggtaccagtgtacttgctttctcctgaagaagcctgaatctgtaataagcacttgatccgttctccaggagtcatgattcctgtggtgaatacgccagataacatcccagctgcaaaaagctggggatagctgagcacatcttctgggtgtttctgttgtagtttcttccccaaaccaaacccaaagaagcacacggcaaacatgggagtgaccccgatgataggggcagccattccccgatatagccccgtgatgccctctctaaaaagagtcttccggaaacagtcaaaggtcccagagtacatgggaggttgtccaggcaaactcggtggctgtgtctgcagtcggaccttgaccgtgtccagagggtgaccgacgaacaccaggcacacgccgccaaagccgccggccagcaggttcttgagcgggctgatgggttttggctggtcggccatggtcagtccgtctgtcactccgtctgtcagttctcgggccgtcctggcttctcagccccagctgcagtgccggcgccgcggctcgtgccgangtcnntcaagcgtcaatnccccacct

SEQ ID NO: 58989 - DNA, 733 bp, Homo sapiens
ccaccaaccaaggccaaggagaccagagcccagcacctcacccagaggaccccagtcagaggccccatctcagacccgaggctagcatgggctgcaggctgctctgctgtgcggttctctgtctcctgggagcggtccccatggaaacgggagttacgcagacaccaagacacctggtcatgggaatgacaaataagaagtctttgaaatgtgaacaacatctgggtcataacgctatgtattggtacaagcaaagtgctaagaagccactggagctcatgtttgtctacagtcttgaagaacgggttgaaaacaacagtgtgccaagtcgcttctcacctgaatgccccaacagctctcacttattccttcacctacacaccctgcagccagaagactcggccctgtatctctgcgccagcagccaagacacagccttgcagagtcaccgctttcctgtgcagaaaccttaggggccctccaggaagctgtgggggccaccaaacgcttcggtgaacatttcctgcaagagccccgacagaagattcagaacatcatagcacctgctcattcatccatgtggcaacgttacatcctatgctcatatttagagtgtgggttttctttagcgtgtgactctgccctgttaactgatttgaaaaatgataaacacattcagatctagtctttttaaaatccctttttaaattgtaaaataaagcaagcatgctat

SEQ ID NO: 58990 - DNA, 827 bp, Homo sapiens
  misc_feature (1)...(827): n = a,t,c or g
cgctgggaatgatgaagaagaacaattccgccaagcggggacctcaagatggaaaccagcagcctgcaccgcccgagaaggtcggctgggtccggaaattctgcgggaaagggattttcagggagatttggaaaaaccgctatgtggtgctgaaaggggaccagctctacatctctgagaaggaggtaaaagatgagaaaaatattcaagaggtatttgacctgagtgactatgagaagtgtgaagagctccggaagtccaagagcaggagcaagaaaaatcatagcaagtttactcttgcccactccaaacagcccggtaacacggcacccaacctgatcttcctggcagtgagtccagaagagaaggaatcgtggatcaatgccctcaactctgccatcacccgagccaagaaccgtatcttggatgaggtcaccgttgaggaggacagctatcttgcccatcccactcgagacagggcaaaaatccagcactcccgccgccccccaacaaggggacacctaatggctgtggcttccacctctacctcggatgggatgctgaccttggacttgatccaagaggaagacccttcccctgaggaaccaacctctttgtgctgagagctttcgggttgacctggacaagtctgtggcccagctggcagggagccggcggagagcggactcagaccgcatccagccctccgcagaccgggcaancagtctttccgaccttgggaaaaaacagacaaaggggcactacacccccaggcaccaagaagttgacgccacagagaaaggcgctggctccctggaggagatcta

SEQ ID NO: 58991 - DNA, 1803 bp, Homo sapiens
ttaggatggagttgtttgcttgttgcacttggagctctttatgaagcaagggctctgcctcccagcctgagacccataccctggtttggacccagtagaactcttgtgggccctgggttggtgtctctgagcaaatccccaaagcaggagagtccctagcaccgtgagctctgtcagaacctcccagctggcctttcttctgccctcattgacaaccctctgaccctcttgctgagcatagacacatatgtgatgttacaggagccagtgaccttccaggatgtggctgtggacttcagccgggaggagtgggggctgctgggcccgacacagaggaccgagtaccgcgatgtgatgctggagacctttgggcacctggtctctgtggggtgggagactacactggaaaataaagagttagctccaaattctgacattcctgaggaagaaccagcccccagcctgaaagtacaagaatcctcaagggattgtgccttgtcctctacattagaagataccttgcagggtggggtccaggaagtccaagacacagtgttgaagcagatggagtctgctcaggaaaaagaccttcctcagaagaagcactttgacaaccgtgagtcccaggcaaacagtggtgctcttgacacaaaccaagtttcgctccagaaaattgacaaccctgagtcccaggcaaacagtggcgctcttgacacaaaccaagttttgctccacaaaattcctcctagaaaacgattgcgcaaacgtgactcacaagttaaaagtatgaaacataattcacgtgtaaaaattcatcagaagagctgtgaaaggcaaaaggccaaggaaggcaatggttgtaggaaaaccttcagtcggagtactaaacagattacgtttataagaattcacaaggggagccaagtttgccgatgcagtgaatgtggtaaaatattccggaacccaagatacttttctgtgcataagaaaatccataccggagagaggccctatgtgtgtcaagactgtgggaaaggatttgttcagagctcttccctcacacagcatcagagagttcattctggagagagaccatttgaatgtcaggagtgtgggaggaccttcaatgatcgctcagccatctcccagcacctgaggactcacactggcgctaagccctacaagtgtcaggactgtggaaaagccttccgccagagctcccacctcatcagacatcagaggactcacaccggggagcgcccatatgcatgcaacaaatgtggaaaggccttcacccagagctcacaccttattgggcaccagagaacccacaataggacaaagcgaaagaagaaacagcctacctcatagctctcaagccagttgaagaaaccttgccttttcagcttgaccctgcaatataacatgcacaggcctgcttgtgaatcaggactgaatgtgaaagggaagtattgagtgaggacattcccaaaaccaaaggacaactgaggagactgcccagcacataatgaataaataagaaaatgagtgaggaggttattaacatcatttggaaaaaaagatttccccattcacttgatattgtttgttcccccccttagtcccttaaaagtgggattaataaaatctgaaaatgttatataataactttaaaaagccaggtaattaataatctgcactgatattacatccacagtaccacagtatttatgtgtatgaattaaggattaaaagataatgtggataaataaactattgatctatgtctgtgtaaaaaaaaaa

SEQ ID NO: 58992 - DNA, 3529 bp, Homo sapiens
gaattttctgcaaggatcatatctaagtgcactttttgctgatacttcatttctagacattgagtctcactctaccccccaggctgaagtgcagtggtgtgatctcggttcactgcaacctccgcctccaggttcaagtgattctcgtacctcagcctcccgagtagctgggattacaggcgcctgccaccatgcctggctgatatttatatttttagtagagatggagtttcaccatgttggccaggctggtctcgaactctggacctcagatcttgtagaaaatttcagctgtagcccttggactagaagctgaaataacagaagctgtgtacgatgcattagggtattgaagaaaattaacttttgaattaaatatttggaatataaggaaataaggaaagttgactgaaaatggggcggaagaaaatacaaatcacacgcataatggatgaaaggaaccgacaggtcacttttacaaagagaaagtttggattaatgaagaaagcctatgaacttagtgtgctctgtgactgtgaaatagcactcatcattttcaacagctctaacaaactgtttcaatatgctagcactgatatggacaaagttcttctcaagtatacagaatataatgaacctcatgaaagcagaaccaactcggatattgttgaggctctgaacaagaaggaacacagagggtgcgacagcccagaccctgatacttcatatgtgctaactccacatacagaagaaaaatataaaaaaattaatgaggaatttgataatatgatgcggaatcataaaatcgcacctggtctgccacctcagaacttttcaatgtctgtcacagttccagtgaccagccccaatgctttgtcctacactaacccagggagttcactggtgtccccatctttggcagccagctcaacgttaacagattcaagcatgctctctccacctcaaaccacattacatagaaatgtgtctcctggagctcctcagagaccaccaagtactggcaatgcaggtgggatgttgagcactacagacctcacagtgccaaatggagctggaagcagtccagtggggaatggatttgtaaactcaagagcttctccaaatttgattggagctactggtgcaaatagcttaggcaaagtcatgcctacaaagtctccccctccaccaggtggtggtaatcttggaatgaacagtaggaaaccagatcttcgagttgtcatccccccttcaagcaagggcatgatgcctccactatcggaggaagaggaattggagttgaatacccaaaggatcagtagttctcaagccactcaacctcttgctaccccagtcgtgtctgtgacaaccccaagcttgcctccgcaaggacttgtgtactcagcaatgccgactgcctacaacactgattattcactgaccagcgctgacctgtcagcccttcaaggcttcaactcgccaggaatgctgtcgctgggacaggtgtcggcctggcagcagcaccacctaggacaagcagccctcagctctcttgttgctggagggcagttatctcagggttccaatttatccattaataccaaccaaaacatcagcatcaagtccgaaccgatttcacctcctcgggatcgtatgaccccatcgggcttccagcagcagcagcagcagcagcagcagcagcagccgccgccaccaccgcagccccagccacaacccccgcagccccagccccgacaggaaatgggtcgctcccctgtggacagtctgagcagctctagtagctcctatgatggcagtgatcgggaggatccacggggcgacttccattctccaattgtgcttggccgacccccaaacactgaggacagagaaagcccttctgtaaagcgaatgaggatggacgcgtgggtgacctaaggcttccaagctgatgtttgtacttttgtgttactgcagtgacctgccctacatatctaaatcggtaaataaggacatgagttaaatatatttatatgtacatacatatatatatccctttacatatatatgtatgtgggtgtgagtgtgtgtgtatgtgtgggtgtgtgttacatacacagaatcaggcacttacctgcaaactccttgtaggtctgcagatgtgtgtcccatggcagacaaagcaccctgtaggcacagaccaagtctgggcacttccttggactacttgtttcgtaaagataaccagtttttgcagagaaacgtgtacccgatatataattctcccacactagcttgcagaaacctagagggccccctacttgttttatttaactgtgcagtgactgtagttacttaagagaaaatgctttgtagaacagagcagtagaaaagcaggaaccaagaaagcaatactgtacataaaatgtcatttatattttccaacctggcatgggtgtctgttgcaaaggggtgcatgggaaagggctgttgatattaaaaacaaacaaaacaaaaaagccccacacataactgttttgcacgtgcaaaaatgtattgggtcaagaagtgatctttagctaataaagaaagagaatagaaaacacgcatgagatattcagaaaatactagcctagaaatatagagcattaacaaagtaaaattaatatattaagttataattggaatatgtcagaagtttctttttacattcatatcttaaaaattaaagaaactgattttagctcatgtatattttatatgaaagaaaacacccttatgaattgatgactatatataaaattatattcactacttttgaacacattctgctatgaattatttatataagccaaagctatatgttgtaacttttttttagagaatagctttatcttggtttaactctttagttttattttaagaggggaaaacaaaaatatcttgcaagcagaaccttggaaaaaaaaagccatgaacacttattctaaatgtaaattaaaagttgagccaaactctttgtgtatatagcatcttaaatatattatcacctttgatgtaagtacctatgtattgtatggtcaccagattaaaaagtatatttttgtggattgccgccaatctggggggaaaaggcgaggtcctttattaagtattcactgtttaatatttactattttgttaaatatactgtactttggattttaattattagcccagttttttcagaggattgtataaaggggtttctcccctcactggtggtgaatgtgtgatgttacattgtaatctttgtgctgtatgggttgagcatcattatatattttgtatgtgtacataaatagcaaagtggcaaaaaaaattgggggttaagtccaacccgaataagaataaaatgtgttgtaacagattttataaggcattatttaacacttgccttttgtgaggaaaactgtagtagaacagctgacctaatttaattaatatcggaacatggcaaatagtagatgagcacaaggtttctaagggg

SEQ ID NO: 58993 - DNA, 2856 bp, Homo sapiens
ttttttttttttcatgctaaatttttatttcaatgttatgcaactacattagtatttacatttatttaacgtatgcagtttacacactcattattaaacaaaattggaatgcaaacaaatatacaaataccataagcattatcaaataaaataactggcactagtgttataagcatattaatggacctggtagggaaaagtgatggaagaagactgcagcccatggcatttttctttttaccaaaagaaaacgctcagtagcaccataatggtaatacttaaaagaaatacataagatagaacattttaactgctatcattgaggttaacctgcttttatttaagtgaattatacaggaaattaacagtacaggcagtattttggccaacttctgcttatgtcagctgaacattgtccataaacaaaagcaaaagaaaataatgctaatcatacatggaccttttgtacttggtacaagttctgcaccgtgctttgatttcatggttggagaagatatgcatgtgttaaaaactgaggttatgtaaagttattcactaaagcctgagtgtgtctttggtaggctaatactttttcagcattattaatcacattcatgtttatctatttcctgtatttttatatataatccaaggtgaccagagaagacatggaaaacaacacagcaaaatcctcaaataactaggccattaaaacccagtcgatcccaaaggcaccaagaatcaatggggtacaaacttccccttagagaaaggtggattttttgtaatacttataacctaatgggactttattttgtagttttatgtatcttatttgttgctgtcatatgcttaattacttacctttacattttttcctctaagatggcatcaacaataaacaagatagagtaccaggtatttctatttcaaagttgtgcaaaaactgccacaatcttgctcaaagtgtctaagtatccaaatggtagcaaatgagctgcattaagctttatataaccacattgcatatgaagaaaaaaaatgaaatttatgccgatataaatagaaatgttacagagtatcatatactgagagtaacctatgcagttcttttaaacttatctctttagtggtttcaataaaatatcactaaccacttatccctaaagcctcaagttttcttcatttgaatgctgtagaattgcattagtattttatattgattatataaattaagaccaatttctatctaagaatgtgcttcaagcaatgttttgtggcaaacacacaaaacatgctttgctcttcaaatttattatccttaaaataatgcacttttaaagccttcacttcatagtttggtaactaagatccacatgacacacaatgccttgctgaacacagaaaatgtatctgcattatgataatgaaacccggcttttgctggtaacctgaaacttaagtagtcacatgtagttcaaccagctccaaacacggttgtacagtggtaattattctgcagcatttatgggcctaaatttcagtctgaattgcaacttttaattccattgtctgatgtgagtggttgttatttgtttcttttagtgcatcgccaaaatataaatcaacattaggttttattccattgttaccatgttcttcagcaatatgattcaactgtgaaacttctgaacaggaagcagtttgggtaaccacagaaatgctacactgatgtggggaattttccagacggtcattttctacctcaggaagaatgttaacagtagcaaagcgggtgtgataatcactggaaccatgactacaagaagttttcatgctttctaggtcagaacaactaaattcagaaaaatgactagagtgagaatctgctacagaaggcatactgtcactgagggatggagcctcaaattcacttgagttcgtgctttgttgttctaacaactgtgcatccatgtcctctctcgtctcatttatcttcatgttaccctttttcctcagtttaccactttttgattttttccctgctgttgcttctttggaccacttggtggcactagatttaccttcaggcaagccactggatgaaccgccagcatgacttcgggtggcactgccatcatccacactactgcttccactgttgtgcctgaatttggatggctttgactcaatatctacttgcacctccatactgttgccttctttgtccaatgggatgtaggaattcagaatggatcctgccattgctttggtgctggcattatcactaactgttcccaagctgactgtgccagattctccacttagactgtaccgttctttctgtacatctgcttgtacttccaacctgttaaaacagtttaccatggcacttcctgacagactccccgttatactggctccagctagtgccatggtgctggccgtttcactcaggttgtctcggatggctcctattcgatccatgtggcttccacttgcactcaaactgccagtcagcccaccaacacttccctcccctatgcttgggttgtgtcttgcttctgctactgatgttgtgtctacagctgtgttagttccaccaacatttatatcattttcatcatcaaattcaatcctaactccttttccattgcctgctgagactccacaacctccgcttcgacaaagagaaattggaactacgccatagacataagctaacataataggaacaccgatacctacagtcactgcagctactactggagacacgattacagacaacgttacaccacctgctatggccaaattccgtttgtgctttgaaacatccttgccttcatagcgattgtg

SEQ ID NO: 58994 - DNA, 2884 bp, Homo sapiens
gcacgatcttggctcactgcaatcactgcctcgcaggttcaagtgattctcctgcctcagcctcccgagtagctgggattacagacgtgtgccaccatgctcagctaatttttgtattttcagtagacacagggtttcaccatgttggccaggctgatctcgaactcctgacatcaggggatccacccacctcagcctcccaaagtggtgggattacaggcgtgagccactgcgcctggcctgccccacctaccttaagttcaaggagaagccatctccccaggacccagccccaggcctgcaccacagatgctcaaagacttggaggaactgatgaattcattttaatcacagaaatttgcctgggcttgagcaaactgtggggactcaatagatttggaggcctcctctcccttctgagaggcctgcctgcttcctgccctgatgaatccctaatttcagtacaaactgaggaacttgaaaaacatctgtgcactgggaccgcccctcacaggagggctgaaagcagcacagctgagtcagcggcacattcagcaggcgttcagtggggaagcaggagacagaggcggcgctcacaggacccgctccaggcttgtcacagccacacatcacagcactttgggttttgccacaacagagcagctctgagctcaatccttgcacctcagaagtgcatttatgattaaaatcatgctcgacatgaagccctgttatgatgtgcagtttaaaaagagaaacgggtccaaatcagcaccaacagagccccccagggggctccaagactcgccccagagacagcagaaggaccccatgtgcgcgctgatctgtaagaagggtggtggatgcagcagcagggggctgcgtccaaaggcagcaggtgggggcctctcatagtgtgaccctgggcaggccactcccctaccccggtaccctcacctgaaaaatgggacagcaacacaatgagacaacagagactgtctagaatataaagaaaagaatgaaaaggtccatcccaagggcagcctggtggggacggggacaggcagtggggggaggctgcctctggaagacctgtcccagcagaatcagcccccacctctgccctgccttccaacctttgaaccaccaggcagtagacacattcccctgggaaacagaatttgcaaggcaggtggaaagagcagcactcacactggctgtgactgctgaaaaatgctcattggcccttctcgaggactgaaaggagattcggaatcacatttaaaattaacccgtgacccacttcctgtaaaactgaagatcaccctctaacagccctaacaaacaggctctggccgtctcctgaccctaacccggtggagcagctgactggacgcagtgacgccaccactgaggttctgcagggtggaggcggccaggctggctcactgcatgaggtggacggtagctgccttgcggatgagccgctcggtcaggggcgagttgggcttcaaggcatcacgctccatcagaaggctccgggctacgttcttatggacgctggaggtgcagtttaaggccgcgtgaatcagcagctggttgaagacgtctctctgggcattgctcccaccgagctggacgatccggtagcggatgggcaggagcagctccaggacgcggtcagggttcccgtcctcagcctccaccagggcctggcacaggggcagccccacgtctcgggccaggaggtgctggcagttctcccctggggattcgctggcgtcccgcagggtggtcagcagctcctgtgtggtctgggggtcgtgtgcacccagggatgccatcaggaagtgtgcgtcattgaacagcaggatgtggtctcggctgtgcttccgggccacaggcaggacatcctgccaccgctggcccacagacactccttccatctgcaggcggtagagcatggagcagctgtccaccacgtccagcattgcatcgttggcctgcaggctgggaaggatgtgggtatcgtagatggtcagcgcggcctcatattcgcccttctcaatcagatataaagcccagtgccaatagttatgacaagccaacatatcagagtccttccagagggtctctgagtgctgcatgaattccaacccatccttgatctctgctttcatctcgtggatgtgagcgacggtgtgcaccgaccatgcgtctgtcgggttaatagataaagcctctttggcgagtttttctgcctggtcgtagaagttggtttccatcaagccaaaagagtagatgcctttcacatagctgcttagggggatgtcaggtgtccagaaggggtaaattcgagcaacagaatctctcatctgttcctgatagcccaggtaaaaataagcatcatgggaaaatttcagggccaacatgtctgtcgggtggtcctggagaatctgttcccatagttcacaggctttcggaaagttcccattggcaaatgtctctactgcagacacgtgcagctgctcccgccttgtcagcggctgggttcttgaaatctccaccattgtcttcacagccaggtccagctctttgtccagcttcacggagcttccagtgccaatcagcacaaggccagtagccatggcgtggcccatcacaaaggttggatctgctgctttgagctttgacaggcagccctcgatgccaccgagactcttgtcattggtccattttacatactgggtcagcgtggcatcgaacagcttgcaggcttcgttgcttgtggtggagagcgggagcctcgcatccttccaggcatggcagtcgcgcagaggcgaggctgcggccatgttgcgccgggtcggagcggacgcgtggg

SEQ ID NO: 58995 - DNA, 1922 bp, Homo sapiens
cgtcacagcccgacgcgccacccagctgtttttgtgctcccagctctagcgaaaagccgccggtatttctccatctggctctcctctacctccaggcaggctcacccgagatccccgccccgaaccccccctgcacactcggcccagcgctgttgcccccggagcggacgtttctgcagctattctgagcacaccttgacgtcggctgagggagcgggacagggtcagcggcgaaggaggcaggccccgcgcggggatctcggaagccctgcggtgcatcatgaagttccagtacaaggaggaccatccctttgagtatcggaaaaaggaaggagaaaagatccggaagaaatatccggacagggtccccgtgattgtagagaaggctccaaaagccagggtgcctgatctggacaagaggaagtacctagtgccctctgaccttactgttggccagttctacttcttaatccggaagagaatccacctgagacctgaggacgccttattcttctttgtcaacaacaccatccctcccaccagtgctaccatgggccaactgtatgaggacaatcatgaggaagactattttctgtatgtggcctacagtgatgagagtgtctatgggaaatgagtggttggaagcccagcagatgggagcacctggacttgggggtaggggaggggtgtgtgtgcgcgacatggggaaagagggtggctcccaccgcaaggagacagaaggtgaagacatctagaaacattacaccacacacaccgtcatcacattttcacatgctcaattgatattttttgctgcttcctcggcccagggagaaagcatgtcaggacagagctgttggattggctttgatagaggaatggggatgatgtaagtttacagtattcctggggtttaattgttgtgcagtttcatagatgggtcaggaggtggacaagttggggccagagatgatggcagtccagcagcaactccctgtgctcccttctctttgggcagagattctatttttgacatttgcacaagacaggtagggaaaggggacttgtggtagtggaccatacctggggaccaaaagagacccactgtaattgatgcattgtggcccctgatcttccctgtctcacacttcttttctcccatcccggttgcaatctcactcagacatcacagtaccaccccaggggtggcagtagacaacaacccagaaatttagacagggatctcttacctttggaaaataggggttaggcatgaaggtggttgtgattaagaagatggttttgttattaaatagcattaaactggaattgacaagagtgttgagcatccctgtctaacctgctctttctctttggtgccccttatctcaccccttccttggaatttaataagtctcaggcatttccaattgtagactaaaaccactcttagcatctcctctagtattttccatgtatcaggaaagaggtgtcttatgtagggagggggcaagtatgaagtaaggtaattatatactactctcattcaggattcttgctcccatgctgctgtcccttcaggctcacatgcacaggaatgctacatgatggccagctgcttccctccttggttatcatccactgcagctgctagttagaaaggtttggagggatgacttttagtaaatcatggggattttattgatttattttcacttttgggattttgtggggtgggagtggggagcaggaattgcactcagacatgacatttcaattcatctctgctaatgaaaagggttctttctcttgggggaaatgtgtgtgtcagttctgtcagctgcaagttcttgtataatgaagtcaatgccatcaggccaaggaaataaaataattgcttaccttaaaaatcaaaaaaaaaa

SEQ ID NO: 58996 - DNA, 2079 bp, Homo sapiens
tttcgtcctacccccgtccctagtcccgtcagcatggtttggatcccctgtgccgtcgcctctttctttggcgacgcctccgccgccgcctggggaggcgagctatccgggagttacaccgccaccgccaggatggatagaatgacagaagatgctcttcgcttgaatctgttgaagcggagcttggacccagcagatgagcgagatgatgtcctggcaaagcgactcaaaatggaggggcatgaggccatggaacgtctgaaaatgttggcattgctcaaaaggaaggatttggcaaatcttgaggtgccacatgagttacccaccaaacaggatggcagtggtgtcaagggctatgaagaaaaacttaacgggaatctcaggcctcatggagacaacaggactgctggaaggccaggcaaagaaaacatcaatgatgagcctgtggatatgagtgctagacggagtgagccagagcgaggaaggctaactccctcaccagacatcattgttttgtctgacaatgaggcttccagtccccgttccagttccagaatggaagaaagactcaaagcagccaacttagagatgtttaaggggaaaggcattgaggagcggcagcagcttatcaagcagctgagggatgagctacgattggaagaagcccgactggtcctgttaaagaaactgagacagagtcagctacagaaagagaatgtggtccagaagactccagttgtacagaatgcagcatctattgttcagccatctcctgcccatgtgggacagcagggcctatctaagcttccctctcggcctggggcccaaggggttgaacctcaaaatttgagaacattacagggtcacagtgtcatccgttcagctaccaataccacccttccacacatgttgatgtctcaacgtgttattgcaccaaacccagcccagctacagggtcagcggggcccgcctaagcctggccttgtacgcaccacaacacccaacatgaatcccgccatcaattatcaaccgcagtcaagttcttctgttccatgtcagcgtacaacatcctctgccatctatatgaaccttgcttctcatatccagccagggacggtgaacagagtgtcctcgccacttcctagccccagcgccatgactgatgctgccaactcacaggctgcagccaaattggctcttcgcaaacagctggaaaagacactcctggagatcccaccccctaaacctcctgctcccttacttcatttcttgcctagtgcagccaatagcgagttcatctacatggtaggcttggaagaagtcgtacagagtgtcattgacagccaaggcaaaagctgtgcctcacttctgcgggttgaaccctttgtatgtgcccagtgccgcacagatttcacccctcactggaagcaagaaaagaatggtaagattctatgtgagcagtgtatgacctccaaccagaaaaaggctctaaaagctgaacacaccaaccggctgaaaaatgcatttgtgaaagccctacagcaggaacaggtaagaattctgactgctcactggccacctgtcccagtttgttttttccaaagggtcgcgccttctagtttgcaggagtggttcatgtgatccctacaggtccacaggttccctttttgtctccttatcattgtgtcctatttccatttgagcgagtattctgattaagaacatggtaaaatataatggctgaggttaacagaaagggacagaaagcttgggactcttggcttttccatagcactctattctcatcttcattttttcctaaaacaaataatagattttggtgggaggaatttatatttgtgctataaatctctttgaaacagttatttgcagtgcgtgtttgataagaaatgacgaaagaaagagtgaattatgaagtagcccagtgaagagtagtggttctagagtatgtgaacatctcatgtagcagttataggatgagaatatcttagagaaggaaaaatgtgttgggaaactcagatccttttcttcctatttcccactccacccatcagagtc

SEQ ID NO: 58997 - DNA, 3600 bp, Homo sapiens
cgctccttttctccccttctagagtgttacggtgactcttgggtccgaaggggacggacgtcctcccacgtaccatttagaagaaatggagcaagagccacaaaatggagaacctgctgaaattaagatcatcagagaagcatataagaaggcctttttatttgttaacaaaggtctgaatacagatgaattaggtcagaaggaagaagcaaagaactactataagcaaggaataggacacctgctcagagggatcagcatttcatcaaaagagtctgaacacacaggtcctgggtgggaatctgctagacagatgcaacagaaaatgaaagaaactctacagaatgtacgcaccaggctggaaattctagagaagggtcttgccacttctctgcagaatgatcttcaggaggtgcccaagttatatccagaatttccacctaaagacatgtgtgaaaaattaccagagcctcagtcttttagttcagctcctcagcatgctgaagtaaatggaaacacctcaactccaagtgcaggggcagttgctgcacctgcttctctgtctttaccatcacaaagttgtccagcagaagctcctcctgcttatactcctcaagctgctgaaggtcactacactgtatcctatggaacagattctggggagttttcatcagttggagaggagttttataggaatcattctcagccaccgcctcttgagaccttagggctggatgcagatgaattgattttgataccaaatggagtacagattttttttgtaaatcctgcaggggaggttagtgcaccttcgtatcctgggtaccttcgaattgtgaggtttttggataattctctcgatacggttctaaaccgtcctcccgggtttcttcaggtttgtgactggttatatcctctagttcctgatagatctccggttctgaaatgtactgcgggagcctacatgtttcctgatacaatgctacaagcagcaggatgctttgtgggggtcgtcctgtcctctgagttaccagaggatgatagagagctctttgaggatctgttaaggcaaatgtctgaccttcggctccaggccaactggaacagagcagaagaagaaaatgaattccaaatccctggaagaactagaccctcctctgaccaactaaaagaagcctctggcactgatgtgaaacagttggaccaaggcaataaggatgtacgtcataaaggaaaacgtggaaaaagggctaaagatacttcaagtgaagaagttaacctgagtcacattgtaccatgtgagccagttccagaagaaaagccaaaagaattacctgaatggagtgaaaaagtggctcacaacattttgtcaggtgcttcctgggtgagttggggtttagtcaaaggtgctgagattactggtaaggcaatccagaaaggtgcttctaaactccgagagcggattcaaccagaagaaaaacccgtggaagttagtccagctgtcaccaagggactttatatagcgaagcaagctacaggaggagcagcaaaagtcagtcagttcctggttgatggagtttgcactgtagcaaattgcgttggaaaagaactagctccacatgtcaagaagcatggaagcaaacttgttccagaatctcttaaaaaagacaaagatgggaaatctcctctggatggtgctatggttgtagcagcaagtagtgttcaaggattttcaactgtctggcaaggattggaatgtgcagctaaatgcatcgttaacaatgtttcagcagaaactgtacaaactgtcagatacaaatacggatataatgcaggagaagctacccaccatgcggtggattctgcggtcaatgttggcgtaactgcctacaatattaacaacattggtatcaaagcaatggtgaagaaaactgcaacacaaacaggacacactctccttgaggactatcagatagttgataattctcagagggaaaatcaagaaggagcagcaaatgtcaacgtgagaggggagaaggatgagcagacgaaggaagtaaaggaggcaaagaagaaagataaatgatgaagtgctgggaatcacttataccaaagccttatgaaatggatgaaattttgttaaataggcaaatgtggaattcctcacagattaaccagtattttttaaatgtattcattcctacaaattaactttcataaattttatggcatgtcttctatttaaaaggaaaagaataagtattcttgcatctggccttagaaatgtgaagttatattctcaagtttatttttttccaagtgtagctaaaatatttttgcaggtaaaataaagctgatagtacatgtgttgttcaaaccttgttaaacctaatattgaactatttttatatctgctgtctttcagaaggcaaataggaaactatatatttgcttaaaaattggcatttagtaaccttaattctttttatagaaggaatgacttaaagtattgtcccctctttttgcactaattgtggatttttttagatgcttctcaaaattttcagtgtgtaagctaaacaaaaactaaaactaagaattctcaaaaaaacttgttcaaaacagggaaagactgatgaaaagtaaaatggactacttttgtaacttacctgtttgttaggaaatggaatggtctctttgatttaaaatgaataaaaatagattattacgtcttttgtattgagactgtattgttatgagcctaggaaatttgggaacatgattgtattgtattaaaattcgaagtgattattatcagcttaattggattaaaaaagtacttcaagaaattattttatcatatctgcttctgtttttccaaaaggttaaaacttgtaaaaaaaatatatataaacaattgagtttactaatggtaaacatttttattctgggattcggtcattggaatttatattaaaagacaagttattaaaaaggaaaggttctattcataatcagggtaaagaatatgaaaaccttagacgtaatcccatggtggataggccattatggtttccactttggccagaaggcagactattcacagccctatttacttacataggctaaaaaactatgtaaccctaaatacctaatggtatttaatttttgtttattgaatttaaggaggttgggtattagttttccataggctgtagtcccattcctaataatttctgatcttctagtggctacttaattagacattatttgaagctgtctgaagaatgcactttatgaattaaaaaactgaattgcctgacctcgttatcacatgagcttatattttgggaacacatagaactgatggaggcttttcctaaggccaaggataatgtactagttgttaaaatggaaataaaagtgaagtggtaaatagcttacagacagtctatgctttgtttaagaaatggaatggcacttcatattattctcatttgtgggagctaaaaattacaaataatcaaacttaaggagatagagagtagaatgatggttaccagaggctgggaggcattgaagggatggggagggaagtgg

SEQ ID NO: 58998 - DNA, 771 bp, Homo sapiens
ggcgtttctctcttcccactcgggtttgacctacagccgcccgggagaagatggctgccccagcagtgtccgggctctcccggcaggtgcgatgcttcagtacctctgtggtcagaccatttgccaagcttgtgaggcctcctgttcaggtatacggtattgaaggtcgctatgccacagctctttattctgctgcatcaaaacagaataagctggagcaagtagaaaaggagttgttgagagtagcacaaatcctgaaggaacccaaagtggctgcttctgttttgaatccctatgtgaagcgttccattaaagtgaaaagcctaaatgacatcacagcaaaagagaggttctctcccctcactaccaacctgatcaatttgcttgctgaaaatggtcgattaagcaatacccaaggagtcgtttctgccttttctaccatgatgagtgtccatcgcggagaggtaccttgcacagtgacctctgcatctcctttagaagaagccacactctctgaattaaaaactgtcctcaagagcttcctaagtcaaggccaagtattgaaattggaggctaagactgatccgtcaatcttgggtggaatgattgtgcgcattggcgagaaatatgttgacatgtctgtcaagaccaagattcagaagctgggcagggctatgcgggagattgtctaaaagtgttggttttctgccatcagtgaaaattcttaaacttggagcaacaataaaaagcttccagaacagaaaaaaaaaa

SEQ ID NO: 58999 - DNA, 1491 bp, Homo sapiens
aaagtaccaactatactttatggttggtggaacatttatgcctttttgataaatgataaaaagatcttactcccaactactgcatattaaaaaaagaagttaatgacaagacgattccgtgggaggttgaggcaggagggttgcttgagcccaggagtttgatttggcaagacctggtctctgatttttttaaaaggatgattccaaattaagtctaagaatggaagtgaatgccaagcacagaccctttcacctccacatagagaataaacgtgggacaagctgacaaggatttttagctaacagcagccactgttgctttgatagacgcatacaagccctttctaacattagcaagtcataaaaatccaaaaagtaaaaatctcagttgagaacttcaaacaatacttctgttttacaagaatttaataacaaagattaaacaatcaaaatgaaccatgggactcaaaaacatcctaagttgcaaaatcaatacataatggaaaatctgacgacatttaaaactgtaagattaattcttttcattgagttcttctacttgcatttgcaaacagagagaatgacgcgcctgtttcagggattctttagccttagcaaggtcttcttttaacttgttgtattgctgcacatcaaagtgctgttgctttgatttcttgtggaagaactgaagaaattgcctactcttaacagctgagtaagtataatcctgtcgagtgactataaagtatgcaaaaaagaccatagaatttgcaaatgtgatgaagtatgtaactggctccatgatatcccaggagtacacccaccacgtgagccaggccagtgccccaccctgaatggacagcagtgccaatccagcccacaggagtccactggttttggcttccgaatgagcttctattccagctttcacctgttcaaggggctgcagctgttccttcaggtggtcaattttctccagtaaatggtgctctctctttttctgagactcttctaaatgcaagattgtaaatagtctgtgaaccaaagatttcatgtgttccatctcagcagtgtgctcattacttggtttttctctctttggacactgcacatcatatgctattttattaatgacaagtttaaaatcattcattagcaaaatatccatcaaggtagaagctgaaatcatgttgccatctgctgtgaagatggctgcagttttgatacccttatcttcattttgtaggtcctgaaggaatgaaccaactgttgacaacattggtttgactacgaattgacaacgttcttttctagatggcaaggtaagtgttaccaagggaaggccatgtctataaataactgttatttcatcaggtggcaccacggtactataatggtgtgactggtagtatttcacatttccacacagcttcacacgcaaaacctggggcggaggcggcagcggccacgggcgcgctgggcgccaggtgc

SEQ ID NO: 59000 - DNA, 1926 bp, Homo sapiens
cccacgcgtccgcccacgcgtccggggtccggtaacaacatggcggcgtccgtgaggggctcctttgggcaggggtagtgtttggtgtccctgtcttgcgtgatattgacaaactgaagctttcctgcaccactggacttaaggaagagtgtactcgtaggcggacagctttagtggccggccggccgctctcatcccccataaggagcagagtcctttgtactgaccaagatgagcaacatctacatccaggagcctcccacgaatgggaaggttttattgaaaactacagctggagatattgacatagagttgtggtccaaagaagctcctaaagcttgcagaaattttatccaactttgtttggaagcttattatgacaataccatttttcatagagttgtgcctggtttcatagtccaaggcggagatcctactggcacagggagtggtggagagtctatctatggagcgccattcaaagatgaatttcattcacggttgcgttttaatcggagaggactggttgccatggcaaatgctggttctcatgataatggcagccagtttttcttcacactgggtcgagcagatgaacttaacaataagcataccatctttggaaaggttacaggggatacagtatataacatgttgcgactgtcagaagtagacattgatgatgacgaaagaccacataatccacacaaaataaaaagctgtgaggttttgtttaatccttttgatgacatcattccaagggaaattaaaaggctgaaaaaagagaaaccagaggaggaagtaaagaaattgaaacccaaaggcacaaaaaattttagtttactttcatttggagaggaagctgaggaagaagaggaggaagtaaatcgagttagtcagagcatgaagggcaaaagcaaaagtagtcatgacttgcttaaggatgatccacatctcagttctgttccagttgtagaaagtgaaaaaggtgatgcaccagatttagttgatgatggagaagatgaaagtgcagagcatgatgaatatattgatggtgatgaaaagaacctgatgagagaaagaattgccaaaaaattaaaaaaggacacaagtgcgaatgttaaatcagctggagaaggagaagtggagaagaaatcagtcagccgcagtgaagagctcagaaaagaagcaagacaattaaaacgggaactcttagcagcaaaacaaaaaaaagtagaaaatgcagcaaaacaagcagaaaaaagaagtgaagaggaagaagcccctccagatggtgctgttgccgaatacagaagagaaaagcaaaagtatgaagctctgaggaagcaacagtcaaagaagggaacttcccgggaagatcagacccttgcactgctgaaccagtttaaatctaaactcactcaagcaattgctgaaacgcctgaaaatgacattcctgaaacagaagtagaagatgatgaaggatggatgtcacatgtacttcagtttgaggataaaagcagaaaagtgaaagatgcaagcatgcaagactcagatacatttgaaatctatgatcctcggaatccagtgaataaaagaaggagggaagaaagcaaaaagctgatgagagagaaaaaagaaagaagataaaatgagaataatgataaccagaacttgctggaaatgtgcctacaatggccttgtaacagccattgttcccaacagcatcacttaggggtgtgaaaagaagtatttttgaacctgttgtctggttttgaaaaacaattatcttgttttgcaaattgtggaatgatgtaagcaaatgcttttggttactggtacatgtgttttttcctagctgaccttttatattgctaaatctgaaataaaataactttccttccacattacatgttaaaaaaaaaa

SEQ ID NO: 59001 - DNA, 4070 bp, Homo sapiens
atacgcgaagcctggacggagtgggtgggagaacgacacgaatggatagataatcatgtacctacaagcactctagtccaaaactcatgctgctcgtatgtagttaatggagacaacacaccttcatctccgtctcaggttgctgccagacccaaaaatacaccagctccaaaaccactcgcatctgagcctgccgatgacactgttaatggagaatcatcctcatttgcaccaactgataatgcgtctgtcacgggtactccagtagtgtctgaagaaaatgccttgtctccaaattgcactagtactactgttgaagatcctccagttcaagaaatactgacttcctcagaaaacaatgaatgtattccttctaccagtgcagaattggaatctgaagctagaagtatattagagcctgacacctctaattctagaagtagttctgcttttgaagcagccaaatcaagacagccagatgggtgtatggatcctgtacggcagcagtctgggaatgccaacacagaaaccttgccatcagggtgggaacaaagaaaagatcctcatggtagaacctattatgtggatcataatactcgaactaccacatgggagagaccacaacctttacctccaggttgggaaagaagagttgatgatcgtagaagagtttattatgtggatcataacaccagaacaacaacgtggcagcggcctaccatggaatctgtccgaaattttgaacagtggcaatctcagcggaaccaattgcagggagctatgcaacagtttaaccaacgatacctctattcggcttcaatgttagctgcagaaaatgacccttatggacctttgccaccaggctgggaaaaaagagtggattcaacagacagggtttactttgtgaatcataacacaaaaacaacccagtgggaagatccaagaactcaaggcttacagaatgaagaacccctgccagaaggctgggaaattagatatactcgtgaaggtgtaaggtactttgttgatcataacacaagaacaacaacattcaaagatcctcgcaatgggaagtcatctgtaactaaaggtggtccacaaattgcttatgaacgcggctttaggtggaagcttgctcacttccgttatttgtgccagtctaatgcactacctagtcatgtaaagatcaatgtgtcccggcagacattgtttgaagattccttccaacagattatggcattaaaaccctatgacttgaggaggcgcttatatgtaatatttagaggagaagaaggacttgattatggtggcctagcgagagaatggtttttcttgctttcacatgaagttttgaacccaatgtattgcttatttgagtatgcgggcaagaacaactattgtctgcagataaatccagcatcaaccattaatccagaccatctttcatacttctgtttcattggtcgttttattgccatggcactatttcatggaaagtttatcgatactggtttctctttaccattctacaagcgtatgttaagtaaaaaacttactattaaggatttggaatctattgatactgaattttataactcccttatctggataagagataacaacattgaagaatgtggcttagaaatgtacttttctgttgacatggagattttgggaaaagttacttcacatgacctgaagttgggaggttccaatattctggtgactgaggagaacaaagatgaatatattggtttaatgacagaatggcgtttttctcgaggagtacaagaacagaccaaagctttccttgatggttttaatgaagttgttcctcttcagtggctacagtacttcgatgaaaaagaattagaggttatgttgtgtggcatgcaggaggttgacttggcagattggcagagaaatactgtttatcgacattatacaagaaacagcaagcaaatcatttggttttggcagtttgtgaaagagacagacaatgaagtaagaatgcgactattgcagttcgtcactggaacctgccgtttacctctaggaggatttgctgagctcatgggaagtaatgggcctcaaaagttttgcattgaaaaagttggcaaagacacttggttaccaagaagccatacatgttttaatcgcttggatctaccaccatataagagttatgaacaactaaaggaaaaacttctttttgcaatagaagagacagagggatttggacaagaatgaatgtggcttcttattttggaggagctcttgcatttaaataccccagccaagaaaaattgcacagatagtgtatataagctgttcattctgtacagtgaattttccgaacctctcaaagtatgttttccgttcttccacagaaatatgcaaaacagttcatccttttctactttatttattgttcccttgaaatgactgaccaggaaaaagatcatccttaaattttgaagcaagtgagagactttattaaaaatacatatatatctatataaacatatatgatagtggctctagttttatagagctccaagtgtattaaacatgacagccattcattcataaagatctggatttgctttaccttgttaatattatctaggggaaaaagtgcaaattgctccatgttcttctctcccttatgtaacatctcctgagggtgtttagttgcatggctgttcagaaaggtattaagggcttaggccaaatcttactttgagtatgttaaaaaaaaaaaaatgctgctgggcttttctgaaaacaggtgcttgaacttgtcagtttgttttaaataaatacaatagtggaaaatttttctctgttacatcagtaatattgttaaagtaatggatagaaccataacttacccatgaaagtcatatactaaatccaatactatttagtttattatcgaaattggaaggattcattgagcagcatagaagtttgtttacatgttactttgagatgctaggtatttgtggaattaaaaagaatcaagcttcttttgtactttgtttttaaatctgtgatgcttttcaaatttaattcataataaattgatgcaatttcatacttaggaacatacaaaaggtaatgtaaactctgccacttttttgtgttcaaaattttggtttttatggaagcccggatggattgaagagttacataagcatttgaatgctctaatataaggctaatgattttctgttagtgtttgaatatcttcattcctctcaaattcataacagttctatttaactgaattaaataaccatatgaaaaatcttttgggtctccccctttttacacgagataattatttttgtcataacactttttaattgtttttcatcataggggcctttgctgaactacaaaaatgtgtaacaaattaaaatctgatgtgaatgatattaatgctacttttagcaaactgggcttcctaatacaaaattttaaatttccatttgtatcatgcttttaatatgcactgtaaatttcattaacttaaacattttttaatagccatggaactgacttcttaaaatctgttgcctataaatatttcactgctaagtacatacagaaaaacagtaattattgttttgccaaaattttatttttctacatattgagagtgtgttctccattttattcagaattcatagtaaagacgaaagaaaggcagagatctgcttggttgaatagactccttttccaaatccttattatgaacactctggtaattttcaagcctaaagaattaaaaaaaaaattctaatgtatgtgacaggttatgtgatagagggaaactggccttcaaaaacggactgcgtataccataaaagagttaagtattagaattacaaatggtaccactgctgtataaattttgccatgacagaagttattgaatatcattcattgtaggtatgatttagcagatttgactgaagaagggcagctttccagttcgttttcagggtgctggtcttcctcaagtaagaaattacgatgcactaggtgaggctacacagaac

SEQ ID NO: 59002 - DNA, 1090 bp, Homo sapiens
cgagggagcaggcgcggccgcggcgccatattgcggccctcagcggccgcgaccgagtcatggctgagacctacgacttcctcttcaaattcctggtgattggcagtgcaggaactggcaaatcatgtctccttcatcagttcattgagaataagttcaaacaggactccaatcacacaatcggcgtggagtttggatcccgggtggtcaacgtgggtgggaagactgtgaagctacagatttgggacacggctggccaggagcggtttcggtcagtgacgcggagttattaccgaggggcggctggagccctgctggtgtacgacatcaccagccgggagacatacaactcactggctgcctggctgacggatgcccgcaccctggccagccccaacatcgtggtcatcctctgtggcaacaagaaggacctggaccctgagcgggaggtcactttcctggaggcctcccgctttgcccaggagaatgagctgatgttcctggagaccagcgctctcacaggcgagaacgtggaggaggcgttcctcaagtgtgcccgcactatcctcaacaagattgactcaggcgagctagacccggagaggatgggctctggcattcagtacggggatgcgtccctccgccagcttcggcagcctcggagtgcccaggccgtggcccctcagccgtgtggctgctgagctctgtggagccagctcacctgttctccaggaccagccctgctggggcccaggcccaggctctgagaggccgtgtcctaacctgccctggccccggagaagctacgttgccacctgtcccccttccctggcctggtggggcctggctttggggcaagactgagccacgggggaagggggaatcccgtacctgctgctgcttcctctgtcttggctaacgtctgtccccctgaacccctaaccataccccaagagctcccaaagcctgagaccagggtcatttgtccccaactccccatctggccctgctgttgctagtacctgttatttattacctggaggcctgtccagcaccccccctacccccataaagcattgtttacaaaaaa

SEQ ID NO: 59003 - DNA, 1969 bp, Homo sapiens
  misc_feature (1)...(1969): n = a,t,c or g
cattttttaaaaacatcagaagtagatgaggttacagcgtacaagtgtggtcagaatgctactgtcgtatgcaaatgacgagtgcattaagtgtcaaacaatgaaacaattgtgcaaagaataaaaaaacaaattttagcctttaaataaatcaaataacatcagtttcttggactgaacaattttcacttctaggacaggcacaaagttcgcttatggcaaaaacaaccccacagcgcatcctccctcctccctccggtagctggtggagggttcgcagcgggctggcccgcaggagaggctgtgctgaagctgtgtcctccccaagtcagttgcaaatgtcttccccaggggttggaaagatggtcaagtcctgttcatgcttgggcgggagtctggcccagcctgggccagagcgctcacccatcaccacccttaaataacaccatcttagctccgaaaataaaattatatctatatttatataacatccccccatcctccccagcagccctcccctcccgcagtacccggggtctatgttacagacaagggatatcaagctcccgctggtgaagggagaacatctgatggggcgcggccacactcccgcgccaatctcgcccccggggatcagaggcgggggtggggtgaaaatggggcgaggggagtcgaacagacacacagccacacactctgaggcccggctcttcagaaaagcatgctcaggggacccttggcactcagtggggagcccaggcctgtgcaacacagctggacgcacacagacactgggatgggggcgcccggtgcccacgccaagtcctggcgcaagccagaggcgtcagcagacagatgccaggcaggccggtggggtccttgtgggacacgggtctccccttctccgggctcgcgggggactggtccaggagggggagccgtgccggcaggggcaggcgcgacgggcgcggccctcatagcaccttgcagcagttgatgcagccgttctgggagccgtagcgcttctgcagcgcggcgcgcgtggccgtctcgaagacctcgcgcacgccttccttggtcttggcagagcactcgaggtagtcgtaggcttggatgcgcacggccatggcgcggccgtcatccgtgcgcacgggttcctgcttcatgcgggccagctctgtgcggacatgctcgtcgctgcgcaggtcttttttgttggccaccaggatgatgggcacattgggacagaagtgcttcacctcggggacccacttctcggggatgttctccagcgagtccgggctgtccaccgagaagcacatgagaatgacgtcggtgtccgggtaggagagcggccgcaggcggtcgtagtcctcctggcccgccgtgtcccacagcgccagctccacctgcttgccgtccacctcaatgtcggccacatagttctcgaagacggtgggcacgtacacctcggggaactcgtccttactgaacacgatcagcaggcacgtcttgccacacgcgccgtcgcccaccaccaccagcttcttgcggatggccgccatgagcgggccgggcccgggcagcaggagggggcccgcgaacgcctcgctgccctcccgctcgccgctcactgctcaccctggggctgcgcgcaggtggcgagaaggggtcgctagctgcacccgggcccccgcgtggccncgcgtttctctccgctggcgctttcggctggccgcggcggggggcggtggggggctccggggggcataaagggcgcaccagtgattcttagccgcgctgctcccggggcggtggtcgctctgctcaccccaggccggggatcggccggctttgtggcgtaacgcggggctcgggcagcagactcgggcggtggactcggcctagctctctcccgggtctctccgggcctcgctgagcatacaagacaacagctccaaccacactg

SEQ ID NO: 59004 - DNA, 2041 bp, Homo sapiens
atcctgggttggaggaggtggcggccgctgaggctgcggcgtgaagacggcgggcatggtggggcgggagaaagagctctctatacactttgttcccgggagctgtcggctggtggaggaggaagttaacatccctaataggagggttctggttactggtgccactgggcttcttggcagagctgtacacaaagaatttcagcagaataattggcatgcagttggctgtggtttcagaagagcaagaccaaaatttgaacaggttaatctgttggattctaatgcagttcatcacatcattcatgattttcagccccatgttatagtacattgtgcagcagagagaagaccagatgttgtagaaaatcagccagatgctgcctctcaacttaatgtggatgcttctgggaatttagcaaaggaagcagctgctgttggagcatttctcatctacattagctcagattatgtatttgatggaacaaatccaccttacagagaggaagacataccagctcccctaaatttgtatggcaaaacaaaattagatggagaaaaggctgtcctggagaacaatctaggagctgctgttttgaggattcctattctgtatggggaagttgaaaagctcgaagaaagtgctgtgactgttatgtttgataaagtgcagttcagcaacaagtcagcaaacatggatcactggcagcagaggttccccacacatgtcaaagatgtggccactgtgtgccggcagctagcagagaagagaatgctggatccatcaattaagggaacctttcactggtctggcaatgaacagatgactaagtatgaaatggcatgtgcaattgcagatgccttcaacctccccagcagtcacttaagacctattactgacagccctgtcctaggagcacaacgtccgagaaatgctcagcttgactgctccaaattggagaccttgggcattggccaacgaacaccatttcgaattggaatcaaagaatcactttggcctttcctcattgacaagagatggagacaaacggtctttcattagtttatttgtgttgggttcttttttttttttaaatgaaaagtatagtatggggcactttttaaagaacaaaggaaatagttttgtatgagtactttaattgtgactcttaggatctttcaggtaaatgatgctcttgcactagtgaaattgtctaaagaaactaaagggcagtcatgccctgtttgcagtaatttttctttttatcattttgtttgtcctggctaaacttggagtttgagtatagtaaattatgatccttaaatatttgagagtcaggatgaagcagatctgctgtagacttttcagatgaaattgttcattctcgtaacctccatattttcaggatttttgaagctgttgaccttttcatgttgattattttaaattgtgtgaaatagtataaaaatcattggtgttcattatttgctttgcctgagctcagatcaaaatgtttgaagaaaggaactttatttttgcaagttacgtacagtttttatgcttgagatatttcaacatgttatgtatattggaacttctacagcttgatgcctcctgcttttatagcagtttatggggagcacttgaaagagcgtgtgtacatgtattttttttctaggcaaacattgaatgcaaacgtgtatttttttaatataaatatataactgtccttttcatcccatgttgccgctaagtgatatttcatatgtgtggttatactcataataatgggccttgtaagtcttttcaccattcatgaataataataaatatgtactgctggcatgtaatgcttagttttcgtgtatttacttctttttttaaatgtaaggaccaaacttctaaactaattgttcttttgttgctttaatttttaaaaattacattcttctgatgtaacatgtcatacatacaaaagaatatagtttaatatgtattgaaataaaacacaataaaattaacacttgatccagaaaaaaaaaa

SEQ ID NO: 59005 - DNA, 660 bp, Homo sapiens
cggacgcgtgggcggacgcgtgggctttccgcgccgccacaatggtgcgcatgaatgtcctggcagatgctctcaagagtatcaacaatgccgaaaagagaggcaaacgccaggtgcttattaggccgtgctccaaagtcatcgtccggtttctcactgtgatgatgaagcatggttacattggcgaatttgaaatcattgatgaccacagagctgggaaaattgttgtgaacctcacaggcaggctaaacaagtgtggggtgatcagccccagatttgacgtgcaactcaaagacctggaaaaatggcagaataatctgcttccatcccgccagtttggtttcattgtactgacaacctcagctggcatcatggaccatgaagaagcaagacgaaaacacacaggagggaaaatcctgggattctttttctagggatgtaatacatatatttacaaataaaatgcctcatggactctggtgcttccacttggtcgttttgagcctttacagcagtgtagccacagcttctgcggcagcatgcagttgcttcgtttatcgaagaatgcgattccctgaagtgactaatacagccaagggaaaaagttcttatgaaaccagtatgcctaagaaacagtcacccctgctgtctgccaaaacc

SEQ ID NO: 59006 - DNA, 1571 bp, Homo sapiens
ttttttttttttcaaactgctttactatactttattgatataaatacagcaaatctcaataagcaccagctaccattttaccactacacaagagaaacaaagtcaaaagaattatatattaatgcaaagagtaaacacagaatgctttcacttccactatagtcctctataacaaaacatcctacatactttgtacaatttgcttataattggttaaatatttgatatgaagcaaggttgatttttaatcaaacttctatttctcagtggaaaatgctctcttcatcagaggtggttgagttttcccgacatcaaacatcatttccaaaggtgggttattgagagaacaccaatcaggtatacggcccgtctgattataatattcctttgaaacagaacggctcccaagtatatcttgtaatgctccaaaaatagcccctcccaaccaggccacacaattagcttttgcaggtggagtatgaattcgaaatgtcttagtgccaagtgcttttttatattttggtttttctaccaaataccttatttctgcaagcaatctgtggagaaatcctggcaacatagaagtgccacctatgactaccaaattctctgctagttgcttcctggtgtctatcggacactgtataagggaatccaatattaaagtggcaactgattgctcttcattatcttgttcaaaaagaatttccacaactgaatctctgattgatccaaggatatgtaaaatcttctctccatctaatggatagtcaacatttgggggtggggagggacgctcattattcccatcaatattaaattttgctgcttggatttttagtcctcgcttcagatcacttacaaagcaagtacgcgctttaatgtcctctaagacaccttccggaactgaacccatcactgagggaaggctctgttctttagcaacacttgtgtcaacagtacattgttccaatagttgagtttccaactctttgtgaagagcttttcctcctaggggtagtgctccccaacaatttagaactgggattccttcatatatgggtaacaccaggctttccctatatccacaatctaggaccatggcagaattaattccaagcgtcagaagagccattagatgacttggagcaagcaagacagatggaacctcaaaatatttgaaaagaacacgagtgagtgtctctctgaagtgagaaggacataataccgattcgataatcacaactcggcggtctctgggattcaccaatagatgcctgaaatatagtatgtggatgaattcctttaggtaggaatataattcttctgtattgatattatactgaacaactctgacaggcttaggcatcccagctctttttatcacactaggaattatacatcttggaccagtttctccagcaaatccacacttggtaaaggcctctcccaggtcgatcacgaccgccgtcttctccccgccgctccccaggccctcgtagagcggcatggtagtaaggcagactgagagaagagggtcgcagtctccgcggccaacaagtctcacgaaa

SEQ ID NO: 59007 - DNA, 1947 bp, Homo sapiens
cccacgcgtccgcgctgagatgggggcggcggcggcggaagcggatcgcactctctttgtgggcaaccttgaaacgaaagtgaccgaggagctccttttcgagcttttccaccaggctgggccagtaataaaggtgaaaattccaaaagataaggatggtaaaccaaagcagtttgcgtttgtgaatttcaaacatgaagtgtctgttccttatgcaatgaatctacttaatggaatcaaactttatggaaggcctatcaaaattcaatttagatcaggaagtagtcatgccccacaagatgtcagtttgtcatatccccaacatcatgttggaaattcaagccctacctccacatctcctagcaggtacgaaaggactatggataacatgacttcatcagcacagataattcagagatctttctcttctccagaaaattttcagagacaagcagtgatgaacagtgctttgagacaaatgtcatatggtggaaaatttggttcttcacctctggatcaatcaggattttcaccatcagttcaatcacacagtcatagtttcaatcagtcttcaagctcccagtggcgccaaggtacaccatcatcacagcgtaaagtcagaatgaattcttatccctacctagcagatagacattatagccgggaacagcgttacactgatcatgggtctgaccatcattacagaggaaagagagatgatttcttctatgaagacaggaatcatgatgactggagccatgactatgataacagaagagacagtagtagagatggaaaatggcgctcatctcgacactaacacatgttaaaaggacattgtttttatagggtcattttaggccctttgactaagttgatatggaaatattttgttgaaaaactgtacagagcagctttacaagttgtcacatttctttataaatttttttaaagctacagtttaatacaaaatgaattgcggttttattacattaataacctttcacctcagggttttatgaagaggaaagggttttatgcaaaagaaagtgctacaattcctaatcattttagacactttaggagggggtgaagttgtatgataaagcagatattttaattatttgttatctttttgtattgcaagaaatttcttgctagtgaatcaagaaaacatccaggttgacagtctaaaatggctactggtattttagttaattcaaaaatgaaacttttcagtgattcactttactaacattctatttgagaaggcttattggtaaagtttggggataaaggcattgcttaacttcttatataatttaggtataaattctgtgacatgctcttgagctttaccctagttgaacatacatgtgtagatttacacatactgtttcattctaaaatttagaaattgttcattaaatcccatttgaggtataagtcactcaggaagttaaaatatctctacacgtatatttttacattaaaaatacagtgttagcataaatccccttttcaggaagaacaaaaatgtcagtgcatagttagataaaatggtaaaatgttttactgaaagcatacttttttggaaaatagattcatgaagcctttaagtgctgcttctgtcagtcaaacgttaaaaactttaacattttcaaagtgcccagactgtgtacaaagacacatgtaatggagattgtacaggttgtttttttgtttgaacctttgaaagagtttaatcttaacgttttctaattttaaaattttaaaatcttgtttaacaaaagcttgtattaagatactgttttcatttcattacagaattgtttataaaagttcatttgttgaaaaataaggatcctttttaataccacagcatttgtactgttcctttttaatatactgaaaaaataaaagggagggggtgtgttaaaaaaaaaa

SEQ ID NO: 59008 - DNA, 2660 bp, Homo sapiens
agcgctcctccttccggtgaaagtcgtcgggttcccagccgggagtctgcggagttctcatactctgttacccagcttcctttgtatgagggctgttgcgcacttccggtggaagcgctgaagcgagtgggtggagtttacggagccggtgggcggtaggcggtgctacgggtagctgggtgctgtccaaaggcgacagggcgtcgttaggggagcgagtcgtgaccggttgggccacactcaacgtgggacgaagcttcgcctactgtttgactacgtgcgtgcagcctcccctcgatgtcggccctcgaaaagagcatgcacctcggccgccttccctctcgcccacctctacccggcagcgggggcagtcagagcggagccaagatgcgaatgggccctggaagaaagcgggacttttcccctgttccttggagtcagtattttgagtccatggaagatgtagaagtagagaatgaaactggcaaggatacttttcgagtctacaagagtggttcagagggtccagtcctgctccttctgcatggaggaggtcattctgccctttcttgggctgtgttcacggcagcgattattagtagagttcagtgtaggattgtagctttggatctgcgaagtcatggtgaaacaaaggtcaagaatcctgaagatctgtctgcagaaacaatggcaaaagacgttggcaatgtggttgaagccatgtatggggaccttcctcctccaattatgctgattggacatagcatgggtggtgctattgcagtccacacagcatcatccaacctggtaccaagcctcttgggtctgtgcatgattgatgttgtagaaggtacagctatggatgcacttaatagcatgcagaatttcttacggggtcgtcctaaaaccttcaagtctctggagaatgctattgaatggagtgtgaagagtggccagattcgaaatctggagtctgcccgtgtctcaatggttggccaagtcaaacagtgtgaaggaattacaagtccagaaggctcaaaatctatagtggaaggaatcatagaggaagaagaagaagatgaggaaggaagtgagtctataagcaagaggaaaaaggaagatgacatggagaccaagaaagaccatccatacacctggagaattgaactggcaaaaacagaaaaatactgggacggctggttccgaggcttatccaatctctttcttagttgtcccattcctaaattgctgctcttggctggtgttgatagattggataaagatctgaccattggccagatgcaagggaagttccagatgcaggtcctaccccagtgtggccatgcagtccatgaggatgcccctgacaaggtagctgaagctgttgccactttcctgatccggcacaggtttgcagaacccatcggtggattccagtgtgtgtttcctggctgttagtgacctgctgtccacccctcctcaacatcgagctctgttgtaaatacgtcgcaccagaggccactgtgatgccactgtctcctctccatcccgcccagccatgtgacactggctcccggtagacgggcaccccgagatgtaccaaccttttcatgtattctgccaaaagcattgttttccagggcccttgaccaacatcggcttccccagtccagggctcccctgctcctttcccttccctgtactggggtagctcctgcctgctctccctgcgttgcctagggtaaagcctccagatttgccatactgagcccctcttcctagcatcaggcgatacatctgagttcaaatgtcttcccaggctcagggacctccattccttgagattgtcttggcatggcccagccctgcctcatgggatggacaatgcatggggtggtctttatttttccctttcaaataaaacactagtcaggtaccgttttatcccagtcgtactcttccaggtttggaagacccagagaggccaagatcccatccttagccatagcgagcggtggtggtggatagcatcacaagaaacgagcctgaaaatcaggtccagccggtccaagcacatggcctcccatctgggagagcccactgtcccactcccacatgtctgggcacctgccctgggctgaggccaggctgctccaggggcctcctgcgccctcacctgccacagagcaacccaggttaaatacagcccatgcacaaagccacaggccaaagcctatggaattgtttttaatcatcaaatttaaccattttcataactggttcctggaggtgtgcagtgcccccttgcctcttcaaacctacagcttctctttgccatttgtggatttcacatcactccacacagaaacattacagcctggcatccccagtctttgccttcttccagctgcctcgacacagcactgtggcctgtccctattgcccaggcacgccatttccaagggcaggaaggggcagtgtcctgaagcccatcttttctgtgactgtcttaggtgatgtgtagccccctccacctttccactcaacaacctcccacccctgtcctgctgcatggtccggagtctgggacctactttgttttttgttatttatgaccttgtttaaagaaaataaatatctcccaacctttaaaaaaaaaa

SEQ ID NO: 59009 - DNA, 1074 bp, Homo sapiens
ggcctgaagtacccaagtccccgagggcgcgccttccccgggaatttaattcaggacaataatgttttattgagcgcctattgtgaatcagacactgagcagtaagcgtcggagaaacaggtgaatgataccggggaaaagtcattccctgtgtgtagcgtctagggcagcctttgccctggttccagcagatgggttgtctcttcatagtctatgcatttctgaagaccccacggtgaagggctgcaaggatgaagctgtcccagagtatctccagagtgcagatcccttggctgccaggtcatgttctctcttcctctcaactgctctcccgaccatataaggagaggcagctgctgggggcgtccccaggatctaaagatagcttccgctgcctggaactctaaatgccaccctggagcgggagccgcaatggcacggcagcacgcccggaccttgtggtacgacaggcccaggtatgtgttcatggagttttgtgttgaggacagcaccgatgtccacgtgcttattgaggatcaccgcattgtgttcagctgcaagaatgccgatggagtggagttgtacaatgagattgagttctatgccaaagtgaactccaaggactcccaggataagcgctcttcccgctctattacttgttttgtgagaaaatggaaggaaaaggtggcctggccgcggcttaccaaggaggatatcaagccagtgtggctgtctgtggactttgataactggagagactgggaaggggatgaagagatggagctggctcatgtggaacattatgcagaggtgagagacaacacctactgtgttctgcccacttgatcattctttgtgtttctctgcacacatgtctctggaggattgtcactggggccaagcagagatatgcaagctctctaggcaggttactcattgatgctgatattctttacgtattttgtgcaatgtttatttaatagggatgagaggaaagaatattattgaaattatatacattgattcacttattcagtgtagagcctgtattctgaagaagtttgacaaaacgtt

SEQ ID NO: 59010 - DNA, 1111 bp, Homo sapiens
ttttttttttttctgcagcagatttttattagatggaagataacaagcattacctcataggtaagtggtaagaaatggcaagtacagccaagccacagaggagtgaggacattactggctatgggaatgggtacttatgaaatctaagggttgggtctcctgatgaactctaactacccagtaagctcttctctttggcactcaatatgaccactgctggcatgaaagggtctacagtagctacttcaacttggccaacagttcttccagttctggtcgagctttgaatcgtcccttgaagtcttcttcagtgtgctccttcactgacagtctgactccttcaggaagactgctttggattatttccaagaaaatttctgcaaacgtagcactcaaaccgctgatctgaaccactcgctcatgggtggtaagcactgagtccaggagcattttgctgccttggtcctgcaactgcaacacttctatggttttggttggcattgcataactttcctcgactttaatggagagagagttgcagaggttgtgaacatactgggcataactctctgccagggtcatatcatatgcagtcagatgaatatttaaaaccccatattcataatctgtccccaaattaatggctctcacttccacttttcccttcttcttcttgggctcttctgctttaattaagtgcttgtactttccaatgccgtgggtgggctttgtcttgtagggccgactgatacttagtagaattccacctacagaatagatgggcttctctcctgaagttctaaaccttaagagagaaaaggcttgcttaaaaatggtattgttcctcaggcacagcaccttttccaaggttccgctcatcctttgctgctgcgcggcctctagctgtgcaaaccgaagaccggaccctgcagccgcgttcccagggcgtctgaaaacactgaaggaacggccttgaccaggtgcagcagcaatatcccaccgagactcactcaacttccacatcattttagttccggaagcttctgaaattcagagtctagaaattctcctgctttccaccctcactcaggttgcacattcactgctgttt

SEQ ID NO: 59011 - DNA, 1108 bp, Homo sapiens
tcttcagggagaggaagccggcggcctcactgctatgggccgcaacaagaagaagaagcgagatggtgacgaccggcggccgaggctcgttcttagcttcgacgaggagaagaggcgggagtacctgacaggcttccacaagcggaaggtcgagcgaaagaaggcagccattgaggagattaagcagcggctgaaagaggagcagaggaagcttcgggaggagcgccaccaggaatacttgaagatgctggcagagagagaagaggctctggaggaggcagatgagctggaccggttggtgacagcaaagacggagtcggtgcagtatgaccaccccaaccacacagtcaccgtgaccaccatcagtgacctggacctctcgggggcccggctgctcgggctgaccccacctgagggaggggctggagacaggtctgaggaggaggcgtcatccacggagaaaccaaccaaagccttgcccaggaagtccagagaccccctgctctctcagcggatctcctccctcacagcatcactacatgcacacagccgcaaaaaggtcaagaggaaacatccccgacgggcccaggactccaaaaagcccccaagggcccctcgtaccagcaaggcccagcgccgccgtctcacaggcaaagcacggcacagcggggagtgagaccgagaacgaagcggtgccccagtctaggctgcggggacctgtccttgctcagcttggctgtccctgtagcccagcctgcacctaggtaatgactgcacagctcaaggttgggaagccaggacctctctggcctggggccagctgcctttgcctggggtcagctgcctttgcctggggtttgaattcccgaaggagcaggcagctgagagcaggcctcccccaggaagagccttcagagccacgtgggggcatcttcccaaatgtgcaccccacctggcactcatcagatttgtgcgcttgtgatttgtttgtccttgataccacgcacaagggcaggtttttggggtggtggaaatggccagggcccatgggtctgtctccagcagttagccctgtggctgcaataaagtacagttctccctgtgttaa

SEQ ID NO: 59012 - DNA, 1061 bp, Homo sapiens
ttttttttttttcattttaaacaagaagtttatttaaacaacaagacgcttgacttgaagggaaaactatctaggattcttttttgttttagagtaatttatccctacttaaagacagattgccctacatgtaacagctacgtacaaaaaagttataaaattgtccttggttttacaatgataaatgaaaaacattaaaattctccaattgaacaaggtatgcaaggatttttatgttgttgttttttttttttgttaaaacagtgagagcaaaataacttactggaatataaagataagagctgaatgagcatgccactaatggagaaagggggtattttcacagaatcagtatttttccccatcccgtctccacttgatgtcaatcaaaacataccattggctgtttagttaaaaaaaaaaaaaatgcaatatgcttgtgcacatataccagttactttatgtacaataaaggaatggggaagggggaaatgaaagaatagagaaaactatacggtagtagtcaggatgtggtggaaccaaattgcagttttctaattgagaatgtaatcttggtctttaaagaacagagttctggagtaaagaagcaggttcccttttcagtagacacctcccgtctgctgttggaacacatcaattgtatcttcatcctccatttccaactgtgcaggtgtgtctgtttcattgattggttgcccgtcaaatcggaatctgatctgcctcattgacaatccctgtcgttcacaataggctttcattagtttactaagtggtgtatgcctcttaatcttaaactgcaccacagaaccatcctgccccgccaccttcaaattaatatgatcgttgttctcagtcttgactccttccttgggcttttcgtcggccatggcgagcgccggagtctcctcagctgccgcttcacaaaagaggtaccaggtccgcaccaaacgagcacacaagcagcaccaggagcggcagaagaaggaggcggcagcggtggacgaggggagagggtgcgcgcacgtcgtgcgctccctccc

SEQ ID NO: 59013 - DNA, 1296 bp, Homo sapiens
ttttttttttttatacaacattttcagcctttattgagagtacagtcatcatgccaaaattcatccatcaacatacaaccttatttcccatctaaagttaatgagaatgtattttattttaaatgggacatagaggcaacatgccaagaattaaagtacaaccataaagttttagtttcacactttgaatatcaacaaagcagtaattcctaaaatcatgaaaacatgataaagtatctatacagaaaaaaatgaacatttaagtcatttcacgctttcttaatatcatatagtgaaaacagatgtacctataatttcagcctacagatagcatacttcataaggtcattattcatttaaaatagtacaaatgtttacaaagaacatttcacttaaatttcacagctgcttataaaatggtacttgcaagactgacctatataaagaaataagagtctcatcaagagatggtaaattataaatatataatatatcacaatgttaaaatcctcagtgctaatcaataagataatgatctttggagaggaaagtatttagctttacatatttactgtgaatttacatattaataagaaacacatttaaaccttgccctgccacagaattattttgcgggggggggggggggggdagatgtactttttgaatatgtgtacatcaaaaccaaaaagttaacttttactttttcctttattggcaacttttgatgcatttttcgattttggttcccagagggcattttttacaaatcttgaagctgcacctctgtccagcttgccagcctttttcttgtctgttatttccttgactctgttcatatatactctgattctttccaattcctgttttactggatgttccttaggattaactccttgggttgccaaataaacccaaaacattgaatttaatgtgtatgcagaaaccaaatccacttttgcttgttcaagtggatccaacttctgcaacaactcatttctagaaacagacatcatggtcttcagcatctcatccacagcaccaatggaattctcaaacgctgacaaatactcgtgaatttctactggatagtcttcattaatttcttcacctgccattatggctgactcacggccttcgactccagtctcccggaaagcggtcgggcaacgatgacgacaatgacgcgccagctctgcccgcgccaccagcggcgctttccgatgatctcaccaatgtatagctttttatacacaaattacataccaataaagtgatttaaaagtataggataaa

SEQ ID NO: 59014 - DNA, 1699 bp, Homo sapiens
  misc_feature (1)...(1699): n = a,t,c or g
gtagggaaactgtgagggcggcaccggaagtggcgagcagtctgcgcgcggantggccgcagcggcgatggcggcagcggcaggtggaggggctggcgcggcccgctccctctcgcgcttccgaggctgcctggctggcgcgctgctcggggactgcgtgggctccttctacgaggcccacgacaccgtcgacctgacgtcagtcctgcgtcatgtccagagtctggagccggaccccggcacgcccgggagtgagcggacagaagccttgtactacacagatgacacagccatggccagggccctggtgcagtccctgctagccaaggaggcctttgacgaggtggacatggctcacagatttgctcaggagtacaagaaagaccctgacaggggctatggtgctggagtagtcactgtcttcaagaagctcctgaaccccaaatgtcgcgatgtctttgagcctgcccgggcccagtttaacgggaaaggctcctatggcaatggaggtgccatgcgggtggctggcatctccctggcctatagcagtgtccaggatgtgcagaagtttgcccggctctcggcccagctgacacacgcctcctccctgggttacaatggcgccatcctgcaggccctggctgtgcacctggccttgcagggcgagtcttccagcaagcactttctcaagcaactcctgggccacatggaggatctggagggtgatgcccagtccgtcttggatgccagggagttgggcatggaggagcgtccatactccagccgcctgaagaagattggagagcttctagaccaggcatcggtgaccagggaggaagtggtgtctgagctagggaatggcattgctgcctttgagtcggtacccaccgccatctactgcttcctacgctgcatggagccagaccctgagatcccttctgccttcaatagcctccaaaggactctcatttattccatctcacttggtggggacacagacaccattgccaccatggctggggccattgctggtgcctactatgggatggatcaggtgccagagagctggcagcaaagctgtgaaggctacgaggagacagacatcctggcccaaagcctgcaccgtgtcttccagaagagttgatgagggctacagctgttggggctctgccaggtcccctgggaccaactacagctccaatcagaaaccctgcgcttccttgagtgtggcttcccacttttcctgcattgtggagctgactgagtacaccggtgaggctggggtctctgcaggggaggtcactggaacagcgagcaagggactggtgcctcgctggtgctgggtctctggtttgctgcagagccgtaggacactcctggctcctcagtaggacagacagacgcaggcgggtttattttggaggggtacttgtggcattttcctgtattgtcttggacatgggatgtggggaggtggaaatgatgagcagtagcatcatttctccctgttgggttttagccagtttgccagcaagcgcatcctagcagggtccccgagcagcaggttgtgtggatgaagggacaggcacttgcatccagctgatctaggtcacacctggctcttggctgccatgtggcttattaacagcttccagtggaagtcgcaataaacagtttttggtaaatctcaaaaaaaaaa

SEQ ID NO: 59015 - DNA, 1568 bp, Homo sapiens
ttttttttttttaagtcacagaaacttttattggaaagaaacgagctgcagcaaagtgacactcagtgcacgcggccaaatgggcgaggtgggggtacaggtgggcaccggggccggcccaagaccagagccggtgactgctggggcctgctcgtggggcctccggccacagaccctttgggctggagtgtgcaggcccagtagaaatacaaaaataaactctgcggtccagctgtccctgctgtggcagttcatttgggcagggcagtcgctcctcccaccaggccccctgctgacaagtccggccacagcatgggcagcaggagtctgaggggtgagtgggcatccacaggatggagccaaagggctaggcaggtatggccttgggcagtgccaggactgtggcagcgccagggtctggccagcagctggggaggccccaggggcctctcaggtggacaggtccaggcattggttgaagctggatgaagctggggcctcggctcctcctcatcaaatacagatcactgggaccctgtcctcctccatggtgctggtctcctcggccccactgcccctgcttctgctttcttcctccacctcctcctcccccagctccatgtccagctcgttgcctgcctctgagggtgtgtaggtggagccactgatggaacggcagctaaagaagacgattcgcttgagccgcttgttgtagaagaagtagttgaaggaccagaggctaccatcctccccgaagggatctgagtccaagtctgggttatagctgtagatgtcacattcagccaggcagatctcctcgtccaccgcgttccacagctgtggtttcagatccttgaagtcctcccgcacagctgagaacagactgcagttgactgcattcaccacccagctaaggctgggctcccggctgaactcatggctgcgggctgtgctgaagtcatagtcaggcctgaaggactcattgagcgtggcaatcaggtagaagagggtcttgcggctgcacttgtcactgagggggccctcctcctcaccgccttggcttttgctgagtctgctggggctcagtcctgaagtctggggtggagaaagtgcctccagcacgtggggctggccctcctggcagaactgcttgaacatgtgtttgtcgtctcctgccatcttacatgagtagctctcaatcctgccaatgatgtgggcatctccggtctccacagtcagctgtgagttgatggcttcaaagctcgagttctccaatagcttcatgtctttggggaaggagctccgtgctccagaggggctagtattgcctgcctggctgggttagatccaggccgcgccgagccgggtctggctgggctgagctccgcgtcggtgccggtgcgcaggcgggggcgggctcggcagcgcgggctcttcaagatcggaggcggcgccggcctccgctcgggccgcactgtatccgggggaagaagtccgcggcgacgtcccaattaacatcacgccctgcacgcgatccgggctgccaccgcgacatagcctcgcccccc

SEQ ID NO: 59016 - DNA, 4265 bp, Homo sapiens
aaatgatgtcagagatttttttcatgggctccgtgttgatgcagtgcatttgttgaaagatcatgtaggtcgaaataatgggaatggattggttaagtttttctcccctcaagatacatttgaagctttgaaacgaaacagaatgctgatgattcaacgctatgtggaagttagccctgccacagaaagacagtgggtagctgctggaggccatatcacttttaagcaaaatatgggaccttctggacaaactcatccccctcctcagacacttcccaggtcaaaatcgcccagtgggcagaaaagatcaaggtcaagatcaccacatgaggctggtttttgtgtttacttgaaagggctaccatttgaagcagaaaacaaacatgtcattgatttttttaaaaagctggatattgtggaagatagtatttatatagcttatggacccaatgggaaagcaactggcgaaggctttgtagagttcagaaatgaggctgactataaggctgctctgtgtcgtcataaacagtacatgggcaatcgctttattcaagttcatccaattactaagaaaggtatgctagaaaagatagatatgattcgaaaaagactgcagaacttcagctatgaccagagggaaatgatactaaatccagagggggatgtcaactctgccaaagtctgtgcccacataacaaatattccattcagcattacaaagatggatgttcttcagttcctagaaggaatcccagtggatgaaaatgctgtacatgttcttgttgataacaatgggcaaggtctaggacaggcattggttcagtttaaaaatgaagatgatgcacgtaagtctgaacgcttacaccgtaaaaaacttaatgggagagaagcttttgttcatgtagttaccctagaagatatgagagagattgagaaaaatccccctgcccaaggaaaaaagggattaaagatgcctgtgccaggtaatcctgcagttccaggaatgcccaatgcgggactgcccggtgtgggactgcccagtgcaggacttcccggtgcaggcctgcccagcacaggactgcctggttcagcaataaccagtgcaggactgcctggtgcgggaatgcccagtgcaggaatacctagtgcaggaggtgaagagcatgccttcctgactgtaggatcaaaggaagccaataatgggcctccatttaactttcctggtaattttggtggatcaaatgcctttgggccaccaatccctcctccaggattaggaggcggggcctttggtgatgctaggcctggtatgccttcagttggaaacagtggtttgcctggtctaggactggatgttccgggttttggaggtggaccaaacaatttaagtgggccatcgggatttggagggggccctcaaaattttggaaatggccctggtagcttaggcggtcccccggggtttggaagtggccctcctggtcttggaagtgcccctgggcatttgggtgggccaccagcttttgggcctggccccggccccggccccggccctggcccaatccatattggtggtccccctggctttgcatctagttctggaaaaccaggaccgacagtaattaaagtgcaaaacatgccctttactgtgtctattgatgagattttagatttcttttatggctatcaagtaatcccaggctcagtgtgtttaaaatacaatgaaaaaggtatgcccacaggtgaagccatggtggcctttgagtctcgggatgaagccacagctgctgtcattgacttaaatgacaggcctataggttcaagaaaagtaaaacttgtattagggtagccattcacatcattttttatagggtagatcttcatattgctgtgattaatgcatccagattgttttcctagtatttccaggttagaacctgtggattgttccaatggccatatagcttggtttccataacatcgagcagcattggttgactgtttacagaaagactcactccacccaggataaacattgctgtatgttaccagtaaagctatctgggagagaacacataaatgattttgggcataccattagaagaaaccatttgtaaacttcaaattaccacaataaggcttatcaagtgagtctaggattggttttgttttataccatatgggatgaagaaaatagaaatgtcagtagaactcattgagggtgctcttgccagctgctgaaaatagaagttggctactctcagaatttggtttaaaagctggacagatttgccttgttaatagggtaaagctttgtcctaaagtccctcattttccttttaaaattgaataaaatttctgtatacagattcattgtatgtacctttattgccttccttaagggtccttgctgtatagacagtcctgccttcagaaggttgctgctttgtttgtctaattgactcatttgtaaatgagcagaactgttttgtgggtttttttccctaaatataaaagtcccacacttcgtttgtgctataacctcaaactttgatttctaatgtcacacttaaaactgtgtggaataagacttttgccataaaaataaactatggagtcctttatctaccagagcctttttggtttgaccgccacgatttaggttagtcagtttaaaaattgttcatgttgtttggatggtatcgaaaaccagaaaccacttttaataatgtgtttaagatacttgatttgaagtccttttcatatggactaattgtagtatcaatttcctcctgtcccgattatgtgaaattttggcctttaaacaaagaggggcccattcataagaaagtgttatatctaggtttttaaaactgaagttgaaattatctttgttagcagtagtagtatagaataaaagatccgtatgctggttcgtagattgatacgtgttagtcctgttatttggaggctttttggcatagttgttcgatcaggagcctgtttactaaaagtcttcatacagagtacaagcgcagccgccagaggagaaaattgagattcttgaccctttcatactcttttctttggtattcaggacactaaggcaggaggaccacatgagttctggttggtaagtgtccttgtcatgaaaacacttgccttacaaggctctaattatgatttccctagtcagtgctctgaagatgtgtcacattatattataaacaatacggaaggggagataggtgagatgatatgaaaaacaaattttctcactgtcataaaaggctctaattatggttactttccttgtgatgaaaaacttggccttacagggctctagttatggttactttccctagtcaatgctctgaaaatgtgtcacattataaacaatacagaaggagagatagatgagagatcatgaaaaccaaattttatcttttacatggcccctttgtcttcgtttgaaacatccccaacatttcctacaaatcagcgtagttacaaaggggtcagtcttttaaaataagtatttcctattaaactatatatatatacagtgcctttttggtgttgtgagtcagtggaacactgaaatacagcggttgtgtaatttaagagtggcaacagtttcatttgataagatttgaaaaggctttttatcactacaatcttagaggattgacagtacaggatttttgtttaagagaaggattgtttagactcaagaggtgactatgttgtgggtcttttgataattcatgaatacagatttgctttgaccgatcactagatactgcctcctcaatttcaaaagcaatataacgtttgtatatgctgtttaatttaagttaatgttaagtaatcatttctcattccaaagacaatgcaaaaaacttcagcactgcttgagagttgtatttcagccacagatattttctccattggaaagctattttcattttagaaaaatgggttgtttgaagatgaaagtcttttatcttttttcacaatttattttggttatatgttcgtacattcttattaaatatttcatacactttattgcaactactttgttatttctacatcttagataaatgctgaaaaggaaaacgatttcattgttcatctaattaaataaattaaaagagcggtttgtgtagaaattggagagaactatgttttatatgaatcacaacagtgctcgttgtggactgtaattaaatgctttgccctctggaacttgaaaaaaaaaa

SEQ ID NO: 59017 - DNA, 1649 bp, Homo sapiens
ggcacctcccatgagggctcgggcgcctgccgagaagacgcacagtgacagcttcctttctcggaaacgcggcgcggccggctgccggaaaacagggcagacctgtatgattggtttattcctggggttgtcatatcatggctgataatgacacagacagaaaccagactgagaagctcctaaaaagagtacgagaactggagcaagaggtgcaaagacttaaaaaggaacaggccaaaaataaggaggactcaaacattagagaaaattcatcaggagctggaaaaactaagcgtgcatttgatttcagtgctcatggccgaagacacgtagccctaagaatagcctatatgggctggggataccagggctttgctagtcaggaaaacacaaataataccattgaagagaaactgtttgaagctctaaccaagactcgactagtagaaagcagacagacatccaactatcaccgatgtgggagaacagataaaggagttagtgcctttggacaggtgatctcacttgaccttcgctctcagtttccaaggggcagggattccgaggactttaatgtaaaagaggaggctaatgctgctgctgaagagatccgttatacccacattctcaatcgggtactccctccagacatccgtatattggcctgggcccctgtagaaccaagcttcagtgctaggttcagctgccttgagcggacttaccgctattttttccctcgtgctgatttagatattgtaaccatggattatgcagctcagaagtatgttggcacccatgatttcaggaacttgtgtaaaatggatgtagccaacggtgtgattaattttcagaggactattctatctgctcaagtacagctagtgggccagagcccaggtgaggggagatggcaagaacctttccagttatgtcagtttgaagtgactggccaggcattcctttatcatcaagtccgatgtatgatggctatcctctttctgattggccaaggaatggagaagccagagattattgatgagctgctgaatatagagaaaaatccccaaaagcctcaatatagtatggctgtagaatttcctctagtcttatatgactgtaagtttgaaaatgtcaagtggatctatgaccaggaggctcaggagttcaatattacccacctacaacaactgtgggctaatcatgctgtcaaaactcacatgttgtatagtatgctacaaggactggacactgttccagtaccctgtggaataggaccaaagatggatggaatgacagaatggggaaatgttaagccctctgtcataaagcagaccagtgcctttgtagaaggagtgaagatgcgcacatataagcccctcatggaccgtcctaaatgccaaggactggaatcccggatccagcattttgtacgtaggggacgaattgagcacccacatttattccatgaggaagaaacaaaagccaaaagggactgtaatgacacactagaggaagacaatactaatttggagacaccaacgaagagggtctgtgttgacacagaaattaaaagcatcatttaaccatagacaatttgccaggatctaggaaccacctaatggtaggtggacagaaaaggaaaaaaaaaa

SEQ ID NO: 59018 - DNA, 1524 bp, Homo sapiens
ccgcgaaacctagtgctgaagtaggcgcggacgtgcccggtgcctggcgcgtggtagcaggcgcccggtgccccggccggcgaagaccatggcgttcatggtgaagaccatggtgggcggccagctgaagaacctcactgggagcctgggaggcggcgaggataagggagatggggacaagtcggcagccgaagctcagggcatgagccgggaggagtacgaggagtatcagaagcaactcgtggaagagaagatggagcgggatgcacagttcacacagaggaaggcagagcgggccacactgcggagccacttccgagacaaataccggctacccaagaacgagacagatgagagccagatccagatggcaggtggagacgtggagctgccccgggagctggccaagatgatcgaggaggacacagaggaggaggaggagaaggcctcagtccttgggcagctggccagccttcctggcttgaacctgggctcactcaaggacaaggcccaggccacactgggggatctcaagcaatcagctgagaagtgtcacgtcatgtgaccacttccccggggttacccactgggctgggcccccatgagggctaagagtgtgtcaacttccagggacccatactccatttggggctttgtttcccttgccccatcctagttccaagacctttcccatccatgccccaagcctatcttctggtttcttcctctccgctgggagtaaagtccccatcttcactctacccttcaggaccctccccaccagctcagcctgtggaggcctcccaagattgtaggaataggcccatccctctctggccatggccccaagttcctgcacacaggagcacccacagagagacacacacaggacacaaaacccctggcacgttcagagacagaagccacagacacatcccggcacagacagacacacacgaggccagctcccttgcgtgtccagcccctccagacaccaccactcagaaactctgagagagagcatgggcagacaccctcagcagacaggaggcctgagttccagtctccacctttattgttcttgaaagcccctgctctctctgagccttatttcatcatctgtaaaatgggaatgtcctgaatgacttctaaggctctttctggcttgaactgtcagagccaagcccacatccctccttgggcagggcagcagctgctgccacagcctccagcggctgccactgtgggctctgggagccggagcgatgctgtgtgagaggcagagtgccaaggatgaagctggcactgaacagtaagcggctccaggcctcctctgggcccagggcccagccaatttctgttctgttcctgtagaacgctctctggattccatagctggaatctcctctcttagctcagtgaaaaataaaaatcccaaatggtgtgcctaccttcccacttcttactggcttccaggagtcttggagttcatagccccccgagcctgccttaaaggggtgcctc

SEQ ID NO: 59019 - DNA, 1463 bp, Homo sapiens
cgccatgcttggcacgagggagcccagccggcgcggagcgggagcggtgcaggctgaggtctccgagcggctcgccatggctggcccgcagcagcagcccccttacctgcacctggccgagctgacggcgtcccagttcctggaaatatggaagcactttgacgcagacggaaatgggtatattgaaggtaaagagctagaaaactttttccaagagctggagaaggcaaggaaaggctctggcatgatgtcaaagagtgacaactttggagaaaagatgaaggagttcatgcagaagtatgataaaaactcagatgggaaaatcgagatggcagagctggcgcagatcctgccaaccgaagagaacttccttctgtgcttcaggcagcacgtgggctccagcgccgagtttatggaggcttggcggaagtacgacacagacaggagtggctacatcgaagccaatgagctcaagggattcctgtcagacctgctgaagaaggcgaaccggccgtacgatgagcccaagctccaggaatacacccaaaccatactacggatgtttgacttgaacggggatggcaaattgggcctctcagagatgtcccgactcctgcctgtccaggaaaacttcctgcttaaatttcagggcatgaagctgacctcagaggagtttaacgcgatcttcacattttacgacaaggatagaagcggctacattgacgagcatgagctggatgcccttttgaaggatctgtacgagaaaaacaaaaaggaaatgaatattcaacagctcaccaactacagaaagagcgtcatgtccttggcagaggcagggaagctctaccgcaaggacctggagattgtgctctgcagcgagccccccatgtaaagtggggacgggggctgcttctccacctcccccaaaccctgcttctgctgccctgatgcgtctacccagactcagagaccgtgagcgccccgcccccacccctacagcctgcacacacctgcctgcagagcaggaaatgagagatagaggatgggcagctggggggctgtcctgagccccctgcacccacccctgcccaggcagtctttgctcagtggatcacacacatggaaggtgatgggggcatgggtggagggtccctaattctcttcgctgtgatgcatgagctccctcgctgtatgatttaggcttctatgtccaacagagtggactcttccctctcgctcccctctgccggtcccccatgccaccacccaccccaaacttccaggttccatccaccaccttgccaatggtgtagctgtcctctcagaactcctgtgtgtggaaggcacccgccctttccttgccttctttactcggcgtgctccttttctctttgggtttcttgtttaccaaagaagagtttacagacaataaaatggaaaggtcctgctgtggaaacttaaaa

SEQ ID NO: 59020 - DNA, 1166 bp, Homo sapiens
tttttttctgtataaagccaaagacctttatttcttcctgcctccccgtgggaagcctccgccctgaggtccgctggcccaccacccctgggtgctcagtttctaccaacatgagccagcaagtccttgtggtagccctggggtagcctgtagtagactcgggtcctgtccacagccctagctgccagcaatgctgtcctcacagaggcatagtcgcccccagctgggttgtgctccactgtgacggtggcccggggggaggatgccagcagcctgcctatggctccagctgtgctgtggcccagcagcatggcctgcatctggaaggacacaggttgccagagcccctggcacaactctagcatatctgtgagcagctgttccctgtagccactgcccagcacctcctcaggccagcctggtgccacagtcacgtgggggaagacctcagccacagctgtaagcagctctctgccagccacatggccggggaccgaaaaactcccgtgggagattttggccccaacccacacaggccaatgcaagaggccaaggctggagaggcgtgccagcaaggccagggatggccggagggctgcgggctccgctatttgcaaatggatgccccagtgtccgggatgtgtggccagctgctgcaggcaggactccagcgtcaggatgttgccacttggagtatgaacaatgggcacggggttttcagccacagttccctcgaggccagtgttcagcaggatcatgccttctgtgtctggaagaggcggcagaggcaacagtgtttaggatttgggttatcataaggtgttaagagtcccttgttaaaggggcagtgggagttatggggtcatcaaggaccttgcctctctggaatctgtcaacccagttttgggctccaggtggatgggttgctttataaatgtgcctggtgcatgagaaactcttgtttcagctcttggcctttacccatgactcagcctgggggctggtgccggccttgcctgcagcaatgtagctgaggactggtctgaaggccaggagccctgtgctcttgacatcactgtactccctctccctccccgcaaccctgccccaccttgcatccagggtatggtgtaaataaacctgtgttgccatggcaaaaaaaaaaa

SEQ ID NO: 59021 - DNA, 1080 bp, Homo sapiens
tcactttaaacttttggaaattttaatgttaaaatcaaattatgtttttctgggctcttaaacacctctgctgtttatgtagttatgcagcatgtcaagaagcatcttaagacagaaagtttcaaataggtcacattcttttggtctttctactcaatttctctctgtgatcaacagcaggctgatgcctctgtttgacacccccttctgttaagatattattgcaattagatatatttacaagaagactccccccgacggcagtggggaaggtgggagctcctcttcggcaatccactcactagttttggtttcgggatatgaaggccaggactcgtcgaataccattcagtctgtcctttaaggacctcattgctaggaaggggagctgagctcggctttccaagggaagaactgctaacatccaccagcaccaggctgggccattcgggttcatctgaggatcggcgtctttctccggcatgggaccaaagtgattgagtatccgattctttagggataatttgagcgaatgaaaccacaatgacgcttgctgatagacacagttatgtaatcccatgagctcagcacaatcctctccctgaaccttttggtcttcaatgtattcaatgtcggctgtgttgtagccatcccgctggctctgatggagcaccctgaagcgcctcttgcctatgctgtcaaccactgagcggccatcagcaaagaattgaacatttctgatctctaggatgcagccatattctgcaaaccctttgacaggatctccaaggcacatgccaaactgtctcgtgcctgtctcaatgcatctacgaatcatcaggcggtaacaaggctcaaagatgtgcaggggacaaggaacggtgggataggccatagtacacacgaaaataggcacattcttattaaggttagaaagttcttccatttcctcttcataaagcttccttcgttccttcagttcttctggaaggaatttagctatgagctcctccattattacatttttgctgtattttcttgatgccaagcactgtgaaagaccgtctttgcacaatggac

SEQ ID NO: 59022 - DNA, 4698 bp, Homo sapiens
ttttttttttttctcattactcatgattttttttaatttaacatatatagtacatgtaaacaactggcataaaattcataaaaatacaatactcctatgcaatatcactttattcctgatacatactttcattttctcattaatatcactggcctattttaacactatattttttttgccaagcatttttagagggcttatctttttaaaggaaatacaggcccccaactttgttttcggaaaatgttgtaggcaataggctattttggatcggcttctttggccccatccttaattttcctcatactaaaggcaaaaatatttggtaaatggctaacaatatgcaaaaacactgaacctttaatactgttttgtacgccctatgggaacctgctaccaatcctgcattgcccatcaaagggtggtgggatgctcccacagtggcttggggctgcggaggctgtgggccacgggctggcatagggggggggaccttcaggcctctggctccaaactggctcccctaatatatagccatattttgctgggggttacattcataaacactgctacaaaaggatccttctggaaaaagctaatttatattacttttaatggttcccagcaaatgaagcagttataatagtatttttaatgcttttttcctatacagaatttctacttattacatgtgaacttctttggaaggaaattactgggggtgagaaaaatataaaataaatgtaaaagtataatttttaaaaattgtaactgctggatgtacacaatcagccacactcaggtgagcaacaatcacagataagcagcgcgcacctccctctccctgctcatgtcaactcccatcctcagcctcaagtgtccaccgcccattttcctggactgttgtgcatcatcgctcaaatgttgcttttaatccacaaatcaagggctgcttccctattttctaaaactagcaaaagcctaagaaataaaaacagtcaaccagcaaatgagaaacagtggccacaaatctgaagaacgctgccagagtccctctcctgggctgcctccagggaaggagcatccctgggagctgcggctctaggcgctggcacaagactggggggcggtgcttctctgagggcacactcctcagcctttgcagctgacttatgtcagcaagctgctgcttccccgggaccaggcctgcccttgggctctggtaagaaggtagaaagggaacagcggcttccaggagtgggcaccagaaaccatgcctgaggactaaggtctgaaggacaatccacaatgaggttaatctgcctgtggttaagaaagagaagctgtataattaaatgtgtagtctgtcagccatagtcacgctttgcttagaatttaaaaccctaaaaccttttctcagagctatgaggtttcatcgttttgaagaatctcatttcacacaaattaacttctaagaaacaaaaattcatacaaggaattcaaagaaggtgtagaaatttttcaaaataaaaataaataggaagaaaaaaactaaagaggaggacgaaatatacttattccttatactgaaatgatggtttttagaaccaaaattataacataaggcttaaggctttgtcttattaaagacaggcaatcttaaaagtaaaatataaaaactccatttatcattattctttacatttttgacagcaaaattagtcatgttttattgtatcttaatagtaaaagaaaaattaccatgtactacagtctactgttccactataaatgatgtctaatcaaatatacattagtttctagatgcactatatttggggttgttcaaaatagtttttcttaaaactataattaaacatgaaaaaactttaaagtggtttaaaggtattaaaatataaacatttgaataatgctaaaaatgagaaaaatacagttaccattaattttttttaaaaccaagaataagtacttgataagcaactaaatgagtaaacagtacttatttgacagaaaatatggggaagaggagaagagagagagcaagagagagagagaaagagacacgataatgccatatggctggaagttaagggaatttcctaaccacaaggtccaagagtttggattaataatgggcaggaaaagcttcattaacaagagaacagagaacaaaaagcgcacaaggaagtaaaacaaacagatagttctatatagcaaacactccatgtctgccccatctactgtaactcaagttgatgacaggggctgacatgaccgaagaacttacaatcactgaaatgtccaaaagacaagagcaagaggcagaaaaaagaagcaaggggcattaatagttcttacactataaaatcagcccctacattgtcagaattgtcctgtattttcatgtcatccttgtcacaacccactgtgttttctttatacaggtagctttgctcactttagcacaaatattaaagtcaagtacaagcatatactcatttgcatagcaaattttaaagggtgcattgaaatagtaaccaattgataaaggtgtaagtcatttttataattagaaggacattcaaattgaccaaataaaacgttttctatttgaaaacagttacctataaaagtttttgggatatgaacaacacatgacttagcaaaacattaaaaccattacagatgtagttctccgtaggcagcaggtcatgtagcagtcattcttttacaacttctaggactttgtaaacactgttctggaatacagtggtgaagtgaggtttggaatccttcaccaagaggttacataagggagttttcccagcattggcaggatcttctacatcccaaatttcaggcatactgcaaccaggcttggatcttcttacacaccatgactcttctagaatgtaatagttcacttttaactttatcagttctcgcttcacttcttcggctgctttccgactatacattgagtatactatttttgttctggctctcaagcctgcgtcttcataatgtggatgattcacaatgggccgaagtgcagagagcttaacacttgccatcgtgggcatggcacccgcaaacactgcatctggtttagtactatatttgatccattctataagttcttcttggggcaaattgctgaactcccctacaatattccactgggtttgcagatttgctgaaccttgtattgacattgctgctaatatagcaaacacaatagcaccaggatgtactttgcaaaagagccatccaaatagctgtcttgagcagatcagtgatgccataacacacatgtgtggtgtcaagaagagttttagtctcataattaaaataccaagggctgtatatgctaacaattgcaatgcatggtaaaccagctctccatgatcaaactggtgttttcttacatgtgtctgttgtttagctaagacaccccacatatcactaataatctttctaacaatagcaacaaacactacaagaacaactggaagcaataatgtctttgtgtatctcagtggagtctctttttccataaagtcaaactccgctgcacaggtatacaataaagtatcaaaatccttataactaaagaattttgatgttagtaagttgccaatatgagcgtcatttgcaataccaaaaattttagatgtcaagtatttaagtatgacagttccaaataaccaaaaacatccttgaataacccataaactaagttcagatacatttattttcaggaaatgtggtttcattgccagaataccccaaataattaccaaagaagaagcataataagaagttaataacattgagttcccaaacatcaaaacaaaacaaagtgcaagagaaatcatgtgtatataaatgatcttccgtaatttacatatatcaatgtacccgacaacatatactgcaaataatgatgcaatctgagtaagaagtacaaactgagcaaactgccaaggaagcatgaaaaatacattggaaatgcagagtgcaatcaagcttcctctataaagttttgtagccctgagaatatgagtcactagcaacatctgaagaacaagaaatggatatgagaagctttcacggagaggtggtgtccacattacacgggtacactctccatgattgaaaaagaagcacaacactgtaaccaggcctcctaatcggctgccacttaaatatgtgccatatatgaagaataatgccatcattagtccatttaaaataaaaattacagcaacatagaagcaagcaggatctcccaatccttcacagctttcagtaggactgagtccttctcctatggtaaccgtccaacatatcttggtttgaataccaatcaagtccattattttggtataaatccggtaccaactggccaaaattacctcagggtaaagattgaatctttttaatgtattaatgacaagggggtattcagtcagtttatcattcataatcatccatactccattcaaaaatgagggtgcttccacaatagtcttgaaataggaataatatagtcccatttcagtgcgaaaagccatctactatgtttattatttatcttctgtcttccctctttcccccactctgttagaatgtagtaatatgaatgctggtgtattccacatgccttgacagttg

SEQ ID NO: 59023 - DNA, 449 bp, Homo sapiens
cggacgcgtgggcggacgcgtgggtagcgccatttttttggaaacctctgcgccatgagagccaagtggaggaagaagcgaatgcgcaggctgaagcgcaaaagaagaaagatgaggcagaggtccaagtaaaccgctagcttgttgcaccgtggaggccacaggagcagaaacatggaatgccagacgctggggatgctggtacaagttgtgggactgcatgctactgtctagagcttgtctcaatggatctagaacttcatcgccctctgatcgccgatcacctctgagacccaccttgctcataaacaaaatgcccatgttggtcctctgccctggacctgtgacattctggactatttctgtgtttatttgtggccgagtgtaacaaccatataataaatcacctcttccgctgttttagctgaagaattaaatcaaaaaaaaaa

SEQ ID NO: 59024 - DNA, 1649 bp, Homo sapiens
ctattttgtttcgtctggtactcttgtctctcgtttatttgcttaactctgtagccacagaagaaaggaaaccagctgaagttcttattgtcgagggacaacagtatgcagttgttggaaccgtattgctgttaataagaattatccttgaatattgccagggtgtggataacatcccatctgttactactgacatgcttactcgtctgtcagatttattgaagtacttcaattcaagaagttgccagttagttcttggagctggtgcactgcaagttgttggactaaaaacgataactacaaaaaatttggctctttcttcacgatgtttgcagttaattgtgcactacattcctgtgatccgggctcattttgaagctcgactaccacctaagcaatatagcatgcttaggcattttgatcatatcactaaggactaccatgatcacatagctgaaatatcagctaagcttgtagcgataatggatagcttatttgacaagctgttatctaagtatgaagtgaaggctcctgttccttctgcctgtttcaggaatatttgtaagcaaatgacaaaaatgcacgaagctatatttgatctccttccagaagaacaaacacagatgttatttttaagaattaatgcaagttataaactccacttgaaaaagcagttatctcacttaaatgtgataaatgatggaggacctcaaaatgggttggtcacagcagatgtagctttttacactggaaatcttcaagccttaaaaggccttaaagatttggacctaaatatggccgaaatttgggagcagaagaggtgatgtcatcctggaaaactgggtagttcatctgaccatgggatgtgtttgttatgaagaaaatctggatgcctgtgattcgagaattgaacctgaaacccaaagtgaactggggtgggggaagggaaaaaggaaagtatcaagtgttgggaaactggattcagtgggatctacaaggaatgtcatttttgtgcatcctacagtgaggagtaactgatcaggtgtctataacatttttcattctctctggaaacagactcaggtttctttggaccaaatccaaaagaacacatagctgtaacacagctgtagttgactagaatgctctgtatactttatattaaaaaatgctttgcatttcttccagtgcaatgaaattcatatggtgtcccaccttatttaatgatggtacaatttaaaatcttagtcaacttctgtagaaagttttctctatgaaagtaaagctgtttgaaaaattattatttttttacagatctttctataaaaaataaacatcttttgattgcttggatttaggaattcaatttttgtttcagtgaccaatgtcaagttgcaggctttgtgtgttgcatatttaatatttctactaccaccgtatgtcaactgggtaaagccttccagagctctctaaatacctgaaagacttaagcctttttttaagtaattaatacttaaaaaaaaaagatcctggcatctatttatgcaactaaatacttttcagaaatggtatataaaaggctacagtttaatatctgtatttttataaaagtatgatgaagggtttggggtgtttttatttgtagcatg

SEQ ID NO: 59025 - DNA, 1671 bp, Homo sapiens
cgtagcgcccgagtgtcggggggcttacccttttcgggccatgatgccgggaaccgcgctgaaggcggtgctgctggccgtgctgctggtggggctgcagaccgcgacgggtcgtctgctgagtgggcagccagtctgccggggagggacacagaggccttgttataaagtcatttacttccatgatacttctcgaagactgaactttgaggaagccaaagaagcctgcaggagggatggaggccagctagtcagcatcgagtctgaagatgaacagaaactgatagaaaagttcattgaaaacctcttgccatctgatggtgacttctggattgggctcaggaggcgtgaggagaaacaaagcaatagcacagcctgccaggacctttatgcttggactgatggcagcatatcacaatttaggaactggtatgtggatgagccgtcctgcggcagcgaggtctgcgtggtcatgtaccatcagccatcggcacccgctggcatcggaggcccctacatgttccagtggaatgatgaccggtgcaacatgaagaacaatttcatttgcaaatattctgatgagaaaccagcagttccttctagagaagctgaaggtgaggaaacagagctgacaacacctgtacttccagaagaaacacaggaagaagatgccaaaaaaacatttaaagaaagtagagaagctgccttgaatctggcctacatcctaatccccagcattccccttctcctcctccttgtggtcaccacagttgtatgttgggtttggatctgtagaaaaagaaaacgggagcagccagaccctagcacaaagaagcaacacaccatctggccctctcctcaccagggaaacagcccggacctagaggtctacaatgtcataagaaaacaaagcgaagctgacttagctgagacccggccagacctgaagaatatttcattccgagtgtgttcgggagaagccactcccgatgacatgtcttgtgactatgacaacatggctgtgaacccatcagaaagtgggtttgtgactctggtgagcgtggagagtggatttgtgaccaatgacatttatgagttctccccagaccaaatggggaggagtaaggagtctggatgggtggaaaatgaaatatatggttattaggacatataaaaaactgaaactgacaacaatggaaaagaaatgataagcaaaatcctcttattttctataaggaaaatacacagaaggtctatgaacaagcttagatcaggtcctgtggatgagcatgtggtccccacgacctcctgttggacccccacgttttggctgtatcctttatcccagccagtcatccagctcgaccttatgagaaggtaccttgcccaggtctggcacatagtagagtctcaataaatgtcacttggttggttgtatctaacttttaagggacagagctttacctggcagtgataaagatgggctgtggagcttggaaaaccacctctgttttccttgctctatacagcagcacatattatcatacagacagaaaatccagaatcttttcaaagcccacatatggtagcacaggttggcctgtgcatcggcaattctcatatctgtttttttcaaagaataaaatcaaataaagagcaggaaaaaaaaaa

SEQ ID NO: 59026 - DNA, 2177 bp, Homo sapiens
ttttttttttttctcaaatgacttagatttaatcatcggaagcaaactaaatggaaaccttacaatagagaagaattacatgtcagtgtcttttggaaaactgagctgggacagaaagggactgggggctgccccccaacctgatcccttctgaacaaagacgtccacagtgttcctggcactctggctcaggaaaaggggagactctgctggttctgtgcattgaagtagccttgcctagcactcactcctggccagcatcaggagccccgccttgccggctctggtcatcgcctttctttttgtggcctgaaacgatgtcatcaattcgcagtagcagaactgccgtctccactgctgtcttataagtctgcagcttcacagccaatggctcccatatgcccagttccttcatgtccaccaaagtacccgtctcaccatttacaccccaggtctcacagttctcctgggtgtgcttggcccgaagggaggtaagtagacggatggtgctggccccacagttctggatcagggtacgaggaatgacctctagggcctgggcaacagccctgtatggccattgttccacaccagtcatggccttggatttttctgtcaaggcatgggccacagccatctcggaggccccaccccctggcaccagctgagggtccaggagaacattgcgacacacttgcatggcatcctggaggttgcgttctacttccgagagaatctctttgctagccccccggaggagaatggtgcaggccttggggtctttgcagtcagtgatgaaagtaaagtattcatctccaattttcttgatttccaacaggcctgctcctgttccaacatcatcttctctcagttcctctggtcggctgactatccgggccccacaggctctagcaatgcgattattgtctgtcttccggactctgcggatggctgtgatattggcccgcataaggtagtgctgagctaaatctgagatgcccttttcagtgatgaccacatcgggcttcagttggataatgtcctcacagagctgctggatgtactcttcctccatctggagaattcgggtgaagtcctcctctcgtgtaatctcaatgtcagtctggctttctcctttcttgtattccagagaagaatccagcagcacaatgcgagggttcttgatatagcgccgcatacgtggatgggtcacatccttgttaatcatgactccacgcaagacacaggagtcttcaatgatgcctccaggtatcttttccactcttgcatatttttttacgtcaatctctttccgaccattctcctcaaactgtaccatcttgacagcatccagggcaatgttgcaagccaaagatgaccaccgactgatggctttggtagtaatagagctgttgatgatgttcagcatcatatcactgtcactgatgtcgactgggatacttattttctttagggtgctgatcatatcatccaatgccttgcggtaagcactgatcaccactgttgggtgcatctgctgctccaggaagtgctcagctacagacagcatttcccctgcaagaataattactgatgtggtcccatctccaacctcttcatcctgggtccggctaatttcgatcatggacttggccgctggatgctggacttgaatctctcgaagaatggcattgccatcattggtcatcacaatgcctcccattgggtccaaaagcatcttcatcatggacttgggtcccaaacatgttcggatgatatctgcaatagtcttggcagcattgatgtttccagattgaacttttcttccggattcacgctttgtgttctggctgagcacgagcactggacttggccgctggatgctggacttgaatctctcgaagaatggcattgccatcattggtcatcacaatgcctcccattgggtccaaaagcatcttcatcatggacttgggtcccaaacatgttcggatgatatcttggcagcattgatgtttccagattgaacttttcttccggattcacgctttgtgttctggctgagcacgagcactggacgatggcccatcatggcgacgcgatgcagagccgggtacccagagctgggggaaccggcagaaccttctggagagagaaccagacagaagcccagaaaa

SEQ ID NO: 59027 - DNA, 1463 bp, Homo sapiens
ttttttttttttcacagccaattttcacactgttgtttcacattctcacagccctcagcacaggtcacgtcccagcccagctctgggactttggttcagggctcagagcctctggtctgggctgatcgaaaacctcctttgaccctgtggcagcaggcggaccttggctcttctcgtccttacccagagctcagggcagtgccccgtgcagtcgccccacttccacgaaggcctccacgcagcggtcaatgtcttcctcgctatgcactgctgagatctgtacccggatccgggccttgcccttggggaccacggggtagctgaacccgatgacaaagatgcctctcttcagcatgtcatccgccatgcgagaggccagccgggcatcacccagcatcacagggcagatggggtgactggctcccgagatagtgaagccagcagcttccatcttactacggaacctctgggtcttggcagccatagactggacaatggtgttactccccatcagcagatctagggccttggaggcgcagccaacgacagcaggtggcagactgttggagaagaggtatggccgggcgcgctgccgcagcagggacaccaggggcccaggccctgtcgtgtagccccctgatgctccacccagggccttccccagggtggagttgatgatggtgacctggtccatcacacccagcagctcatctgtgccccgtcctgtgggccccaggaagccagtggcatggcattcatccatgaagaccagggcaccatatctagaggcgaggcagcagatctcctgcaggggtgcgatgtcgccatccatggaaaaggccccatcagtggccaccaggcgcagccgatgcttctgggcctcctgcagcttggcttctaggtcggccatgtccaggtggcgatagcggtacttgtgggccttgcacagccggatgccgtcgatgatggaggcatggttcagctcgtccgacaggactgcgtcctctggggtcagcagggcctcaaagaggccggcgttggcgtcataacagctgggatagaggatggcatcctcccgctggtggaagcgggctatttttgcttctagattcttgtggatgctctgggttccacagataaagcggacagagctgaggccagctccaaactcctccagagcctgcagacctgcctggatcacctcagggtggctgctcaggcccaggtagttgttggcacagaagttaaggattcctccggagacgccgtccacgcggatgtgcggcccctgacgggacgtgatgacccgctcactcttccaagtgccagctccgcagatgccttccagctccccctccagaatgccacgcagctgggccagcgctgactgtgcgcggcggccgcggggcacccagaagagtgcggcgcgccaggcgttcccaggccacatcgctcggcacgag

SEQ ID NO: 59028 - DNA, 859 bp, Homo sapiens
ggaattcccgggagcctccccaggccggccctgggccttcccccaggaagagccccacggccagctccttcctgttcccctggcggcccctcgcttcttccttctggatgggggcccagggggcccaggagagtataaaggcgatgtggagggtgcccggcacaaccagacgcccagtcacaggcgagagccctgggatgcaccggccagaggccatgctgctgctgctcacgcttgccctcctggggggccccacctgggcagggaagatgtatggccctggaggaggcaagtatttcagcaccactgaagactacgaccatgaaatcacagggctgcgggtgtctgtaggtcttctcctggtgaaaagtgtccaggtgaaacttggagactcctgggacgtgaaactgggagccttaggtgggaatacccaggaagtcaccctgcagccaggcgaatacatcacaaaagtctttgtcgccttccaagctttcctccggggtatggtcatgtacaccagcaaggaccgctatttctattttgggaagcttgatggccagatctcctctgcctaccccagccaagaggggcaggtgctggtgggcatctatggccagtatcaactccttggcatcaagagcattggctttgaatggaattatccactagaggagccgaccactgagccaccagttaatctcacatactcagcaaactcacccgtgggtcgctagggtggggtatggggccatccgagctgaggccatctgggtggtggtggctgatggtactggagtaactgagtcgggacgctgaatctgaatccaccaataaataaaggttctgcagaaaaaaaaaa

SEQ ID NO: 59029 - DNA, 2210 bp, Homo sapiens
tctctagggtggctagagcgtcctcccgcgctcagtcgcgctgcaggtgacggcgcccggaggctgtcgggaagtaggcggggtgacgtgtggttgacgagctcggcggcgggtttgctgagatctgtggccggcggcagctggtgcggggggcagctgagagcgagaggtggatcggggcggtgtgtggccagggccatgacgggcaatgccggggagtggtgcctcatggaaagcgaccccggggtcttcaccgagctcattaaaggattcggttgccgaggagcccaagtagaagaaatatggagtttagagcctgagaattttgaaaaattaaagccagttcatgggttaatttttcttttcaagtggcagccaggagaagaaccagcaggctctgtggttcaggactcccgacttgacacgatattttttgctaagcaggtaattaataatgcttgtgctactcaagccatagtgagtgtgttactgaactgtacccaccaggatgtccatttaggcgagacattatcagagtttaaagaattttcacaaagttttgatgcagctatgaaaggcttggcactgagcaattcagatgtgattcgacaagtacacaacagtttcgccagacagcaaatgtttgaatttgatacgaagacatcagcaaaagaagaagatgcttttcactttgtcagttatgttcctgttaatgggagactgtatgaattagatggattaagagaaggaccgattgatttaggtgcatgcaatcaagatgattggatcagtgcagtaaggcctgtcatagaaaaaaggatacaaaagtacagtgaaggtgaaattcgatttaatttaatggccattgtgtctgacagaaaaatgatatatgagcagaagatagcagagttacaaagacaacttgcagaggaggaacccatggatacagatcaaggtaatagtatgttaagtgctattcagtcagaagttgccaaaaatcagatgcttattgaagaagaagtacagaaattaaaaagatacaagattgagaatatcagaaggaagcataattatctgcctttcattatggaattgttaaagactttagcagaacaccagcagttaataccactagtagaaaaggcaaaagaaaaacagaacgcaaagaaagctcaggaaaccaaatgaagatgttttcagatatgtacacatttctgcttctgcacatattttcatggaaaccattatgtataaagaacttagagcaacatcctaattggctcagtgcacgtttggcaatagtgccagcctgtcttgtctttaatgcatggattcataaacttcttccctacctgcatcatgtgcatgtagtgcatattaaatgaaagtgatattaagaatgctttcccaaattccattatttgacattgagtctgacaactgttagttttctggttgtctaactaccatatgaagctagaaaatgcacaaacgatattccttatctgtaatttaaatacttaaaatttgcaattgtcagatcttgattaaactggttgtcttatttcttctcatcattaacggaaaaaaatcagtatttctatctttgatatctaagtgttttgaggattttaaaactgaattttatctgctataccagttatttgagaaagtatgattttaatgtaaatcatttaaaaaggacaaaagtataatttccagtgattttcactgctgtcagtagaaaagtaataaacatctcaattttattttagtaaattttcttcaagtgtttggggttatttgtttatgtattagagaattgtttcaggaaggtctgagtattatgcttcaaagcaaaatttcaggttaagaagaaattgtaaatcttaaagaatgttggtgttactctcaatggaatattgtttcaagcttgtaagctgtgtataaaaaaaactggaggtctgacagttcatgttatctgcttttttaaaaagatggtagtggtgatgggggtctttctatgccaatttgaataaatttcgtacagcctgcagttttcaagagccatatgtaatttgctcacaattgatttttaaaaattgatttgggagttgctttgtaataatcttctgcttctaatcttcctttgcaagtcagactttaaaagaagactttataaagcttttttttttaaaggaagcaacctt

SEQ ID NO: 59030 - DNA, 2875 bp, Homo sapiens
aagagcttctcggctctaggctctggagtcccgggagcagtgaggggccacccggggcacaggaaagggccgctaggggagggccgggtgcactcggggtgtctgggccgcgggtctgagggatgaggaggggccatggccagcgacggggccaggaagcaattctggaagcgcagcaacagcaagctcccgggcagcatccagcacgtgtatggtgcccagcaccccccctttgatccactgttacatggcactttgctcaggtccacggccaagatgccgaccacaccagtgaaggccaagagggtcagcaccttccaggagtttgagagcaataccagcgatgcctgggacgctggggaggacgacgatgagctcctggccatggcggcggagagcctgaactccgaggtggtcatggagacggccaaccgtgtgctgcgtaaccacagccagcggcaggggcggcccacgctgcaggaggggccagggcttcagcagaagcccaggcccgaggcagagccgccctcaccccccagcggcgacctccggctggtgaagtcggtcagtgagagccacacgtcctgtcctgcagaaagtgccagcgatgccgcccctctgcagaggtcccagtctctcccacactcggccaccgtcacgctgggtggcacatctgaccccagcactctcagcagctcagcgctgagcgaaagagaggcctcccggctcgacaagttcaagcagctgcttgccggccccaacacggaccttgaggaattacggaggttgagctggtccggaatccctaagccagtgcgtccaatgacgtggaagctcctctcaggttaccttcccgccaatgtagaccggagaccagccactctccagagaaaacaaaaagaatattttgcatttattgagcactattacgattctaggaacgacgaagttcaccaggacacatacaggcagatccacatagacatccctcgcatgagccctgaagcgttgatcctgcagcccaaggtgacggagatttttgaaaggatcttgttcatatgggcgatccgccacccagccagtggatacgttcagggtataaatgatctcgtcactcctttctttgtggtcttcatttgtgaatacatagaggcagaggaggtggacacggtggacgtctccggcgtgcccgcagaggtgctgtgcaacatcgaggccgacacctactggtgcatgagcaagctgctggatggcattcaggacaactacacctttgcccaacctgggattcaaatgaaagtgaaaatgttagaagaactcgtgagccggattgatgagcaagtgcaccggcacctggaccaacacgaagtgagatacctgcagtttgccttccgctggatgaacaacctgctgatgagggaggtgcccctgcgttgtaccatccgcctgtgggacacctaccagtctgaaccggacggcttttctcatttccacttgtacgtgtgcgctgcttttctcgtgagatggaggaaggaaatactagaagaaaaagattttcaagagctgctgctcttcctccagaacctgcccacagcccactgggatgatgaggacatcagcctgttgctggccgaggcctaccgcctcaagtttgcttttgccgacgcccccaatcactacaagaaatgagcccaggcccacccgcagctggcctcactgtcccgggtggcgcgccccacctgcctggctggtggtaggcccctgtgagctggtcccgggctgctaaaaggccttgtgaggtggccccaccctccaggggagctggtgaagatgggccacagacctggtctagggctgacaaagacagggacagcctttgttttctgagataccaaagagagccaggggagggccccgggttcggcggccagaggcaggtcaggggtcccctctccctctccctgcaatgtccttgccaaatgactgcctcgtgctgcccctagtccggggcagcctaggaggccgaccctctttggagtcctgctgtctgggtgccagggccggaacgaggtagtggccatctcatacctactctgaaatgcaaaacttctattctgttgagtgaaagaataaaatgtagacaaaatctagaccgagacgttgcgctgacccggggtctctgtgccgcgaggtcccctcacagctgtatttcactgctgctggccctttccctccgtgtgttttcctgcttgcttggtttaaacgtggctgggaagctgaaggctggagtccaagccgtgagcccgccgagtgcctgggaggccgtgggaccaaaggctgggagcagagggaggcctcgccatcgccttactttccaccttgaacctcttttacaagagagaaacccccacctccctgaggtccagggccaagtggccccgccacgcaggtaggcgccggcctcagccagagcccctggaggcccacccaggctgtcgggccatgttgggctggcagacgggcagggggtcgcgtccctgtcatcaaagccctgaaccacagtgctcttctcaccgcagcctggaagcggaatgagcttttggagacttcctgggacttgctgtccttgtccaggtctgccaggtgtaggggaggtgtgactggttccatcatggaccggttcctccgtggaccggttccgccatggaccggttccgccatggaccactcctgccctggaccggttctgccgtggactggttcccgccgtggaccagttcccgctgtatactggttctgccctggactggttcccgctgtggactggttccttggggctctaagtgcggaagggcccagagctggtccctgccca

SEQ ID NO: 59031 - DNA, 3245 bp, Homo sapiens
cacttactcctccccagcaagagctaacagccctccttgggtgtgcactttctcctcccctgaggcacctcgcgcattctgccgcctacctatcaatcatcgtgctccgctgtccagatggctggccaagggggcggggccgtcgtgtgacgtttgcagcccgccggccaggaagccgcgagatgcttgacgagcgaagcgcgtgacagaagagcggttggccaacgcagtggcggcagtcggtgtaaacaaggcctcgcgccgctgcgggtcctgcgaccgctcctggctggtgggtggtctcgcgtggggcggttaccgccggcttcagtgggaggtgcttctcggcttcctccccctcatggcgtacacacccccggcgcaccacgtgggcgtgaggcgaggaaggaggggtgttaggccaaattctattttcattggctgtcactgctgccggcctttgtaagggggcgctctgattggtcgataaggtgggggcgtcgagggtctttgagtcctaaggcttctaattggttagatgagataagctagtgaagcgctttcttccgagagggatttcgattggtcggtcagagaggttacctggaaatccaacaccgcccaacacccctcccgctccccagtccggggacttcgataggattggagaaggtttgtgttcccgacgccttggtagttggcataggctaaagaaaagggatctcagccccgaggaagggtcaccctcctagagatagctactaccccgtctcaggagaccctggtatttctagagcacgctttgctttcaccaaacccaaggaggtgacaggaggagcccccgcacaggacctaagaatgctgtgaccagaagatgggatcgcggaacagcagcagtgcaggatccgggtccggagacccctccgagggcttgccccgaagaggggctggcctgcgtcggagtgaggaagaggaagaagaggatgaagatgtggatctggcccaggtactggcctatctcctccgcagaggccaagtgaggttggtgcagggaggaggtgcagcaaatttacaattcattcaggccctcttggactcagaggaagagaatgacagagcttgggatggtcgtcttggggatcgatacaacccacctgtggatgctacccctgacacccgggagctggaattcaatgagatcaagacacaagtggaactggccacagggcagctggggcttaggcgggccgcccagaagcacagctttcctcgaatgttgcaccagagagaacggggcctctgccatcggggaagcttctcccttggagaacagtctcgagtgatatctcacttcttgcccaatgatctgggcttcactgatagctactctcagaaggctttctgtggcatctacagcaaagatggtcaaatattcatgtctgcttgccaagaccagacaatccgactctatgactgccgatatggccgtttccgtaaattcaagagcatcaaggcccgcgacgtaggctggagcgtcttggatgtggccttcacccctgatgggaaccacttcctctactctagctggtctgattacattcatatctgcaatatctatggtgagggagatacacacactgccctggatctcaggccagatgagcgtcgctttgctgtcttctccattgctgtctcctcagatggacgagaagtactaggaggggccaatgatggctgcctgtatgtctttgaccgagaacagaaccggcgcacccttcagattgagtcccatgaggatgatgtgaatgcagtggcctttgctgatataagctcccaaatcctgttctctgggggagatgatgccatctgcaaagtgtgggatcgacgcaccatgcgggaggatgaccccaagcctgtgggtgcactggctggacaccaggatggcatcaccttcattgacagcaagggtgatgcccggtatctgatctccaactctaaagaccagaccatcaaactctgggatatccgacgcttttccagccgggaaggcatggaagcttcacgccaggctgccacacagcaaaactgggactatcggtggcagcaagtgcccaaaaaagcctggcggaagctgaagctcccaggggacagctccttgatgacctaccggggccacggagtgctgcacaccctcatccgctgccggttctcccccattcatagcactggccagcagttcatctacagtggctgctccactggcaaagtggttgtgtacgaccttctaagtggccacattgtgaagaagctgaccaaccacaaggcctgtgtgcgtgacgtcagttggcacccctttgaagagaagattgtcagcagttcgtgggacgggaacctgcgtctgtggcagtaccgccaggctgagtacttccaggatgacatgccagaatctgaggaatgtgccagcgcccctgccccagtgccccaatcctctacacccttttcctcaccccagtagatccaacctccagccccatatagggtgaacctcttgataagctctctgcctcctcctccctttctcccttgtggggaatgtttggaggaatcactggcatttgatggggaataacataagcctgggctctgagcctcagctgagccctggaagattctccccatggggcagagtggtctccttacgtgctcacacccagtcagcttgggtccctatctctggccagagtttggcaggactgccattatctggggtgtggcctctgccagcaagagaagtgtcctgggtgtttttaatcatgtttgaatgttaggggttggatcctagagtagatgcctgaggccacatctgaacagacctgtcagccaggcctgccaggtcttcacgttgaggattcaactggccaatcacaggacaggtgtcctggcctttcttcctgaggtctctaggggaggggcatgggtaagggtgtttcctcagcaccctcctggggtggggattatgtctgctgtcatgtctgggtctttagggtaggacaggctgtggtatgagaggcaggagtctccacaaggcttcatgtggccccttatagggcaggccctgccctctgggaaggtcccttcatgctggaggcacacagctttaaggaagtaggttgaagtaggactccttcgtcctctcactggctttggctccctcaataaactgtgtgggaacctgaaaaaaaaaa

SEQ ID NO: 59032 - DNA, 996 bp, Homo sapiens
tggaccagcgtggtggaattccgtcgctgccgctgccgctgccgccgtcgttgttgttgtgctcggtgcgctgagctccgcggctccgcgagccggttccgtccccttcccgccgccgccatgaagtggatgttcaaggaggaccactcgctggaacacagatgcgtggagtccgcgaagattcgagcgaaatatcccgacagggttccggtgattgtggaaaaggtctcaggctctcagattgttgacattgacaaacggaagtacttggttccatctgatatcactgtggctcagttcatgtggatcatcaggaaaaggatccagcttccttctgaaaaggcgatcttcctgtttgtggataagacagtcccacagtccagcctaactatgggacagctttacgagaaggaaaaagatgaagatggattcttatatgtggcctacagcggagagaacacttttggcttctgagggccattgctgggctaggtgcaccgtaactgcttgtgtatcttgtaaatagccagccattttcagttattataccagaacctcttcacatagacctattagtgcatttgtaactggatttatttcttaatatattggaaggttttgtttccttagactagtaaattatcatacagagttttattttgagtttttctttttgtgcattgtcctcatgcctgtattctccaggaaacttgtccttctggaaatcatattgaatgatatttctatatcgaagtgaggtaggtgcggtattaaagtgaaagggaaggtgatgcatttattctgggttatgcttgaagtgttagatggctaagtattaaaattatccaaattaaatccttagcagtcagaacacttgcttcactagaatatgccaactgccaatcatgttggactgagctaatttgttcctctttctgaaactattaaggtaaataattaacaataaaaattctcttataaaggccaaaaaaaaaa

SEQ ID NO: 59033 - DNA, 822 bp, Homo sapiens
tacgcagccttcggtgcagtcgtcactcgtgtctcgctaccagctccccgctgccctgcgctcggcgggctggcatccggcccgggggaaagcggaccagcccttctgcaggtctgcggggccaagtgtcccggcggcgcacctcgtggcgagaatcgggagaaggaggagactacaaggataggcccaggagtaatggagtccaaagagaaacgagcagtaaacagtctcagcatggaaaatgccaaccaagaaaatgaagaaaaggagcaagttgctaataaaggggagcccttggccctccctttggatgctggtgaatactgtgtgcctagaggaaatcgtaggcggttccgcgttaggcagcccatcctgcagtatagatgggatatgatgcataggcttggagaaccacaggcaaggatgagagaagagaatatggaaaggattggggaggaggtgagacagctgatggaaaagctgagggaaaagcagttgagtcatagtctgcgggcagtcagcactgacccccctcaccatgaccatcatgatgagttttgccttatgccctgaatcctgatggtttccctaaagttattacggaaacagacccctgctttcgaatttacatgttcatgatgtgcccttgttgtaaacctttacctgtcacttgtttacgtgggtctcctattaccagcttctaattgaatattgtgtttttgaaccagtctgtaagatttttgttagcagaagaattttacctattgcatggaaagatgctcattatagtgaagttaataaagcacctttaaaaagcaaaaa

SEQ ID NO: 59034 - DNA, 1964 bp, Homo sapiens
tttcgtccgtcgggcagcagcggggctgtctatcccggctgaggacccgcggccagtgcgggtggctggctttgccattagcgggggcctttcctgaggacggcgtacggagtgtggggaatgaaggatggcagcatgccgtgcattaaaagctgttttggtagatctcagtggcacacttcacattgaagatgcagctgtgccaggcgcacaggaagctcttaaaaggttacgtggtgcttctgtaatcattaggtttgtgaccaatacaaccaaagagagcaagcaagacctgttagaaaggttgagaaaattggaatttgatatctctgaagatgaaatattcacatctctgactgcagccagaagtttactagagcggaaacaagtcagacccatgctgctagttgatgatcgggcactacctgatttcaaaggaatacaaacaagtgatcctaatgctgtggtcatgggattggcaccagaacattttcattatcaaattctgaatcaagcattccggttactcctggatggagcacctctgatagcaatccacaaagccaggtattacaagaggaaagatggcttagccctggggcctggaccatttgtgactgctttagagtatgccacagataccaaagccacagtcgtggggaaaccagagaagacgttctttttggaagcattgcggggcactggctgtgaacctgaggaggctgtcatgataggagatgattgcagggatgatgttggtggggctcaagatgtcggcatgctgggcatcttagtaaagactgggaaatatcgagcatcagatgaagaaaaaattaatccacctccttacttaacttgtgagagtttccctcatgctgtggaccacattctgcagcacctattgtgaagcaatgtgtgcatctgaagcaacttgaaatgcagcttcttattgtctggaatgaatcccttaccaactcagtgccagcatcggtagacaccagtcagtgctgatcgctttttaaccctcttttgttgtgcattaattagaaagaaaggtattgaattgcggctagccagtaagccttgctaatctcttttattttgtaactgaagatgagacccaaagaaagggaaagctgagattttgtgccattccttttaaaatattcatcaggttaggtggggctgtgggggaaaagctactacagggaagagtgttctctgctgtctcttcactggaaaacagggaggggggatttcagactgtgaagaaagttgaatggtggtttttaaattataaagtaatgtattaaaaggtgcattaggctgtagttctaatattgagttcaactgtgaaatccatcagatgtgccaaatggagaagacagaaagcaacaaagtgaattgttctttagcccaagtggtacagtgaatttgctttaacagatgttgaaaactaaattttctactgtattcccagcacgggtgacttctttttctcttcattagccagagatgactaatttaaatttagaaccagattttaatttaaattaatatttccattaataacctattcattgcagatacctattatactgtgtaacagttgttttggaaattttatgtaaaattaaaactatcagtattttacagatgttttaattagacattgttattaacaggaacagtgcagaaactagaatcaagccttataatatcttatagaccatgcatttttgaagttagtgtccactagggtcctattaactgtacatttgcaagatttcattatttttgcctctgacactatgggaaaaattttttagaagctattgggacagattcaagcttttatgcacttggttactacagctgtaaaatgaaatctcgtcttgtagcatggattattcttctcatgttaaacccaccaaaataaaggggactaaataggtaaaaaaaaa

SEQ ID NO: 59035 - DNA, 1987 bp, Homo sapiens
atcaagcaggggcagggctggcgctgcggcgggagatgctgtcgggccgcggcggcgcttggcagccaggagctctgcattgaaggcactggggtaaagtgaatgccgaagacagaagatttggatgatacaccactgactttctttgtttggaatacacgttatgaaccctttctggagcatgtctacaagctctgtacgcaaacgatctgaaggtgaagagaagacattaacaggggacgtgaaaaccagtcctccacgaactgcaccaaagaaacagctgccttctattcccaaaaatgctttgcccataactaagcctacatctcctgccccagcagcacagtcaacaaatggcacgcatgcgtcctatggacccttctacctggaatactctcttcttgcagaatttaccttggttgtgaagcagaagctaccaggcgtctatgtgcagccatcttatcgctctgcattaatgtggtttggagtaatattcatacggcatggactttaccaagatggcgtatttaagtttacagtttacatccctgataactatccagatggtgactgtccacgcttggtgttcgatattcctgtctttcacccgctagttgatcccacctcaggtgagctggatgtgaagagagcatttgcaaaatggaggcggaaccataatcatatttggcaggtattaatgtatgcaaggagagttttctacaagattgatacagcaagccccctgaacccagaggctgcagtactgtatgaaaaagatattcagctttttaaaagtaaagttgttgacagtgttaaggtgtgcactgctcgtttgtttgaccaacctaaaatagaagacccctatgcaattagcttttctccatggaatccttctgtacatgatgaagccagagaaaagatgctgactcagaaaaagaagcctgaagaacagcacaataaaagtgttcatgttgctggcctgtcatgggtaaagcctggctcagtacagcctttcagtaaagaagagaaaacagtggcgacttaagagatggtgaatctggtgcaccatgcactttcctgctagactctggcctagttcaagctgaccaatggcagaggactgcctgaagagtaaaactgtgtgaacaatgactgactgccagtgttttccatgtatgcataggttctaacagcagggtttggaaacctgtctctaagtaatgcattacttctgtcagaagtgtcttagggtggttatctagttcagtactccaaattattggggaccttgaggcttaagtaagtatttttctgaatataatgctaaaggtaagttgcattcatttaaactaatagagcagacagaattcagcactacttaatagtttataaatcagtggtttcagttgtatatatgttaggaaatggagaggtatagagagagcaggttccatagctcagcacttttaagtggaagatcatttgaatctcagtcttcagcctgcactgatttgtagcctgcactgtcttactgatttacaaactgaaatcactgagaaatgtctttagttcagtgagaagaaaccagaacacttgttcctagtgttgtgttgttttttttaagcaaattacttacttactgtatttttatggcaggagggagaaaaagtgttacaacggtttctaatgaagtccggtatttaaatgataaatgactaatgtgtttagtagagacaaaagaaaccaataaatgattgttctttgccatttatgcaggaaactacccttttctcaatataaccaaacaaaggctaatttataaatgctttattgaaaaatacacttatcttcatataaaattacagtagcagtatcttgagaagttttataaatatttttgcagaacactattctaattgaacaatgtaagttccatatttctctcagcaatatgaaagtacctagtaacttttgttatactgattca

SEQ ID NO: 59036 - DNA, 3119 bp, Homo sapiens
cggtctgtaattcccggctcgacgatttcgtcgcgctggcccgggctctcccgcccgcgcttcatggctgcacacgagtgggactggttccaacgcgaggagctcatcgggcagattagcgacatccgagtgcagaacctgcaagttgagagggaaaatgtgcagaagaggacctttacacgatggataaatctacatctagaaaagtgcaacccacctctagaagttaaagatttattcgtcgatatacaagatggcaaaatcctaatggctttgttagaagtcctgtctgggcggaatctgctgcacgaatacaaatcctcgtcgcatcgtatttttcggttgaacaacatagcgaaagcacttaagtttttggaagatagcaatgtaaaactggttagcattgatgcagcagaaatagcagatggcaacccttctttggttcttgggctgatatggaacataatcctcttcttccagattaaggagctcacaggcaacctcagcagaaactctccatcttccagcttggcccctggctcagggggcacagactcagactcatccttcccacccacacccactgcagagaggagcgtggcaatatcggtgaaagaccagaggaaggctatcaaggccctgttggcgtgggtgcagaggaaaacgagaaagtatggcgtggcggtgcaggactttgcgggcagttggaggagtgggctggctttcctggcggtgatcaaggccattgaccccagcctggtggacatgaaacaggccctggaaaattccacacgagaaaatctagagaaggctttcagcatcgcacaggatgccctgcacatccccaggctcctggagccagaagacatcatggttgacacaccagacgagcagtctatcatgacttacgtggcacagtttctagaacgttttccggagttggaagccgaagatattttcgattcagataaagaagttcctatcgaatccacttttgttcgcatcaaagaaactccttctgaacaggagagcaaagtcttcgttctgactgaaaatggggagcgtacctacactgttaaccatgaaaccagccacccaccaccctccaaagtctttgtctgtgacaagcccgagagcatgaaggaattccgcctggatggtgtttccagccatgcgctgtcagacagctccaccgagttcatgcaccagattattgaccaggtcctgcaagggggcccaggtaagaccagcgacatcagtgagccatctccagaatcctccattttatcatccagaaaggagaacgggaggtccaactctttgccgatcaagaaaacagttcactttgaggctgacacctacaaggatcctttctgcagtaagaacctgtccctttgctttgaagggagcccaagagtggcaaaggaatcattgaggcaggatggacatgtcttggcagttgaggttgctgaggaaaaggaacagaaacaggaatcctcgaagattccagaatcctcctctgacaaggtcgctggtgacatttttttggtggagggcacaaacaataattctcagtcttcttcctgtaatggtgctttagagagtacagcccgccacgatgaagaaagtcactctctttcacccccaggagaaaatactgtgatggccgattccttccagatcaaggttaacctgatgactgtagaagctttagaggagggagactattttgaagccatcccattaaaagcctcaaaatttaacagcgacctaatagattttgcttctaccagccaggctttcaacaaagttccttcacctcatgagacaaaacctgacgaggatgctgaggcttttgagaatcatgctgaaaaactaggtaaaaggagtattaaatctgctcacaaaaagaaggattcgccagagcctcaagttaagatggacaaacatgaacctcatcaggactccggagaagaagctgaaggctgtccttcagccccagaagagacaccagtggataaaaagccagaggtgcatgaaaaggccaagagaaagtccacccgtcctcattatgaggaagagggagaagacgatgacctccagggtgtgggcgaggaattatcttccagccccccaagcagctgtgtcagcttggagacccttgggagtcacagcgaagaaggcctggatttcaagccctccccacccctctcaaaggtttccgtcattccccacgacctcttctatttcccacactatgaggttcccctggctgcagttttggaggcttatgtagaagacccggaggatctaaaaaatgaagaaatggatctcgaagagccagagggctatatgccagacctggactccagggaggaggaggccgatggctctcagagcagctccagttcctcggtgccaggagagagcctccccagtgccagcgaccaggtgctgtatctcagcaggggtggtgtgggtaccacaccagcctcagaacccgctccactggccccccatgaggaccaccagcaaagggagaccaaagagaatgaccccatggacagccatcagtcccaggaatccccaaacctggaaaacatagcaaaccccctagaagaaaatgtaacgaaagaatcaatcagtagtaaaaaaaaggaaaaaaggaaacatgtggaccacgtagaaagttcactatttgtagcaccaggaagtgttcaatcctcagatgacctagaagaagacagtagcgactacagcattccttccaggactagtcacagtgactccagcatttaccttcgacgacatactcataggtcttcggaatcggatcattttagcctatgttcagttgaggaacgcagcagatctggatgacagaagaaaccgaatattaaccaggaaggccaacagctcaggagaagccatgtcactggggagccacagcccgcagagtgactccctgacacagcttgtccagcagccggatatgatgtattttattctcttcctgtggctcctggtgtactgcttgctgctcttcccacaactggatgttagcaggctctgatacgtgtgtctggataataaaaaagacaggaccctgaaaaaaaaaa

SEQ ID NO: 59037 - DNA, 2434 bp, Homo sapiens
caagctccagagactacaataattcacttgccctaggttccaaagccagcaagtggaaaacggagactggaattccgcccgcaggactccaaagcctgtgcagcaacaccccactcccccggcaggatcaccagcaggacgcgcgggagccagaaagtaagatccgtacctccaaggctcccatgggcccaagcctccgcatcaacagactgggagggattacgtggggtcccagggccggctctgaggcgggaaaactttctggaggcggcggcctcaggccggagcgggcgcacaccgactggaggggtcggattcagggatgtgggtggaccgcatttccccatcttccccgccgcgcacttcctctggtgcaatctccacaccccgcgccggcccgcctgcaacgcgccctggcactcaccggtgggcgaaatttccccgcctccacgtgagagccagctccgccgtgacccggaagtccacttcgagtcgccggcccaccctctcgggttccggcttcttccgggtcgcggccttccggcgaacgcggttaccgtggaaaccgcggccatggcggcaccgcggcaaatccccagccacatagtgcgcctcaagcccagctgctctacagactcgtcgttcacccggacgccggtgcccaccgtgtctctcgcgtcccgcgagctgcctgtctcgtcgtggcaggtcaccgagccgtcaagcaagaatctgtgggagcagatctgcaaggagtatgaagctgagcagcctccctttccagaaggatataaagtcaaacaggagcctgtgattacggttgcgccagtagaggaaatgctttttcatggcttcagtgcagagcactattttccggtttcccatttcaccatgatctcacgtacaccctgtcctcaagataaatcggaaacaatcaacccaaaaacatgttctcccaaagaatatttggaaactttcatctttcctgttctgcttcccggaatggctagcctgcttcaccaagcgaagaaagaaaaatgttttgaggttcgctgtgatcctgagattcaagaactgcgtcagtggcagaagaaacttcgcgaggccaagcacattcaccagcaagtcaaaattttctgggccaagcaagaacaaaaagtgaaatgcaaaatggaggacgatgcagtacctgcagccaagatgaaaattccatcatcttaaccatagctaagacgtatctttgcccattcgagcacaagttaccttgtgcaaggaaaatgtccaaatgatgctctctctcttgtgatttctttaacaagacttggaacatgtgcaaatggaatcttttctgtacaagataggattcattgcaaacaagctttaatgcaaatagtttagaaaagaaaggaccagtcttcactttctgcattatccccacattttattcattcatccagattacttcttcagtgcctcaggagtattcttctacaccagctgctgttaaaatgtacaatgaactctagtcccaaggaatacagaagtgctcttattaccagttttcccacttgtggccgcctttgcaaagatccatattctaatttaagtccccaacctctgaatttggttttaagtttacctagtgactgactactctctttataaaaaagaccttatacttaatgatcatttccaaaggagaccactccttaacttttactgcaaacccaacaagatgagacacttaaaccccagacagatgtaacaaaggatttttgttgtctaagtcccaaagtattatatagaaagttcctgcttttatgggtaaacttattaccttaatatgttctgtggtttgctgttaaccaagattctcccatttaaaatgccacagaccgaccctcaaggcagatccgaaagcctagtagttagttgcactgggttgttttgacaagctaccacacgtcttaagtaaatagtaaagcctttatttttgtgttaagaacagcattttgaaaataaaacctatctgcccatgctttacagccttttaaatttgtaatatttatatagtcgtttatggtacatattgattgtcttgaaatttctttaacttcttttttataagtatgcaacagtcagccgggggaagataaaggtacattataaaacacacattaatgcatttaataaatatatattatctatcaaaagtgagccttagctcttcatcagttaataaaaagcacctgctgagaactcctgtaagctggtatcatcattgcatcattggattataaaagccacaatgctccctttcaacttggggtttgggcctgaggcgttccaactcagcccttgggcaaccgagaccaccacccgagttcacccttgtttcagtgggtcctgacgggcatctgggctaaaaaaaaaa

SEQ ID NO: 59038 - DNA, 844 bp, Homo sapiens
cggacgcgtgggggcggccgacttagccggtggcacgacagttgctgcagggaatcttttaaacgagagcgagaaggactgcgggcaggaccggcgggctcctggggttcagccgtgccgcctcgttacgatgaccagtgtggttaagacagtgtatagcctgcagcccccctctgcgctgagcggcggccagccggcagacacacaaactcgggccacttctaagagtctcttacctgttaggtccaaagaagtcgatgtttccaaacagcttcattcaggaggtccagagaatgatgttacaaaaatcaccaaactgagacgagagaatgggcaaatgaaagctactgacactgccaccagaaggaatgtcagaaaaggctacaaaccactgagtaagcaaaaatcagaggaagagctcaaggacaagaaccagctgttagaagccgtcaacaagcagttgcaccagaagttgactgaaactcagggagagctgaaggacctgacccaaaaggtagagctgctggagaagtttcgggacaactgtttggcaattttggagagcaagggccttgatccagctttaggcggtgagaccctggcatcacgacaagaatccactactgatcacatggactctatgttgctgttagaaactttgcaagaggagctgaagctttttaacgaaacagccaaaaagcagatggaggagttacaggccttaaaggtaaagctggagatgaaagaggaaagagtccgattcctagaacagcaaaccttatgtaacaatcaagtaaatgatttaacaacagcccttaaggaaatggagcagctattagaaatg

SEQ ID NO: 59039 - DNA, 3318 bp, Homo sapiens
tccaatacatttaatttttcactaggacagattccccggaataattctgttgagtcaaaggaaatgagtagttttggctcctgcttataaattattataatggttgtaatccattcctagagttgacttccatgtggtgggccaaataggaactttagaatcattttgtaaagttctaaaaaactatctgagttttgattgattttattttgaaattagcagtaaattatcagaacaatgctcacattgtatttatgataaccactcactcagtaactaaatgtatctttcatagattgatgaactcccagagggcgctgtgaagcctccagcaaacaagtatcctatcttcttttttggcacccatgaaactgcatttctaggtcccaaagacctttttccatataaggagtacaaagacaagtttggaaagtcaaacaaacggaaaggatttaacgaaggattgtgggaaatagaaaataacccaggagtaaagtttactggctaccaggcaattcagcaacagagctcttcagaaactgagggagaaggtggaaatactgcagatgcaagcagtgaggaagaaggtgatagagtagaagaagatggaaaaggcaaaagaaagaatgaaaaagcaggctcaaaacggaaaaagtcatatacttcaaagaaatcctctaaacagtcccggaaatctccaggagatgaagatgacaaagactgcaaagaagaggaaaacaaaagcagctctgagggtggagatgcgggcaacgacacaagaaacacaacttcagacttgcagaaaaccagtgaagggacctaactaccataatgaatgctgcatattaagagaaaccacaagaaggttatatgtttggttgtctaatattcttggatttgatatgaaccaacacatagtccttgttgtcattgacagaaccccagtttgtatgtacattattcatattcctctctgttgtgtttcggggggaaaagacattttagccttttttaaaagttactgatttaatttcatgttatttggttgcatgaagttgcccttaaccactaaggattatcaagatttttgcgcagacttatacatgtctaggatccttttatcaaggcagttatgatcatcgttttcctgccttgaccccaccatcatcaaacactcagttaaatataaattaacattttttagatgaccactcaacataatgcttaagaatggaatttcctctctgtgacagaacccaggaattaattcctaaatacataacgttggtatattgaagacgaaattaaaattgtccttcagttttgaggccatgtgtaaagtttaaccatattgtaaaatatctattccgtattagaaatagctagttgacagcttatacttctcaaaattcatattgttatgtacacaaactaagtttctatatgtgaagttagtgagtctttttgtgttactccaaaataaaggcaatgatttatttttttcccagtgccaatacaattttgagctaagcactcaaggtggatactttacattttaaagctggaatcagcaacagccctatgggaaaccagacaaagcattgacttttaaatgtagacttttaaaataaactgttttcttttggaactacaattagaatagttaatattcatccttaaaccattattatgtgtacattattgttgctattgtgataatagagaattttatttatttttatgccagcttatattgtgagaacacatttagtcagtttgggttttatcaatcctgttaatgcttgtccttggaacatctttcgcgtattcacggtttgtagttgaaaagtttactgtaaaaaaatcaaaaacaaaaaaaatgtattgtttttacagaataaatttattggaatgtgtactgggagtaagatttgaggttgtaagcaaactaagttagtgtaatttggcttcatatatgtaacgtgaggtattaatgtaattcatatattaaagcaaaaattgttcacagcaagctgacaatagaatcaagtgcaggtgaggggttttctttttctttcttttttttttttaaacactttttgggttttaaattatttgaaaacactgtaggggatgatggggagatgactacatgatttgcttacacttacatatttaccaccccagtggaccctaaattttgtaatttgatattatccatgcattgatttgtatcccattttcttttggtttttttgatgaggagctaataaaaacatgaggaaaatgtgaggcagaccctaaaagcctagggccgttaataatgatgatggtgatgatggcagctaagggtatgaaagcaccagtccatttatcattccagggcacagtgaggaggtggctgtttggatttttggtgtgtttctttcatttagtgaatactgattttctctagtatactcaacatacaatcccaaacatgaaaagttcataaaaagatagtagggatgtcgatctaatacttcttccttaaaaggtcctttttaattttgaatatttgaatgtattttttaattaatgaaatttaattcatcaaaagacctcttcattgctcacactgaaacataaggggaatgtagatggcattttgaattggaatatacaactcacaaattttctttaaaagcgttttatgtgtatatatgaaatgtttcaaatttaataagatttgtctttataagaggccaaaaataattttattaaaaatatacacagaaatacaatagaaatatttccagccaccaataaaacaaatgttcattaaggatagagataaagttactgatccctatttagctgtttaaattcacacaaaaaaatttagtaaaagtaattttcttgaaacagcagcaaataataaactttccttgggaaaacatttttcaaacaacatttaaaaatattctgatgatttgccttttatattgagtttaataatgaagcatattcatcttatttgcaaaagttactcctccagtctgcattcactgttttgaattttttaatatgcacaggccatattctcttttgaatagtttcatttcatgctcactactgttggcactaaattgtaattttttacacttataattattttatatgtcaaacaatattgagatggatgatcaagtttattcacaaatgattttgaatatatttcttgagaaacagtttgtttaaagaaatatattcacaaatgattttgcggacgcgtgggtcgacccgagggatctcaaccggtacctctaaggtatctag

SEQ ID NO: 59040 - DNA, 1612 bp, Homo sapiens
cgacagaatggggcctctctggaagttgtcccgggtgttcgccgctggagcccgggtcgagaggacgaggtgccgctgcctggagaatcctccgctgccgtcggctcccggagcccagccctttcctaacccaacccaacctagcccagtcccagccgccagcgcctgtccctgtcacggaccccagcgttaccatgcatcctgccgtcttcctatccttacccgacctcagatgctcccttctgctcctggtaacttgggtttttactcctgtaacaactgaaataacaagtcttgatacagagaatatagatgaaattttaaacaatgctgatgttgctttagtaaatttttatgctgactggtgtcgtttcagtcagatgttgcatccaatttttgaggaagcttccgatgtcattaaggaagaatttccaaatgaaaatcaagtagtgtttgccagagttgattgtgatcagcactctgacatagcccagagatacaggataagcaaatacccaaccctcaaattgtttcgtaatgggatgatgatgaagagagaatacaggggtcagcgatcagtgaaagcattggcagattacatcaggcaacaaaaaagtgaccccattcaagaaattcgggacttagcagaaatcaccactcttgatcgcagcaaaagaaatatcattggatattttgagcaaaaggactcggacaactatagagtttttgaacgagtagcgaatattttgcatgatgactgtgcctttctttctgcatttggggatgtttcaaaaccggaaagatatagtggcgacaacataatctacaaaccaccagggcattctgctccggatatggtgtacttgggagctatgacaaattttgatgtgacttacaattggattcaagataaatgtgttcctcttgtccgagaaataacatttgaaaatggagaggaattgacagaagaaggactgccttttctcatactctttcacatgaaagaagatacagaaagtttagaaatattccagaatgaagtagctcggcaattaataagtgaaaaaggtacaataaactttttacatgccgattgtgacaaatttagacatcctcttctgcacatacagaaaactccagcagattgtcctgtaatcgctattgacagctttaggcatatgtatgtgtttggagacttcaaagatgtattaattcctggaaaactcaagcaattcgtatttgacttacattctggaaaactgcacagagaattccatcatggacctgacccaactgatacagccccaggagagcaagcccaagatgtagcaagcagtccacctgagagctccttccagaaactagcacccagtgaatataggtatactctattgagggatcgagatgagctttaaaaacttgaaaaacagtttgtaagcctttcaacagcagcatcaacctacgtggtggaaatagtaaacctatattttcataattctatgtgtatttttattttgaataaacagaaagaaattttgggtttttaattttttttctccccgactcaaaatgccattggtcatttaatattagtagcctcttaaaaaaaaaa

SEQ ID NO: 59041 - DNA, 2992 bp, Homo sapiens
accgcctcgcgatttcgtcgcggctcggcgggcgggcagtgccggcgtccgcggctggaatggtgctggctgtgttggtcggtgcctgcgttctgaagcccgagaggagccacaatggagacgccgccgctgcctcccgcatgcacaaagcagggtcatcagaagcctctcgattcaaaagatgataataccgaaaaacactgcccagtgacagtgaatccttggcatatgaagaaagctttcaaagtcatgaacgaattaagaagtcaaaatttgctgtgcgatgtcacaattgtggcagaagacatggaaatttctgctcatagagtggtgctggccgcctgtagtccttattttcatgccatgtttacaggtgagatgagtgagagccgagcaaagagagttagaataaaagaggtagatggctggaccctgaggatgctaattgattatgtttacactgcagaaattcaggttacagaagaaaatgtacaggtacttctcccagcagctggtctcttacagttacaggatgtgaagaagacttgttgtgaatttttggaatcccagcttcaccctgtcaactgcttaggaatccgggcttttgctgatatgcatgcatgtaccgaccttctgaacaaggccaacacctatgcagagcaacattttgcagatgttgtacttagtgaagaatttctcaatcttggcatcgaacaagtgtgcagcttaatctcaagtgacaaacttaccatttcttcagaagagaaggtatttgaagcagtaatagcatgggtgaaccatgacaaggatgtgaggcaagagtttatggcccgactgatggaacatgtacggttacctttgcttcctcgggaatatttagttcagagggttgaagaggaagcattggtcaagaatagcagtgcttgcaaaaattacctgattgaagcaatgaagtaccatttgctgccaacagagcagcgtatattaatgaagagtgtccggacccggctgaggacacccatgaaccttcccaaattgatggtggtggttgggggccaagcaccaaaggctatccggagtgcggaatgctatgactttaaagaacaaaggtggcaccaagtagcagagttgccttccaggaggtgcagagcaggcatggtctacttggctggacttgtttttgctgttggtggctttaatggctcattaagagttcgcactgtagattcctacgaccctgtgaaggaccagtggaccagcgttgctaacatgagagaccggagaagcactttgggagctgctgtgttaaatggattattatacgctgtgggaggctttgatgggagtacaggtttgtcatctgtggaagcatacaacataaagtctaatgagtggtttcatgtagctcccatgaatacaaggaggagcagtgttggtgtgggtgttgttggaggtttgctctatgctgtaggaggttatgatggagcatcacgtcagtatcttagcacagtagaatgctataatgctacaacaaatgagtggacctatatagcagaaatgagcaccaggcggagtggagcaggtgttggtgtgttaaacaatttattgtatgctgtaggaggtcatgatggccctttagtacgaaaaagtgttgaagtatatgatcccaccactaacgcatggagacaggttgcagatatgaacatgtgcagaagaaatgcaggagtttgtgcagttaatggtctgttatatgttgttggaggggatgatggttcctgtaacttggcgtcagtagaatattataacccaacaaccgataaatggacagttgtgtcatcgtgtatgagcacagggagaagttatgcaggggtcacagttattgataaaccattatgagcctgaaggacattttcagcatatttatacatgagaaacagccttcaacaagtatttgtgaagtgactgagaatctagcacttctccacttgtagctgcactttaagtctcagcagaagatacgatcgtctgcctttataggcctcagatactgaagattatttttggtagaagcaccgtgtaggctttttctgcaatgagcagcagctgactgaattttcataagaaacttggactgcaggacttaatctgtagtctttagacaacagttgctttcataaagactagttcttatcaaccttgaatgactacagattattttgtgaaggaggatgaagtaatgtgtgttcttgtaaaattaaattttatctttatttcttctaaaaatctgtataccaggaactgaaaatctttgaacagatattaaaatctacgtaagtatacaaactagttgagggatacactgtttgcttttataaaataactttgattacatgaatataataaattatgtgcatataaatgtgtgtctatatgctttcctttaaatatgtttgaaaagatgtttgaaacttgattatactatttataattggcacagtactttgaattatgccagtactacattgtaaaacagagttgtattttttgatatttaacaatgcttaacactttaaatgccacttctgaggaatggacctggtgtaacacacttgaatatgtgtgatgccaaactttttaaaatacaatataaattatgcttatttattattttctttagtttaatcttggtcatgttttggtgtgtatttttaatttttttcttaaattaacactttggcatgaacattactgcaggtttttgatgaatataatgaatgtatggaattcaattgaatttgcatggtcttcggaattttttctgtgtgtataaatttagctgctattaacagaagagagaactttctgtgagtagccatgtgtgttgatcagatacagtttttctgagatcttcaattaatctcactttaaaaatgaccaaaacatgtctttcttgaattaactttgaataaaagtttgtatatcaaaaaaaaaa

SEQ ID NO: 59042 - DNA, 2366 bp, Homo sapiens
tatgggctacttgaacacaaggactgagatactgcaacagtccatctgataactgagatggctacaaagtgactaatgaatgggtagtgtctacagcacagatatgcagaaaaaagataaaaacctgattaatcttcttcaaagattattctgcaaaccagttcatcactgggcactttccaaatgagcatttttttctttttaatttcagcagggatctgtaaactattctttacctgtacatacagagatccaaggagaaacaatccaatcatttgcatacccagaaaaaatgagaacactgtttttgtagatgcatgtatcacacttattttgcatgtagtttaattggattgccaattttgttctttagaatttgggctctacaaaggttacatcctattaaaaaggctcaatatttacctgttcaagactacttttacatgtaattataacttgccataaatgaaaatctaagaagctcttgagtatggttatgacttttattaatcatatctgctgttattcccaaacttctcaatgttacatgaatactaacccttggttttatataaaatatggactaaagtaaattttacctacaggtgcctctctccttcattgggtgattaaaatttcacgtttgagactaaacttcattgaaactactgcaagcatgtgtatgatagaccaatttagcttagtatctggcattgtggccagaaaaaaaaaaaaatcggttcctacaaaatctcttgggcaacacttaagccattggaagaggcccacatgaatccaggtctactttcctttacaggtagattccagaacaacaacaaaaaatgtaagactacaagaaatgatttaatatgataaaactcccatttcaaaacccagttctaaaggatttactgactaatgctgattatttagtcatggaaaatgtctctcataaaagtgctcctaacaaaacatgatctacaataatttataaaatgtgaagggttgggatgtgcagactgattggtgcacgtcaggttgtttctcttaaataaggtataaaaaactatgatatcatagtcttttgactttattttctgagataaaaaagtataggcataggtgtttttaatagtcttcttgatgatatcctttagaataatctatcaaatggcttctttcatgtttcctgattatcagcattcatcagtgttactgtcagccttgattaagtggttgaaaatttcagagaagaataagcaacttctgtgaacctttccccaatccctgagaatcataatcattacagaaatattttatcctttcatcaaatatctctggaaagtagccgtgttcgttcattgttaatagggcaaggtgcagtgtcatagagggttaatccatgtaaattggcttccacccgtaaagaaattttctgaaaatcacgaatgtaagtcaggaaaaaaccaaagaaggaaaatgacatagaccattctgctgcagtagtgatcatgtgaagcacataacctttgtcctcggggttccaatggagtttctgttctaaatcagtcccaaaattgccactgtgcaaaactgatgagcaagtcagcatgctaagtgcacttactccacaccagataaccaacaacagtctgatccagaagacttgtttgccatggattttgggctgcatttggtaggaaaggatggtctgaacaaacatatataatgagcccataccaaaggtaagcacagctccacttacatgtgcagcaaaaagggttgttttctggaagtttgccacaatagaaagtcctaaacaactcagtattccaagtacaaggccagccttgtttaatttgatgataacgttctcttcaggactcagagcatgaacttgcttataacgaacataaatggtagcaatgcataaaactgccgcaatatttagcattgccccaaataagcatttttctggagctactgtaccagtgtcactgatataaggtaaagccgggtctatatggtggagtgttactgcagtaatgtatgaaaatatgaaagcagcagatgtccaaattacaagggctgaaggaaggaaactgaggccttgctgaaaccaccacatttctaacaggttttctgttttacaacttcacaaaatgttagtcttcagacctgctcatacctgcaccttttgtaaatccagaggaattaattagaccgctgattttctccggaagcgcgaagcactaggccgtttgaggatctccgctccgctttgcctgggaccaggaaaagacgcgagagacggaactcggcatcaggcactgcttggggcaggaggagagtaggggaaacttacc

SEQ ID NO: 59043 - DNA, 892 bp, Homo sapiens
ttttttttttttaaaatatatttgctttattatgtacacactatatttacatcacccaccctgaaaacagcaggttctggcttttccgtgaacccccagatgaatataaattggagcctctgagaacagttccttccccagagcggggagtgtgcacgtgtgtgtgtaaccttctgattccatgggacctggccagctcctctggagccacacagcacctccttgccttacaccctggctccagcttcactggtccgggggacgcctcagcctggggcagctgtgatgtaaaccagtcactccacctccatcttcctcttctgcaaagaatcgaggaagtcttgccactctgctgggtaaaagcgtttatagacgttgatcttactccgaatctgttttggggtatcttgatagtaattcttctcatcacgggccatggccttatagtcctccccgtggttctctaccatgtagcgtacatagtcaatgaggtcccgagacagagtatttcctttcttttctggaaggctggcttctgcctccaggtcattcagcacatagggcttccgtacaagctctttaggcctctcctctatgtccacctccatggccttcacctttctcttacggaggggcaccgccctgttggggtccacagccaaccccatctcggccaggttctgccgtaccgatttagcgtggtcccaggcatgtcggatgtgggagcattcgatccgcggcgctgccttccgtcgagcattccggttcagacgctttcggttgacactgtaaccaaacttctgcctccgggttttgcccttggccttgggcatcgcgctgaccaccgcaccagcagctcaaacacgctgcctctgtctctcagacctcgtgt

SEQ ID NO: 59044 - DNA, 1770 bp, Homo sapiens
  misc_feature (1)...(1770): n = a,t,c or g
ttttttttttttacctttaaagagaaatgtaaaactcagtttaatttcaagtttgtatagagaatgtatgccacagtttgtattttataaacacaacctatcttattataaatacaaaataagaaaaagtgatacgttagctgttatgaagggggaaaacattatataaacttcaaaaggctgctttctgcatctgcatctatgtaatttcatggttctctaccaatttcatttacagaaataatctctatagtcaaattattgttcactttcatgccccaacatgggaagtggtaggtgaatatctgtaggaatacaatttattgtctgctcctccactcagaagtagccctgtgtctgtccagtctacactcagaactttgtcttcatgagcagccagatcatagagaggagccttacaacttcttgtatcccacagcttaacaatgttatctaaagatcctgaaatcagctgctgttcatgggtaggagaccattttactgatgtcacccaaccagtatgtgacgttagggacagcgacaccaaagaaccatctttagttcggggatcccacagtctgatatgcctatctgtgcttccagatgctaaacgtttacaaagtggagaataggaaatacaattaaacactttatttcctgtcaaagttgacttaagactgccagactcaacatcccacactctaattgtatggtcccaagatgcactgcagatttcttcagcatctgaccacagaactgaggaaactgcctccatgtggccagagagggtcactatgggagtccttgttagtcccaactgttctgtcttctgtttctttcttggtcgatttgtggactcctccatttcatcttcttcatctgtagggactgtagaccagatctttagcatcttatcccaggagccactgcaaaatttagttcctgagccatcaacagctatagaatctacacttccagcatgacctctacagcagtgtagggctttcactttgtttctctctacattccactcccataagagaatagtctgatccatagaagcactcaataataagcaggacaaactatcttttttcacccaggccacatcttttacaacatccgtatgtcccacaattgtcattattgactttccttccaaggaccagatccgagaagtcttatcataagaaccagtcaagatccattcctctgcccctttaattgaactgatccagtcatcatggaacatgcattgctctggctggggtgcagtatacttctccacgtattctatttccacaacttcttctgatgagatgttctccatttccatgtgtttgtccaagggcattcgcagaaactggcccttaataaggaaatcaaactccacatgtttgtggaactcatttttgtcctttagtagtttattgatgatgttactaaggtcggcaatttcagaggcagcagggattgagaagggaacatcatctacggcatatttcttgttatcagtgtagaagcgtgtttggagctgagccatggcgaggagtacacacgacttgcccacggaaacgtacgggttagcagacccacaacacgaagctcctgccttttaagactacaaagaggcagctcaaaattagactgcacaggtaagcgaggaactgcagtctaagcctggactctgccttctgccctccggtctcctctgcagaaagcacgaggttgcccttctacagacgacgaaatgtggncctgcgcagcctc

SEQ ID NO: 59045 - DNA, 4504 bp, Homo sapiens
cccacgcgtccggtagaagcatcgaaagcgttggagaggtgttaccggaacggcggcgacaagggtgttcccgaactagagtggatagaaaatcaagtatattttaaaagaagggatgtgggatcaaggaggacagccttggcagcagtggcccttgaaccagcaacaatggatgcagtcattccagcaccaacaggatccaagccagattgattgggctgcattggcccaagcttggattgcccaaagagaagcttcaggacagcaaagcatggtagaacaaccaccaggaatgatgccaaatggacaagatatgtctacaatggaatctggtccaaacaatcatgggaatttccaaggggattcaaacttcaacagaatgtggcaaccagaatggggaatgcatcagcaacccccacacccccctccagatcagccatggatgccaccaacaccaggcccaatggacattgttcctccttctgaagacagcaacagtcaggacagtggggaatttgcccctgacaacaggcatatatttaaccagaacaatcacaactttggtggaccacccgataattttgcagtggggccagtgaaccagtttgactatcaggacctccaggacctccagcacctccccagaatcgaagagaaaggccatcatcattcagggatcgtcagcgttcacctattgcacttcctgtgaagcaggagcctccacaaattgacgcagtaaaacgcaggactcttcccgcttggattcgcgaaggtcttgaaaaaatggaacgtgaaaagcagaagaaattggagaaagaaagaatggaacaacaacgttcacaattgtccaaaaaagaaaaaaaggccacagaagatgctgaaggaggggatggccctcgtttacctcagagaagtaaatttgatagtgatgaggaagaagaagacactgaaaatgttgaggctgcaagtagtgggaaagtcaccagaagtccatccccagttcctcaagaagagcacagtgaccctgagatgactgaagaggagaaagagtatcaaatgatgttgctgacaaaaatgcttctaacagaaattctgctggatgtcacagatgaagaaatttattacgtagccaaagatgcacaccgcaaagcaacgaaagctcctgcaaaacagctggcacagtccagtgcactggcttccctcactggactcggtggactgggtggttatggatcaggagacagtgaagatgagaggagtgacagaggatctgagtcatctgacactgatgatgaagaattacggcatcgaatccggcaaaaacaggaagctttttggagaaaagaaaaagaacagcagctattacatgataaacagatggaagaagaaaagcagcaaacagaaagggttacaaaagagatgaatgaatttatccataaagagcaaaatagtttatcactactagaagcaagagaagcagacggtgatgtggttaatgaaaagaagagaactccaaatgaaaccacatcagttttagaaccaaaaaaagagcataaagaaaaagaaaaacaaggaaggagtaggtcgggaagttctagtagtggtagttccagtagcaatagcagaactagtagtactagtagtactgtctctagctcttcatacagttctagctcaggtagtagtcgtacttcttctcggtcttcttctcctaaaaggaaaaagagacacagtaggagtagatctccaacaatcaaagctagacgtagcaggagtagaagctattctcgcagaattaaaatagagagcaatagggctagggtaaagattagagatagaaggagatctaatagaaatagcattgaaagagaaagacgacgaaatcggagtccttcccgagagagacgtagaagtagaagtcgctcaagggatagacgaaccaatcgtgccagtcgcagtaggagtcgagataggcgtaaaattgatgatcaacgtggaaatcttagtgggaacagtcataagcataaaggtgaggctaaagaacaagagaggaaaaaggagaggagtcgaagtatagataaagataggaaaaagaaagacaaagaaagggaacgtgaacaggataaaagaaaagagaaacaaaaaagggaagaaaaagattttaagttcagtagtcaggatgatagattaaaaaggaaacgagaaagtgaaagaacattttctaggagtggttctatatctgttaaaatcataagacatgattctagacaggatagtaagaaaagtactaccaaagatagtaaaaaacattcaggctctgattctagtggaaggagcagttctgagtctccaggaagtagcaaagaaaagaaggctaagaagcctaaacatagtcgatcgcgatccgtggagaaatctcaaaggtctggtaagaaggcaagccgcaaacacaagtctaagtcccgatcaaggtagtatactttttaaagtattttgtctgatttttaaaaaaaattgactgaatttattcaaagttgaaagtgtcctttctctctctctttaataaactcagtttggtacttgataaataatcatagtcttaaatgttagaaatcctatataatattatttattaaaaattgcagatttttaatttaaaatacatttttatttttaaattttgtcttttcccttttttttcagatcaacaacccctccccgtcgtaaacgctgaggaatgatgtggcaagaatgccatgatgttctttaaaaaaattccatgagttttaagggcttgtctcattatagaggcacattgtggctgtgtaggtgaaaccagaatcttttttttttttaatctgtaaataggggtactttttccaatgctgctccaagttacttaataggatttctttgtattacgtttttttcaaaaaatatagtgcataataagactataaacatgccattctctttcagctgtaatgttcttaaaattattcttgaatgtactgtgatgtcaataaagctctttagttcatttttgttaaactcttgcaccttaattttatggttttaatctaaggaacgtacttttataaaaaggcagctggaattttgtataacaggttttaaaggtaccttctctcacctcccccaaagaaaatggtttttacttaatagtttgtcaaagtttgtaaattgtacccatggacttttgccagattccaactttaagggtatgaaagagggctagaaatagacctttacttttcatttggaagtatttgacaactttctaaacttttcttcctattttggggattttcaagtaatatattctctgtgtgtataacgtgtggttcactcctgtaaaatgaaattgctggaatcaatcaagccagtgcaccagtagagttatttgtaaggaacgattgtgtttgacagtaatagtcaagtctggaactatattctacagtcacccacttctgttttagaagcattttgaaacactttttggggttatagaaataagactcatgattcaatatatttatttatatttttaaagtataatatgacctcaaatcaatggaggaatgctgtattatgcaggtttgtgtcaatttcatgacattaaaattgtctgattttgtccgtttcttaaaattatgattagtgagtggtctaacagtttaaggcattgataacttacaagtagaatggggctctcaaagcattttaactcagttgctttagggtccatttttttatgtaatcacttactcagtgataaatgaatctctgaaaacaaatgcttttacattttaatttaaaaagaaaacaggtgcaggccacagaaaagttttaaagtatgccttcttaccagcaatagttcattttaaaaatcatgccagatttttgccaagatcagtgtttcctcaacatgaagatagaaatagatttgtatagtgtgctcttgtacctctacatagattattatataattttgagcagttacacatttatctaaaggaaataaatcaactgtgaataaatgcatgtttaccaaaatggctgtttacagtgcatttagttctgatatttataaagatgacatttcacagaataactttaaaatagtttgaaattctatatagtttagacatcgatcacatctggagacaaaataaaatgtgcaatattttttatgtaggcgagctaacacagtgtacctaattgcagaattatctgattaatttgtaatagataagttgtataacattttcatatcttaaaatgttttttagatcaatcttgaagtgaaatattttcaaaataaaattctacagaaaaactctgttggctatgatatgcacatttttgggcaagttatgaactagagccaaaagtagtatttgacagttttatttactctgccggaatttgcaagcttatcagttaagtctgtagttttttaaaaagccgtcatgatatttgtgag

SEQ ID NO: 59046 - DNA, 2731 bp, Homo sapiens
ccgaatcccgggcaccacgcgtccggcctcgcgctcctgctgatgcggtagctgcttttcgtcgactcttaccggttggctgggccagctgcgccgcggctcacagctgacgatgggggaccccagcaagcaggacatcttgaccatcttcaagcgcctccgctcggtgcccactaacaaggtgtgttttgattgtggtgccaaaaatcccagctgggcaagcataacctatggagtgttcctttgcattgattgctcagggtcccaccggtcacttggtgttcacttgagttttattcgatctacagagttggattccaactggtcatggtttcagttgcgatgcatgcaagtcggaggaaacgctagtgcatcttccttttttcatcaacatgggtgttccaccaatgacaccaatgccaagtacaacagtcgtgctgctcagctctatagggagaaaatcaaatcgctcgcctctcaagcaacacggaagcatggcactgatctgtggcttgatagttgtgtggttccacctttgtcccctccaccaaaggaggaagatttttttgcctctcacgtttctcctgaggtgagtgacacagcgtgggcatcagcaatagcagaaccatcttctttaacatcaaggcctgtggaaaccactttggaaaataatgaaggtggacaagagcaaggaccaagtgtggaaggtcttaatgtaccaacaaaggctactttagaggtatcctctatcataaaaaagaaaccaaatcaagctaaaaaaggccttggggccaaaaaaggaagtttgggagctcagaaactggcaaacacatgctttaatgaaattgaaaaacaagctcaagctgcggataaaatgaaggagcaggaagacctggccaaggtggtatctaaagaagaatcaattgtttcatcattacgattagcctataaggatcttgaaattcaaatgaagaaagacgaaaagatgaacattagtggcaaaaaaaatgttgactcagacagactcggcatgggatttggaaattgcagaagtgttatttcacattcagtgacttcagatatgcagaccatagagcaggaatcacccattatggcaaaaccaagaaaaaagtataatgatgacagtgacgattcatattttacttccagctcaaggtactttgacgagccagtggagttaaggagcagttctttctctagctgggatgacagttcagattcctattggaaaaaagagaccagcaaagatactgaaacagttctgaaaaccacaggctattcagacagacctactgctcgccgcaagccagattatgagccagttgaaaatacagatgaggcccagaagaagtttggcaatgtcaaggccatttcatcagatatgtattttggaagacaatcccaggctgattatgagaccagggcccgcctagagaggctgtcggcaagttcctccataagctcggctgatctgttcgaggagccgaggaagcagccagcagggaactacagcctgtccagtgtgctgcccaacgcccccgacatggcgcagttcaagcagggagtgagatcggttgctggaaaactctccgtctttgctaatggagtcgtgacttcaattcaggatcgctacggttcttaatactgaagtcatgatgtgtatttcctggagaaattcctctttaaatgaacaagtaaccacatctcaggcggcagtgaagtccagatagttttgcagattgttttgctactttttcatatggtatatgtttctgatttttaatatttcttttgagaaattctgagttctgatgtaggagctttcctgtgatttctgtttcacgttccttcctgtcacaccctcctttggcgtctctgtgtatatccttgctttattttcttggaacctttgatttcaacactgagggcctggagacctcggctcctcctgctcctgaaccaggaggcttcatgtgggggaggaggagaggtctccatgtgacacatgggctcagggctgccagaatcagcggatgctggatgggcctgcagaaacaacactcaccacacacacttccttcaaaagaccaaaagtgactggtgtctcgtgtgacagattgcttcatttatgtttctacatagtaaggtgactgccaaataatatttgaagtcatctgtctctttgtaaattattttatatgacctataaatttaaaaatgtttttcagtgagtgcttttaacaaacttaagcttctgccctgccaagggaattaatgttatcttgtgaaaggtgttgctgtttgaattgatgagaaatggaagatgagaactccctaagagttctcataataaatcatctcatcacaaatcaatacggtatacagagttaaagtggaatgaggtaagaagatacagctacagaaaatagttgcgtgtatgggagaacagtcattgtaattgggtagttttgttaataaatatttttaaatcttgcttttcagaaattaccgaatgtgtataaacaaataaagaaaaataatttagctgtgttttagacagcattagaatatattgttcagcacagtaaaatatatttgaaatttgataagccaaaaatgtggttttgaatgaatattttgtgaatctttcttaaaagctcaaatttgtagacttctaaatagaataaacacttgcagcagaaaaaaaaaa

SEQ ID NO: 59047 - DNA, 2981 bp, Homo sapiens
gcggccgccgcctctggccgccgccttcgccgcttcagacttcagaaccagcgtcgtcctcaaccacctggccgagaagtggtttccgggccagcgcgagcgggcccgggcggccggcaggctcggggagctactgcaccaaggggcgctaacgggaagccctggcggccgcctgcgaggcgctgcgagcagaaacccagtgacttgattgtaaaaatttacagagcggaatcatatgctggtctccaagagtttaaagcagccatagaagatttaaatgcagttctttttcaacttccagattggcctgaggtctacttcaggaaaggaaaagtactctggcgatgctggttttttaggtgatgccttacaactctttcttcagtgcttagcccttgatgaagattttgcacctgcaaagctgcaagtacaaaagattttatgtgatttattattacctgaaaacttaaaagaaggcctgaaggaatcttcctggagttcattaccatgtactaaaaacagaccttttgattttcattcagtgatggaagagtctcagtctctcaatgaacctagcccaaagcagagtgaagaaataccagaggtcacttcagagcctgtcaaaggaagcttaaaccgtgctcagtcagcacagtctataaattcaacagaaatgcctgccagagaggactgtttaaaaagagtgtcctcagaacctgttctgtcagttcaagaaaaaggtgttctgctgaaaagaaagttgtctcttttagaacaggatgtgattgtaaatgaagatggaagaaataagctgaaaaaacaaggagaaactcccaatgaagtctgtatgttttccttagcttatggtgatattccagaagaattaatcgatgtctcagatttcgagtgttctctctgcatgaggttgttttttgagccagtaacaaccccttgcggacattcgttctgtaagaattgtcttgagcgttgtttagatcatgcaccatattgtcctctttgcaaagaaagcttaaaagagtatctagcagataggaggtactgtgtcacacagctgttggaagaattaatagtgaagtatctgcctgatgaactgtctgagagaaaaaaaatatatgatgaagaaactgctgaactctcacacttgaccaagaatgttccaatatttgtttgcactatggcctaccccactgtgccttgccctctccatgtatttgagccaagatacagattgatgattcgaagaagtatacagactggaaccaaacagtttggcatgtgtgtcagtgatacacaaaatagttttgcagattatggttgtatgttacaaattagaaacgtgcatttcttaccggacggaaggtctgtggttgatacagttggaggaaagcggtttagggttttaaaaagaggaatgaaagatggatattgcactgccgacattgaatatctggaagatgtttaggttgagaatgaagatgagattaagaatctcagagagcttcatgatttggtttactctcaagcctgcagctggtttcagaatttaagagacagatttcgaagccaaattcttcagcatttcggatcaatgcccgagagggaggaaaaccttcaggcagcccctaatggacctgcatggtgttggtggcttcttgcagttctccctgtagacccacgataccagctgtcggttttgtcaatgaagtctttgaaagaacggttgaccaagatacagcatatactgacctatttttctagagaccaatctaagtaactaactctttggatctccctttaaagtgaccctaatctggctgcattgatggccagattgtctgctgcctttgcacatctagtgctggtttcagaaatttaatgaaacttttctttttccttcgacctcctgaatcatgtggttctgcaaatgaataccttcaactaggatttagaccactaagaacttgcacagaaaaacacgcattgaatgtgtgtcgaacctctacattgtgaagttgcactatgtaccatactctaaaatgaaataagaactctttatgtctgtgagagagtgtgtgtgtgtgtgtgcgtgcgtgtgtgcttgtgggggttgggtagtgtgtgtgtattttctctggctttaaaattttaaaacaaacaaacaaaaaagccatagagagcagaacttgccgagggtcatttattgcccaagtttacaagagtagcgatacaagtttttgcaaattgaatttgcctcagatatatctgtcctaatgcttatatttgcacaagtatgtaaaatatcgtgttgaggatcattctttgttggaaatactgctcttgctgaactgtcttgaccattgactatgacacagtttcttatttatgtaaatacttgcatcacagtggccgacaggcattggatgcagaacctagagccagttttcaggaacaattgtaaacctgacatggtactgtgcatctattcataaaacactcaaaactgtgaaaatatggtttacatttaattgtacataaaggtaaagggagaactcaattcagtaccagttagtttgtacattttagggggcttttcacattaactgcccatttgtgtaatttatagtttgacatgatgtgtttgttttaaaaaaaaatgcatagtataaacccattaaggatctgggaaaagagaagaagtttaatatagaactaagcttttaaagtttgtttttgtttttaattctggtctcggtgcaaatgttagttatgccttattcatatcacagttagatcaccatgctgcaacatggtttatattcatgctgccctagaaacttttgtaattatttgttgcaaatttgtgactgtccttattaactttcttttatgtaagtaatttgtaaaagtttcttaaaatttttgcttttgcttatttaattttgaataaaagctaaattcct

SEQ ID NO: 59048 - DNA, 1786 bp, Homo sapiens
ctgggggtcctggctgaactggtctggtgttaagggggccccctgacccccttgaagggggggctgggctgggtgagggggggtggccgacccccagccaggttcccaggcaggatgagctggggttggggtggctaggccgagggccttgggagctgggcagtctgggctgggctgggctgggcagggcgccacatggaagctggaggagcaacgggagcgctgggcgtggggtgcaaattgcccagtgccttctgtttcccaggcagctctgtggccatggatatgttccagaaggtagagaagatcggagagggcacctatggggtggtgtacaaggccaagaacagggagacagggcagctggtggccctgaagaagatcagactggatttggagatggagggggtcccaagcactgccatcagggagatctcgctgctcaaggaactgaagcaccccaacatcgtccgactgctggacgtggtgcacaacgagaggaagctctatctggtgtttgagttcctcagccaggacctgaagaagtacatggactccaccccaggctcagagctccccctgcacctcatcaagagctacctcttccagctgctgcagggggtgagtttctgccactcacatcgggtcatccaccgagacctgaagccccagaacctgctcatcaatgagttgggtgccatcaagctggctgacttcggcctggctcgcgccttcggggtgcccctgcgcacctacacccatgaggtggtgacactgtggtatcgcgcccccgagattctcttgggcagcaagttctataccacagctgtggatatctggagcattggttgcatctttgcagagatggtgactcgaaaagccctgtttcctggggactctgagattgaccagctctttcgtatctttcgtatgctggggacacccagcgaagacacatggcccggggtcacccagctgcctgactataagggcagcttccctaagtggaccaggaagggactggaagagattgtgcccaatctggagccagagggcagggacctgctcatgcaactcctgcagtatgaccccagccagcggatcacagccaagactgccctggcccacccgtacttctcatcccctgagccctccccagctgcccgccagtatgtgctgcagcgattccgccattgagaatgtcaaggccacactcagatcctttctcgagcagcagctgctgccccagctgcctcctacccattgccaagagaggatgcatctggggagagcaaagcactaaggaattcagcatcagcctgcagagggctgagtctgggttagtcctgcccgcaggttagcgagatcctgtgttgttttttgggttggacggtgccgtttcaaaatagaggcacagatgctccatgcacgaggggtccccgggcactggaacaagtgccaagttgaaggcagggggcctgccagagctgggtgtgggtattcaggccctcacctgccctgcctgcagggccagaccctgaggaaagggcgccccctgctggtctttttggatttaaaatgtttgggggaagagttgagttccagttcagtcccaagttaaacaggagggagtgagggagaggagagagggcgttccccggatcccaggagagctgggctatgactgcaataaggagttgttccttcacctgagatgtgcttcttttggttcatttctggcttgacaacaagaaataaacgtggtatgttcctgaaaaaaaaaaaa

SEQ ID NO: 59049 - DNA, 2747 bp, Homo sapiens
gaaattaaaatttttcaaagaacaaagcttcaatattggatactgaagagtatacatgaaagaaaattccttttgaagctattaaaccatttttttcctatgtgaaagttgaggacaatttatataactcactttttgtcatgtaaaaaaggttactcaagttgtactacccacataactgaaaatatctgccatttggccttatctgtgagatttgacactaagtttttgttagagatdtggaaattatactagtcctbtttaaggggtaaaaaattcaattcaatactgacaaacttttgcttgtagttttactgtacatttatttttaaagaaaaagaaaacaaaagccagacaaacccaagttgtccaggcaaataaactcaaatctttgtcacgtctgatattataatcttctatgtaagttttttaattaaagttatttctatatgccgtgtgttgcttgttattaaatgcgacgtattcatggcacaaagctttcccaagctgaataaaaacaaacattaacaaatttttaccttgtaatgcaggaagaaacccaagcaagctctagtctgtgcttaagtgttagcattcttattttttgaaccttatttctcaaaacttatagtagcctcaagaagtctattgatattggtcatgtttatttcttgccatatttataacacagcaagagtatttacaggaatgaagtagctgacacatatttttagactctgtataattcagaacagttataaatatttagtttatggattgactctgtatcctgtcatcttttcgcctacctgatctttcttggaataaaataatatatccttggggtcaagatccatagttccagaattttctcagccatctggttctgctacagcgtaaaattagactggaaataagacaacgttaagtaaaaagcttcttttacctaacccacctcccaagggctccatttgtaaaagtacagaccagaaattttaccccttcccagatcctttccagggtaccaccctattaagcattaatttcttcattttttaaatggggacaaaaatatctgctttattattaccacttacttatagaggtgatttacagatttaatgagaatatatcaaagtactttataactcacaaaaatataaacttatataatgctgtttactttgtgttgagcatattctaaattctgggactagtactggaaactttacatatatagtgttagctcttaattctcaacagaaccccacagttgctataattacatttaatgtataaatgactttagagaaacacaaaaaagattgggtgatttgttaaaggtccagctagaaaggggcagtcagaattcaacccaatattacctccaaacagaggttttactttttcctttctactcagagctaacacaacagcattatttaacgttcttaagaatggtggggaggaatcactgaataacctgctttgacaaaacaccctgataaaatctatgcttgtattttagaacccctgggtttcacacattgtttttatagttttcacacatcaagtgtaaggtgaaaagtgatagattttaagaaccaagaatatggtatgcaccccacccaaacttataaacaaatcacacataacacgaaatagaaaaaaacattaagacttcctttgcttttggaaaacagctgagaaacaacaaaattcttttcagaagtacagacaaaatttgtttttgtagtgtagctaatatgccctccttagacattaagacacttttctgtttgtaaccctaatgcagccgtatttttactttataaaaatcaaatctctcaataaaaacagtatcttactcactaatcaataaattgcatcactaaaaatgtagttatacacaccaatttctgacctcttagaatattctgcacaatcagttttaatcactggaatgaataactgctcaaaaaagcagtacggcttcaattgcattgtgatttggtagtcaatattcctgttttcccaagtaaaaggggagattccatggaacggggaacactgggctccttatggtttcaccgatcaagagaacgtttctgagcagcttctgagcaaacatttcttaatagattgatcacagatctggggtcttcactcctcataatagcactgccagacacaatcatgttagctcctgcctctgcacatttatggacagtgtcaggacctactccaccatcgacctctatatccaaagatgggaactgggtcctcaaccagtgaacctttggcatcatatcttccatgaatttctgccctccaaaccccggttccactgtcataaccaaggccatatctatctgattagcccatggtgccaaatactcaactgaggttcctggtttgatggcaaggccaaccttcatcccattctcccgaatgtctttaatcaaagcccctgggttctcagtagcctcgagatgaaaggtgtactgattggctcctgctacagccattggctttacccactgttctggcttggacaccatcatgtgcatgtccgtccattacgtccaggtgcagataatcggccccagagtctagcatccggaggcactcggcccctaaattggccaggtcgctgttgaggatggacgggccaatcttgcagcccgacgccataccgctggctcccaaaagacgaaatttcgacccggaaattccggagcggaacc

SEQ ID NO: 59050 - DNA, 5352 bp, Homo sapiens
agaccctggggaggtggctgctcggagtttatgagacggttgcccccaccctggcgtgcctgccccggccgcggctgaggaggaggaggaggaggaggaggaggaggatgatctccagatacactcggaaggcggtgccacagagcttggagctgaaaggaataacaaaacatgctcttaaccatcatccccctccagagaagctggaggaaatttcccccaccagtgacagtcatgagaaagacacaagttcccaaagcaagtctgacatcacaagagaatcatcttttacatcagccgacactgggaattcactgtctgcttttccaagttatacaggcgcagggatatctactgaaggaagctcggacttctcctggggatatggtgaactcgatcaaaatgccactgaaaaagtccagacaatgttcacagccattgatgaactcttgtatgagcagaagttgagtgtgcataccaagagtctacaagaagagtgccaacagtggacagctagctttcctcacctcaggattctaggtaggcagataatcactccaagtgaaggttatagattgtatcctagatccccttctgctgtttccgcttcatatgaaacaaccttgtctcaagaaagagattctactatatttggtataaggggaaagaagttacatttttcatcttcttatgctcataaagcatcttccattgccaaatcctccagcttttgttctatggaaagagatgaggaagactctataatcgtctcagaaggaataattgaggaatacctagcattcgatcacatagatatagaagagggatttcatgggaagaaatcagaagcagctacagagaaacagaaattagggtatcctcccattgctccattttactgcatgaaagaagatgtccttgcttatgtgtttgacagtgtatggtgcaaggttgtgagctgcatggagcagttgacacgtagtcactgggaaggatttgcctctgatgatgagagtaatgttgcagttaccagacccgattcagaaagttcctgtgtgctgagtgaactacatcctttggtgttaccgcgagtgccacagtctaaggtgctgtacattacctcaaatccgatgagtctctgtcaagcaagcagacatcagccaaatgtgaatgatctcttggttcatggaatgcctctacagccaagaaatctctccctaatggacaagctcctagatcttgatgacaagctacttatgaggcctgggtccagtaccatcctttcaactcgaaattggccaaatcgagctgtggagtttagtacatcatctctgtcatacacagtgcagtccaccaggagacgcaatccaccaccacgaactcttcatccgatcagcacgagccattcatgtgctgaaacaccaagatctgtggaagaaatcctcagaggagcccgagtcccagtggcacccgactcgctctcctctccctcaccgacgcccctgagtcgaaataatctgctaccacctattggcacagctgaagtggaacatgtgagcactgtggggccacaaagacagatgaaaccccatggcgactctagtcgagctcaaagtgcggtggtggatgaacctaactatcagcagccacaagaaaggctccttttgcccgactttttccccaggcccaacacaactcaatcatttttgctggatacacagtatcgtcgctcatgtgcagttgagtatcctcatcaggcccgacctggcaggggatctgcaggtcctcagttacatgggtctacaaaatctcaaagcggaggcagaccagtctctcgaaccaggcagggaccataaggcaaatgagaagaatctatcaggctgcaggaaacacgagatttcatgaagcagtattcagtcatcaagtgatgcagagcttgtatagaagatcgactagaaatcatcttcatgaagagtgattttggcacaagtgaccgaagaacaaaacaccatagcagccaaaaatgacatgagtgttgtttctatctccagttactgtctctttcagcagaaattaacctatcccattggaaaggcaagtttgtacccaaagatgcaacagtgaataatacccaaatcactgctcatgttatctcttaacaatgatcagttcaatcatataggatttgatgagctcacacatacacaaaaagcagcaaatcatcagtgacaatatcactggcttcagaatacttcagcctgtgttcatttctggagagttgtactcagttttaagtcattttgctgttgaaaatctgacctcatcaaatagatgtcattcctaaaactctctttagatgtcctaccctatcagcagattaaaatggaaggggtgtgtaactaaaaacataaatgttaagcattagtataaagtaacttctgtaataaattatatcgcatattttttcagataggacagctcaaccttacgatgcctacctgatgccaggtgatgcttattttcttcctaaagtaggttactggtcatatcttttttccaaatattaaatgcaccttgccagatattctcctgcagctctaaggaaaggaaatcaatttaaaaataatttgtagaatctactattgagccaccaaagtataattccctaaaagtttaagaaaccctggcaattaattcagcataaacatatcctataaacagcaggagaggttcagctttctgattttactgtggaccttttcctaagggcattcatgaatgcagcaacagttttaactatggcttacatttattttaaatttcactaaatacaaatcttgattgtcatgccagttttagatcttattaattttcagaatggataaattcaaataatcataaattacggtaactttttattataccaaggtgttctaatgccatcatatgaagacagatgcttcaaacaacctgcattaaattatatttttaataaaattaaaatctatttttaacctatttgtaggtcacaaaccgaaaacgtgtcgtctttaccttaggaggctaaagggcttactttatggcatacgggtatatttaataggtctacaaatcaaaggatttaaacagtcccttaaaaattccatatattctcataccaactcatctacataggaaatggaaaatctctattgttctcacaaaccattaccatgagttcactattaacaactggatcaatatggcttgcctttcaaagttaaagaatcagaaaggggcctgtaagaagtcatttagcccaattccctcaccctgtgtgttttccctcaaagccagtgcaatttttttttaaccaaaaaactggacatgtttaatacatacagtttgacaaatttggatttcactctttgttttgatgtagtaactcttttataaaagggaacagattcagacaagctcagtggcccaactgaagacattcagcaattaatggcaggacttcagtaatcagtggcaggactacaacatacatctcttcatgctagggaaaccaggctctctattataaagctgaccagggctattgttttccccttttctctcatcctaaacaccattcatatttttcctaggtcacattttagtgggatcatttacaaagcccccagaacttaatcatcatgttttaccttttttattgaattatatacacctcttacaaaaatgcttgaagtaatttaacacctgtacatcagtacaaaacctggctgagtaaaatgaagagaggatctattcaagatcattaagaccaaatgtaaactgggaagtatgtggaagatagctgtccagcaagtgtctggaaggtgttctagctgggtagagagcctattctaacagacacgcacatcgcagaaagcagcatgaacagaaccacatcctagataagagttctgtgtacagaagatccatggaggcaagtgctgtcaggaaggacactgcctccctccaccctcccaaatgtcaccaccaagttccttcaggtgagacctcacacaatgtcaagtgctttctaggaaatactaagatcaggttgagagattctgcttggtctagtcaatctgaaaaattcaggctggaaagacaccttttctcaagagctgaattgacttttgccttcaaatcctgcctgcaccttgcctacgatggcatcaatttacacctaaggacctttgaagagaaaaattccattatttcttttctttcttgagagcagattttttccctcctcctttggaagatttgcagtactttgcttccatctgagccagaaaattgtccatttccttttgccgatccttttgtctgctctgtttgagaagttaaaacacaagctttcacaacattatccatagacagaaagtacctagtggttgccaggggctggaaaagtggaataactactaatgggtatggagtttttttggaatggtgaaaatgtcctacaattggtgttaataattgtaaaactttgtaaatacacttaaaaccaccaaattgtacactttaaaaggacaaatagaaggtatgcggttatgtcttaaaagaagaaaacaaaatacaacattccaaagaaaatattagcagtaggaatcagatcattaaagatgtggcaacaaactgccaagtttacctgaatggctgccttcaggctatccacgccttcatcaagccccaactcctttctgctcatttctgcttctttggcctcttcctgagcctgaaacaggaactcacatgagactcagggccaccaggaaatgcttaaaatacatactctttcccaaaagcaaatctataattctgtttcaattttatgaatatatgaatagacaaaatgaatcgaattacataactatgtcattcattaaatggcaacaatgctgacagcaagcagtagatcctctgattccaattaccatttgttttttacccaattctatttgctagaggtagtaagtactctggcactcataaatcacatgatgataaaaaggaacatgaggccgggtatggtggctcacaactgtaatccccataccttgggaggccaaggtgggaggatcacttgaactcaggagttcaagacctgcctgggtaacatagtgagacctcagttctataaaaaagaaaagaaatgagcctggtgtggtggcatgtgcttgtagtcccagctactagggaggctgaggtgggaagatggcttcagtctgagagttcaggctgcaataagctgtgatcatgcctctgcactccagcctgggtgatggagatgccatctcttagaaaaaagag

SEQ ID NO: 59051 - DNA, 1731 bp, Homo sapiens
gactctcatgtgcaaccacatctgaccatcattggtttggtcatgtttggcatatagttttcttatgtttttaaaataaagcacactaagagaactgattaacctacaatgacttatgtgtttatgaagtgttctaaaaaaccatacaaaaaccaaagaaacaagaaaacaaaccttttcaacttgatgtagggttcagaagatacatacattccaaataccacagtaagcattcatctgaaagtttgccggttggtctttctattaattaaaaaaattcaaaacagaatacagatttaactatgtacaatatttacaacttacagattttacaacgaaattatacagttaagtctgtcgtggaaaagttggcattttggtatataacacttcagaaatttcaaaaacaactttacctcaaaaacatgttacacaaattttccaaagtgctgtagctcactggctcattttatctcaacaatccagtttagcaatccaggtacccaaatcttgaggcatgaagtaaccgctatactactgagagacagcactttttatacaacagcagaggctgttagaaaccttgggtctttaaaaccctataacaatgcccctttcaccctccaatcctgagacaacaaatcctgtagttccccctcatcatcgctgtcagcattctcttcttcctttttctgcagttcttttatggtcaggatttctttaagtttattttttatttcatcctggcgattccgtagcttttccacccgtcggtaacactctatctgctcatcgatctccccaatctggcggtccaaccgtccctcctcatcctcttcggcaactatggcttcggaaatagtgttgacctgcctcatggctttttggaattcgtcccactctttgtccatctgatcttttggagcatcaacctttcgtactcttgcatctacctcagggtcgtcaaaaaaaccttccggtaacgcttccgcggtgttttctctcctttccaccactttttcatgtatttctgctttctcaattgaccctgaatgaggaattatgggggccttgggaggattagtactaaagaaatcgtttggcagcacactacttgttacctcccgtgaagaggaaactgagtgctccttgccctgtgcgtcggagagcggcttgctggcgtcccccctttttctttctccatctccttcctcctcctcttcctcctcctcctcatcttcataatcggggagtaaactgagtcctgaaggcttactgggagtcgctctaatgaactcctttcctattttgtcaaagttggtggtccacgcagatgtggagggctgtacctgaggcaccaaggtggccttcgctctcttgacatcttggtcgtctgcgtccggcgctttcctcttgacggactgaggcgctgaactggcggacgaaccctggctggcttccttcgcgcctttcagctcggccactttctctcggtgctgctttcccaggacgtgagtctgccacaggagctcgctcttaaccggagtgttacacagggcacaactcagctgccccaaacggttgtacttcgcgaatggagattctatccgtttccgactggtgctcagacgctgcttctccttcattaaccgccgcaattcttcctgatttatcactcgcttccctgccggagtccgggcggaggcggaggacgccatcttggcgaccaga

SEQ ID NO: 59052 - DNA, 1444 bp, Homo sapiens
agtgttctggcaggtaaggaacgccggctcttcgcctctcagcgcggcttgtcctttgttccggacgcccgctcctcagccctgcggctcctggggtcgctgctgcatcccgcacgcctccaccggctgcagacccatggccgagcgcggggaactcgacttgaccggcgccaaacagaacacaggagtgtggctagtcaaggttcctaaatatttgtcacagcaatgggctaaagcctctggaagaggtgaagttgggaaactgcggattgccaagactcaaggaaggactgaggtgtcatttactttgaatgaggatcttgcaaatattcatgatattggtggaaaaccagcttcagtcagtgctcctagagaacatccatttgtcttgcaaagtgttggaggacagacattaacagtatttactgagagctcatcagataagctgtcattggaaggaatagtggtacaaagagctgaatgccgaccagctgccagtgaaaactacatgcgattaaaaagattgcaaatagaagagtcttccaaaccagtgaggctatcacaacagctggacaaagttgtaacaaccaattacaaacctgttgctaatcatcaatacaatatcgaatatgaaaggaaaaagaaagaagacggaaagcgagctcgagctgataaacaacatgttttagacatgctattttcagcctttgagaaacatcaatactataatcttaaggacttggtggacatcacaaagcaacctgtggtgtacctgaaggaaatcttaaaagaaattggtgttcagaatgtaaaagggatccacaaaaacacatgggagctgaagccagagtacagacactatcaaggagaagaaaagagtgactaagaagactcctagccagcatgctagtgaaacgactagcagcgatgctatgcaaaaggcgctgatactggaaggcttgaacaccgtatgttaataggggttaagtgacagtactttgatttctctcggtaaattttttaaacctgtaattcttgtaaagtttcttaactgtttttttgaggagaaagaacagatttatttatagacttaacttgtattaaaccagattattcacagtaggaataggggttggaggattaagagggtttttcttaaatattagcttttaatgtgtacaattaggaaatttttttaagtgaggactctctacccttgccgtatctaaggagctgaggtaatacagatccaaggagaattgtatagcaagaaaaaaacacgtcaactacagaaactcttaaaaggaataaaaacccaaagttccttattttgaaattgtcaaagaacaaagcggtgtttttcctttaaaccagggtgatcacgtttcgtgttcatactcaacgttaataaaaggagagagtttgtagtgaaaaaaaaaaaaaa

SEQ ID NO: 59053 - DNA, 1957 bp, Homo sapiens
  misc_feature (1)...(1957): n = a,t,c or g
ttttttttttttggatgtgggcaaaccttgttttaattgcaaacgacttaatttacagcacattcaataatgaaccaacaggagagttgctgactttgtaacatatgaatatataaaaatcccttgcaattcaggtagtcaaggtaaaaagcgcatacaaggaaggcaatcctcatttttctgaaaatgtttacattttaaaaggtgactagacatacttggaagttcaaagcagtaggatgtagcttgcagggaaaagaaaacccttttccatgttgttaggcagaagtatatcaaatatatcccaattccacttgataaaagtcagttggatgacctccttgaaccaatctagggcagaacacttagtaaaagcgggccctgggtggggatgtgaatccaggagaagaggggcaccagatcccatgcagcgccaaacacatccattccaccctctaacacatacgaggcatgtcaccccatgtccctggacacaagatccacaagaacagtcagcagatggtcactgctcccacggcctggtgctttctaatggtcttaattcaggccatggagaaaatcctttaccaccaaacacaaactgtcattgaacttcagtcataaaggatgttgtgggggaaattcttgtaacacatacataaggacttctatttacctaattagaacaatgattacacaattgacattcctgtttccataaggttttgttctctatgctggaatggctgaagaaaaagttgtctatttttggttttattttacattttcaaaagagagggaacagagagaaaaatgcccaactttggggcccagcaggtacaaaagcagacttctaggtccatcagatttgggggaagtttcaatgcctagggaaggttagtgaagcccattatatccccaatcgtacaggaagaattctacagttaatctatcacagtgttccagcaaagcatatgttgaaaactacagttttcaatctaacatctaaattttaaaaagtagcatttcagcaacaaacaagctcagagaggctcatggcaaaagtgaaataacagaactattgctcagatgtctgcaaagtcaagctgctgccctcagctccgcccacttgaaggcttaggcagacacgtaaggtggcggtggctccttggcagcaccattcacagtggcatcatcatacgggggtagcagcaccgtagtgtcattgctggtaacataaaccaggacatcagaggagttcctaccattgatgtatcggtagcagttccaaacacagctaatcaagtaacccttaaaagtcaagataatgctaataaacagaagaataataaggaccaaacaggtaggattcactgacatgacatcatctctgtagggaaaattaggaggcagttgccgtatgtattcctgaatggagtttggataaataagcacagtgattgcaaccaacatgttcagggcaaagtcaaagatctggtaacagaagaatgggatgatccaggctgcgcgttgcttgtacgctccgtaagtagccatagcacatatcaggatcatgagaagagaaatcgcaatggcaatgcacatgttggcatcatccatgaactcaaagtcacctcccagttcagaacttgaaaagttatactgatccggatcagccagggcactcaataaaatcaacagtaccacagcattgatgatcagataccagacgccgagcaggatggtgccggtgcggacatggcagcacaagcagcagctgttggagtagaaccgcgtccagggcgcgaccatcttcatcgctccggggcatgtgncgagngcgcgcaagttttcaggagagtcgacccctcgtctggagcncgncgcccgctgctgccggctccntccgcgctccggctncncgccgctcgcccgctgcnccgcgggcctgcctcct

SEQ ID NO: 59054 - DNA, 2038 bp, Homo sapiens
ccttctggtgcaccctgggaacagtggatgtccaccccattggctggtgtgccatcaacagcaagatcctagtgcccccacggaccatccatgccaagttcaccgactggaagggctacctcatgaaacggctggtgggctccaggacgcttcccgtggatttccacatcaagatggtggagagcatgaagtacccctttaggcagggcatgcggctggaagtggtggacaagtcccaggtgtcacgcactcgcatggctgtggtggacacagtaatcgggggtcgcctacggctcctctacgaggatggtgacagtgacgacgacttctggtgccacatgtggagccccctgatccacccagtgggttggtcacgacgtgtgggccacggcatcaagatgtcagagaggcgaagtgacatggcccatcaccccaccttccggaagatctactgtgatgccgttccttacctcttcaagaaggtacgagcagtctacacagaaggcggttggtttgaggaagggatgaagctggaggccattgaccccctgaatctgggcaacatctgcgtggcaactgtctgtaaggttctcctggatggatacctgatgatctgtgtggacggggggccctccacagatggcttggactggttctgctaccatgcctcttcccacgccatcttcccggccaccttctgtcagaagaatgacattgagctcacaccgccaaaaggttatgaggcacagactttcaactgggagaactacttggagaagaccaagtcgaaagccgctccatcgagactctttaacatggattgcccaaaccatggcttcaaggtgggcatgaagctggaggccgtggacctgatggagccccggctcatctgtgtggccacggtgaaacgagtggtgcatcggctcctcagcatccactttgacggctgggacagcgagtacgaccagtgggtggactgcgagtccccagacatctaccccgtcggctggtgtgagctcaccggctaccagctccagcctcctgtggccgcagaaccggccacaccgctgaaggccaaagaggccacaaagaagaaaaagaaacagtttgggaagaaaaggaaaagaatcccgcccactaagacgcgacccctcagacaggggtccaagaagcccctgctggaggacgaccctcagggtgccaggaagatctcgtcggagcctgttcctggcgagatcattgctgtgcgtgtgaaggaagagcatctagacgtggcctcgcccgacaaggcttcaagtccagagctgcctgtctccgtcgagaacatcaagcaggaaacagacgactgagccttcctgcctccagcctggcttctagctggaagccagcccagcgtttctctaccaccaccaccatgcctccacctgactttggcttggagactgatcctctctgtgtaaattctgcccggtgctgtgaaggctggacggtggaggacctgctggggtctcctgggacccgcctgttgcttctgccctcccctgtggaaaggtctatatgacgggccgcctgaggccccagaactcgtctgtgaaccaccttttccagccagagttcccaaagctggaacgctagctgcctgctcttccttaagatggcctccccccgacccgccacggccctcagttgccagggatggggccaccactgtcacactgtggaatacaagacagtgaactctgtctgcctgaacgagtcatgtaaattaagttctagagcagctctctgagcaggataaggtcccctgacagtgagttgtgtggtgggggcagcctctgcctcaaaaattcaccaagcagaatgcctctcagcctcatgtgttggtcctctgctcctcctagctccccagggatgttggggacccagcttgtctcggcagctaagaagcagtgaccaggatgtggattttggcgacctgtgtggtggccttgagctgctttcttggggttgtgaggactgactcccatttcctaaagga

SEQ ID NO: 59055 - DNA, 5517 bp, Homo sapiens
ttaaagcccagaaaactgaaatcagaggatttcatataataatctacctatgcttcttacccttcagtactttctcgttttggaacccaagcgcgtcagtgggcggggcttcattctcggaaaacctcggcggtgggaggagtcccctccgggagagcttcctgaagggggcgagggatgacttccgtaatctttcggaagaggcggagtcttcttccgaggaccattcggaagaggcggagtcttcttccgaggaccattcggaagaaggcggagcctacctctcatcaggaccagtctgactgcacctgcatccttagctcagagcatccccggagcatcttaagagctgagcgcagctgacaactaggggccggaccgtcgcaggaggcgtccgctggataccttcccccttccctgacctagagctctacagctgctgcctcggtactgaccgagggttcccagagctgtctcaccattgcaaaaacgttatagcaacagcctctgattacgacatggctgagatcaccaatatccgacctagctttgatgtgtcaccggtggtggccggcctcatcggggcctctgtgctggtggtgtgtgtctcggtgaccgtctttgtctggtcatgctgccaccagcaggcagagaagaagcacaagaacccaccatacaagtttattcacatgctcaaaggcatcagcatatacccagagaccctcagcaacaagaagaaaatcatcaaagtgcggagagacaaagatggtcctgggagggaaggtggacgtaggaacctgttggtggacgcagcagaggctggcctgctaagccgagacaaagatcccagggggcctagctctggatcttgtatagaccaattacccatcaaaatggactatggggaagaactaaggagccctattacaagcctgacccctggggagagcaaaaccacctctccatcatctccagaggaggatgtcatgctaggatccctcaccttctcagtggactataacttcccgaaaaaagccctggtggtgacaatccaggaggcccacgggctgccagtgatggatgaccagacccagggatctgacccctacatcaaaatgaccatccttcctgacaaacggcatcgggtgaagaccagagtgctgcggaagaccctggaccctgtgtttgacgagaccttcaccttctatggcatcccctacagccagctgcaggacctggtgctgcacttccttgtcctcagctttgaccgcttctctcgggatgatgtcattggcgaggtcatggtgccactggcaggggtggaccccagcacaggcaaggtacaactgaccagggacatcatcaaaaggaatatccagaagtgcatcagcagaggggagctccaggtgtctctgtcatatcagcctgtggcacagagaatgacagtggtggtcctcaaagccagacacttgcagaagatggatatcgccggtctctcaggtaatccttatgtcaaggtgaacgtctactacggcagaaagcgcattgccaagaagaaaacccatgtgaagaagtgcactttgaaccccatcttcaatgaatctttcatctacgacatccccactgacctcctgcctgatatcagcatcgagttcctcgttatcgacttcgatcgcaccaccaagaatgaggtggtggggaggctgatcctgggggcacacagtgtcacagccagtggtgctgaacactggagagaggtctgcgagagcccccgcaagcctgtggccaagtggcacagtctgagcgagtactaatcctgttcttctctcctctaatccccgggggccaagctggggagggatgtggaggggaaaaagatgacagagaagtggactccaaacctcattttagttgtagaagaaaatttcttacaaaacaaattccacaaagaacaccctatatgaccacagctgcagatcagttcttagcaatgatgtttttttttctgctttgcaaggcgctagaatcttttattttactttattttttttgaggtggagtttcgctcttgttgcccgggctggagtgcaatggtgagatctcaactcactgcaacctctgccctccaggttcaagggattctcctccctcagcctcccaagtagctgggattacaggcacccacgagcatgcccggctaattttttgtattttcagtagagatgggtttcaccatgttggccaggctggtctcgaattccagacctcaggtgatccacccgcctcggcctcccaaagtgctgggattacaggtgcgagccaccgtgcccggcctctggttttgttttgttttttttttttaatgggggacaaaagagagggaaagacccctataaaatctatatataacaatgtaaccatatacttgcatgtcttaatacaaactgaagaaattagcctaactgccaatatcaagttggcagattttaatccatggaaattgtgttttgtgctgaattgtatttgctgattacctgaaattggcttctttttattgggcttctctggagaatttctcccactccccacctctgcagaagaaaattttgctcttataaaacctcatgttttcatcattcccatcttttctttttattgcctcttatatctctgctctttgacctcaaggtctagaggtctgcagtaagccaagaaacaaaggtggggtggatgaggcaaggtttgcaggagaaagaggaattgagaaatggggtatttttgctatcagctcttctgctatgaagtagtaaaaggcagtctataattaactgacagacctaactgaagcacagagaatacatcagacttatgcatccaagacatcagaacttggattttatcaaacttgatgacttctctaaaaggagctttggaaacttcaaattcagctataggatagtaccaatgaacacatccagctgatcccaaaagctgttttcaggtataaggacaaggagaggagacaagtgacgacagccattcccctttgcagctatctactgtagtgacagccatttcttggttgatgggttggaagtcatcagaggtttgaagaattacactggcctttgtttttctggaaatgccgaccatggagatgctttagagtcttctcaaatagcttagatgttgtaatgaggttagctttgcttcataaaacaggggccctcagaagttctccttaaatttttcaataaaaatttagctcttaaaaaaataacagtgtgactgagtgaatgaagataagttggattctttcagagcattcttttcctcaaaacgagctgcataattcttggaatttatgtcttaccacatggtggagggatggaggaactacaggatgcaattcttcttctaccaatgggcaatagaggttgagagagattcagcatctttctgggattagaattcaagtctctttactcctacagcagctgtgtctccaacgttgagactttgcagatggcacagactccatggataataggtaaacttggggccgggcgcagtggctcacgcctgtaatcccagtattttgggaggccgaggtggaaagatcgcttgagcccaggagttcaagaccagcctgggctacatgacgaaactccatctctatcaaaaatacaaaaaattaactaggtgtggtgctgcacgcctgtggtcccagctattcaggaggctgaggtgggaggatcatttgagcccagaggtagaggctgcagtgagccatgatcatgccactgcactctgggctgggtaacagagtgagatcctgtctcaaaaattaattaattaattaattaaaataaactaggtaaacttggataggcagtagatatttttgcccacctgaggaggaactcagtcaagctgttgcttaacagcttgatccagggcgtgaaaggttagttgagactgaagtgttcacttccatagaagaacatcacttttaaccttgctttggcgaagggagtcggaaagctgagtctctatggacgggggggtgatcttgctttcagtgttccctcagcttttgtggatttaaaaccattctgctcccccttaaccttttgtttgatttcagcccatgttcttgacaatgcagagcaattctgagcagtcacaaagcctactctctgttcttgtccctgccaacccccaccccccataatctgactcacaacttcaccatcagttggggtcataccactagtctctgtcctataccccatgaaatgtaaatactgtatcataagtagaagaaaataatttttgttttctaaaaatgcattttgagatagtttaatgtaaatctgacaggagcattctgaagccccattaggaaaaaatttaaatggttcctcttcatcgccttaatgtctaaagatcagaaatcgctgagcaaacccgcttttgtttccttcccagaaacaatgcaaaacaacaggtggagatagtctggtctttgccctgctgtgtgtgcctctgtagctcctcctgacaaacgtctgggaaaacagcctcaccccactctcctctctcttccccatttccttgtagctttattccttgcatctttgggtctactgagcagtgggtgctgaggtgacaggggaggaaccagttgttctgtagcctaggaactgcctcagtgtctttgccagaaaaaggcaaagaggcggacagtgcagggctcctccctcctacctcaggcctgatccatcgtgcccttgactttgccgtctcaaagtttcttagctgactttggctttcacatttgttctttccagagctaactgataagagtggaggaggaatgccttctcctaagagtcagttgaaagaaagacaagagagtcacatcttagcttttgcacaaggcattcgtggtcaggaataggttagggaatggtcacttctgattttccaacagttgctccttctctgaagagatcttgattcctttgggaagacaagaatttttcttaataacaaaggtccctttatgagttattccttctttcagttcatctcactggagcacagccaagatggacatgtttatggacagtgctctagatgtgaaaacagatagaactggtttgtgggacaggggcagcttgctcaggagagggaataacgcaggtcccttttcttggaaggcttgtactatggccatgacagtgacattgccctcaccatgatccctctccaaagtggttgtctttctttaccttgtgtcttctcttgtaaaaatgaaactcaaaaataaaataaatgtgtcaaattttgaaaaaaaaagaaaactgaaaaagctaacatgaattgtgtgaaattgcataatgctgtaatgctaatctacaatatgtaatgctatcttgtatgttgaatttgttaatgcaccacacaagtgcaaaataaagactgattcacattacataggcaaaaaaaaaa

SEQ ID NO: 59056 - DNA, 939 bp, Homo sapiens
ttttttttttttcctgttttcattttattgggaacttcaaagaaaagaaagagagacggattggttcccaagacaagccgtgacgtagactcccaacaagctggggaattctggacagcgaaggggtggacagtgagactcagcacagcccaaagtcaaaggcattagggttgttctgaaaatagagattcaagaagccctggaaaatgctcttatccatgagaagagcacagactgtggggtcccacttcatggctgatatccagagccgcagggctggcgtgtggctcacacagtccagtatcccatacacatccagccgctcaaaccagggccagaggaggtaatcaatcatggatatacaggttccaccaaagaaggtggtgttctgatactcaagaatctcttccaggttgctgaattcctgacgcagggctgccttcagattagtgcattctctcccacatctcaacgctaccaggcactccttggtcaaatgtgggaccttacaaaatagctccaataacatcttttggcgagctcgttcataagggtcatatggaaacagcttccttcctggataagcatcatccaggtactcacaagcaataacagattcatagatcagttgacattggctggtctccaggacaggaatgtggccaaaagggtgctttgtatagtaccattcaggcttgtttctcaggttaatgttgaccacttcatgtctgatgtctttggccttgaggacgaggcgggtcctgtgagaataggggcagaacctcatgctgtagatgcggatcagcccctccgggactggccctgggggctggcttcctgcagagcagcgatggagggggacagggaaaggagaggctagtcagcccggtgaggaaggagctcgctcacttgccccggacgcgtgggcggacgcgtggg

SEQ ID NO: 59057 - DNA, 2812 bp, Homo sapiens
ttttttttttttgaacttgctcagaattttattgggattaacagggtccacggggagaggcgagccttctgggggacggggacaagaataccgcaaagaataccgcaatggcgaagcggccttgcatagacaccgaggcgggctagcggcgcggcgggaagaggagagggatggagaaagaacttgggagaggaaggtggcagcagcgcctccatgggcactgcgcggctgtgacgaaggccacagcggccctccccgcttcgggggtcagggtgtccactccacacagcacagggagaggggctggggccacaactgactgggagaagtgggtagaggggccctgaccaaggcatcacaataaatacagttagcagcacacagaagcctgcgggggcggagggccaaaagaaggggactagccccctttccctccccccaaaataagaactctgcaatgactaaaccataaaaataaactttaaacccgtgtacgaagtcggtcaccccccagaagtgcaatgtggggccgcgtggccctagctgaggaggagggcaaatgggatagtgggtgggggatacagagaggtgatccccaaaaggggaaaacccttatccggttttccccctcttccccggattggcccaaccgtttgggacctgaagcacatcctctaggtcagagtcgtccgaatcttccccttcttcccagacatcttcacttccttcctcctcatagtttccttcctcatagatgtcctcatcttgctggatgccttcctcaatgccctcttcttccactgattcgtctgagatgatctctatcacgtcctcgtagtcagcctgatccttgtcaaagtcttcaataactttctcatagtactcaatgtctctgtcgtcatcatcgctgccttcattgtcaccttcattgccatcatcatcactgccctcattgtcaccttcgttgccatcattatcttcatcatcactggcctcatctgcttcattgtcactgtcgctgctgtcctggttgttgccatggctgccccagaagccacctttgaagaagttgttgccgtaagtgttctcgttgttgttagggttctcttcgttgtcatcagtgttcttgttattgtcttcaggattctcgttgttgtcatctgcactctcattgttgtcagtggtttcgtggtcatcagcactctcgttgttatcagtggtctcgttgttggggacctcattgtggtcaggattctcgctgtcgcagatgttctcattgatgtcagttatctcattgtcagtggtctcgaagtagtcggtggtctccatgaagtcagagatcttgatgtcatgaattgtctcatcaatgtctgagatctcgctgaaaatgtcttccactgcataatagtcaggggcgtcttccatgatcaccacctcacatctgcccctggttttacgtttcttcatttcttgcttctttctctttatcctggagcccctttctctcaggtagtagcgtagagggttaacccacagatcattcttgataatctcagcaatcctgtcagcctctgggaggctatggtttgagaaccagctgaaaaagctgtggctcgcatcctggttcccgtgacgacgggcctggggttcctggccccggtgccagcggattggggttgagtgagacaccagccggcctgagcggttgcgctggaactccttgacaatcaccatgtttgtgaagtaggggttagtctggaagtacagcttcattttgtagcccatggagatatgtctgagatcctgtacctgcagattggtcaagtagcggaaaatgtcttcatcacgtcggttgatcaaaattgaaattctggggtggttgaggaatgctttgacccagaagcctgggatatgctggatgatgaggtctctgcgctccaggaagggtcttcgcatctggatgaacttgcgcttgagacgcaggaaggctttgcctgccttgatgttcactgcctccagatccagctgaatatcctccagtgcctgcaggatgctctccatcctctcggcatttctctctctgctttccctcttcaccttcctctgcttcctcctccgccgccgccgccgcctcctgctgctcctcatactctcccgctcatcctcatcctcatcctccactatgatgatcgcctcttccttgctcttcgggtcaactaacctctggggcgcccaccccactgcgctacaggtttctagggccccctctccaccaaaactgctcgactgtacaacctgaaaatcgatttccaggctcccccccgaggcctcaggagtggggagtgcttccaggctctccgtgggcgggggcgcctccccataccccgactcgatggtagaatcccagccgggacactcagcaccgagcgtgaagtatgcgcggatccccccctcctcgagaatgacatagggaggcggcgggggcagcgcggggcccagtcccacccccctcatatcggccagcacctgtgccgcctccgtttcctcctggagcctcgggcgctgctggggtggaggcagcggcagtcggaggagcggcggcggcggcggcggcgggggcgggtcgcgctgtggagactcggagctgctcaggcggcgggtcttggccggaggcccctcatctgggcggtccatggcgaccgcgttcgtacagctcaggggactcgcactcgccccttcgcttttagccgcgtcgctgccgctagtcgcaccggtaagcagagctgaggagactcacgacgaaatcgtcgac

SEQ ID NO: 59058 - DNA, 863 bp, Homo sapiens
  misc_feature (1)...(863): n = a,t,c or g
gaggcggcagcgagctagagcccgagtcgcagctccgggccgcagagcgctgggcgagcgcgagcgccagggcaccggcagggcaggcagctgcgcgcggctggagtcatgctatactgaaaagacacttcatcaagataactctgggagaagcagaaaaccctgtgccagggacaggaaagataggagaaagaaagtttatcagaattttttaaacctgtctcagaaataacaacatattttaatcagagatttatgttgctatgaggacagattcatcaaaaatgactgacgtggagtctggggtcgccaattttgcatcttcagcaagggcaggccgccggaatgccttaccagacatccagagttcagctgccacagacggaacctcagatttgcccctcaaactggaggctctctccgtgaaggaagatgcaaaagagaaagatgaaaaaacaacacaagaccaattggaaaagcctcaaaatgaagaaaaatgaaggctcataatctatcaagagtgctgaatttctgcatgttgaaagacttagtggttctgttttcttgagacatttaatctggtggtaactgtggtaacattgcagccctaagcagcatgtgtatattagataattgtgttgtgatgctactcactttgattgcaatgatgatgtccaaggtaagctattaaaagggcaggttacttccaaatcgcactggaagggaaaaggttaaggattaatacatgatcacagaaatgcataccactgttctgtaaaaccccaaccaaaattcactgtttctcttttgggggatttattttaggccccgatggtattttttttaattnccattttttttgg

SEQ ID NO: 59059 - DNA, 1871 bp, Homo sapiens
cccacgcgtccgcgcagaggcacgctgttgccatggcagtgtggtcctggctgccgcggaggcaggtgccggggtctcctttgcctcaatgtgaagagcttaaaaagaggaggagaggagaactcccccggccatctctgtgatcccagccgccgcattttacacagaaaatgaatgaaaataaagatactgattcaaagaaaagtgaagaatacgaagatgactttgaaaaggacctggagtggttaattaatgaaaatgaaaaaagtgatgccagcataatagagatggcttgtgagaaggaagagaatattaaccaagacttaaaagagaatgagacagtaatggagcacaccaaacggcattctgatcctgacaaatctttgcaggatgaggtctcaccaagaagaaatgacatcatttctgtaccaggtattcaacctttggatcccatatcagattcagatagtgaaaactctttccaggaatccaaactagaaagccagaaagacttggaggaggaagaggatgaggaagtaaggagatatattatggagaaaattgtacaagctaacaagcttctacagaatcaagaaccggtgaatgataaaagggagcgaaaacttaagttcaaggaccagttagttgatttggaagttcctccactagaagacactactacttctaaaaattattttgaaaacgaaaggaatatgtttgggaaactgtcacaattatgtatttccaatgattttggacaagaagatgtgctcctgtcacttactaatggaagctgtgaagaaaacaaggataggacaatactggtagagagagatggaaaatttgaacttctgaatttacaagacattgccagtcaggggtttttgcctcccattaataatgcaaatagtacagaaaatgaccctcagcagttgttacccagatcttccaactcctctgtcagtggcaccaagaaagaagattctacagcaaagattcatgctgtcactcactcatcaacaggagagccgctggcttatatcgctcagccaccactcaaccgcaagacttgtccaagctctgctgtcaactcagatcgaagtaaagggaatgggaaatctaatcacaggacacagtctgcacatatctcaccagtgacttcaacatactgtctttcccctcgacagaaagaactacaaaaacaactagaagaaaagagagaaaaactgaaaagagaggaagagcgacgaaaaatagaagaagagaaagaaaaaaagagagagaatgacatagtatttaaagcgtggttgcaaaagaaaagagagcaggtcttagaaatgaggagaattcagcgagcaaaggaaattgaagacatgaacagtagacaggaaaacagagatccacaacaagcttttcgattatggcttaaaaaaaagcacgaagagcagatgaaagaaagacagacagaagaactaagaaagcaagaggaatgtttattcttccttaaaggaacagaaggccgggaaagggcctttaaacaatggttaagaaggaaacggatggaaaaaatggcagagcaacaagctgtcagagagagaactagacagctccgactagaagctaagcgttctaaacagttacagcaccacctatatatgtcagaagccaaaccttttcgttttactgatcattataactgaaagtttctattaaatatttcagtgggcagctgctatcaaaattttggatatgatttcttagggtctgtgtactttggttgtattctaaattatggaaatggtatttatcttttattgacagtgaatttgtttttttaatactagaacaaaataaatttttttctcacagtg

SEQ ID NO: 59060 - DNA, 1093 bp, Homo sapiens
ttttttttttttagagttatacattttatttgagcttcatctctttggagaaaggggaacagggatgagaggattaagttagagatggtctggcacaaagcccagagatgtggggtgtgtgaagaaggaaattcatgactagaatatatgctgaaggtgaaatgaggggagcctggatagggaattcagagataattgttggcatttagtaatgtgatttgggagtatgatcccagccgcagagcaatggaagaaggctggcaggtagtaggagtcacagtcaggaaggaagtactgctagttcgtatccagtctaggtctctgggacaattgacccctttttgggtaggaggatttgccagcattatctgaccccttatttctagttcatctcctagacatcttcattgctgttgccctctggtgagtatgaatccataggatggcgtctcctctccactgaccatgtccgagtctgagtctgagactgggtggaagccatagacggatgatacataggccagtaacgctgctgaggaaaagtgtgagctcttggcctagatttggggttgggctccatctcaggctcagtctcaggctggggctccatctcggtctgggtcttggtctcggtctcagccttgggctccatttcaggctccagctcccgatccaggtctaggtccagacccagcccagcctcttgttctgattccagctccaaatccaactccgactcctcttctacaggctgttggatcttgatgaagcctggacttacatttttttggcttcctagaaaactgctgctcattttatatcttgaattgtcattcttgtctgtttctgagtaggtttcccgtatcactgtctcggattcatcgatgcttaactcagaggagcctatgaccttccttgacaaggcaaacagcacggcgtcgtgaacgctgaggaacagctgggtcttggtgatgccagcgtcaaagaaatcattcctctcaaatgccctgactatggaagagtgacaccctgcaatgagtatcaaaatgttggcgttttgaaaggcattgcatatccgtcttaatacgactaa

SEQ ID NO: 59061 - DNA, 1999 bp, Homo sapiens
cttagtccggccgctcgcgatctagaactgaggtcggcagtgtgaggagctgctatggtgctgagtttcctggtagagccggccgagctgaggcggtcgcggccatgaaggcgggtgccacgtctatgtgggcttcgtgctgtgggctgctgaatgaagtcatgggaactggagctgtcaggggccagcagtcagcatttgcaggagccaccggtccattcagatttacaccaaaccctgagttttccacctacccaccagcagctacggaagggcccaacatagtttgtaaagcctgtgggctttcattttcagtctttaaaaagaagcatgtttgctgtgactgcaagaaggatttttgctccgtttgttcagtcttacaagaaaatctccgtagatgttctacttgtcacttattacaagagacagcatttcagcgccctcagttaatgcgactgaaggtgaaggacctgcggcagtatctcattctgagaaatatacccatagatacttgtcgtgagaaagaagacttggtggatctagtactgtgccatcatggactaggctctgaggacgacatggacacaagcagtctgaattcttcaaggtcccagacttctagcttttttacacgttcgtttttttcaaactatacagccccctctgctactatgtcttcgtttcagggagagcttatggatggagaccaaacatccagatctggagtgccggcacaggtacaaagtgaaatcacttcagcaaacacagaagatgatgatgacgacgatgatgaggatgatgatgatgaagaagaaaacgcagaggatcggaaccccgggctctccaaggagagagtgagagcttcactgtctgacttgtcaagccttgatgatgtggaaggaatgagcgtgcgccagctgaaggaaattctggctcggaattttgtcaactattctggctgttgtgaaaaatgggaactggtagagaaagtaaaccggttatacaaagagaatgaagaaaaccaaaagtcctatggcgagcggctgcagctgcaggatgaggaagacgacagcctgtgtcgcatctgcatggatgccgtcatcgactgtgtcctactggagtgtgggcacatggttacctgcaccaagtgcggcaagcgcatgagtgagtgtcccatctgccggcagtatgtggtgcgagccgtgcacgtgttcaagtcctgaaacaggctcccctcaccaggacagtcacccccaaacttgacccccaacatttcaatgcacagaagggactggaaagttatgttcaaaggctgaagctattttaaaacattattttgactactaagtggggacagaaagatccatcctgagttgtggaaacattggtccatgccgtgagcctgtctgcctgtggacacgtgagcttcccgggctcagctgggctttatcacacatcccgtgaacactcattgaagtcagcctgtttgcgccatgtgggcatcagccactgctgtcttgggaggacacttatcctgttctcttatttccccttcatcctatttttaacttaaactgctcagatgtttgaaacttctgtcctctttggatgagatcagtgtccacaagtggccgacatggaacatgctgagcagtggctcctctgaatgttcactttattagtcatgtatattttaaatgctaacatttgatgaatgtaagtttccacattgttgctgtttctgcatttaaacataattgggaacaactgacattctctagtcgactgccagggccttagactccacatgtccatttttgttcaggtatagctttttatagcaagggctgcatctagcttcttttattagaagtgtgtgtgctaaattccttattaatgtgtaatcagtttacattgttttgtatagtgaaggtgtattttcagtgctacccgctagctgattttaactttaggaataaaattagttttaaaaaaaaaa

SEQ ID NO: 59062 - DNA, 1847 bp, Homo sapiens
ggcacaagcctctctctctctccctctctctctccctctctctctctccctgtgtcgcttaaacaacagtcctaacttttgtgtgttgcaaatataaaaggcaagccatgtgacagagggacagaagaacaaaagcatttggaagtaacaggacctctttctagctctcagaaaagtctgagaagaaaggagccctgcgttcccctaagctgtgcagcagatactgtgatgatggattgcaagtgcaaagagtaagacaaaactccagcacataaaggacaatgacaaccagaaagcttcagcccgatcctgccctttccttgaacgggactggatcctaggaggtgaagccatttccaattttttgtcctctgcctccctctgctgttcttctagagaagtttttccttacaacaatgagaaaacatgtactagctgcatccttttctatgctctccctgctggtgataatgggagatacagacagtaaaacggacagctcattcataatggactcggaccctcgacgctgcatgaggcaccactatgtggattctatcagtcacccattgtacaagtgtagctcaaagatggtgctcctggccaggtgcgaggggcactgcagccaggcgtcacgctccgagcctttggtgtcgttcagcactgtcctcaagcaacccttccgttcctcctgtcactgctgccggccccagacttccaagctgaaggcactgcggctgcgatgctcagggggcatgcgactcactgccacctaccggtacatcctctcctgtcactgcgaggaatgcaattcctgaggcccgctgctgtgtgtggcttctggatgggacaactgtagaggcagttcgaccagccagggaaagactggcaagaaaagagttaaggcaaaaaaggatgcaacaattctcccgggactctgcatattctagtaataaagactctacatgcttgttgacagagagagatactctgggaacttctttgcagttcccatctcctttctctggtacaatttcttttggttcattttcagattcaggcattttcccccttggctctcaatgctgtttgggtttccaacaattcagcattagtgggaaaaagtgggccctcatacacaagcgtgtcaggctgtcagtgtttggtgcacgctggggaagaatttactttggaaagtagaaaagcccagcttttcctgggacatcttctgttattgttgatgtttttttttaccttgtcattttggtctaaggttgccattgctgctaaaggttaccgatttcaaagtccagataccaagcatgtggatatgtttagctacgtttactcacagccagcgaactgacattaaaataactaacaaacagattcttttatgtgatgctggaactcttgacagctataattattattcagaaatgactttttgaaagtaaaagcagcataaagaatttgtcacaggaaggctgtctcagataaattatggtaaaattttgtaagggagcagacttttaaagacttgcacaaatacggatcctgcactgactctggaaaaggcatatatgtactagtggcatggagaatgcaccatactcatgcatgcaaattagacaaccaagtatgaatctatttgtgggtgtgctatagctttagccgtgtcacgggcatcattctctaatatccacttgtccatgtgaaacatgttgccaaaatggtggcctggcttgtcttctgaacgtttggttcaaatgtgttttggtcctggaggctcaaattttgagttattcccacgttttgaaataaaaagagtatattcaaaaaaaaaa

SEQ ID NO: 59063 - DNA, 1113 bp, Homo sapiens
ttttttttagggtatgatgttttttttttttacccatcagttttgaaaaagttaattacatttggcaattccccattcccttatagtgaggggtctcaagagctggctcctacacataaagggcttaaaacagtggctggtacctaggccaccaatagtcttttgccccacccaaccggtgacacagcccggggccccgccgccccctggcggccattacggatttccgcctccctcacagaaggcagtcactgcaacgtgcgtggcctcagttgcgtcatatccggcccttgcgatcagggcttgaggaacccgcgccatgaagtgcgtgtttgttaccgtagggaccaccagctttgacgacctcattgcgtgtgtgtcggcgcccgacagtctgcaagtgagtgagggaggcgagcaggcggcggcttggctcgccacccgccatctccggccatactgccagccgcgttagccttgcctgaccgtcgcgctcggaaagaaacccccgcaactctaccacagaaaatcgagagccttggttacaaccgacttatcctgcaaattggtagaggaacggtggtacctgaacccttcagtactgagtcgtttactctggatgtttacaggtacaaggattccttgaaagaagacattcagaaagcagatcttgttattagtcacgcaggtgcaggaagctgtttggagactctggaaaaaggaaagccactcgtagtggttataaacgaaaagttgatgaacaatcatcagctggaactggcaaagcagctagcacaaagagggtcatctcttctattgtacctgcagttcttccttgagacactagaagcttgccaaagggccagcacgcttcctgggctgttacagtcaatggacttatcaacactgaaatgttatcctcctggccagccagaaaaattttctgcatttttggataaagttgttggattacaaaaataaacactaaactctcaacactttaaaagcaacccccaaattcaacctatgtaatgtgattaaatcaaattaaatacataatatatatttacaaaataatataattaataaacttcctacatctatagaaaaaaa

SEQ ID NO: 59064 - DNA, 2608 bp, Homo sapiens
cagagggctgccgccgcctctccaagttcttgtggcccccgcggtgcggagtatggggcgctgatggccatggagggctactggcgcttcctggcgctgctggggtcggcactgctcgtcggcttcctgtcggtgatcttcgccctcgtctgggtcctccactaccgagaggggcttggctgggatgggagcgcactagagtttaactggcacccagtgctcatggtcaccggcttcgtcttcatccagggcatcgccatcatcgtctacagactgccgtggacctggaaatgcagcaagctcctgatgaaatccatccatgcagggttaaatgcagttgctgccattcttgcaattatctctgtggtggccgtgtttgagaaccacaatgttaacaatatagccaatatgtacagtctgcacagctgggttggactgatagctgtcatatgctatttgttacagcttctttcaggtttttcagtctttctgcttccatgggctccgctttctctccgagcatttctcatgcccatacatgtttattctggaattgtcatctttggaacagtgattgcaacagcacttatgggattgacagagaaactgattttttccctgagagatcctgcatacagtacattcccgccagaaggtgttttcgtaaatacgcttggccttctgatcctggtgttcggggccctcattttttggatagtcaccagaccgcaatggaaacgtcctaaggagccaaattctaccattcttcatccaaatggaggcactgaacagggagcaagaggttccatgccagcctactctggcaacaacatggacaaatcagattcagagttaaacaatgaagtagcagcaaggaaaagaaacttagctctggatgaggctgggcagagatctaccatgtaaaatgttgtagagatagagccatataacgtcacgtttcaaaactagctctacagttttgcttctcctattagccatatgataattgggctatgtagtatcaatatttactttaatcacaaaggatggtttcttgaaataatttgtattgattgaggcctatgaactgacctgaattggaaaggatgtgattaatataaataatagcagatataaattgtggttatgttacctttatcttgttgaggaccacaacattagcacggtgccttgtgcagaatagatactcaatatgtgaatatgtgtctactagtagttaattggataaactggcagcatccctggcctgttgtcatgcagtcatttcctgttaattctgggagacaatgatttcacaactagcgggaagcagtcctaaaagtttaaaatccgataaggaatatctgggacagggtttagatcatgactctacacagataccatgatgagagtatattaaagaaatttaggaaagcacctggttcctttctccccatgcctgccttctgctccctccccagctggtttgggctcaaattgtccctggagactagggtttatgttagggtattgatagattagagcaggtggttgaagagatcttctctggtcagacttggaagaatttccaaaactgaagttagccccaagacttccctagggttgatgtactttatgatccagatgctaaacttcttagaatgaaaatatgcttcaacacttaagtagcatacactgccctacaaacctcagagagcacttttccccaagttcttgtttttatttttgaaagtactcacacagcacttactatgctccaaacactcctctaagcactttacacatattagctcattcagtccccagacagacgggatgaagtaggtattgttactgttcccattttacaggtgagagatttgaagcctggggaggctagtaactcaccccaaggtcacacggctcatacatggtgggactgagactcagatgcaggcagtctggcacctcagtctggattctaaccatttcactaagctatttttgtcttgtactactttgacccacccctgaataaacctcaattgctggagtggggtgtagttattaaagggatgctttttaccttttgctgtctgctgtggcagattccccagataaccaaggaaaaggggccacccatacctggaaataggccatagggcccctactactgccaacaagccatggcctaccttgacacttgtttgatcttaaaattgtgtcttggtaacaaaagatttggacaggcatatctgtagctttcaagttaattaattgcaatatttttttcttcaggattttagctgctgaacaactttcagtttggagctaaaagagacctgtctcatggtctgcccttccctggggcaatagctagggtctttcctgatttttatggaattttaggggatattttgagctttgggttctcagtagtgaattgagacttggaggtgacttttcatgtttggagtatcatctctgtctgggatctgggctgacaaattaaaacctagagtagtgcttatgctgaaatgatacttttcattttttggttgatttttttgccttcccttcaattttaaactgaagcattttaatatgg

SEQ ID NO: 59065 - DNA, 2012 bp, Homo sapiens
ttttttttttttaagaacgtcagctcctttattattattattattattattattaattatttactgttatttacccctaaacaacagcataactcaaataataatgacacacacgtcccgcccatatacacaataccactagcctatctgtcaggctatctggcctttgcttggttcctgatggagctgtctggagacagctccctctgtaaaaatcccgacttaaacacaggggacagaagaaaggggggacctaggtcagatcataaactgacaggctcccagcgtccttagggagtgctaatgtggaaactttgagaacgtgctggacacatctgggcagagggcagaaggcactgtttgtttttatgtggttgatggataaattccatatggggatataagacctgtatatcaccccattttaggcccaggcatgtggaagcacagtggggttagctactgggtttcattaacccaaaccatgcggcatggtttgggagccatgggaatcgggagcccagagtaggaacctgggtgatgggggaggtccccagagaaaagtaacccttgcattcactgcaagtaagatacaacgtgaaatgttaagtccccttttatgtgttttgcacattctatagttgcaaaacacatagaatgtgcaacattttcatcaagatagaaaaggtaaagaaagcaaaactagtattttggcctaacacaaccaagcatgatttgccaattgcgctatcctgtggagaaatctaccactacactatccagggaatctgtggtcagtcctcacccccgcaccctctaacattttacttgcactaaatctgagttcagctaaagtaatgtatcctggaatcagagaagccctagggttggggacaaaacaaggatgggccagtactggcatctcaggtacaggtgacttcctggctgtcctggggaagctcgttgttgaaactgctctctccaaatgttgagtaaggagggacctggggagcttcgatgatcagcagaccctctggggaaagtgaggcaaatactgtcacaggatccacctctgcaggaagctggattttctttgtgaagttcttagaaacaatgccaccttcttgctgtttctcttcatgtttgccagacacctccacgtatccatctttggtcttcaccatcaactcctctggcttgaagctgtgcacattcacacacactttccagggctccccagggaagggtgggggggtcctgccctcggcaggcaccccaaacctggcggtggcagtggggccccggggcaccatgcccgaccttagggtgcctggccaggcggaggagagacgaggcagagcccagtcgggccaagaggctgtcaagtcgtctgggaaggggtccatgccaaagccatcatccagcaggcgagaggagaggggagagtcccgaaaggggtctcggcgcaggcggcttgggtagtggcaggagaagggcatctgaccgtcagccatggtggctgctcagctcagagagaaacagaggctcagagagacagaaccacctgcccaaggtcacacaacaaggtggtgtggctgggctagcttattcttcagcttccgaaaatgctgcttttctgcagggagaagcagaaccaaccactgccagggacggttgtgtcccctcgactggggtcccagcccccaaaggtaacccccggggcagatccagcagaatcccagagggtccccgtccgcactgcctcacgacagaccggcaagccaccgtcctcccaggcttcccaggctgcccaggctggcagccagaaccgctgaggtctagagcggagccaggagcttaataaacccagggcacgcgcgcctagaaacttcttctggctccttctgggctgcaagccttctatttatttgctgctggaggctggaggcgggttttgcaagcgtctcctgtcacaggaatattcggaggtgatgaaccagccccggacgaaa

SEQ ID NO: 59066 - DNA, 1409 bp, Homo sapiens
cctcggttccgttgcgtaggttgtccctcagtgggacactgcagggtgcggggacaactacgaagatggcggttgcgcgcttggcagctgtggcggcctgggtaccttgtcggagctggggctgggcagccgtccccttcggtccccaccgtggcctcagcgtgctgcttgcacggatacctcagcgggcgccacggtggctcccagcttgtagacaaaagacgtcactctcattccttaatcgaccagaccttccaaacctggcttataagaagctaaaaggcaaaagtccaggaattatcttcatccctggctatctttcttatatgaatggtacaaaagcgttggcgattgaggagttttgcaaatctctaggtcacgcctgcataaggtttgattactcaggagttggaagttcagatggtaactcagaggaaagcacactggggaaatggagaaaagatgttctttctataattgatgacttagctgatgggccacagattcttgttggatctagccttggagggtggcttatgcttcatgctgcaattgcacgaccagagaaggtcgtggctcttattggtgtagctacagctgcagataccttagtgacaaagtttaatcagcttcctgttgagctaaaaaaggaagtagagatgaaaggtgtgtggagcatgccatcaaaatactctgaagaaggagtttataacgttcagtacagtttcattaaagaagctgaacatcactgcttgttacatagcccaattcctgtgaactgccccataagattgctccatggcatgaaggatgacattgtaccttggcatacatcaatgcaggttgccgatcgagtactcagcacagatgtggatgtcatcctccgaaaacacagtgatcaccgaatgagggaaaaagcagacattcaacttcttgtttacactattgatgacttaattgataagctctcaactatagttaactagtatcacatgtttagttggtatgtaaactaatgtatccacgaagattggaagagggataagaaatgaaagatcctgatactttaaggtttttccctttcctctattttgtaaatataagatgagtattatttaatgatgtatttgcataagtaatgcaaattgtgaagaaggaccagctgctgtttagaaaattttctccttccttctgtccttgattttttttccattaaagtatttcctttttttaattcaagaaaagtttacctttcttatgcttatgttagctatgccagctcttaattgcatccttttctaattaggattattaataaagcgcggatattttgttttttattatagacagaaattggtgccattacttgtgattaaaaaatgcaattcacaaaatatagggactgtatt

SEQ ID NO: 59067 - DNA, 2208 bp, Homo sapiens
  misc_feature (1)...(2208): n = a,t,c or g
aatttctcaaggttataggttggggttcttagaactttttgtggtgtgtgttggcctagagcgactcagaagcgttagtgacttcacctaaaaaagctaacctctctgctgagcgcgaccggtatgcggcgcaggatgagcctcagggcttctgttaagagtctgtctgagaaagccggtctgcgctgttcctcggtggcgaccttaattatgagatgagctaatgctttactgacttaaccatggcgcagcgggcagtgtggctcataagccacgaaccgggaactccactttgtggcaccgtgagattctccagacggtatccaactgttgaaaaacgagccagagtcttcaatggagcaagttatgtgcctgttcctgaagatggtccctttcttaaagcactggtcctttgaacttaggattatttggatgattgataaagacttcgttgagagtcgtgatagctgttcacgcatcaataaaacatccatttatggactcctgataggagtgtgatttggaaggaatcatgccaaatgttaccatcagcttgagtctccccaccaatggatctccacttcaggatattctagttcacccttgtgtaacttctcttgactctgcaattctgacttctagtagtattgatgcaatggatgactctgcatttagtgggccttacaaatttccattcactccacctttagagtcattcaacttatgcttctacacttcccaggtccctgtcccaccaattttgggtttttatcaaatgaaggaggaagaagtacaactaaggaataaccattaatttaaaacttcatggaaagtgtggaaaaataattttggaattctgtggaagcccatataccttttttacaattagaggtcccattacacatttggaatacaaaactagttttggccagcttgaagtatttcgagagaaaagcttattgatctggattattggccagaagttcccaaaatcaatggaaattagtctttctggaactgtaacttttggagccaagagccatgagaagcagccatttgacccaatttgtactggagaaacagcatatttaaagcttcattttaggatcttagattacacacttactggatgttatgcagatcagcattcagttcaagtttttgcatcaggaaaaccaaaaataagtgcacaccggaaactaatttcttctgattattacatctggaattctaaagcccctgctccagtaacatatggatcattattattgtaatagtctcatgtttaaatgggattatataatgataacagtttaaagaaaatcataatcttatatttttaatgtggatgcatataacctgtgagtgaaaaatcactgaatgatttaattgtaaaagtagtcttatgtggtgtttgtagtctgatagagcttgaaaggacattttaaaagctaatgtctccaattttgttaaccttcgattttatgccagtataattcagaacatagaaaagtaatgattcacttgggctcattttagactggtcctgggtcaccctgccacacttgtttcctagtgtttctgtggcagacattgctaatcaattacagcccttttctgtactgagccttggataaagggtcaggctcctttttagttcagagattcaggcagccactcccagtgggttgtagataatgtgcaagataaaaactattttctcttccaaatctaagtactaagctcctagtataaggtgttgttacagaataccagagaccatgttagagacaactacatctcttcaaaaaacagccaacagagacaaaggaaaagtgtttaaatagtaagctgttcttcttaatcagaactatcctattgactaataaataatctgcataattctacttaaggtgtgtaatctctgttctagagttagtttttaagtaagcttgttaatctgccactttgacattttgcttaggatgtcagtagccatattaagatgtgtagaataccttcagaagatgatcatagtgttttgtaatcatttaatgtctgcagccaaatttttaaaggtaatttagacctaatactgctcttgctgtgtcttattaagttaaaattaatgaatgaattctggggaaaaatttcaaaagggcactctgtggggtaggaggagtatccanttaaggccttatttttagg

SEQ ID NO: 59068 - DNA, 2249 bp, Homo sapiens
cggacgcgtgggcggacgcgtgggtgcgcgcctgggacctgaacatggacttcccgtgcctctggctagggctgttgctgcctttggtagctgcgctggatttcaactaccaccgccaggaagggatggaagcgtttttgaagactgttgcccaaaactacagttctgtcactcacttacacagtattgggaaatctgtgaaaggtagaaacctgtgggttcttgttgtggggcggtttccaaaggaacacagaattgggattccagagttcaaatacgtggcaaatatgcatggagatgagactgttgggcgggagctgctgctccatctgattgactatctcgtaaccagtgatggcaaagaccctgaaatcacaaatctgatcaatagtacccggatacacatcatgccttccatgaacccagatggatttgaagccgtcaaaaagcctgactgttattacagcatcggaagggaaaattataaccagtatgacttgaatcgaaatttccccgatgcttttgaatataataatgtctcaaggcagcctgaaactgtggcagtcatgaagtggctgaaaacagagacgtttgtcctctctgcaaacctccatggtggtgccctcgtggccagttacccatttgataatggtgttcaagcaactggggcattatactcccgaagcttaacgcctgatgatgatgtttttcaatatcttgcacatacctatgcttcaagaaatcccaacatgaagaaaggagacgagtgtaaaaacaaaatgaactttcctaatggtgttacaaatggatactcttggtatccactccaaggtggaatgcaagattacaactacatctgggcccagtgttttgaaattacgttggagctgtcatgctgtaaatatcctcgtgaggagaagcttccatccttttggaataataacaaagcctcattaattgaatatataaagcaggtgcacctaggtgtaaagggtcaagtttttgatcagaatggaaatccattacccaatgtaattgtggaagtccaagacagaaaacatatctgcccctatagaaccaacaaatatggagagtattatctccttctcttgcctgggtcttatataataaatgttacagtccctggacatgatccacacatcacaaaggtgattattccggagaaatcccagaacttcagtgctcttaaaaaggatattctacttccattccaagggcaattggattctatcccagtatcaaatccttcatgcccaatgattcctctatacagaaatttgccagaccactcagctgcaacaaagcctagtttgttcttatttttagtgagtcttttgcacatattcttcaaataaagtaaaatgtgaaactcaacccacatcaccacctggaatcagggattgctcactccaggttactgcaaccctaactcactctagtgggaccttgactggagaaactccacgatcttcctgaagaagagaaatggatgtttccaaattccacaataagcaatatgtggtgataatgaaaagaatgattcagtcttgacggtgaatggaagacacttacctaacaagtactgctcatttacactcaaattaatcttgaagtagtcttaaaatgtgtaagaagttaaaacttgagaagcaaaaaaatgcctgcaaaaagaagatcattttgtatacagagaaccggatgaatataagcaatgaagatgaacatttattgatcttctacatacaagacttcaccataaggccaggagcagtggctcacaccttgtaatcccagcactttgggaggccaaggtgggcggatcaccttgaggtcaggagttcaaaaccagcctgaccaacatggtgaaaccctgtctctactaaatattagcggggtgtggtggcgggcacctgtaatcgcagcctttcaggaggctgagacaggagaatcgcttgaaccctagaggcggagtttgcagtgagccgagatagtgccattgtactccagcttgggcaacagagtaagactctgtctcaaaaaaaaaaaaccaaaaccaaccacccaaaaaaaccccctcccctggggggctcctggggaaaaaatttaaggggccatatttattaagttcccaaaaaagggggaaatggtccttaggccgggaattggttttgcaaccgttctaggaaatgggggaaaaaattttgacccccttcttatgggcccaggaa

SEQ ID NO: 59069 - DNA, 2222 bp, Homo sapiens
gcggccgcccgagaggaggcggtgccgagatcgggggcgccgagcgcggcagcagagagcggtagcggcccgtcgtggcgcaccagaaccgaaaccaggggcagccgcacggccacttgagccgccccttcctgctggagccagcgaggggtgcctgcagccgggaccccttcctctccgcgtctcctcgtctcccgcgcagccgctccctcggcggggccgtggggagcgtggcgtcagggggcccgcgcggcgcagtcccccttcagcatcccgaacagcagcagcgtcccgtacggctcgcaggactcggtgcacagcagccctgaggacggcggcggcggccgggaccggccggtgggcgggagccccggcgggccgcgcctggtgatcggctccttaccagctcacctctcgccgcacatgtttggaggatttaagtgccctgtatgctcaaaatttgtatcctcagatgaaatggatttgcatcttgtaatgtgtttaacaaagccacgaataacctataatgaggatgtactgagtaaagatgctggggaatgtgcaatatgccttgaagaattgcagcagggagatactatagcacgactgccttgtctatgcatatatcataaaggctgcatagatgaatggtttgaagtaaatagatcttgccctgagcacccttcagattaagcgtcagcttcctgttttataggttttcttgtcttgacaagatgcttgaaaaaccaagaggatatgaaaatctgtctctggagaaacaaagacgcaggcatactcagccagaaatctgagttttgtgagacttggtaatacagagatggacaatcgtactggggtaaaaaaaccctgctgaagagaggacagtgaccacagaactcagtgtaccaaacatgcatacaaaggacacacagggattttgaaaatgctgcacatcccttaatagtcatctacataggtaatactgataaacattttgtattcagacgccaaagttaactgatttaaaagttgatttactttttattaagttctccagagctgcacaactagttatgttttgatttgttttgttttttaatttggggtctctttgttttccccaacataatgttcataatgtttctgcattcatctgttcttaaattgaaaaacatataatttacttcttataaattgaagtcttaaatgtgaaaccaagaaatgtaatcaagcagtaaaaacatctgaatgtagaccatgatctcaagttcttccattttctcccccacgagtggaaaatagacttctacataggaaagctaaaatatgttaatatttttaaattaaaggtttaatatcagaatgcagtccaaagagcaaatcatattacataattacattttaattaaatatagaatattctactgaattgcaatttattaaatattcttatcctcttaaataaaactgctcaacagttaatcagcagtgaatcatcttgcagctatgcaatttaaaaaaaatacagattaccaatttcaagtgctgccagctaaaataactgttttaacgggtatcttttgtttgttcttttcacttaattattttattgtgctttgcatctccaggcagttctctcacatttgggtaaaatgtttagcaggctgtaaacttaagaaaagggtaaaataaaattttctggagaggaacttggaatttgagggagattttatatacctttaaaaactgtaatttaattgggatgccaggtttatagcaatttgcaactttaattttcccagataatctggaggttagcatttgataaatgattttttaaagtagatatgaagattttgttaatttataatttattcatgtgttattactgtaattgaaaatgttatagacacttttaaattcagtttgtgtagaaagaaatgtgttaaacaaaattatgttaataaatattcccacataatacatctgaatggttaaaaatactggaagagttgtcagggctacaatagtgaatgtccttttttttaatatcaaaaatatcgataagtaggttttgtgttttcaacgtagggaaaatgttatcagtgaataggtggcgtactttacttggtataatttaaaggtgcacagtaagtactgattcccttattttaatctttctttactcataatgtatttaagaatttgctgttttatttaac

SEQ ID NO: 59070 - DNA, 1112 bp, Homo sapiens
aatgagaccctgtagacattagtcagtgcggtggaattctgccatctcatcttccccctaaaaacccttttatgtacacctgcgcagagaagagggctgcctggcctccctgggccgctggtacagatcacacacacacacagattaaacgcagcccgtttaatgatggggcccagactgcagtggctcaagacaggacactgcggaaagccgccatgtgccgccgcacactgtctgagatctgctcagccgatctgctccggccgtagtaatccgtgaagaggccgtcagggttgagcaggtagatggcaatggagtggtccacgatgtagtcctggtcctcatccttggggccggcattgtagtacacgcggtaactgtgactagcctgggcaacctgtttggtggagccggtcagacccaacagtcttgggtggaagtcctggacgtagcgggccatggcttcaacgtcgtcccgctcggggtccacagtgatgaagacaggctgcactggaggcaaaccaggctctgcttccagctgccgcaccacctgcaccagcttctccagctcgtctgggcagatgtcagggcagtgagtgaagccaaagtacatcagcacccactggccccggaagtcagccttgcagcgagcccggcctctgtgatccagcaggtggaagtcgccctggcccacagctgcctggcgcagggcttctgttcgcttttgctgctgcagcctctccttctcagccctcagggccagccaggccccaccgagtccagccccgaacaggcctgtgatcagcagccgggttcgaagcccagggccctggggctggccctgcccacctgtctctgcagggccctgccttgacaaaagccaggacctcagatgcagggcctggcctcccagggtcccagggaggaccggaggcttgagctgagagagcctgtgccaagctgtggggctccgagtcagcagcagcatggatctgatgctcctcgcggcggggccgcgcgtcagtggaccaagcacgagaggaagcgccgacctccagctccctgggctctgccccgccggctcagggaaagcgggcgccacacgctcacag

SEQ ID NO: 59071 - DNA, 1570 bp, Homo sapiens
cgacccacgcgtccgggggccgcggcggcgcgggtgctccgggccgaggccgcgtctggctcttgctgattgaattcctttggtgcagtttagcatgttcctctgtgttctgcatctcctgtagtgtaatgttcaagctcagaaatgccttatgtggatcgtcagaatcgcatttgtggttttctagacattgaagaaaatgaaaacagtgggaaatttcttcgaaggtacttcatactggataccagagaagatagtttcgtgtggtacatggataatccacagaacctaccttctggatcatcacgtgttggagccattaagcttacctacatttcaaaggttagcgatgctactaagctaaggccaaaggcggagttctgttttgttatgaatgcaggaatgaggaagtacttcctacaagccaatgatcagcaggacctagtggaatgggtaaatgtgttaaacaaagctataaaaattacagtaccaaagcagtcagactcacagcctaattctgataacctaagtcgccatggtgaatgtgggaaaaagcaagtgtcttacagaactgatattgttggtggcgtacccatcattactcccactcagaaagaagaagtaaatgaatgtggtgaaagtattgacagaaataatctgaaacggtcacaaagccatcttccttactttactcctaaaccacctcaagatagtgcggttatcaaagctggatattgtgtaaaacaaggagcagtgatgaaaaactggaagagaagatattttcaattggatgaaaacacaataggctacttcaaatctgaactggaaaaggaacctcttcgcgtaataccacttaaagaggttcataaagtccaggaatgtaagcaaagcgacataatgatgagggacaacctctttgaaattgtaacaacgtctcgaactttctatgtgcaggctgatagccctgaagagatgcacagttggattaaagcagtctctggcgccattgtagcacagcggggtcccggcagatctgcgtcttctgagcatccccccggtccttcagaatccaaacacgctttccgtcctaccaacgcagccgccgccacctcacattccacagcctctcgcagcaactctttggtctcaacctttaccatggagaagcgaggattttacgagtctcttgccaaggtcaagccagggaacttcaaggtccagactgtctctccaagagaaccagcttccaaagtgactgaacaagctctgttaagacctcaaagtaaaaatggccctcaggaaaaagattgtgacctagtagacttggacgatgcgagccttccggtcagtgacgtgtgaggccagaaagcgcacgggagcctggcctgccttttgccgttcctcagttttccttttcatggaggcttctagccaaagatgataaagggggaaatggtttttagtgcgtatattatactgcctcttaggtgtactctttataagctggtaaaccaagaatctagggagtggccaaactaaatataatttctttaaaaaagaaagaaaaagg

SEQ ID NO: 59072 - DNA, 506 bp, Homo sapiens
attctttccccaagtctctatggtagcgtcagcgtcggaggcggtagtgacggtggcgtttccttgaggaagagtgagggttccaacttttctgcttatctgggaggtgttgggcgcggacagtcgagatgtcagagaaaaagcagccggtagacttaggtctgttagaggaagacgacgagtttgaagagttccctgccgaagactgggctggcttagatgaagatgaagatgcacatgtctgggaggataattgggatgatgacaatgtagaggatgacttctctaatcagttacgagctgaactagagaaacatggttataagatggagacttcatagcatccagaagaagtgttgaagtaacctaaacttgacctgcttaatacattctagggcagagaacccaggatgggacactaaaaaaatgtgtttatttcattatctgcttggatttatttgtgtttttgtaacacaaaaaataaatgttttgatataaaaaaaaaa

SEQ ID NO: 59073 - DNA, 602 bp, Homo sapiens
  misc_feature (1)...(602): n = a,t,c or g
aaactgttgagaaaacggaactactggggaaagggagggctcactgagaaccatcccggtaacccgatcaccgctggtcaccatgaaccacattgtgcaaaccttctctcctgtcaacagcggccagcctcccaactacgagatgctcaaggaggagcaggaagtggctatgctgggggcgccccacaaccctgctcccccgacgtccaccgtgatccacatccgcagcgagacctccgtgcctgaccatgtcgtctggtccctgttcaacaccctcttcatgaacacctgctgcctgggcttcatagcattcgcctactccgtgaagtctagggacaggaagatggttggcgacgtgaccggggcccaggcctatgcctccaccgccaagtgcctgaacatctgggccctgattttgggcatcttcatgaccattctgctcgtcatcatcccagtgttggtcgtccaggcccagcgatagatcaggaaggcatcattgaggccaggagctctgcccgtgacctgtatcccacgtactctatcttccatcntcgccctgccccagaggccaggantctgcccttgactgnattcacttactc

SEQ ID NO: 59074 - DNA, 4377 bp, Homo sapiens
tttttttttttttaaaatatacagatatatttatattatcaaaaagtccccaaattggggaaaggggcatcaggtagtctggaccccccactcagcccagactggaaggaaggctgaagtccccaaagcgcagctctcagccctgtagaagctcagccaagagctcccctccccgtgagctgagtgctccttctacagcacccgcttttcttgctgttctgggagtttgttgggaggagcagggggctcccttccgggcagggccccagggcttcaacgcctctgaaggtgggggtggtcctccccaagttcctgacttatggcccatctctccaagccccacaagggacagttgaacccggtggggttgagcaggttggggccaagaggtcttgaacacctggggcagagttgggaagaggtttcctgcccagggttgacccctgctgcctcccagcccctgccggggaacccccatgctgcaagtcaggatggaggatgtgggttgtggggtgcagtttcccatgcaccccccgctggctcacatgcaggccttggagcataaggggtgtctgaacaaaaggcttccagcggcggaatcctagagccaaggatgggctcctgtgctcagacgttgcgcagaagagacagagggtccgcggtgaaggcagccacactccggcgcatttcattttcactacctcgaagggggatcagtgacacactacccagccggacctcaggcactgcccgggacacgcgtgagggctctgagggccacaccaggccgtcatgctgcacaaacagaaaggtagcgaaccactcccggagctccatctgtgtgtcacagcagaggtaccactgctgcttctcatgtttctctgtctcatgcaccactgtgaagccccagcaggtgggtggcctgagtttcttcttcactcccaggtagactttgagactcttaataggccactccttctcaggccggtgactggtctcaggggccccgctccacggcctctggctccggacctccttgtagagccgcaagcagctgctgttgaggatgaagtagcgatcgtggaagccacctgagggcaggcccaggcccaggaggctgcggtcctcacggaacttcatcatgccatgcttggtgtcaccgacacggctggccaggtacagcagcatggcctccatggcctggtgcttcttcaccaccaggtggctgtccgtgcccagcccgtgcaggatgggcagcaccttctccgcaaagtgcagggggcgctctgcctcctccctctcgttgacctcaaagcaggtccaatagtccttctccctgatgcccacgttccggcgatccaggatctccagggtgagctcctcagcagtcatggatgctgggaccttgatatgctgctcagtctctgccttcttctcttccagatacactgtgcagatgaagtcaccggcatgctgggtcccactggcagtgccagccacgcgcatcttcacaatggcagtgatctcctcccgctgcttcctgagctcttcctcatccacactaaacaccaccacatagtggttaatgaggtcttccaccacacggccagccttgtagtcctgcccatctgtctggaagagcgtgggcccaaacacaattgccaggttgtgcacgttcatctggttcgtgtctgagaagcactgaacacagtacaggtggctgataagggccttcactgtggcccggttgacagggggcagccgcaccagcagctctcggtacctggagaccttctcctcctcgtcctcaatctctgaggcctccagccaggttaggcgctgggcgcgagtgaagagcccatcaggcaggtcgcgcaggaagcgcttgagcgccgaggaaacatcatccacgtgctgctcgccctccttgaggtgcacagagcgcgcatcctgccgcaggctctccagcagccgctgtgtcttcgatgtctgcccacacttgcggtagatgccctcggaggtcaggccgcactgcgtgatgtagtccacacagcggtacacgatcaccgggatatccgagtccccaagctgctgctccgacagcgtgtcccccatgctggcggctgctttctggatggcccccagccaacccatgaagtccagccgccgctcgccctgtatgtacagtgtcctccttcgctccactagcaccagcacctggttctcactgtccccctggatggaaagctcctgcagtttccgtagttgcagcggctcttcgcagggcccctccgggaagacagcacggagctccgagccactgagagagaaccagccctcctgggcccgctgtaggctcaggccagctttgtagggtaggcgtcccagccgctcaaaatcccgggccagcagatcctcggctaggggaggcacgaatgccttagcaatacacttgacccactcatgagcctgctccgcactctccagcccaaacaggtacagccgttctccctccgtgtacacctcaaaggtgtgctcaaagccatgggtgtcaggagggggcactgccaggcacacaatctcgctggcccgaatctctccattgggggtcactgcccgctcattctcaaagtagctcaggaccccgtcaccaaggacacaccagcgccggctgaactcttcccgggcccggcggtcctgtagcagcttgccggcagaggcagtcttgtagaggaagccactgtggctcacggtcggcaggacaactgagtagtgcttttccaggggcttcatcgagtccagccgaggcacctctgtggtccggttgttccgaaggaattccatctgcagcgtctgccccgcctgctctgcaagagccaggggcgtgggggcctcagggtcccccgagaagcagttgatcccagccccacagcccaggagcgcctgggtctcagccaggtctgtggtggtgactgcagcacacagggccttgtccagctcctcctggttgccaaagagcgggtggtagcggcggtacttgccctcacggtacttggcctccaggtggcaccgccgggtgctggggctgctgctgggctgcagggcctcactggggggcacgttggctgcccagaagcggttcccagcgccattccccagctgtaagaagagctcgataagtgtttctgtccacaccttcctgtccatcttcaggctccgcaccttggagacgccagcgcccaggccacggtgctcccctgcacagcgcttgcagataacaacacagaggttgatggaggcccagtcaggctgaggagccccgcagtcagcacagaacctgttgggggctgcagcccagatgcgctcggccacctccgaggtagacagggcctcagcgatggctccctgcatggcctccaaccactgctccttctctagctctgagtcagcagagaagctgaagatgcggtagggcgtggtgaggtcgaagctgcgccggtccacttccttcacgttgcccacgctcatgtcgatgaaggtgatgccaatgcccaggtggtactcctctagattcttgtagagctgcactttgtccccgaccacggccacgtacagcttattcttgaagccacgaagctccaggctgccagcgcggtcaggctgctctgagcctggaactcccagcagataagcgctagagagccgggcccgggcacgctgctcagccatggcctgctgcagggcctgcatccactccttccgctccacatcactctctgcccggaaggcaaaggttcggttgtttgtgatcacttcaaacttctggtccccgatggcagccacgtgggagatgcaggccacagagataaagcgcttagagtaagcgtccttgttactgtcaaagtatcgcaggtgatcagtatccagtctcacccatcgtttctgatagatgtaagatccctgcggtgggttcttgtccagccagccagccttgatgactggtgtgacgggggtggagcccccaggcggcccgtccatggggtgtggcgcagctattgtgctgggcaaggacaagctcaggctgctggtatgccatccgccattggggacgccctcataggcgtggtcatcctcttcctcatccccttggtcgtccccagacagttcctctccctcgctcagcagactggccacgcgcacggcccgtgggactcggctcggtgggggctcctcctgcccccgagacccactcagcgtcatccttcccttcaagccacagatcacacccacccggggctgccacgccccctctgtccacacagccccgacccacacagcccagcactttaagttatgtttcctcacactcccctcccc

SEQ ID NO: 59075 - DNA, 1053 bp, Homo sapiens
ttttttttttttgcatagtgagtcggagtttatttttataatttgtagaaaattgacatttagatttcaaaacttatattacaaaattatcagcagcagtcttaagcatttcaacaatgctgatagattccactttgctaacacaaacaaggctattataccatgttcgaaaagcaagacttgttccaagagggcctattattatacatctgcctcactgctcaggacccgtttgtgactgtgtcttcttccatctcttcttcaccatcatcagtgggccctgatctgcgttctctgccagggatctgaccagactgcagcaaccccttcagcctctccacttcagccagagttgaagcatttgctatggcattcttgattgcttctacatcccctggagatggcccacctttctttttgtcagttggcaaaccagcacctggattaaaagttttgcttctcctggcaatatcctttgcaagctgtgcaccccgtttgcccttgaacattttctctgcttcctgacgctcttttagtttcactttctggaaatccagtactctgacttgcggaactttataaatcacatacaatctgtaatgcttcttattggttaccggatttcttaggatacttaggtaagtcagcgatttgagagatgccagagggtccagatcacccagttccacgagactattattggtgagaatgagttctgtcagacagggcagagcctgatcaagtccctcacctatacggcatattctgttgttgttcactaacaatgttttcagtcttctcaacaaaggaaaaccatccagtttcctgatctcattgtcagaaaaatcaatagcatcaaactggtctaacgtagcacctagattttcaatgacgggaattttatacccccggaggtccagctcccggtcgcgcaccgcgttggtgtactgcgccgcctgctcgatcagctccgccgtcagcttgaccatcctgcagcctcccgttcccccgcgctgtggaaagcccgtggcctcccgccagcgagacacgaaa

SEQ ID NO: 59076 - DNA, 467 bp, Homo sapiens
cgacccacgcgtccgggcagcggcggcggccggggaggttcacaataaaggtgctaagaaagagaatgtaagacaggaaaataattaaatattcttaccgagtgtcttcaataggccgtgtttaagaggcgtcttacactccctgttgccagtggctggaacacaatggatcacacaggggcgatagacaccgaggatgaagtgggacctttagcccatcttgctccaagtcctcagagtgaagctgtggctcatgaattccaggaactctccttgcagtccagtcaaaacttaccccctctgaacgaaaggaaaaatgtgctccagctgaggctgcaacaaaggaggacgagagaacaactagtggaccagggcatcatgccacgcaagatttataccatcactgccatccctaacgtgacagaacatgacgggcgtgtcccagaagagcctgcatcttgctctgt

SEQ ID NO: 59077 - DNA, 807 bp, Homo sapiens
ttttttttacagtttaccacacaaatttatttgggagaaacatccagggactaggggacaagagaggaaacctggtgggcagtagggctgggggtacagagtagcagtaagtgtgctgaagggcgtcaaccaagaggaagagccaaggctggggtccagtggctggagggaggcaaggagggctggtatgagggactagaagtcctggccaagcccagatagaagtcaggaaggtggctggaaactggtggaattttacaccaaagtttgctgcagtcacactaaggagtatagagccctctgttttgagggtcattgcagaaatccaggaagcagtattgagagaatatccagaagccagacaccggagaagttcgggtatttgaacaatcactcatctgctccttacttcggcagtcactcaccatgacgtcagaaccgctgctgttctttttgtggagagtgatgcagctgctgccagctggggtgaggcagatgtcagatcccagaaggcaccctaactccttggtctccaagaggcatcggtagcagcgcaggtatttggggaatggaagtggttgagggggttcccaattgacaggaacaaacttacctcatcctttttcctgccccgcctgtgctcagctgcggctcagtgggcctgaactccggagcccacagaatctggcgctgggcgtccgctctccgcgcctgaccgcacctcagaactccggtaggacgggggggtggccccccgctcaagctctgttccctggggaagaaacctggaaagtgcgaaccgcgcga

SEQ ID NO: 59078 - DNA, 1036 bp, Homo sapiens
ttttacatgccttgcatttttgcagaagctctgtcccagggagctcaaagcttatcatagtatttaaaaaaaaaaaacagaaatacagaaagtgtagggactgcaataaagactagtctgcaagtctggggcccacttctcccaaaattttttcaagagttccagggtttaacattcggcctcagaaattccagaatcttggggttcaaatggaatcttccaaactgcccatcccacccagaaaggacacattcttcagaccatatgttccaatgtttttttggggaagtgaggttcccatataagggaaaatgccccattccaaaatacgacctttggacagggtgacgtcattggaaatccgaaataaactgaggggtggggaccagtggggggaagctctgtcacttctggttaccactgttttgaagcttcattgtggctaatccccctgcagaacctcaaaccacttagagatcaactccatagatctttggttttcttcatctgtttcacatggaacacagctttctcctagtctgtgctttgtttgctcacgtgtttttttcttcctcttgtggttcatctgtggcactccattccgacccttgccttctgtcccctgtacttctgaactgtctccctggggacctccgccctctagatgagttatacgctcagaagctcaagtacaaagctatcagcgaggaactggaccacgctctcaacgacatgacctctctctgagaggcagccaggtcgctgccctctgtccttctcacatggtgcctcctacgcccctgtgggcttctaggagctccggtggcctgccttctggtttgaacgtcagagccttcttctgatgtgtctgtgactctacaaccgaaataaagacgggcagtcctcctcttcatgccccctcattctcattttctccacttgctgcctttgagctgtagctgtgtgcccttaaccatagcctgaaacacaaagtgggtggttagcctctctcactcacaaatgaaaagcttattac

SEQ ID NO: 59079 - DNA, 2179 bp, Homo sapiens
gtattggaatgaatatggaggaggactattgtggcaaagttggcaagaaaaacatccgggtcaagcactatcttctgaaccttggaactttcctgatacaaaggaagaatgggagcaacattatagtcaactttattggtattatttggaacaatttcagtattgggaagctcagggttggacttttgatgcctcgcaaagctgtgatacagatacttacacatctaaaacagaagctgatgacaagaacgatgaaaaatgcatgaaagttgacttagtatcttttccatcttcacctattatgggtgataatgatagctctggtacaagtgataaggatcatagtgaaatacttgatggaattagtaacataaaactgaattcagaggaagtaacacagagccaattagattcctgtacaagtcatgatggtcatcaacagctaagtgaagttagtagcaaaagagagtgccctgcttccggccaaagtgaaccacgtaatggaggaaccaatgaggaaagcaactcatcggggaatacaaacacagacccaccagctgaggattcacagaagtcttcaggagcaaacacaagcaaagacagaccacatgccagtggtactgatggagatgaaagtgaggaagacccacctgagcataagccaagcaaactgaagaggagccatgaactggacattgatgaaaacccagcttcagactttgatgacagtggttcccttctaggattcaagtatggctcaggacaaaaatatggtggaatcccaaatttcagtcatcggcaggtcaggtatttagagaagaatgtgaagcttaagtctaagtacctagacatgcgcagacaaataaagatgaaaaacaaacacatcttctttaccaaagagtcagaaaaaccatttttcaagaaaagcaaaattctgagtaaggtagaaaaattcctcacatgggttaataaaccaatggatgaagaagcatcacaggaatcatcttctcatgacaatgggcacgacgcttccacaagttgtgattcagaggaacaagacatgtctgttaaaaaaggtgatgacctactggagactaataatccagaacctgaaaagtgtcagagcgtatcttcagctggtgaacttgaaacagaaaactatgaaagagacagcttgctagcaactgttccagatgagcaggattgtgttactcaagaagtgccagactcccgccaggcagaaactgaagctgaagtgaaaaagaagaagaacaagaagaagaacaaaaaggtgaatggtctgcctcctgaaatagctgctgttcctgagctggcaaaatactgggcccagaggtacaggctcttctcccgttttgatgatgggattaagttggacagagagggctggttttcagttacacccgagaagattgctgaacacattgctggccgtgttagtcagtccttcaagtgtgacgttgtagtagacgcattctgtggagttggaggaaataccattcagtttgccttaacaggaatgagagtgattgccattgatatcgatcctgttaagattgcccttgctcgcaataatgcagaagtttatgggatagcagataagatagagttcatctgtggagatttcttgctgctggcttcttttttaaaggctgatgttgtgttcctcagcccaccttggggagggccagactatgccactgcagagacctttgacattagaacaatgatgtctcctgatggctttgaaattttcagactttctaagaagatcactaataatattgtttattttcttccaagaaatgctgatattgaccaggtggcatccttagctgggcctggagggcaagtggaaatagaacagaacttccttaacaacaaattgaagacaatcactgcatattttggtgacctaattcgaagaccagcctctgaaacctaactatgcagcagtgcgaggacaaaagatcatggagtggtcaaaatattcagatgagacatttggcatgtcttcctttattcactgatattttctacccatggtcttatatcaccgtatgaaatggaaacttacaggacttaaatatcagtgaaatattttgagatctttgaataattcctttagaggaattatacaaaattaatatatatgagtcct

SEQ ID NO: 59080 - DNA, 631 bp, Homo sapiens
gtgtggtggaattcccggagaaggtgaaattctgtgtgctccctccggcgagagactttgtcagctcccgcacagtaacatcctgaataaagtcaaaactcaaccaacaggtggaagtccaagaatccgagtggaggctcaccgaggcgaaggggccaaccatgggaaaggagagtggatgggactcaggcagggctgctgtagcagctgtggtcggaggagttgtggctgtggggactgtgctcgtggcgctcagtgccatgggcttcacctcagtaggaatcgccgcatcctccatagcagccaagatgatgtctacagcagccattgccaacgggggcggagttgctgctggcagtctggtggctattctgcagtcagtgggggcagctggactctctgtgacatctaaagttatcgggggctttgctgggacagctcttggggcctggctgggttcacccccttccagctgaacaccacactgaggcagggagttggctctcttggtggagatgactttcctgggcctctggatgacaatcttccaaaggacaagtctcctactcccaaaactatttaaggaagcatgaaaaataaagatgctggttatcttctcctaaaaaaaaaa

SEQ ID NO: 59081 - DNA, 1855 bp, Homo sapiens
catagagcaagagtggacagaagcagggagtccccaggaggggacctcaggcatccagggagggtgaggagggacattactttgtcaggacatccaagactcagtactcagcatgttgtgctcctgagggaggatgaggttggagatccaggaaccaaagacctgggccacccccagcatggcagtcccatccaggagacacagagtgaggtggtcaccctggtcagtccactcccagggagtgacatggcagctttaccggcttggagagctacttctgggctgacactctggccccatacagcagaaggcagggatctgctgggagctgagaacagagccttgactggtgggcaacaagcagaggatcccaccttggcctcaggggcttatcagtggcctggctctgttgagaagctgcaagggtcagtatggtgtgatgctgagacgctgttgagcagctcgaggactggtgggcaggctcccccatggctgacagaccacgatgtgcagatgctccgtctgttggcacagggggaggtggtggacaaagccagggtccccgcccatgggcaggtgctacaggttggcttctccactgaggctgcccttcaggacctgtcctctcccaggctcagccaactctgttcccaagggctctgtggcctgatcaagaggcctggggacctgcctgaggtcctgtccttccacgtagatcgtgtgctggggctgcgccggagcctacctgctgtggcccgccgcttccatagccccctcctgccctaccgatacacagacggtggagcaaggcctgtcatctggtgggcgcccgatgtgcagcacctgagcgacccagatgaggatcagaactctctggccttgggctggctgcagtatcaggccctgctggcacacagctgcaactggccaggccaggccccgtgcccgggcatccaccataccgagtgggcacgcctggcgctcttcgacttcctgttgcaggtccacgaccgcttggatcgctactgctgtggcttcgagcctgagccctcagacccctgtgtggaagagaggctccgagagaaatgccggaacccagccgagctgcggctggtccacatcctggtccggagcagcgatccatctcacctggtctacatcgataacgctggcaaccttcagcaccctgaggacaagctgaactttcggctgctggagggcatagatgggtttcctgagtctgccgtgaaggttctcgcatcagggtgtctgcagaacatgctgctgaagtcgctgcagatggacccagtgttctgggaaagccaaggcggagcccaggggctgaagcaggtcctccagaccctggagcagcgaggacaggtgctgctgggacacatccaaaagcacaacctcacactcttcagggacgaggacccataagccgcacacagccctgagtcaatgagcatccatcctgatggccacattttcttgggctcactcatcttgaggacaaatgggaaaagccagaagccagaggggcacaaggatgtcacgggatatttcacctgcctgggatggtggaggtagtatggggttttcaatctcaaagcgtccctttctgccttctcggctctggctatttattcccttgcaccaacaaatacattcgaaaatgttctgtgagctgctcaagaaactgtaaaaatgtgtgatgcacgtgcatatgcagagtgggagaactttgtgtgtgtgtagaggtgtgtaggtgtgggtggcatgtgtgcccgcctgcatgcaatacctgagaccaacctaataaaggtacaatcttcatagaactgcaaaaaaaaaa

SEQ ID NO: 59082 - DNA, 1083 bp, Homo sapiens
gcggccaccgttttaaccacgattggcgaagcgccgtcatttcggagcgactcagcgcctgcccgccctctcgccgcgtcgccggtgcctgcgcctcccgctccacctcgcttcttctctcccggccgaggcccgggggaccagagcgagaagcggggaccatgttccgacgcaagttgacggctctcgactaccacaaccccgccggcttcaactgcaaagatgaaacagaatttagaaacttcatcgtttggcttgaagaccagaaaatcaggcactacaagattgaagacagagggaatttaagaaacatccacagcagcgactggcccaagttctttgaaaagtatctcagagatgttaactgtcctttcaagattcaagatcgacaagaagctattgactggcttcttggtttagctgttagacttgaatatggagataatgctgaaaaatacaaggatttagtacctgataattcaaaaactgctgacaatgcaactaaaaatgcagaaccattgatcaatttggatgtaaataatcctgattttaaggctggtgtgatggctttggctaacctgcttcagattcagcgtcatgatgattacctggtaatgcttaaggcaattcggattttggttcaggagcgcctgacacaggatgcagttgctaaggcaaatcaaacaaaagagggcttacctgttgctttagacaaacatattcttggttttgacacaggagatgcagttcttaatgaagctgctcaaattctgcgattgctgcacatagaggagctcagagagctacagacaaaaatcaacgaagccatagtagctgttcaggcaattattgctgatccaaagacagaccacagactgggaaaagttggaagatgaacacttgaggacttcagcttctcacctactttagtacagttgggaaccatacacttctggcatgtttggaaatcaaaatgtcacattctcgggggaggaagcccagaaaattgggtatgttctagagatttaccaccattgcttattgcttttttctttaataaagtttaggaaagtaaaaaaaaaa

SEQ ID NO: 59083 - DNA, 1667 bp, Homo sapiens
ggaagtgcttggccacagtcgcagccccggcgccccgaagcgggaaaaaggctgggtgccgccgtcccccagctgcgcaaccctaggaactctcggatcaacctggatgccttccttcacaataatctcatggaggtaatttaaagaatcccttttttggagagtcagagagaaaagcaaaaaaaaagagcatgaggaatttgaagactgagagatgagttgtgtagcaccaacattttctttctgcctgaccttcatacctgatgaattaaaagggcaataattaaggtggaatttgcctcacatgaagttttattattttagttattaaaatagtttccaacactactgagaagcaaaaagcaattctcgttgttttaagaacataggatgtttggaagagtgagataagggacacattgaaaacagagaggcaatctgaaggctaccttgacgcatctgcaaagctcccagattctgactttcacaagacttgctttctgtttctgggcctcgcctaaacagactgccagtcatccgaaccgtggcaggatggagatgtttgtgtaaggtagactcaagtttgcaagactcaagaagtaaaccaccaaactaattttactttcacttaaaccagattgaaaccaagacttgaagaattaaaaactttgacattaaccattgattcactccaatgaaataattgtgttatagccagaatcatggtgaaattggaacaaggcttttgatgggatttttaattgagggacttatattaaattggatattttctttaatgaacagcatgtggccaaaattctattttcattaaagtatattaagcatcatgacaactcatattaaacctgcaacaaatgattaatgacatttagagacttcaaatgtcatgagacaccttaaatattaagaatcaaaaagaacacctcaaagttgtttctattcttagtaattatgcttaaaaaaaaatctttccttgctttgaaagccagttgctaaaaataaaaactgttccatgaaaaatcacaatgcccaatgataaatttatgtatttgttttttaaagggggaggatggtgagaaaaatagaaagctcctggctgacatcagaggtcacaagatgagttcctcatttgtccaaatgacattcagctgctaaaagaagtcagacttcttttacagggctgttgaaaagacagtaagtcaggaggttttcaatacatgactgcaggggaatcagacacaggctagtcacttaagttgcttaattgtccgtgtacccttagcccacgacttcaggggctcagcagcttcatccttcatggcaccaaaccttgacgtaagggattcaaagacacactcataagaatcgtgaatttgtcctcatgcaaaatttgggggactggcctacaaaaccgaaacaaggagatcgtatcccctaagtgaaagggactttatattaattgtcagttataacaatatgtaaaatacataaaagagatagagcactgcaggccatcaaggtcaaacatttgaaacagaattaaactaaattataaggaggattaaatggcttttgtctttgtaaagaaaagaatatgcatgcattgattgcctatgtagaaggattaataaatcttttggcatggt

SEQ ID NO: 59084 - DNA, 532 bp, Homo sapiens
cttttcccacgtggtgaatgccctggagttgtgagggtgtgagggtcgcgttcctgctgtctggactttttctgtcccactgagacgcagctgtgtgaaatatgatttggcgaggaagatcaacatataggcctaggccgaggagaagtgtaccacctcctgagctgattgggcctatgctggagcccggtgatgaggagcctcagcaagaggaaccaccaactgaaagtcgggatcctgcacctggtcaggagagagaagaagatcagggtgcagctgagactcaagtgcctgacctggaagctgatctccaggagctgtctcagtcaaagactggggatgaatgcggagatggtcctgatgtccaggggaagattctgacaaagtcagagcaatttaaaatgccagaagggaggtgacaggcaaccacaggtttaaatgaagacaagctgaaacaacacaaaactgtttttatctaagatatttgacttaaaaatatcgaaataaacttttgcagctttctccgaaaaaa

SEQ ID NO: 59085 - DNA, 1116 bp, Homo sapiens
ttttttgggattttgcaacatttaatcaaaaaagaatctggcatcttaaaagttaggtttacaaacttgacacattctcaatattagcaatttatctatttaaacattgtctaagaaaatatgatctatgaagacattaatacattaataagatacttaagagttcattataagctacaacactttgcaaataagtatccagtttaattgtaacaaaccacaatttgtgagcaaatttaagaatataaaaaacattaattagttaaatacaattctctgggaatatacattatacctacagctgtttttacagtgagagtcttcctttttttttccttttaattatcaaaatggtaaatcactgtatggtcctggatctccatgctataaaactgaaatatgtatttccagcgtagcagatggtgaccaggaaggcaaagaacgatgaggccgcccagctgttgaagttgtgactgtccctctcaggggagacggaagatgcatctacaacagcggcagagaggtacaagacgaaggcactgccgttaaagcacaggcccactgttgtccagggcacctggggaatcctggtgtaggtcattgttatgtagataatgaggaagaagacggtgaggacccagtaaaatacagctacaaacatgacccagccaaatgcggggacccggaagtactcagttccagcaataagcgtccataccagcagccccagaacgatctcggccacgatgaggaagccgggcagggtgcggaggaactcccggtcgtaggcgaagctgctgctgctggtatggacgcttattgctggaactgagtacttccgggtccccgcatttggctgggtcatgtttgtagctgtattttactgggtcctcaccgtcttcttcctcattatctacataacaatgacctacaccaggattccccaggtgccctggacaacagtgggcctgtgctttaacggcagtgccttcgtcttgtacctctctggcgctgttgtagatgcatcttccgtctcccctgagagggacagtcacaacttcaacagctgggcggcctcatcgttctttgccttcctggtcaccatctgctacgctg

SEQ ID NO: 59086 - DNA, 2093 bp, Homo sapiens
cccacgcgtccgtccaaggtcaaggtgccgcacaccttcctcatccacagctatacacggcccaccgtttgccaggcttgcaagaaactcctcaagggcctcttccggcagggcctgcaatgcaaagactgcaagtttaactgtcacaaacgctgcgccacccgcgtccctaatgactgcctgggggaggcccttatcaatggagatgtgccgatggaggaggccaccgatttcagcgaggctgacaagagcgccctcatggatgagtcagaggactccggtgtcatccctggctcccactcagagaatgcgctccacgccagtgaggaggaggaaggcgagggaggcaaggcccagagctccctggggtacatccccctaatgagggtggtgcaatcggtgcgacacacgacgcggaaatccagcaccacgctgcgggagggttgggtggttcattacagcaacaaggacacgctgagaaagcggcactattggcgcctggactgcaagtgtatcacgctcttccagaacaacacgaccaacagatactataaggaaattccgctgtcagaaatcctcacggtggagtccgcccagaacttcagccttgtgccgccgggcaccaacccacactgctttgagatcgtcactgccaatgccacctacttcgtgggcgagatgcctggcgggactccgggtgggccaagtgggcagggggctgaggccgcccggggctgggagacagccatccgccaggccctgatgcccgtcatccttcaggacgcacccagcgccccaggccacgcgccccacagacaagcttctctgagcatctctgtgtccaacagtcagatccaagagaatgtggacattgccactgtctaccagatcttccctgacgaagtgctgggctcagggcagtttggagtggtctatggaggaaaacaccggaagacaggccgggacgtggcagttaaggtcattgacaaactgcgcttccctaccaagcaggagagccagctccggaatgaagtggccattctgcagagcctgcggcatcccgggatcgtgaacctggagtgcatgttcgagacgcctgagaaagtgtttgtggtgatggagaagctgcatggggacatgttggagatgatcctgtccagtgagaagggccggctgcctgagcgcctcaccaagttcctcatcacccagatcctggtggctttgagacaccttcacttcaagaacattgtccactgtgacttgaaaccagaaaacgtgttgctggcatcagcagacccatttcctcaggtgaagctgtgtgactttggctttgctcgcatcatcggcgagaagtcgttccgccgctcagtggtgggcacgccggcctacctggcacccgaggtgctgctcaaccagggctacaaccgctcgctggacatgtggtcagtgggcgtgatcatgtacgtcagcctcagcggcaccttccctttcaacgaggatgaggacatcaatgaccagatccagaacgccgccttcatgtacccggccagcccctggagccacatctcagctggagccattgacctcatcaacaacctgctgcaggtgaagatgcgcaaacgctacagcgtggacaaatctctcagccacccctggttacaggagtaccagacgtggctggacctccgagagctggaggggaagatgggagagcgatacatcacgcatgagagtgacgacgcgcgctgggagcagtttgcagcagagcatccgctgcctgggtctgggctgcccacggacagggatctcggtggggcctgtccaccacaggaccacgacatgcaggggctggcggagcgcatcagtgttctctgaggtcctgtgccctcgtccagctgctgccctccacagcggttcttcacaggatcccagcaatgaactgttctagggaaagtggcttcctgcccaaactggatgggacacgtggggagtggggtggggggagctatttccaaggcccctccctgtttccccagcaattaaaacggactcatctctggccccatggccttgatctcagcataaaaaaaaaa

SEQ ID NO: 59087 - DNA, 1621 bp, Homo sapiens
tatttttagtagagacggggcctcgcactgctggccaggctggtcttgaactcctgacctcaagtgatccgcccgcctcggtctcccagagtgctgggattacaggcgagagacaccgcgcctggcccccttccaactttcttaacgggaaaggctgctaccatttcttgagcacctatgtgtcaggctccatcaggcacgtcacagtctaacctgataattacacaacccatgtcactgacaaggaagccaggttcggaggggttgaggcccgcaacctgagggaggtgactccgggacacacaattagtcctgctttgctgaaggaaagatatgcagcccaccagtcggaggctggagaaggagcagcagcagcttaaaccttaacccagagttatttttattttccagaacgtgttaggaactagtacttaaataatctcaagtccctgaggggccagagatcccaccatgcaaaatagcaaacagacccaagacttggggagaggcggtgagtgcatcagaaatggatgggtacatctgattcccaccacgcggggctcagcttagttagcaggagaccttcagactgagaaaaaatgcaagtctttttttggcctctaatatctgggaaggatggagggagctcaggagacacagaaaagatggcgtatgaatcctgtccggcctgaacgaggctggagttgtgcctctggatagcttcaagcactgatcagattgtcagcccccgctgcttgaacagatgctttagagcctcttccagttgccggtttgttccctgaagccccttcaccacctgcgctgcccactcgaagtattcctggactcgatgttctgaccatccctctggggtgcagcgattcaggtccctcagattgtacagcttgtctgccagcttcaccagtttggccccggggctactgtggggcgcttgctccacctgcagcctctttctctccagcttgggcagagtcttgtcatctgttacctcctccaccaggcgccgcacttgtgccccaaagtgtagctccacctcatccagggtggtgtctgtgtcctccaccgtgtcatggagcagggccgcctgtaacaccacaatgtcagtgattcccgcctcgtgggtcaggatccgtgccacacctgacggggaggggcaaagcaggaagtcaggtcggaggtagtcccaaggcggtgtgttgtgggttttggacagccagatgtggccccttgtggactctgactagctgggtgaccttggtcaagtaccttaccctctgggagccaaccgacaaagggaacgatcatgcctaccgttccaattgttatgaggcttaaacggtatatcgcactaagcttgggacaaaacaggtgctcaatgaggtgcacgccccccacgtttccttcccagtccccaccacccaggtgccgcagccggcgctccgcggccgacgcgcccaccgatggggtggttgatgtagggggtcccctcggggtccttccgccgctgctgccggtgcttgcgagccgcgaagtcggcagcctccagcagctgcgccgcctcagagcccatcgcgcggatggggccgacgactgcggccgc

SEQ ID NO: 59088 - DNA, 2142 bp, Homo sapiens
tgcttcctgcttcccagaggccgggatccggagccgcccgaagccggtgccgcagccccctgcgcccccggtgcccccgacatgtccttccgcaaagtggtccggcagagcaaattccggcatgtgttcgggcagccggtcaagaacgaccagtgctatgaggacattcgcgtgtcccgtgttacctgggacagcaccttctgcgccgtcaaccccaagttcctggcggtgattgtggaggccagtggagggggtgcctttctggtgctccccctaagcaagacgggccgcattgacaaggcctacccgacggtgtgtgggcacacgggacctgtcctggacatcgactggtgtcctcacaacgacgaagtcatagccagcggctcggaggactgcacggtcatggtgtggcagatcccagagaacgggctgacctccccgctgacagagccggtggtggtactggaggggcacaccaagcgagtgggcatcatcgcctggcaccccacggcccgaaacgtgctgctcagtgcaggctgcgacaacgtggtactcatctggaatgtgggcacagcggaggagctgtaccgcctggacagcctgcaccctgacctcatctacaatgtcagctggaaccacaatggcagcctgttttgctcagcatgcaaggacaagagcgtgcgcatcatcgacccccgtcggggcaccctggtggcagagcgggagaaggctcatgagggggcccggcccatgcgggccatcttcctggcagatggcaaggtgttcaccacaggcttcagccgaatgagcgagcggcagctggcgctctgggacccagaaaacctcgaggaacccatggccctgcaggaactggactcgagcaacggggccctgctgcccttctacgaccccgacaccagtgtggtctacgtctgcggcaagggtgactccagcatccggtactttgagatcacagaggagcctccctacatccacttcctgaacacgttcaccagcaaggagccgcagcggggtatgggcagcatgcccaagcggggcctggaggtcagcaagtgcgagatcgcccggttctacaaactgcatgagcgcaagtgtgagcccatcgtcatgactgtgccaagaaagtcggacctcttccaggatgatctgtaccccgacacagccgggcccgaggcagccctggaggctgaggagtgggtgagcgggcgggatgccgacccgatcctcatctcactgcgggaggcctacgtgcccagcaagcagcgggacctgaagatcagccggcgcaacgtgttgtctgacagccggcccgccatggccccgggctcctcccacctaggggcccccgcctccaccaccactgctgctgatgccacccccagcggcagcctggccagagccggggaggctgggaagctggaggaggtgatgcaggagctgcgggccctgaaggccgcttggtcaagggagcaaggcggaccggcatctgccggcctggaggagcagctgggccgcatggagaacggggatgcgtagggccacagccacacgccaccttcatctcctccgccgcccccttcccactcagcttctgccagcgggtcgcaccgggctagctggctgcccagagcctctgaggcagcgcaggggtcagttcccacccccacccgtcccaggcccaggccgaagccagcgcccagctttcctcactgttcctgtggaggatgtctacgcccaggcgagctcctcgacctctgagggaccatctccccgaccactgcccagccctctgctccctccccagaggaggcgggagggtgggctctatattttcattccaaataaaattctctttctaaaagccaggctgacctgctgctgcaagggtggggctgagaagtctggaaacctggagacagatgatgtcacaggagtcacacatgtgcagaaggtctgggggcagtgagcagccccacaggcattgctcccctggattgtcaggcagggaaactgaggcagaagacctgagaacacatgcaaggctgcatccagcttcaagttggtgctgcttcttccttggaggacaggcccggcagcccagcctcctccagagagacgaaa

SEQ ID NO: 59089 - DNA, 1856 bp, Homo sapiens
ctgatagccctcggaaccgcttcgaaatcctcggtagacccacgcgtacgcccacgcgtccgggcccgcgccccgccatggaggacctggatgccctgctctctgacctggagactaccacctcgcacatgccaaggtcaggggctcccaaagagcgccctgcggagcctctcacccctcccccatcctatggccaccagccacagacagggtctggggagtcttcaggagcctcgggggacaaggaccacctgtacagcacggtatgcaagcctcggtccccaaagcctgcagccccggcggcccctccattctcctcttccagcggtgtcttgggtaccgggctctgtgagctagatcggttgcttcaggaacttaatgccactcagttcaacatcacagatgaaatcatgtctcagttcccatctagcaaggtggcttcaggagagcagaaggaggaccagtctgaagataagaaaagacccagcctcccttccagcccgtctcctggcctcccaaaggcttctgccacctcagccactctggagctggatagactgatggcctcactctctgacttccgcgttcaaaaccatcttccagcctctgggccaactcagccaccggtggtgagctccacaaatgagggctccccatccccaccagagccgactggcaagggcagcctagacaccatgctggggctgctgcagtccgacctcagccgccggggtgttcccacccaggccaaaggcctctgtggctcctgcaataaacctattgctgggcaagtggtgacggctctgggccgcgcctggcaccccgagcacttcgtttgcggaggctgttccaccgccctgggaggcagcagcttcttcgagaaggatggagcccccttctgccccgagtgctactttgagcgcttctcgccaagatgtggcttctgcaaccagcccatccgacacaagatggtgaccgccttgggcactcactggcacccagagcatttctgctgcgtcagttgcggggagcccttcggagatgagggtttccacgagcgcgagggccgcccctactgccgccgggacttcctgcagctgttcgccccgcgctgccagggctgccagggccccatcctggataactacatctcggcgctcagcgcgctctggcacccggactgtttcgtctgcagggaatgcttcgcgcccttctcgggaggcagctttttcgagcacgagggccgcccgttgtgcgagaaccacttccacgcacgacgcggctcgctgtgcgccacgtgtggcctccctgtgaccggccgctgcgtgtcggccctgggtcgccgcttccacccggaccacttcacatgcaccttctgcctgcgcccgctcaccaaggggtccttccaggagcgcgccggcaagccctactgccagccctgcttcctgaagctcttcggctgacagcccgctcggctcgccgtctcccccggaggccgcgccctcccggaaaagccgggtcctccagaccccgagggccttgctctcagagcgggaggccccacccactggagagccccgcccctaaggtactatgagtcctcaggggtcaagttcagaaacggcccagccagacctaaacccacacgcccacaaagtggattgcacacagacaagaactcccgtgcgggcctccactctattcccacccttgagggagcccccttactgggggagggtccttgcaattccagcgaatcggaggccaggccaggacgtccttgctccctgcaccctcactgttctgtgcactttttctacctacataaacacacgcattccacctcaaaaaaaaaa

SEQ ID NO: 59090 - DNA, 2091 bp, Homo sapiens
tggtcgacccacgcgtccggagaagatgctgctgtccctggtgctccacacgtactccatgcgctacctgctgcccagcgtcgtgctcctgggcacggcgcccacctacgtgttggcctggggggtctggcggctgctctccgccttcctgcccgcccgcttctaccaagcgctggacgaccggctctactgcgtctaccagagcatggtgctcttcttcttcgagaattacaccggggtccagatattgctatatggagatttgccaaaaaataaagaaaatataatatatttagcaaatcatcaaagcacagttgactggattgttgctgacatcttggccatcaggcagaatgcgctaggacatgtgcgctacgtgctgaaagaagggttaaaatggctgccattgtatgggtgttactttgctcagcatggaggaatctatgtaaagcgcagtgccaaatttaacgagaaagagatgcgaaacaagttgcagagctacgtggacgcaggaactccaatgtatcttgtgatttttccagaaggtacaaggtataatccagagcaaacaaaagtcctttcagctagtcaggcatttgctgcccaacgtggccttgcagtattaaaacatgtgctaacaccacgaataaaggcaactcacgttgcttttgattgcatgaagaattatttagatgcaatttatgatgttacggtggtttatgaagggaaagacgatggagggcagcgaagagagtcaccgaccatgacggaatttctctgcaaagaatgtccaaaaattcatattcacattgatcgtatcgacaaaaaagatgtcccagaagaacaagaacatatgagaagatggctgcatgaacgtttcgaaatcaaagataagatgcttatagaattttatgagtcaccagatccagaaagaagaaaaagatttcctgggaaaagtgttaattccaaattaagtatcaagaagactttaccatcaatgttgatcttaagtggtttgactgcaggcatgcttatgaccgatgctggaaggaagctgtatgtgaacacctggatatatggaaccctacttggctgcctgtgggttactattaaagcatagacaagtagctgtctccagacagtgggatgtgctacattgtctatttttggcggctgcacatgacatcaaattgtttcctgaatttattaaggagtgtaaataaagccttgttgattgaagattggataatagaatttgtgacgaaagctgatatgcaatggtcttgggcaaacatacctggttgtacaactttagcatcggggctgctggaagggtaaaagctaaatgggagtttctcctgctctgtcccaatttcctatgaactaatgacaacttggagaaggctgggaggattgtgctattttgcaaagtcagatggctgcatttttgagccattaatttgccagcgtatttcactttttctgttattttcaatttattacaacttgacagctccaagctcttattactaaagtatttagtatcttgcagctagttaatatttcatcttttgcttatttctacaagtcagtgaaataaattgtatttaggaagtgtcaggatgttcaaaggaaagggtaaaaagtgttcatggggaaaaagctctgtttagcacatgattttattgtattgcgttattagctgattttactcattttatatttgcaaaataaatttctaatatttattgaaattgcttaatttgcacaccctgtacacacagaaaatggtataaaatatgagaacgaagtttaaaattgtgactctgattcattatagcagaactttaaatttcccagctttttgaagatttaagctacgctattagtacttccctttgtctgtgccataagtgcttgaaaacgttaaggttttctgttttgttttgttgtttaatatcaaaagagtcgatgtgaaccttggttggaccccaagttcacaagatttttaaggtgatgagagcctgcagacattctgcctagatttactagcgtgtgccttttgcctgcatctctttgatttcacagaat

SEQ ID NO: 59091 - DNA, 2450 bp, Homo sapiens
gagaatttataccttgatgtccctggccgagaaccccgggtcgacccacgcgtccgggggcgggggttgggaagatggcggctcccagcctcctcaactggaggcgagtttcttccttcacggggccggtcccccgcgcccggcacggacaccgagcggtggccatccgggagctgatgatcatctttggagggggaaatgagggcatcgcggatgagctgcacgtctacaacacggctacgaatcagtggtttctgccagctgttagaggagatatccctccaggctgtgctgcccatggatttgtctgtgatggtaccagaatattagtatttgggggaatggttgaatatggaagatacagcaatgagttatatgagttacaagcaagtcgttggttatggaaaaaagtgaaaccccatccccctccttctggtttacctccttgtcctcggcttggacatagcttctctttatatggtaacaaatgctatttgtttggtggcctggcaaacgaaagcgaagattcaaacaataatgttcccagatatttaaatgatttttatgagttggagctacagcatggctctggtgttgtgggttggagcattccagtgactaaaggggttgtgccttctccaagagaatcccacacagctgttatatattgcaaaaaagattctggaagtcctaaaatgtatgtttttggtggaatgtgtggtgctcgcctggatgacctatggcagcttgacttagaaactatgtcatggtcaaaaccagaaactaaagggacagtgccacttccacgaagccttcatacagccagtgttataggaaacaagatgtacatttttggtggatgggtcccacataagggggaaaatactgagacttcacctcatgattgtgaatggagatgtaccagttcattttcttacctaaatctggatacaacagagtggaccaccctagtatcagattctcaggaagataaaaaaaattcaagaccaagaccaagagctggccactgtgctgttgcaatcggcactcgattgtatttttggagtggaagagatggctacaaaaaagcactgaatagtcaagtttgctgcaaggatctttggtatcttgatactgagaaaccaccggcaccatctcaagtacagctgatcaaagccactaccaactcctttcatgtcaagtgggatgaagtgtctacagttgagggctatcttttgcagttgagtacagacttgccataccaagctgcatcatcagattcttcagcagcaccaaatatgcaaggagtcaggatggaccctcacagacaaggcagtaataacatcgttcctaacagtatcaatgatacaataaacagcacaaaaactgaacagccagccacaaaagaaacttcaatgaaaaacaaaccagactttaaagcactgacggattctaatgccattttatatccatctttggcatcaaatgcttctaatcataatagtcatgtggtggatatgctaaggaaaaatgaaggtcctcacacttcagcaaatgtaggtgttctaagtagttgcctggatgtaagaacagtaattcctgaaacatctgtatccagtactgtttccagcacacaaactatggtaacccagcagaccattaaaactgaatcatccagtacaaatggggcagttgttaaagatgaaacttcactaacaacattcagtaccaaatctgaagttgatgaaacatatgcactgcctgcaacgaagatcagccgtgtagagacacatgctacagcaacgccgttttctaaagagactccttcaaatccagtggccacagtgaaagcgggagaacgacaatggtgtgatgtgggaatttttaaaaataatacagctttggtgagccagttttatttgctgccaaaagggaagcaaagcatctcaaaggtaggaaatgcagatgtacctgactacagcttgcttaagaaacaagatcttgttccaggcacaggatacagattcagggttgctgcaatcaatggttgtgggataggtcctttcagcaaaatcagtgaatttaaaacttgtattcctggttttcctggagctccttctgcagtcagaatttcaaagaatgttgaaggtatccacctttcctgggaacctccaacctcaccttctggaaatattttggaatattcagcctacttggctatccgcacagcacagatacaagataatccaagtcaacttgtgttcatgaggatttattgtggtcttaagacatcatgtatagtaactgctgggcaacttgcaaatgcacatattgattatacatccaggcctgccattgtgttcaggatatcagcaaagaatgaaaagggatatggaccagctacacaagttcggtggcttcaaggtaacaataagaaagcacctttaaat

SEQ ID NO: 59092 - DNA, 1960 bp, Homo sapiens
tttcgtggccgcgagatggggaagatggcagcggccgtgggctctgtggcgactctggcgactgagcccggggaggacgcctttcggaaacttttccgcttctaccgtcagagccggcccgggaccgcagacctggaaggggtcatcgacttctcggcggcccacgcagcccgtggcaagggtcctggtgcccaaaaggtgatcaaatctcagctaaatgtgtcttctgtcagtgagcagaatgcatatagagcaggtcttcagcccgtcagcaagtggcaagcctatggactcaaaggctatcctgggtttatttttatcccaaaccccttcctcccaggttaccagtggcactgggtgaaacagtgccttaagttatattcccagaaacctaatgtatgtaacctggacaaacacatgtctaaagaagagacccaagatctgtgggaacagagcaaagagttcctgaggtataaagaagcgactaaacggagaccccgaagtttactggagaaactgcgttgggtgaccgtaggctaccattataactgggacagtaagaaatactcagcagatcattacacacctttcccttctgacctgggtttcctctcagagcaagtagccgctgcctgtggatttgaggatttccgagctgaagcagggatcctgaattactaccgcctggactccacactgggaatccacgtagacagatctgagctagatcactccaaacccttgctgtcattcagctttggacagtccgccatctttctcctgggtggtcttcaaagggatgaggcccccacggccatgtttatgcacagtggtgacatcatgataatgtcgggtttcagccgcctcttgaaccacgcagtccctcgtgtccttccaaatccagaaggggaaggcctgcctcactgcctagaggcacctctccctgctgtcctcccgagagattcaatggtagagccttgttctatggaggactggcaggtgtgtgccagctacttgaagaccgctcgtgttaacatgactgtccgacaggtcctggccacagaccagaatttccctctagaacccatcgaggatgaaaaaagagacatcagtacagaaggtttctgccatctggatgaccagaatagcgaagtaaaacgggccaggataaaccctgacagctgagacttggagatcccatcctttttactcaggcacctgcttaccgtaaatgatcatgttattgtgtattgccgtggacttcagcacccagacaagccaaaaacagagacagggaagaactcattgttgatcacactgttgccttggaacccacgcagaagtaaactcagccactttgctcagagaagtgtttgacatggtctgttcctagttacatgttggctgtaatgtatgttgagaagtcagtccaaggaggtatgttcttccacaacagccttctcagcctctgctatttcctttgaggaaggtagaagtgagtttccatgtttgcagagtatttaaatacctcagattttattaatgagaaatacagtacccctccctccactccatctggtaatttatggtaaaattgtggttctgtgaaccagctattagtctcatcttcttaactccctcaggcatcatcaaattctttgatcttctcttccacctctctggctctcatggaagaatcctttacacatgaaaacaatggaactggaaaatcttgtcttttagaaaagaaattaatcacaactatctctcttgcctaaaagataaatataggtaaacccaaggaaaggggaatttagtttctctacatgtcatttcggtctccaaactccctgttggctttttaatgcaattttaattgttggaataaaaaagtcccaagggtgttttgttactgttttctccatgaataaactcacttgattttaaattaaaaaaaaaa

SEQ ID NO: 59093 - DNA, 4651 bp, Homo sapiens
agcctagcactctgacctagcagtcaacatgaaggctctcattgttctggggcttgtcctcctttctgttacggtccagggcaaggtctttgaaaggtgtgagttggccagaactctgaaaagattgggaatggatggctacaggggaatcagcctagcaaactggatgtgtttggccaaatgggagagtggttacaacacacgagctacaaactacaatgctggagacagaagcactgattatgggatatttcagatcaatagccgctactggtgtaatgatggcaaaaccccaggagcagttaatgcctgtcatttatcctgcagtgctttgctgcaagataacatcgctgatgctgtagcttgtgcaaagagggttgtccgtgatccacaaggcattagagcatgggtggcatggagaaatcgttgtcaaaacagagatgtccgtcagtatgttcaaggttgtggagtgtaactccagaattttccttcttcagctcattttgtctctctcacattaagggagtaggaattaagtgaaaggtcacactaccattatttccccttcaaacaaataatatttttacagaagcaggagcaaaatatggcctttcttctaagagatataatgttcactaatgtggttattttatattaagcctacaacatttttcagtttgcaaatagaactaatactggtgaaaatttacctaaaaccttggttatcaaatacatctccagtacattccgttcttttttttttttttttttttttttgagacggagtctcgctctgtcgcccaggctggagtgcagtggcgggatctcggctcactgcaagctccgcctcccgggttcacgccattctcctgcctcagcctcccaagtagctgggactacaggcgcccgccactacgcccggctaattttttgtatttttagtagagacggggtttcaccgtgttagccaggatggtctcgatctcctgacctcgtgatccgcccgcctcggcctcccaaagtgctgggattacaggcgtgagccaccgcgcccggcctatacgcttttttctgttaaaaaatatttttaagtttttaaacttttgttaaaaattgagacagaagcaaacacattacttactaggcctacacagagccaggattatcagtatcaatcccttccgcctccacatcatgtcccactggaaggtcttcggggcagtaacggacatggagctgttatctcctaacatgccttcttctggaatacctcctgaaagacctgcctgaggctatttaacagttaactttttttttatatgtaagtaggagtactctaaaataacaatataaaatgtagtacaataaaataaataagccagtaacgtagttgtttattatcaagtatgtactgtacataattgtatatgctagacttttatacagctggcagcacagtaggtttatttataccagcacctccacaaacatgtgagtaatgctttgcacttgaccttctgtcagctatgacatccctaggttgcaggatttttcagcttcattataatcttatgggaccatcttcatatgtgagtggtctcttgacccaaacattgttatgtagcacatgactgtaaattttggaatcaccttgtcagtatttacaaaatagctttctgagatttagtggcgcgatctcggctcactgcaagctccgcctcccaggttcacgccattctcctgcctcagcctcccgagtagctgggactacaggcgcccgctaccacgcccggctaattttttgtatttttagtagagacggggtttcaccgtgttagccaggatggtctcgatctcctgacctcgtgatccgcccgcctcggcctcccaaagtgctgggattacaggcgtgagccaccgcgcccggccaaaattgcctaaatttttaaaatcctaaattggtgttgaattttgtcaaatgctttcctgcattgattttgatgatcacttgatttttctccattcttttgttaatgtgctaaattatgttgcttaatttttgaatgaaaaaataatcttacattcctgaaataatttcggtttggttgtgatgttttattcattctatttcgtgctgaattcagtttgctaatattttgtttaggaattttgcatctatgttcatgagacagatcggcctgtaattttacttttttgtaatgtccttgtcaggtttaggcctcaaagttatgttgactttataaaatgaactgtgaagtatttcctcttttttatgctttagtttgagtaagattgattttttttaaaacttatgtcgtccttaaatatttattagaattcactagggaagttatcttggcctgttactttctttcttgagtaaattttgttttcattctttttttatagttaagtatattgagttagaatgcatacacaaacaaatgcacacaacttaaagtccagttctatgaattttgactaatgtataaacctgtttaacttccactgtaagcaaaatatagtgaattttcgtcaactaaaaagtccccttgtacccatttaccttcagtacctatccctaccccagccacaggcaacaaatgattttcatgtgcttatttgccatctgtatacctctttggttagttttctgtttatatcttttgcccatttatttttttaatttttagaaacagagtcttactatgttgcccaggatagactcaaactcccggactcaaaggacccttccctctcggcctcccaaagtgctgggattacaggcacacactactactcttggtttgcctatttttaaatcaggttgtttgttttcttattattgtgttctctacactgtaggatattctacctttcctagaatttcatgtaaatggactcagacatactgttgtgtctggcctcttttgttcagtgtaatgtttttgagcttcatccttgcatgttatgtgtatcagtgattgattcaatttttattgctgcatagtattggattgtatagctataccacaatttgtttattcattctcctgttgatggaatattggttgtttccagtatttagctattattattattattttttttttttgagacggagtctcgctctgtcgcccaggccggactgcggactgcagtggcgcaatctcggctcactgcaagctctgcttcccgggttcacgccattctcctgcctcagcctcccgagtagctgggactacaggcgcccgccaccgcgcccggctaatttttttgtatttttagtagagacggggtttcaccttgttagccaggatggtctcgatctcctgacctcatgatccacccgcctcggcctcccaaagtgctgggattacaggcgtgagccaccacgcccggctgcaaataatctttctttttttctgagacagagtctcgctctgttgcccaggctggagtgcagtggcacgatctcggctcacggcacgctccgcctcccgggttcacgccattctcctgcctcagcttcccgagtagctgggactacaggggcccgccaccacgcccggctaacttcttgtgtttttagtagagacggggtttcaccgtgttagccaggatggtctcgatctcctgaccttgtgatctgcccgcctcggcctcccaaagtgctgggattacaggcgtgagccaccgcgcccggccagggatgtcattttttataactagccataaactttagctttgaagtaaaactatttctagcaagtgattcttacctgatattttttgttgttcttgcccatattttaattgggttgtgttattatggttctctatgtattctagatttaagtttttgtatatggtgtgaggcaagtgtcaagtttaattttttttctacaaacatcctgttgttccagtaccttttgatgataagactgtcttttcccccattgaattatcttaacgccctcatgaaaagcaattggccatatgtatgtggatctacttttggactctcaattctgttccagtgatttatatgtccacccttatgtcaataccacattattttgattattgctgctttatagtaagtgacatcatgttgcctgaaatcacgttttccacctttattcttctgttgatggttgctttggcaattaggggtcctttgcattttcgtagacattttagaatcaacttatctattgctactaaaaatgcttgattgggattgtggtaaatctagaaactaatttaggaagaatggtcatattaacagtttcaagtttcagatccatgagcatattttcactctccattaggtcttttaaaatttatcctagcagtgttttatggtttttactgtagaggtcttacacattttgttacatttgttgctatgtgtttgaccttttttgatactagtgtaaatggaaattttttcttttatgttctagttgttcattattacactaaatcatctttgggtgactactaaacattctattgaaaatttgtgaatggcgtgaacccgggaggcggagcttgcagtgagccgagatcccgccactgcactccagcctgggcgacagagcgagactccgtctcaaaaaaaaaa

SEQ ID NO: 59094 - DNA, 1534 bp, Homo sapiens
ttttttttttttgatattaaatgttaaattttatttcaaaaaactatcacagcctaaagggaaatataatttaagcattaagatagtacatttcagaaaataagctagtattttcatgttacattttaggtacctatcatttgtcattccaagagatccttgcgttctagactctagaattaaatggggtaaagggttatgcttttaagaactataagctgaaatgatttacttcagttcaatatagaatatttgtcagtcaagataacaatcaatgtgtacaaaaatttacataacaagaggaaaaataggcagtgcagcacctttagaaaaataattaaaagtttcattgcatttacaggtaagtgccacactgagaatttacaatacagtaatttactgcaatcacaggggagttccataaagaaacaaagctcttacactccaggtttttggaaggtgttattggaatgcttaactgaaaccccacagaacttgtatatcccttaggattgagttgatggaaggtcataaaaggttttcatagcatctattatataaaaggagttcactgcatttggatagctggtttagtgtctctgacaagtgtgaagcctagaagaattactggcttgatggtgatctttctgtatccggcaagacagaccttctccacagtaacaacgctggaatatttctagtccatgagagccttttctcctatgcttggtacacacttgaccttctttcaggacaggtttacagatcttggaccagaagtgtctagcacaacacaatcctgaggcacagtctgatgaccggagacaaacagaaccttcttgtcctttggtgtgatacatttttgaagacaaggtggttcttctggaatacccatccaaggtgctatgatcattaccaaagctttcagtgatggtttcctcaatttctcctcggaaatgattttgatcagaagacacacatattccatttttgcagtaattcccggggcagcacatagcgtgacgcatgcagcgttttcggcgcttcctgcaggcgagacagatttgcacgcccgcgtcccctccgcgggtgggactagcgcagtactcatcagtgccgcactcctcgtcctctgcgcacgggtacggctggtagttgtcaatggtctggtacttattcccgcccgggtacaggattcccggcgcggcgctgactgcagagcctgggtgccccgcagcgccgcccagcggtgggggcaggttcttgatagcgttggaattgagaaccgagttcaaggtggcgctcactcccagcagagggtggccgccgagagccgccgctaccatcgcgacaaagacccgggtagctcccgctgcgcccagagccatcatctcagaaggactcaagagggagaaagaaagagaaaatgaccgtcactttgcaagcctgggtccccacgaaaccgtgccggttcggctgcagagtcagggtccgggagccccctgcggtcccagagtcctgactgcagggagca

SEQ ID NO: 59095 - DNA, 1598 bp, Homo sapiens
gcacgagggagtgccagtacagatgaaagcaccccaatccgtctcctccagttctttaggtttaatcacatctctccaatcgccgagggaactggagatttaaacaaacatacgtgaactggtgtgaagctgtaaaagggaccattatgtttccgattcagaatatatattcttctctcactttctaagaattaaacacaagcttttctcccttattgattagttgctgaagtaaaggaaccctgcagccttcccatgctatctgttgacatggaaaacaaggaaaatggctctgtcggtgtaaaaaattccatggaaaatgggagaccacctgatcctgcagactgggccgtgatggatgtcgtcaattatttccgaaccgtgggatttgaggagcaagctagtgcttttcaggaacaggaaattgatggaaaatccctgctattgatgacaagaaatgatgtgttgacaggacttcagttaaaattggggcctgctctgaaaatctacgaatatcatgtaaaacctctgcagacaaagcatttaaagaacaactcttcatagtacagtcaaattggggtcttcgacctcaaaaaaatacataatgacataatttagtttcatgtaatgaaactttgtaaacagaatacatacatgtgtatatgtaaagaatttcaatcaaatgaaacgttatcctattggatagactaggcaattcatcagctcacctgaaatcagccaggaggagcaaggacaagatgcgcacagggtggttttcctcatggattttgtcaaatagatgatctttgacacgattagacactcctccccacaaaggctttgaaatcataaggattttcctcatctctttatagctttcccaaaatcttttaaaaaagaatttaattaaatgacagtcttttggttacagacttaggatgagtaaaaacaagaaaatttggggagggggagaaagaagaaagggattgctgtctcccttgaattcctctgttccttagagcttgtgttacttggacggaattgccaacacccttttttatagagggttctccacttgaccttattaaggttttattgggatatgctgcagtgtttgaaatgaacatgcatcatggccccttcaggagcagaatcatagctctgaaaagagaagctccgttgtgtactgaggatatccatccatattcagctagctttcaaatggggtaatgatattttctgcatagattttcttttaaattggttctttgtttctgaagaaagaattttttttaacttcatggttttatttataataatttgtttctgaagaaatttgccgagagttacaggtcaaaaagccttgttactagtacagaatatttttatatatattccttcatgatggtgtaattttttttaattgtcctatgctttgttcggttcctgggttaagtacttgtttttaagagcttggaaaaagtgggcttgctacatctctgttcaaagagacatttgttcaatctctgtgtgtcaacgccttgttgaattggtgctttgtggttgcaataaagcattgcttcagtttaaaaaaaaaa

SEQ ID NO: 59096 - DNA, 2556 bp, Homo sapiens
tacggctgcgagaagacgacagaagggggaaacaatttgcttccggaaacaggacagccggggccgtgttcctgcaacagcagaccaagcaccgcggcggacccaggcaagcacggaacaagctgagacggatgataatatggatacaaaatctattctagaagaacttcttctcaaaagatcacagcaaaagaagaaaatgtcaccaaataattacaaagaacggctctttgttttgaccaaaacaaacctttcctactatgaatatgacaaaatgaaaaggggcagcagaaaaggatccattgaaattaagaaaatcagatgtgtggagaaagtaaatctcgaggagcagacgcctgtagagagacagtacccatttcagattgtctataaagatgggcttctctatgtctatgcatcaaatgaagagagccgaagtcagtggttgaaagcattacaaaaagagataaggggtaacccccacctgctggtcaagtaccatagtgggttcttcgtggacgggaagttcctgtgttgccagcagagctgtaaagcagccccaggatgtaccctctgggaagcatatgctaatctgcatactgcagtcaatgaagagaaacacagagttcccaccttcccagacagagtgctgaagatacctcgggcagttcctgttctcaaaatggatgcaccatcttcaagtaccactctagcccaatatgacaacgaatcaaagaaaaactatggctcccagccaccatcttcaagtaccagtctagcgcaatatgacagcaactcaaagaaaatctatggctcccagccaaacttcaacatgcagtatattccaagggaagacttccctgactggtggcaagtaagaaaactgaaaagtagcagcagcagtgaagatgttgcaagcagtaaccaaaaagaaagaaatgtgaatcacaccacctcaaagatttcatgggaattccctgagtcaagttcatctgaagaagaggaaaacctggatgattatgactggtttgctggtaacatctccagatcacaatctgaacagttactcagacaaaagggaaaagaaggagcatttatggttagaaattcgagccaagtgggaatgtacacagtgtccttatttagtaaggctgtgaatgataaaaaaggaactgtcaaacattaccacgtgcatacaaatgctgagaacaaattatacctggcagaaaactactgttttgattccattccaaagcttattcattatcatcaacacaattcagcaggcatgatcacacggctccgccaccctgtgtcaacaaaggccaacaaggtccccgactctgtgtccctgggaaatggaatctgggaactgaaaagagaagagattaccttgttgaaggagctgggaagtggccagtttggagtggtccagctgggcaagtggaaggggcagtatgatgttgctgttaagatgatcaaggagggctccatgtcagaagatgaattctttcaggaggcccagactatgatgaaactcagccatctcaagctggttaaattctatggagtgtgttcaaaggaataccccatatacatagtgactgaatatataagcaatggctgcttgctgaattacctgaggagtcacggaaaaggacttgaaccttcccagctcttagaaatgtgctacgatgtctgtgaaggcatggccttcttggagagtcaccaattcatacaccgggacttggctgctcgtaactgcttggtggacagagatctctgtgtgaaagtatctgactttggaatgacaaggtatgttcttgatgaccagtatgtcagttcagtcggaacaaagtttccagtcaagtggtcagctccagaggtgtttcattacttcaaatacagcagcaagtcagacgtatgggcatttgggatcctgatgtggaaggtgttcagcctggggaagcagccctatgacttgtatgacaactcccaggtggttctgaaggtctcccaggtccacaggctttaccggccccacctggcatcggacaccatctaccagatcatgtacagctgctggcacgagcttccagaaaagcgtcccgcatttcagcaactcccggtcttcccattggaacccacttcggggaaaaaggccaagcattgaagaagaaattaggagtgctgataagaatgaatatagatgctggcccagcattttcattcattttaaggaaagtagcaaggcataatgtaatttagctagtttttaatagtgttctctgtattgtctattatttagaaatgaacaaggcaggaaacaaaagattcccttgaaatttagatcaaattagtaattttgttttatgctgctcctgatataacactttccagcctatagcagaagcacattttcagactgcaatatagagactgtgttcatgtgtaaagactgagcagaactgaaaaattacttattggatattcattcttttctttatattgtcattgtcacaacaattaaatatactaccaagtacagaaatgtgg

SEQ ID NO: 59097 - DNA, 1121 bp, Homo sapiens
gaagtttatcaggaaaggagcttaaaagagaaccaaattcagcctgtgttggaactctcagtcccagaggggtgtggtttgtagctctccggcctgctgttggacttaggctgtgacccacagaaggacgccagaaagtactcaagacattcacggtgccccggtcagcactcgccatgacgaagacttctacatgcatataccacttccttgttctgagctggtatactttcctcaattattacatctcacaggaaggaaaagacgaggtgaaacccaaaatcttggcaaatggtgcaaggtggaaatatatgacgctgcttaatctgctcttgcagaccattttctacggggtcacctgcctggatgatgtgctgaaaagaaccaaagggggaaaagacattaagttcctaactgccttcagagacctgcttttcaccactctggcttttcctgtatccacgtttgtatttttggcattctggatcctctttctctacaatcgagatctcatttaccccaaggtcctagatactgtcatccccgtgtggctgaatcatgcaatgcacactttcatattccccatcacattggctgaagtcgtcctcaggcctcactcctatccatcaaagaagacaggactcaccttgctggctgctgccagcattgcttacatcagccggatcctatggctctactttgagacgggtacctgggtgtatcctgtgtttgccaaactcagcctcttgggtctagcagctttcttctctctcagctacgtcttcatcgccagcatctacctacttggagagaagctcaaccactggaaatgggtttctgttcagatcttgcaaagatggaggctagaatctgttggaatctgcttccagtggcccgattggaagtcaccagccaagcaccaactggtcaagaatatcaggtgaaatatcagggctataaaaatatttctagcccttgctactatctgacagcagttaaaggaataaaacaagtcggggtgaatctaacttcctatctgccaactaggatactttctactgggaaaaatgcttctcaatcaagaaaatatttataataaacataattttccaattacaaaa

SEQ ID NO: 59098 - DNA, 2329 bp, Homo sapiens
ggagccggggcagtgcggctctgggctggccgaaggggtggcgctgcgatcccgcagggcagcgacgcgactctggtgcgggccgtcttcttccccccgagctgggcgtgcgcggccgcaatgaactgggagctgctgctgtggctgctggtgctgtgcgcgctgctcctgctcttggtgcagctgctgcgcttcctgagggctgacggcgacctgacgctactatgggccgagtggcagggacgacgcccagaatgggagctgactgatatggtggtgtgggtgactggagcctcgagtggaattggtgaggagctggcttaccagttgtctaaactaggagtttctcttgtgctgtcagccagaagagtgcatgagctggaaagggtgaaaagaagatgcctagagaatggcaatttaaaagaaaaagatatacttgttttgccccttgacctgaccgacactggttcccatgaagcggctaccaaagctgttctccaggagtttggtagaatcgacattctggtcaacaatggtggaatgtcccagcgttctctgtgcatggataccagcttggatgtctacagaaagctaatagagcttaactacttagggacggtgtccttgacaaaatgtgttctgcctcacatgatcgagaggaagcaaggaaagattgttactgtgaatagcatcctgggtatcatatctgtacctctttccattggatactgtgctagcaagcatgctctccggggtttttttaatggccttcgaacagaacttgccacatacccaggtataatagtttctaacatttgcccaggacctgtgcaatcaaatattgtggagaattccctagctggagaagtcacaaagactataggcaataatggagaccagtcccacaagatgacaaccagtcgttgtgtgcggctgatgttaatcagcatggccaatgatttgaaagaagtttggatctcagaacaacctttcttgttagtaacatatttgtggcaatacatgccaacctgggcctggtggataaccaacaagatggggaagaaaaggattgagaactttaagagtggtgtggatgcagactcttcttattttaaaatctttaagacaaaacatgactgaaaagagcacctgtacttttcaagccactggagggagaaatggaaaacatgaaaacagcaatcttcttatgcttctgaataatcaaagactaatttgtgattttactttttaatagatatgactttgcttccaacatggaatgaaataaaaaataagtaataaaagattgccatgaatcttgcaaaaaaggtattaactcatactatattcttggataaaataaccttttaaaatactttagcacatatgcttaaaatctaagttaacagatttgtcttagtccatttgtgttgctataacaaaataccacagatttggtaatttataaacaacagaaatctgtttttcctggctcttgaggctgggaattccaagaccaatgcaccagcagaattagtgtctggtgaaggctgatctctgcttccaagatggcacctcattgctgcatcctccacagtggaggaatgtatgtcctcacatggtggaagggacagaagggaaagaggagcaaaatgctttcaaaagagcatttaatctcattcattactcagtcacctcttaaaggcccacatccctttaatactgttgcctttggggattaagtttcgacatgaattttggaggggacaaaaacatccaaaccatagcaacataaatgtatagaatatttcacacaaagcagagtgcctgggtaatgaccagatataaagaagtatttgaaatgaccttacctccaagatgcttatactcttagaaaagttgacaggtacagatggctgtaatttgaagcagcaggtaggattcattgcacctattattcattaaacacctgttgtatgtcttctactgtactggagtgcttagtattagttaattaactcattcctcataacagcccactaagatagatggtattacctaccttgatagatgaagaaagaccaacaaggttttacttttccaaggtcaaggtcacaaagctagtaaggggtaaagccatgattagattcagctcaggaagattccactggcaactccttacttctactattattaattttactttaacatttaacaccttacagcagaaaacatgcacaggcactaataggaaatcagcaggagtaacaggtaaagaaaaacatggtccttatctacaagcagttcacaattgagctggagccaaagg

SEQ ID NO: 59099 - DNA, 749 bp, Homo sapiens
gcacgagaaggaagtgcttttgaatgaggtactgagggccaaggtgttggaagttcctaattctttcctcggttaactgtgaaactctgcgtattgggaaggcctggcctcagtcatcaggccaggagaggtactggacgccgcgcacgcactcgtctgccagcgaggcccaaaggggaagcctagcggagctcaatgtggcagctgctggcctctgggccgactgtgatcaaccactctatgattgtcctatgtgtgggctcatatgtacaaattaccatattcttcaggaacatgttgacttgcatttggaagaaaacagctttcagcaaggcatggatagagtccagtgttctggtgatctacaattggctcaccagcttcagcaagaagaagacagaaagaggagatctgaagaatcaagacaagaaatagaagaatttcagaagctgcagagacaatatggtttagataattctggaggatacaaacaacaacaactacgaaatatggagatagaagtaaataggggaagaatgcctccatctgaatttcataggagaaaagctgatatgatggaatcattagctcttggttttgacgatggaaaaacaaaaacttccggaattattgaagcacttcataggtattatcagaatgctgccacagatgtgagacgggtgtggctttcttcagtggtggatcactttcattcatctttaggcgacaaaggttggtcgacgcggccg

SEQ ID NO: 59100 - DNA, 1112 bp, Homo sapiens
caatcttcgctcctccaatctccgctcctccacccagttcaggaacccgcgaccgctcgcagcgctctcttgaccactatgagcctcctgtccagccgcgcggcccgtgtccccggtccttcgagctccttgtgcgcgctgttggtgctgctgctgctgctgacgcagccagggcccatcgccagcgctggtcctgccgctgctgtgttgagagagctgcgttgcgtttgtttacagaccacgcagggagttcatcccaaaatgatcagtaatctgcaagtgttcgccataggcccacagtgctccaaggtggaagtggtagcctccctgaagaacgggaaggaaatttgtcttgatccagaagccccttttctaaagaaagtcatccagaaaattttggacgggggaaacaaggaaaactgattaagagaaatgagcacgcatggaaaagtttcccagtctacagcagagaagttttctggaggtctctgaacccagggaagacaagaaggaaagattttgttgttgtttgtttatttggtttccccagtagttagctttcttccctggattcctcactttgaagagtgtgaggaaaacctatgtttgccgcttaagctttcagctcagctaatgaagtgtttagcatagtacctctgctatttgctgttattttatctgctatgctattgaagttttggcaattgactatagtgtgagccaggaatcactggctgttaatctttcaaagtgtcttgaattgtaggtgactattatatttccaagaaatattccttaagatattaactgagaaggctgtggatttaatgtggaaatgatgtttcataagaattctgttgatggaaatacactgttatcttcacttttataagaaataggaaatattttaatgtttcttggggaatgtgttagagaattccttactcttgattgtgggatactatttaattatttcactttagaaagctgagtgtttcacaccttatctatgtagaatatatttccttattcagaatttctaaaagtttaagttctatgagggctaatatcttatcttcctataattttagacattgctttaactttttagt

SEQ ID NO: 59101 - DNA, 1362 bp, Homo sapiens
ttttttttttttatctgtaataattgccagtttattcctctggctaagagatccagaggtaatttgaggtttacatttctttttaaagttctttcatcaagagtttaggtgcccccattgccctcataagctggttgcaaattatttgactcttacttgtaaaaaaaatccttaattctttttgtgtgtgagacacgtgttcattaaaaagtacatataagcaaaaagaacaaaaagaagaaaacaaataaaatttcacaccacacagaaataagcttggttaagtttgtgatatatgttatatggatgtatgtatacacacacgcacacacacaaagtttggaattttatcctacatatgtgagctgatattaaatatgctgctttgccataacctgttatgttttactttacaacatggaatgaacatattcccatgcaaatgtgtgaaagtttccaattgaaaaatagacctggaaaatgggtcaaaatccaaaatccaatgagatgctggtaccaaggaaattacctaaaacaaaatttcatcagatgattaaaagtaaaatggaggtcaaagatacatcagaaaatgctaacagaaagaaagctggggccagattttaatattaggcaaaaatgaattcaaggcctaaagcacacaggataaggacggctgcgtgaatgtctttgcttccaatgcatcatcacaaacttgtttcttactcttcttatctcttccctaagcctttcaagctcatctactcctcttatcatttcttcagggtccaaatgcctaacgggtgtgtcctctttaaatccctggccaggctgattcggccctcctctggggtttccttctgcttcctggcttacgccttcttcggaaggttgaggatttccttctgcctcctgtggtacatcctccaaagggcgatcttcctcggcctttggcatgttctgtggttttccctcattttcttcacaagacttttgcatattgagtattttttatttcctttttgaataaattaatcctgcagggattcaggggattttcctctctcttccctcacctcgatttgtgtcgcgcccaaaaaaccaaatatcctgaaaggatcttgggcacttttctccttcgctcgccgctactgacgaaatcattatttattttcttttcctgttgctactaagatgtttcaattcgcaacgtgtctcgctaatttgactatggattcatcaaaatgcaactgaggtttgctcagttaggttaccccattcggaaatctccgtatcatagtttatttccaactccacgaagcttatcgcaggtaatcgaatccttcatcgactttcagacccaag

SEQ ID NO: 59102 - DNA, 1850 bp, Homo sapiens
aaggatgaggaaaggatatcccagagtgccagggcgcgcaaaccaaacttcacactctaggaagacagaggccagaggaaccaggagggcttcctggaggaggtggcatttactctgggcctaagagatcacaggaaaatggaggccagcattctaggcctggggaagagtttgggcaaaggcttggcagtaagagaataaaggtggggcttgatgggccagaggataagtgactcctcaaggtcacaagacaccctgatggctgggaccccatctctgatggagcaaggcttctgatacccaactgaggcttggcgccaaggactgacatcaaggaagtggattcctgcaaacctggcacccgagggtccacttcctcaatttctgtgcagctgggaggtgaggtaagaggaagtgtgggccacaggctaggcccagagagcctggaggaggagcctctgccagactggagagaagcaggcctgagcctccccaaaggcagctcctggggactcccaggaccacaggctgagacgagacgcagggtggctggaggaagtgagaggtgaactcagcctgggactggctgggcgagactctccacctgctccctgggaccatcgcccaccatggctgtggcccagcagctgcgggccgagagtgactttgaacagcttccggatgatgttgccatctcggccaacattgctgacatcgaggagaagagaggcttcaccagccactttgttttcgtcatcgaggtgaagacaaaaggaggatccaagtacctcatctaccgccgctaccgccagttccatgctttgcagagcaagctggaggagcgcttcgggccagacagcaagagcagtgccctggcctgtaccctgcccacactcccagccaaagtctacgtgggtgtgaaacaggagatcgccgagatgcggatacctgccctcaacgcctacatgaagagcctgctcagcctgccggtctgggtgctgatggatgaggacgtccggatcttcttttaccagtcgccctatgactcagagcaggtgccccaggcactccgccggctccgcccgcgcacccggaaagtcaagagcgtgtccccacagggcaacagcgttgaccgcatggcagctccgagagcagaggctctatttgacttcactggaaacagcaaactggagctgaatttcaaagctggagatgtgatcttcctcctcagtcggatcaacaaagactggctggagggcactgtccggggagccacgggcatcttccctctctccttcgtgaagatcctcaaagacttccctgaggaggacgaccccaccaactggctgcgttgctactactacgaagacaccatcagcaccatcaaggacatcgcggtggaggaagatctcagcagcactcccctattgaaagacctgctggagctcacaaggcgggagttccagagagaggacatagctctgaattaccgggacgctgagggggatctggttcggctgctgtcggatgaggacgtagcgctcatggtgcggcaggctcgtggcctcccctcccagaagcgcctcttcccctggaagctgcacatcacgcagaaggacaactacagggtctacaacacgatgccatgagctgacggtgtccctggagcagtgaggggacaccagcaaaaaccttcagctctcagaggagattgggaccaggaaaacctgggaggatgggcagacttcctgtctttgaggctaatggacccgtggggcttgtaatctgtctctttctactatttacatctgatttaaataaaccattccatctgaaagggaaaaaaaaaa

SEQ ID NO: 59103 - DNA, 1944 bp, Homo sapiens; identical to SEQ ID NO: 58757

SEQ ID NO: 59104 - DNA, 453 bp, Homo sapiens
ttaaataggactcactaaggggaaatttggcccctcgaggcccaaaaattcggcacgagaactgcctgactgcttgttcgtctcactggtgtgagctccagcatcccctttgctcgaaatggaccccaactgctcttgcgccactggtggctcctgcacgtgcgccggctcctgcaagtgcaaagagtgcaaatgcacctcctgcaagaagagctgctgttcctgctgccccgtgggctgtgccaagtgtgcccagggctgcgtctgcaaaggggcatcggagaagtgcagctgctgtgcctgatgtgggaacagctcttctcccagatgtaaatagaacaacctgcacaacctggatttttttaaaaatacaacactgagccatttgctgcatttctttttatactaaatatgtgactgacaataaaaacaattttgactttaaaaaaaaaa

SEQ ID NO: 59105 - DNA, 1610 bp, Homo sapiens
tttcgtggtgcgcctgcagggatcggaagccggttggggtgtgagaggttttctcgctctaggtaagcgaaacaagccgggggactgcgagccagggactcgggccgcggggcgggaagaagtggggcagcgcttggccaggccgaaaggactttgggggtgggggctgggagtccgtgtctcgaatgagggaggagaggtggagttgccggggctcaggcccggcctcgagcatgggcggatgagaggagtcgggagccgaggcctatggtccttcgggtgaggggagacggagccagcgaggagatggagcagaagcttgtggaggagattcttcaagcaatcactatgtcaacagacacaggtgtttcccttccttcatatgaggaagatcagggatcaaaactcattcgaaaagctaaagaggcaccattcgtacccgttggaatagcgggttttgcagcaattgttgcatatggattatataaactgaagagcaggggaaatactaaaatgtccattcatctgatccacatgcgtgtggcagcccaaggctttgttgtaggagcaatgactgttggtatgggctattccatgtatcgggaattctgggcaaaacctaagccttagaagaagagatgctgtcttggtcttgttggaggagcttgctttagttagatgtcttattattaaagttacctattattgttggaaataaactaatttgtatgggtttagatggtaacatggcattttgaatattggcttcctttcttgcaggcttgatttgcttggtgaccgaattactagtgactagtttactaactaggtcattcaaggaagtcaagttaacttaaacatgtcacctaaatgcacttgatggtgttgaaatgtccaccttcttaaatttttaagatgaacttagttctaaagaagataacaggccaatcctgaaggtactccctgtttgctgcagaatgtcagatattttggatgttgcataagagtcctatttgccccagttaattcaacttttgtctgcctgttttgtggactggctggctctgttagaactctgtccaaaaagtgcatggaatataacttgtaaagcttcccacaattgacaatatatatgcatgtgtttaaaccaaatccagaaagcttaaacaatagagctgcataatagtatttattaaagaatcacaactgtaaacatgagaataacttaaggattctagtttagttttttgtaattgcaaattatatttttgctgctgatatattagaataatttttaaatgtcatcttgaaatagaaatatgtattttaagcactcacgcaaaggtaaatgaacacgttttaaatgtgtgtgttgctaattttttccataagaattgtaaacattgaactgaacaaattacctataatggatttggttaatgacttatgagcaagctggtttggccagacagtatacccaaacttttatataatatacagaaggctatcacacttgtgaaattctcttgtctaatctgaatttgcattccatggtgttaacatggtatatgtattgttattaaagtaagtgacccatgtcaaaaaaaaaa

SEQ ID NO: 59106 - DNA, 390 bp, Homo sapiens
ggcacgaggcgccttatagcctctcaacttcttgcttgggatctccaacctcaccgcggctcgaaatggaccccaactgctcctgcgccactggtggctcctgcacctgcactggctcctgcaaatgcaaagagtgcaaatgcaactcctgcaagaagagctgctgctcctgctgccccatgagctgtgccaagtgtgcccagggctgcatctgcaaaggggcatcaaagaagtgcagctgctgtgcctgatgtccggacagccctgctcgaagatatagaaagagtgacctgcacaaacttggaattttttttccatacaaccctgacccatttactgtattttttttaatgaaatatgtgaatgataataaaagttgctgacttaaaa

SEQ ID NO: 59107 - DNA, 1124 bp, Homo sapiens
ttttttttttttatgggaataaatacttgttaaacttctcttataaatatgcattaaaacgtccgataacacaagccaagggctgtaaaattaaggttaaatcaagactgaatttcccgcacggaccagcaggaaagccagttacctaaaagagcctaatccccaaatccgctgaaggtgcagggcggcctcagtcccggggcatcttgaactggtccttctccctgcgcacggcccgcatggtggtcaccgggtccgtctcacctgcgtgctgctgcaccgtcttctccctcactctcatgaaggggttgtaggtaaactcctctgccagggtggatggcactgtgggctccccgatgctgtacttctccttggcccaggccagcttctcccggatggcggcattgccgggctccacgtggcgtgcaaacttgaggttgttgatggtgtactcgtggccacagtagactcttgtgtccggggggagccggcccaagacctccagcagagctttacacatctcatccgcagtcccttcatagaacttcccgcagccagccacaaacaaggtgtcacctgtgaacacggcagggggctccgagcctccgggcttgctcacgaagtaacaaatgtgtcctgaagtgtggcacggggtcgccaggcacttgacgttcagagaccccacctgcagtgtggacaggtgagtgatcttgtgagtcagggccccgatacggtcgtcacccccgtacaccttcagtcccgactccagcttgaccagtttctcattcccgccagcatggtcccagtggtggtgggtggtgagcactgtggtcagtttcaccccgtgctttctcgccgcgtccacgaccttctggggctgcaccggatccacaatggcagcctccttggtctcatcatcaatgaccaggtacatgtagttgtcggtcagggcaggcagcacctctaccttcatggtgccctcgtccacggtcaggttcttccgcaaatctgtgtggcagaaaactcccagcagggctggacctagcgctttccgcacccgcggcccaacgcccgctcagcgcttgcgccgcctccgctcgagcccggacgaaatcgtcgacccg

SEQ ID NO: 59108 - DNA, 3073 bp, Homo sapiens
tgtcgtgggaaatgtagtcactgtcccggaacctggggcagcggagtcccgtgcgccctgtggtgacagctcaggagggtgtgtgcgctcagcaggggccagcatggaccagtctgtggcaatccaggagacgctggctgagggggaatactgcgtcatcgcggtgcaaggtgtgctgtgtgagggggacagccggcagagccgcctcctgggactcgtgcgctaccgcctggagcatggcggccaggaacacgctctcttcctctatacgcaccggaggatggccattaccggggacgatgtctctctggaccagatagtgccagtctcgcgggattttacgctggaagaagtgtccccagatggtgaactctacatccttggctcagatgtgaccgtccagctggacacagcagagcttagcctcgtattccaactgccctttggttcacaaaccaggatgttcctccacgaagttgccagggcctgtccaggcttcgattctgcgacccgggatcctgaattcctgtggctgtctcggtataggtgcgcagagctggagctggagatgccaacgccgcgcggttgtaactcggccctagttacctggccagggtacgcgacaattggcggaggtggttctaactttgatggtttgagaccaaatgggaagggagtgcctatggaccaaagctccaggggtcaagataaaccagaaagcttgcaaccaagacagaataaatccaagtccgaaattactgacatggttcgctcctccactatcacagtgtcggacaaggctcatattttatccatgcagaagtttggactgcgagatacaattgtgaaatcacatctactacagaaagaagaggattacacctatatccagaacttcaggttttttgcgggaacatacaatgtaaatgggcagtcccccaaagaatgcctccggctgtggctgagcaatggtatccaggccccagatgtctattgtgtagggttccaggagcttgatctgagtaaggaagcttttttctttcacgataccccaaaggaggaagagtggttcaaagctgtgtcagagggtcttcatccagatgccaaatatgcaaaggtgaagcttatccgactggttgggattatgctgctgttatatgtcaaacaggagcatgcagcttatatctcagaagtggaggccgagactgtggggacaggaatcatggggaggatgggcaacaagggaggcgtggcgatcaggttccagttccacaacaccagcatctgcgttgtgaattctcacttggcagcccacattgaagagtatgagaggaggaaccaggactataaggacatttgttctcgaatgcagttttgtcagcctgacccaagccttccccctctcaccatcagcaaccatgatgtgatcttgtggctgggggacctcaactacaggatagaagagctggatgtggaaaaagtgaaaaagctcatcgaagagaaggattttcaaatgctgtatgcatatgatcagctgaaaattcaggtggccgcaaagactgtctttgaaggcttcacagagggtgagctcacattccagcctacttacaagtatgatacgggctctgacgactgggataccagtgagaagtgccgtgctcctgcctggtgtgatcggattctctggaaagggaagaacatcactcagctgagttaccagagccacatggccctgaagaccagtgaccacaagcctgtcagctcagtgtttgacatcggggtgagggtcgtaaatgacgagctttaccggaagacactggaggaaattgttcgctccctggataagatggaaaatgccaacattccttctgtgtccctgtccaagcgagagttctgttttcagaatgtgaagtacatgcaattgaaagtagaatcctttacaattcataatggacaagtaccctgtcattttgaattcatcaacaagcctgatgaagagtcttactgtaagcagtggctgaatgccaaccccagcagaggcttcctcctgccagattctgatgttgagattgacttggagctcttcgtaaataagatgacagctacaaagctcaactcgggtgaagacaaaattgaggacattctggttctgcacttggacaggggaaaggattactttttgtctgtgtctgggaactacctgcccagctgttttgggtctcccattcatacactgtgttacatgagagagccaatcttggacctaccacttgaaaccattagtgagctgactctgatgccagtatggactggagatgatgggagccagttggatagccccatggaaatccccaaagagctctggatgatggttgattacctgtaccgaaatgctgtccagcaggaagatctgtttcagcaaccaggcctgaggtcagaatttgaacatatcagggactgcttggatactggaatgattgataacctctctgccagcaatcattctgtagccgaagccctgctgcttttcctggagagccttccagagcctgtcatctgttacagcacctaccataactgcttggagtgttctggcaactacacagcaagcaaacaggtcatttctactctccccatattccacaaaaatgtcttccactacttgatggcgtttttgcgagaactgctgaaaaattcagcaaaaaatcatttggatgagaatattctagctagcatatttggcagcttattgcttcgaaacccagctggtcaccaaaagcttgatatgacagagaagaagaaggctcaagaatttattcaccagttcctctgcaacccactctgagcctctctctcctcctattttacttgaggctgccaattaccagccccacctgtttcagctcaagagatgccttaagataattatgtgaggccacttggtagcaagaatggcagctatttcctgagcctagtaccccaattaagcccaccattggttagcacactcagcgctgtgagtcgtgaagacacgggagaaaatccaccataataaaactgacattcaattttc

SEQ ID NO: 59109 - DNA, 2594 bp, Homo sapiens
cgcgccagccgcgaatcggatctctatggagatggcctaggcgatatccctgagctgagagcatcaccctgtccccgaatccttctttcctctctgttttgtttttcattcccctccctctctcccctccccctccagtccacgacgactggctgttgaccctgttcaggcctcggtgaaggcttttggttactccccttcccaccccatcccttaattttattcttttgaagagtgcatttcaagctgccaaggtggagagagggattacagaaaggagaacaccttatttcagaaaaggtgtaccatacctgagagcaccaggaagtcgcatgagagatcacctgatacatgaacgtatgatgttccatctgcgcattgatgaataggcagcatttacaaattaactgatgtgttgctgtatatcatctctttgatgattgctcctcttctttgtatcctgtcttataatttcaacacatttgcgatactcaatgtctattctaaattaaccatgttttgtaccacaaactcattgcccatggatctgttgctgaaacaaggaagtcttaaacaagaagtggaatctttctgttatcagattgtgtctgaatcaaatgatcagaaggttggaatattacaaagtgaagataagcagttgcaaccttcagtttctaaaaaatcagaaggtgagctttccagggtcaaatttatatccaattccaacaaaataacatttagtaaaaaaccaaaaagaagaaaatatgatgaaagttatttgtcttttggatttacttacttcggaaatagagatgcacctcatgctcagtgtgtattatgtaagaaaattttatcaaatagctctttagcccctagtaagcttcgaagacatttggaaactaaacatgctgcatataaagacaaagacataagctttttcaagcaacatctcgattcacctgaaaataataaacccccaacacctaaaattgtgaatacagataatgaaagtgctacagaagcatcatacaatgtaagttaccatatagcgctgagtggagaggctcatactattggagaattgcttatcaaaccttgtgcaaaagatgtagtgatgcggatgtttgatgaacaatatagtaaaaaaatagatgcagtacagctatcaaacagtactgttgcacgtcgaattaaggatctagctgctgacattgaagaagagcttgtttgtagactgaaaatttgcgatgggttttcactgcaactagatgaatcagctgatgtttcaggacttgctgtgctgcttgtgtttgttcgttataggtttaataagtctattgaggaagacctactcctgtgtgaatctttgcaaagtaatgctaccggtgaagaaatattcaactgtatcaacagttttatgcagaaacatgaaattgaatgggaaaaatgtgttgatgtttgtagtgatgcttctagggcagtggatgggaaaattgccgaagctgtcaccttaataaaatatgtggctcccgaaagcaccagtagtcactgcctattatacagacatgcactggcagttaaaataatgcctacatctctaaaaaatgtgctagaccaggcagtacaaatcatcaattatattaaagctcgaccacatcaatccagactattaaaaattttatgtgaggaaatgggtgctcagcacacagcacttcttctaaatacagaggtgaggtggctttctcgaggtaaagttcttgtaagactttttgaacttcgtcgtgaacttttggttttcatggattctgcttttcgactatctgattgtttaacaaattcatcttggctgctaagacttgcatatcttgcagatatttttactaaattaaatgaagttaatttgtcaatgcaaggaaaaaatgtgaccgtttttacagtatttgataaaatgtcgtcattgttaagaaaattggaattttgggcctcatctgtagaagaagaaaactttgattgttttcctacactcagtgattttttgactgaaattaattctacagttgataaagatatttgcagtgccattgtgcagcacctaaggggtttgcgcgctactctgttaaaatactttcctgtaacaaatgacaataatgcttgggttagaaatccatttacagttactgttaaaccagcttcattagtagcacgggactatgagagcctgattgatttaacatctgattctcaagtgaagcaaaattttagtgaactttcactaaatgatttttggagtagcctaattcaggaatacccaagcattgcaaggcgtgcagtgcgtgtacttcttccttttgctacaatgcacctgtgtgaaacggggttttcatattacgctgcaacaaaaacaaaatataggaaaagacttgatgctgcacctcatatgcgaatccgacttagcaatattacacctaatattaagcggatatgtgataaaaagacacaaaaacactgttctcattaaaattggaggagtttgcatgtctcatgataaccaaatgtaagatgaaaataaaagatgatttacttcaaaaaaaaaa

SEQ ID NO: 59110 - DNA, 797 bp, Homo sapiens
taccgctgcgagaagacgacagaagggtacggctgcgagaagactacagaagggtacggctgcgagaagacgacagaagggtacggctgcgagaagacgacagaagggtacggctgcgagaagaccacagaagggtacggctgcgagaagacgacagaagggtacggctgcgagaagacgacagaagggtacggctgcgagaagacgacagaaggggctcgcgatagccagccgcggctgcccttgcgcttcccgagctggcggggtccgtggtgcgggatcgagattgcgggctatggcgccgaaggtttttcgtcagtactgggatatccccgatggcaccgattgccaccgcaaagcctacagcaccaccagtattgccagcgtcgctggcctgaccgccgctgcctacagagtcacactcaatcctccgggcaccttccttgaaggagtggctaaggttggacaatacacgttcactgcagctgctgtcggggccgtgtttggcctcaccacctgcatcagcgcccatgtccgcgagaagcccgacgaccccctgaactacttcctcggtggctgcgccggaggcctgactctgggagcacgcacgcacaactacgggattggcgccgccgcctgcgtgtactttggcatagcggcctccctggtcaagatgggccggctggagggctgggaggtgtttgcaaaacccaaggtgtgagccctgtgcctgccgggacctccagcctgcagaatgcgtccagaaataaattctgtgtctgtgtgtaaaaaaaaaa

SEQ ID NO: 59111 - DNA, 1938 bp, Homo sapiens
agatagtaaataatctcggaaaggcgagaaagaagctgtctccatcttgtctgtatccgctgctcttgtgacgttgtggagatggggagcgtcctggggctgtgctccatggcgagctggataccatgtttgtgtggaagtgccccgtgtttgctatgccgatgctgtcctagtggaaacaactccactgtaactagattgatctatgcacttttcttgcttgttggagtatgtgtagcttgtgtaatgttgataccaggaatggaagaacaactgaataagattcctggattttgtgagaatgagaaaggtgttgtcccttgtaacattttggttggctataaagctgtatatcgtttgtgctttggtttggctatgttctatcttcttctctctttactaatgatcaaagtgaagagtagcagtgatcctagagctgcagtgcacaatggattttggttctttaaatttgctgcagcaattgcaattattattggggcattcttcattccagaaggaacttttacaactgtgtggttttatgtaggcatggcaggtgccttttgtttcatcctcatacaactagtcttacttattgattttgcacattcatggaatgaatcgtgggttgaaaaaatggaagaagggaactcgagatgttggtatgcagccttgttatcagctacagctctgaattatctgctgtctttagttgctatcgtcctgttctttgtctactacactcatccagccagttgttcagaaaacaaggcgttcatcagtgtcaacatgctcctctgcgttggtgcttctgtaatgtctatactgccaaaaatccaagaatcacaaccaagatctggtttgttacagtcttcagtaattacagtctacacaatgtatttgacatggtcagctatgaccaatgaaccagaaacaaattgcaacccaagtctactaagcataattggctacaatacaacaagcactgtcccaaaggaagggcagtcagtccagtggtggcatgctcaaggaattataggactaattctctttttgttgtgtgtattttattccagcatccgtacttcaaacaatagtcaggttaataaactgactctaacaagtgatgaatctacattaatagaagatggtggagctagaagtgatggatcactggaggatggggacgatgttcaccgagctgtagataatgaaagggatggtgtcacttacagttattccttctttcacttcatgcttttcctggcttcactttatatcatgatgacccttaccaactggtacaggtatgaaccctctcgtgagatgaaaagtcagtggacagctgtctgggtgaaaatctcttccagttggattggcatcgtgctgtatgtttggacactcgtggcaccacttgttcttacaaatcgtgattttgactgagtgagacttctagcatgaaagtcccactttgattattgcttatttgaaaacagtattcccaacttttgtaaagttgtgtatgtttttgcttcccatgtaacttctccagtgttctggcatgaattagattttactgcttgtcattttgttattttcttaccaagtgcattgatatgtgaagtagaatgaattgcagaggaaagttttatgaatatggtgatgagttagtaaaagtggccactattgggcttattctctgctctatagttgtgaaatgaagagtgaaaacaaatttgtttgactattttaaaattatattagaccttaagctgttttagcaagcattaaagcaaatgtatggctgccttttgaaatatttgatgtgttgcctggcaggatactgcaaagaacatggtttattttaaaatttataaacaagtcacttaaatgccagttgtctgaaaaatcttataaggttttacccttgatacggaa

SEQ ID NO: 59112 - DNA, 2031 bp, Homo sapiens
tagaaaccaggcggcgcgttcccggtggcggcgccctggactcccgggcccgcgcatccccgccagccttccttaaggcggatgggtggcccccgagaccccgtcggacccatggtttccagtgcagcgcggagtgggcgatgccagcgtgccaggagccatgtctgaccaggacgtttggaagatcatatccatgccagaggctcttgtgaggagatgagttggtaaagagagaggctgggatgaagatgctgccaggagtgggcgtgtttgggactggcagctccgcccgagttctggtcccactgctgagggcagaagggttcactgttgaggccctgtgggggaagactgaggaggaggcgaagcagcttgctgaggagatgaacatcgccttctacaccagccggactgatgacatcttgctgcatcaagatgtggatctggtgtgcatcagcatcccccctccactcacccggcagatatccgtgaaggctctaggtattgggaagaatgtggtttgcgagaaggcagcaacatcggtggatgccttccggatggtgacagcctcgcgctactacccgcagctcatgagcctggtagggaacgtgctgcgcttcctgcctgccttcgtgcgcatgaaacagctgatttcggaacactatgtgggagcggtgatgatctgtgatgcccgcatctactcaggcagcctgctgagccccagctatggctggatctgtgatgagctcatgggcggcgggggcttgcacaccatggggacctacattgtggacctgctgacccacctgaccggccggagagccgagaaggtgcacgggctgctcaagacattcgtgaggcagaacgctgccatccgtggcatccggcacgtcactagcgatgacttctgtttcttccagatgctcatgggtgggggtgtgtgtagcacagtgacactcaacttcaacatgccaggcgcctttgtgcatgaagtcatggtggtaggctctgcaggacgcctcgtcgcccggggagccgacctctatgggcagaagaactctgccacgcaagaggagctgctcttgagggactcgctggcagtgggcgcaggactgcctgagcaggggccccaggatgtcccgctgctgtacctgaagggcatggtctacatggtgcaggccttgcgccagtccttccaggggcagggcgaccgccgcacctgggaccgcacccctgtctccatggccgcctccttcgaggatgggctgtacatgcagagcgtggtggatgccatcaagaggtcgagccgatccggggagtgggaggctgtggaggtgctgacggaggagcccgacaccaaccagaacctgtgtgaggcacttcagcggaacaacctatgagcctgcacctgggctccttgccacagggcagagggaccagggaggggaacaggagccagacatgacagggacttggccctagcagagacagtgtctttcatttaatgagtctgggtgaagccagaggtggctctgggacttcgccccctccagtggctcatctgctcctcagacttgcagggtggcaaatgttcctgttgccaggttaccacggtgtgcacagggcagagctgccgccaggcctcctcatggtgatgccagtgagtcggaccaggaaaggctcaccctggggagcccttcagcctgatccgcagtcctaacagggtgagaaagcacaagaggggccagctcggctgaggcctgaggagaaatgatgagaagttttgtttcgttcttgggctggggcatctcaggaacagtgagggcaacaagctgtccctcagggaccctcacctgccctcccatgtgaccaggcccttcccaggtggggactggggcttgctttattaagtgagctcttgggcttttgaagtaggacagagggccctggtttggcagagaggaggcaagggagggctttagaacatctgagaaatgttaataaataattcagaaaataggaaaaaaaaaa

SEQ ID NO: 59113 - DNA, 1714 bp, Homo sapiens
ctggggctcgccgtcaacgtggtcaccacgctcgtgctcatctcctactgtcccacggccaccgaagaggcaccatactggacataccttttatgtgcactgggactttttatttaccagtcactggatgctattgatgggaaacaagccagaagaacaaactcttgttcccctttaggggagctctttgaccatggctgtgactctctttccacagtatttatggcagtgggagcttcaattgccgctcgcttaggaacttatcctgactggtttttttcctgctcttttattgggatgtttgtgttttattgcgctcattggcagacttatgtttcaggcatgttgagatttggaaaagtggatgtaactgaaattcagatagctttagtgattgtctttgtgttgtctgcatttggaggagcaacaatgtgggactatacgattcctattctagaaataaaattgaagatccttccagttcttggatttctaggtggagtaatattttcctgttcaaattatttccatgttatcctccatggtggtgttggcaagaatggatccactatagcaggcaccagtgtcttgtcacctggactccacataggactaattattatactggcaataatgatctataaaaagtcagcaactgatgtgtttgaaaagcatccttgtctttatatcctaatgtttggatgtgtctttgctaaagtctcacaaaaattagtggtagctcacatgaccaaaagtgaactatatcttcaagacactgtctttttggggccaggtcttttgtttttagaccagtactttaataattttatagacgaatatgttgttctatggatggcaatggtgatttcttcatttgatatggtgatatactttagtgctttgtgcctgcaaatttcaagacaccttcatctaaatatattcaagactgcatgtcatcaagcacctgaacaggttcaagttctttcttcaaagagtcatcagaataacatggattgaagagacttccgaacacttgctatctcttgctgctgctgtttcatggaaggagatattaaacatttgtttaatttttatttaagtgttatacctatttcagcaaataaaatatttcattgcttatattaatccttattttttcaatttcaatatgatcacttacagtttccatcataatttttttttgcaacatagccatttcttttttaaattcattttgtgcaccagtaagtagattatcatgattcttctccaactcttccatactctaaaaacacaaaagacaagttaagttacaaaggaccacttttcatctcaggttctaaacttgtacaattaattttcaaaagtagtaatttttgaatattcaaatgctcatctatttgaaataaaaatattctaagtaatacatgaataccaaaatacctactaaaaaagaaaaaatataagacatgaataaaatgttataggaagtacaatgtagtatactttgcccaaaatgggtttcctgaactgttaaggtcaagataaaaaagactggaagtcccacatcagtaaaaaccatttctattaagctttccaaatatcaagcaataatctacttatgactaatagtgtgccatgaattcactagagggaataaaataatctatagtacaacctctttcacattatgaaaaataaaaattatgtctta

SEQ ID NO: 59114 - DNA, 1211 bp, Homo sapiens
gatgacatctggtgtattgactgtggccagtcttaaagctagtttttgctatgtggaacatgctgctctaattcagatttaaagagtttcttcctgttaattcgaagctcactgtgcctcttgtttccgagggaagaaggactgattaagtcatctaaatggatgcaatactgaattacaggtcagaagatactgaagattactacacattactgggatgtgatgaactatcttcggttgaacaaatcctggcagaatttaaagtcagagctctggaatgtcacccagacaagcatcctgaaaaccccaaagctgtggagacttttcagaaactgcagaaggcaaaggagattctgaccaatgaagagagtcgagcccgctatgaccactggcgaaggagccagatgtcgatgccattccagcagtgggaagctttgaatgactcagtgaagacgtcaatgcactgggttgtcagaggtaaaaaagacctgatgctggaagaatctgacaagactcataccaccaagatggaaaatgaggaatgtaatgagcaaagagaaagaaagaaagaggagctggcttcaaccgcagagaaaacggagcagaaagaacccaagcccctagagaagtcagtctccccgcaaaattcagattcttcaggttttgcagatgtgaatggttggcaccttcgtttccgctggtccaaggatgctccctcagaactcctgaggaagttcagaaactatgaaatatgaaatatctctgcttcaaaaaatgaggaagagcaagactgtcccctatgctgccaacatgcagtctttgtttatgtcttaaaaatgtcatgtttatgtcatgtctgtgaattgctgagtactaattgattcctccatccttgaatcagttctcataatgctttttaaataagaaaaattcagaagatgaatttcttccaatatttgaataaattaaagctcttagatacagagtagattgtattatatgctttttcctattaatactacttatagaaatccattaaaaagcaatctctgtacagtgtatttaaatatttcattgacatactgtgatctctattagtgatggatgtacaaaaaatgtttttttacccttgacttacaatgaaatgtgaaattacttgtttgaaccccgtggggagaaataaataattttcccaaagttcaaaaaaaaaa

SEQ ID NO: 59115 - DNA, 1630 bp, Homo sapiens
tttcgtggaccggcgccttctccttgcttctgggggtcgtggccttgctcccgctgtgcgggaaaagaatccaggcccttccacgcgcgtgtgggtgcgggggccccgaagtgctcgtggttccccgctaggtctccgctggggcaggaaccggaatcatgggtgggaccaccagcacccgccgggtcaccttcgaggcggacgagaatgagaacatcaccgtggtgaagggcatccggctttcggaaaatgtgattgatcgaatgaaggaatcctctccatctggttcgaagtctcagcggtattctggtgcttatggtgcctcagtttctgatgaagaattgaaaagaagagtagctgaggagctggcattggagcaagccaagaaagaatccgaagatcagaaacgactaaagcaagccaaagagctggaccgagagagggctgctgccaatgagcagttaaccagagccatccttcgggagaggatatgtagcgaggaggaacgcgctaaggcaaagcacctggctaggcagctggaagagaaagaccgagtgctaaagaagcaggatgcattctacaaagaacagctggctagactggaggagaggagctcagagttctacagagtcaccactgaacaatatcagaaagctgctgaagaggtggaagcaaagttcaagcgatatgagtctcatccagtctgtgctgatctgcaggccaaaattcttcagtgttaccgtgagaacacccaccagaccctcaaatgctccgctctggccacccagtatatgcactgtgtcaatcatgccaaacagagcatgcttgagaagggaggataaaaactttcagaatgagcaaaacaccatcaacgttaattccagagatggaacattttttttcctagtgagaaaacaacccatttgaagagaagaccactaatgagaagaccactaaagagagacatcaagaatggattcagcagaatcatttcacgttttgaacagcagcagtttgaagggccaaagccttgatcagggatcagtcattaaaggacactcttgagtattagtaaaccctcttatgatgattaaaagagaagggcagccctctccaccttttggtactttctattcaacttgcactgaccataaaatgtttctcttctgaacaagccccatcatttggtgaacctccaccctaacaaagtaggatggggttgggggctaaattaattggagtggggcgaggagagagccagaaaacatagatccgagggcagcagtgctgggtggagagagccagaaaacagatctggaggcagcagtgctggatggaattgtctaggctgtggcatgttggttttgtctttcttttctcctttgattatgtaagagctatttcattataacttattatggtgattatacaggcaagaagacaaaaaggagagaaaatgtacctcttctactggaataatgtttatgattacaagtgagataaggtatttttatcaatatgaaggcaaccttggctgataaaacctctatagtgaatactcacatctttacttcactcactatcaataataaatatattttctgacaaagactggcaaaaaaaaaaaaaa

SEQ ID NO: 59116 - DNA, 969 bp, Homo sapiens
gcggccgctccaacatgttaccattctgatgttggagccggttagcgaaccccaagagtgcagagtgtggagcgtggagcgccgggactgtgcacgcttgaccggaagcccagaccagtgcggtcctagccagagagaaaggacatttgccaacaatgagacacgaagcgcccatgcagatggcctctgcccaagatgccaggtacggccagaaagactcctctgatcagaactttgactacatgttcaaattactcatcatcggcaatagcagtgtggggaaaacatcttttctattccgttatgcagatgactcctttacatctgcattcgtcagcacagttgggatcgatttcaaagtaaaaactgtattcaaaaatgaaaagagaatcaagcttcagatttgggacacagcaggccaggaaagatacaggactatcaccacagcctattatcgtggagccatgggctttattttaatgtatgacattacaaatgaagaatccttcaatgcagtacaagattggtcaactcaaatcaaaacatactcttgggacaatgcccaagttattctggttgggaacaagtgtgacatggaagacgagcgggtcatctcaactgagcgaggtcaacatttaggagaacagcttgggtttgagttttttgaaacaagtgccaaggacaacattaatgtcaagcagacatttgagcgccttgtggatatcatctgcgacaaaatgtcagagagtttggagactgatcctgccatcactgctgcaaagcagaacacgagactcaaggaaactcctcctccaccgcagcccaactgtgcctgttagtgtccccgtgcacacaggcagctccagggggctctggttgccaacaaacagcatttgtaaatggtctattagccttcatttatactgcctaacaattatttgaaggaataaattgatgtcaatggctcgt

SEQ ID NO: 59117 - DNA, 1984 bp, Homo sapiens
aaagtgtgagattcaggcacgagccaccgcaccctgcctggaaaagtacttcttaaagggaaggcaagaaaagggtgaaaaaaagaaaaagattctccagtggtgaaaatttgggtataagcaccaagtaggaggacacgtgtggggaaaggatcaggggaaagggctctcaaagccagccattcagacttcacccagtgagggcccagtgcagcccccaaactgatgtttcagctcccagcctacctgaacctgcccaggggccagggatggccagcacagcatccccaggggactctagtgccaaaatggccatacagtcatgcccattccacatccatcatccccaacaaagaactccagccccaaagtgctcgtaacaaagaaattttaatgcataaggcacagtgagaggctggaatcattaagcatcctcaaacacaaagggcccagcaggctgagcaaaagaacagagacactctccctcactaccactgggcgccctggacagtcccctgaggagtagggggcatccagtctttggcacggtgcctgggggcaggaagtgactagcatgatcccagctacccctctgtgggaatactgccaccaagaggcagctctttggtctggataaagtcagtgcaaatgtccaggggtcaagctctggaggaatgagggtggcacagtgccctagggctgggcagtctctgaacagtctcctcagccctcatgggcaacatgtgggcttcttcttgctggcagttaggtagaggttgctgtcatcactgttgatgcggacaacatccccaatgcgtcgagcccccgatttctccagctcagccagcacattggcctcaaaggtcagtgctgccacacggaagaagaattctcggacattctcaccagtgagagatgagactgcccagtactcagccttcatctcctgggccacctggagggcgtctttctccatcagcgcatactgagcaggggtactcagatccttcttggaacctacaaggaagagaagcacactggaagggtcattctccttcagggcatcggccagccactgcttggtatgttccagagatgccacatcattcaggttgaagacaatgatgatggcttgagctcctctatagtaggttgatgcaatgcatttgaacctctcctgcccagcggtatcccaaagctgcaaactgaagggaatgcccagcacctcaaatcgttccatctcgaagtccactccaatggtggccttgtaattcttatcaaaggtgtctttgcagaacctattaatgaggcaagtcttccccaccgacaggtcccccaccacaatgaccttggagatcttaaatcccacggtgcctgtccggtgctcctggcaggcgcaggtgacgcgggggtggaagtctttgtgcccgtgcaaagcggcctccttcctcaggcactggggcagctccgccaggacgcgatccctccgcacgggtgccagaatgttcatcctgcctgcggccttgcagggcgccccagccgaattggtgatggggaatcggagactgctgcgcagcatctggcgatgccaggaaccagcagggaggggaaagggggagagaaggggcccaaggagaggcggcgcttccctcctcaactccaggcctgggaggtgactcatagagtctgccccctctcgcccttctgccctgggaggtcgggggtgaggatggtggaggggaagcgtgcgaagggggtgccagggttagaatgaggtgcccaccgaggagagagacgtctgaagtctggcgtcttttccttcaaggctgctgtgtacattgtgaggcgggagggctgaagatcaagttccctcgagggaggttaaagaatggctaattggacccggatactctgctcttcggggagcgctccgctctgggaggacgggactcccctctggcatggcggttcattgctctggccc

SEQ ID NO: 59118 - DNA, 1286 bp, Homo sapiens
acactcgaacctcatacgccagcttggcacgaggcgcgatgtggagtggccgtaagctgggctcctccgggggttggtttttaagagtgctggggcctggaggctgtaatacaaaagctgcgcgtcccttaatttcctcggcggtttatgtgaagaaccagctcagtgggactctacagattaaaccaggggttttcaatgaatacagaaccatatggttcaaatcctacaggacgatcttttcctgtttgaacagaataaagagtttcaggtacccttgggcgagactgtacagtacttcccaaaccactgtcgacagcggtgaggtaaaaaccttcttggccctggctcacaaatggtgggatgaacaaggagtatatgcacctcttcattccatgaatgacctgagggtgccatttattagggacaatcttctgaaaacaattcctaatcaccagccaggaaaacctttgttggggatgaagattcttgacgttggctgtggtggtgggctgttaactgaacctctagggcggcttggggcttcagttattggaatcgaccctgtggatgagaacattaaaacagcacaatgccataaatcatttgatccagtcctggataagagaatagagtacagagtgtgttccctggaagagattgtggaagagactgcagaaacatttgatgctgttgtagcttctgaagttgtagaacatgtgattgatctagaaacatttttacagtgctgctgtcaagtgttaaaacccggtggttctttattcattactacaatcaacaaaacacaactttcctatgccttgggaattgttttttcagagcaaattgcaggtattgtaccaaaaggtactcatacatgggagaagtttgtttcacctgaaacactagagagcattctggaatcaaatggtctgtcagttcaaacagtggtaggaatgctctataaccccttctcaggttactggcattggagtgaaaataccagccttaactatgcagctcatgctgtgaaatccagggtccaggaacacccagccctctgctgagtttgttttaaagggagaaacagaagagctccaagctaatgcctgcaccaatccagctgtgcatgaaaagctgaagaaatgaattgtttctgagaactatagtaatatggcttggatatctgatgttttcaaatacaagaaatgtacaatttatcctttgagagagaatcatgaagaaaagaaggtcaataaaaagggctaaaaccttgaaaaaaaaaa

SEQ ID NO: 59119 - DNA, 1987 bp, Homo sapiens
gcggccgcagcccacccccactgctgttcgaatcaagcaggaacccctggactaggccctgcttcagtgcccacctgggcccccccagggacctggaaacagtgctggggagttctgcctgtgtatacttggccgtgggcatgagaccgagggtgaggctggagggtccaaagctggcccagcgagcaccagggtcccaggtgtcatggcaacagaacgtgggatgctggaggcatgcctgcagaaggactgttgatgcgacccaaagatacagcggtgggatctctgctgccagctctcccagcccctcagcttcgcagcctggcgcagcatcctctgaggccccggggcctgttggggcggggttggaagagccgtctgcagctacttcagaggagctgtttatccctctccacgcggggcagactctggcgggtctcctagcgtccgagagatggcttattttctacagtatttaaaatggatgcagccctaactgcaaaagtcagagaggctgacaaggaccaatgcttctttatctggtgctcagttctcagtcagacgtgcagcatggctgcagggtggaccagctgcctggcattcaggcccagatgcctgcagggctggggctctcgggacagatgcagggatgtgtgctgcagggctgctgggaggagagtggtgggggcctgagggctgagtgattctgtaaccacctgagaccttcacgtttgctgccgttgggggctcaggctgcactccccgggtcacctgacctgctgcccaggggcttccagtcctgtctgtgtggactggcacctgggctgctggagaagtctcctcccgttcggaccagcctcagggctgcacgttacctcaggaatgggccccaccatgaaggggcccatctgtcagcagcgtcttctaggtccccagctcagggagccatccccagctccagttttctcatgcgaatatgcacagttttaattcacgttgttacactagcctgccgatgagacccagacacaggcagacctggcgctcttgacccctgattccagtgaggactggccctgaggagtccttgcagacctgctgcctgccccacgacaggcccaaagatggaccccccctggccttgtgacagctccccaagtgttctccggtggagaaactgcagaggactggtgggcggggctccccagccatcaccatcctgtgtacaatggctgtagacttgtatatggctcctttaatattgtaaagatgctgatgtacaattgtcgtgcatttgtgtgaacacattgcgttcccagtccatgccataaatgatgctctcaagcaaaagactggaggctctgtcctgtgcagaagcagcagccagactcccgcattcgatgttgtgcagggaggtttgggggcggaacggattcctcccttggatccttcagttcccatcgaggaataacccgcagcagtggtggaggaaggtcagtggctgggtcctgagcttggtgttatttattgcatttgggtgcctgtcccctcagggcagcacagattctgaattctgattcacagtccctagccagatgggaactgggaaagagacagaaggcgtctgggtgcttttgaaccctgtctcaaatgtttgggattttctctctcactattctttgggtggggatgatgtcctctttagacccccacgtaatggtatgagaaggtggcaggcagtggctcagccagccaggggggcaccaagtcatgcagccagcgtgagacctgcagttcacctaagcacagaacgagatctcagtatgcctccatgtaaacagattcacataggcctccaatttcaatgagaccttttgcatttgttctcagagcccttatgttctaacccatgagaaccattttacctgccctctaagggccaccagcttcgacctgcctcaggggacagcagcacaggaccagtggc

SEQ ID NO: 59120 - DNA, 1960 bp, Homo sapiens
ggcacgagggcggcgctaccgaggggctgtgggcgcgcagctggaacctccggctgtcagtgcgcttacagttcctaaccccgaccctgcgcgcagcccgcactatggcagccccgccgcagctaagggctctgctcgtagtcgtcaacgcactgctgcgcaagcgccgctaccacgctgcgttggccgtgcttaagggcttccggaacggggctgtctatggagccaaaatccgggcccctcacgcgctggtcatgacctttctcttccggaatggcagcctccaggagaagctgtgggccatactgcaggccacatatatccactcctggaacctggcacggtttgtgttcacctacaagggtctccgtgccctgcagtcctacatacaaggcaagacctacccagcacacgcattcctggcggccttcctcgggggtatcctggtgtttggagaaaacaataacatcaacagccagatcaacatgtacctgttgtcacgcgtcctgtttgccctgagccgcctggctgtagagaagggctacatccctgaacccaggtgggacccgttcccgctgctcactgcggtggtgtgggggctggtgctgtggctctttgagtatcaccgatccaccctgcagccctcgctgcagtcctccatgacctacctctatgaggacagcaatgtatggcacgacatctcagacttcctcatctataacaagagccgtccctccaattaatgcagccctgaggtgtctggctgtggctcaagatttggccccatgcagaccctcccaaaggatactgccttctcaagatcataggcctcagactccaactggtgttatcccagggttctgtttgctgaagtaaaaacactgattttaaaatcccagtgggtacctttgtatggtggcacaagtggccgaatcaggctgaggaatctacggcttggttccagctgtgcagctgacttctgtgagactggggccagccacactactctctaggcctcaggggtcaaggagctcagaggagggccctgaggtctctttccgggtgggtatgttcattccttcaactgttccttatgtcacagagggctccttgcctggtgggcagtgggttgtaaatactttttaaaaaacactaagttccttatcctcagatgctgttctactggagaagttcctagattcccactgtcccaatagaaacacgtgagcccatatatgtaattaaaatgtttctagtagctgcattacaaaaaagaagcctgggcactgtggctcactccctgtaatctcagaactttgggaggtctgaggcaggtggatgcacttgagctcaggagcttgagaccagcctgggcaacatggtgaaacccagtttctacaaaaaatacaaaaaattagccgggttccatcacctgtggttccagctgaggtgggaggatcacttgagcctatgaggtcgaggctacagtgagcaaagatcacgccactgcactccagcctgggcgacagtgagaccctgtctcaccaaagaaaaaaaaaaggggagattaatcttcactatatattttaacacaaatttctaaaagttatttcaacatataattaacatcattagatattttgtactcttttttgtattaagtattcaaaattgggtgtatattttgccacccacattttcaggacccagtagccacatgtggctagtggctgctgtgacgggcaacacagatatggaacacttgtatcctcacagattattctagtggacagtgcagatctagagctagaggacatgggtttgagtccccactcccccactgtgtaaccttggggaaggttctggacctctcagagcctcaatttatcataaaatgaggataatcataatgccgtggtcctcactggacttgtgcaactaccactgatgtgctactaat

SEQ ID NO: 59121 - DNA, 1401 bp, Homo sapiens
ggggcggtagccggccgggcctgggaacgtggctggttggaggaggtagatcaccctttctgcgggggacgatttcgtcggtggtaggctgctaccatgaggttgaatcaaaacaccttgctgctggggaagaaggtggtccttgtaccctacacctcggagcatgtgcccagcaggtaccacgagtggatgaaatcagaggagctgcagcgtttgacagcctcggagccgctgaccctggagcaggagtatgccatgcagtgcagctggcaggaagatgcagacaagtgtaccttcattgtgctggatgccgagaagtggcaggcccagccaggcgccaccgaagagagctgcatggtgggagatgtgaacctcttcctcacagatctagaagacctcaccttgggggagatcgaggtcatgattgcagagcccagctgcaggggtaagggccttggcactgaggccgttctcgcgatgctgtcttacggagtgaccacgctaggtctgaccaagtttgaggctaaaattgggcaaggaaatgaaccaagcatccggatgttccagaaacttcactttgagcaggtggctacgagcagtgtttttcaggaggtgaccctcagactgacagtgagtgagtccgagcatcagtggcttctggagcagaccagccacgtggaagagaagccttacagagatgggtcggcagagccctgctgatggctgggccttgtgggcagccactctgtgtgagcagggtgttgggcccatacacttcaaagaccagagccctgcactgggagagtgctcctggcccaggctgggaatcacctttcgaggcccttcagactctggcggggcttgctgtggcctccctccagctagtggtgtggctgagcagactccagggccagggccagttcccttctcccctcccggccaaacccagacccagactctaggaagctggaatggagggcagggatccatgggagatgtcgggatgaaggtgggagctggaggtgcagggggacctggaacatggatgggagtggacaggcctttctccttagaggccagaggtgctgccctggctgggagtgaagctccaggcactaccagctttcctgattttcccgtttggtccgtgtgaagagctaccacgagccccagcctcacagtgtccactcaagggcagcttggtcctcttgtcctgcagaggcaggctggtgtgaccctgggaacttgacccgggaacaacaggtggtccagagtgagtgtggcctggcccctcaacctagtgtccgtcctcctctctcctggagccagtcttgagtttaaaggcattagtgttagatacagctccttgtggctggaaaacacccctctgctgataaagct

SEQ ID NO: 59122 - DNA, 3032 bp, Homo sapiens
gcgccgcgcgggtctggcgggaccggtttggaagactttgccggcctgcagattggccttaagagaaggacggagccacatactgctgacggcccagaactggcagagagaaggttgccatggctgctgttgacagtttctacctcttgtacagggaaatcgccaggtcttgcaattgctatatggaagctctagctttggttggagcctggtatacggccagaaaaagcatcactgtcatctgtgacttttacagcctgatcaggctgcattttatcccccgcctggggagcagagcagacttgatcaagcagtatggaagatgggccgttgtcagcggtgcaacagatgggattggaaaagcctacgctgaagagttagcaagccgaggtctcaatataatcctgattagtcggaacgaggagaagttgcaggttgttgctaaagacatagccgacacgtacaaagtggaaactgatattatagttgcggacttcagcagcggtcgtgagatctaccttccaattcgagaagccctgaaggacaaagacgttggcatcttggtaaataacgtgggtgtgttttatccctacccgcagtatttcactcagctgtccgaggacaagctctgggacatcataaatgtgaacattgccgccgctagtttgatggtccatgttgtgttaccgggaatggtggagagaaagaaaggtgccatcgtcacgatctcttctggctcctgctgcaaacccactcctcagctggctgcattttctgcttctaaggcttatttagaccacttcagcagagccttgcaatatgaatatgcctctaaaggaatctttgtacagagtctaatccctttctatgtagccaccagcatgacagcacccagcaactttctgcacaggtgctcgtggttggtgccttcgccaaaagtctatgcacatcatgctgtttctactcttgggatttccaaaaggaccacaggatattggtcccattctattcagtttctttttgcacagtatatgcctgaatggctctgggtgtggggagcaaatattctcaaccgttcactacgtaaggaagccttatcctgcacagcctgagtctggatggccacttgagaagttttgccaactcctgggaacctcgatattctgacatttggaaaaacacatttaatttatctcctgtgtttcattgctgattattcagcatactgttgattcgtcatttgcaaaacacacataataccgtcagagtgctgtgaaaaaccttaagggtgtgtggatggcacaggatcaataatgcctgaggctgattgacgacatctacatttcagtgctttttccctaagctgtttgaaagttacgcttttctgttgttctagagccacagcagtctaatattgaaatataatatgatttgtcaggtcttataatttcagatgttgttttttaagggaaattgaccatttcactagaggagttgtgctggtttttaaatgtgcatcaagaaagactactgaaaagtattattttgtaactaagattgctggtactattaggaaaaatctgtgtgtattgtatagctctagctgtttgactatctgtaatgaaaatgctgcacttcaactggtatttcattagagaaccgtgtgtgtgcgtgtgtgtggtgcctttgagcaactttatttatggttaccatatttttaaaaagattttttgtcaggatgacttaacatggactcttatagggtattaaaacaatctagattattccttttcatcctaaataagcctaccaaatttcatgctgttggtttgccatgaatgatattacttcctacattatatttgtgttttttcaaatctgctatggaatgaacttattcctagatttggatatgtaagagaaacctgcagtcatcttttgatttataaggcaattcttgtggataaatagtgatttctcagcctctgacccattttataactgaaatttagccctttagagcttgttatatctggttttcctacgtttttctatgtaatattattccattccagtagcattattgatagaaatagtaagtatttatggaatagtaaaatatggacaaattacgtgtgtgacatatctgtcaaaataagttagaagcttattcttggtttgtgtaatgaatttatgtattgtagtgaatacctttactggtgtgaagataattatgcacaaaccctcacaatacgcgttaacattgaaacctgtgaaatgtccttaggttgggtcatataaagccaaccatttttgaggaccatgtacctagtgctttgaaaactgtaagtcactatatgaatatgacaatatgtgcacatttaaaattcagagctcggcattgtgatactgatgcagaagctagtagattggttaaaagtctggacttctgtggcatttttttcgtgacgtgataatctatcataagcagacctaagcacagttttatgaacacaattttgcccatgacattgcctacaggatttccagatgtgacttgcactcagaagatcagtggtcaacttcagaagttcttccacgcttagatcatgtcttcagaacttagatgtgaaaatctacacactgggagatgctgtgagccccaaggttttgatggagtttgcttggaatcctcttgacttcatgccacattgacgtgaactttgatgtataataagcagcagcaacttcatgtgaaaatatggtcaggtagttatatgtaaggttacgtggtccagtaatgtcttagattgataaattaggtatggaatccatcagtgttacgtgatgagaataggtgaacacaccttgtcagtgatgatgtaaacttctctccttggcaggacatgggcaaacatgctgattggtgcaaatgtggtgccgagctgtccatagctgcagtgaaagatgaagagcaagaccttctctaggttttctagctttcattaaatgtatttttttccccagaaaaa

SEQ ID NO: 59123 - DNA, 1431 bp, Homo sapiens
ttttttttttttccatatagtaaaatgcctttatttaaaaaagaagaggtacagtacattataattccaaggaaattttcgtattttaaaaatgccaatttttggctaaaaactcaaaagatttcatttaatacttgaataacaaggaaattcacaattaaggctgaaatactgttcatattattgagtatttctaagcatgttattttaagcttgtgtattttaaaccatggttacagaattgtataggaatatattgaaggcataaccttatatttattggaattttggtttaattgtttagaatttcaaaatagtattgggatgtgaaacaggatgattatcactctgataaaaacaagactgaactgagtccttcactgtatttttctaaagaactcacttctagtgagtaagtgttcaataacataaagttaggaaatctttatgttattaaaatttgaatttttctttcactgtatcccaatattttaaatatgtgtttcaggacatttccagttaaaataaaagtttaaataatatcctcactacattaaaaataagatctttaagtaaacgtatttccaaatcatattgtcattgtgcactgaagttaattctctgaagactaaattatatgcaattgaggttctgtttcccttctaaacgttcctttactaatttttccaaagcgaaaagatgctcatctgcttcttctggcacaaggttcctaatagaatttgcaagttcaaaaagatattctgtatttcttccacttggaccagctgcattaaaaatttgttcagcaatgtcttccagaggtgcaggaccaagataatcaggattatcacatgttccaatatatagcaatacactgaatggttttgttgtgggatcttttggataaaaaatgactgttgtggttctgtagcctcctttttctctgaagtcaaggtatgcttttacttcttcttcctttcctactggcaatctgtaagcaacaccccatacacatcccgcaggatcttcaacaagagtcacaactcttccaggcttgccggggaccccgcggtggtccgtgctgccctgccagaagcgcctgctgtagttggtgatgtatccgaccagcttgtcctgataggggaaatccaccttccagatcagggacccgtaaccaaaaacccacatcttctcgcggctcctctgccccagtggccgtgaaccctagctgtcgccgcgccgccggggactgaagcctccggtaagcgagtaaccggccgcgcggggcgcaggcgcgatggccacttggggcgcaaagcgcactgggagtttagatccagaaagattttccgagcggatctcagtcagctttattttatttccttgattagggtgtcaagaggcattgaccttcggtgtagtaagcaatgg

SEQ ID NO: 59124 - DNA, 1702 bp, Homo sapiens
ttttttttttttatagctgatcaagaatttatctttattctgattatgattcttcaaagagcattagttgtttaaatttaatttaagccatgcttaaatcgaatacatacaaaatatgattacttatattccttttgaccaaagagctgaaaattttgtgttccagttcatcttactcatgttattctgatgcgaaacactctaaatgcaaattgttttgaaagtaaataggccaagtggcctaccctgccctttttatagtataaattctgtgatactgccttcttttcagtatatgctcctctgtgggcctttggcttacacggagaccatcagctacaacgcatggcagtcagcttcagagtcctcgctccagtgtgcatctcgtttctcagccacaagtttgatgaattgagagtgactggcataaagcttcagtttatcattgatgtccacccatttcacttttccagcatcatctccagcttctagcataagattatccattatctcacctgtttcgtcatggtagttcacagcttctgtctccatccatgcattatcagtgtttcgaggatcatcaacatatcccttatatatcactaggtggtcttggctgaagagtttgtgcaacttttcctctatttctctcttctcagcactggttttctgtaaggagttgagagcttcctcaccaaattctcttttcagtgtggcactaatcttctctcctggatccaccatcccccctgggattgcccattctccacagtctttcctttttattgcaacaaattgtaagatatgcttcccagaaacaggatgcatgattttatttccactgctatcccttttccatctggttataatgggatctgcagcgtgatttgggccccatcgccccaaaagcccccggcccaccagtccagtccgtcctgcaggatttctcggtcttccattttcaatctcatacaggccattcttgctctttctctcaacatgcccatccttttcgttaaacttgggagaaaaattactttcactgatctgaggatctgcccacctgggtccagccaagacagagactgcagtgtattccacaggcttatagtcttgccactcaacaagccagcccactttctcattaggaacctggcttcgttcaacttttgaacctgggtaaggagacgtccgagccttattgtgagaattttctttggaaccattagaaccagacatgacgttggtattaagatgaaaccaagaagatgaaaacgagtttctgaacgcctggatgccgcggcagcgcgaggacctgatagtcacagaggccaaggccagagagagagacaccgcggctaaagcctttcccaggaggcgtcccgccatgagcgccccgagggcggctttgcgatgctaggtcgctcttagttggtgcctccgcctccccacaccccacagctccgagtcccggccgcgggtatctgatgggcactaggacctgtctgccgttgggttcccgaacgggagtagctgtgcctatctataaatcacagatcaagagccctcccacgataagagtccaccgctttccccagtgcatcgagaaaaatccagaccagcacgtgacgccgaagcctccagcgccagctgcctggggaaaccgcggccacgaacctcgtaactttctctcaggaaatcg

SEQ ID NO: 59125 - DNA, 3018 bp, Homo sapiens
ttttttttttttaatccagtgattcccagatttatttggttatgaccatctatccccccagtagtcctcaccaatattctgtggaacaaatctgtttatttgcagaacacaattttgaaaagggttattctgaatgtctatgaagtgttttaaatatggtacattttaatgaggttatataccaaaatagcctaatcaccaacaatgacagaaacatccaggatacaacttgtgaaagtaaaaatttttattttgattgatttctcaatgtatagttcagtataatgccagtttttaatggcaaaaatttggttccactgaaactccataatgctacagagagctactactttttccaggaagtaggttaacagctagaaagaaaaaggacaatttcctagcagcatggcaacttaaactgcagatctaataggtctgcaacttttacactaaaaatggcacaaacagctggtgacacaagtgagaaatggggaacaagatgtgaacactgaaaagaacaatatatatactgtaaatatgatgaataaaccaaatgtagctataagaatcttaaaggatgattatagaaaagggaaccaaatattttcctcaaatgctttttagagcctttctgtagcgatacaaatatatatatatatatttatccaaaaatatgttttatacagataaatgtttctcaattaaagatgggaccaaagctataggtataacataaagcacattgtcttttgtaagactatttatccacctgaattttcaatttctttaaagttagtgcattaaatgttttccaaatataattacctgtcagtctttttatagatataaatcaagtaggcattatgttttaaaagtgtttgcaggttaaacttttctaagatgctgtgcatattaaacttattatgagccccattaagaatcattattaataaacatatcaaaaagggctatatgtcagattttcctgttcatagtaaatattttctgatttccagtttacaagtattgaaaatgcacaagaaagattttacttcacaagtacttttaagaatatactttgatttaatatgtatgttagtaaaactccacgtgttgtaaccattattatgtttttgtttttaaaatggggatgtaatactaataaccactacctataaaataaagcacacaattgttccggtgattttacaaatctttttttccaggtgtaaagtctacaaaaattccaaaaaattagagaacactgaaaacatattaaagtttgacatccaactttatagtatttccatgttaccctgaaagataacttaaaaaatatggccttcttagaacaggccactctgctattataaaaaattggtgacagcaagaaattgtatcactgatatgtggaatttttgtaaatagttttctctccaaatcattagaaaaatgttcaaaaataaaaacaaaataaaatatggtggtggtccctaaactattttgaaggcaggtagcttagtctaagctaaaatatttttttcattcatagcaataatcctcccctcaaatgccctttaaaaaaatgcatgaaaccgtacaatagcaaaaatcaaagagcacagactgtattttcaagaacagaaaaatctctaatgctgaaagatatagtagaaagcagatttctttggggacattaatcaattagtttataattcattatgaagatttctcttttttattccggggagagtctgctacatttgaagttaatgttccattcacaccattttctgttccttttttagaagatctgcctttagttactgttggtttcttcttcacagctggtgcctgaaaagcagaatgttccctccaccttcgaagctgaaaattaatgaacttccacatcataaatgcctgagtaacgcaaatggatgccagaacagcgattctaacagctaacacattgaagtttccagtactgaaatccagcttctgattttctgctcttgcaaggccaaaaccaacagtcagtactgaaagaattaaagtcagaagtcttcccaaaacaaaaagaactgcccacagagaaaatcctttctgatacttttcattgctaaaataaaacaggcgggaaatgtggaaaagaaattcaacaaaataatgtagcaccagaagaacaagtcctagatgattcaagttcaaaaggtaagctccagcaatgtggaagaggtaaagaccaatgtagacaagctgacgaggaatatcttcttttttggttttctggaagtagagttcaggaaaagcatgaagccagtaagccagctgtgatatgtagaaaaacttcatttgaaatgtcatcaggttatggggataagccctccataagatagttgggtctgagatgtagttttcagagatgagaatgaatgtgccccaaacacaggcaaaaaggtagaacgcactaagctgaccagattcattaaacttgctgtgttttgttttggagaagtgcattcgcctgttaattttatccaacatatactcttgaattacggcatgaataattatcgccactagcatgtagaagaaaacagtagccaaatctttgatgccatagtaataaagggacactgattcagtagcttgttcttctgttgctgggagggtgacattgtactgaagagtaacaaaaatgatagaagcttttgccgttatctcaaacatgagccccagcaggaagaccatcgccacacaggagacgatgtccgcgtgattctgcaggacgaattcgtggctcagcactggggggctcttggtgcttttcttgcgaatcgccatggtggggccgccgcccgcgcctgcaggtgctccgccccggttctgctcttcccagctgctcaccgactcgccgccgcctcccgctggctgctcctcacggccccgctgcagccgctcgctggggcttcacttcccatcccacagccagtacgcagccgccgggccgcccggggg

SEQ ID NO: 59126 - DNA, 812 bp, Homo sapiens
ttttttttttttaccagaaacacgtgcactttattgaatgccattgtagaaaagcgtgtgaggataaagggctgatacaggactcggctccgggggcagggcgaggaatggaagttggagtacgtgggatacaggtcatgggcagagctcctggcctcagtgatgcctcctgatctatccataggcctggaagatcagcactgggatgacgatgagcagaatggtcatgaggatgcccagaatcagggcccagatgttcaggcacttggcggtggaggcataggcctgggccccggtcacgtcgccaaccatcttcctgtccctagacttcacggagtaggcgaatgctatgaagcccaggcagcaggggttcatgaagagggtgttgaacagggaccagacgacatggtcgggcacggaggtctcgctgcggatgtggatcacggtggacgtcgggggagcagggttgtggggcgcccccagcacagccacctcgtgctcctccttgagcatctcatagttggggggctggccgctgttgacaggagagaagaaggtttggacagtgtgattcatggtgtccagcgaagaccagcggcggtcgggttactgggatggttctcagtgagccctccctttccccagtagtttcggtttctcaacagtttccttttcctggcatttgtcaaatcgggatttggccgggccagatgagggcggaacaaattcctgaggatcaaattactttaagatagagaggaaggaggggctgagggctaagaggggcctcctctctagagcccaagggagca

SEQ ID NO: 59127 - DNA, 760 bp, Homo sapiens
agtgggaggtgcactttacttcctgactcctttcctttttccagtggttatcgcggcgcccaccggcctctgatctctgagtcttctccaacccacagacgttttttgttgctctggttccaggaccttctccacaactaggccattttccctgccaggtgtcctttttgacctcttgacctctgactcaaagggcctgctccccctcatgtcttcggcctggagaagagccagctcctgaaggaggcctttgataaggccggcccggtccccaagggcagagaagatgtgaagaggcttctgaaactacacaaggaccggttccgaggtgacctgcggtggatcctcttctgtgcagacctgccgtccctcatccaagaaggccctcaatgcgggctggtggccttgtggatggcaggtactctcctgtcgccccccagtggcgtccccctggagagactcatacgggtggccacggaaagaggctacacggcccagggagagatgttctcagtggccgatatgggcaggctggcccaggaggtgctgggctgccaggccaagctgctctctggtggcctgggcggtcccaacagagacctcgtcctgcagcacctggtcactggacatcccctgctcatcccctacgacgaggacttcaaccatgagccgtgtcagaggaagggccacaaggcacactgggcggtgagtgcaggggtcctgctgggtgttcgggctgtgcccagtctcggctacactg

SEQ ID NO: 59128 - DNA, 2145 bp, Homo sapiens
tcgcgatctagaactagtccggacgcgtgggtactgttagaaatggctgttgtcaattatgaggaaatccagtagttctctgggagagatctgaattagtagcgttgagaggctattcctgaaccccatattagaatccttcacaaactactgcagtttgctgcttggtcctgaaataagagacaatggatgaaaccaaataattttcaacccttattgtgaatttacatttctttaaataatatttaatcaatgaatcacaaatatttaacctgtcattatgtcaccccgctggacaataatggagagagtggggtatcactgctgtcttataacttttaaccccacaaactttatttgcatccccattaaaggacaaggccatgctccatttctgatctgttcctgggtcactcagaaactgaggctttcagacagatctgtgcagtgatgagaaggaccacttttttgaaatgtggagaaaaaaatatgacatcttttaatgtcaggcttcttatctgagcaaaaaaacatgtatcatcttttctttttgtcagtgtgacagctggatgacaagaagacctacaactgagtagaaggctgtgacttctttccttctcctccatgctatcaacatgagtctttaaatgtcctgtaagattctgagattttaattttgaatacaacctcctaaaaagtgaggtaaaaaactatcttcaacttctatattgcaaatttgttgatactaccaatgcacgtgtttaactgagatgcataaaagcctttctcctcaaaaggcttatgtttaactaaaattgtcacttttaaaagaaagtttatggctaaaatgtatatcatcattatcagcaggagtatgattgtgtctgggagcccatttcactagatagcccaaagtcttctatcaaatgggttataatgtgtttcttctattctggtgattaaacagtaagctcttgggagtgatttgtttttatttttacagtgatcacctatcaaactgttctgctgtgttatagttcccaaactggagttcaacagtcttagaaattcagtggtctaagaactgcagttcttgagtccaacctcctggaaaagtgaagtataaaactctggctccagctgcttgttccggtacttgttgacaatgtcggtgattttctgtttccggcggacatgggggggactgtaggagtcactttccagtctctttcttctacaaatgttaattacagtctgcctcaccagaaagccaagagctcgcctgctgacaatcatcccatccacaagagggatgaccatattaaattttccagtggctccttgaatttttatccggaataatccagtgtttaaagggtggatgaagatgacaggaacttctttttcaagagttgtagatctcagtgaagtgctactatttgcagtagtttccacaccagtactgatctctgtcatcagctctgagaggggaaagttttctatatcatcatagcgttccacccagactacagaaactcttgtctcaggtccaaggggaggaacagggcgaccctgaggcagcttcctcattctggaactgggactgagcctctgtgaggaattaagattgtctgtatgattggggaaaagctcaagtgtcagggatggctgtttcagaattcctggcataagatccatatttgaatcactatcttggtccgagatgttactttccaatgaatcagttaaggactccacaggagaaggaaccacaaaagcaatttctgtaagggcatcagcataatacagcaccttcttctgtccattgaaaatgctagctccaatatcttcagaggaaatcacttcttcttgttgagatccttcaccatcatcacaacaattaatagaccaactggtagaaacatgcccagtccaaccagggtgtctgcccacatctactgaccagccaagggaaagcaaaaattctaggaaatgtggctgaacagttctggaagactccacattctttaaaatctcttggttcgttttctgacctggcttcatatagaaaataaaaactgtgtcaaaaggacgacatggcaagagatccagataccccccttctgtcgtcttctcgcagccgta

SEQ ID NO: 59129 - DNA, 1827 bp, Homo sapiens
ttaggcaaactttccaaccgccaggatattgcggttgtttttccccttattccctttaaaatttttttttttccctaaaggctttaaatttcgtagggaggttgggccaatttgtcccccccccaaaggaagggttcttttccaaaattcccaggtaggtttttattctgctccctataaggaaaaaagttttgcgttggaaggccgggttaaatttgggccccctaagggttcttttaaacgggccccccttttttttttttttcatttttagttttgttaaaaaaaaattctgacaaatcagaaatgggggttcaggagtggtggtgatgcaaaagatggaagccatggggtgggggctgtcaggggtgggggcagtagtgtctccttcacccccaccctggtgtcctctcctgaaggacagacggtcacattccaaaatgggcgagtcttctaccgtgtctgttcaatgtaggaggagatgtctatctcatcaggcagctcactaatattgacctcaaagcgatcctgcacatcattgaggatcttggcatcattctcatcggacacaaatgtgatagccaagcccttggtgccaaaccggcctgctctggccacccgatgcaggtaggtgtcagaatcctcaggcatgtcataattaaaagcaatgttcacccgctcgatgtccatgcctcggccaaataggttggtagccacaagaattcgtcgttgaaaatctttaaactgctgataccgagaaagcctctcctcctggggcatcccacggtggatggcaatggctgggaagttctgctccactagtagctgggccaaggcaatgcaccgctgcacagacttcacaaagatcaccacctggttgaactcaaggacatccagaaggtcaaagagcttccggttcttctcgttgtccttcagtttcacgtagtactgctgcaacccatgcagcgtcaacttcgtctcatcatccacgaagatctccattggatcttgcatgaacttgcggcagactggacggatctctttgctcaaggtagcactgaacatcatgacctgcttctcgtggggggtcatgcgaaaaatttcctggacatcccgacgcatgtcgagctgttcaagcatcttatcacattcatccaaaataaagtgtttaatgtgtttgaggttgaggctcttatttcgagccagggctaggatacggcctggagtccccacgacgatatgcgggcagttcttcttcagcacctcttcatccttcttgatagacagaccaccaaaaaaaacagcaaccttgacattgggcatgtatttagagaagcgctcatattccttgctgatctgaaaagccaactcccgagtgtgacacatcaccagtacagacacctgcccagtaactggctccagctgttgcagtgtggccaagacaaacactgctgtctttcccatgcccgacttggcctggcacaggacatccattcccagaatggcctgagggatgcactcatgctggacttctgacggatgctcaaagccacagtcgacaatggcccggagcaactctggcttgagcaggaagtcacgaaagccagagctgtggatggagacataggagcccttgacatccttcttggcaggggcctcagccccatctcccccagctgctgtctccacctcatcatcttcatagtccaagagctcattgtccacatcgttctctgccataactaaacagggagagcgcgtatggcggcagcaacagcgacgaaggagggaaatctgccttcacttccggttgcaggcttccctcta

SEQ ID NO: 59130 - DNA, 1031 bp, Homo sapiens
ggaattcccggaccgggcggattggccccttagcgcccgggcgtcggggcggtaaaaggccggcagaagggaggcacttgagaaatgtctttcctccaggacccaagtttcttcaccatggggatgtggtccattggtgcaggagccctgggggctgctgccttggcattgctgcttgccaacacagacgtgtttctgtccaagccccagaaagcggccctggagtacctggaggatatagacctgaaaacactggagaaggaaccaaggactttcaaagcaaaggagctatgggaaaaaaatggagctgtgattatggccgtgcggaggccaggctgtttcctctgtcgagaggaagctgcggatctgtcctccctgaaaagcatgttggaccagctgggcgtccccctctatgcagtggtaaaggagcacatcaggactgaagtgaaggatttccagccttatttcaaaggagaaatcttcctggatgaaaagaaaaagttctatggtccacaaaggcggaagatgatgtttatgggatttatccgtctgggagtgtggtacaacttcttccgagcctggaacggaggcttctctggaaacctggaaggagaaggcttcatccttgggggagttttcgtggtgggatcaggaaagcagggcattcttcttgagcaccgagaaaaagaatttggagacaaagtaaacctactttctgttctggaagctgctaagatgatcaaaccacagactttggcctcagagaaaaaatgattgtgtgaaactgcccagctcagggataaccagggacattcacctgtgttcatgggatgtattgtttccactcgtgtccctaaggagtgagaaacccatttatactctactctcagtatggattattaatgtattttaatattctgtttaggcccactaaggcaaaatagccccaaaacaagactgacaaaaatctgaaaaactaatgaggattattaagctaaaacctgggaaataggaggcttaaaattgactgc

SEQ ID NO: 59131 - DNA, 1497 bp, Homo sapiens
ttttttttttttagtctctcaatactttactcggccatatcccccgatacccccacagcaatttcaccaacacagagcaactgccctcagccactctgatgtgatggagccaatccaggtgtcctagaaatatcctagaaatgcagagcatggggaaatcacagaaccctgggaaatgccataagaacctgggctctggaaagtgccatccacctcccctctggtcaggctggcggcactgacaaggcatccacagggcagccatgctatggcccagacctccggatatgcaggaaccggggcctcccacagaagtccctgcgcacagccacaagattaaggtacaggtcaggccggctctgaagccagctgctgacaagctccgggtgccttgggtccacttctaagaagatactaccagagtctttcaggagccggggtgccaaggccagaatgtgggtaatgatgtccatgccctcctccccaccatccagggccgcggggtcttcatagctgcggatctcaggggccagctgctccatgtcctggtggaagacgtagggagggttgctgacaatcaggtccatggggccccagggcaggtgtgtccagctcctttctgaggtcatgtcgaggtggatgatccaaatcctgtcctgcaaccgaagcctctgagcattctcatgggtcagagagatagcagcttcccgcttatccacagcaatgactcggctctgggggagctggctcagcaggctgagggagatggctcctgatccgcagcccacctccagaatgagggggctgcctggggatcccacagcatgggacctctggcccacctcttccagcacccactcaaccagttcctctgtttctggccgcggaataaacactgggggcaccatccttaggctgagcccctggaagtcccactctccaaggatgtactgcaccggcatcctctgcaatcgacggctactcagctcccggatacactgtagttgctgagaggtcaagggctgggtccaaagtgccggcctcaggctctgaaatgttttggctccaaggacatgagccacgatgtactcactggattcccgggcctcagggatacccctcttctcaaagaccccagtccagtggctgaccagttctatggcactggataacccagccagaggtggttggggttgccatgagctgaaggcccagccccgggtacttcccctcctccctgggccagacaggagggcccacagcattcggccccaaagctccatgtctcagggaaaggttctccagagtgcttccaggttcccaagtctgctttatgatgtcagctgctgaggtgagtgctgagagtggcccctggacccagctgggtggagatggagaggtcacaagctctggtgccccaaaatggctctggtcctcagatatagttggttgccaccctgcctgaaaggctgccccacacacccaccagccggagaa

SEQ ID NO: 59132 - DNA, 2419 bp, Homo sapiens
tttcgtcgctgagctgaaggctgtgcggagcggcgcggcacagagcctgttgttgagctcagtatgtcgtgggaatccggggccgggccaggtctaggttcccaggggatggatctcgtgtggagtgcgtggtacggaaagtgcgttaaagggaaagggtcgttgccactctcggcccacggcatcgtggtcgcctggctcagcagggccgagtgggaccaggtgacggtttatctgttctgtgacgaccataagttgcagcggtacgcgcttaaccgcatcacggtgtggaggagcaggtcaggcaacgaactccctctggcagtggcttctactgctgacctgatacgctgtaagctcttggatgtaactggtggcttgggcactgatgaacttagactgctctatggcatggcattggtcaggtttgtgaatcttatctcagagaggaagacaaagtttgccaaggtccccctcaagtgtctggctcaagaggtaaatattccggattggattgttgaccttcgccatgagttgacccacaagaaaatgccccatataaatgactgccgcagaggctgctactttgtcctggattggctccagaagacctattggtgccgccaactggagaacagcctgagagagacctgggagttggaggagttcagggaagggatagaggaagaggatcaagaggaagataagaacattgttgttgatgacatcacagaacagaaaccagagcctcaggatgatgggaaaagtacggagtcagatgtaaaggccgatggagacagcaaaggcagcgaagaggtggattctcattgcaaaaaggccctgagtcataaagagctatatgaaagagcccgagaactgctggtatcatacgaagaggagcagtttacggtgctggagaaatttaggtatttacctaaggccattaaggcgtggaataacccgtccccacgtgtagaatgtgtcctggcagagctcaagggcgttacatgcgagaacagggaggctgtgctggatgcttttctggatgatggcttccttgtccccacatttgaacagttggcagctttgcagatagaatatgaagaaaacgtggacttgaatgacgtcctggtgccaaagccgttctctcagttctggcagcccctgctcaggggcctgcactcccagaacttcacgcaggccctattggagaggatgctctctgaactgccagccttggggatcagcgggatccggcctacctacatcctcagatggaccgttgaactgatcgtggccaacaccaagactggacggaatgctcgccgattttctgcaggccagtgggaagcaagaaggggctggaggctgttcaactgctccgcctcccttgactggccccggatggttgagtcctgcttgggctcaccttgctgggccagcccccaactccttcggatcatcttcaaagccatggggcagggcctgccagacgaggagcaggagaagctgctgcgcatctgttccatttatacccagagtggagaaaacagcctggtgcaggagggctctgaggcctcccccattgggaagtctccatatacactagacagcctgtattggagcgtcaagccagccagctccagcttcgggtctgaagcaaaggcccagcaacaggaggagcagggcagtgttaatgatgtcaaggaagaggagaaggaggagaaagaggtcttgccagaccaggtagaggaggaggaagaaaatgatgaccaagaggaggaagaggaggatgaagatgatgaagatgatgaagaggaagacagaatggaggtggggcctttctctacagggcaagagtcccccactgccgagaatgctaggcttctggcccagaaaagaggagctttgcagggctctgcatggcaggttagctcagaagacgtgcgatgggacacatttcccctaggccgaatgccaggtcagaccgaggacccagcagagctcatgctggagaattatgacaccatgtatcttttggaccagcctgtgctagagcagcggctggaaccctcaacatgcaagactgacaccttgggcctgagctgtggtgtcggcagtggcaactgcagcaacagcagcagcagcaacttcgagggccttctctggagccaggggcagctgcatgggctcaaaactggcctgcagctcttctgatggccatccctggtgcaagtgttcatccagccgtgccagggcaacagcccaccccctagtacaactgatgctccctgagacaacctgggagacagcctggatcagccacatcaactcagttgtccaccacaggggaattttgaatgtcttttgtttttgttttgttttgaaaaataataaacaggcaactgtaaaaaaaaaa

SEQ ID NO: 59133 - DNA, 2007 bp, Homo sapiens
  misc_feature (1)...(2007): n = a,t,c or g
ggagcaaggggaagaagaggatgggctcgtccatgtcggcggccaccgcgcggaggccggtgtttgacgacaaggaggacgtgaacttcgaccacttccagatccttcgggccattgggaagggcagctttggcaaggtgtgcattgtgcagaagcgggacacggagaagatgtacgccatgaagtacatgaacaagcagcagtgcatcgagcgcgacgaggtccgcaacgtcttccgggagctggagatcctgcaggagatcgagcacgtcttcctggtgaacctctggtactccttccaggacgaggaggacatgttcatggtcgtggacctgctactgggcggggacctgcgctaccacctgcagcagaacgtgcagttctccgaggacacggtgaggctgtacatctgcgagatggcactggctctggactacctgcgcggccagcacatcatccacagagatgtcaagcctgacaacattctcctggatgagagaggacatgcacacctgaccgacttcaacattgccaccatcatcaaggacggggagcgggcgacggcattatcaggcaccaagccgtacatggctccggagatcttccactcttttgtcaacggcgggaccggctactccttcgaggtggactggtggtcggtgggggtgatggcctatgagctgctgcgaggatggaggccctatgacatccactccagcaacgccgtggagtccctggtgcagctgttcagcaccgtgagcgtccagtatgtccccacgtggtccaaggagatggtggccttgctgcggaagctcctcactgtgaaccccgagcaccggctctccagcctccaggacgtgcaggcagccccggcgctggccggcgtgctgtgggaccacctgagcgagaagagggtggagccgggcttcgtgcccaacaaaggccgtctgcactgcgaccccacctttgagctggaggagatgatcctggagtccaggcccctgcacaagaagaagaagcgcctggccaagaacaagtcccgggacaacagcagggacagctcccagtccgagaatgactatcttcaagactgcctcgatgccatccagcaagacttcgtgatttttaacagagaaaagctgaagaggagccaggacctcccgagggagcctctccccgcccctgagtccagggatgctgcggagcctgtggaggacgaggcggaacgctccgccctgcccatgtgcggccccatttgcccctcggccgggagcggctaggccgggacgcccgtggtcctcaccccttgagctgctttggagactcggctgccagagggagggccatgggccgaggcctggcattcacgttcccacccagcctggctggcggtgcccacagtgccccggacacatttcacacctcaggctcgtggtggtgcaggggacaagaggctgtgggtgcaggggacacctgtggagggcatttcccgtgggcccccgagacccgcctagatggaggaagcgctgctgggcgccctcttaccgctcacggggagctggggccatggatgggacaggagtctttgtccctgctcagcccggaggctgtgcacggccctcgtcacaaggtgacccttgcagcacaggccgcgggtgccccaggctcggctcagttcttggaggtcaagggcatgggttggggtagtgggtggggaggtgaatgttttctagagattcaaactgctccagcaatttctgtatagttttcacctctgagaattacaatgtgagaaccgctcaaaaaaaaaaaaaagggggggcccttttaaaagaacaaatttttactcccgggggttggcaaggtatttttttttttttggggccccaaaattaaattccgggggcggttttttaaaaaggggggagtggaaaaaccctggggttacccaattttatttgttttggagaaanatntntttactnntttttatttaatatgtttttt

SEQ ID NO: 59134 - DNA, 839 bp, Homo sapiens
ctcccggttcgacgatttcgtggcgcccgggcctggcgcggagcctgagcccgccggacgggaggcggccccgccgcgggctcggccccggccccagccccgccagcatggccggccggactgtacgggccgagacccggagccgggccaaggatgacatcaagaaggtgatggcgaccatcgagaaggtccggagatgggagaagcgatgggtgactgtgggcgacacttcccttcgtatcttcaagtgggtgccagtggtggatccccaggaggaggagcgaaggcgggcaggtggcggggcagagagatcccgtggccgggaacgtcggggcaggggcgccagtccccgagggggtggccctctcatcctgctggatcttaatgatgagaacagcaaccagagtttccattcggaaggttccctgcaaaagggcacagagcccagtcctgggggcaccccccagcccagccgccctgtgtcacctgccggacccccagaaggggtccctgaggaggctcagcccccacggctgggccaagagagagatcccgggggcataactgctggcagcaccgacgaacccccaatgctgaccaaggaggagcctgttccagaactgctggaagctgaggcccccgaagcttaccctgtctttgagccagtgccacctgtccctgaggcagcccagggtgacacagaggactcggagggtgcccccccactcaagcgcatctgcccaaatgcccctgacccctgagaagccggcctgcctgtcctgttgccccaggggcccctttggctttttacaaataaagacccttttgtaaaaaaaaaa

SEQ ID NO: 59135 - DNA, 728 bp, Homo sapiens
ccggccagcaccacggacggcgcccaggaagcccgagtccccctggacggggccttctggattccgaggcccccggcaggttcgcccaagggctgcttcgcttgcgtgtccaagccccctgccctgcaggctccggcggcccctgcccctgagccctcggcctctcccccgatggcgcccacactgttccccatggagtccaagagcagcaagaccgacagcgtgcgggctgccggcgcgccccctgcctgcaagcacctagccgagaagaagacgatgaccaaccccacgaccgtcatcgaggtctacccggacaccaccgaggtgaacgactattacctgtggtccatcttcaacttcgtctacctcaacttctgctgcctgggcttcatcgccttggcctactccctcaaagtgcgagacaagaagcttctcaatgacctgaatggagccgtggaggatgcaaagacggaccggctgatcaacatcaccagatccggtctggcagcctcctgcatcatgctatggatggctctctctgtgatagccactcaccgtgggctaaggtcgtccgcgtccatattggttgcggaaccccatgactggaatacagagagaccacaagtcacgtttcgcgagcgatgtcctgcactgtaacttgaaatcactcaggtgaccgtacgaggctagatattatgaagctgtcgtataccctgcccagaggtccg

SEQ ID NO: 59136 - DNA, 1757 bp, Homo sapiens
cgccgggcccgcggtcccacggcgcctggttgcccccagccccctccctcctcccaccttcactgtgtcccacccttcctagctttgtgcccggggtgctgagcccttccccgtcagccgggccgcgggaggagggagccgtcaccgaggagctgccgctcgctgccccgggcaggggcacaggcttcatccagtgaatactagagggatcgaacagttgcaaccaaggcaatgtcttactacctcagctcagaaaaccacctggacccagggcccatctacatgcgagaaaatgggcagctgcacatggtcaatctggctctggatggtgtcaggagtagcctgcagaagccaaggcctttcagactgttccccaaaggcttttctgtggagctttgcatgaacagggaagacgacactgcacggaaagagaagactgatcatttcatcttcacatacacccgagaggggaatcttcggtactccgccaaatccctcttcagccttgtcctgggtttcatctccgacaatgtggatcacattgattcccttattggctttcctgagcagattgctgaaaagctgttctctgctgctgaagccagacagaaattcactgagccaggtgcagggctgagggctttacagaaattcactgaggcctatggaagtttggtgctttgctccctgtgtttgcgaaacaggtatctcgtgatttcagaaaagcttgaggagattaagtctttccgggagctgacctgcctggatctttcctgttgcaagcttggagatgagcatgaacttctagaacatctcaccaatgaagccctgtctagtgtaactcagctccacctgaaggataattgtttatctgatgctggggtgcggaagatgacagcaccagttcgagtgatgaaaagaggccttgagaatctaacattattagacttatcatgtaaccctgagatcacagatgcaggcattggatacctcttttcttttaggaaactaaactgcttagatatctctgggacagggctcaaggacatcaaaaccgtcaagcacaagctccagacccacataggccttgttcactccaaagtgcctttgaaggaatttgatcatagtaactgcaagacagagggctgggctgaccagatcgttctgcagtgggagcgtgtgactgcggaagctgtgaagccacgggagacctcggagcctagagcagcagctcagcgcttctatgggaagcggtctcgagcagaagccccactgaagtgtcccctggcagacacccacatgaactcttccgagaaactccagttctataaagagaaagccccagattgccatgggccagtgttgaaacacgaagctatctcaagccaggagtcaaagaagagcaagaagagaccttttgaggagtcagagacagaacagaataactcttcacaaccttcaaagcagaaatatgtatgtcttgctgtggaagactggggacttgtttaaattcctattgattagtagatacaagttgacctttctctggcccccagctctagtgtttgagtaaaggagactgaggatgatttactttttgtttgaatttacctatggcattagcatagtaagcagatatttctacttttgtggtgtgggaggggaatgctatggaagtatgtaataatttctaatgtatattttcaatacatagtaattttttcaaataaacatttttgctgtccttaaaaaaaaaa

SEQ ID NO: 59137 - DNA, 1293 bp, Homo sapiens
ttttttttttttaagaagaaaaaataataaacttagtttctgtatgagcatccgcgtaaggaggcttctgattttctggtctggtggagggttgggtgggaacttgggcatcgtttttctcctccctcttgttcttgcaaagatcctagcacctgatctctagcccaggactatatgttccaggcagaaatctacccaagaagagggaagattggtgaatttgatgtggtagggtgcctttccccagtcagtttgaagtcacagatatccttttcctctcatttcttttccctcggttcctagacgttcctcggagctctttgatgcctcagacctttcccttttatccctcttgctcaggtgcttcctttcacaactttttccagagggcaggcgtcctagctccagttgctccatcccttgggccctcccctgctcttcatctagccaaactggtttgagtcagccacaccccttcccagctccctgggctcttcacgtggtggctggccactcaaccccacccctgggcttggcttggagccctgagtcagctccatcaccacccaagccaaaccaaagctgaggcaggagccgaaactcagagtccttcaaggcctatagccaggtgatggaggacgaggagaaggcagtggagatcttgggcaacacggaagctgctcatcctccatcccccatccgctgctgctggctccgcctccgctgcttggcagctactagcattatctgtggctgctcttgcctgggagtcatggctctggtgtttgccatcaaggcggaagagcggcataaagcaggccggtccgaggaggcagtgcgctggggggcccgggcccggaaactcatcctggccagctttgctgtctggcttgctgtcctcattctgggtcccctgctgctgtggttgctctcctacgccatcgctcaggctgagtgaccctggatggcctctgctgagagccagccgagacctcctggatcctgcaatgcggcattgctaaggtcctgtgacagcagtggttggaaggatcctggttggaaggatggggactctctcaaggggctttggaagagctcttctagccctttataaaaggagggcagcagctgagactgatgagaggagggcagcctgctctgttctttcagggccccccacccccatctcccctaccctagcccaccctagggcctctacccagcgggaggggttgaagaccaggcctggttttattagaattcattttgtaataaaagccttttttagtggtg

SEQ ID NO: 59138 - DNA, 2450 bp, Homo sapiens
agcatcaacaacggaggctgtcagcaggtctgtgtgaacacagtgggcagctatgaatgccagtgccaccctgggtacaagctccactggaataagaaagactgtgtggaagtgaaggggctcctgcccacaagtgtgtcaccccgcgtgtccctgcactgcggtaagagtggtggaggagacgggcgcttcctcagatgtcactctggcattcacctctcttcagatgtcaccaccatcaggacaagtgtaacctttaagctaaatgaaggcaagtgtagtttgaaaaatgctgagctgtttcccgagggtctgcgaccagcactaccagagaagcacagctcagtaaaagagagcttccgctacgtaaaccttacatgcagctctggcaagcaagtcccaggagcccctggccgaccaagcacccctaaggaaatgtttatcactgttgagtttgagcttgaaactaaccaaaaggaggggacagcttcttgtgacctgagctgcatcgtaaagcgaaccgagaagcggctccgtaaagccatccgcacgctcagaaaggccgtccacagggagcagtttcacctccagctctcaggcatgaacctcgacgtggctaaaaagcctcccagaacatctgaacgccaggcagagtcctgtggagtgggccagggtcatgcagaaaaccaatgtgtcagttgcagggctgggacctattatgatggagcacgagaacgctgcattttatgtccaaatggaaccttccaaaatgaggaaggacaaatgacttgtgaaccatgcccaagaccaggaaattctggggccctgaagaccccagaagcttggaatatgtctgaatgtggaggtctgtgtcaacctggtgaatattctgcagatggctttgcaccttgccagctctgtgccctgggcacgttccagcctgaagctggtcgaacttcctgcttcccctgtggaggaggccttgccaccaaacatcagggagctacttcctttcaggactgtgaaaccagagttcaatgttcacctggacatttctacaacaccaccactcaccgatgtattcgttgcccagtgggaacataccagcctgaatttggaaaaaataattgtgtttcttgcccaggaaatactacgactgactttgatggctccacaaacataacccagtgtaaaaacagaagatgtggaggggagctgggagatttcactgggtacattgaatccccaaactacccaggcaattacccagccaacaccgagtgtacgtggaccatcaacccaccccccaagcgccgcatcctgatcgtggtccctgagatcttcctgcccatagaggacgactgtggggactatctggtgatgcggaaaacctcttcatccaattctgtgacaacatatgaaacctgccagacctacgaacgccccatcgccttcacctccaggtcaaagaagctgtggattcagttcaagtccaatgaagggaacagcgctagagggttccaggtcccatacgtgacatatgatgaggactaccaggaactcattgaagacatagttcgagatggcaggctctatgcatctgagaaccatcaggaaatacttaaggataagaaacttatcaaggctctgtttgatgtcctggcccatccccagaactatttcaagtacacagcccaggagtcccgagagatgtttccaagatcgttcatccgattgctacgttccaaagtgtccaggtttttgagaccttacaaatgactcagcccacgtgccactcaatacaaatgttctgctatagggttggtgggacagagctgtcttccttctgcatgtcagcacagtcgggtattgctgcctcccgtatcagtgactcattagagttcaatttttatagataatacagatattttggtaaattgaacttggtttttctttcccagcatcgtggatgtagactgagaatggctttgagtggcatcagcttctcactgctgtgggcggatgtcttggatagatcaagggctggctgagctggactttggtcagcctaggtgagactcacctgtccttctggggtcttactcctcctcaaggagtctgtagtggaaaggaggccacagaataagctgcttattctgaaacttcagcttcctctagcccggccctctctaagggagccctctgcactcgtgtgcaggctctgaccaggcagaacaggcaagaggggagggaaggagacccctgcaggctccctccacccaccttgagacctgggaggactcagtttctccacagccttctccagcctgtgtgatacaagtttgatcccaggaacttgagttctaagcagtgctcgtgaaaaaaaaaagcagaaagaattagaaataaataaaaactaagcacttctggagacatagtcgacgcggccg

SEQ ID NO: 59139 - DNA, 1514 bp, Homo sapiens
ggaattcgacttccttgctggttgctaagacactcttgtttcgctccttgacaaccctggcgggggttcgctggctgcggccccggctccggcccccgcaggagcagcaccccccggggaaagacattttctgctcccaccgagttggcagggcctgcttcctgaatctcctgggtgtgtcttaactgccagtcccagcacctcctgaaagccccactctcctccagtggtcacagtggaaggatcatgggagaaacagaagggaagaaagatgaggctgactataagcgactgcagaccttccctctggtcaggcactcggacatgccagaggagatgcgcgtggagaccatggagctatgtgtcacagcctgtgagaaattctccaacaacaacgagagcgccgccaagatgatcaaagagacaatggacaagaagttcggctcctcctggcacgtggtgatcggcgagggctttgggtttgagatcacccacgaggtgaagaacctcctctacctgtacttcgggggcaccctggctgtgtgcgtctggaagtgctcctgacactctgtcccctgccccgtcccctgcagggccttttcctgccactcatctggggtggggagcagccctaggcaggtcctggtttttccaaggagagttggggtcttttctttttgtctttgtgtaccagtttcctgagccacgcccagtgtgtgaacttgacatctccatccccaggctctcaactgtctccctcggagtctcagggtgtggacggggcagcgggcatgggtctgtgtgggagacgtggggtggggcggtgtgacagggtagaggaggtgggagatgagatcttccgcacaggaacacgccagtccccctttctccagggctgccttccccttgcatcctgggagccccactgccctgccatccccagtactgccgggaagtgtcggccgtccttgtcattagtggtcatatgaaaatggccccaagaaggagatgattctttcaagggacacaggcagcttctctccttgtcctctggggaggtgctgacccctcagaaaccccttcccccaacttgaccccaggctgaacagaccactgcatctcactgggccagcagcccccccagcccccagccttggtggggaccaagcagcctttcccgtcccctcctcgacccgtacagttgagagccaggggctggtgtgtgggagctgctacctggcagtttctcgaggggtcaccgagcctctggtgggacacctgggcaggagtgctctcaccacgaggctgcttccgcagggaaccctggcctgcccgcgacttcgcatcagggaccgcatgctgatttgtactgctctctgctgggttttctatgttcttttcgagtgtgggaaaagggttttagtagaagggtgaatcgtattttacacagcggtcttatttatataaatgtcttggtttttacaattaaaatgaccaaaaactgaaaaaaaaaa

SEQ ID NO: 59140 - DNA, 3372 bp, Homo sapiens
gaaggagcgggcatgaggcgctgcccgtgccgtgggagcctgaacgaggcggaggccggggcgctgcccgcggcggcccgcatgggactggaggcgccgcgaggagggcggcggcggcagccgggacagcagcgacctgggcccggcgcaggggccccggcggggcggccggaggggggcgggccctgggcccggacagaggggtccagcctccacagcgagcctgagagggccggcctcgggcctgcgccggggacagagagtccgcaggcagaattctggacagacggacagactgagcccgcggcagctggccttggagtagagaccgagaggcccaagcaaaagacggagccagacaggtccagcctccggacgcatctagaatggagctggtcagagctggggacgacttgtctttggacggagaccgggacagatggcctttggactgatccgcacaggtccgacctccagtttcagcccgaggaggccagcccctggacacagccaggggttcatgggccctggacagagctggaaacgcatgggtcacagactcagccagagagggtcaagtcctgggctgataacctctggacccaccagaacagttccagcctccagactcacccagaaggagcctgtccctcaaaagagccaagtgctgatggctcctggaaagaattgtatactgatggctccaggacacaacaggatattgaaggtccctggacagagccatatactgatggctcccagaaaaaacaggatactgaagcagccaggaaacagcctggcactggtggtttccaaatacaacaggatactgatggctcctggacacaacctagcactgacggttcccagacagcacctgggacagactgcctcttgggagagcctgaggatggcccattagaggaaccagagcctggagaattgctgactcacctgtactctcacctgaagtgtagccccctgtgccctgtgccccgcctcatcattacccctgagacccctgagcctgaggcccagccagtgggacccccctcccgggttgaggggggcagcggcggcttctcctctgcctcttctttcgacgagtctgaggatgacgtggtggccgggggcggaggtgccagcgatcccgaggacaggtctgggagcaaaccctggaagaagctgaagacagttctgaagtattcaccctttgtggtctccttccgaaaacactacccttgggtccagctttctggacatgctgggaacttccaggcaggagaggatggtcggattctgaaacgtttctgtcagtgtgagcagcgcagcctggagcagctgatgaaagacccgctgcgacctttcgtgcctgcctactatggcatggtgctgcaggatggccagaccttcaaccagatggaagacctcctggctgactttgagggcccctccattatggactgcaagatgggcagcaggacctatctggaagaggagctagtgaaggcacgggaacgtccccgtccccggaaggacatgtatgagaagatggtggctgtggaccctggggcccctacccctgaggagcatgcccagggtgcagtcaccaagccccgctacatgcagtggagggaaaccatgagctccacctctaccctgggcttccggatcgagggcatcaagaaggcagatgggacctgtaacaccaacttcaagaagacgcaggcactggagcaggtgacaaaagtgctggaggacttcgtggatggagaccacgtcatcctgcaaaagtacgtggcatgcctagaagaacttcgtgaagctctggagatctcccccttcttcaagacccacgaggtggtaggcagctccctcctcttcgtgcacgaccacaccggcctggccaaggtctggatgatagacttcggcaagacggtggccttgcccgaccaccagacgctcagccacaggctgccctgggctgagggcaaccgtgaggacggctacctctggggcctggacaacatgatctgcctcctgcaggggctggcacagagctgagctgctcagccaccatcaggttaattggatggcgccagtctggctggaggagccctgagatgccatgggaggcctgaggttggccacgggggagctggcctccagggacgggagagattgtgtcatgtgccacacgagaccaacgtggaaaagtctgaagggccttgggagaccaggtagcacctggccccatcatgatgcaggggttttggggacctggaaggaaggtgatgaggcagtgagtcagaaaaaccagaacggggtccccggatctgctgggaaggcttctgaggggctgccctgagagcattcagttcacatgtcacagggtatggtgtgacagggtgcctgtggacacatgaatcacttctaacctgcctccctgtcagcctccaggctgccagctggctgaggccagggactgggtcaggctcatctgtggcgcctcagagggtcagcatcattggtgaacagatgcaggcgctgctggaccatctggggagagtgacagtccatgtcttcaccagggagccatttgagtgctgagcgacaagaggctcagagggcatgaccccatgggactggatgcggcctgagggctgataccgctgggcggtatcctgccctgctgtggccctgtgggatcctccgtgttcctcggcggactctgctgacctcctgcagacccaaaccacagccacatcccagcttctgtgccagcactgtgacagtacctcgctcctctgtgcaccagatccggcctcaggacttacacctcctgcctgacccccaggcttctctctcctttctcccagcaaactgcagtggcagaaaggaggttcagaggctgggaaagtgggcctccccttgcaactcagagctgctgcactcaggagggccccatccaatcccgggcccctgcagggaaaagcgctgggtgtgtgtcagaggcgcagggtgggtggggctgccagccaggaccctggcctgcagcctgatccaaaccaaagactgtagaaccctggggtgtggctaacggcccctccagcacccatagccaggtcttcctggcccttgaggctgggctggcggacaggcacctacctcttccttaagctgaagctcccacactgtcttccagggctgaggagatgctctccttttctactgaccatcttgatacttatttatacgagaggcagttgctggacggggtagtactgggaagcaggaggcagaatggctctgctgagcctcctacccatgacaacaccccaataaacagaacattcagagccaaaaaaaaaa

SEQ ID NO: 59141 - DNA, 1941 bp, Homo sapiens
  misc_feature (1)...(1941): n = a,t,c or g
agcaggacacagtggctcacacctgtaatcacagcaccctaggaggccaaggcaggagtgagccaccacactcagccaaccttaactcttaattattggaaatacccaaacctcaatgccttaccccatatggaaggcaaaatcctgtattcccaattcacacatgaaaattacacgagaggtaagtcaaaaatgcttcctttattacataaagccaatactgctacttctaagttcaactgtttgtgcatctctatatcgttcaaagtgttacgcccgtgatattaacaatgaccgcttccaagtgtcagtgaacagtggctccctgtgagtgtcatcatggtacctctccccattgcacacaagtcaacaaactgctctagaaagttaagttctcccaggcccagagtaaacatatactcaatattcttccatactttattataccataagaagcaaacttctgaaggagatacaattaaagataccacaggtgtcctagcttgtcaatattctgttttatcattttcattaacaaagcagattacaatgtagccctaatttgcattataattagttgttacaagacactgcacattctcctgaagacacacaatgatttccaagatgccaggtcactcttccaatcagtgaatggcgagctcactggcaggtgcagggctacttcctgtattccaatgatgtgcctgaaatagcgctttgcaagatgagcgtggattatgtggacacaattttgaggcaatctccattacacatttggtagaagactgcctaacttaatcttactattagtgtattagtgttgttatattatgaagacatattatattccattattctgcttagctcaaggaagaataaagaatttggaccaaaattataaccagattatgagcaatttcctaagcaaaagaaacaaagtaaatgctgaggttaataaagatgtaataattctcttcacatggcctttactgtttgtgaactgtgtaatttaaaatcctgagcttaacaaaaatctttataaatcaactcatcaaaacaggcatttggccaataagaatttaatttcacatcaataaaactttagactttagatttatttagggctgtttgcatatgtttatagaatagtttactctaaaagatgacaagacagctccccctcagtgagaccctggcctaaatatatttgctttatttatatagcaagaggataacattaaacatggaagctttcaatttgtggcactgaataatctacacagggcatccttcaaaggctacaattaaggatccacctaacttttcagcaatacaagcccgattgagatcttctggtccatttgcttgacattcatgttttatgccttgaaatttctttttaattgcatccttggagcttgcatagatcattttacttttcagaggtgctagttctggtgcccacaaaaaaaacatcaactcttcttttctggattcttttgtttcaaagcttgcatcatacaaagcatagcgacaatctttttcaggaagcattcccacaaaatgcttgaaaggatcagttatggttacaccaacatctccaaccaagatctctttgccttcttctacaatgatgcactttttgtctgcactgagacaaaaaatgacagccttctttcttttcttgatttcttctggtgtggagcatttacgaactttcatgtcataaaaaatgcgacatacttcatcagctacttgcactcctgaggccatcttcgccgcggcggtcgcagggacgcgggggagggagccggcgggcagcgagtatgcagaccgtcctcctcacggctgcgggaccgagagacccagcgctgagctgacgcggcggcgcgagcttacncggggggggaattccccgcntgggtagtggtactcgaa

SEQ ID NO: 59142 - DNA, 1441 bp, Homo sapiens
cacccagatcgctccgcccccatccgcaggttctaacttgggctgggactctgcccctctacctcagcacagaatcgccccgggtcctactacagaatcaatccttgaacactgcctccacgtcgccggctcaatctgggcgagaacccagacttccaccgcagccccgcaatctgcagacctcagcggcagcgcaggtggcagacctgcctcctttgcctgtgagtcatggcagctcccatgaatggccaagtgtgtgtggtgactggtgcctccaggggtattggccgtggcattgccttgcagctctgcaaagcaggcgccacagtttacatcactggccgccatctggacacccttcgcgttgttgctcaggaggcacaatccctcgggggccaatgtgtgcctgtggtgtgcgattcaagccaggagagtgaagtgcgaagcctgtttgagcaagtggatcgggaacagcaagggcgtctagatgtgctggtcaacaatgcttatgcaggggtccagacgatcctgaacaccaggaataaggcattctgggaaacccctgcctccatgtgggatgatatcaacaacgtcggactcagaggccactacttttgctcagtgtatggggcacggctgatggtaccagctggccaggggctcatcgtggtcatctcctccccaggaagcctgcagtatatgttcaatgtcccctatggtgtgggcaaagctgcgtgtgacaagctggctgctgactgtgcccacgagctgcggcgccatggggtcagctgtgtgtctctgtggccggggattgtgcagacagaactgctgaaggagcatatggcaaaggaggaggtcctgcaggatcctgtgttgaagcagttcaaatcagccttctcatctgcggaaaccacagaattgagtggcaaatgtgtggtggctttggcaacagatcccaatatcctgagcctgagtggtaaggtgctgccatcctgtgaccttgctcgacgctatggccttcgggatgtggacggccgccccgtccaagactatttgtctttgagctctgttctctcacacgtgtccggcctgggctggctggcctcctacctgccctccttcctccgtgtgcccaagtggattattgccctctacactagcaagttctaaccctcctggtctgacactacgtctctgcttgtcttctcatttggacttggtggtttgtcctgtctcagtgaaacagcagcctttcttgtttacccatacccttgatatgaagagaagccctctgctgtgtgtccgtggtgagttctggggtgcgcctaggtcccttctttgtgccttggttttccttgtccttctttttactttttgcccttagtattgaaaaatgctcttggagctaataaaagtctcatttttctttccaaaaaaaaaa

SEQ ID NO: 59143 - DNA, 2714 bp, Homo sapiens
tttcgtggcaccgcggcgctcgggtgtttttgggggcccgggtggagggcccgggtgccggggcccaaggtgcggcctcgctagcgggagagggagcgggatcaccggcccggagagagctctcagggccagagcggggcaggaggatgctttcccagccccaccatggagctgcgctgtgggggattgctgttcagttctcgctttgattcagggaatctagcccacgtggagaaggtggaatctttgtccagtgatggggaaggggtaggaggtggggcgtcagccctgaccagtggcattgcctcttcccctgactatgaattcaacgtgtggacccgaccagactgtgctgaaacggaatttgagaatgggaacaggtcatggttctacttcagcgtccggggaggaatgccaggaaaactcatcaagatcaacattatgaacatgaacaagcagagcaagctgtattcccagggcatggccccctttgtgcgcacactgcccacccggccacgctgggaacgcattcgagaccggcccacctttgagatgacagagacgcagtttgtgttatcctttgttcatcgtttcgtggagggccgtggggccaccaccttcttcgccttctgctaccccttctcctacagtgactgccaggaactgctaaaccagctagaccagcgctttccggagaaccaccctacccatagcagccccctggataccatctattaccatcgggagctcctttgctattctctggatggacttcgtgtagatctgctgacgatcacttcctgccatgggcttcgagaagatcgagagccccgtctagagcagctatttcctgataccagcacccctcgaccattccgtttcgcaggcaagaggatattcttcttaagcagtagagtacacccaggggagactccatctagctttgtcttcaatggctttctggacttcatcctccgacctgatgatccccgggcccaaaccctccgtcgcctcttcgtctttaagctgattcccatgttgaaccccgatggtgtggtccggggacactaccgcacagactcacgtggagtgaatctgaaccgtcagtacctgaagcctgatgccgtcctgcacccggccatctatggggccaaagctgtgcttctctaccaccatgtgcactctcgtctgaactcccagagttcctctgagcaccagcccagttcctgtctccctcctgatgctcctgtttctgacctggagaaagccaacaatctccaaaatgaagctcagtgtgggcactcagctgacaggcataacgctgaagcctggaaacaaacagagccagcagaacagaagctcaacagtgtgtggattatgccacaacagtctgcggggcttgaagagtcagcccctgataccatcccccccaaagagagtggcgttgcttactatgtggacctgcatggacatgcttccaaaaggggctgcttcatgtacggaaacagctttagtgatgagagcacccaggtggaaaacatgctatatccaaagctcatctccttgaattcagcccacttcgacttccagggctgcaatttctcagagaagaatatgtatgcccgagaccgtagagatggccagtctaaagagggaagcggccgtgttgcaatctacaaagcctcagggataatccacagctacacacttgaatgcaactacaacactggacgctcagtaaacagcatccctgctgcctgccatgacaatgggcgtgccagcccccctcccccgccggctttcccctccagatacactgtggaactatttgagcaggtgggacgagctatggccattgcagccctggacatggcggaatgtaatccgtggccccgaattgtactgtcagagcacagcagccttactaatctacgggcctggatgctgaaacatgtacgcaacagccgaggcctaagcagcactctgaatgtgggtgtcaacaagaagaggggccttcgaactccacccaaaagtcacaatgggttgcctgtctcctgctccgaaaacaccttgagtcgggcacgaagttttagcaccggcacaagtgccggtggtagcagcagcagccaacaaaattctccacagatgaagaattcccccagctttccttttcatggcagtcggcctgcagggctgccaggcctgggctctagtacccaaaaggtcacccaccgggtgctgggccccgtcagaggtaagccagtctgggagcccctgcaacatgtgttcggttgtctggggcattgctgggggaagtaagagcttgaagatatactgttggcccaggaccaaggggtgaatcaataaaattagtttgtagcagaacctgtggcctctcctacgaccttggtgttccctgcggcatgattccagagcggtattgtgtgtggccagagggggaagtctgggtatctgggcttcagtgcatgctaggagccagggaagtttccaaggatgaaacactagctgaagcagtgccaaacaggacatggagcctccacgtcacggacaatgtcagtctgtcttcatgggggcagttaagggaatgtcctcagaatccaaactgcagtactgtagaatgatggggaatcttatctgtggtctttatgggctgaaatttttcctggcttcagagctcattaaggaagtgatag

SEQ ID NO: 59144 - DNA, 2750 bp, Homo sapiens
attgcccctgtaacctgtcaaagaagagctaagggagctttcggggttggcttcttggaggctgctttctcctttacttggaaggcttcgctagtgatggacccatacatgattcagatgagcagcaaaggcaacctcccctcaattctggacgtgcatgtcaacgttggtgggagaagctctgtgccgggaaaaatgaaaggcagaaaggccaggtggtctgtgaggccctcagacatggccaagaaaactttcaaccccatccgagccattgtggacaacatgaaggtgaaaccaaatccaaacaaaaccatgatttccctgtccattggggaccctactgtgtttggaaacctgcctacagaccctgaagttacccaggcaatgaaagatgccctggactcgggcaaatataatggctatgccccatccatcggcttcctatccagtcgggaggagattgcttcttattaccactgtcctgaggcacccctagaagctaaggacgtcattctgacaagtggctgcagccaagctattgacctttgtttagctgtgttggccaacccagggcagaacatcctggttccaagacctggtttctctctctacaagactctggctgagtctatgggaattgaggtcaaactctacaatttgttgccagagaaatcttgggaaattgacctgaaacaactggaatatctaattgatgaaaagacagcttgtctcattgtcaataatccatcaaacccctgtgggtcagtgttcagcaaacgtcatcttcagaagattctggcagtggctgcacggcagtgtgtccccatcttagctgatgagatctatggagacatggtgttttcggattgcaaatatgaaccactggccaccctcagcaccgatgtccccatcctgtcctgtggagggctggccaagcgctggctggttcctggctggaggttgggctggatcctcattcatgaccgaagagacatttttggcaatgagatccgagatgggctggtgaagctgagtcagcgcattttgggaccctgtaccattgtccagggagctctgaaaagcatcctatgtcgcaccccgggagagttttaccacaacactctgagcttcctcaagtccaatgctgatctctgttatggggcgttggctgccatccctggactccggccagtccgcccttctggggctatgtacctcatggttggaattgagatggaacatttcccagaatttgagaacgatgtggagttcacggagcggttagttgctgagcagtctgtccactgcctcccagcaacgtgctttgagtacccgaatttcatccgagtggtcatcacagtccccgaggtgatgatgctggaggcgtgcagccggatccaggagttctgtgagcagcactaccattgtgctgaaggcagccaggaggagtgtgataaataggcctgcatccattctcctgaggatgtgtcccatctagggaaggctggactaggccttgcggctcctcagggactcaggtggccctactgggagaggggcctcaaatgcaccatgtcaagggttcaagattgttcctgcttttccccaagtacaaccacacccacactcagatcctcctcattcacatcgcagattctcccttgctctgcgctgctagagtgactcactaattcattaatctgcctccctctcgtaagatttccttctttttttcttgaaagtaccaggtgaacaaagtttaccagaaagcagttgagacaagaaaataagagctcaggatgagggaaaagaaaaagattgagagaatttgtgcccccaaccatttcctcagactctaagaaagaacacgctctctccaggcaggtctgaagctcaactctcttattgcctcacttcaggtatacctcactttacacaatagaattataactggaaagaagttggggacacatgtatttggtgattacattttaaacacattaggaaaagttgctatttgaactttttattgatttttggggggagtaaagaattattttgtgatgcaaataaatatcctttaattgatcgacttgccaaatttagatttgtgtgcatcaggctttcttttttttctttttttagagaagttcaatataagcttttcttttctttgtttctttctttctttattttgagatggagtcttgctctgtcgcccatgctggagtgcagtggcgcgatctcggctcactgcaacctccacctcctgggttcaagcgattctcttgcctcaacctcccaagcagttgggactacaggcgtgagccaccatgcccggctaatttttgtatttttagtagagacagggtttcaccatgttagccaggctggtctcaaactcctgacctcaggcaatctgcccgcctgggtctcctaaagtactgggattacaggcgtgagccacctcgcccagcggcatcaggctttcttaaagtgagagcacgcctgtactagagcaagcaggaatcagagaccttccagaaatactactgtgtaagggccagaaatatcttcacttgtcattgttatataatcattattacttttgctgtaatgttaatattgatttattaatatatattatcttttcatacattttctaagaaacatttatattgataagatcttttattttgcaagggcataaattattgtttttcttttttttttttttaataaatttcacc

SEQ ID NO: 59145 - DNA, 607 bp, Homo sapiens
tcgggacggaggcctccaggggagagggaggcgggacgaagcagcgaagaactgggaggtcccgagcagtggaggggcgggtcctgtcctggagggggcgtggcttgccgcgtgagccccgcccgccacaaactaccaccgctgcctcaagaccaggacccgccgcgggaagagcacgcagccctgcgagtactatttccgcgtgtaccactcgctgtgccccatcagctgggtggagagctggaacgagcagatcaagaacgggattttcgccggcaaaatctgactgccccagcgcggcttcctctgaagatgcagtgatcctgcatctttttgtctcgcggagccccgggtctcggttatccacccctacctcccagtgtctaagccacgaataatgcaggtagatgcctcgcgttgacagctacgagccagcccagggtccccagttctcaacactgtcccacccagatggctccaaggccaaggagtgccgcttgacaaagccctagggttccagcctggtcctgctgagggagccgtgagaccagtcagcctggggtgctggttttcccaacgggtactccctgagctatcagccttccag

SEQ ID NO: 59146 - DNA, 1009 bp, Homo sapiens
gtcccggcctgagtcgcggccacccgcaggtctgagctgtgggctgaggcagcgcagccgctgccgcagggtgcgcgatgccttgaacctgggaaactatgtgaagcaacactctggattttgaaagacatcttttcatcatgggacagcaaatttcggatcagacacagttggttattaacaagttaccagaaaaagtagcaaaacatgttacgttggttcgagagagtggctccttaacttatgaagaatttcttgggagagtagctgagcttaatgatgtaacggctaaagtggcttctggccaggaaaaacatcttctctttgaggtacaacctgggtctgattcctctgctttttggaaagtggttgtacgggtggtctgtaccaagattaacaaaagcagtggcattgtggaggcatcacggatcatgaatttataccagtttattcaactttataaagatatcacaagtcaagcagcaggagtattggcacagagctccacctctgaagaacctgatgaaaactcatcctctgtaacatcttgtcaggctagtctttggatgggaagggtgaagcagctgaccgatgaggaggagtgttgtatctgtatggatgggcgggctgacctcatcctgccttgtgctcacagcttttgtcagaagtgtattgataaatggagtgatcgacacaggaattgccctatttgtcgcctacagatgactggagcaaatgaatcttgggtggtatcagatgcacccactgaagatgatatggctaactatattcttaacatggctgatgaggcaggccagccccacaggccatgaccttgaagtgaaagtcttctgttgctattgtgggctcaaatatttggtcatgggggaagaatgtagggttgtggcactggcacagacacaggaaaatccattttccccactcttttatttttgctattctgatcatttgtcccccttttaaaaataaacttcccatgtcttccaaa

SEQ ID NO: 59147 - DNA, 711 bp, Homo sapiens
cggacgcgtgggcgggcaagatggcagcggcgctgcgcgtgcgttgttgagtgttcgggacgccggcctgcaggcgccatggtcttcctcaccgcgcagctctggctgcggaatcgcgtcaccgaccgctactttcggatccaggaggtgctgaagcacgccaggcacttccggggaaggaaaaatcgctgctacaggttggcggtcagaaccgtgattcgagcctttgtgaaatgcaccaaagcccgatacctgaagaaaaagaacatgaggaccctctggattaatcgaattacagctgctagccaggaacatggactgaagtatccagcgctcattgggaatttagttaagtgccaggtggagctcaacaggaaagtcctagcggatctggccatctacgagccaaagactttcaaatctttggctgccttggccagtaggaggcgacacgaaggatttgctgctgccttgggggatgggaaggaacctgaaggcattttttccagagtggtgcagtaccactgaggactgttgctgtattgattaggaaaagagacagagtaatttgcagtttgtttgatttatacttttgtttatctacaacccaataacagacatgagggatggccctgtctctctgggacagagcctcaaagatgatgtccatgttttgtgtgaatgaaactcaaacactcttcaaaaaaaaaa

SEQ ID NO: 59148 - DNA, 3246 bp, Homo sapiens
  misc_feature (1)...(3246): n = a,t,c or g
cccacgcgtccgccggacgtaggaggtggaggttgtggaattcgccgttcgaaagcagggactaaaagccccacttcgtcttacgttccgaaaggaaggcgtctgttgagcctttctctcagtcgtgagggaggcgtcgacggcgtgcggaagtcctgagttgaggcttgcgggatcctttccggagaaagcgcaggctaaagccgcaggtgaagatgtccaactacgtgaacgacatgtggccgggctcgccgcaggagaaggattcgccctcgacctcgcggtcgggcgggtccagccggctgtcgtcgcggtctaggagccgctctttttccagaagctctcggtcccattcccgcgtctcgagccggttttcgtccaggagtcggaggagcaagtccaggtcccgttcccgaaggcgccaccagcggaagtacaggcgctactcgcggtcatactcgcggagccggtcgcgatcccgcagccgccgttaccgagagaggcgctacgggttcaccaggagatactaccggtctccttcgcggtaccggtcccggtcccgtagcaggtcgcgctctcggggaaggtcgtactgcggaagggcgtacgcgatcgcgcggggacagcgctactacggctttggtcgcacagtgtacccggaggagcacagcagatggagggacagatccaggacgaggtcgcggagcagaaccccctttcgcttaagtgaaaaagatcgaatggagctgttagaaatagcaaaaaccaatgcagcgaaagctctaggaacaaccaacattgacttgccagctagtctcagaactgttccttcagccaaagaaacaagccgtggaataggtgtatcaagtaatggtgcaaagcctgaagtaagtattctaggtttgtcggaacaaaactttcagaaagccaactgtcaaatctgattagccacttatatcttagactatactttttgggaagtctagagatgtatataatgtgctaaattcaaagtagcaaatctgaagataggcaatgtcaaacccatgaaaatgggagattaatgagctttatttggccgtgcatggtgcctcatgcctgtaatgaggcagatggcttgagtccaggagttcaagactagcctgggcaatgtggcaaaaccgcgtgtttacaaaaaatacaaaaattagccaggcatggtggtgcatgcctgtagtcccagctgtttgggaggctgaggcaggaggatctttgagcctaggatgctaaggttgcagtgagccaagatggcaccattgcactctagcctgggcagcagagcgagaccctgtctcaaaaaatacatttatttttttcattttcagttaacagtgtactcttataacaccgttattagctggtactttggtgatttctattactagtttttctaagctatttacagagtgtttgtagctttcatttgcagcattatgttcccacaaattctgtactcagcatatacagtatagtttatctgctctatttctgtcttatagaaatcatgaatgtggtctgcagacattgatgaagaaaatctgttggtaattgatacatgggctaaagcatcagaggtttaatttgaagtttatgttcacacactgaaaacttagtttttttgttggtagatccatgtgcatgctagaatttgggacaggcactatttgcataaagtattaaagtcaatttttaaactaagcaaaggtacacgttgtaacggtggggcatctgtgaaaaagatgtccctttcataatatatgcaatatattccagatgttttgagagattacagaagaggaggcctgcttcacttgcagctgtcggaaaaggtaacagaagatggaactcgaaatcccaatgaaaaacctacccagcaaagaagcatagcttttagctctaataattctgtagcaaagccaatacaaaaatcagctaaagctgccacagaagaggcatcttcaagatcaccaaaaatagatcagaaaaaaagtccatatggactgtggataacctttggtccatctgtgctatctctcatatctgcaagagaaacctaaaatgttaatatttgagtgttaagtatttacatctttttgtgttggtttttaaatgcacaagtacccctgaatggctcaaagggatgggataatgctagaaacactaacttgcaataaagtgcagttttcatgcaaacttagccatcagttttcttcttttagataggtatccacagtccatatggactttttttctgatctatttttggtgatcttgaagatgcctcttctgtggcagctttagctgatttttgtattggctttgctacagaattattagagctaaaagctatgcttctttgctgggtaggtttttcattgggatttcgagttccatcttctgttaccttttccgacagctagacaggttaagaaaaagtgtaattttaaaacacatacccttggtttctaaatcctatattaaaaaatagcctaattgtaaacaaaatttagctgtagacacaaaaatcaacttggatctaacagcctaagtaacagaactattgagttttccccttaacaaaactgatttaatattaggcttaagacactcttcccataattattttacttccctgctggcaaatttaaactaattttttaatcagttttctcaggttgaatcaagttcacttttgaaatgtaaagccacatcagaaaatacgttttaagaaactaaggcatttgccagttaggcacctaatcgtctgaacaaagaccttgtctactaatactgagcaaacccacatctgggcccaattacacagattcatttagatacagcatttttttttttttaagcccccgagacgggagtcttgctctgtcacccaggctggagtgaaaagtacagtgcaatttgctaatgcacatcctgcacatttctggagaattataataaacttatctgcaagtgaagcaggcctcctcttctgtaatctctcaaaacatttcaggctttgcaccattacttgatacacctattccacggcttgtttctttggctgaaggaacagttctgagactagctggcaagtcaatgttggttgttcctagagtttcgctgcattggtttttgctatttctaacagctccattcgatctttttcacttaagcgaaagggggtntctnccgcgacctcgtcctgga

SEQ ID NO: 59149 - DNA, 2343 bp, Homo sapiens
ggtggagtgacagccggagcccgggcgccggcgcggggctcggtgacagcggaggcggcggcccgggcgggacgagggagcggccgcggcgccgacggcgggcgggaagggcggacggggcgggcctccctggtggcacggggccggagcaggccgggagcaggtggcgggcacagcttgcgggccaggcacccgaacttgcgacaagttgccggagccgcggggcgcgggcggcggacagattgaccttcagagcgagggagccagcgccggcagccaccatggcgtcacgcatagggttgcgcatgcagctcatgcgggagcaggcgcagcaggaggagcagcgggagcgcatgcagcaacaggctgtcatgcattacatgcagcagcagcagcagcagcaacagcagcagctcggagggccgcccaccccggccatcaatacccccgtccacttccagtcgccaccacctgtgcctggggaggtgttgaaggtgcagtcctacctggagaatcccacatcctaccatctgcagcagtcgcagcatcagaaggtgcgggagtacctgtccgagacctatggaaacaagtttgctgcccacatcagcccagcccagggctctccgaaacccccaccagccgcctccccaggggtgcgagctggacacgtgctgtcctcctccgctggcaacagtgctcccaatagccccatggccatgctgcacattggctccaaccctgagagggagttggatgatgtcattgacaacattatgcgtctggacgatgtccttggctacatcaatcctgaaatgcagatgcccaacacgctacccctgtccagcagccacctgaatgtgtacagcagcgacccccaggtcacagcctccctggtgggcgtcaccagcagctcctgccctgcggacctgacccagaagcgagagctcacagatgctgagagcagggccctggccaaggagcggcagaagaaagacaatcacaacttaattgaaaggagacgaaggttcaacatcaatgaccgcatcaaggagttgggaatgctgatccccaaggccaatgacctggacgtgcgctggaacaagggcaccatcctcaaggcctctgtggattacatccggaggatgcagaaggacctgcaaaagtccagggagctggagaaccactctcgccgcctggagatgaccaacaagcagctctggctccgtatccaggagctggagatgcaggctcgagtgcacggcctccctaccacctccccgtccggcatgaacatggctgagctggcccagcaggtggtgaagcaggagctgcctagcgaagagggcccaggggaggccctgatgctgggggctgaggtccctgaccctgagccactgccagctctgcccccgcaagccccgctgcccctgcccacccagccaccatccccattccatcacctggacttcagccacagcctgagctttgggggcagggaggacgagggtcccccgggctaccccgaacccctggcgccggggcatggctccccattccccagcctgtccaagaaggatctggacctcatgctcctggacgactcactgctaccgctggcctctgatccacttctgtccaccatgtcccccgaggcctccaaggccagcagccgccggagcagcttcagcatggaggagggcgatgtgctgtgaccctggctgcccctgtgccagggaacaggggccggcctgggggctgggagggccaggggcacctccctcccacccttcaggctgcactgtgtgtgaagtagccacctgccctgcctccctcctccccgttggcccctgtttggacttagtgcctgtctggcagcctgtggggtcaggagaagcacccccagggcagcccttttgactggcgcagtgggaagaggccttcagcccctctcccggagatggaatcgcggggcagggaggggcagggtgttctaaaggtgagaagagggcctggtggagattccctgtcttctgagcccgagcccctcattaccagtgagaggacatgcttgaggggttcgggaagctcctcatctgaggcaactggtcctgggggtgctcaggcctgcctttttgggactcagatggcaggaggtccaccccgcagcctggtcctcggctctcccacaggtgggcaccccccactttggtgctaatagctctccaccaggtggtgtgagcgcgggggctgccagaagcgggaggggtcactgccggaagagcagctgccctccgacccctcactttgtgcctttagtaaacactgtgctttgtaaaaaaaaaa

SEQ ID NO: 59150 - DNA, 1322 bp, Homo sapiens
ctgagggagagactgaggtgcatcagatggcagtggtaaccaaaccagttcccttgccgtgggtggggacacaggagaagcacggaagcatctggaactgagcaatcaggacaggaggctcaagcctgggtgagtcaggagtccgggggctttcttttcatccaacccattgtctgctggtgtctcggcaaaagccagccagccagccgtggcccttcaccgttcttcagactctagggtgagcccagcccagcgacacaacagaaaccaagtgccacgggggccggtgtcctccaccagcatttctcctctggtcacatctacgtcctgatgggacttctccctcctccttggaccatcagctttacagtccagaccaccctgcagccacccggtggtctcccagctgccccagtctcgggcaggatggcttttgagcctgttgggagagaccttgccaggagaatggtgcccagggcaggcaagaggacacagactctgggagctagaagagttgcggcccagggggccaggccactcccagaggacaggaggcccaaaagcggggaaaggctccatgttacggtggccccatgctgggagtttgtgctgccttctgtctccctgactgcccaagcgtggggtggtgtggggcaggaggcatcctctggtgttccctagcagcccaggctgtgtgcaggggctcccattttgtgtctcagctgcaagaaggccacaaagggaggaggggctcatgggactgctgagaagaaggtgtgcagaaagggagtgtggccctagatcagtcctttaaaaagcctctgttacctgaaaggaggtcaagcagagaggaatggctgcgtgtgtgtcctaccgggcaggacaggacagagggaggtcattgttacacacacatcccccctcctttcctccttcccctccacttccctgtgaaggcctgaggcaggctgtggccaggctcaggccctgactgtggggtacataccagggagggccacgcctccccacagacggggtggagtggtcagtggagccagcaccctctgctgcgttcagcatctccgcctggagccagctgtcccctctctctcaggctccatccgaacaaaaggaaggcagagcctgagatccggcaccccatccccctccactcagcactgagttagagctgggtgggggcatgtctgccttcacacgctgccttatggcttctgtgtctccaacagccctcagcctctggctgctctccttcccaatagtcacaagatttaccatgataataataggttaagacttgaaaa

SEQ ID NO: 59151 - DNA, 867 bp, Homo sapiens
ggcggcgcccatgtaacccggtccgtgccgcaaagcgaacgggggccgcggcgcgggccccgcgggggttagaggtcaccatgctgagggtcgcgtggaggacgctgagtttgattcggacccgggcagttacccaggtcctagtacccgggctgccgggcggtgggagcgccaagtttcctttcaaccagtggggcctgcagcctcgaagtctcctcctccaggccgcgcgcggatatgtcgtccggaaaccagcccagtctaggctggatgatgacccacctccttctacgctgctcaaagactaccagaatgtccctggaattgagaaggttgatgatgtcgtgaaaagactcttgtctttggaaatggccaacaagaaggagatgctaaaaatcaagcaagaacagtttatgaagaagattgttgcaaacccagaggacaccagatccctggaggctcgaattattgccttgtctgtcaagatccgcagttatgaagaacacttggagaaacatcgaaaggacaaagcccacaaacgctatctgctaatgagcattgaccagaggaaaaagatgctcaaaaacctccgtaacaccaactatgatgtctttgagaagatatgctgggggctgggaattgagtacaccttcccccctctgtattaccgaagagcccaccgccgattcgtgaccaagaaggctctgtgcattcgggttttccaggagactcaaaagctgaagaagcgaagaagagccttaaaggctgcagcagcagcccaaaaacaagcaaagcggaggaacccagacagccctgccaaagccataccaaagacctccaaataaaacatgactggtaaaaaaaaaa

SEQ ID NO: 59152 - DNA, 1028 bp, Homo sapiens
ttttttttttttaaagtgaattaatttattgattcatccattccataaatgtgagctcctttgaatgttatccttgctggggggatctgtgcccccaggcctggcgggctgtcacaggccaaggcctccccacaggagccctgtggttacagagctgcaggctcaaggagcccatgggtcagagaggcaaggctgggctgctggtttgcttcaggctgtagggggtgagtgggtggaggcaatgggagcggccccttgccccagcttgcctcagctcttggagtaacgcctctgcagcgattcccggtagaaacggaagacgtgttgcgaagcggcctgggccgcagccaggcactgctggagctcagtgtctgagtagagccccttggtgctggacatcagcagcttccgttccacgctgtccagggcaaaggtcaggactgcccgggcctccttttcttgcttggatgtaggatccagcacgagggtcccatcagagtccagggcgcaggcgaccccacagaagagagcccgcatgggcacacctgcatccaccaatgccatgcaggcggcattcagacaacaggccaggagagagccggcatcgctgacaacctgcagcaccacggtgatggaggtgcgggggtgcaacgtgcccagcaccaccgcctcgcacgtgttcctgatcagccgctcccggctcttctctgcaacaccaggcagcccaatcttcggcctcaggatcacttcgagtgtggccttgttgaaaatctctttgctgaccttcacctcggccggcccgtacacacccgccaggacagaggtgtcaccttgcaggaaggaagcagagccatctggccgcgacagcaggttctgttcgcaggcaaagtgccggaggctgcagccaggaccccgagggctggaccctgttccattttcagcacggattttggcgtcagtatgcatctcctcctccatcgcgccgagcccacgtgcggctgcagttgtcacttccgcggacgcgtggg

SEQ ID NO: 59153 - DNA, 2618 bp, Homo sapiens
  misc_feature (1)...(2618): n = a,t,c or g
ttttttttttttaaaggtatcaaaggcctttattgatttaattttcctttcaacttatcaatgctatcacaaattctaaggaaacaggacttgggcaaaattttttattatgaagatacagatctaagaacagaaggataattatgtgctagcttatatatagttccttgtaaaaataatgatacatgaaaaattagtagaaaatgaaaatctgcagttatctgatatctgaaaatgttaagcaatttcccctgcatcttagttctaatcacttttgcagaataatcaagcatatttgggtgaagagagtatttaatgattccatttttattaatagtgtagtgtgcccttcagagcttggcgtagtctttaagaatcatctgaagtttctggctcagcatgatgttccctctggccttcagcctgccactaaagaatgccttctgagggtcaagcttgcccaggaccacctccatgaaatcttcatctgaaagtatgattgttgtatcagcagcaccttttgcagggccttggtacacttttccagaaccacttttcaggtcaatagtccacttagccccaatatttccgcctttggttatatgccactcaaatacagcatttactttcttcaccacctcaggcccaatatcctttaggcggcgtcctatttcctcaaatacaaaggtactctgaagcttcccgccctcagagggtgtcttagctgaagtaccagatgttggtgcaagatccacatatgcatttgaaatgacaatgtctccagtttcttggaccttggtttgaaaatgaattctgtttccttccttccacatctcagtttgtagagtttgtcctggatatactggttttgcaaaacgagccttaattgccttgaatcttgacacatcattatctgcaaactgctgtaacacacgcctggcagaaaatccaaatgtacataatccatgtaatatgggcttgtcaaaacctgctagactagcaaagttaggatcaatgtgtaagggattccagtctccactgaggcggtacaaagcagcctgattaagagaggtggtatctgtaagtacagcatcaggaggtctattaggtatggctacagctaccttgactttgtctgatgtccgttttccaccaaagcctccagagccaacaagaaagagagagaactgattgtggcatataagttccttctcagaataagaatagacatccataataatcactacaccggatcctttatctaggacatcagcaacaactgcttcacattttaattttcctgctctgggaagtggtttatataactctaagtactgctctccatgaagaacctttgcaaagttgattgaaagtccaggaatttctgctaatcctccacccatcatagatttctgacctatgataactccgaaggtgggcaaacaggagaaatcagaacttccttcataaataaatttcaaatcttttggatccttgattgacgctcccactccaagggcatacataatagcttccagttccgtataagcataagaaaatggagggagtttctggccaatagctccagcaaatcctgatgttgctgtagacgttgcacgactagtatgatttgctgaaactcctccttctgaatctattttactcagaacttcaattatactgccagttgattcttggatactctgaggcttgctggcattctcaaagtcacagatcttcttccagttagccttgactgcctcaggagtcattgggtgattcttttgtcttacaatagctccaagagtccgctcccagcgtaattttccaatccatcctgctccaacctcaaacaagccaccattctcctcacaactctcgtgacaaagccaaaggacaagaggtgccacatactctggcttcagggcttccacaagatcttcaggcataactgtctgagtcatccgtgatcccgcattaggagcaatggtgttacaatgaatgttgcttttcctgccttcaattgcaagagaatttgcaaggcccagaagacccaactttgcagcactataattggcctggccaaagttgccatatattcctgaagctgatgaagtcataataatccttccatacttctgtttcttcatgtgttcccatgctgcccgtgtcacttggaatgaaccccgcaaatgaactctgtggattatatcccagtcttcatcacttatcctagcaaaggaacgatccctcagaattccagcattgttgaccacaacatctattcttccaaaagcatccagggctgtcttcacaaccttctctccttcttccactgaatcatagttggccactgcttttccacctctccttcttatttcttcaacaaccttatcagcagctaaggagcctttaccaactcctttgaagtcccctcccaaatcattcacaacaactaacgctcctctttctgcaaaagccagggcataggctcggcccaatcctgcccccgcgccggtgaccagtaccacccgcccgtcgaacctcagcggtgagcccatgaataaggcctgcaacgacacacacacgaacaagcagagccgctggacgcgacntgg

SEQ ID NO: 59154 - DNA, 1887 bp, Homo sapiens
gcgtcgacgagaccgagtcttgctctgttgcccaggctgctggagtgcgatggcgcgatctcggctcactgcaacctccacctcctgggctcaagtgattctcccgcttcagcctcccgagtagctgggattacaggcatgcgccaccacgcccggctaatttttgtatttttagtagagacggggtttctccatgttggtcaggctggtctcgaactccggacctcaggtgatccacctgcctcagcctcccaaagtgctaggattacaggcgtgagccaccgtgccgggcacgtttcctttaaagagctttttttttgtttattttttgagacggagtctcactctgtcacccaggctggagtgcaatggtgcaatctcagctcactgcaacctccacctcctgggctcaagcgattgtcctgtctcagcctcctgagtagctgggattataggcacacaccatcatgcccagctgatttttgtattttttagtagagatgggggtttcaccatgttggccaggctggtctcaaactcctgacctcaggtgatccgcctgccttggcctcccaaattgctgggattacaggcatgagccaccacacccagccagatgctgttagcttcaaactaactttcctaagttaactttatatgtatatgtacacatataaattttctaagctttcaaaatgtttggaataaaaacaattattttgcaaatcttcaactgggcagatggttggtgtctgaaatagaaataaataaaagcaaagcaaacaaaatattccaaagtgatagagaatgtccacaagctacttaacaacatgaattcaaggtagagtgaaaaaccagtggtcttcctcatcattctcaggtcaataatttagaaaaaatcccttcagtgctactaagcttcaggctttgtaatgaggactgaaaattccaggggaaaggaagagaaagagaaaggaaagaaatgagtctatgcaaagatcaacatatcattttattaattctgattccttttatcatgtgcttttttatacaaagcactttcaaatacattacattatcttaaatttataataggagtttctttcggattcagtttaaaaatgacaaatagcattcgttgtgcccaagttagaattacaccaaaattaccatgtgctggcacataccatcatcccactggtggctggaaaactgggttgcaggagtgtctgtcactgagatgggccaccaccccagtggccatatggtagagatgagggaaggatggactagaagcaagctgggtcttctgggtcgtctctactcctttttcacttcatcaccgttttccccactgagcttgaacacaggaatctgctgaccatccttgagctctaaaaagacctcgtcaaggtgccacctctgaaaggggccacctctggatgagtggacgtagagaaggccctctgatttggatccagagacaggaatcttcaacttggcatcaacaatgtccacgaagttttccctgtcgatgagcttgagataatggatgttgagaggagggcccagagcttcctgtgcctcgggatggctctgcagctgctccactgccaacttgtaatataaagccctggaatgaaacttttgaatgaggtaatacacaatggcaaagcccccggcatagaacacaccgtggaaaaggatccttgctcccagaggcattgaccgcctgcttcctgcatacttttgccacatcatagcacaactctcttgaaaatcatcaaaggcaagttgtcctgtgagcaacagaagcaccacgctacaaagagcatgacgagttcttccaggcttgggaaagcacgggtaaatgcccgcggtcctgcg

SEQ ID NO: 59155 - DNA, 2811 bp, Homo sapiens
ggtgtgactgaagaaatatcaaatgtttccctagtaagacagcaactcaggactctaggatggaagaaggtgtctgaccgtaaattacacctgcagtgcaaccagcagactaatggggatgaggttctggtacaagatgatgaacaccagtatgtcagacaatgacttgggagctggaatcaaggacatgaccaagagcagcaagaacaaaagggagactgacacattgatcactttctcaacctttgatctcttgagaggatggttcacatttgagtaaagacaggggagtttgttttcagaatgacatactagtctgcaggatgaatttcataactgacattgcaccttggactgcaactaggactttcactggaatcagagaaagagttttgaagaaaactgggcataggctcagcaaaaccaaacagaagaggaacagaaaaagaaacaaaaagcagaacagtcagaatagaatcatggaggaaaactcattagaattcttaagtgatcttacaccgggagatcaggacccatctcagagtgaagaggaagacattgaaaagaccagaagagaatcagaatatcccttcattgatggtctacaaaatgaagtcggagattttgtgactggatataaagaaaaaagatggaaaaataaagatcctaaagacagtttccaaaacgttatgtctatagttgaattagacaacacaccaaagaattacctctctaaggaaggtgataacttgtttgtaagtttgttactgaggccaaatgaaatctccgttacttgtccaatactgactcaaaacctttcctgtgtaacaactgatgactgctctggcatgaaggtagaaaagcatattagaaataggcataccatagcattagacacccaggacctttctgcggaaacttcatgcttatttatgaagaagagagaaatagtagataaaaatctctcacatgaacccattctgtgccatcaacatggaatcagaatgtcagataaagttttaagagaggaacaagtgtatacaactaaaatcaatcactgggcttttttcacaaccaatttatctgatgaagatttacagctgggctctgacagacagccctattttggtagctggcctgcaggacctcataagtttatatgtgaacagagaccaaagaaagatagagcatgtaagttggctggtcctgacagcagggggcaatggattcaaatgatcttcacttcggtggcagcatcagaaccaggaaacaatccagaaatattgacagacaaactactgataggaaatgaagatttttcacctccacctgaaactatggattcattcatagaaacaaacctcttcagaagctgcttacctcaaccggatataccaaagaatgccttagaatcaacaaaaaataagaaaaggaggaagaaaaggattttcaatttggtaccaaattttgacttattaggacagagtcgtatcggtgtaaaagaaagggagaaatgtgacctgttaacaaaaaaccatggactaaaaattactttgggagaagaaaaagatagaatttcagaaaggaacagtgaagaggagaataaacaaaaacttatgacctttgatcatcatccattgtggttttaccttgatattatcaaagctacccctttaaatattgatggacagcgttattctcattgcctgtcatttaacagactaaggtgctctgcatctttatacaaaaattatattccttcttttgtgctacataatttatctagtatttggaagccatcttttacaaacaagaaactgtttttgactttcgaatctcagacaagagtaggtaataaactaaatgatgcagggtttatttctccagaaattttacatagtcatcctgatacttcgtgctctttgggagtcacttctgattttcactttttaaatgaaaggtttgatagaaagctgaaaagatgggaagaacctaaggaattaccagctgaggacagccaagacttaacaagcactgactaccgttcccttgagctaccattatcacaagggtttgcctttcaattagtaaagctttttggatctccaggcgttccaatggaatccttgttgcctgatgactatgtggttccccttgactggaagacactaaagatgatctacttgcaatggaagatgtcagtggagaaaagacagaagaagattggttgaaaaatgaaaattccttgaactttgagttctgctgtcttcatggtactgctgaagatcatgatcacggagaaaagtcagagtgctcagtgccaacccaagggattctttccagagacgtacccgttggataccaaaattagtttggataatctgttcaaccattcttgataagttatctgaataataaaaaaactcaacagaggaggtaacaatttgagcatttcattgtctaatttgaagatgtatgccatactttgtttgatagaagaaagtaaggcacagaaaacttgagtaccttatttttaaaactgcattaggattaaaaggttagcccctatatccaagtattggtctgagatcccatttctagaattctgaaatccaaaaagctctgaaaatcaatagttatttttccaaatgtattcattgtggtaaaatacaccaatataaaatttaccatcttaaccacttttaagtgtgttataaatacattcatgctaccatcactagcatccatctctggaactcttttcatcttgcaaaactgcaattctatacccattaaacaatgacccatagc

SEQ ID NO: 59156 - DNA, 826 bp, Homo sapiens
  misc_feature (1)...(826): n = a,t,c or g
acgttctggagctgagcacggtgagggggagaagggagaaggggactctggcggcccaagccccacacctttgccccagagccacaggtcccacggagtgtcacgtaattccccacatccagaacagctacccatctcaaaccccaggagtcaccagcccttgggccctcacatccctggagcctcagccccctccacacacgtgctgtgaatcatagggggatcaggatactcctgctcacagacacccatctccccctaccaaaaataacgctgggctcctccttccaccctgactctgcctctctgtctgcaggagcctggtcggggtgctccacagaagctgtgcctgggcttgggagccaaggccatgtccctctcccggccaggggagacggagcccatccacagtgtcagctatggccatgtggccgcctgccagctaatgggcccccacaccctggccttgagggtgggagagagccagctcctcctgcagagcccccaggtgagtgagaagaggagttgtgggaggaggagagaagggaagcgatgtcaggaagcatttacagaacaccaaacctgggccaggtagagctctaagcactggggatccagcagtgatcacagacaagctgaaggagcttacactagagtggagtcagacaataaacaaggaatcccaggctatgaagacagtgagaaatgctacaaaggaaagagtgatgtgacaggaagccagggaagggttctcaaaaagggtgccatttaagctagccagggaagannnnnnnnnnnnnnnnnnnnnnnngaaagaattgcaagg

SEQ ID NO: 59157 - DNA, 2393 bp, Homo sapiens
tttcgtgctaacctcgcagcagagaggagttgagggcgatgagagcgggtactgcgaactgccgggcgatgctgtcgctgccgccgtgatacggagagcaacagttccccagcaacacccctccccgacacaggcacacaccccccgacaggcacgcacacccaccccacagtgcccggctcggctgcgcctcctctattggcccaggaagcccacccagccccgccacgcagagcccagaaggaaagaaagcctcatgcctgagccgaggggagcaccatggatctgacaaaaatgggcatgatccagctgcagaaccctaaccaccccacggggctactgtgcaaggccaaccagatgcggctggccgggactttgtgcgatgtggtcatcatggtggacagccaggagttccacgcccaccggacggtgctggcctgcaccagcaagatgtttgagatcctcttccaccgcaatagtcaacactatactttggacttcctctcgccaaagaccttccagcagattctggagtatgcatatacagccacgctgcaagccaaggcggaggacctggatgacctgctgtatgcggccgagatcctggagatcgagtacctggaggaacagtgcctgaagatgctggagaccatccaggcctcagacgacaatgacacggaggccaccatggccgatggcggggccgaggaaaaaaaggaccgcaaggctcggtacctcaagaacatcttcatctcgaagcattccagcgaggagagtgggtatgccagtgtggctggacagagcctccctgggcccatggtggaccagagcccttcagtctccacttcatttggtctttcagccatgagtcccaccaaggctgcagtggacagtttgatgaccataggacagtctctcctgcagggaactcttcagccacctgcagggcccgaggagccaactctggctgggggtgggcggcaccctggggtggctgaggtgaagacggagatgatgcaggtggatgaggtgcccagccaggacagccctggggcagccgagtccagcatctcaggagggatgggggacaaggttgaggaaagaggcaaagaggggcctgggaccccgactcgaagcagcgtcatcaccagtgctagggagctacactatgggcgagaggagagtgccgagcaggtgccacccccagctgaggctggccaggcccccactggccgacctgagcacccagcacccccgcctgagaagcatctgggcatctactccgtgttgcccaaccacaaggctgacgctgtattgagcatgccgtcttccgtgacctctggcctccacgtgcagcctgccctggctgtctccatggacttcagcacctatggggggctgctgccccagggcttcatccagagggagctgttcagcaagctgggggagctggctgtgggcatgaagtcagagagccggaccatcggagagcagtgcagcgtgtgtggggtcgagcttcctgataacgaggctgtggagcagcacaggaagctgcacagtgggatgaagacgtacgggtgcgagctctgcgggaagcggttcctggatagtttgcggctgagaatgcacttactggctcattcagcgggtgccaaagcctttgtctgtgatcagtgcggtgcacagttttcgaaggaggatgccctggagacacacaggcagacccatactggcactgacatggccgtcttctgtctgctgtgtgggaagcgcttccaggcgcagagcgcactgcagcagcacatggaggtccacgcgggcgtgcgcagctacatctgcagtgagtgcaaccgcaccttccccagccacacggctctcaaacgccacctgcgctcacatacaggcgaccacccctacgagtgtgagttctgtggcagctgcttccgggatgagagcacactcaagagccacaaacgcatccacacgggtgagaaaccctacgagtgcaatggctgtggcaagaagttcagcctcaagcatcagctggagacgcactatagggtgcacacaggtgagaagccctttgagtgtaagctctgccaccagcgctcccgggactactcggccatgatcaagcacctgagaacgcacaacggcgcctcgccctaccagtgcaccatctgcacagagtactgccccagcctctcctccatgcagaagcacatgaagggccacaagcccgaggagatcccgcccgactggaggatagagaagacgtacctctacctgtgctatgtgtgaagggaggcccgcggcggtggagccgagcggggagccaggaaagaagagttggagtgagatgataggaaggactatgacaaataaaaaaaaaa

SEQ ID NO: 59158 - DNA, 1684 bp, Homo sapiens
ctggggtttgggggaccgagccgctccgggttcgggatgctgaggagaccgcgggcccgcgccagcctcccacacacacacactctcccggcgcctcggccggccgggcgcggtgtgcaggggtgaggcggtgtctccaggctgaggagggacgcggaggagggtccggcgcggccccgggactggagggtgagtccctcacaaagggcggagcggggctgtcacctggagatcacggagggaagttcatccatgagctcggatttcccacattacaacttcaggatgcctaatattggattccagaatctgcctctcaacatatatattgtggtttttggtactgctatatttgtcttcatccttagtttactcttctgttgctacttgattaggctaagacatcaagcacacaaagaattttatgcctacaaacaggttatattaaaagagaaagtaaaagaattgaatttacatgagctctgtgcagtgtgcctagaagacttcaagcctcgagatgagttggggatttgcccatgtaagcacgccttccacagaaagtgccttattaagtggctggaggttcgtaaagtgtgtcccctgtgcaacatgccagttctacagctggcccagttgcacagtaagcaggaccgtggaccccctcaggggccccttcctggggcagagaacattgtatagcttaccgcaaggatcagactgttgctggacacgacgtctgtgtggagccaggaggaacacatgtggtgtctgtatggctgctctctacctaggacaccagctgccacttcttttgcctcatgaagaactcttgggccagccaaactgggaacctaggtgtctgggtcttgtgacaaccaaagcactttgacactaccccctgccgagagaagaggagtggatgagcctgcgggtttgcctcaagaaacttcatgagggtctcttactaactccattacactctctctcctggagcctcatctccatgtcaagcaggagggtaaagaagggaactaagagcaggtctttcaagccacacccccacctgcggatggatgggtttctctgtaggccatgcaggcctttgtcgcagcaaaccttcccagcagcccttgagccaagtaaaaccagcacaaccagccaccagtggttggtgaggcagtgcccacaaggctcatgttgtatgcctttgataaggccatcttggctttgagtagcagtgttcctcgtcacccatttccccctcaggattacaacacctgctatcaaatcatctaagctgaaaacatgagatgcgcttggaaaggcctagtcagaagccatttcctcttatcatttccctctcctatgcaccagtaaggcccgtccagagccccagcagggagtgggccctgagtccacactgtccctgagtgatccaggaggctgcccacatccccacatgtgcactgtggttccagtgtagctgctgtgagcccactgccactgcctcagaagggagccactgtgaacctctcgagtggctccaaagagcagtggctttttgagaatggcccatacttctggcccggctggatgaagggaatgccgaccctttggcctctccccctccttccatctcttctctctcttgccctatctctctttctacttcagaaaaaaaaaa

SEQ ID NO: 59159 - DNA, 2483 bp, Homo sapiens
tttggacaatgaaatccttttaattgaaaagtatatataaaatggctttagacataaaagataagtattttacattatttcttctgttatatttttacgctttgtgccagaatttacttcttgcaactattcttgctttatctggaacagtttactccgttattgaatatctattagtgtttaatatagaagagcttaataaaccgctaatccgaaaataatggtattcccttgcttttcagacctttttgctgaatatgcttatttatgtccaatgtggaaatctgatcctgttctcttccactctgccagcagttccttttgtactgcttctggtagttcatagaaaacttgaggatcaatgtcagaagggaaagtaattttctcatcaacagaatctggctctctattttctgtaagtccttcatgagagtctgttgctactgtttgcttatggctatctgtagtgtggtttctggagaaaagttgctcactctgcaagtttggaaatgaatgaaaagcagacacagcagggtttgaatttgtaaagtggaatccttgaggttctttaggtccttgacttattcgttcatcttttaatctattatctaaataatatgaataatccttttggctagacatgtaagaagaactactgctattaaagcctgatgttcccggttcacaaggagatacagaggatacctgtttgctactggataaatgatctctaggatttatgggaatatcttgcatttgttttttagaaaagaaagataatactcctctagaggcatgtaatggacaactcacacttcctttcccttgaaatttttccctagattttccagaaaggatttcttcttgaatatctactggaagctgcttgaagacttcttggtcaacaccttcaggaagtgaacagagtgggaattcattaatgtctttttctttagaaaaatttgtggtatctagtggagactccctagttcttgtactttcaattcttccacttggtaggaaatcccggtttgtttctttgtctttgggaaaatcttccatatgagtgtctttcattttaaaactgtgcttgccagagcgtgaagtagttgataatgatggcattaaataataatcaataagccctttcttagcagtatttagtgctttaaggttgcagaagcacacacttagaagggtaaggtgaaatggcatcttcacattcaccatatttcgaaaaagtttcataagtatatcaaccattggggtcatcacatcataatttcctgtccctaatttctgaattacatgtgaaggaatagggcactgacgactctcacgaccatagtgcttctcagaggaataccgacggattattaatctcactgtatgaggcttcctttcatcttggcataatctgtttaaaagactagcaagtagttcttcaatcttatttttagcttcaacttcagatgaacattttttaaatgaatcttcttcactaaaggactgaggtggtcctgagagtatcacaggggagttatcctctccaaaactgagcttttggatacgctgagcaactgaaattcctaattctttttctaaaattttgggtgaaaaggtttggagatcacgcacactattgatacccagtgcttcaagacatttggcagttttatagccaataccaggtatttcctttatgtgattcaaactatgaataagatgttgacaactttcaggtaataagactgtttgttgatttggtttaaagacaccagaaactaattttgccaacagtttattagaagccactccagcacagccagtgagccccaactgattatacatggcttcccgcatctctgctgcaatctgagatccaacaagtagtctgatgtgcaagacgtcaagcaggtttatagactgattattgtatacatgacccgacacagtcaccgcagaaagttcatcactttgcagctgctgtagtctcttctcaaccatttctgttagatccacaaaattttcatcaaatccaagtctctcaacaactggactaaattcttccagtaattctgtaaccttataagacatttctctgtagcgggtcaggtcttctccattaactaataccaactgtggacacttttcttttgcatctctgacattcataagtttcttaactccaagtttcctagcttcatagttgcaggtaaccaccaaatatttctgttgaacccctaaaggtttgtcttttagctctggatttgagatcatttctacttgtgcataaaagcaatccagatccacatgtactatgactctggatgaagcatttggtgtgggcaacacttgatcatgaactccctgcgagctggctgccgcccccacgtccgccagttccatggcccaggcctcggcgtcttcctcgtcgtcgccgccgccttcctcctccggctccacccccagcttctacgaaa

SEQ ID NO: 59160 - DNA, 3568 bp, Homo sapiens
tttcgtctgaggtggcagcagggggcgggacgcgcagcgctatggcagagggcagcggggaagtggtcacagtgtctgcgaccggggctgccaacggcctcaacaatggggcaggcgggacctcggcgacgaccagcaacccgctgtcgcgcaagctgcataagatcctggagacgcggctggacaacgacaaggagatgttagaagctctcaaggcactttcaaccttttttgttgaaaatagtctgcggactcgaagaaatttacgtggagatattgaacgtaaaagtttagccatcaatgaagaatttgtaagcattttcaaggaagtgaaggaggaacttgaaagcataagcgaagatgttcaagcaatgagcaactgttgtcaagatatgacaagtcgcctacaggcagcaaaggaacagactcaagatttaatagttaaaaccactaagcttcaatctgaaagccaaaaattagagataagagctcaagttgcagatgccttcttatccaagttccaactgacttctgatgaaatgagtcttcttcgaggtacaagagaaggacccattactgaggattttttcaaggcactgggaagagtaaaacagattcataatgatgtcaaagttctcttgcgtacaaatcaacaaacggcaggtttagaaattatggaacagatggccttacttcaagaaacggcttatgaaagactttaccgatgggctcaaagtgaatgcagaacattgacacaagaatcatgtgacgtatctccagtattgacacaggcaatggaagccctgcaggacagacctgtcttatataaatataccttagatgaatttggaacagccagaagaagtacagttgttcgtggatttattgatgcgctcacaagagggggccccggaggtacacctagaccaattgaaatgcattctcatgaccctttgaggtatgtaggagatatgttggcttggctccatcaagctactgcttctgaaaaggaacaccttgaagctctcttaaagcatgtaactacacaaggtgttgaagaaaatattcaagaagttgttgggcatatcactgaaggtgtgtgcaggcctctaaaggttcgaattgagcaagtaatagttgctgaacctggggcagttttattatataaaatttctaatctcctcaaattttatcaccatacaatcagtggtattgttggaaatagtgcaactgcattattgactaccattgaagaaatgcatttgctaagcaaaaaaatattcttcaatagcttgagtcttcatgcaagtaaattaatggacaaggttgaactcccaccacctgatcttggaccaagttctgcactaaatcagacactcatgttgctgcgtgaagttttagcatctcacgattcttcagttgtaccattagatgctcgtcaagctgattttgtgcaggtattatcatgtgtcttggatcctctcctacagatgtgtactgtatcagccagcaatttaggcacagctgacatggccactttcatggtcaattcactatatatgatgaagacaacattagctctatttgaattcactgacagacgtctggaaatgctacagtttcagatcgaagcacatttggacacacttataaatgagcaagcctcttatgttttaactagggtaggcttgagttacatctataacactgtacagcaacataaacctgaacagggctctttagctaatatgcccaacctagattctgtgacactgaaggctgcaatggttcagtttgatcgttatctgtcagccccagacaacctattgataccacagctgaactttcttctaagtgccacagtgaaagagcagatcgtaaaacaatctacagaattagtctgcagagcctatggtgaagtgtatgcagccgtgatgaatccaatcaatgaatacaaagatccagagaacattcttcaccgatcgccgcagcaagtgcagacgcttctttcctgattatcttatttcattgtgttagcaaaatatgacctccctaaaacactgaaggttattttttattctttgaatttttactctataatttgatagttacagttttctttgtatcataagattgtaagtcccgataatttttttttttttggtctcagtaacagggaagtaagtaacatgttgacctgagctagtattgctgggtatctactctaaaggagatgatctatttttttgctagccatctttccagctctgcagttttcactgttttcaggaagcataaagtagtatgaaaggtttgaaaaattttttttacaaaactagttctaaattaacagcttataaaaaattggcctaaatttaataattagtataaggatatgacctaataaatgtctccttacctaaagattcatttgctttcttttaatatgagtaggcatacttagtagcttttctgaacctagcctatgtctctgtccccaaaatagctgcccttaaagagttgttagcagagagaaaaataacagtgaatgtgctcctggtgtatatggcagtgaatctcctttctgttctactttagcatactatatatatttgactgtgtacattcttatgcaattttaagtatacactcagcaataattagaaaaaaaggagagagaaaagtgatttaaacagggtggattccactctgtgggagccttcgatggaactcaaggtggagctcagcctttccaatgagctctaagcatgtagatagcctgagctgtgtctaagcctggtgtttaaagatgggtatttgtcatacaatatgggtcctaaatccaaccaactacacattttatctggtgttcaaaccaaagaaacaatgatctactcaaacattggagaaaaaaactgccagaggaggagttgccaattggcagtgtgtcttatctccatgttgtaactggactctgactttagaccattacctattaggaagattaaaaatgactgtatttttaaaggaataaatcccagtgtgcctgatttgacattcttgtcagcaaaaaaaaacttaatttctagtaaatctataaaaatggggtaagtccctaaattacaaatgagaaaattgaaggcacaagggaaaaaaataacctagtttggaaatattttggaaaagtaataacataaaactagtatttgtagaagattatgtgttgtatataacaaattagtatttatagaatatgacctatttatctgaagtttataattgtttatacctaatacagttctttttggagtaagaatgattatataatccgttatcccatttgggtataaatcctgtatttttagttttttccctttgattagtatgtgttacatataaagacagaaaataaagtataaatcaagagcttaaattgtatataatttatttctacagagaaagaagattgataccttgctatgagtgaattcctttgttttatagggaaaatttattgtgctttttacctggttttttcaaataaaatattaaaatattaaaaaaaaaa

SEQ ID NO: 59161 - DNA, 1941 bp, Homo sapiens
gcggcacacctctcctttgggcctagcagggccagagaaagacggaatcactctacccactcagcccggagaaataggggagtgggggcccaagaacgagaagacgagaacgcgtcgccctgcgctatgtcagaatggggcgggtgtgaggggaacagctctcttgcgatcagctcaggagtatgagcctcccggaggacggcatgagttctggacacttcaggagtcctcagctagtgacatggtcgatatggataaactcataaacaacttggaggtccaacttaattcagaaggtggctcaatgcaggtattcaagcaggtcactgcttctgttcggaacagagatccccctgagatagaatacagaagtaatatgacttctccaacactcctggatgccaaccccatggagaacccagcactgtttaatgacatcaagattgagcccccagaagaacttttggctagggatttcagcctgccccaagtggaaccagttgacctctcctttcacaagcccaaggctcctctccagcctgctagcatgctacaagctccaatacgtccccccaagccacagtcttctccccagacccttgtggtgtccacgtcaacatctgacatgagcacttcagcaaacattcctactgttctgaccccaggctctgtcctgacctcctctcagagcactggtagccagcagatcttacatgtcattcacactatcccctcagtcagtctgccaaataagatgggtggcctgaagaccatcccagtggtagtgcagtctctgcccatggtgtatactactttgcctgcagatgggggccctgcagccattacagtcccactcattggaggagatggtaaaaatgctggatcagtgaaagttgaccccacctccatgtctccactggaaattccaagtgacagtgaggagagtacaattgagagtggatcctcagccttgcagagtctgcagggactacagcaagaaccagcagcaatggcccaaatgcagggagaagagtcgcttgacttgaagagaagacggattcaccaatgtgactttgcaggatgcagcaaagtgtacaccaaaagctctcacctgaaagctcaccgcagaatccatacaggagagaagccttataaatgcacctgggatggctgctcctggaaatttgctcgctcagatgagctcactcgccatttccgcaagcacacaggcatcaagccttttcggtgcacagactgcaaccgcagcttttctcgttctgaccacctgtccctgcatcgccgtcgccatgacaccatgtgagccgcacaggtcacactagagaagctgcgctggtatctttcctggtcgtgtgctgaggttgggacaattttttcctcttttgacttcagcttgcatatggggttgaagcagcccactggagccaagttgagggagattggaaggaaaagagagctgggtcttcccgtggggctttttcatatttcttaccttcacttctccactgtccagacccgtttttttcaacctccacatgggttgaattccagtgtggcaccccatggctgcccttccccatcccccccctgcctctgaaataggacatttttccctacagtaacaaaacaggaatcaaactcaaggctgtgaacaaacatacgctgctttattctttccaatttttctcttgttttctaagaactcttatccatatgtttttaaaataagtacctaaaagtggtttgatagtgtcctaaacgacttttttaacttcctaaatggaaagagcataacaatgtagttgattggtaagatttacagggatttggtttctgagtttgaggcacattcccagtgaataagctgagtcccataccacactcaaaaggttttaataaatctaatcctatttcttcttaaaa

SEQ ID NO: 59162 - DNA, 2909 bp, Homo sapiens
ttttttttagtgctaaaatataacatttaatgtcacattgttgggcgactcccatttactttttccatatatacagtgaagacttacaatagctcacaatgcagttaagaattgcattttaataatctcaaactaccatctaatggaggaaagaataagtttgtcagaaaaccagtacagccattttgctattaaaattttcctttttaataatttatttaaataaggtatttgaagcagtttagaaaaaacaagatttgtattttatttccttgtaaaaatctttacacatgcagacaaaccagtgttaagaaagtattcaccatcatttaaacaaataaccacttaaatagaacagtgtctgcaattttatctgtataaaaataagatacatttttacagaattcacgctccagttcttatagcaataaacaatacacaactataataaagtacaattgaacctgaccatggtttttaattagatactgctagggcattttaatgtgcaaaaaaattaacatagttcttttcaaaagaaactgtcctcagtgttctagagacctagagggtttcaagaaatcaaatcctaatcagtttgcgtttaatgtttttgattgagtccatacatcacactgtagataggcaaaaccaagaactgatgcaggctcaaaggaagagaaagtcagcgcctgtgcctgccatgtcctgagcgactgccaccatggtgcttgcttttatgggacctctcaaaggagcgagatcgttcacgcctgtccctatgatgtcccctttcatgcctgtgtttcttggctgcatctgagtgatcccgagacttgctctgagatcgagaacgagattttttccttttatgaccatgtctgtttgaactttttaaatcatctctggtatgcttggccttaaggtgaggagaaccatgattatgatgtcttcgagggctttcactgtgactgcgggacctgcttcttgatctcgagctgtatgttccagatcgactccgcctattattatagtgtcttcttggagtatgtgatctagaacgtgatcgtgttcttgacctcgatcgacttgcacttctgctatttctacttctcttgctgtcttttcttacaccattgtaagggcttttggaagcctgttgtctatcctcaggttcttttttgactgtcttcacattaatggagattggtgatttctcttcagcttttacttctcttggtgatgatggcttggaggctggagaaaatccacccagggttgaaagggctggagttccatccggattcaatccctttgcttttaatttggcttcttgtaaggctacttttcttttttctacttctttttccagtaattcatagtttggcttttttctggtataaagcctaagtgtttctatgcagatttcctggatttcctcttctgtagtaccaaaaagaagaaaccaatggggacgagttggcaacggaatctgaagtgctctagctgcaaggtagatgcaagcacatgctatagtctctggttgaaatcgaacaaacacattggttcgaagactgtcattcatgtaattcctgaaaaatatttcaactataagcttgcatgtaaacaaaccagttcttctgaagcttacataaaattggagactcaatctactttattcttttttcttctcttatttatattcacatcctcatattctagcatataacaactcttaactcaaaaaaatcagtaagcaataagaatttaatactaggaccatatgcgattttcctatatatgagcgaagcccttttaaattatttcatattacaatccaaactagaaattactcctaaaaagttaatatatttctgtaaaaagcaatgcttttcaaagtcaattctgacacgattagtttcagaaatgataaaccactccaataatacttcaagccattaattactgaccatctctcctttatccacaataaaagcagtgtcaaccaagttcttttcaaaagctcaaaataccgttaacaggggtaaaaaggcattttcagtaagtaccaagttaaacttatattaagaaagctaagatacttagaaaatctagatagggaaataaagagcaataaacacatataatggccttgtttacataccttttttgtgactaggtaaaagagataaactatttcagttaaaaaattgctgaacttttattaatgaaccctccccacaacattcctaaactatcaaagaaattttacagatcatttaaaaggttaagctgaaattaaatggactatttcttaaaaatcctaaaccatgagaactgctataatccattttatgcaacacatacttaaaatgtcatgcattttataaaaataatgagacttttctaacattacaaatatttactgagtccaaaagaagcatggcagtcataaaaaggacatcttgctgggaagcccagaatataaaaattacttcactaagtccttcacatcaatagtcttaggaaacagtagttgtggctgaaccacaaactccttggcttgacctttaaataagccagcactccaaatcacacatctgcatctcaagaagtccaagtgctaaagcatttaagcaatattatagtaacatctcttttaaaaatgaagtgcttcttgcttctaatattattacccgcaatacagccaagcagttatataaattaagccagtgtgggaactggtgcccattttaagctgcaagtttgtcgtctcctttggtagtattcatgctatacacactaaaaataaaaatttagtcaaactcctaataaaccatttaattcataatggctgcacaacaaatctatcaaaaatgaactattcattttgatagttacaagtatac

SEQ ID NO: 59163 - DNA, 1359 bp, Homo sapiens
  misc_feature (1)...(1359): n = a,t,c or g
tgaattgcatatgaaaattatagtttattgtctatacaactgaaggtttaactcggactcctgcttctgtcggagctgtataaagaagcaattcttctcttagaacaaataagcacagtacactattgtaatctaagaaacaggcactatttatgtattggaaagccttgctctcaatagggctaacagtccaatggcccataagccactattttagcagctgtagaaaagaaagctgtggaagtcacaaggaatgagatgctaaaagcaacagagacagatgatcccaacaccagcgggaggtttcaagtcccagctgctgcccctgttagtttagcaagcaagactcgtaggttgggaccacgtacttaatgttgataaaggcattttctcctccgtagcgctcgaaggcctccagtgtctcctggatcaagtccccaatgttctccctcttctgctggctgtagtcaatgccgtctccggagttcacattcatattcttaaagatgttcaggacagggaggatttgacggtaataaggcaccaaggccttgcccaccatctcagctgacacaaccagatgctggaggaccttgagagtgacacagatgacctgtcggtttcggaggttcaaggcattttttatcgggataatgagctgtggaaggacaggtaggatcttgttcccaccgtgttccagcatgtcgtggattccttgccgagcaaaaaactcatagggaaatgtcatttcacaaagcccatcaaaaaacagaggcagataatgatggtaatccagcttctcaatttctaccttccaggcgattttgtttcctttcgaatcatgctcaagggcaattgggaagtcacctcgctcatagaattttcgaaatgctgtgggcttggttggtctttctttaaatgcccctgcagctggagggcctctcacgactgagtttttcatcatggctttgactgtgaaaccctcagaaaccagagagtgaggctggtgcaccgggagcggctgttgtgccagcagcttggtcctcttcggcatcttgtctgggcatttgtttaagctcagggtctctttttctgccaccatcttcctagaaaatgtcttgttctcataaaaagtgtagtaaaagaatcagtgggctttacggatgtgagcaggaggtcttcgcctctcacctcactggccggttgtggtgcggttcaggacccatcgagacccactctctgtggggctctttcaggaaaccgcagcaaagcattaaactctaatggaaggcacctggtgagggtggctggctccagaattccgccgcacaanctagtgtctcagttncccctccgccg

SEQ ID NO: 59164 - DNA, 1091 bp, Homo sapiens
tgcagcaggggcagcgcgtgcggacccggggccggcgcgcatgcgccagcgcgacgcccttggaggggtgcgtggacctcagctacccccgcacccacgcggccctgctgaaagtggcgcaaatggtcaccctgctgattgccttcatctgtgtgcggagctccctgtggaccaactacagcgcctacagctactttgaagtggtcaccatttgcgacttgataatgatcctcgccttttacctggtccacctcttccgcttctaccgcgtgctcacctgtatcagctggcccctgtcggaacttctgcactatttaatcggtaccctgctcctcctcatcgcctccattgtggcagcttccaagagttacaaccagagcggactggtagccggagcgatctttggtttcatggccaccttcctctgcatggcaagcatatggctgtcctataagatctcgtgtgtaacccagtccacagatgcagccgtctgatgaggccacaacccctaggcccctcaggagctttgcagagaggaggacgtgtactccaggcgaggcctctggacctgtgttcctgtgccaaagtcctgtcaggctggtgggcaccaggaaaggcctgcaccctcttcctgctctcccaggaagccagctccctgagctcctgagccagccggaaactcttcctccagccttccggggagaacatccctcccattctgggaaaggaaagcagcctccagggaaatgttttctgccttcctgcttctagaaccacctcaggtactgatgaaccccacttagcacagctgaaggggtttgtgaatactcccgcctaaatcccttctacttcactcctcaggggagtgaagtgccttaagaaacaaagccctgtcctaatttatctagcttgtcagtccggtcttagagataccctctttcctgaagtgaggcgtgcctgtagaaacactatgtggtcagcctgtccccaaggagatcttgtgtctcctctccatctctgcctttgttaccagtgtgcatgtgtttgtgtgttttttaataaaatattgactcggccagttaaaaaaaaaa

SEQ ID NO: 59165 - DNA, 3477 bp, Homo sapiens
ttttttttttttattgaatatatacaatttatttaataaattaatgtcattcaaaatacagtgccagaacatggtgcagttgaacatgctagtaatgtttgtcatgaagcacctgtgctcatgttagattggcggcgccccactactgctagtggttcccgggaataaatgccagagcagcgctagtgtatctgctcttctgcacagctagtgcagagaattcctgaacagttccccttattaatcctaacccccacacgcacacaacaggttaaaaaaaacacaccctggacaggcttaacagatctatacacaatcactctacagtaatgcttgttattaaattaagatgtaatgacctggttaaccgactctaaatcttgaagatggagaactacatcagcagcagatagttatatgcatgagccaatgttaacataatacagaaagtggaggctttttctgattaaagctccacgcagacccgcacaatgagtggctggcaattcttactgcaagcccagcaacttaagtccacacctggtaaatgaccagctgactggaagacctgtattctagatagacaagtataagttagtgaaaagagaatacatgcacctaatagtatagttagactgatcctgcagtcatagctttccctgtgtaataccataaaattatggaagatcttcctcaactagagtataggatttagacatttctataccaacacggacattagtgttaagtgcagttgaattaattacactgaaaactgtattccaggacttcagaacagaagcacgggaatgaaacacacatactaaaataacctcagcacaatttgtgatacatcacactaggaacaggaaactacttttataaatgaactttttgaactgtacatacacagggctaacaatgttagataatccagattcttatactctcatgattacacataaagtttctcaattattgaataatctatttcatattatggaagcatatctttctgtaagactcactgatatatattatactgatgcaaatattaagtagggcataaaaataaaatttatcaaagatagaattttatgtactcatatttagttctttcatagcctcttttgtttagcaaagaaaatgacaaagcacataactcaggcgtgcactccctgaacttccccactatacaggtggtagtgcaaccatttctccatccagttcaaactcttctgtcccatccgttgaaaaaagataagttggtggtttccatggagactcttcaaggcaggatggatagagtttccccacagtgcatcgaaaatctctccccaagtcccacagtacacgttcagatatatgctgccgcagagaccaccggtcaagttccaggtcatattggtaggtgacgtatttagctcgctcatttaagtgggtttctcgcataaacacacatagagaatttgagatcacaacagctctaacacaggggtcagagtacctcttagcagggatgttggctgccattttccactcatttttattcacatcataaatttccacagttactgaagacccatctacagtgccagaggggagtcttatgccggaattggtagcaatatgcaaccctccaatatagaaaattttatcaccaaaagctgcagctgaagcaaaggacctactagtctgtctcatggccatttctacccatgagtcagaccttggaaaataacagtacatgaggttcagtgtcatcacataaatgcagtcatgaaccacaactgctgcactccattgccaagcacaaggtaaagggcttaccatcgtccactcatctttctcagtgtcgtatctttctacggtcctccgattaagttctccacctacgctatctcctccaattgcatagatatagccttcacagcaaaccaaagatggctttatgcggacaaaaagcattggggtctttggaaaccaggtattttgctgtgcatcaaaccaataaaagcaattcacagttctgaaggcagtctgaagtttgcttgttttactgtgatttgtttttgtgtttttcagaggaacttgaccccctgctatgtagatatcattatcaggagttacaacggtcccaaccttatgcaaatcagctggtgggctacataacttgtaaactttttctgcttgggggctgtaacagacagaagagtaaagactacaaggattttctgaagatgcttcaatgaaaatcatcatttcctctttagtcatcccaagtcttggtttgaaaaacttgggcatggacttatacagaccttgaaccaccactgacttatcattgggtggcagaccttgaaaccaagctctctgtgttacttctgaaagtgcatcaattctgatttggctaagaacagaagacaaatactgggatcgtgattctgtgttatactctagccacagcatagcagcttctcgaacggtttcttccttttctacatttaaattgtcgctgctgagaatatctatcagtaggtcatgtgacagctgcatgaacgcgtcctgatgatacacagcagtgaacttgtgctccaccattcttttagccctctgttttaattcctcccaactgaagagatcagcaaaactcaacaatcgtacacaattctctgcatttatttttttaattaaatattctcgacaacgttgtaacacatcttctacctgtaggaagcaagctgtttcataaagctgttctacagtgctgtcattcattgccaagttacccgtgtatgcataagttattattatctgtaaggtggcagcatcgacattcctcaggtgtacatgggtttgtttgctttcacttagtccactcataaacatggccctgaaataagagctacatgttgcaagaaccatcttatgacaagggaattcagtgccctcaacaattaacactatgtcagtaaacaactgctgttcataaaacagtttcaactgttccaacaatgacacagcatattcagtattgatctgcctctcgtcttgagtggacatgactgtattccattaatatctccaggaacagattagaaaagtccgtcttactgatggaaggtcaagtgaatacttcagaaataaaggagaacctacttgctgttatctgcagcattcagtaccaagactgacacattcactaatgagtaatatcttgttacacagacttagaatcactcctaggtcatcctgtgttaattaggttcttcagagtttttcaacacagtctgcagacattgtgctcaaatctgcaattgtgcagctcatgagtgaaagagaaaaatacacgaggtagattttgtggcaacatcctatgttcagcggatcctgtggagtaaccgcgtccctcggtccggaggtgtgggatccgctccagccggtggccccgtccacactgggcccctccggacgaaa

SEQ ID NO: 59166 - DNA, 908 bp, Homo sapiens
gtgactgagagcaacaagtttgacctggtgagcttcatccccttgttgcgagagaggatttactccaacaaccagtatgcccggcagttcatcatctcctggatcctggttctggagtcggtgccagacattaacctgctggattacctgccggagatcctggatggactcttccagatcctgggtgacaatggcaaagagattcgcaaaatgtgtgaggttgttcttggagaattcttaaaagaaattaagaagaacccctccagtgtgaagtttgctgagatggccaacatcctggtgatccactgccagacaacagatgacctcatccagctgacagccatgtgctggatgcgggagttcatccagctggcgggccgcgtcatgctgccttactcctccgggatcctgactgctgtcttgccctgcttggcctacgatgaccgcaagaaaagcatcaaagaagtggccaacgtgtgcaaccagagcctgatgaagctggtcacccccgaggacgacgagctggatgagctgagacctgggcagaggcaggcagagcccacccctgacgatgccctgccaaagcaggagggcacagccagtggtgagtggactccgtccctacacctcacctcctgtcgggggcccagggagccagatgtcataggagttgccttggggcctcacttaagcaaccaggactactttatgtatgtcactcacacaattgtagcagcaacccagcgcagtggcagcagtggttctcccccattctgcagacaggacacagggaagctgagtaccatggccacacactcgcagctagtgaagactggaaccggattggaacccaggcaggctgtctccagcagccattgatttttaacccttcctgcctcaaagaccat

SEQ ID NO: 59167 - DNA, 1631 bp, Homo sapiens
  misc_feature (1)...(1631): n = a,t,c or g
gcgcgcgtgagtccgcccccccagtcacgtgaccgctgactcggggcgttctccactatcgcttacctacctccctctgcaggaacccggcgatatggctgccgctgtgccccgcgccgcatttctctccccgctgcttccccttctcctgggcttcctgctcctctccgctccgcatggcggcagcggcctgcacaccaagggcgcccttcccctggatacggtcactttctacaaggtcattcccaaaagcaagttcgtcttggtgaagttcgacacccagtacccctacggtgagaagcaggatgagttcaagcgtcttgctgaaaactcggcttccagcgatgatctcttggtggcagaggtggggatctcagattatggtgacaagctgaacatggagctgagtgagaaatacaagctggacaaagagagctacccagtcttctacctcttccgggatggggactttgagaacccagtcccatacactggggcagttaaggttggagccatccagcgctggctgaaggggcaaggggtctacctaggtatgcctggttgcctgcctgtatacgacgccctggccggggagttcatcagggcctctggtgtggaggcccgccaggccctcttgaagcaggggcaagataacctctcaagtgtgaaggagactcagaagaagtgggccgagcaatacctgaagatcatggggaagatcttagaccaaggggaggacttcccagcatcagagatgacacggatcgccaggctgagtgagaaatacaagatgagtgacgggaagaaggaggagctccagaagagcttaaacatcctgactgccttccagaagaagggggccgagaaagaggagctgtaaaaaggctgtctgtgattttccagggtttggtgggggtagggaggggagagttaacctgctggctgtgagtcccttgtggaatataagggggtagtgggaaaagtggtactaacccacgattctgagccctgagtatgcctggacattgatgctaacatgaccatgcttgggatgtctctagctggtctggggatagctggagcacttactcaggtggctggtgaaatgacacctcagaaggaatgagtgctatagagaggagagaggagtgtactgcccaggtctttgacagatgtaattctcattcaattaaagtttcagtgttttggttaagtggacctgaagccattctttttttttttcaaattatactttcgtctatgacctgctttcctctttgaatctaagctggtatagactccactttcccagggtaacaaactatcctcataacactgtggaaactggcatacctttgttattttccagtgatattcagactgacatggattgactgtcaatggtaaagtttgtctattttccagtccttaaaactcaatagcagtattgatgaatatattgaaccaacattgatggaccatggtgtaattattttccatgctttgtgagggtacacatagcaaattcttaggttttactgatatattctgtgacttggatttacacagctaganttccnccgcnctgtcctaatggtcctttattnngncnctncaaaatgttttcaaat

SEQ ID NO: 59168 - DNA, 1616 bp, Homo sapiens
gagcgccggcgcgggaccgagctggcggcgggcggcgcgcgcttccgaggcttcctgctgcttctgcccgagcccgcggcctcacgcgcgccctctcccgtgccatggcctgcaggcaggagccgcagccgcagggcccgccgcccgctgctggcgccgtggcctcctatgactacctggtgatcgggggcggctcgggcgggctggccagcgcgcgcagggcggccgagctgggtgccagggccgccgtggtggagagccacaagctgggtggcacttgcgtgaatgttggatgtgtacccaaaaaggtaatgtggaacacagctgtccactctgaattcatgcatgatcatgctgattatggctttccaagttgtgagggtaaattcaattggcgtgttattaaggaaaagcgggatgcctatgtgagccgcctgaatgccatctatcaaaacaatctcaccaagtcccatatagaaatcatccgtggccatgcagccttcacgagtgatcccaagcccacaatagaggtcagtgggaaaaagtacaccgccccacacatcctgatcgccacaggtggtatgccctccacccctcatgagagccagatccccggtgccagcttaggaataaccagcgatggattttttcagctggaagaattgcccggccgcagcgtcattgttggtgcaggttacattgctgtggagatggcagggatcctgtcagccctgggttctaagacatcactgatgatacggcatgataaggtacttagaagttttgattcaatgatcagcaccaactgcacggaggagctggagaacgctggcgtggaggtgctgaagttctcccaggtcaaggaggttaaaaagactttgtcgggcttggaagtcagcatggttactgcagttcccggtaggctaccagtcatgaccatgattccagatgttgactgcctgctctgggccattgggcgggtcccgaataccaaggacctgagtttaaacaaactggggattcaaaccgatgacaagggtcatatcatcgtagacgaattccagaataccaacgtcaaaggcatctatgcagttggggatgtatgtggaaaagctcttcttactccagttgcaatagctgctggccgaaaacttgcccatcgactttttgaatataaggaagattccaaattagattataacaacatcccaactgtggtcttcagccacccccctattgggacagtgggactcacggaagatgaagccattcataaatatggaatagaaaatgtgaagacctattcaacgagctttaccccgatgtatcacgcagttaccaaaaggaaaacaaaatgtgtgatgaaaatggtctgtgctaacaaggaagaaaaggtggttgggatccatatgcagggacttgggtgtgatgaaatgctgcagggttttgctgttgcagtgaagatgggagcaacgaaggcagactttgacaacacagtcgccattcaccctacctcttcagaagagctggtcacacttcgttgagaaccaggagacacgtgtggcgggcagtgggacccctagatcttctgaattgaaacaaataatcacattgac

SEQ ID NO: 59169 - DNA, 2356 bp, Homo sapiens
ttgtaaatgacattacatcttttgtattatccaatacacagtagatactcagaatttactccaatgaatgcatgttaaaaggatttgtacagacacaacactcttactttcaaagagcagaggaacattttatatagtgaacacatacacactgtggcaatgtaaaactacttaaggaaggaaaaatatccccctccccagccaggtactgagacctggggctaaaattttttgtcagtcagcccccatccccatcccttatcttcgagtgaccttaccaggaaacctggctttggtggaaaggagagctgtggggcttggggagcctgatgccttttcttttgggaggaaaggccacctgcacaatccacaggacaggagtggccagcagctatcctgagctgaggctccagaagagttcagatccaagagagcaagggatgaatggaaggaaagtcccacccaccttcatgtgtaaagtgattggcatttactcaaatctaaatctactcctctcctccctgcaatataccattgagcatgtgccagagtaatggttctgaacaaaagccaacacagatgtcagcctgggggcactctcagcctaaggaagcccctacagccgagccctcagccctaatgacttaggcagtaggttaggcaggagatgtagagttggtctggctcactgatttcactgtggaaatcttctactagaatttgcaaagactagatattggggaaaggttcattgatcttaagatcccaagacacacagcctagtacctaagaattttagtatatgtgggagacagaagtggagaaagctaaagaattacagccatgcctcccaaatgattatgaaaaggagggcttgtccaagctacctctgggccttaaggatgagatgagggtaggagtagggggatacatgcacccagcctgttggagaatccaacatgaagactattgtcccttgagaacctaaggcaaaagtacaaggaggggaaatactgggtcctttacctgaaacaagatatgggcctcccctgcccctcagaccctacagctccttaggctccaggcctcaggcacaagagatagagaatcatatctgagccttttgcccttcccttagctccaaacaagggcaggggttgaaatgtgagtgggagagaagggatcatcagacacactgtttagcacctgaaccacatctcttcctaaaccagaaatcccaagagcagaaagaaataggagcaaagtgagagaggggttgtgcttccatcacattaaataggagacttcgtggggttgggcaagggttgtttcacatcaggacatcaatgactctggtcaaggtgaggggttataattagcaaagcttcatgtgctctccctttctttattcatcctgcttccgtttcggctttttggggttccgggaccgactcttggccttgcaaagagggcatataggtgcattccggtgaatttgctggtgacatgacaagcaggccttcataggtgggggctgctgcctgaaggtggccgtctgccgagtatcctgcttcctagccacttggagctgttgggcggcagcggctgcagcggccagggactcagggatggggggctcctgaggttctgtctgccattctgctttctgcttctcaaagtaatccaaggaaagcttctcctcttcttcacacaagtcagggagcctctgcaggcccagagtcatgcgcagggcatccacatgttctttcagtggcttatactcatcatgcagcctccttgtagactctagcagcttgtttaggtcattctcagattgtttgatagtgttttccatcacattgatgtcagcgtggatcagtcggagttcctccacatgggccatcttctcctgtagcagaaggtccatctcctgcttgtattccttcaggtgcctttcctctgactcaagtgcctcaaactcagccttcaaacgagccttgatcttctccatctgcagggtcttgttcctgcaatttgcaaaaagcaggaaacaggccagcaaaagaagggagaaaatagaaatggagccaggactttttttctaagccatctttacaagcttccccctctccaggcagagccaacctgaggccatctcaaaaaagaaggccaggtgcaatggctcatgccagtaatctcagcaatttggaagacagaggcaggaggatcacttgagcccaggagtttgaaaccagcatgggcaacatagtgagaccttatatctgatctctttaatgctttccaatttgcacatgatttcttgctcatctgccgcgaaatcgtcgacccggaaatt

SEQ ID NO: 59170 - DNA, 1392 bp, Homo sapiens
gcaaggtaagaatcaccactcatctttaatataatgaaaactggaaaatcaaaaaggtttatgtgaacactaagtcatgtctgggtggtgggatgacaggtgatttaaaaatttttctttattcatatcaaatttttattttttctacagtatactattagtgtgttatttaaatagatgtactacttaaataattttaatagtaaagaagatactctaagtaaatacatagagaaaaatgtaaggaattcccaaggcaccccaggttttgtgttaaaatttcagatgaaattaagtaaatgtttaggataataccagatccttctgaattctcatctcatcgacttcattttcagcatactgaggatctctcgcagggtccttgatatctttcagcgtgttaatactctttggtggaaagagcttttcatacacttttttccacaactccataggtgagtgggcatgaagctttccaatgtcattttcaggaacaggaggagatcctatttgaccgaaagaatccaatcctgctgtgataaacagcggtttattctgatccacacatattgatttgcttttgtcaatgccaaatgccaactggttgataactccacgtaattttagtaatagagcttctgatttactggtaaacattaatgatgctccataataatgtgcaacaaatcgaagtgtcttgcatattacctttctcttctcagactcaaaatcctgaaaaacatcatatttacttccaattatgaccagaggtaccggaaatgggtcaattaattcatgatcctgaggatgatccttcggcatattattccagatcttctgtctcatttcagaaactgctttagcatttgtctttcccagtttcattatcactttgtctacatggctttttgtggcttgcaagagattttccatggtgggccagagatcattaggttttgaaagatccagaacgagaacaagagaaaacgtccgtaaggtgtcacctgtgatgggtatgctgattaagtccaataaagaggttcctccaccgagttcccaaaagtgagcgatatcttttggtgtgttgtgcccttttgctcttcttccatatgtatattccaaagctaaggttggttttggtggttcatctctgtcaagacaccttagaataatagtagtctttcccccatttttactgccaatgaagaaaacagatttttctgcaatttcagctccatcaccttcacttccattaattccccttttttccacttcagcttttgcaatttcccagagagtttcactgggcatcgtcgacggcctggctgccgcaaacgtcacaggctcggagtagtgaccagcctagaatcaggcggcgagctccgctcgtgc

SEQ ID NO: 59171 - DNA, 1042 bp, Homo sapiens
cgtgcgcatgcgcggcaggcccttcgggacgagctggaggcagagcgtgagtacaaagtgatcggcctcggccgcacgtagtagcccccctactccccggccaagtcagggcctccctcttcccgcggagtcgcaaccacgggtagctcgtgtaggtaacggcaggtccaggcctccgcatgagcggagggccccccgcgcgaccttgaatggcccgggcgcgcgcggtcgtgtgggagttgtagtcctccgtccccgtccgcgcggactccgtttcccgtggtgccccgggcggcccgcttccggcgcagttagttacgagtcggcgcacgcggcctcggtccggttgactttgcggagccatggagggcggcttcggctccgatttcgggggctccggcagcgggaagctggacccagggctcataatggagcaggtgaaagtgcagatcgccgtggccaacgcgcaggagctgctgcagaggatgacggacaagtgtttccggaagtgtatagggaaacctgggggctccctggacaactccgagcagaagtgcatcgccatgtgcatggaccgctacatggacgcctggaacaccgtgtctcgcgcctacaactcgcggctgcagcgggaacgagccaacatgtgaccggcgagcgcgggccaccccaccctgttcatttccataaacgtgctttgagaggcggggtccgcatgtacgtactgcctgcccggggcttaggagggtggcaccggtgctgggacacacgggactgtgtcctcgccaccccccgccctgccccctgccagccagtgcagcttggatctcgggggtgtggggccctgtgccttcctgaagtgctggcagcccagtggcacctccttcaggcctttggggtattcccctagtgtgcccaagtcagcctcatattctgggcggacagcttgtctggacttcggagttgggggtggtcagacaccacaggagctgtcacctcctgcggatgggcaaataaattggtggaggacggaaaaaaaaaa

SEQ ID NO: 59172 - DNA, 2030 bp, Homo sapiens
gcacgaggagaaacaataggacggaaacgccgaggaacccggctgaggcggcagagcatcctggccagaacaagccaaggagccaagacgagagggacacacggacaaacaacagacagaagacgtactggccgctggactccgctgcctcccccatctccccgccatctgcgcccggaggatgagcccagccttcagggccatggatgtggagccccgcgccaaaggcgtccttctggagccctttgtccaccaggtcggggggcactcatgcgtgctccgcttcaatgagacaaccctgtgcaagcccctggtcccaagggaacatcagttctacgagaccctccctgctgagatgcgcaaattcactccccagtacaaaggtaagtcccagctgctggaggggttgccacactggcgaggagatgtgagagatcgtggccatggaaggccctggcagccatccctggagccctcactccctcccactctgtgctttccctccctctcctccttctcctcctcctggccctcagcccagcatctcacaccctcagttttcaatccctggtaagattgctcaattctgttttgttgtgtggatttgagtttgattttggtagaagtgtagttgtgttttatgttcaggtgtctcttgatcacagtaacccatagtcccccactggggggacggtgggggaagactttgggaggattttacccagaatacttgccgcctgctttttgtcctccaggaaaccagaagcccgggtaattaggtaggccggggagcagcgttgagtcagatggaatgcaggagtgggaggcctgtgctgattagcccaagccctttgctgttacagaatgtccccaaaattgctatatgaaagcaacccttcgattcacatatgataattttttatttctttttataatgtattttacaggggacatcagcagccaccagcatggtggggtctttgttggggagtgggggagtcttttgtaaatcaagtaagaatccattaaagaaattaattttaaatgtgcattacctggttacataaaggactctagaacaacttaggttcttttgggactgttgaaacattgtctttaaggacagaatgtactgggtgcctttctctgtactctgaatatgcatgtgtattgcggtggggatgggggagttgggggccctcacttggtccttctctgttgtttttttccaggacaaagccaaaggccccttgttagctggccatccctgccccattttttcccctggtcctttcccctgtggccacagggaagtgtggcctgaataccccaccccggctcctctgcacccagagctgggggccacctcagaagtgtcatctctctctgagcacgcattcccctgcagcagtcgaggactgagcagattgagtgatgctggggcagagaggcctgggaggaaaggtgttcagccagtcgtttgtaaggcgctcgtcggcacctgctgaaacgcccccacctgacagccccatcctcaaagactgtcttaattactcatggcaggttctagagacttaaggggaaaagctgctttcaaggccaccacatgtctgtgctccccaaccagctctatctgccttgtgttcattttgttattttgtgacgtgagactgcaaagaccaataaaaacatattttataagaacaaaaggcctgggtgcctacccgtgtgggggcactgtgggaagcctttgctagggtgtcttgtgctgtgtggtttgttttgtttgcccctttattttgctttgcttacccagtcttcccttactcttggatgcttcttaaccctcaggcaaacctgtgttccccctgtattcaggctctgctttaaagcaagccatgaggctgttggagtttctgtttagggcattaaaaattcccgcaaactataaagagcaatgttttcagtcttttaggattagaagaattacataaaaattaataaacattttcaatgatggaaaaaaaaaa

SEQ ID NO: 59173 - DNA, 2961 bp, Homo sapiens
tcggaccgcccgaattcccggtcgaccacgcgtccggcggtttctgaggttcttcactcgcgactgacggagctgcggtggcgtctccacacgcaaccatgaagttgaaggacacaaaatcaaggccaaagcagtcaagctgtggcaaatttcagacaaagggaatcaaagttgtgggaaaatggaaggaagtgaagattgacccaaatatgtttgcagatggacagatggatgacttggtgtgctttgaggaattgacagattaccagttggtctcccctgccaagaatccctccagtctcttctcaaaggaagcacccaagagaaaggcacaagctgtttcagaagaagaggaggaggaggagggaaagtctagctcaccaaagaaaaagatcaagttgaagaaaagtaaaaatgtagcaactgaaggaaccagtacccagaaagaatttgaagtgaaagatcctgagctggaggcccagggagatgacatggtttgtgatgatccggaggctggggagatgacatcagaaaacctggtccaaactgctccaaaaaagaagaaaaataaagggaaaaaagggttggagccttctcagagcactgctgccaaggtgcccaaaaaagcgaagacatggattcctgaagttcatgatcagaaagcagatgtgtcagcttggaaggacctgtttgttcccaggccggttctccgagcactcagctttctaggcttctctgcacccacaccaatccaagccctgaccttggcacctgccatccgtgacaaactggacatccttggggctgctgagacaggaagtgggaaaactcttgcctttgccatcccaatgattcatgcggtgttgcagtggcagaagaggaatgctgcccctcctccaagtaacaccgaagcaccacctggagagaccagaactgaggccggagctgagactagatcaccaggcaaggctgaagctgagtctgatgcattgcctgacgatactgtaattgagagtgaagcactgcccagtgatattgcagccgaggccagagccaagactggaggcactgtctcagaccaggcgttgctctttggtgacgatgatgctggtgaagggccttcttccctgatcagggagaaacctgttcccaaacagaatgagaatgaggaggaaaatcttgataaagagcagactggaaatctaaaacaggagttggatgacaaaagcgccacctgtaaggcatatccaaagcgtcctctgcttggactggttctgactcccactcgagagctggccgtccaggtcaaacagcacattgatgctgtggccaggtttacaggaattaaaactgctattttggttggtggaatgtccacgcagaaacagcagaggatgctgaaccgtcgtcctgagattgtggttgctactccaggccggctgtgggaattaattaaagaaaagcattatcatttgaggaaccttcggcagctcaggtgcctggtagtggatgaggctgaccggatggttgagaaaggccattttgctgagctctcacagctgctagagatgctcaatgactcccaatacaacccaaagagacaaacgcttgttttttctgccacactcaccctggtgcatcaggctcctgctcgaatccttcataagaagcacaccaagaaaatggataaaacagccaaacttgacctccttatgcagaaaattggcatgaggggcaagcccaaggtcattgacctcacaaggaatgaggccacggtggagacgctaacagagaccaagatccattgtgagactgatgagaaagacttctacttgtactacttcctgatgcagtatccaggccgcagcttagtgtttgccaacagtatctcctgcatcaaacgcctctctgggctcctcaaagtccttgatatcatgcccttgaccctgcatgcctgtatgcaccagaagcagaggctcagaaacctggagcagtttgcccgtctggaagactgtgttctcttggcaacagatgtggcagctcggggtctggatattcctaaagtccagcatgtcatccattaccaggtcccacgtacctcggagatttatgtccaccgaagtggtcgaactgctcgagctaccaatgaaggcctcagtctgatgctcattgggcctgaggatgtgatcaactttaagaagatttacaaaacgctcaagaaagatgaggatatcccactgttccccgtgcagacaaaatacatggatgtggtcaaggagcgaatccgtttagctcgacagattgagaaatctgagtatcggaacttccaggcttgcctgcacaactcttggattgagcaggcagcagctgccctggagattgagctggaagaagacatgtataagggaggaaaagctgaccagcaagaagaacgtcggagacaaaagcagatgaaggttctgaagaaggagctgcgccacctgctgtcccagccactgtttacggagagccagaaaaccaagtatcccactcagtctggcaagccgcccctgcttgtgtctgccccaagtaagagcgagtctgctttgagctgtctctccaagcagaagaagaagaagacaaagaagccgaaggagccacagccggaacagccacagccaagtacaagtgcaaattaactgccctggtcaagtgtgtcagtgactgcacattggtttctgttctctggctatttgcaaaacctctcccacccttgtgtttcactccaccaccaaccccaggtaaaaaagtctccctctcttccactcacacccatagcgggagagacctcatgcagatttgcattgttttggagtaagaattcaatgcagcagcttaatttttctgtattgcagtgtttataggcttcttgtgtgttaaacttgatttcataaattaaaaacaatggtccgaaaaaaaaaa

SEQ ID NO: 59174 - DNA, 1297 bp, Homo sapiens
gcacgagccggaaaggaggcccaaagcgcgggcggcgaggcaagatggcggcaaccaagaggaaacggcgtggaggctttgcagttcaggcgaagaagccaaaaagaaacgaaatagatgcggagccgccagctaagcggcacgccacagcagaggaggtggaggaagaagagagggaccggatcccaggccccgtttgcaagggaaagtggaaaaataaggaacggattctcatcttttcttccagaggaataaattttagaacaagacatttaatgcaggacttgagaatgttgatgcctcattctaaagcagatactaaaatggatcgtaaggataagctatttgtgattaacgaggtttgtgaaatgaagaactgtaataaatgcatctattttgaagctaagaaaaaacaggatctctatatgtggctttcaaattcacctcacggaccatctgctaaattccttgttcaaaatattcataccctcgctgaactgaagatgactggaaactgtttgaaaggttctcggccccttttgtcttttgaccctgcttttgatgaattaccacattatgctttgttaaaagaactcttaattcagatctttagtacaccacggtatcatcccaaaagccaaccatttgtggaccacgtgtttactttcaccattttggataataggatatggtttcggaactttcagatcatagaagaagatgctgctcttgtagaaataggacctcgttttgtcttaaatctcataaagattttccagggaagttttggaggaccaactttatatgaaaatcctcactaccagtcaccaaacatgcatcggcgtgtcataagatccatcacagctgcaaaatacagagagaaacagcaagtgaaagatgtgcaaaaactgagaaagaaagagccgaagactcttcttccacatgatcccactgcagatgtttttgtaacaccagctgaggagaaaccaatagaaatacagtgggtaaaaccagagccaaaagttgatttgaaagcaagaaagaaacggatttacaaaaggcaaagaaaaatgaaacagaggatggacagtgggaaaacaaaataagtcaatggaaacctgatttgtttttcagttactttatatttattttgtattcaatgtgtaaatacttttattatctaatactatcttacgtctaattagtgtagcatttacaagaaagaaaaattaagatcttaaaatcagtgattatctttttctaaataaaatatcaccagaattcatcaaaaaaaaaa

SEQ ID NO: 59175 - DNA, 722 bp, Homo sapiens
agtccggcccgcagcctcggggccccgcgggcgcagcggggcgggaggcggggcggcccgcccgtgggcggagcggggcggcccctgtgacgcctgcccccaactcgccctcagccggctggccggcgcggccatggaggtctacatcccgtcctttcgctatgaagagagcgacctggagcggggatacacggtgtttaagatagaagtgctaatgaatggaagaaaacattttgttgaaaagagatacagcgaatttcatgctttgcacaaaaagcttaagaaatgtataaaaactccagaaatcccttctaaacatgttaggaactgggtccccaaagtcttggaacagcgacgacaaggcttggaaacatacttacaggctgtcattttagaaaatgaagaacttcccaaactgtttcttgatttcctaaatgtgcgacacttgccctctctaccaaaggcagaaagttgtggatcttttgatgaaacagagtctgaagagtcaagcaaactgtcccaccagcctgtgctgctgttcctcagggatccatatgtcttgcctgcagccagcggtaatcaaacctgtcatctgctaacagctctttactgatctgaccctgcaccacataaaccacgtttttaatacaggtctaacagagtgacattggtcccgggcttaataatctgccaataaaccagtgctcttggtaaaaaaaaaa

SEQ ID NO: 59176 - DNA, 2560 bp, Homo sapiens
caattaaattgggtaccccccgggttttcccctcccccccttgttaaacccccgccccgggaatttaatttgggggccccaaaaaaaaaatttttccttgcccgcccccggtagttaaatttggttcctttaaacggccccccccttttttttttttttttggaaagcaaggatcacacttccccctccctgttccttaatcccttttctaaaaaggggggaaaatccggatggattttagggattggtctggtgtcagctgtgttttattgcacacctaaatcctgattataggcttttcatttctccgcaaagcctttattttggcagttaagccaaatgtgttttccagaaagttagttattttctcctctttctttcctttctttcctccctttttcccgtctgaaccccaaacgttattgtccaaacatgaactggacagcagctttttggtttcttgaccctgtaatatggacagtctgctaatattgcacagaagggtgcagtttttggggttatagtcggtgattttcgctaatcaatcatattaggcagggaaaaaaaatgacttgtttctgttgtacttgagtcttaagaaaaagtgcccatagtttagtgacaatttccaaaggctttagtaccacctgtatttcaaaatgggggacccaaactcccggaagaaacaagctctgaacagactacgtgctcagcttagaaagaaaaaagaatctctagctgaccagtttgacttcaagatgtatattgcctttgtattcaaggagaagaagaaaaagtcagcactttttgaagtgtctgaggttataccagtcatgacaaataattatgaagaaaatatcctgaaaggtgtgcgagattccagctattccttggaaagttccctagagcttttacagaaggatgtggtacagctccatgctcctcgatatcagtctatgagaagggatgtaattggctgtactcaggagatggatttcattctttggcctcggaatgatattgaaaaaatcgtctgtctcctgttttctaggtggaaagaatctgatgagccttttaggcctgttcaggccaaatttgagtttcatcatggtgactatgaaaaacagtttctgcatgtactgagccgcaaggacaagactggaatcgttgtcaacaatcctaaccagtcagtgtttctcttcattgacagacagcacttgcagactccaaaaaacaaagctacaatcttcaagttatgcagcatctgcctctacctgccacaggaacagctcacccactgggcagttggcaccatagaggatcacctccgtccttatatgccagagtagagtactgaccagcaaaatggagaagatcagagaatgcagcagcagttttttttcttgttttcttaccactttattctttcagagtttaaagaaaatggactcatgcacagaacactatgcattttgaaacttgttcatcctggatttttttaaatcatttttatctcagaacttaaacaaaaattagatgtcgtgcacggactgtgtgaaagaagatgctttgcatatttgctgcactgcatcagtatcttactaaaaatgtgaaatgaaaggactattgtacactgaaatgcttaaatgtatctgaaagcacaaggtgatactcatttttatggtcttcccatttgtgctggtttttgcctctttgacatctgtcatcagtatttagagggtgagaagtgaatgtaacaggtataaataacatttttaaaaacaataactttgctataatcacagttgttccagagcactgtcagatacattctaatgaccagaactggtttaaaaaaagaaaatacaaccatgggaaggaaatcttaaatgaaaaacgcatctcattgtaggcatttttgcctcatattttactgggccatgtttgtttcctggtactcatgtattttttttttccagatctctttccccaagttgctattgtaagagtattctgctgcgtgtggatgcagttatacacattaaagcagatctggagtctgaagtagctataaagcagctataaaacagaaatacatgcatagctgcagaaaccatgataggtagaggacttttcttttggttttgttttgttttgttttgttttgtttttggttttacagagaagagatttttattacaaagaaaaaaattccagtgaattgtgcagaaatgctggtttttacaccatcctaaagaaaaactttacaagggtgttttggagtagaaaaaaggttataaagttggaatcttaaattgtaaaattaaccattgagtgtcaaagttctaaaagcagaactcattttgtgcaatgaacataaggaaagactactgtataggtttttttttttttttctccttttaaatgaaaaaaagctttgccttaagggttgcatacttttattggagtaaatctgaatgatcctactcctttggagtaaaactagggcttaccagtttccaattgtatttagcttctggttggaatttgaaaaaaaaaa

SEQ ID NO: 59177 - DNA, 1465 bp, Homo sapiens
gcacgaggacgccgagtgaggctgaggctgggggcgaatcgccgcagagctgcgtgtcggcggcgcattctgattggacagcggggaagcccgtcagcctgttggccccgctgatcccgccccgtagcgcagggcagcctttaacctttagccccagtgggcgccagccactcagatcgcttcttgttggtatgtgtagcggcagtggccgccggcggagcagtctgagcccgacgatgaggccggggacgggagctgagcgtggaggcctcatgatggggcaccctggcatgcattatgccccaatgggaatgcaccctatgggtcagagagcgaatatgcctcctgtacctcatggaatgatgccgcagatgatgccccctatgggagggccaccaatgggacaaatgcctggaatgatgtcgtcagtaatgcctggaatgatgatgtctcatatgtctcaggcttccatgcagcctgccttaccgccaggagtaaatagtatggatgtagcagcaggtacagcatctggtgcaaaatcaatgtggactgaacataaatcacctgatggaaggacttactactacaacactgaaaccaaacagtctacctgggagaaaccagatgatcttaaaacacctgctgagcaactcttatctaaatgcccctggaaggaatacaaatcagattctggaaagccttactattataattctcaaacaaaagaatctcgctgggccaaacctaaagaacttgaggatcttgaaggataccagaataccattgttgctggaagtcttattacaaaatcaaacctgcatgcaatgatcaaagctgaagaaagcagtaagcaagaagagtgcaccacaacatcaacagccccagtccctacaacagaaattccgaccacaatgagcaccatggctgctgccgaagcagcagctgctgttgttgcagcagcagcagcggcagcagcagcagcagctgcagccaatgctaatgcttccacttctgcttctaatactgtcagtggaactgttccagttgttcctgagcctgaagttacttccattgttgctactgttgtagataatgagaatacagtaactatttcaactgaggaacaagcacaacttactagtacccctgctattcaggatcaaagtgtggaagtatccagtaatactggagaagaaacatctaagcaagaaactgtagctgattttactcccaaaaaagaagaggaggagagccaaccagcaaagaaaacatacacttggaatacaaaggaagaggcaaagcaagcttttaaagaattattgaaagaaaagcgggtaccatcgaatgcttcatgggagcaggctatgaaaatgattattaatgatccacgatacagtgctttggcaaagttaagtgaaaaaaagcaagcctttaatgcctataaagtccagacagaaaaaaaaaa

SEQ ID NO: 59178 - DNA, 1228 bp, Homo sapiens
tacggctgcgagaagacgacagaagggggcagcagcggcagccgagactcacggtcaagctaaggcgaagagtgggtggctgaagccatactattttatagaattaatggaaagcagaaaagacatcacaaaccaagaagaactttggaaaatgaagcctaggagaaatttagaagaagacgattatttgcataaggacacgggagagaccagcatgctaaaaagacctgtgcttttgcatttgcaccaaacagcccatgctgatgaatttgactgcccttcagaacttcagcacacacaggaactctttccacagtggcacttgccaattaaaatagctgctattatagcatctctgacttttctttacactcttctgagggaagtaattcaccctttagcaacttcccatcaacaatatttttataaaattccaatcctggtcatcaacaaagtcttgccaatggtttccatcactctcttggcattggtttacctgccaggtgtgatagcagcaattgtccaacttcataatggaaccaagtataagaagtttccacattggttggataagtggatgttaacaagaaagcagtttgggcttctcagtttcttttttgctgtactgcatgcaatttatagtctgtcttacccaatgaggcgatcctacagatacaagttgctaaactgggcatatcaacaggtccaacaaaataaagaagatgcctggattgagcatgatgtttggagaatggagatttatgtgtctctgggaattgtgggattggcaatactggctctgttggctgtgacatctattccatctgtgagtgactctttgacatggagagaatttcactatattcagagcaagctaggaattgtttcccttctactgggcacaatacacgcattgatttttgcctggaataagtggatagatataaaacaatttgtatggtatacacctccaacttttatgatagctgttttccttccaattgttgtcctgatatttaaaagcatactattcctgccatgcttgaggaagaagatactgaagattagacatggttgggaagacgtcaccaaaattaacaaaactgagatatgttcccagttgtagaattactgtttacacacatttttgttcaatattgatatattttatcaccaacatttcaagtttgtatttgttaataaaatgattattcaaggaaaaaaaaaa

SEQ ID NO: 59179 - DNA, 1048 bp, Homo sapiens
gcacgagccgcggtagggtgggaacccaagcgggagagccgcgggatttgcggccgccgccatgccgtcgtccccgctgcgggtggcggtggtgtgctcgagcaaccagaaccggagcatggaggcgcacaacatcctcagcaaacggggattcagcgtccgatcctttggaacagggactcacgtgaagcttccaggaccagctcccgacaagcccaatgtttatgatttcaaaaccacatatgaccagatgtacaatgatcttcttaggaaagacaaagaactctatacacagaatgggattttacatatgctggacagaaataagagaatcaagccccggccagaaagattccagaactgcaaagacctgtttgatctgatcctcacttgcgaagagagagtgtatgaccaggtggtggaagatctgaattccagagaacaggagacctgccagcctgtgcacgtggtcaatgtggacatccaggacaaccacgaggaggccaccctgggggcgtttctcatctgtgagctctgccagtgtatccagcacacggaagacatggagaacgagatcgacgagctgctgcaggagttcgaggagaagagtggccgcacctttctgcacaccgtctgcttctactgagcccagcgcccgcatggagccgcctctggagcttcctgttgttcatactttttccttcctgacatttgtttttacttacaggtgttctgctggtgacggtagcattacccaaataaactgtgcatatgaaatgggagaggagatgccaaaacgccagatgaaagcaatcaagtttcttcttttccacttttacttatgagcgggatattgattacaaagtttttcttctttaaccaaaaaggaaagacaacggtttgtgtgcacttcccgacatacctgtgtcttcgtgtgcctgccttccctccctcctccccaccgggccggactgtacagagccctgctgcggcgtgttaggaatgacctggaattgtcaataaacagatgctgctgtcaaaaaaaaaa

SEQ ID NO: 59180 - DNA, 495 bp, Homo sapiens
cttcattcttcgccaggctctctgctgactcaagttcttcagttcacgatcttctagttgcagcgatgagtgcacgagtgagatcaagatccagaggaagaggagatggtcaggaggctcccgatgtggttgcattcgtggctcccggtgaatctcagcaagaggaaccaccaactgacaatcaggatattgaacctggacaagagagagaaggaacacctccgatcgaagaacgtaaagtagaaggtgattgccaggaaatggatctggaaaagactcggagtgagcgtggagatggctctgatgtaaaagagaagactccacctaatcctaagcatgctaagactaaagaagcaggagatgggcagccataagttaaaaagaagacaagctgaagctacacacatggctgatgtcacattgaaaatgtgacttgaaaattttgaaaattctctccaataaagtttgagttttctctgaagaaaaaaaaaaaaa

SEQ ID NO: 59181 - DNA, 1574 bp, Homo sapiens
cggtatgcatctgagatataaagaagaaaaagccacagctccttccttcgtgatgctcatagtctgggagaggaagaattcagtgtcctggcaggttacaatggtaccatctttgcatatgggcaaacaggcagcgggaagacattcactatcacagggggtgcagagcgttacagtgacagaggcattatcccaaggacactgtcttacatttttgaacagttacaaaaggacagcagcaaaatatatacaacacacatttcctatttggaaatctacaatgaatgtggttatgatcttttggatccaagacatgaagcctccaagtttggaagatttgccactcctatgaaccaagcttcaacccgttcccactgcattttcaccattcatttgtcaagcaaggaaccaggatctgcaactgtacgacatgccaaactccatctggttgacctggctggttcagagcgagttgcaaagactggagtagggggccatcttctaacagaggccaagtatatcaacttgtcactacattacttagaacaggttatcattgccctttcagaaaagcaccgttcgcacattccttatagaaactccatgatgaccagtgtcctaagagacagtttgggagggaactgcatgacaactatgattgcaacactctccttggagaaaaggaatcttgatgagtctatatcaacctgcagatttgcacagcgagtggcactcataaagaatgaagctgttcttaatgaagaaattaaccccagattagtgattaaacgcctacaaaaggaaatccaggaactgaaggatgaactggccatggtcactggggagcagaggacagaggcactcacagaagcagagctccttcagctggaaaaactaataacatcctttttggaagaccaggattcagacagtagattagaggttggcgcggatatgcgtaaagttcatcactgttttcatcatttaaagaaactattgaatgacaagaagatccttgaaaacaatacagtctcctctgaaagcaaagaccaagattgtcaagaaccattaaaagaagaagaatatagaaagctacgagatattctgaaacagagagataacgaaatcaatatcctggtaaacatgttaaaaaaagaaaagaagaaagctcaggaggctctccacttggctggcatggatagacgtgaattcagacagtcccagagcccacccttccgcctaggaaacccagaagaaggtcaaagaatgcgactatcctcagctccctcacaggcccaggacttcagcattttggggaaaagatccagtttgctccacaagaaaataggaatgagagaggaaatgtcattaggatgccaggaggcttttgaaatcttcaagagggaccacgctgacagcgttaccatcgatgacaacaaacagattctgaaacagagattttctgaagccaaggccctgggagaaagtataaatgaagcaagaagtaaaatcggtcacctgaaggaagaaatcacccagcggcatatacagcaagtagccctaggaatctcgga

SEQ ID NO: 59182 - DNA, 1421 bp, Homo sapiens
ggcaatttccggcgcctccctcacgcccgccctccttgccgcccagccggtccaggcctctggcgaacatggcgcttgtcccctgccaggtgctgcggatggcaatcctgctgtcctactgctctatcctgtgtaactacaaggccatcgaaatgccctcacaccagacctacggagggagctggaaattcctgacgttcattgatctggttatccaggctgtcttttttggcatctgtgtgctgactgatctttccagtcttctgactcgaggaagtgggaaccaggagcaagagaggcagctcaagaagctcatctctctccgggactggatgttagctgtgttggcctttcctgttggggtttttgttgtagcagtgttctggatcatttatgcctatgacagagagatgatatacccgaagctgctggataattttatcccagggtggctgaatcacggaatgcacacgacggttctgccctttatattaatcgagatgaggacatcgcaccatcagtatcccagcaggagcagcggacttaccgccatatgtaccttctctgttggctatatattatgggtgtgctgggtgcatcatgtaactggcatgtgggtgtaccctttcctggaacacattggcccaggagccagaatcatcttctttgggtctacaaccatcttaatgaacttcctgtacctgctgggagaagttctgaacaactatatctgggatacacagaaaagtatggaagaagagaaagaaaagcctaaattggaatgagatccaagtctaaacgcaagagctagattgagccgccattgaagactccttcccctcgggcattggcagtgggggagaaaaggcttcaaaggaacttggtggcatcagcacccccctcccccaatgaggacaccttttatatataaatatgtataaacatagaatacagttgtttccaaaagaactcaccctcactgtgtgttaaagaattcttcccaaagtcattactgataataacattttttccttttctagttttaaaaccagaattggaccttggatttttattttggcaattgtaactccatctaatcaagaaagaataaaagtttattgcacttctttttgagaaatatgttaaagtcaaaggggcatatatagagtaaggcttttgtgtatttaatcctaaaggtggctgtaatcatgaacctaggccaccatggggacctgagagggaaggggacagatgtttctcattgcataatgtcacagttgcctcaaatgagcaccatttgtaataatgatgtcaatttcatgaaaagcctgagtgtattgcatctcttgatttaatcatgtgaaacttttcctagatgcaaatgctgactaataaagacaaagccaccctgaaaaaaaaaa

SEQ ID NO: 59183 - DNA, 744 bp, Homo sapiens
ggtggaattcgcgggactggggctcctggctgtgggtgtggtaccgaggcttcagcgggtgccgcccgcctagagggagtggagcgagagcctacgactagatttgcatctttacgtcctgcgcggaggctgctacacacatgcagaagtcatgctggtggcctggacagtgaagggagagaagtggatttgggagacatttaggagatggcaccaaaagcgaagaaggaagctcctgcccctcctaaagctgaagccaaagcgaaggctttaaaggccaagaaggcagtgttgaaaggtgtccacagccacaaaaagaagaagatccgcacgtcacccaccttccggcggccgaagacactgcgactccggagacagcccaaatatcctcggaagagcgctcccaggagaaacaagcttgaccactatgctatcatcaagtttccgctgaccactgagtctgccatgaagaagatagaagacaacaacacacttgtgttcattgtggatgttaaagccaacaagcaccagattaaacaggctgtgaagaagctgtatgacattgatgtggccaaggtcaacaccctgattcggcctgatggagagaagaaggcatatgttcgactggctcctgattacgatgctttggatgttgccaacaaaattgggatcatctaaactgagtccagctgcctaattctgaatatatatatatatatatatcttttcaccataaaaaaaaaa

SEQ ID NO: 59184 - DNA, 1827 bp, Homo sapiens
aattcttggaagaggagaactggacgttgtgaacagagttagctggtaaatgtcctcttaaaagatccaaaaaatgagacttctagcaaagattatttgccttatgttatgggctatttgtgtagcagaagattgcaatgaacttcctccaagaagaaatacagaaattctgacaggttcctggtctgaccaaacatatccagaaggcacccaggctatctataaatgccgccctggatatagatctcttggaaatgtaataatggtatgcaggaagggagaatgggttgctcttaatccattaaggaaatgtcagaaaaggccctgtggacatcctggagatactccttttggtacttttacccttacaggaggaaatgtgtttgaatatggtgtaaaagctgtgtatacatgtaatgaggggtatcaattgctaggtgagattaattaccgtgaatgtgacacagatggatggaccaatgatattcctatatgtgaagttgtgaagtgtttaccagtgacagcaccagagaatggaaaaattgtcagtagtgcaatggaaccagatcgggaataccattttggacaagcagtacggtttgtatgtaactcaggctacaagattgaaggagatgaagaaatgcattgttcagacgatggtttttggagtaaagagaaaccaaagtgtgtggaaatttcatgcaaatccccagatgttataaatggatctcctatatctcagaagattatttataaggagaatgaacgatttcaatataaatgtaacatgggttatgaatacagtgaaagaggagatgctgtatgcactgaatctggatggcgtccgttgccttcatgtgaagaaaaatcatgtgataatccttatattccaaatggtgactactcacctttaaggattaaacacagaactggagatgaaatcacgtaccagtgtagaaatggtttttatcctgcaacccggggaaatacagccaaatgcacaagtactggctggatacctgctccgagatgtaccttgaaaccttgtgattatccagacattaaacatggaggtctatatcatgagaatatgcgtagaccatactttccagtagctgtaggaaaatattactcctattactgtgatgaacattttgagactccgtcaggaagttactgggatcacattcattgcacacaagatggatggtcgccagcagtaccatgcctcagaaaatgttattttccttatttggaaaatggatataatcaaaattatggaagaaagtttgtacagggtaaatctatagacgttgcctgccatcctggctacgctcttccaaaagcgcagaccacagttacatgtatggagaatggctggtctcctactcccagatgcatccgtgtcagctttaccctctgaacttctgatcgaaggtcatccctctccagcttgagtggatcaaagatgacaagggccaatggaaccaagtttgagtcttgccaggtcaatacttgggtcctgagtatggtgactagtatctgttttgttatgtgtgtattattccagccagaatgggaaatgctaattcagctcctccaggcagcccaatggggctggtggctttgatattattaaactctttctctgctgcaaaccccactgtctcagtgtattgttctgttgctgtgcagcaggcatacaaatctgacaatctcgtaactatttgtggcaagccaggtcgaggtcactctctttgagggcatttactcactgcctagtgccccctttccactgggacagacccagagacaaaccctagcagc

SEQ ID NO: 59185 - DNA, 1534 bp, Homo sapiens
ggcacgagctcctgtgagacgggcttcccacctacagaagccacagcacctggactcttgggccagcaggggcttccaccacatgttgaccaagactagtgcctaagactaacaggggaagtggggacaggttgaggacacagggctgtgtgggtggatcaatgtggccaagttctgagtgccagctcctcagcctcccaggctggtgagcagctggattcctgcaggggcctgggacccagccccttgtcatggctctgaggctgctgctgggaacacccaccagcctaattctccaaccacccacttctctcaactggcttttttctttgccagcaaagagttgaaattcacaagctgcgtcaaggtgagaacttaatcctgggtttcagcattggaggtggaatcgaccaggatccttcccagaatcccttctctgaagacaagacggacaagggtatttatgtcacacgggtgtctgaaggaggccctgctgaaatcgctgggctgcagattggagacaagatcatgcaggtgaacggctgggacatgaccatggtcacacacgaccaggcccgcaagcggctcaccaagcgctcggaggaggtggtgcgtctgctggtgacgcggcagtcgctgcagaaggccgtgcagcagtccatgctgtcctagcagccaccaccatctgcgactcctgcctgccgcctctctgtacagtaacgccacttccacactctgtccccatctggcttctgctgaccgctgggccccagctcagaagggctatagctggtcccagaggcctggcctggccttccttcccttctcccatccctggcctggggcctctgggaccagctttctctcctggacaccgaggattggaaataagggcctggagctgagtagtagccagtctgctgtgaccacaggctcaggtccgaccctgctgcttggccacagcagtggctgggcaagtgggaaccactatctcttgggagcccccaaaagctgggaaatgctggaggaaccaggcctttcccgcttttgcctggctgcagggttcggctccgcccctgccccccagccctcgtgtgtccacaccgcagtgcctctgcccctcgggggactggacacacatcctgccagaggcgctacgaagctttgcccagatgaagccaggtgggctccgcgttcactcccactctcccgaggggtgctggcctccccagggtttgccttcttacggatttagacgaggttcgaggctcacctatcagggcagctctcaggattgtcattttcctctttgcctgtgggtttaacttttgtatttttttaatcacaagtttgatacaaaatgtttttatcgtactctttggagatgcccattctacttttgaatttagcttttactaattcgcatctggaagctcagcaagtgcacaagccttactttggttaccgtggaaaccactgccgcccctccccgatgtggtgcgctcaataaaaatgctggaattcaaaaaaaaaa

SEQ ID NO: 59186 - DNA, 1001 bp, Homo sapiens
ggcacgagccggcctccaaggggcgggcagaagttggaaacatgcggctgtcggtcgctgcagcgatctcccatggccgcgtatttcgccgtatgggcctcggtcccgagtcccgcatccatctgttgcggaacttgctcacagggctggtgcggcacgaacgcatcgaggcaccatgggcgcgtgtggacgaaatgaggggctacgcggagaagctcatcgactatgggaagctgggagacactaacgaacgagccatgcgcatggctgacttctggctcacagagaaggatttgatcccaaagctgtttcaagtactggcccctcggtacaaagatcaaactgggggctacacaagaatgctgcagatcccaaatcggagtttggatcgggccaagatggcagtgatcgagtataaagggaattgcctcccacccctgcctctgcctcgcagagacagccaccttacactcctaaaccagctgctgcagggtttgcggcaggacctcaggcaaagccaggaagcaagcaaccacagctcccacacagctcaaacaccagggatttaactggatctgaagagtctgcagcccttaatcagtacccatgatcacaggcctttggagcacttttactctctgagaagaactggagctagagatgtaaaatggacagtcttgatggggttgagaaccttctggggagccagatgaccctctctttgcacaatagataaaagtctttatatgaatatatataaatttatttattttttccttcctgtgggatttctggagaatgagaattatccaaatgctcagtctacctgagatagtaaattcatggcttatgcttctggtccttaaatttgggttatttttggttagtgcaattttgtttttcttaatgccagtttacatgggaatgcatcctataattccaaatgttgccagaggtggttgtgttttgacatctggtctcctagagatgagtgcttggga

SEQ ID NO: 59187 - DNA, 1656 bp, Homo sapiens
ggcacgagcacatacctgattttctagatccaaaagaactcaggcagagaccatgaaactaaagcggatccagaaggagttgcaggctttagatgacatggtgtcagctgacattggaattctcaggaaccggattgatcaggccagcttagactattcatacgctcggaagcggtttgacagggctgaagcagagtacattgcagcaaagctagatatacagcgcaagactgagataaaagagcaactcactgaacacctttgtacgatcatacagcaaaatgagctccgaaaggccaagaagttggaggagttgatgcaacaactagatgtagaagccgatgaagagactttggagcttgaggtggaggtcgagagattgctacacgaacaagaagtagaatcaaggagaccagtggttcgtttagagaggccatttcagcctgcggaggagagtgtgacattagaatttgctaaagagaacagaaagtgtcaagaacaagctgtttccccaaaggtagatgaccagtgtggaaattccagtagcatcccctttcttagtccaaactgcccaaatcaagaaggtaatgacatttcagctgctttggccacatgaagttctggtattcttttgagctaatatggtattgagtaaagtatactttttgcagtagatcatgccctgacctccaataaaaacctctttaaaacaatgctgatttttgaattcatgattagttttagtaaattaataggtttggccattctaaaatccaaaattatgataactgtatttctaggggtatgtttcaccttgattttggcccggttctttcagtgttccgtttaccctttttactgaaagtaagtgacttaaaaggatggaagaaaaactacatggttggagtgtttttagatcagataaatatagaaaagtaaaatggaaaatgatactcaatacctagttaaactcatttcacttctcctgggagacgtattaagactggaagtcctattttatttaatcagtatcagtaaaaagacaaaaattacagtgtgaacaagagaaaaacaggaatagaagaaaaaagttgcaggttgaattatctatctggatattactagagttgtaaaacacaacttggaaactggaatttatgtgaagaaccaaacaacttaaaccagcatcacttttgtcttcaatttgccttccagtgattttagtttacaacctgcgttttgttatttgaaacacacacacttatatataaacacatgtaattttactattttattgtctttcctttaatcgatgaattgattaaatttagacaattaaaacatttctaaagtgagactgaaaataatatagaaaatctcattgctacttgtgattatcaaaaaaagtatgtattttctttctaaagttatctataaatatgtttttgatatgttggacatgaattaccctgtcatgaagcgtttaaattgttaaaatgctgattttcttattagtttgttaattgcctgttactagtacttgaccaatacattgtgctatatgtaaatgtgtaaataaatattgtaattttctcacaaagtctgtgaatatcacattatgatttatttatcagaaattccaaaaagtaaaaataa

SEQ ID NO: 59188 - DNA, 545 bp, Homo sapiens
ttttttttttttaacggtttgtattttgttttatttttatttagaagtagagaatacagtaatagtgaggcaggagaacagggaattaggatagccaggggtaggggcataagcaaaggaatagcaggtgcagccagtttgcataaacaagagaacagcaggtgcagccggttctaggcaagatcaggcagcatgcaggcaagatcaggcagcatgcaggccacatcctcatgcctttatcagtcggcgaatactgtaagaaattaagaggatcgttccaataataccagccatcacacacaaaataatgagtattatcactacaggagctggtacagtgaaacgatggacaagttgtcccgtttctccatttgtctgtgatgagatgtaactctttgtgactgaagaagaggttgaagtgtgcattgccacctcagtggtacttaatgctgatatgctcacaatttctgacaatagtaatacaaagattatttttccatacatcctgagatcatgagctggttcctgctcgtgccgctcgtgcc

SEQ ID NO: 59189 - DNA, 1110 bp, Homo sapiens
caagagggagagtgtgtgagagagagttagttcaagccaaaatggccgacagagtctctgctggtttctgaatatttaaaatacaaaaaaacagatagacaaaaagaattcattttttggaccttttttcatttccatttctaccttgtatgcctcaatttgctggatttaagcactgctgcactttatgagagagaaggagcaagaaagggaagaacagttaatggaagacaagaaaaggaagaaagaggataaaaagaaaaaagaagccactcagaaggtcacggaacaaaaaaccaaagtgcccgaagtgacgaaaccaagtttaagccaaccaacggccgccagcccaattggcagctctccatcgccaccagtcaatggtggcaacaatgccaaaagggtggcagtgccgaacggacaaccgccaagcgccgcccgctacatgcctcgggaggtgccgccgcgattccgttgccagcaggaccacaaagtgttactaaaacgtgggcagccccctccaccgtcctgcatgctccttgggggtggggcagggcctcctccctgcacagcacctggagcaaacccaaacaacgcacaagtgacaggagcgctgctgcagagtgagagtgggactgcgccagactcaacccttggaggtgctgctgcttcaaattatgcaaattccacttggggctcgggagcctcctccaacaacggcacctcccccaacccaattcacatctgggacaaggtgattgtagacgggtctgacatggaagagtggccttgtattgccagcaaagacactgaatcttcttccgaaaacaccaccgataacaccagtgcctcgaaccctggctctgagaagagcactctgccaggaagccccactagtaacaaaggaaaagggagccagtgccagtctgcaagttctgggaacgaatgtaatcttggggtctggaaatctgaccctaaggctaaatctgttcaatcttccaactctactacagagaacaacaatggactaggaaattggaggaatgtgagtggtcaggatagaattggacctggctctggcttcagcaactttaacccaaatctcgtgcc

SEQ ID NO: 59190 - DNA, 1589 bp, Homo sapiens
  misc_feature (1)...(1589): n = a,t,c or g
ttttttttttttcaccagtgaagcaggagttttattgagttcctccatgtcacattaatacattagcttcaagacacagtttcaaagaccccgggtccttctgacgtagtgtgttggaggcagctaggccagcttgaggcactgtgtgttaaagctgtccccctccttgccggcgacagcctccagcagggcctgtttcttctgcatgctccgtgaggactccagctcgtacatggtggtcaggttgaagagcacgctctcgtgcaggtagtgcctggggtcctgctggaccatggcctccagctgccgcagggagtccttgagcttgcccaggtagagcagacacacggcagcgttgttgttggccactgcgtttcttggatccatccttaagatctctgtgaagaacctgtgggcttctgcaaagttattctgcccgaggtgaaggaacgcgctgttcatcaaaaccatgattttaccctgtagtccatctaatttctgtgttactttctcaacgtcttgaaaatacttttcagctgtttttatgtctccaatctgcagggaaatccggccgatgccgctgagcagctggggctcttgctctgggtaatacttgataaccgaatgatacgcctccacggccagcacataatccttcatcaggagcagacagtttgccatggagtacatcacccggcccagacgtgacctccacagccggatagaggcttgtctgccctcctgagtcacgctgctcatgccgccgtcttctgctaagccttgctccaaattggccaggatcttgctgcagacagtcttcaccttgtgcagtctatccagcgactcctgtgggttccccaggtactgctgaagctccgcgtgcaagatgcgcatcgagaaggggaccatggagcccctgcgcccagggtacacgtgcgggtagtactcgtaataaagatctggctgatcaagatttccgaagggttcaaattccatctcagcattctggaaaaggcccaacttcactagtagtgccagcctgacaaaccagagctgcagtgaatctgtcgtgtggctggtgagcagcccgctcttgccgtagccctggccgtgggctgtgaggagacgtccgcacaggtccactgctgccctccagtttctgcagctgattagctgtttcaatccaacaaaagattgttccactgagtcggcatttaggacttgtctctttgctgcagctttttcacccagaaagcgaagcatcaagtctttaactgcatctccctggatgttgtcgaacctgaggcccggcatggtgaggttctccttgtccacgaacacggcgccgcgctgctgggtggccacggcccgcaggactccacgcgtagcctcgccgggaagccaggcgtcgttcctccggtccatctcgcccatgctcagggcggtggcaaaggggtcgtcactccctgcaaacactgcctggatgtgcgcgaaaggatctggaaacgccgggggcgcagctgcctggggccctcgcatggccacgggttcggggcacccccgnngnnccncgncatggcntacgaact

SEQ ID NO: 59191 - DNA, 1994 bp, Homo sapiens
tttcgtggaccgggtgcggtggtggctgcggcggcggcggcggtagcagcatggattggggcactgagctgtgggatcagttcgaggtgctcgagcgccacacgcagtgggggctggacctgttggacagatatgtaaagttcgtgaaagaacgcaccgaagtggaacaggcttacgccaaacaactgcggagcctggtgaaaaaatatctgcccaagagacctgccaaggatgatcctgagtccaaattcagccagcaacagtccttcgtacagattctccaggaggtgaatgactttgcaggccagcgggagctggtggctgagaacctcagtgtccgtgtatgtcttgagctgaccaagtactcacaagagatgaaacaggagaggaagatgcacttccaagaagggcggcgggcccagcagcagctggaaaatggctttaaacagctggagaatagtaagcgtaaatttgagcgggactgccgggaggcagagaaggcagcccagactgctgaacggctagaccaggatatcaacgccaccaaggctgatgtggagaaggccaagcagcaagcccaccttcggagtcacatggccgaagaaagcaaaaacgaatatgcggctcaactgcagcgcttcaaccgagaccaagcccacttctatttttcacagatgccccagatattcgataagctccaagacatggatgaacgcagggccacccgcctgggtgccgggtatgggctcctgtcggaggccgagctggaggtggtgcccataatagccaagtgcttggagggcatgaaggtggctgcaaatgctgtggatcccaagaacgactcccacgtccttatagagctgcacaagtcaggttttgcccgcccgggcgacgtggaattcgaggacttcagccagcccatgaaccgtgcaccctccgacagcagtctgggcaccccctcggatggacggcctgaactccgaggcccgggtcgcagccgcaccaagcgctggccttttggcaagaagaacaagacagtggtgaccgaggattttagccacttgcccccagagcagcagcgaaaacggcttcaacagcagttggaagaacgcagtcgtgaacttcagaaggaggttgaccagagggaagccctaaagaaaatgaaggatgtctatgagaagacacctcagatgggggaccccgccagcttggagccccagatcgctgaaaccctgagcaacattgaacggctgaaattggaagtgcagaagtatgaggcgtggctggcagaagctgaaagtcgagtccttagcaaccggggagacagcctgagccggcacgcccggcctcccgacccccccgctagcgccccgccagacagcagcagcaacagcgcatcacaggacaccaaggagagctctgaagagcctccctcagaagagagccaggacacccccatttacacggagtttgatgaggatttcgaggaggaacccacatcccccataggtcactgtgtggccatctaccactttgaagggtccagcgagggcactatctctatggccgagggtgaagacctcagtcttatggaagaagacaaaggggacggctggacccgggtcaggcggaaagagggaggcgagggctacgtgcccacctcctacctccgagtcacgctcaattgaaccctgccagagacgggaagaggggggctgtcggctgctgcttctgggccacggggagccccaggacctatgcactttatttctgaccccgtggcttcggctgagacctgtgtaacctgctgccccctccacccccaacccagtcctacctgtcacaccggacggacccgctgtgccttctaccatcgttccaccattgatgtacatactcatgttttacatcttttctttctgccgctcggctccggccattttgttttatacaaaaatgggaaaaaaaaaaaagaattttttttaaaaaaaaaa

SEQ ID NO: 59192 - DNA, 1491 bp, Homo sapiens
gtttttcagctttatttcaaatgctgtgtagcataagaacctagccgtcagacatcattttttagctatgaaaaatatgaaacaaggcatattctaaagtgctgaaggaattaattgccctattagataacgaatacctggaggaatgaacagagtgatttatggcttaaagtgcttgggtctgatcatcatcttagcctctttgaaggaggacttgtagccaccagggtgtgcctcacttacaccaggccaggtaccccagaaaatcccattacggacacctctgtatttttggtgataatatttgccatttaagtttgcagaaagacatgcatcaaaccaccagcctgaactgtagtacagcccacagttcccagaaggatatcgatcattgtctttatctggagtggtgaaaaacttcagatcgtggttgtaatgtttgttgaaacgtaatgcatctccagctgtgccattatagttaccaacgtgtaaacgatatttgagaaactcattagccacataaaactgatcatacaaggcatatagttcgacaccattaaagtcttcaagatctattctcagaatcatttccttactcttggtcagaagatgaattttatcgttccccagccaaaattcccttctgaggtttccaaagcctgctttgtagtcttgccatgttctggtgaagttggtgctcccatcgagacgtgcctgcagcactgtccagcctccccccatggtctccatgtcacagtaaacttcaaagctactatttttgggatcaggtgtaactctgtaggtctcactgcttcttttgcctattgcgtagtagtcagagcaatctttatatattagatgttgaactggacgtgactgtatttgttcttggctgggacactttgaacatttgccatccaaactattgacaacaaatgttagatttgccactttgctgtcaacataattttctatgttgttcatatttacaagattcagcttctccaggcgaccatgaagtacattgatctcctctttggcattctttagctcagaggacagcttgttaacctcactctctaattctctaactctgttatcaccaacctctcccggggctcctgtactgggtaacaacagtccgtttctgcctgggtctccgttgtcatcagcctgcagcttgcagtcttggcaagatttctttagactatttacgatttccttgaggttttggacttctttgaacacctcctcgatcctgctgaattgcttcgggagctgaatagtcaaggggggcaggcttacctggtaggggcactcccctgcctcttcgcatttccctctgctttctagtctcactgggcagacatcctttgctctttcatctttaatttcctctgtttcattgtttgccacaaccaaaaaaccgtaagtggcaagaacagctgagctcagccagtaccagttagccagcttcatctttacagtgct

SEQ ID NO: 59193 - DNA, 2059 bp, Homo sapiens
gcgaagggaactagtccggtgcaggacgtggggcttttgcagctcagctggttccggctggggaagatggcggtggctggggcggtgtccggggagccgctggtgcactggtgcacccagcagttgcggaagactttcggcctggatgtcagcgaggagatcattcagtacgttttgtcaattgagagtgctgaagagatacgagaatatgttactgatctcctccagggaaatgaaggcaaaaaaggtcaattcatagaagaacttataaccaaatggcaaaagaatgatcaggagttgatttcggatcctttgcagcagtgcttcaaaaaagatgaaattttagatgggcagaaatcaggcgaccatctaaagcggggtaggaagaaagggagaaacagacaggaagttcctgcatttactgaacctgacacgactgcagaggttaaaacaccttttgatttggccaaggcacaagagaacagcaactccgtaaagaagaagacaaagtttgtcaatttatacacaagagagggacaggacaggcttgcagtcctgctccctggtcgtcacccttgtgattgcctgggccagaagcacaagctcatcaataactgtctgatctgtgggcgcattgtctgtgaacaagaaggctcaggcccttgcttattctgtggcactctggtgtgtactcatgaggaacaagatattttacagcgtgactcaaacaagagccagaaactgctaaagaaactcatgtcaggagtggagaattctggaaaggtggacatctctaccaaggaccttcttcctcatcaagaattgcgaattaagtctggtctggagaaggctatcaagcataaagacaaactgttagagtttgacagaactagtattcgaaggacccaagtcattgatgatgagtcagattactttgccagtgattctaaccaatggttgtccaaacttgagcgggaaaccttgcagaagcgagaggaggagctgagagaacttcgacacgcctctcgactttctaagaaggtcactattgactttgcaggaaggaagatcctggaagaagaaaattcactagcagagtatcatagcagactagatgagacaatacaggccattgccaatggaaccttgaaccagccactgaccaaattggatagatcttctgaagagcctttgggagttctggtaaatcccaacatgtaccagtcccctccccagtgggttgaccacacaggtgcagcctcacagaagaaggctttccgttcttcaggatttggactagagttcaactcatttcagcaccagttgcgaatccaggatcaagaatttcaggaaggctttgatggtggctggtgcctctctgtacatcagccctgggcttctctgcttgtcagagggattaaaagggtggagggcagatcctggtacaccccccacagaggacgactttggatagcagccacagctaaaaaaccctcccctcaagaagtctcagaactccaggctacatatcgtcttcttcgtgggaaagatgtggaatttcctaatgactatccgtcaggttgtcttctgggctgtgtggacctaattgactgcttgtcccagaagcaatttaaggagcagtttccagacatcagtcaagaatctgattctccatttgttttcatctgcaaaaatcctcaggaaatggttgtgaagtttcctattaaaggaaatccaaaaatctggaaattggattccaagatccatcaaggagcaaagaaggggttaatgaagcagaataaagctgtctgacccaggagaaaaggaactatacagcatagtggagttttgtgtactaaaattgctatctactggtcctttggaattgaagtagtagaaacctaaaggcttggcgtcaggcttgaatatctcagaacttaaactcttaccaaaatctgtatatttttcttaaggagtgggattcctactttatgtaatggggtcgaaatctttgaacacattatttataaaaacctgtttaaaaattctaaaaaaaaaa

SEQ ID NO: 59194 - DNA, 1725 bp, Homo sapiens
ggaagagaaagcaggagccgtccagcacggaggaaggcgaccatggccaaggagtggggctacgccagtcacaacggtcctgaccactggcatgaacttttcccaaatgccaagggggaaaaccagtcgcccgttgagctgcatactaaagacatcaggcatgacccttctctgcagccatggtctgtgtcttatgatggtggctctgccaagaccatcctgaataatgggaagacctgccgagttgtatttgatgatacttatgataggtcaatgctgagagggggtcctctccctggaccctaccgacttcgccagtttcatcttcactggggctcttcggatgatcatggctctgagcacaccgtggatggagtcaagtatgcagcggagcttcatttggttcactggaacccgaagtataacacttttaaagaagccctgaagcagcgcgatgggatcgctgtgattggcatttttctgaagataggacatgagaatggcgagttccagattttccttgatgcattggacaagattaagacaaagggcaaggaggcgcccttcacaaagtttgacccatcctgcctgttcccggcatgccgggactactggacctaccagggctcattcaccacgccgccctgcgaggaatgcattgtgtggctgctgctgaaggagcccatgaccgtgagctctgaccagatggccaagctgcggagcctcctctccagtgctgagaacgagcccccagtgcctcttgtgagcaactggcgacctccacagcctatcaataacagggtggtgagagcttccttcaaatgaggctgctggatcttgccctcttcaggaaaggaaacctaccattggagagcttggttccttgcctccttctggtgctccttactccaagtctatttcatttttccacactgagcaatgaatgtgagagatgtggtcaccaagatctaagttacttgttgaaagaaagttactttcgacaagatctaatatgaaagcatagatttcacatttgatctctgtaataatcatctttcctataaaagtagcatttttggtaaagtttcaaagaagaagaaacagagatggaagagtaaagatatttttaaaatggctagctattgggcaccagtttttctgttatctaaaatttcacacaacttcattgtttttatttttatattatgagttgtccatcttaaagaaatatgagtaattctacatgtagtagaggtgtatgaagatcatataacaattaaacataagccagaaattaaaatgactatagacagcaagaattgagctaataatatgttttaactcttaacaccagcaagaagtcagtcatttattgaagttttagctactaagattacttggttttgattaccagtgaaaagaaaacacaatacaatcaggagttttcaaatttttgattcagtatttgaatttcttcttcataaatgtagttgaatttatcctagtatttttctttacctgaagtagggccatttatttttaatttcactacatttttctttgcatgattattaaaataaaaactgcctctgttgtgtttctcactggaggctggaatgaatgatcactagaacacaaaagagtgaatgatgacacttgaagtcaaagcagttgtactgatcaccagaaccaataaagacataaatggaaaacgtaaaaaaaaaa

SEQ ID NO: 59195 - DNA, 2830 bp, Homo sapiens
  misc_feature (1)...(2830): n = a,t,c or g
gctgctgctttatagattatgacagaagactttcaacagacctgatttttaaaaaaccctcaacaaatctaatactaagggaaagcaactagatttaatgttgttacctgtcttccataaataccatagttaaatgttttgtgtgcatacatgttcatatgtgtctataaaggtattgatatgcttcccaaataatcctatatactaacattggaaatggtttataaagaggctttacagtcgcatgtcattcagcaggagagaatatactggtctttatgattacatgaaatatgctgtgaagctacagactccattataagtaaacccatggttcaaagtgtaagttataaattgaaacaaaatcaaaatctgctagaagggagggtgggtagacagccaccagccttgtttataaattcaaacaaaataagaatctgctagaagggagggtgggtagacgccacccgccccgtcacaggcactttggtttgtttggtcatgtgagttacccacaagttgtatagttccatgaaacaagctaaaagctccaatttaaattacaaagctatactttccttaatatatttacacatagttttaagatgttctcatggctatggaagccattttcagcatatagcttataatatacacttaatcgtctacatatgtgcattctttctttacagacacacacagcctacgacactgcaacagagcctcacctcacaggaggtctgggggactcttaagtacagaaacctgcttttaacagtctaaacaggataaaaattgcataacaatatcccaatattaaggtcagtcatggcataaagtgaggcagcctgggaagtggctgctgagaacagcaggggccgggctcgcagctgtggcgcccccaaccctggtggtggccagtgcacatcggctcaaaggtcccacatcctatgtgtgaggtcacactgggggttcctgacaataatcagatcgagctttcaatttttaatgcaatatcctgtctactcactccaatctacctcacaacctttaaaaggacaacgtgtaccttcctttttttataggctgggaaaacattgaaaattaacaaagctcatgactgattgtttgacaacagcttaattgctaacattgaaagtctgctcttacagttgaggaaaagtacaaggtgtctgtatactgtttcatgagtaagttacaacagcaattaaaataaacataagacacttcatttttatgtaagaaatttcagattagcacaatgtgatttatgaaccatgacaattctcttaatatattactcagttataaaacatttttccttataagcccttcaacttacttctcaataatacatccttatatttatgaaaatgttaatattttgaatactttatttcatctttcataatgggcagaaacatactaacatttaataatatttcagcttttcttttcaaaaagaaacaccacaaaataggtcactgagaactttttgctgccaagatgaaaatgattatttgtcacacgaatttaataagttttagaagaaaatatatatatttccttgatctatttccttctgaatttaaaccagcatgtaaagattataaaaaatagtctatttacatggcatagtatacctcagtgatatataaacaaggccataataaagcacagacacatccgactcctacggacacagctgagcagagtccacagacacaagagctaccgccgccctactgcacgttgtaggaactggcgaaatcctagaggaaatccaacacagaaaattcaatgataatattggccaaatttgcctgaaatgtcaacaattttataaaactattaaggtatgtataactaaatccatgaaattataaaaataacattggtacgtctgtgagagggtgtgttccgggtagaggtggagagctacgctgaagaggacgcctcctgcctgctgcggctatgtcatcgcctgaggcctcgtcccatcttccgtgaggtcataccactgggtccagcctttggcaagttcttcagatgccagagcaaccaatactttgccaaggagccctttgtctttggacaggaagccgccgctgttcttcacggcaacgtcgagcgttctcctctgcacttctggtaacgaaacactgaaatcaaagctttgatcaaacactggatttaatgttttctttgacacgtgtgttttcctccttcctgaccgcctcttgtctggtaataaatacatgcggacataggggtcagagccgtcttcagagaaggcaatgaggtttctgcaggcatgcacgaccacgataagcttgtttctctgcgagctgtgccggatggtcagctggatctgccccagtggagactgtcccagggtcgtcccgctgtgggaaaagagcagaaagtcaccagcttgcctgagactggagaacgttgtgattcattggtccactgtacacgataaaataatttctattcatttagacaaaaagaagtcaaattacccatgaacttaaacataatttgaaacttctgggtacaagtcaaacagatgaatattttacttgagggttcaatataaattaattattcaaaactgacattatttcttttgtttttgttttttgagacggagtttcactcttgttccctaggctggagtgcaatggcgcaatcttggctcactgtaacctccgcctcctgggttcaagcgattctcctgcctcagcgcacgcgtggntctccccngcggttcgcagtacactcaatggcctcagttcaagcactt

SEQ ID NO: 59196 - DNA, 1032 bp, Homo sapiens
ctgtggggcagaggcgctgctgtggttggtcagtccagtaagaagccagcagggctggtgctggggcttcttctcctgaaggggctgcaagagggaaggcttagccatgtcgtccttgatcagaagggtgatcagcaccgcgaaagccccaggggccattggaccctacagtcaagctgtattagtcgacaggaccatttacatttcaggacagataggcatggacccttcaagtggacagcttgtgtcaggaggggtagcagaagaagctaaacaagctcttaaaaacatgggtgaaattctgaaagctgcaggctgtgacttcactaacgtggtgaaaacaactgttcttctggctgacataaatgacttcaatactgtcaatgaaatctacaaacagtatttcaagagtaattttcctgctagagctgcttaccaagttgctgctttacccaaaggcagccgaattgaaattgaagcagtagctatccaaggaccactgacaacggcatcactataagtgggcccagtgctgtgtagtctggaattgttaacattttaatttttacaattgatgtaacatcttaattaaccttttaattttcacaattgatgacagtgtgagtttgatgaaaatatctgaagctattatggaaataccatgtaatagggagagttgaacatgaatattagagaaggaatccagttacttttttaaattacacctgtgtgcacctgtattactgaatataggaaagagatacccattacatagttactcagtaaacaaaagagaaataccagggtaggaaagaagagtttactatttcctgagaaataatcaagaacatatttaatttaaactaatgatgtgaactatttagttttgatgtccgttatgtgattctgcttttacttgagtaaaattaaagtgtttaaatttgagatcaaggagaagatatgtggaacaaaatgttatatagataatatttttctaatggaaataaaataggcagatttccaaaaaaaaaa

SEQ ID NO: 59197 - DNA, 1503 bp, Homo sapiens
gccggcttgctttcccctgcggtcgtccagactattgggcgctagcgagacgaactattggtacggggctagagaggaaggctttgggattgccggggagcagcgagcgaccgacttccgtttccagttaccaaggcacgaggatccggtgttccaacccagggggaaaaatgcggcctttgactgaagaggagacccgtgtcatgtttgagaagatagcgaaatacattggggagaatcttcaactgctggtggaccggcccgatggcacctactgtttccgtctgcacaacgaccgggtgtactatgtgagtgagaagattatgaagctggccgccaatatttccggggacaagctggtgtcgctggggacctgctttggaaaattcactaaaacccacaagtttcggttgcacgtcacagctctggattaccttgcaccttatgccaagtataaagtttggataaagcctggtgcagagcagtccttcctgtatgggaaccatgtgttgaaatctggtctgggtcgaatcactgaaaatacttctcagtaccagggcgtggtggtgtactccatggcagacatccctttgggttttggggtggcagccaaatctacacaagactgcagaaaagtagaccccatggcgattgtggtatttcatcaagcagacattggggaatatgtgcggcatgaagagacgttgacttaaaacgaagccattccaaggacagacggctgtatggaaaggccgagctttgtttcctgtgtttgtgtggactccaccatcatgttgaattttgtcaacactctggcctcttcagggacttcttatttactgtactctctatcactgacaaatgcaggctggattcttattatatacagagatggctcaaaaatggggtttcagatctttgtgacgaaatagaatactgtttcatatttgaatcagagggcttcttgttctgagaaataggttcaaaatcattggaaccaggaacaagaatagcttattgttatctgtgataacactgttttctaaacacaaggattttcttttttattaatatgcaacatagacattgccataacagaataataaaccacatgtggggttttaaaaatgaaatttggctaataggagcaattcagctatttttctatacagtaattggtgtgtggtatagaagaaaaacgggttcaaaccccacttctgccacctaccagctatatggccttgaatgagtcattcagctttaataaggttcattttcttctgtttaaaaagacacaaaacttgaaaatcagctttggccatctacctgagaattagaaagtctgatttttggaattagaaatcatgattgtaggctgggcacagtggctcgcgcctgtaatcccagcactttgggaggccaaggcggacggatcacttgaggttaggagtttgagaccagcctggccaacatggtgaaaccccatctctactaaaaaaaaaa

SEQ ID NO: 59198 - DNA, 1622 bp, Homo sapiens
ttttttttgagtttaacacagattttattgccctatagacagttatgatgtgaccagtggatatcaatgaaacttcttaattatttgagtctgaaaatgcatatttaaaacattaaaagattgactccactttgtgccaagctctgcgggtaggcatatttcatatcttaaaaaggcttgtaattcattcagggaggcaaaagcaaaatctgtaattagaggttagccataatgttatgaaaagtgccatgagaatagagagagagaataaaatcataaagatataaataaacatatttgaactacaggtgatgtattgtcttaaattacttctatatcataatcccggagggccttcaatggaaaatcctaggtagaaagacactctttctatgttcctaccacttctgagtggacctgaataaacagatattactggtatttttattttttcctctgttccatattctacagagattagcttgccttcagcctgaccagttagacgacgcaggaggtctttgacttcattttttttccacacatccccactgtgccagagggaatttgtattttgtgctttatcaaagtactgctctattttggccttgtgaacaatactgtttagacccttccttttgcccagatagaaaagtgtgcttgcctgcttggacctgcacatgcgcttgtactgtcccctgaaggatctatttaaggatgaaacatacttttctattagtttggaatcttgatctagctcttgattttctggccagaacaggaggcaggccaagaaataaggacctggatattgatgacttagtcctacaaattgcaagacctctcggagttgtttttttagcgtggtaagtggttgaattaacttggagttgggctttagacaactcagaataatgttggccaaaatggaattttgtttctcatttgtcatgggcttttttgagttttgctgcagtaggaaggcatattcattcactatactttccatggtggtagcatctttgtagtttggattaagatattccaagagtccagcaaacctatctgctctcagagcttctagctttttcctgcaattctcctcctggagtaattgactctctttactttgtaatagacatggatccaaatgacagaaaagttctgtgtatttcctgaaacaacgactgactttcttgcttaacatgatttctgcaatttctttttgggtatacctcattttcagaagaaccatataatcaataaaaaagtcaaagcaccttttcagatctgattgtaaattttttaggtgggatgtgaacttgctaagagccaaataacattcatttctgggatcaggaggaatggtccactttcctgataaaaattgcaccatatgttttttggataattcattttctttgtggaaaaagggagtgagctgaagaatctggatagtgtaaagaccaacttctatttcacccaagaaacaagctgtgttatacatgtcatatcgtctctgggacttctgtggtgaccagttctcggtttcatagtttttactatcagtttgcctttgggattctttgaaagctcttgaggctttttccgcagcttctagg

SEQ ID NO: 59199 - DNA, 782 bp, Homo sapiens
ttttttttttttagattataaaaacttcctctttaatcaaggcttttaacatgaacagatttcttgaataaaatggaaagtttccagtacactgaaacataaatccgcaagtcaccacacatacaacacccggcaggaaaaaacaaaaacagcaagtttacatgatccctgtaacagccatggtctcaaactcagatgcttcctccatctgccaagtgtgttctggatacagagcacatcgtggcttctggggtcacactcagcttaggctgtgggtccacagagcactcatctggctgggctatggtggtggtggctctactcaagaagcaaagcagttaccagcacattcaaacagtgtattgaacatcttttaaatatcaaagtgagaaacaagaaggcaacataataatgttatcagaaagatgttaggaagtaaggacagctgtgtaaagcttgaggctgaaaagtagcttgccagcttcatttctttggtttcttgggtagtgggcgccggaacagcaagatgtgaggttctggttcatggatcatataatggacccatccctgactctgctgaacgccaagattcctccattcagattcagacatcagatgggttttagggaccagcttggctatgtccttgggcagcatgacatgtcgatactcaaactcctcgtcgtcgtatttgtccgaatagtaaatttgtttgtgcgacatgatcgctcggtttgctagccttcagccccgcgccgccaacctccaagcaacctcgtgcc

SEQ ID NO: 59200 - DNA, 1460 bp, Homo sapiens
ttttttttttttgttccttctgtttatttcattttggatgctcagtgaatgttaattaaccaggaaacttaaaagttatttcaattatgaacctcttcaatccttcatcaattattttgagtattctggtcttaaaaacatctctttcttctacaaacttctgaaagagatgaacacctccacctacaccaaaataatgtgctttgctggccaaaagtacacgtccatttttacttaacagtctaaggaaagtctggtgcaaattactataataatctgggttgtaaatggtttctgaggtgagaatgagatcatattttacaaaaagtttttcactacttagtacaagcttacaaaactcagaccactcaccagaaaaaaatcggcatttatatagttgtgttacttttggtttcctgcatcttttcacatctggctcatttacatcattttcttcatcttccaaagtggagttagctactacattaggtaaggttacttcatcaatcaccatactgttataatcttgaaagtgaatttctttggaccctcccttgaatgcagttatacctagtaaacctgatccacaaccaagatccaagacttttttcccagcaaatttcactttggcctttgtgaaataagccaggaggtcaaaggtacattcccagatttttaagcctccctcataaacacctgtaatcagatcagagtgagaagaaaagctttttgaaactatgttttctccagggaagttctctttcaacaagatggttttcactactgataacttaacatgctggaaacctggtaatgtttctatgactttattttctaacatcttctttaaatctttaggcatagcatgctctttggcagctctcaaggagggctgttttccatgtggctccaagttccttgaactgctggctgcactgagtggactgtctgtgtcttgagagggagctgcattttccattgacttatgttcccacaagtgatcctgaggcaagtcaaattgttctgcagaacattttctgtccctctcttctcctttttgactttctgagactgacagctcttttgaggaatccagggtcaaagctccatctctaatgggtgttaattcattttccagatggtcttctatagtgaaattaaactgaaaggtcatcctcttattaaatgcacacaatctttaaattcagattcttcaacttctggatagaatttgatgatacacacaaatctgcctcaattattcaattagttttgttgggcccaatttctctttagcagcttatacatggtaacaaatatttagagatatttccaaatgactttttagacgtctttggtcctctttccaagcagctctggggatgcttgcttcccgacgtgtcctgggatcgcgcttctgaaaaagctcacctcacaacgcctcctccggacctaaatcg

SEQ ID NO: 59201 - DNA, 3091 bp, Homo sapiens
cggacgcgtggggtaagagaaaggggaaggggaggtgggagaggcacctcaactttgatgtcccgagccttgagtggccactcgcaagctggccaagggcttcacacaatttgccaagatgacagaggggaccaagaagaccagcaaaaagttcaagttcttcaagttcaagggctttgggagtttctccaacctccctcggtccttcactctgagacgatcctcagcttccatcagtaggcagtcccatttggagcctgacacctttgaagccacgcaggatgacatggtgacggtgcccaagagtcccccagcctatgcccgctccagtgacatgtacagccacatgggcaccatgcctcgccccagcatcaagaaagcacagaactcacaggctgcccggcaggcccaggaggcgggtcccaagcccaacttggtacccggaggtgtacccgaccccccaggcttggaggcagccaaagaggtgatggtgaaggccactggccctctagaggacaccccagcaatggaacccaacccttcagcagtggaggtagaccccatcagaaagcctgaggtccccacaggagacgtagaagaggagagacctcccagggacgtgcactcagaaagggctgctggagagccagaggctggcagcgactatgtgaagttctccaaggagaagtacatcctggactcatcgccagagaaactccacaaggaattggaggaggagctcaaactcagcagcacggatctccgcagccatgcctggtaccatggccgcatcccccgagaggtctcggagaccttggtacaacgcaacggcgacttcctcatccgggactcactcaccagcctgggcgactatgtgctcacgtgccgctggcgcaaccaggccttgcacttcaagatcaacaaggtggtggtgaaggcaggcgagagctacacacacatccagtacctgtttgagcaggagagctttgaccacgtgcccgccctcgtgcgctatcatgtgggcagccgcaaggctgtgtcagagcagagtggtgccatcatctactgcccggtgaaccgcaccttcccactgcgctacctcgaggccagctatggcctgggacaggggagtagcaagcctgctagccccgtcagcccctcaggccccaagggcagccacatgaagcggcgcagcgtcaccatgaccgatgggctcactgctgacaaggtcacccgcagcgatggctgccccaccagtacgtcgctgccccgccctcgggactccatccgcagctgtgccctcagcatggaccagatcccagacctgcactcacccatgtcgcccatctccgagagccctagctcccctgcctacagcactgtaacccgtgtccatgccgcccctgcagccccttctgccacagcattgcctgcctcccctgtcgcccgccgttccagtgagccccagctgtgtcccggaagtgccccaaagacccatggggagtcagacaagggcccccacaccagcccctcccacacccttggcaaggcctccccgtcaccatcactcagcagctacagtgacccggactctggccactactgccagctccagcctcccgtgcgtggcagccgagagtgggcagcgactgagacctccagccagcaggccaggagctatggggagaggctaaaggaactgtcagaaaatggggcccctgaaggggactggggcaagaccttcacagtccccatcgtggaagtcacttcttccttcaacccggccaccttccagtcactactgatccccagggataaccggccactggaggtgggccttctgcgcaaggtcaaggagctgctggcagaagtggatgcccggacgctggcccggcatgtcaccaaggtggactgcctggttgctaggatactgggcgttaccaaggagatgcagaccctaatgggagtccgctggggcatggaactgctcaccctcccccatggccggcagctacgcctagacctgctggaaaggttccacaccatgtccatcatgctggccgtggacatcctgggctgcaccggctctgcggaggagcgggcagcgctgctgcacaagaccattcagctggcggccgagctgcgggggactatgggcaacatgttcagcttcgcggcggtcatgggtgccctggacatggcccagatttctcggctggagcagacatgggtgaccctgcggcagcgacacacagagggtgccatcctgtacgagaagaagctcaagccttttctcaagagcctcaacgagggcaaagaaggcccgccgctgagcaacaccacgtttcctcatgtgctgcccctcatcaccctgctggagtgtgactcggccccaccagagggccctgagccctggggcagcacggagcacggcgtggaggtggtgctggctcacctggaggccgcccgcacagtggcacaccacggaggcctgtaccacaccaatgctgaagtcaagctgcaggggttccaggcccggccggagctcctggaggtgttcagcacggagttccagatgcgccttctctggggcagtcagggtgccagcagcagccaggcccggcgctatgagaagttcgacaaggtcctcactgccctgtcccacaagctggaacctgctgtccgctccagcgagctgtgaccccagggacatttcccctctgcagctgcggacagcgtcaggggcagaggggcacacaactttccccagagcaccccaaggacactgtgatcaacccgagaatgttctgggttcaactcaagcatctcccttgcacctccagggtcctgcgtggactctgggttccatcccacctgctacatgctcaccaggtctccattgaggaagaacaggaacgccggttcccccaccagcttttgctgctccccttcctgctggggttccctgttttcgagccatgggaggcaggctgctcacgcctcctcactctctgtctgtccctcaccaacaccaaggcctccatctcactgtaaataagtctcttgttcttgtaaataagatgtacagaag

SEQ ID NO: 59202 - DNA, 3407 bp, Homo sapiens
gttatttttcaggagaagcgctacaaagcagccactgtgcttactgaacggcctccccctgtatcgcttaattgagaaggtatacaaatgctctcagtccagccagacaccaagccgaaaggttgtgctggctgcaaccgaaagatcaaggaccggtatcttctaaaggcactggacaaatactggcatgaagactgcctgaagtgtgcctgctgtgactgtcgcttgggagaggtgggctccaccctgtacactaaagctaatcttatcctttgtcgcagagactatctgaggctctttggtgtaacgggaaactgcgctgcctgtagtaagctcatccctgcctttgagatggtgatgcgtgccaaggacaatgtttaccacctggactgctttgcatgtcagctttgtaatcagagattttgtgttggagacaaatttttcctaaagaataacatgatcctttgccagacggactacgaggaaggtttaatgaaagaaggttatgcaccccaggttcgctgatcctatcaacatcaccccattaagaatacaaagcactacattcttttatcttttttgctccacatgtacataagaattgacacaggaacctactgaatagcgtagatataggaaggcaggatggttatatggaataaaaggcggactgcatctgtatgtagtgaaattgccccagttcagagttgaatgtttattattaaagaaaaaagtaatgtacatatggctggatttttttgcttgctattcgtttttgtgtcacttggcatgagatgtttattttggactattgtatataatgtattgtaatatttgaagcacaaatgtaatacagttttattgtgttaccatttgtgttccatttgcttctttgtattgttgcatttagtacaatcagtgtttaaacttactgtatatttatgctttctgtatttaccagctattttaaatgagctgtaactttctagtaaagaattgaaaagcaaatctcactaatgatacacagatagataaagcaagtctatcaacattaaaaatactaaaaaataaagacacacacagagcattttagtgacatccactacttattgccgctatgagttagagtctatcagtgttcttgttataaccccctattttcaggggggttaaaaatcagctttaaaaaaatacataaaaatttcatcttaaagcactttcattttataccaacgtgaaaagtgccatttttagaataactttaaagcttaacaggtttccttttaatatcctttttttgtgtgctctttacttacacaatggctttgttttgctttttcagccacaccccttatgtgaactagtgcctttgggtatcacgtaaaattttttccaaagggttactttaaaaatctgttaccacaattatgagatgatttttaagtgataaattaaacttcttcttgtataaattctgcccagatctctccacaagagctgagggtttcataactttatggcttaataaatgtatgacactgaaaagatttgagtgtgaatctactgaaatcactataatgcacattgaagctatgatggtatttgagtagtgaggttacttttgatcggagcaacataatgctcatagaatcttctagaagaagagaaacaaagggattgataaaatgctgagaactagtgattatatatttttctgtatttacctgacatttattttaatgttcaaaaagtaaacactttaagtttgatgtgttttactctctcattgttttaagtaattgccaactcagaatacatcattcttaggctgaaatttgtctttccattttttaaggtgaaatagtactaccttacgtgatagcatacaaagaagaaagctctagaaagagaaattatggagaatgattatttaaattacaattaaggaaatgagaatatgatcccctcttccgagttgcccacaaacttgcttctttgcttttgctccctgtaatagaactacttttcaacaaatctaattttgcacggcaccgttaaccatattttcactacagcaaacttagtgctatgggttttctttttctttgtttttttcttgatcacttgtataggaaacaatattttccagtgttatttgcatatatattttgtccttccaatatatgcattacagatgaaaattaaatgttatacctgaattcttgggttggggccaaaatattaaggctggaaaataatgctgggtgtgggatttgttttaaaacaaaggcttttatttatggaacatggcatgtggaatctgggatattgcctcttatttttaagaaaatggttctgtgaaaagtgaatgatatgtatttttccaaatgcttcatggttaggagtcttcaagttccatgttccccagatttgagatatactaaagaaagaaattcaaaagtagctatttggggcccacaaaaataactattattttagccttagagccttacacttgtttcatgaagagaaaggacttgcataaccaaaataaacaaagcaagacaaattaaaaatatgtgggggagagatcagtgaaaagtggttttcttaatgcagccctgctggtccccattaacaattgcttgaaattcacatggatgtaaaattataattgtcaggatcttattcagatgatcttttaaggtttaactggttttgcttttgtttatctatatgtcaaaatacttgtaaattgggaacaaacttctctcagcttcttgaagttgttcaactatccttgccactggaagaccaaacaaggttttcactgctttttcttttacataatatgctgagaattatttcttatgctttttactacaaacaaaattactcacctggattaaagattaaggccttaatctgtttagattatctttaatctccatgaaatcgtgaaataagacaagaatagtgtttcagctgtaggccattttacagctaattgcccataaattgtagcatttattgacctgaagtactaagctaattgtcttgactactcaaagcccctgaattgttgtcaactttcccctttgtgttgggtagccctaacgtcatttagcttgttgtctgatgcctccagtaggacacctccgatggagctttgatttctgagcagcgaaagctcccttcctaagatgcatctcgcataggctgcctatgatgaaggaccgtgcacctccactccaacagagtgctgagtttaaaagttgacctgtgtttgtaatttcactttcatcttgcttaataaatatctgctggattctttcattcacttttttacatttggatttatgtttttacccaaaggggtgttcccctaaaaaaaaaaagaaaaaaaa

SEQ ID NO: 59203 - DNA, 2571 bp, Homo sapiens
agacgcagctcctcaggcgcccggcggtatttgttgggtcggcggcgtcagggattcgcagtggcctgtggtcggcgtcgtccggccactggtgcgcccccgcggcaggcagagctcacgctcctgtcccccggctggtccggggtctgggcgccgcgtcgacggcggctccgcaggacgcgcagaccgggccgcagcccatgccccgagcggactgcattatgaggcacctgccttacttctgccggggtcaagtggtgcggggcttcggccgcggctccaagcagctgggcatccccacagctaattttcctgagcaagtggtagataatcttccagctgatatatccactggtatttactatggttgggccagtgttggaagtggagatgtccataagatggtggtgagcataggatggaacccatattacaagaatacgaagaagtctatggaaacacatatcatgcataccttcaaagaggacttctatggggaaatcctcaatgtcgccattgttggctacctgagaccagaaaagaactttgattctttagagtcacttatttcagcaattcaaggtgatattgaagaagctaagaaacgactagagttaccagaacatttgaaaatcaaagaagacaatttcttccaggtttctaaaagcaaaataatgaatggccactgatgaaaaattgtattatttattcattcactgttttctagtgtttctgtgtttattactgttcagcatcatcttggttatatactgaaaatcaaacactttactacagttgtgaattagtttaaaccgtacaatgttgttatcatatcatgcttcaactattaaattaagcccatcatatcatagcactaaaaagattgagttaaaaataagatttaaaaaatatatattgattaaaatgtaccactagaaaggtattacatgtgtataagtatgggtaaaaaggcaagtcactagtttgagatgaaaactaaaattttcatggtaaaatgccagcatgtatgtacttgtgtagtgtgtacttctaaacagagaaggcttataaaagtaaatgcattaaggccaagtgcagtggctcacaccggtaatcccagcactttgggaggccgaggtgggaggattgcttgagctcatgagttcaagaccagtctgggcaacatagcgagactccatctctataaataaaaaaaaaggaaatgcattaaatagaaggttgatagtttatcataaacctgcggggaagaaactcagactttctatttttgatattttgtgcattaatacattacaaacatgaagatgtttgtaaagttttgttttagtcattttctttgcagtcacatcattgtaccaccttcattattgtatagagctgcttcaattctgagtcctctggacttcccctgcctatctgtttgttgttgttgttgaagacagtaaaataagtgttttcaaatctatatgtctcctttttgttggataatgtttcttctttttaatggtaaatattcttgttcttcaacatttttctttggttcttttttccttttttaggaaaaacaaaacaacagacttcatccttaggttttctcaagatttaagtgaacacatttacacatatcaatttcttaaagaacacaaaatgtttcctccctagcaaaactatttaagagccaattaaactatgaaatagttataaaattatttttaatatttaaggccttgaaattatattccaaggcaaatctaaatgggtgtagttgtatatgcacgatgtaatttaatgctaaagagtacttacagcttgagggaaaagcataaagttttagttaaatagccttcatactgtggatttttcctcctactaactaatatgtgggaaattaagattacagatgctttgggccccctcaaacagtacattgctacagttcactgtagcaacagatttggtggtgatggggggatagaggtagaagcagatagaaggtaattttaaagttaatttattatgaatcattttcccctaatctgcataaatgaattagaactgattttaataaaaatattctgtgtaaaaagtactcagaaaaacatctaaagctgttggagaagagggactcatataaatagttggattgcgttttgctttttatttctttataaaaatatgtcaaaaacagtttttaattttagaaatcttatacttgaaagaaacctcaattatcagtggctttatgaagtaaagttaaaaacaaacataggaaatgtgaaaatatttgtgtttgttttgtctgactaacttgctgctaaatgctatctttaggtgtgtgaaagttctttgatatgttattgtccttttacatcttgttaaatagccattgcttttgagaatcagatagtgtgttgtttaggggttaattgtgtctatatctttcaaaaacttttatattatgtattataagaagttacagtagtaccattttgattagtctgaatgttttcaggccttgaaataaattttgactaagtgataaaaaaaaaa

SEQ ID NO: 59204 - DNA, 1872 bp, Homo sapiens
ccaggacccagcagtgccctctgtccactgctctgggccattccccaatcccccctcccacttgagcccctaactcagaatctgggacccaggggcccctccctaccccagctaacctcttctggaccaggagagccaacccagatcccactacctccatgagtgctacagacaggatggggcccaaagctgtgccgggtctgcggctggcactgctgttgctgctggggctagggacacccaagtcaggggtacaggggcaggaagggctggacttccctgagtacgatggtgtggaccgtgtgatcaatgtcaatgcaaagaactacaagaatgtgttcaagaagtatgaggtgctggcactcctctaccatgaaccccccgaggatgacaaggcctcacaaagacaatttgagatggaggagctgatcctggagttagcagcccaagtcctagaagacaagggtgttggcttcgggctggtagactctgagaaggatgcagctgtggccaagaaactaggcctaactgaagtggacagcatgtatgtattcaagggagatgaagtcattgagtacgatggcgagttttctgctgacaccatcgtggagtttctgcttgatgtcctagaggaccctgtggaattgattgaaggtgaacgagagctgcaggcgtttgagaatattgaggatgagatcaaactcattggctacttcaagagcaaagactcagagcattacaaagccttcgaggatgcagctgaggagtttcatccctacatccccttcttcgccaccttcgacagcaagggggcaaagaagctgaccctgaagctgaatgagattgatttctacgaggccttcatggaagagcctgtgaccatcccagacaagcccaatagcgaagaggagattgtcaacttcgtggaggagcacaggagatcaaccctgaggaaactgaagccggagagtatgtatgagacctgggaggatgatatggatggaatccacattgtggccttcgcagaggaagctgatcctgatggtttcgagttcttagagactctcaaggctgtggcccaagataacactgaaaacccagatcttagcatcatctggattgaccctgatgacttccccctgctggtcccatactgggagaagacgtttgacatcgacttgtcagccccacaaataggagtcgtcaatgttactgatgcggataggctatggatggaaatggacgatgaggaggacctgccttctgctgaggagctggaggactggctggaggatgtcctggagggcgagatcaacacagaggacgatgacgatgatgatgatgactagttgctatggcaaccatctttcagccccactggtcttttcatgctctctcctgccttcccttgtccttccctgagttcctccagggagactaggttattctctgccatagagctaactggggtctatatgctgggtgctgagacactgatccccctcatttgatgagcaaatgagctacttttccctagacaccaggcccagctcttctcttatctgacttctgtttcttatccccataacttacgttgtatctattatgtgtctcttccatcactctccatactctttcttgtgattctcctctagccatatatatgggcccctatctctgttctgttccctccatctatgcacagctttcccccactctctctaatcctgtatctttctgactgtcctgtccttggccagaaggaagggagaatactgtgtttgggactgtatctcagcaatcacttgttaatgtatttgggtcaaatgagaggcctcaataaagacatctggggcagcatgaaaaaaaaaa

SEQ ID NO: 59205 - DNA, 1103 bp, Homo sapiens
ctggccctttcctttccgcgtgtagaatgtggggcgcctgtaaagttaaggttcacgattccttggccaccatttccatcactctgagacggtacctgagattgggggcgaccatggcaaaaagcaagttcgagtacgtgagggacttcgaggctgacgacacctgcctggcacactgctgggtggtagtgcggctggacggccggaatttccatcggtttgctgagaagcacaactttgcaaaacccaatgacagccgtgctctccagctgatgaccaaatgtgcgcagactgtgatggaagaactagaggatattgtgatcgcgtatggacagagtgatgagtacagctttgtgttcaagcggaaaaccaattggtttaaaagaagagccagtaagttcatgactcacgtggcctcccagtttgcctccagctatgtgttttattggcgggattactttgaggaccagccccttctgtatcccccaggctttgacggaagagtcgtggtgtatcccagcaaccagactttaaaggactacctcagctggcgacaagcagattgtcacatcaataatctttataatacagttttctgggcacttatacaacaatctggactaacaccagtacaagcccaagggagattacagggaactcttgcagcagacaagaatgagattttgttttctgaattcaacatcaactataataatgagccgccgatgtataggaaagggactgtgttgatatggcagaaggtggatgaagtgatgacaaaagaaattaagctgccaacagaaatggaaggaaaaaagatggcagtgacccggaccaggacaaagccatgcaagccctcccacctcccaagggctccttgccttaggtggctgtagcatccctaccacccaggacactggtgcgaatgacacaactcaagttggggaggggaacagggaaggaagggatggatgggggtggtgtatcttactctgtttaagcagaacaccttgtttgcggtgttggaacatggttcctttggcagaagtgctttttttttaatcgcagtactatttttataaagcaagaactattccatgcca

SEQ ID NO: 59206 - DNA, 1258 bp, Homo sapiens
aagaaccgagggagaagccggatgtttgcaaacaatcgaggagacgacttgcggaccagacggcgcggacgtgttcgtacccggagcctctgcgtggaagagcgcgttcgtcgcgaccctgccgctgctgttggtcctcgcggcgctggcgctgggcgtcctccggaagcagcggagaagccgagaaaagctgaggaagcaggcggagaagagacaaggtgagcggggacagggcgttctgcacgcacctgcccaagtgccaaaacccgccgtcatctaaaggctgtgggtcccgttacgagggtttattccagcgcgaggtgtcagggcggccaccggggaacggggatcggtgaccccggtggggaagggggaagatcgttcatatggacaaaagcggaggtgcggaacggctgcattttccacggaggctagtgcacagatgtcagggttgaccggctgctgtcgttacgccctcggagcttcacatcacactgtacagagggagcggtgaccagggtctctgctgccagcgccacctcgtccaggttttcatagcgcacagggagtcgggcggatgcgcaacatctccgcacagggtcaggaagcggcggtcaggcaccgagaaaacagcccagttacgtgaggcagtgtccggggcttaacgtttccgccgagctaatagatttgggaggctccgaccctgattttcacactagcaggagggagggcgctgggtcaccctcctatgcagaagggcagccaagggtgcgcacttccccatcccctgcctggagcctcacttccagcccagcctgggcccgcagaccaccgcgggtgggagtgccgcatcggaggtgaggcctcagtgttcacccatctgttctgtctgcctcattccccaacctgagagtctttccccttttcttcatcttttttttttttttgcccaaaaaaaaccccccggaaaaggggggaaattttggggggggggcccaaagggttgcttgtaagggacccttggccttgggaagggggaggggggccccctttggaacgggggggggaaaaaattaaatttaaaccctccctgggggccccccccctttccctttgtaagggggtaaaagggagggttgcttccccccggcaatttcccaaaaacctttggaaaaaacctggcaagctctcccctggaaaataaaacattccagtaaaaattcttaaaaaacggttaatgggttccgggttatttttt

SEQ ID NO: 59207 - DNA, 791 bp, Homo sapiens
  misc_feature (1)...(791): n = a,t,c or g
agcagcaaggagtacatttcccaacacaggaaatgccggtggctgttggctctggccccagcctcttctctgctcccggtttttttcttggattcctggaatccttgggggtcagagactcattcagagagcaagactctggtctctgccctgcttcagcacccaaatctttagggagctggctggtgggctgccaggcagttaggcctatggagagctgctgtcagtctctctaggaggccatggtttcctgcatgtgggggagagccccatcccccagactctggagtgagtttaatttcccaaggcaagtctgcctgattgtcctctcctttccttaccttcagcaccaagaagtttccggtcccggtacagatcagtgaggaagaggctattgacaagtgtggatttgcccaggccaaactctcctgagaggagagaggacagaggcaccaaatcagaagggacccttctctgggctgtctgatagtctgcagagacacagctgcttccgtgctctaggagagagggactccttggagatctgatctcactagtagtcgtaattctttggatgggctcagtttgtactgcttcatcctttgggtaagacaaaatcctacggggaactctgactccttgggggttctggaccttggatggtgggtcatcttctaagatttgtgattgtaagttattcttctggtcttgaaaactcaactgatgagtagatttggcatctgggattgatgaagcatgatggcccgacctcggcgncctgactttgctct

SEQ ID NO: 59208 - DNA, 1769 bp, Homo sapiens
tcagatcgcccagagtggcgcggtatcgccacttggagaccaccgcgaatgaagtttgcattttcctctgttcttgagcccagcttcttctcgtctcccaccccagcttcccggcattggaagaagggaccgtcctcttccttgtcttggccacccaaatcctggtatcgaaagggttgaacggaccggaagtgtgcagcagcgacgggtccccagctaatcgacgccggaagtagcaattactagacaagcattccgccgccggcttcgctatggcggcaattcccccagattcctggcagccacccaacgtttacttggagaccagcatgggaatcattgtgctggagctgtactggaagcatgctccaaagacctgtaagaactttgctgagttggctcgtcgaggttactacaatggcacaaaattccacagaattatcaaagacttcatgatccaaggaggtgacccaacagggacaggtcgaggtggtgcatctatctatggcaaacaatttgaagatgaacttcatccagacttgaaattcacgggggctggaattctcgcaatggccaatgcggggccagataccaatggcagccagttctttgtgaccctcgcccccacccagtggcttgacggcaaacacaccatttttggccgagtgtgtcagggcataggaatggtgaatcgcgtgggaatggtagaaacaaactcccaggaccgccctgtggacgacgtgaagatcattaaggcatacccttctgggtagacttgctaccctcttgagcagctcttctgagatggccccagtgaaccagcttctagatgacatagaatgacatgtaatgctaaattcattttggctttgcaagtcatgaagcttaggaggcctggcatcttgggtgagttagagatggaagtacattttaataggatgcttcttttctcttcccccagtgcctaggttgccagagcatttgcacaaatgcccctgtttatcaataggtgactacttactacacatgaaccataatgctgcttcttgtgcatgtctgctctgatatacgtcgaacaatgtagcagccactgtcatttctcagtggttttgcctaaccaaacttcttcctaaggagatttatattctggcctacacagcagtccttgatggctgacagccacagaattccaaaccaagtagtgtctgtcagccctcttaactctgtgcacgccctatttcagtcttttacatttgttcttctagggaatgtatgcatctctatatatattttccctctcaaaaccagaacatcaacagtgctgtttctgacacttcagacatcccacgcaaagccacattgaatttttgccaaatgaaaaacacatccaacaatcaagtttctaagaaggtgtcaagtggggaataataataatgtataataatcaagaaattagtttattaaaaggaagcagaagcattgaccattttttcccagagaagaggagaaatctgtagtgagcaaaggacagaccatgaatcctccttgagaagtagtactctcagaaaggagaagcgccactcaagttcttttaacccaagactttagagaaattaggtccaagatttttatatgttcagttgtttatgtataaaaataactttctggattttgtggggaggagcaggagaggaaggaagttaatacctatgtaatacatagaaacttccacaataaaatgccattgatggttgaaattaaaaaaaaaa

SEQ ID NO: 59209 - DNA, 2061 bp, Homo sapiens
tttgatcgcctgcgatccccccggaataccgggcgacccacgcgtccggtctgaagccggtaaacatggccgtcaccgacagcctcagccgggctgcgactgtcttggcaactgtgttgctcttgtccttcggcagcgtggccgctagtcatatcgaggatcaagcagaacaattctttagaagtggccatacaaacaactgggctgttctggtgtgtacatcccgattctggtttaattatcgacatgttgcaaataccctttctgtttatagaagtgtcaagaggctaggtattcctgacagtcacattgtcctaatgcttgcagatgatatggcctgtaatcctagaaatcccaaaccagctacagtgtttagtcacaagaatatggaactaaatgtgtatggagatgatgtggaagtggattatagaagttatgaggtaactgtggagaattttttacgggtattaactgggaggatcccacctagtactcctcggtcaaaacgtcttctttctgatgacagaagcaatattctaatttatatgacagggcatggtggaaatggtttcttaaaatttcaagattctgaagaaattaccaacatagaactcgcggatgcttttgaacaaatgtggcagaaaagacgctacaatgagctactgtttattattgatacttgccaaggagcatccatgtatgaacgattttattctcctaacataatggctctagctagtagtcaagtgggagaagattcactctcgcatcaacctgatcctgcaattggagtccatcttatggatagatacacattttatgtcttggaatttttggaagaaattaacccagctagccaaactaatatgaatgacctttttcaggtatgtcccaaaagtctgtgtgtgtctactcctggacatcgcactgatctttttcagagggatcctaaaaatgtactgataactgatttctttggaagtgtacggaaagtggaaattacaacagagactattaaattgcaacaggattcagaaatcatggaaagcagctataaggaagaccagatggatgagaaactaatggaacctctgaaatatgctgaacaacttcctgtagctcagataatacaccagaaaccgaagctgaaagactggcatcctcctgggggctttattctgggattatgggcacttattatcatggttttcttcaaaacttatggaattaagcatatgaagttcattttttagagttgatgatgaatgaagaatgcatggaggactgcaaacttggataataatttatgtcattatatatttttaaaaatgtgtttctcttgtatgaattggaaataagtataaggaaactaaatttgaatcaactattaattttataacttaaagaaaaataattgttaatgcaactgcttaatggcactaaatatattccagttttgtattttgtgtattataaaagcgaatgagacagagatcagaatacattgactgtttttgaaaatagtaatttccccttatccccttttcatttggaaaagaaacaattgtgaagacattaaattctcactaacagaagtaactttggttaattattttttgtatatcctcccaatcttttgacttatgcacatattttttcccaatatggagatcatatggaatgtactattttgtaatgtcttttttcattttacaatgtattatcaaccttttccctctcaaaaatacattgtgaatgactgcatagtattcactttatgaatatttaattcatttcacagtcttctattgttggaccacttacattgtaccaaatgttttcctttggtttattctttaatgtattaatattttactgctggtcactcatggaatcctgcagctttaattaaaagcaaagatgaaaaattggttttttaatctatggcactgacaatctccaggaccttatatgtttgttgtcagtttatttgggaaattttagacctttgataatttcacgtactgactgctcaagagaaacataccccattgtttttca

SEQ ID NO: 59210 - DNA, 2184 bp, Homo sapiens
  misc_feature (1)...(2184): n = a,t,c or g
agggcagttccggcccaggggcggggattatgttattttcccaaaagccccacctcgcctcatccgggcgggagagagggaggtctcgcgctttccccggggttgcgtcccgccccgcaggctgcgcgcaggcgctgacgagccgctcgcattctacgtaacggacggcggaggctacgtgaagagaggcgcggcgtgactgagctacggttctggctgcgtcctagaggcatccggggcagtaaaaccgctgcgatcgcggaggcggcggccaggccgagaggcaggccgggcaggggtgtcggacgcagggcgctgggccgggtttcggcttcggccacagctttttttctcaaggtgcaatgaaagccttccacactttctgtgttgtccttctggtgtttgggagtgtctctgaagccaagtttgatgattttgaggatgaggaggacatagtagagtatgatgataatgacttcgctgaatttgaggatgtcatggaagactctgttactgaatctcctcaacgggtcataatcactgaagatgatgaagatgagaccactgtggagttggaagggcaggatgaaaaccaagaaggagattttgaagatgcagatacccaggagggagatactgagagtgaaccatatgatgatgaagaatttgaaggttatgaagacaaaccagatacttcttctagcaaaaataaagacccaataacgattgttgatgttcctgcacacctccagaacagctgggagagttattatctagaaattttgatggtgactggtctgcttgcttatatcatgaattacatcattgggaagaataaaaacagtcgccttgcacaggcctggtttaacactcatagggagcttttggagagcaactttactttagtgggggatgatggaactaacaaagaagccacaagcacaggaaagttgaaccaggagaatgagcacatctataacctgtggtgttctggtcgagtgtgctgtgagggcatgcttatccagctgaggttcctcaagagacaagacttactgaatgtcctggcccggatgatgaggccagtgagtgatcaagtgcaaataaaagtaaccatgaatgatgaagacatggatacctacgtatttgctgttggcacacggaaagccttggtgcgactacagaaagagatgcaggatttgagtgagttttgtagtgataaacctaagtctggagcaaagtatggactgccggactctttggccatcctgtcagagatgggagaagtcacagacggaatgatggatacaaagatggttcactttcttacacactatgctgacaagattgaatctgttcatttttcagaccagttctctggtccaaaaattatgcaagaggaaggtcagcctttaaagctacctgacactaagaggacactgttgcttacatttaatgtgcctggctcaggtaacacttacccaaaggatatggaggcactgctacccctgatgaacatggtgatttattctattgataaagccaaaaagttccgactcaacagagaaggcaaacaaaaagcagataagaaccgtgcccgagtagaagagaacttcttgaaactgacacatgtgcaaagacaggaagcagcacagtctcggcgggaggagaaaaaaagagcagagaaggagcgaatcatgaatgaggaagatcctgagaaacagcgcaggctggaggaggctgcattgaggcgtgagcaaaagaagttggaaaagaagcaaatgaaaatgaaacaaatcaaagtgaaagccatgtaaagccatcccagagatttgagttctgatgccacctgtaagctctgaattcacaggaaacatgaaaaacgccagtccatttctcaaccttaaatttcagacagtcttgggcaactgagaaatccttatttcatcatctactctgtttggggtttggggttttacagaggtttgaagttaccgggaagggctctgttttccaggatttttttttttccggttattcaattntttttggttatttttntaaagggattgtccttggaaatctgtgtaggtttttaatattttnaaaatttntattncaatcctccgtgctttagtacttcngtgtttaaggantccctgaatttntaggtggtacccgtttttt

SEQ ID NO: 59211 - DNA, 2142 bp, Homo sapiens
agaggcctgcgcccacaccctctcctgtccagccttcgcccgcctgggcagggcccggcgccgtccgtggatgagccacagaacctcttccaccttccgagcggagagaagtttccattcctcttcttcttcctcctcctcttccacctcctcctcggcctcccgtgccctcccggcccaggacccgcccatggagaaggccctgagcatgttttccgatgactttggcagcttcatgcggccccactcggagcccctggccttcccagcccgccccggtggggcaggcaacatcaagaccctaggagacgcctatgagtttgcggtggacgtgagagacttctcacctgaagacatcattgtcaccacctccaacaaccacatcgaggtgcgggctgagaagctggcggctgacggcaccgtcatgaacaacttcgctcacaagtgccagctgccggaggacgtggacccgacgtcggtgacctcggctctgcgggaggacggcagcctcactatccgggcacggcgtcacccgcatacagaacacgtccagcagaccttccggacggagatcaaaatctgagtgcctctcccttccctttccctgtccccccgccccacgcctgccagcaaagcctcgctaaccccattacaacagctccaggacatctcagcccaggttctagcccccacgcaccccagaccccaggtggaccatcctcccaaactagggccctccactctatccagggcaggccagggactccctggcctgacacatgatgcccagatttcagatttggcctccgtcacttaatccagagtacaggggctggggtcagggaaggaagatctaaagaacccactgtgggtcaggggaatgggaccagcaggacatatgggcaagctctgcaggacagacaggcagacaaaccctctgatctatgaagtctctgcagggcaaggggaccagggacctggaaccctcttggccaaggggagtgggagagacagagggaaggtcacaggcaagggtgcctatctaagtggaactaattgcccgagggctcagcaaggccaagaggagacagccgtgacggtaaacttcccctctaccagcctccaagccccacgccagcgagcaggctgcctgcccaccccgtgcccccagccagctggctgtgccagggcagagccatgccacatctgtatatagatggggtttttccaatacagctggttcgtgataaactgcatgaaactcctgccgtcctgcgcctgctggggcctccaggcaaggccaagtggggttgggggtggggctggtccttctccctcccacaggcctgtgttcttggggctgctcccatgcagacaggatcacctaacagagatggaagccagggcatggatggggctttgggtcctcgaggttggaccccagcttcttgccaccttcccctccgggcagtcagctctccatccatccccctctttaatctatgaatctataggctcggtgtgtgtaacacacacacccctatcgttgtccttcaaatactcagcattaccattggttgaggccaaattcagagctttctcaaatcagatttacaatctccattttcattaacggggaaacatccccgagccactgagtgctgtgctttgtcactgaaggttagatctgaacccagggtgtcaacagctgctctcaactccccacctctgggcactgaggagtatttcccctcattctacctctctaaggctatgcacccctccccacgtcttccagctgggggatggggggagtcataggaaaagcccccatctcccatctgggatagggaccttccatcagccttaaccctgggaaatgcctgctgcccccagtgactcttggtttcgtctcccacatacagaagcagggtggaggggaagggtgggtctcagttagcaggggtccccagggcaagtcagcctcctccctccatgcctctctggtcagtgtgccttagggtggcctctcactcccaccactctgggccccttgggggaggactggggagggggccgtgggagagccctgacgctggaacctgtatacacaataaaggacagtctcacagaaaaaaaaaa

SEQ ID NO: 59212 - DNA, 752 bp, Homo sapiens
caagatggcggtgctgtcagctcctggcctgcgcggcttccggatccttggtctgcgctccagcgtgggcccggctgtgcaggcacgaggtgtccatcagagcgtggccaccgatggcccaagcagcacccagcctgccctgccaaaggccagagccgtggctcccaaacccagcagccggggcgagtatgtggtggccaagctggatgacctcgtcaactgggcccgccggagttctctgtggcccatgaccttcggcctggcctgctgcgccgtggagatgatgcacatggcagcaccccgctacgacatggaccgctttggcgtggtcttccgcgccagcccgcgccagtccgacgtcatgatcgtggccggcacactcaccaacaagatggccccagcgcttcgcaaggtctacgaccagatgccggagccgcgctacgtggtctccatggggagctgcgccaacggaggaggctactaccactattcctactcggtggtgaggggctgcgaccgcatcgtgcccgtggacatctacatcccaggctgcccacctacggccgaggccctgctctacggcatcctgcagctgcagaggaagatcaagcgggagcggaggctgcagatctggtaccgcaggtagcgccgccgccgccgccgccggagcctgtcgccgtcctgtccccagcctgcttgtgtcccgtgaggttgtcaataaacctgccctcgggctgccgccaaaaaaaaaa

SEQ ID NO: 59213 - DNA, 1241 bp, Homo sapiens
tccttcgagctactccgtctggccccgccttttctctgctctcctgaacctttaggcttgtctcggcccatttgaagaccaggaagttgatcaatcccgaggctgctgagagacggtggcgcgattgggacagtcgccagggatggctgagcgtgaagatgcagcgggtgtccgggctgctctcctggacgctgagcagagtcctgtggctctccggcctctctgagccgggagctgcccggcagccccggatcatggaagagaaagcgctagaggtttatgatttgattagaactatccgggacccagaaaagcccaatactttagaagaactggaagtggtctcggaaagttgtgtggaagttcaggagataaatgaagaagaatatctggttattatcaggttcacgccaacagtacctcattgctctttggcgactcttattgggctgtgcttaagagtaaaacttcagcgatgtttaccatttaaacataagttggaaatctacatttctgaaggaacccactcaacagaagaagacatcaataagcagataaatgacaaagagcgagtggcagctgcaatggaaaaccccaacttacgggaaattgtggaacagtgtgtccttgaacctgactgatagctgttttaagagccactggcctgtaattgtttgatatatttgtttaaactctttgtataatgtcagagactcatgtttaatacataggtgatttgtacctcagagcattttttaaaggattctttccaagcgagatttaattataaggtagtacctaatttgttcaatgtataacattctcaggatttgtaacacttaaatgatcagacagaataatattttctagttattatgtgtaagatgagttgctatttttctgatgcccattctgatacaaatacttttcatgtccaatatctactgtgcccaaatgtactcaatttaaataattactttgtaaaataaataagcagatgattcttgtaaaaaaaaaacacagctgggcatggtggctcatgcctgtaatcccatcactttgggaggctgaggtgggtggatcacaaagtcaggagttcaagaccagcctggccaatatggtgaaaccctgtctctactaaaggtgtaaaaattagctgggcgtggtggcgggtgcctacagtcccagctgcgcaggaggctgaggcaggagaatcgcttgaacccgggaggtggaggctg

SEQ ID NO: 59214 - DNA, 1481 bp, Homo sapiens
cgacccacgcgttcgcgcgatgctggcgacgctggcgagggtggcagctctgcgcaaaacctgcctcttctccggccggggcggcgggagggggctgtggactggccgcccgcagtcagatatgaacaatataaagccattggaaggggtaaaaattctggatctaacaagagtcctggcgggaccttttgctactatgaatttaggagatcttggagcagaagttataaaagtggagagaccaggagctggtgatgatacacgaacttgggggccaccttttgttgggacagaaagtacatattatctcagtgttaaccgaaataaaaaaagtattgctgttaatatcaaggatccaaaaggggtgaaaatcatcaaagagcttgcagctgtttgtgatgtgtttgtggaaaactatgtccctggcaaactgtctgcaatgggcctgggatatgaagatatagacgagattgctcctcacatcatctattgttccatcacagggtatggtcagacaggtccaatttctcagcgagctggttatgatgctgttgcctcggctgtttctggtctgatgcacatcacagggcctgaggtggcgtgtttgtctcacatagctgcaaattatcttattggtcaaaaggaagcaaaacgttggggtacagctcatggcagtatcgttccttaccaggcttttaaaaccaaggatggctatattgtagttggagcaggaaataaccagcagtttgccaccgtctgcaagatcttggatttgcctgagttgattgataattccaagtataaaactaaccaccttcgggtacacaatagaaaagagcttattaaaatattatctgaacggtttgaagaagaactgaccagcaagtggttatatctttttgaaggcagtggagtcccgtatggcccaatcaacaacatgaagaatgtatttgcagaacctcaggtattacacaatggcctcgttatggagatggagcatccaactgtggggaagatttccgtcccaggcccagctgtgagatacagtaagttcaagatgtcagaggccaggccgcccccgctgctcgggcagcacacaacgcacatcctgaaggaggtcctgagatacgatgacagggccatcggggagctgctcagcgctggagtggtggaccaacatgaaactcactgacaaaggaaaagggctcttcctcataacctcgatccgaatacactggcaaaggcaacactttgcttggacccttctccccagttctgataccactaaaaagaagatttagagtaactccagatttcttacatggcatctccagaatggctctggtattaatgaatctagtgccttttaaatgtatcccacgttttgttccctaccatcttttttttcagatgatgatttcattatggatttgtgggatttttaaaaataaagttttaatttttttcctggaaaaaaaaaa

SEQ ID NO: 59215 - DNA, 2138 bp, Homo sapiens
ttttttttttttaaggttctcaagaattttattataaaacagaacaatgacacaatataagcttacacattaatatttacattatattcaaaatatattacagctttaatttatgaacagaaatatcctgtcttttcttctttttcttttctgttttctttgcatcattgatttgcatttttacttgatcttgtaatttagaaaagaatgcttgagaggactttaaggccttgtctttaccttcatcctttatgaaggaagctttgccagttttggtcagctgttttaacttctccgaagctactgttttgctgtatttccctgcttgatctacactgctcttttcaagcagttttctccgcttctccttctcttttattttcatacgcttttgatatttctttttccttcgctctcgtttcttgtctgtagctgttttttcagcagctgtttttatatctccagctttatttttctccttgatctcctctggggccaggagagctgcatcactaacactcactggggctacttcctccatggttatggctggcagatttgacacaactttaatctctggtacaggcggtttagggataaagtggaagtttgagagggcatccaattttaagaagagggaatccatcatcttctgaatttctacatgttctggattttcttcttctgctgttttttgctggttgagtttgatgtactcctgttcataaatttcagcaaggctcaatttactcttctcatggtctaaggttaaacgctttttatattcatatgcatcctctttaggtttttctttacgtactacatcatcccaagcctgatctcttatcctctgtttaatgatatcttccatttgaagggtggtttcctctgtaatcacaggtgccatccggacagcatggtcaaagtgtagggtctcctccaggaggctgttctctggcctcttctgtgctgtcacttccccctgaagctgccacggctttttttctaacaactctttttctaaagatgcaattttttcattcatcttttcctgtcttttttcaaaggaggatttaacttcatcagaatttttctttacatttaaaacacctgtatcttcagtttccgcatcatctggtaaagcaaaggtcactcttttcaagctttctttatgttgtttattgtcttcattttcttgaaggtcatcatcttcatccgtttccgaaatacttagttcttctgcttcttcttcagcaatttcatcatcttctttgtttgaatccagctcatcatcatgaacatttgttatgtcttcatcactttcaactggatcaaaaaaatctttgtatttcagatttctggaacttttacctgacttaagttttttacttccaaacagtcccccttcatcttcatcagaatcaatatcttcaaaaaaatcaatatcttcctcctcctcatcatcattatcatcttttcgttcctcttctttttctatgttttctaaataggcctccatttcagagagtttgaagaatttatcatctactatggacttttctcttggttttccctgtcctttgttttgcaccttgctctgctgttccaatttgctgatatcaaagtcaaggtcagaatcctcatcactgaaaacggggcttttcctcagatcagatttgcttgagttttcagctctctcacccatttcaggatcatcattacccatgtcggacacttcctcctcctctaaatcttctaggtcctccttgtcatcagcctctatctctgaaccatcctcttcatgttcctgttcttcactctctgggagaagactgatatcttcatcattaattgtttcactaactgcattctgaaagtattgtaaaattggttcattttgcaattccagttgttgccaaatctgctcatcatcaaaattttctatcacaagtttttgcaaggggcttccatggatcctaccattctctaatattttattaaagtcataaagcacttttgttaaagaagtgaactttgatgccaatccctcttgaatcgtgaggaagcactcgggccgacccgtggctttgccgacttccgtcagacaccgctccagggtccgtcgaccgacagcaacg

SEQ ID NO: 59216 - DNA, 2303 bp, Homo sapiens
  misc_feature (1)...(2303): n = a,t,c or g
catcggaaccgccccggaatccgggtcgacccacgcgtccgggctggcttctgcgtggtgcagctgcgcacgtgtttcagccggcagcgctttaagatttccggggatggaatccgaaatggaaacgcagagcgccggggcagaggagggctttacccaggtcacccgcaagggtggccgacgggcgaagaaacgacaggctgaacagctgtccgcagcaggagagggcggggatgcgggccgcatggacacagaggaggccaggccggcgaagaggcccgtcttcccacccctctgtggggacgggctcctgagtgggaaagaagaaacaaggaaaattccagtcccagctaacagatacacaccattgaaagaaaactggatgaagatatttactcctattgtggaacatttgggacttcagatacgctttaacttgaaatcaaggaatgtagaaatcaggacttgtaaagaaaccaaggatgttagtgctctgacaaaagcagctgattttgtgaaagcttttattctcggctttcaggtggaggatgcacttgccctcatcaggttggatgacctcttcctagagtcttttgaaattacagatgttaaacccctaaagggagaccatctatccagggcaataggaagaatcgctggcaaaggaggaaaaaccaaattcaccatagagaatgtgacacggacaaggatagttttggctgatgtgaaagttcacatccttggctccttccaaaatatcaagatggcaagaactgccatttgcaacctaatcttgggaaatcctccttccaaggtttatggcaatattcgagctgtggctagcagatcagcagatcgattctgatttcaagtcagagactttttatcttgcctttggactctggtgaaaaatactttacagtggtcggtcacaagaaaccatctgaacaatttcagtcatttgaagcctccgtcccttcttccattctcagccagaagcataaacagaaaagaaagatttaagaggattcacactcaacaggttttaggataatttaaatatcaaaaattgattgttatacttacacattaggtataatttatcatttatctgaaatcacatgtagcagattgcatagtctgtaatcctctcagagggaaacttcttgtttaaacagctctatatggatttatacttttatatttataaatttataacttcatacaaatttataaacatttctttataaattgtaatttaatagattatctcagaaaaacctctctgaatgatgacccttccttaatactgggtgatgtgtgaatatttgtttgttggcagacagggtctcactttgtcacccaggctagagtgcagtggtgcaatctcagctcactgcagcctctgcctcctgagttcaagtgatcctcctgcttcagcctccctagtagctgggactacaggtatgcaccaccatgcctggctaattttttgtattttttgtagagatggggtttcgccatgttgaccaggctggtcttgaactcctggccctcaagggatccgtccgcctcagcctcccaaagtgctgggattacaggcataagccactgcgcctggccttgatgtgtgaatatttgagaggtcataagcagtggttttggccaatncccgtattatacccatatacatcagtaagagctcatcttggaacctgttttgcagtttcttgcagtttcaaaaattaaagacctacatcacagggttaatgtgaagaaagctttatttttcaaatgagtatttaatgaaagtatacataaccaatgttgggtatacagatgcttctcaacttatgatgggtttaggtccagataagcccactgtgagttgaaaataccaaaagtcaaacatcatagcttagcctaccttaaaagggctccgaacactacattagcctacagttgggcaaaatcgtctaatacaaagcctattttataataaagtatgttgaatatctcatgtaatttttgaagattacattgaaagtgaaaaacagaatggttgggtacttgaaatacagcttctactgaatgaataattctaaagttgaaaaataatagtaagacccatcataagtctgtttcttctagtaaaggtgaaatgatgaaagaatgcttttttcccacccaaaaaactatgctctataaatgcagattagctagtttctgcctgtttaaatggtattattttatacattacaaaatggaaggaacttactttattaaacttaactttgataaaa

SEQ ID NO: 59217 - DNA, 741 bp, Homo sapiens
tttcgtcacaaatataaaaattgtagatgaatttacttattatactgacacaattatcctaaataaaacattccaaacagattctagcacagattaaaaaacacccattaagatcaaggggttttttttgttttttttttctagaaaaccctttggaagttcatgatattttgaatttcaatggatatttcctgggaataatgagttcaaatgaacgaatatgtggaacaaagcatcacccacatttattttttcaggatgaggggatggacaaaaccatcacagggaaattgaggcaaatagtacatgtaaaacaatacttcgggtgagtccacctatcccaaagtcgtatcaaagaagtggctgcagattggagcccaaagcctttggttcctcagtttccaaatggattctcactaggtgggatcatgagtttgctttggacaccccaaattctaactatttcttttgtttcttacatcctttccctcttccccagccccttcccctcatgttacacctcttgctggtttgagacgtcaatcaccactgagaaagaattaaaccagtattttgagctggcaaaattcttagcctagtacaattccttcaattaaactgtagctcaacaatgtgttctctaaaagtatgatttaatattctacctagaaactcagaatatttttcataactcctccagggcagtgtggattatgttgatgtgttaggagaaagtagaag

SEQ ID NO: 59218 - DNA, 2459 bp, Homo sapiens
  misc_feature (1)...(2459): n = a,t,c or g
tgggacagccatggtttcagacgaagatgaattgaatcttctggttattgtagttgatgccaacccaatttggtggggaaagcaagcattaaaggaatctcagttcactttatccaaatgcatagatgccgtgatggtgctgggaaattcgcatttattcatgaatcgttccaacaaacttgctgtgatagcaagtcacattcaagaaagccgattcttatatcctggaaagaatggcagacttggagacttcttcggagaccctggcaaccctcctgaatttaatccctctgggagtaaagatggaaaatacgaacttttaacctcagcaaatgaagttattgttgaagagattaaagatctaatgaccaaaagtgacataaagggtcaacatacagaaactttgctggcaggatccctggccaaagccctttgctacattcatagaatgaacaaggaagttaaagacaatcaggaaatgaaatcaaggatattggtgattaaggctgcagaagacagtgcgttgcagtatatgaacttcatgaatgtcatctttgcagcacagaaacagaatattttgattgatgcctgtgttttagactccgactcagggctcctccaacaggcttgtgacatcacgggaggactgtacctgaaggtgcctcagatgccttctcttctgcagtatttgctgtgggtgtttcttcccgatcaagatcagagatctcagttaatcctcccacccccagttcatgttgactacagggctgcttgcttctgtcatcgaaatctcattgaaattggttatgtctgttctgtgtgtttgtcaatattctgcaatttcagccccatttgtactacgtgcgagacagcctttaaaatttctctgcctccagtgctgaaagccaagaaaaagaaactgaaagtgtctgcctgaggataaaatattttccccatcttttagagctgttaatagaaattatatagcagattctttgttgggaagactgaaaaaaataaagataggtataggataatttttaatatggtgaccttacagaaaatatttcccaaacatccttttcatcctgtgcttctggaggactgatttgtttgagggaatcattctatgcattatatcctaaaatattctatgactggtttctgtccatgtttgtggctttcatttttttaatgggatgactattagtcaaagtcagcttgtcatgactcatcataggctttctaacctactccctgaatccgggtcctcattgtgaaatgcatgccatacgaaatttgaacgtagctttggaaaaagggactatttgtggagtaatggcattaatcaacatagaacatcttatttgaatcaacagttaacttcagtagtcatgtgaataaaattcttattgtctaaattgagacagcctcagatatttgcagatatttactttttgtctgatatcagtacatatttggacaaagtcatctaaataatagtttgtcaccaaataactacaaaatctcattttaaatgagtaaggagaacgtgtacagaagcaaattttcttcaaaatagttgtgggaagagcttatatgtgaaagcttatgactggttttgagggagaacttactggagaaaatggactctatgttaagtatggttttcagatagaattctttccttttttaatgaggaaaaaaaatccacattaatattgaaactgcacctgtaatcccagcactttgggaggctgaggacagaggattgcttgagcccaggagttcgagagcagcctgggcagcaaagtgagaccccatctctactaaaaatttaaatgtatttattaaaactgttctctagaagctttggactgaatcccaaaagtgtttataagttcaaaagcaaaagtatttgtaatttcaacaacaaaaaatgtatttctttatgtaatcttgaaattattaaaagtccttttagcttctagcacatatttgtacaaagagtttaaggaatggtggctggtttggtttgttttttaaaaatgtttactgacgaggccgggcgtggtggctcacccctgcaatcccagcactttgggaggccgaggcaggcagatcacaaggtcaggagttcaagatcagcctggccagtatggtgaaaccctgtctctactaaaaatagaaaaattagccatgcgaagtagcaggtgcctgtagttccagctactcgggaggctgaggcaggagaattgcttgaatccaggaggcagaggttgcagtgagccaagatagcgcctctgtactccagcctgcgtgacagagcgagactctgtatcanaaaaaaaaaaggaagggcccccgtggtttagccctggatcaccaacattttgggaggcccatggggtggggacccaggggcggggggggctaggccgggcttgcggttatgaatg

SEQ ID NO: 59219 - DNA, 4540 bp, Homo sapiens
ttttttttttttatattgctgaacaccaatatgtcactttattatttggattttttttcccatttgtcacatacctgtcaatgtttacacaatgagggaaatcaaccagcattggaagcaactgaccaaatcagttgataattctgtaccctcttaacacacatcaattttcacttggtagggattatctttaattcggtctcacagctattcttaaaattggtgtcaagattgtcacatctttaaatacagatagaattgccagaagtacataattatatatatatatacacacatacagaaaaatacaagactgtttttccacaatatttaatttatacactactgtaactatatgcaacttttgaagacaggttaaggggtacaagtaactgtttagagcaagtaagtagtttggtccaatattatcttaatgtaatggtttttcgctccctcccttttatgtgacgacatactatgacatacaaaacatgcacaatcattcacttataaacaaaggagtaagacaccactcagactgacatttgtataccccaagggtcaaccacacaactaataaggctataatacagctatgcagcataaatggtcaacactgctgatcctaaagtgagccccatatatacatctgaatataaaaaaccattgaaaccaaacacatatgggttagttaaaaggtgccattccaaggctatacataatcacaggaaaaagtatttacactgcttggaaaacagctgcaacaaagagtttattgccaatgccctttataaacttctctcctatgtttaatacagatgttacgctcactatctatgtgaaccacacatcttatttctggccctttataagatccctgctcaagaatttcaagcaaatatgttctatggcttcacccacacatctattctcatagctttcaaattataaatatcacaatgaactagagctgtagcttaaaacatctagcctaggtctagaaagtaaaataagtattttaagtatcatttttacttagtttagtaagtatactgtgaaattcagagttctgagtaaaatatatttatcctaaagtagcagagtcagtgtgtacttgaagaaacagtgaccacagcaatgcagttctttggtgatgtgcccactctctgaattacaggaccagatgcgtctcagtccgtcacctcagacacatgactcggggctgaagagtggggaagggccctgggtcccagccacatgctatcaccaatgttgctaagcactgcttttaagactcccagggcactgcatgaaaaaacagcaactggccccttccataatcagcaatttgcaatatacagtgtcctacaagatagaatgccacaacagatgattatctggtcaaaaacagtctttgtacaggaataggttaaagcaagagttctttgattattgttttggcagaaaaaggcaaagtgaaaaacaattccagaaaaaaaagttacgaagcaggctttgtgcatttttgtttgctgtatgtgtgaattttacccttttatgtatattttttcatcagccaatttcaaagctagctgagcccaaaggatattaactgaatgaaaataacaaaagagataatctaattaccaaactcctaaaaaccaaattccagtaggttttaattcatggggttttgactttgccaacatttgctgtgcaccttctgtactaggccctatagttcttctatctacatggaaatcctgcagtgtgccctacaggaaggaatttacacagagcatctttttgttctgttagacagacatacactctctaagtagagttaagacatcatcacttcatcacattacaaaataagattgtctgcttgtaatttatcactacaggggaagctgccttataaatctaagtactttatctcacctattacaaaaacaaggaaatctttttcagttaaattttcagagcccaaactttgtttttacactatagcttaagacaaacaggtgtgggtatgttcaactgtggtttaaggttctcagtgcagacactcactgtcctctgctctgcacgggccatggacagctgggcggcacaaggtcgctagctggctccaggcctgtgggcatcacaacgttattgctttggttctgtctcagacaccagagagtgtgtctcagagcctagggtttccacatcacagaaggtcaggacaggaattcagatttttcacaaagaaaaagcattttttctctctctaggttaagtgcagaacaacaaatttctaagtgctccatttataagaggttccagatatatatcttgatttaatcctgatcatccacattaaaattatgaatgtaaaaattacataataggcttttcggctgggaaagaaaagtgtctagcagcatgcacaaagaccatgcattgtcacatcatcaggcgaacaaatggaaaggtaataaataattgctcctaacgcccactttaaaatagtaaaaccaaatggaacagtgaagtgagccggtcttcactgctctgagcaggaagcgtgctagcggccagatggggccacagtcagatgacatggcaacagctggctgggctggatgcgcacagcagcccctccttagggttccgctggatgttcacagagatggtcttttcgcacagaggtagctgcagcacgttatttttcaggttcttgctctttatccgttccaattcagtggtggtatctgccatgtggtcagagaaaaactttatgccgcccactgcagggacctgccctgcattccctgtggagctaatgcacattttccacgtagatttctcttggactttcacactggaaaatgacaagccattctgtggatcaataatgtacttggtgctcccatgaagctgggagccgaggcagaggctcatgagtttgaggctctcaacgagctccccagcactgcgagaggccagctgcatggagttgctggggccggcacagcggcgtgtggtacccgatgtattggtggggttgccacccgagccgctggagggactgcccccaccagcattgttctcactggggctggccttgtccacccctccactggcattgcttggcttgctctggcccccgccatccccctcactgccagggggcccctcgctgctatcccgtcggtgccaggagtaggtgaacccgctatctttatcgagccgccgccggctttcagaatcatcatcactggtctccgaactactgcagctggagccccggccctgacttttcctccggtggtagcgtttgtgaactgtacctggagaagctatattcatctttaacctgctcaacttgggaggcagattctcatccatgtcaaactcatcatcagattccccttcctcaaagatctggttgaggacgggcgcactcttcctggatgtcaggcggttggttacagatggcttccggcgcaaaaccacttgtgttgagagggacatgggtttcttgtcctcctcatcttcctcttcatcttcttccaccctgaacagacacttccgcccactggctgtgggttttaagcttgcgggtggcaccgtagagagtgctggtccagccaactcagggaggtcatctttcttagctgagtcacacaggcctttgctcctgtggccattgaggacactgtcagcagcccgagcaggagactgagggacagtcgcgtgggacaaaggagtggccgtgaggtcatcctcaaggtcctggggtacatcaattttggttggccatgactgcctaaactgggccttgatattgctcgggcttgcagatctggtctgtatttctttctcttgcttttctctcaggatcctttcagccagcaggaagtatgtggctgtgatatggttatacctgttggtttccagggcttctacaatggcgtctcgatccgctatgtccccaagcaccatgcgctgaatgatgctgttgtgctcctcttccgagagatttttgtatgacacaaggggaatgttatactttgtagctggtgaagggtccactccctgaagccaaggatgattttcaatctcttctaaagaagcccttctcttgggatctctctgtagcatccgtgtgattaggtctttacactctttagacacatgggatggtactgtatatttgcaatccatgatcattgtcagtgtttcactgtcattggcttcttgaaagggcggctgcccacacaccaacatgaaaaggatcactcccagactccaaatatctactgcaggtgcatcatactcatcaccaagcagaatttctggagcggaatatgcaagagatccacagcttgtagtgagcttcttccctggttgaaatttgttgctgaacccaaagtctgtcaactttacaagaccttgtttttcaaagaagactacattctctggttttaagtctctgtgacccacatggagtttatggcaataagatatagcatgaactatctgagcc

SEQ ID NO: 59220 - DNA, 2310 bp, Homo sapiens
cccacgcgtccgcaaagatggcggcggcccctgcggctggagcgatctgggcaacggctgcggctaaagctgcagccgggcccacgggggggctgcacgggggtagtagggggtggccctgaactggggcctggccctggctggcctctcccgccgcctcactgggggacaggtactggggatacgatggctgattcgatagatctggttcctgccctcagtgcgtatactgctccccactttcgttgatgtggtagtggtgatgactgagccaaccacctaatgtggaaatgagaggacagcaagattgtgggtccagcctgtggtgtccacaatgccccaggcctctgagcaccgcctgggccgtacccgagagccacctgttaatatccagccccgagtgggatccaagctaccatttgcccccagggcccgcagcaaggagcgcagaaacccagcctctgggccaaaccccatgttacgacctctgcctccccggccaggtctgcctgatgaacggctcaagaaactggagctgggacggggacggacctcaggccctcgtcccagaggcccccttcgagcagatcatggggttcccctgcctggctcaccacccccaacagtggctttgcctctcccatctcggaccaacttagcccgttccaagtctgtgagcagtggggacttgcgtccaatggggattgccttgggagggcaccgtggcaccggagagcttggggctgcactgagccgcttggccctccggcctgagccacccactttgagacgtagcacttctctccgccgcctagggggctttcctggaccccctaccctgttcagcatacggacagagccccctgcttcccatggctccttccacatgatatccgcccggtcctctgagcctttctactctgatgacaagatggctcatcacacactccttctgggctctggtcatgttggccttcgaaacctgggaaacacgtgcttcctgaatgctgtgctgcagtgtctgagcagcactcgacctcttcgggacttctgtctgagaagggacttccggcaagaggtgcctggaggaggccgagcccaagagctcactgaagcctttgcagatgtgattggtgccctctggcaccctgactcctgcgaagctgtgaatcctactcgattccgagctgtcttccagaaatatgttccctccttctctggatacagccagcaggatgcccaagagttcctgaagctcctcatggagcggctacaccttgaaatcaaccgccgaggccgccgggctccaccgatacttgccaatggtccagttccctctccaccccgccgaggaggggctctgctagaagaacctgagttaagtgatgatgaccgagccaacctaatgtggaaacgttacctggagcgagaggacagcaagattgtggacctgtttgtgggccagttgaaaagttgtctcaagtgccaggcctgtgggtatcgctccacgaccttcgaggttttttgtgacctgtccctgcccatccccaagaaaggatttgctgggggcaaggtgtctctgcgggattgtttcaaccttttcactaaggaagaagagctagagtcggagaatgccccagtgtgtgaccgatgtcggcagaaaactcgaagtaccaaaaagttgacagtacaaagattccctcgaatcctcgtgctccatctgaatcgattttctgcctcccgaggctccatcaaaaaaagttcagtaggtgtagactttccactgcagcgactgagcctaggggactttgccagtgacaaagccggaagtcctgtataccagctgtatgccctttgcaaccactcaggcagcgtccactatggccactacacagccctgtgccggtgccagactggttggcatgtctacaatgactctcgtgtctcccctgtcagtgaaaaccaggtggcatccagcgagggctacgtgctgttctaccaactgatgcaggagccaccccggtgcctgtgacacctctaagctctggcacctgtgaagccctttaaacacccttaagccccaggctccccgtttacctcagagacgtctatttttgtgtctttttaatcggggaggggggagggggtggttgtagctccattattttttttattaaaaaatacccttccacctggaggctcccttgtctcccagccccatgtacaaagctcaccaagcccctgcccatgtacagcccccagaccctttgcaatatccctttttgtgaattaatttttttaaaaaaaaaa

SEQ ID NO: 59221 - DNA, 895 bp, Homo sapiens
ctgcctttggctgtaccacttcccttttcttctcgcctgcacctccctcatctttcctctatgatgacatcgccctggggaagagaagctgagaggaactcctcactcagctagcttcaggagcatgacgtcatctctaccatggaaattccactcactctcctgtgcccccacatttgtcctaggcctcagagtccctataaagagagattcccaagtcagtatcagcacaggacacagctgggttctgaagcttctgagttctgcagcctcacctctgagaaaacctcttttccaccaataccatgaagctctgcgtgactgtcctgtctctcctcatgctagtagctgccttctgctctccagcgctctcagcaccaatgggctcagaccctcccaccgcctgctgcttttcttacaccgcgaggaagcttcctcgcaactttgtggtagattactatgagaccagcagcctctgctcccagccagctgtggtattccaaaccaaaagaagcaagcaagtctgtgctgatcccagtgagacctgggtccaggagtacgtgtatgacctggaactgaactgagctgctcagagacaggaagtcttcagggaaggtcacctgagcccggatgcttctccatgagacacatctcctccatactcaggactcctctccgcagttcctgtcccttctcttaatttaatcttttttatgtgccgtgttattgtattaggtgtcatttccattatttatattagtttagccaaaggataagtgtcccctatggggatggtccactgtcactgtttctctgctgttgcaaatacatggataacacatttgattctgtgtgttttcataataaaactttaaaataaaatgcaaaaaaaaaa

SEQ ID NO: 59222 - DNA, 1591 bp, Homo sapiens
tttcgtgtggggaagggtcccgggaacgtggtggggcatggcctccgagcgtggttggactttgaaggggagcggccgccatgctgcatcccctttttggaattgctcaaccaggtggtaaccggcgccgcttcctggccttgggagggggttcctttcttaacccacaagaacctctcccaagagaacttggtcctgatgtctgaccatggagatgtgagcctcccgcccgaagaccgggtgagggctctctcccagctgggtagtgcggtagaggtgaatgaagacattccaccccgtcggtacttccgctctggagttgagattatccgaatggcatccatttactctgaggaaggcaacattgaacatgccttcatcctctataacaagtatatcacgctctttattgagaaactaccaaaacatcgagattacaaatctgctgtcattcctgaaaagaaagacacagtaaagaaattaaaggagattgcatttcccaaagcagaagagctgaaggcagagctgttaaaacgatataccaaagaatatacagaatataatgaagaaaagaagaaggaagcagaggaattggcccggaacatggccatccagcaagagctggaaaaggaaaaacagagggtagcacaacagaagcagcagcaattggaacaggaacagttccatgccttcgaggagatgatccggaaccaggagctagaaaaagagcgactgaaaattgtacaggagtttgggaaggtagaccctggcctaggtggcccgctagtgcctgacttggagaagccctccttagatgtgttccccaccttaacagtctcatccatacagccttcagactgtcacacaactgtaaggccagctaagccacctgtggtggacaggtccttgaaacctggagcactgagcaactcagaaagtattcccacaatcgatggattgcgccatgtggtggtgcctgggcggctgtgcccacagtttctccagttagccagtgccaacactgcccggggagtggagacatgtggaattctctgtggaaaactgatgaggaatgaatttaccattacccatgttctcatccccaagcaaagtgctgggtctgattactgcaacacagagaacgaagaagaacttttcctcatacaggatcagcagggcctcatcacactgggctggattcatactcaccccacacagaccgcgtttctctccagtgtcgacctacacactcactgctcttaccagatgatgttgccagagtcagtagccattgtttgctcccccaagttccaggaaactggattctttaaactaactgaccatggactagaggagatttcttcctgtcgccagaaaggatttcatccacacagcaaggatccacctctgttctgtagctgcagccacgtgactgttgtggacagagcagtgaccatcacagaccttcgatgagcgtttgagtccaacaccttccaagaacaacaaaaccatatcagtgtactgtagccccttaatttaagctttctagaaagctttggaagtttttgtagatagtagaaaggggggcatc

SEQ ID NO: 59223 - DNA, 2490 bp, Homo sapiens
gccaaacttaccttgttttattggattttgagtaaaaacatgaaccatgtcaaagtttccaggcagactcctaaaaagcattagcagatctggacccaggcaggccagggacagggaggtccctctatcaggttttgaggcgggttgagcgccgaggtagtgggggctgggagggtcgagccgtcaccttgctgggtgttttgtcctgggtgttgggctgggagggtgggcggccgctggaggtgaacagggctgtcaaagcgttccgggcgttgattgcgcaccggcggctcacaggtcgggtggtggggctggggttcttggccgccttgtatttctgcaggttctcaaagtggcccagggacttgcagtgggagagctgtgcccctgagttgctgtgatagaacttgtggcagatgcggcagatatagcccatcacgggcaccaggaagtccacaccatatgcagtattggggctgtaggtctccgagcccttccactcctctctggatatatctctggacctcacctgcttgcagagttcctcctcaacctcgatctcttcttcatcctcatcatcctcttcctcttcttcatcaccctcgaagcaacccacagcgtccactgtaatgaagtggtcctcatcttggccagcaatttctttctcaagcgacttcagctccttggctttgtccttatgcccctgggacttcacgtgctccacaaacttgcgaggggttttgaagtagcggttgcaaacggtgcagaagggtcgcaaggattgtttggcaatcttgtggtcctgtgtcctgcggtgttggatcaggtcccccatgtagtagagctggcaggtgttgcaccagcgccttggtggaggctcctcatcctctgtctccaggacgtcccggggcacgggcagcagggacaggaggcaggcttggctcatgtgctggatctcccctagccgctgctggtgctgaggctccgacatgtggtcctggaactcctgctggctggagcagctggccttgcagatgtagcagaagaactggagggcctgcttagagggagtgctggtagccgcaggggtggaggagacggagtcactggggcgggggacaggtgtcaggggtacagtgctaaaggcccggctgtcactgctctgcagaatggtgaccttcagggagcccccggcgccccatacccctggcatctctctcgctctgttttcacattctcccacatctaggccacaggccgactcattctgaatctcttccatgctgacttgggtgcccacaggctctggcaaggtcttttccatgcctccaccagcttctactgcatcaggtggcatctccagcccgcagacatgaaccacaactggtgtttgctctggagccagcaacgacacctgcggctgggtgtgaggctgctcatgggtctgctctggtggctgtactgacacctgcgctggaggatgctcctgtggctggacgcttggctgtgcctgtgtgtggacctgtggatatgtctgtgtctggacctgcttctgcagctgcagctgcacctgccttgggggctgtgaatgtgcctggggctgcacctgtggctgcacctgcttcagcggctctgcctcctgctgcagctgcacctgccttgggccctgtgaatgtgcctgtggctgtacctgtggctgcacctgcttctgtggctctgcctcctgctgcagctgtggctgcacctgcttctgttgcagcactaagtgctctggagaggtctgtgtttgcgcctgcttctgcagctttggctgcacctgggtgtctgtggatggtatccgcggctgagtctgtgactgcacctgggcctggacctgcaggacccgtggctggaatcgtggcagcacttgggcttccagggcctcaggcagcaggtctggtgtctgtgtctgtttcggtactgtcatccgggcctgcggctgggccttcacctgtaactgccctggaggttccttctctgtgggctcttctgagctcctcaatctctttgctggcagctcggacgcctcacaaggctcaggctcaggtgctggagtgcgtttttccttggcgatgtcctctgggcagggcggtaaatcttggtcttctggtgtgtccatccggggctctgcggcttcctcagacccctctggggggtctgacttgtcttccacaggcattgtttgagaagaagaatcctttcgattgggggtggtagaggaggaggtccgggcctgtttctgggggttccgtcctgaaaggttgaactgggaagggttcatggggaccccaacaggaggaggtcccagcaaggactggcgagtggcctggggaaagaactgttgcaaatttggagtggccagttgtgggggtgtgaggctgggggctgcgaggcctggggatgccatgccatagcctcggaggttacccagtgttgctgtgggcatggtcc

SEQ ID NO: 59224 - DNA, 2061 bp, Homo sapiens
gagaaagcagggactcttcggcctaggcagccgggacccagccagccctgcgcctcgcgccgtcgcgcatgcgtcctgggtatgtccacgcgcaataaggaggggcgaaaggacattttttttttttcttgctcccgcctctgttcttcccccacctgccacgtacagagcccaagttctcgctaggcttgttgggtcagcgcgattggccggggcccgcgcgagcctgcgagcgaggtgcggcggtcgcgaagggcaaccgagggggccgtgaccaccgcctccccgcgacgccccagtccagtggcctcgcgtccgcccattcagcggagacctgcggagaggcggcggccgcggcctccgcaagccgtctttctctagagttgtatatatagaacatcctggagtccaccatgaacggacagttggatctaagtgggaagctaatcatcaaagctcaacttggggaggatattcggcgaattcctattcataatgaagatattacttatgatgaattagtgctaatgatgcaacgagttttcagaggaaaacttctgagtaatgatgaagtaacaataaagtataaagatgaagatggagatcttataacaatttttgatagttctgacctttcctttgcaattcagtgcagtaggatactgaaactgacattatttgttaatggccagccaagaccccttgaatcaagtcaggtgaaatatctccgtcgagaactgatagaacttcgaaataaagtgaatcgtttattggatagcttggaaccacctggagaaccaggaccttccaccaatattcctgaaaatgatactgtggatggtagggaagaaaagtctgcttctgattcttctggaaaacagtctactcaggttatggcagcaagtatgtctgcttttgatcctttaaaaaaccaagatgaaatcaataaaaatgttatgtcagcgtttggcttaacagatgatcaggtttcagggccacccagtgctcctgcagaagatcgttcaggaacacccgacagcattgcttcctcctcctcagcagctcacccaccaggcgttcagccacagcagccaccatatacaggagctcagactcaagcaggtcatcagattgaaggtcagatgtaccaacagtaccagcaacaggccggctatggtgcacagcagccgcaggctccacctcagcagcctcaacagtatggtattcagtattcagcaagctatagtcagcagactggacctcaacaacctcagcagttccagggatatggccagcaaccaacttcccaggcaccagctcctgccttttctggtcagcctcaacaactgcctgctcagccgccacagcagtaccaggcgagcaattatcctgcacaaacttacactgcccaaacttctcagcctactaattatactgtggctcctgcctctcaacctggaatggctccaagccaacctggggcctatcaaccaagaccaggttttacttcacttcctggaagtaccatgacccctcctccaagtgggcctaatccttatgcgcgtaaccgtcctccctttggtcagggctatacccaacctggacctggttatcgataaggaggctcctctacaccaattaatgtagctgctagctattggcctcccaaaagactccagtactattttaatttgtattgaagaagttcagaaatttaaaagcagagcattttttatgatatcattgttggtgttaattgaaagtataatttgctggaacacaaagaccaaaatgaaagttttttcctccctgcttaaaaatgtagcagcttcttagttactttggaacactactcttacatgtataaagtgattgacttgactttctagcttcccttgtccggaggatattaaaatgctagggtgaggtttagccatcttacttggctttttactattaacatgatgtactaaagtagagccctttgagaatacaagatattatgtataaaatgtaacactgatgataggttaataaagatgattgaatccaaaaaaaaaa

SEQ ID NO: 59225 - DNA, 4874 bp, Homo sapiens
cccacgcgtccgcaccaagttaatactgctagttaatgacaagaaaagatatgagcgggttggtggcggccccaagcggctgggacgagatgtggaaatggaagaaatgattgagcagctgcaagagaaagttcatgagcttgaaaaacaaaatgacaccctcaaaaacagactgatttcagccaaacagcaacttcaaacccagggttacaggcaaactccatacaataatgtacaatctcgtattaacactgggcgtagaaaagcaaatgaaaatgctggtttacaggaatgccccaggaaaggtataaaattccaagatgcagatgtagcagaaactccacatcccatgtttacaaaatatggcaacagtttacttgaagaagccagaggagaaataagaaatttagaaaacgttattcagtcacaaagaggccagatagaggagttagagcacttggctgagatcctgaaaactcagttgaggagaaaagaaaatgaaattgagttatctcttcttcagcttcgagaacagcaagctacagatcaaaggtcaaatattcgggacaatgtagaaatgattaagcttcataaacagctagtagagaaaagcaatgctctttcagcaatggaaggaaaatttattcagcttcaagagaagcaaagaactctcaaaatcagccacgatgctttgatggcaaatggggatgaattaaacatgcaacttaaagagcagcgtttaaaatgctgcagtcttgagaaacaattacattctatgaagttttctgaaagaagaatagaagagctgcaggatagaattaatgatttagaaaaggaacgggaacttttaaaggaaaactatgataaactttatgacagtgccttcagtgctgcccatgaagagcaatggaagttaaaggagcaacagctgaaagtgcagattgctcagctcgagactgccttgaagtctgacttaacagacaaaactgaaatccttgacagattaaaaactgaaagagatcaaaatgaaaaactcgttcaagagaatagagaactacagttacagtatctggaacaaaagcaacaacttgatgaacttaaaaaacgcataaaattgtacaaccaggagaatgatattaatgctgatgaattgagtgaagctctcctacttataaaggctcaaaaagaacaaaaaaatggagacctttcctttttagtgaaagtagatagtgaaattaataaagatctagaacgctctatgagagagctgcaagcaactcatgcagaaacggtgcaagagctggaaaagacaagaaacatgctaattatgcaacacaaaattaataaagattatcagatggaggttgaggcagtgacccgtaagatggaaaatttgcagcaagattatgaactcaaagtggaacagtatgttcatcttcttgatatcagggctgcacgtatccataaactagaagcccaattaaaggatattgcctatggcaccaagcagtacaaatttaaaccagaaatcatgccagatgactctgttgatgaatttgatgaaaccatccacttagaacgaggcgaaaatctatttgaaatccatatcaacaaagtaaccttttcttctgaagttttacaggcatctggagataaagagcctgtcactttctgtacctatgctttctatgattttgaactacagacaactcccgtagtgcgaggccttcatcccgaatataacttcacttctcaatatcttgttcatgttaatgacttatttttgcaatatattcagaagaatactatcacccttgaggtccaccaggcttatagcacagaatatgaaacaattgcagcatgtcaattaaaatttcacgaaattcttgaaaaaagcggccgaatattttgtacagcaagtttgattggaacaaaaggagacatcccaaattttggcacagtggaatactggttccgattaagagttcccatggatcaagcaattcgactttatcgagaaagggcaaaggctttggggtatataacatcaaattttaaggggccagagcatatgcagtcgttaagtcagcaagcacccaaaactgctcaactcagttctacagattccacagatggcaacttaaatgaacttcacattacaataagatgttgcaaccacctgcagtcccgagcaagccacctgcagccacacccatatgttgtgtacaagttttttgattttgcagaccatgatacagctatcattcccagtagcaatgatccacagtttgatgatcatatgtatttcccagtgccaatgaatatggacttggatcgataccttaagtcagagtctctgagtttttatgtttttgatgatagtgatacccaggagaatatttacataggaaaagtcaatgtgcctctgatttcgttggcacatgacaggtgtatctcaggaatatttgagttaacagaccatcaaaagcatcctgctggcaccatccatgttatattgaaatggaaatttgcttaccttccaccaagtggatcaataacaactgaagacttaggaaatttcattcgcagcgaagagccagaagttgttcaaagacttcctccagcatcctctgttagcacactagttttagcaccaagacctaaaccaagacaacgtttaacacctgtagataagaaggtatctttcgtggatatcatgccacatcagagtgatgtttcacaagaaggcagtgtagatgaggtaaaagagaatactgagaaaatgcagcaaggaaaagatgatgtgtctttactatctgaaggtcagcttgcagaacaaagcttggcatcttctgaagatgaaacagaaataacagaggacttggaaccagaagttgaagaggacatgtcagcttctgacagtgatgactgtattattccaggtcctatctccaagaatatcaaacagccatcagaaaaaattcggattgagatcatagctctaagccttaatgattctcaagtaaccatggatgacactatccaacggctgtttgttgagtgtcgattctacagtcttcctgctgaagagacacccgtgtcacttccaaaacccaagagtgggcagtgggtctactataactatagcaatgtgatctacgtggataaagaaaacaacaaagcaaagagagacatcttaaaagctatactacaaaaacaagagatgcctaatagaagccttcgcttcaccgtggtcagtgaccctccagaggacgagcaggacctggagtgtgaggacattggcgtggctcacgtcgaccttgccgacatgtttcaggaagggagggacctcattgagcaaaatatcgatgtttttgatgcacgagcagatggtgaaggtattggcaagctcagggtaacagtcgaagctctccatgccctccagtctgtctacaagcaatacagagatgacttggaggcttgaaagcaaatgctccagaggcatctcctactcctcagtaaatgctcacatgaaagtacctacatgagattttggtaattactctggtgtatataatctataattcatgggaagctgggagcggggagacctgggtttgaagtgttgaagttttgtatactttttcatttgtttatttctctattccctccttctcataactgccacccctcaggacttaagttctccataatgggcagtaccttctcaataatttatacctacgtgatagcgtgagaaagtctatttgcattttcaacattttcttaggaagaaccgaaatgcaattcccatttttatttttaataagcaaaagcataaatcttagaaaacctatgaaaaagaaatacttttatgttatccctaatcgtcccactaaatggaatgcctatgcattagmcttcattaagagttttatactgtgaagattttattagaagcaatatatgaaaattacttggattaatgggttaatcttcctctttaaaatgctaatatccattttatgcacattaaagctcagtatgcattttctttgatgcatgcagtttctatcaattaaatataaagaatgaaacttagcaccaacttattcaatgactgcaagttttttgtctttctttcttaaaagttcattctatttgtattattttcatacatttgtaatggggacccagggatgtatatataaaaaggagatagttatatagatagatgtgaaatttacacgttgaaaacttagtatatgacacagaaagaaattatgaaaagtataactcaaattctgatatgcttagttagacgtgaaaggagtatctttttatcattttttaaatttacatcaagccagtacagtgccagggtgtatctgggtaaccagatcctcgaaaagcagctctgaaagttaattttctagcttttacccaatctcactgaaggatttaattgatatttttaatggagctgtgaatcaatgctgcaaaggaattgtctctagaggtctaggatataatgcatttcattttttaatttacttttttatttgtcattttcttcaaaggatttttataggctgtgggttttcactgtttgcaaacaggctatgttccttcttaagcatatgtaaagtattcagggagataagtaatttattaaaatctacctaatttgccgtgatatattaaatctctgcttcagtgatcacagaccatttcatttagagaattaggcattccctctttgtgtgattaaagctctggaaaatgagttctttgctcctatttgtgaacattcaaagcctgctaatggcaagaagatggaatagattatgagacaattcattacagttcaatag

SEQ ID NO: 59226 - DNA, 1848 bp, Homo sapiens
tacgccaagcttcgcacgaggcacacatagaccaaacttgtatacacacagacatctacactgacataccccatgtacacacacagatctagacgtgctccacatatgtgtgaatatgcgcacatacaggcctaccacaaacacaaaacccacctgcaaaggtttcacggaacgtggagctctcctggcctcccgtccctcctcccagcctgtttgttgtgcctctgtagagagcgcttcggagagagaggcgaagtaggaagtgggattttctcttccctctcctgggcccgtttgcccctaccctcgcccagcaagctgcgcccaaattctattctgcctctggaaactgctggaccatccaaggtcagctgcctgccctgacccctaccccagggccagcttgtcctcctgggaggcgggacaggccccagtgaggttccgttgtgcgctgtgcctatctctcgattccagggcagatgagccacaacatcaccaccctgccacttacaaggtgggggacctgggtctggggtctcaggcgcaaactggaggccctcacagcccactaggccccctcccaaccccagtaccctcagtccctcagtcaggtggtgctagtagagctatctctgacgctgcaggccccaggtagatgggcagggccctccgtgggtgtgcagcggcggttccctcatcagtccagccactgcccaggactaagggtcttcaaggaagatgaggccattgcccttctccaggtggcttcaccacagtgctgcctgggcacctctctgaggcagagaagtggcccctccctcagtccctgcctggccgaccactgtggcctgcacgcgaatgggtcagagccagaccccggagctggtgctgtccttctaggtggctgctcatagctggggatggtgagtggctgtgttctggccttgcccacgtgggtgtttgcagagacaaaatgaaggggatatgctccccataaataccaccttgccaccacaagaggaccagaaggctactcagccttgctgccacatgaaggggatttgtagggtcaagcctggctgcagaaaggctggctcagatcttgaccaagaaaccccaagcgatttccatcaaagaccacgcaggtaacaagaggtgattcctggaagacccagcccacagagggttggcagccaaagcatctctgagcagtgtccctgctagcatcgccagcggccatcactctgcctccctcccacctcttgtccctcgtcgttaaaaaacagcaccctatcctgcttccccacatttctgttcctccaatgaagggctaagactatttagtaatctctttcttaagcagaggagtggcaaggatggcaatcttgaattttattttctgtagagatagcatttcttctggtgcggagctgaaaggaatccacccagaagttctgtagcatcctgcgtgcagcctcctggagccccagactccatctgggggagggacttgtttacaagcagttctgaccaccttagtggtgtactgttttctaggcaaaaaatatctgtctgttgtacctgtatagccctttaaaatgcagtcccaggaatgagactcttttaagaaacacatccctgcttctgcaattcccagagagtgctgggggaaaaaaagggataaaaattcctacctactcatcagtgtttgaaagatggagctgaatagcttttcttgttcctggactaggcaatgaataagcaacaatgtatcttttctgtgttcaaaataaatacataatatcaataaaatgtagcaagaagtaacactttcagagagtgaaaaaa

SEQ ID NO: 59227 - DNA, 2737 bp, Homo sapiens
ccgaggagggagcttgcggtgcgttctgggaaagttgctgggccagctcctttgtttccagtctgagcgttgcgttcggtttcccgagggtcttctgaggcaccgcggctgcgggcttctgagttcccggctctccgcagggaagcctcctcttcgtacctcgttttttggctcgtggggggtcctcccaccgctggccgacgcagccagcatgtccggggtgcgcgcagtgcggatcagcatcgaatcggcctgcgagaagcaggtccatgaggtgggcctggatggcaccgagacgtacctgcccccgctgtccatgtcgcagaatctggcgcgtctggcccagcggatagacttcagccagggttcgggctccgaggaggaggaggcggcggggaccgagggggacgcgcaggagtggccgggcgccgggtccagcgcagaccaggacgacgaggaaggagtggtaaaatttcagccttccctttggccttgggactcagtgaggaacaatttgagaagtgccctgacagagatgtgtgttctctatgatgttctcagtattgttagggataaaaaatttatgactcttgatcctgtctctcaggatgcacttcctccaaaacagaatcctcagacgttgcaattgatatctaaaaagaagtcacttgctggagcagcacaaatcttattgaagggggcagaaagactgactaaatcagttaccgaaaaccaagaaaacaagctacaaagagacttcaattctgagcttttgcgattacggcaacactggaaacttcgaaaagttggagataaaattctcggagatctgagctacagaagtgcaggatctctctttcctcatcatggtacatttgaagtaataaagaatacagatctcgatctggataaaaagatacctgaagattactgtcctcttgatgtccaaattcctagtgatttagaggggtctgcatatatcaaggtttcaatacaaaaacaggctccagatataggtgacctcggcacagttaacctcttcaaacgacctttgcccaaatccaaaccaggttccccacattggcagacaaaattagaagcggcacagaatgttctcttatgtaaagaaatttttgcacagctctctcgggaagctgttcaaattaaatcacaagtccctcacattgtggtgaaaaaccagattatctctcagccctttccgagcttgcagttatctatttctttgtgccattcctcaaatgataagaaatcccaaaaatttgctactgagaagcaatgtccggaggaccacctttatgtcctagagcataatttgcatctactgattagagagtttcataaacagaccttgagttccatcatgatgcctcatccagcaagtgcaccttttggccacaagagaatgagactttcgggtcctcaagcttttgataaaaatgaaattaattcattacagtccagtgaagggcttctggaaaaaataattaaacaagcaaagcatatttttctaaggagtagagctgctgcaaccattgacagcttagcaagccgaattgaggatcctcagatacaggctcattggtcaaatatcaatgatgtttatgaatctagtgtgaaagttttaatcacatcacaaggctatgaacaaatatgcaagtccattcaactgcaattgaatattggagttgagcagattcgagttgtacatagagatggaagagtaattacactgtcttatcaggagcaggagctacaggattttcttctgtctcagatgtcacagcaccaggtacatgcagttcagcaactcgccaaggttatgggctggcaagtactgagcttcagtaatcatgtgggacttggacctatagagagcattggtaatgcatctgccatcacggtggcctccccaagtggtgactatgctatttcagttcgtaatggacctgaaagtggcagcaagattatggttcagtttcctcgtaaccaatgtaaagaccttccaaaaagtgatgttttacaagataacaaatggagtcatcttcgtgggccattcaaagaagttcagtggaataaaatggaaggtcgaaattttgtttataaaatggagctgcttatgtctgcacttagcccttgtctactatgattttttccagatgtttcctaaagaagtttccagaaactttgacttgaaatgtttgcagatcaactataagcacaaagaagagataacttccaaaagagtgctgtttttaaaaataataattaggaaatgtttatttagcactttcaaacttttcactttataaatgacaagtgctttgaaatgcagaagtttatgtacagttgtatatacagtatgacaagatgtaaaataatatgtttttcatgcagtttaaaatattactaacttaagggtttctatgtgctttttaaaatattccttctttgatgttgacatcaaataaagtatgtggtttaaaaaaatctccaaatacctttttttccccccaaatactttctaaacttttttttttgagatggtatctcactctgtagcccagtctggagtgcagtggtgtgatcatggttcactgcagtcttgacctcccaggcttaggtgatccttctgtctcagccttccgagtagctgggaccacaggcatgcacaaccacggctggctaatttttgtattttttataaagacagggtttt

SEQ ID NO: 59228 - DNA, 639 bp, Homo sapiens
actaggcggcacccgagccctgagggtcccagccccgcgctccgcgtccccgggacagcatggagcgcccggagcccgagctgatccggcagagctggcgggcagtgagccgcagcccgctggagcacggcaccgtcctgtttgccaggctgtttgccctggagcctgacctgctgcccctcttccagtacaactgccgccagttctccagcccagaggactgtctctcctcgcctgagttcctggaccacatcaggaaggtgatgctcgtgattgatgctgcagtgaccaatgtggaagacctgtcctcactggaggagtaccttgccagcctgggcaggaagcaccgggcagtgggtgtgaagctcagctccttctcgacagtgggtgagtctctgctctacatgctggagaagtgtctgggccctgccttcacaccagccacacgggctgcctggagccaactctacggggccgtagtgcaggccatgagtcgaggctgggatggcgagtaagaggcgaccccgcccggcagcccccatccatctgtgtctgtctgttggcctgtatctgttgtagcccaggctccccaagcttccctgcatcttggtccttgtccccttggccacactggagagg

SEQ ID NO: 59229 - DNA, 1628 bp, Homo sapiens
ttttttttttttaaaaatatcttcaataataagacatcctatttttggggggttagggatagagataaatatgaaaacttttttttgataaaacacctagtaaggacatgtttccaggtttaaagttcatgaacatataaaacagaaattgggtcctgccaccttgagtgcaggattctgaggtcctaaatctggttctgaggttctgtgtttgattctggggtacagacagctcaagtaggaggtctccttatgtcacaaaactacacgatgcggaggttctgttccccaccaaaggcttgtctggggcccattggctgcctggggaggaggccccagcgaggctcatgggtccagcatggctcctggggggacccctactctcaccacgcaagagcccccagccaggagcactgggccagccagctgcgggccgatgagggggcttctggcccgccctgcacctggaggcccgccctgcacctggagttcctgcttggccacgggtgggcagacccaggagacacagcactccccactgggtctaggaccgtctccgcgggtggggaccccagccggccaggcatgtgccctgacagccctgccgacaacaacacctgaagggaacccagagtcggccgtaggaggcggcggggtctgtgctgctggggggcggcctaggcctcggaggaggactgtgatggcccctgcagcagcagggcacggtaggtgggagagctgaggaagcgggggtaggagtcccggtgcatgagcgtgtagatctgcagctgcgcgtcgtcgaacgtgtgtgcggacggctcctgcatcttcttgttgatgccctcccgcacacgggagtccaggctcacctccttgggggacaggatggatacgtagtcctcgtagatgagcctcgccttctcgtctaccacatgctggttggcctcggccttcagctcctcgcaggccaaccagaagagcatgttctcctcgctgtactctgtccgcaggaacgcccggaacacgctgcgtcccgctgggctgtgcatcagcttgtcaaaagactgcgcccagctctgcacctcctcaggacttggcgtggcacatacttcacagctggggaggggctgcagcttgctctcccgggaggcctgccacgcgcgccgccgctcttggttccaggagcagctacagcagcagcaccagcacaggcagcaggggttgcggctgggggccgctggagaggctgtatcatgactggacattgaagggggccggtccgcctcctctggccctgtgatctgcttctcagcctcatgcggggtgggcatgggtgggcggaggaggttgcccaggctccgtggtaccagctctcagaccctcaccacagcctgggggtcagcgacccaaaggcggggtgggggcaggaggggccaggttgggtctgggccccaccctggctgccgaaggggcgtgcactgcagcagcagggactcaagtcagacggcaggagggactcctgcggcgctctggagggaggctagcgccaggagcccccgatcggctggggccgggggcgcagcgcctcccctacagctcgaagggctgagtggctgcccctagtgcca

SEQ ID NO: 59230 - DNA, 2090 bp, Homo sapiens
agcctgacctgatacgccagcttggcacgagggggccacctcctgcagctccccaaatgactgaggcagaaagcccttggggagcctagaaagcaaagctaaaggggatgcagggtctgtctgtctgtctgtctttcagtctgaggaatgagaatcctgacctgagggctgtgcagctgagagcccactacctccccagcccctctcggccccagccgcatcatcccacctgtcccctcccccccacctccagtggggctttctccagatgtcttatggttgggggtttcctgatgggccaggagaggagggcatcttcttgcgacagcactgtctgggttaagtgcccagtgagggcatggtgtggggagctggcctcagaggagccgctggtgggcaagcgtgaagtgggctgaggggctctgagccactttgctcccatctaggggactgccccccatggaactcctttgaagtcacagcagccttcctttctgtttgctcttggggctgagaggtggctcaaacactcggggtccctatggctctgggtcaatctaggccaggctgcaccccatggacagggagtctcagggctcctgatcatgcccaggccctggcctggggcctccctccttggcagctttcccacccccacgcccctggcatcctcagttgctatgggatgcccctccagggcaccagctcagggctaagcgaaggaagataggagcagctcagagctgccaggctctgccttcctcacagacctggtggggcaggtcctgttcacagcagcaggagtgaaggcctggccatcggtggagagggcagctgtcagagggctgggggccagggcacaggattgaagagtttcacatatcatcacagcatacactgggaatttggtgggggcagaagaacccagggccactccctcaatatgaagggaaaccaagctgaatgtgaccaccggcacactgctgccatgtcccatgtccacctttctccccgggaataactggccctgagacccctagacccaaggaggcctgtgccatgccaagcatccgggaagcatggctggccttatccacccatgggtcacgtcggttcccaggggcagcatgggagatctttgggggcaacagggagagtctgggtggggagacgggacttgtccaagcagaaggcaggaccctgggaaatgcataatgtaaggacatcaataatagtattattttttttgtaagggaaaatcaatatgtacattctgaaatcattttctctgtaaatggttggatttcatttcacccttaaagggatgcttaaaggagaagataatattaataataaaaacagctacaaagtcaaaaaaaaaaaaaagggggggcccttttaaaagaaccaattttaaaacccgggggtgggaaagtaaaaatttttttaatggggccccaaaattaaattccggggccggggtttaaaaacgggggaaggggaaaaacccgggggtaccccaattaaacccctttagcaaaaatctgagaagcaatgcagcccgcagcttaacttcaacatgcttttaaacttttttcccattctcttgagtttcaagatataaccttgaggaaactcaaaatcctttctccttagccttaaaatagactccacgtccctcccctttctcaccagatatgctcccttttcatttatctaactgtatgctactatttaattgtgtgatgtcttagaagtttcagtggctaatcttgagacagaccaagcctggagacccagctgcaaacctccaaaaattacttcaaaatggctaattaacaacctgaccattgttaaaataatgtcaatccgaggtccaggtggactgaagcccaagatagccaccagaacaaaacacacagacatcatactcagcccatttcttgcatgccttccttatcaagtcttcccttttaaaaaccctaaaaattgctttcccctctaaaaattgaagcagttactttaaatagcaatctggctacttccccctttactagttttgggtaataaatttgctttttattactaga

SEQ ID NO: 59231 - DNA, 1335 bp, Homo sapiens
ttttttttttttccgcataactcttttaataaataaagcatattcatggcttagattttaaatcacatttacagatgagggaaaacttctaggcctaaacaggtaacagtaaagcgactactgctggaaggagtggtgtgccacatgcgccttaagcctcaagagtggggactgcagggccaaacaccaaatacatcacctttaggccagacggagagtggagacccaggaagcccatgcaaccaccatctgccccctcccctagtgctgcagaaccggctggacactgtcacactttcagaagaactggaggtgggtcctgatcatattacatgaagctttccaccattgtgaacaattaggcaaggcatgagtgacagaggggcatcgctgataaatacagagcaatactggggcagtgaagaggaagctacagagacattcgtgtttcttcaaatatcagaagcttccacatcacagcaggagagctgacgacgagctccacctcctgaaggcttagtccaaaaacttcctgttggcatttgcaccaaacaaggctccccggacttctggcatcatctgctgggctatgagatccagccggctttccagggtgttggaaacctttattttacgatctccattatagatctcaactccaccagctatgtcttcaggcaggtaggactcctggtcaatttggacatcaacatcgtttttggtggcaattttgtacataggaattgccttctgcactgcagcctttaccagagggaaatcttgtttcctgcaacgaacaatcattcggggctccagcaactggtacaaaccctggagaaccagtccatccagcagcacttggtacctggttgtatcttttaccaccttgctgagtctctgttttgcttcatttagtaggtctgtgataaggtcatctcttgctctgaggactttgagtctcgcttgattcatcaaattggacatctgaattttcttctgctgctcaatctgtttctctttcttctcataatattccataatctttagtctttgggtttgcacaagccgacctttctctatgttgaactcttcttctgcctttgcatctatttcttctgctttctcattggcttcttgttcaatgaaagccatcatatgctttatctgcttttgcacgtcagcatcgctgagagccatggcgagagcaatgctaggccggtgaacagtaggctcgagtttaggtttgaaaggtgaggtgagagaaatcggcaaagggaacccctgcgcagatctcgggttcctttactttataaccgcgggttccggttcctgcca

SEQ ID NO: 59232 - DNA, 2832 bp, Homo sapiens
ccaccgctccgaattcccgggtcgacgatttcgttgagaggcgcacccgggcggccagctgggctcggagcggaacggggtcaggatggacgaggacgtgctaaccaccctgaagatcctcatcatcggcgagagtggggtgggcaagtccagcctgctcttgaggttcacagatgatacgtttgatccagaacttgcagcaacaataggtgttgactttaaggtgaaaacaatttcagtggatggaaataaggctaaacttgcaatatgggatactgctggtcaagagaggtttagaacattaactcccagctattatagaggtgcacagggtgttatattagtttatgatgtcacaagaagagatacatttgttaaactggataattggttaaatgaattggaaacatactgtacaagaaatgacatagtaaacatgctagttggaaataaaatcgataaggaaaatcgtgaagtcgatagaaatgaaggcctgaaatttgcacgaaagcattccatgttatttatagaggcaagtgcaaaaacctgtgatggtgtacaatgtgcctttgaagaacttgttgaaaagatcattcagacccctggactgtgggaaagtgagaaccagaataaaggagtcaaactgtcacacagggaagaaggccaaggaggaggagcctgtggtggttattgctctgtgttataaactctgggaaattccatctcttgcatatttgatcagatagtgacatctttctgtatataaactctttaactgctattttagggaccttgcagtttgcacataattgttttatatcatagcagtaaatatttgcaagaaatcccactcatcgaccccgggtaaaatgttatggtaagcatgcacagtttgcagtctacagtttttttatgtagcacaaaataggtgtacctttataagtacattcaattttatgatttacatttatcatgtaatttttaaaaaaatccatctatctaggatatgttgatacaaagtctgcttttgctattctttttgcttaaatactcctatcattttctgaattacttggtatttagaactcctagcaccacggggaagaatagaggtatcatcaaacgtggcaaattttctttcaggaataataaagagcatgattccacagcttttctgggatgtttgagattcttttttagtactaagcaaaattctcatcacagaatgtagcccaggccaatttataactaaatctctatttgttcggatgatgcttctaaaacagcattgataggttaaagaagcttggtatttttaatttacttcaatgattagctcagttgcttaactggagttttaatcctgtgatatgtacattggattcatgactgtgcagcatttttagttatgtggtgtttggcagaatgacaataaggttttcccccattttggtttcaggaggacatgaatagtgtgtttattgtaactcctcatacacttttaaaaccaacatcttttttcataaatgttggtagtgtttgtccaggtaccttaactgtagcttgtgtaatgttgatgaatatctgtatcttacggcttccataatggctagttgatattcaaaaacctatttctgtgttttgaggggtggggaaaaaaaacactaagtgataatttgaaaaaggcatattgcttccagattctgatgtgtgagggaaaatactgtcacaatgaaaatcttgacaatttacttaacaagtaaccagtagttcatcaaaaccaacttgtacagactaataaatctttttcacagtattcagttttctcacctcttgctattgtatattgtagatttttttcattcatgtgttatttaatttacactgatctctgctattttaaccccccaaataagttatttgtcctttaaggttggttactataatacccctcagtaagattccagtattaatttctgggcagtttgttctctgtatacaattgcaaatgataagcatttttgtgagtgaccacctttgcaatatgtttgttaatttacttcatgttgggttctttctgaaatgtacatctttacatataaaaacctcacattctacttgatttacacttcctagtctacattacatgtggttgaaggttttatacattctatatgcttttactaaatatacaagatttactactagaaatttggagaaagaacactaacacatgtacttgtgatttgttcatgttatattaaaacttgagatttgtgtatttatgtagagtctgtattgacaagactgttgttttttgctccttgagctatataataatctgtgtattggattgttgtcttgatttggtctaaatttgaatatatatgagttacttgaatataacaaaaatgaattttgtttgatagatttatattgtaacctttttctagttcttgaataaatatagcctgctttccctaggatgcatttgtgtagggaagtatatacatttccctattactctcatcaggctggaaggaatatgtactattgtgtttactcaaattatgtgggcctttccattttgttgttttgttgcaagcttagtgttttgtagtggaggttttgtaaatgaaacagttgtaatatctaaggtcaggcacctagtaacagggttttgttaattcttttcagaatcattgaagcagtcttaaagggtcttttgcagatggtacaaattagaacaattagaatatagtattttgagttctagtagtactgagattgacccaaacaaataaaaaactattcaatttctgaaaaaaaaaa

SEQ ID NO: 59233 - DNA, 3028 bp, Homo sapiens
gttagtccatcttattcagtccatggaaggggtgggtagcacagctgggtcccgggtctgttgtgtcccagcatctgaggggccacgcagtgccttctagaccactcaaggaagggcagaaccttggacctgaatacagctctgcagccctagctgcacagaagacaggtaggtgctttctcaaagaagacagacacagtttatttataaaccaaagaggccaggagcctactagccacccccatccccttccctcttcctgagcacagacatggctcccccacctcctcacaaggtttttggtacaaactgtggtttggcctagagcatccctaaggaccctggtggggcagggtaccctctgctcccaccacctgggatgtgctggggaacgtggagtggggcagcctgatattgatatcccgcggccccggccagggctctggagctgctcttccctgggctctgcagcttggggtcctgggccacctcagacgcaggcccgaggttgggctggggaggagggggtcacccgtccacatcccagctgaagaggtggtgcttcaccagcatgtcccggacgccctccttcaggggctgctgcgcctctctcttcgcagggagctcccagtcctgggagaggctgaaggcaaagcagcagaggactcggagctcacacttgatctggacccagcccgggctgcgcaggaaggaccagggctggtaccacttctccacggtgggcaggctggagcagagcacctccagccacaggtgcagcacctgctcattgagccccacgcagatcagtgagcggagcttcacatccatttgtgcatgcactgcatcgtgggtcacgttcacagactgcacagcccggtagagcagctcctccggggtcaggactttgccatcttcatccaacctgaaggtcttacagagcaccagacgggaatacacggaggcaaagtctctctcgacctcccggcctgcagcctcctcgataaacagccaggggtggcaggcgcccccaagcagggatggcttcttcagtccatgttcgaacagggccttaagggccgggcagagggtccctcgcacgaggtctgtgaccccctccgtcaccgagtcatcccccgcgatggagtactctttgctgcgctcatccaggacttccacgaacttggctggaaaccagcctcgcaggccgttgagctcccccacccagcagtgctcgtccttctgagacacgattgtgatgatgtcgttcttgcggaagcccagctcgtcgtcgtcgtgccgctcaaagtccagcagggccttggctcggcgccggtggctgcgtgagcacgccacgtagttctcgtggtcccgctggtggctctccatgctatagtctggagtcagctcctgccacagtgaatacaggcccactaagggggttggaggagttagggccgtgtttggtagcagcccagggagctggcgactcaccacgctgcagtttttggggtctgtgcactggaagtggcgtgccacgcgcaggatggcttcccggaggtcagccaccagttccgtctgcttgatgttcttggccttgagtgcctccaggtcatcctccccgaagagcagagcagtgatggtggacttcctccgctgggtcctgcggcgaacaacctgagagaggttggtgagggtgccggcccccaggagctggccctggtctgcaatgagataggccaggtgcttgcggcgctgagtctccacggccacatcggtgagggagccggccagccgcatggccacccccagaagcagctccgcgtcctccatctgcgacgggatatccgatagcgtgttgaagatggaggccgagttctctgactggatcagctcttcctccttgaggtgcagcatgcccagcgtgagctggaacagcacccgggagccctcgtagaaaaacaggtcccagatgcgcaggagcagcttgatgtccaccacgctggcgaaggccgtgaggaaccagtgcagtgtgatcagggacagctcaatgtcatgctcctggagcagcttgtccaggcgaggcaggtactggacaatgaggtggcgcaggacccgctggtcagtctggacacccagcagggtggtgctgaagtaggaggcggggagcaggtcctcgatgatggcagacatcatccagaaggcgtcctcctcctccaggaacagcaggaggcaggcggccaccatgccggtgccctggcagtagccgatctctgggtagagccaggccagggcccggagcaccctgcgcaggcggggcaccccgatgctacccatgctggcgaagcaggcgttgctgggcatggtgcggagcaggtccttctcgatctgcttggcagcgatggtctcatcgttggagctgttcttcacaatctcgcggtaggacagctcagagttcctcttcttctgcagggccccagagagccgcatccacagctgtggcctcatgccatgtgggatgccggccagcaccagggagcggagcttctcagagcggggtagggagacggcaatcttgtcccaggtgagatcccccacatcgtggttatgggtgaactccaggtgggcctgccaccgcagcctctgtggagcatcctccatcagaggggagttcgccagcagactggagccaggctcatcaccttcttccttgtacacacggaaaccaaactcatcgtagtagaactctggttgctctgctgactcttccttctgcgtgtacttggccaagatctcctggggccatatgctcggagtcagggctgagaaagggccacaggcaggtgtatggcttcctgacattgtgctggtgggctggcaagtcttctgcagctccaatcttagaagtctcctatcctgctatcttagagctggaaggctcctcaggcttcatctggtccagaatcatctgccctgccccacgggccacctcagcgccaatccgggtcgggttagcagcttccccact

SEQ ID NO: 59234 - DNA, 1927 bp, Homo sapiens
ggcacgaggaagcgtgcggtgccgcagcaatggcggcgctcacaattgccacgggtactggcaattggttttcggctttggcgctcggggtgactcttctcaaatgccttctcatccccacataccattccacagattttgaagtacaccgaaactggcttgctatcactcacagtttgccaatatcacagtggtattatgaggcaacttcagagtggacgttggattacccccctttctttgcatggtttgagtatatcctgtcacatgttgccaaatattttgatcaagaaatgctgaatgtccataatttgaattactccagctcaaggaccttacttttccagagattttccgtcatctttatggatgtactctttgtgtatgctgtccgtgagtgctgtaaatgcattgatggaaaaaaagtgggtaaagaacttacagaaaagccaaaatttattctgtcggtattacttctgtggaacttcgggttattaattgtggaccatattcattttcagtacaatggctttttatttggattaatgctactctccattgcacgattatttcacaaaaggcatatggaaggagcatttctctttgctggtctcctacatttcaagcatatctacctctatgtagcaccagcttatgggggatatctgctgcgatcctactgtttcactgcaaataaaccagatgggtctattcgatggaagagtttcagctttgttcgtgttatttccctgggactggttgttttcttagtttctgctctttcattgggtcctttcctggccttgaatcagctgcctcaagtcttttcccgactctttcctttcaagaggggcctctgtcatgcatattgggctccaaacttctgggctttgtacaatgctttggacaaagtgctgtctgtcatcggtttgaaattgaaatttcttgatcccaacaatattcccaaggcctcaatgacaagtggtttggttcagcagttccaacacacagtccttccctcagtgactcccttggcaaccctcatctgcacactgattgccatattgccctctattttctgtctttggtttaaaccccaagggcccagaggctttctccgatgtctaactctttgtgccttgagctcctttatgtttgggtggcatgttcatgaaaaagccatacttctagcaattctcccaatgagccttttgtctgtgggaaaagcaggagacgcttcgatttttctgattctgaccacaacaggacattattccctctttcctctgctcttcactgcaccagaacttcccattaaaatcttactcatgttactattcaccatatatagtatttcgtcactgaagactttattcagaaaagaaaaacctctttttaattggatggaaactttctacctgcttggcctggggcctctggaagtctgctgtgaatttgtattccctttcacctcctggaaggtgaagtaccccttcatccctttgttactaacctcagtgtattgtgcagtaggcatcacatatgcttggttcaaactgtatgtttcagtattgattgactctgctattggcaagacaaagaaacaatgaataaaggagactgcttagatgtgtgccaagcaattatttcatgggaaattaaccagaacttgaagaaagttgccagtggcatcagccatttgtttcagtagaactgttcagagcaccgttcttccacacttggtcttgcccagcctagcaaccggattttcaccatggtgagaagccgccaactttttttttttggcgtgtacacaggcagatggtgtactgtccccattctgtacaccttgttccagattttttttgtttgaaattatacagtgacaatactcacaaagccaaggggagtagttaaggtataattt

SEQ ID NO: 59235 - DNA, 4495 bp, Homo sapiens
cgacgcatcgcgcgatggcgcgggcgggacagtgcttgtgaaactgaacacaacaaaagtatggatatgggaaaccaacatccttctattagtaggcttcaggaaatccaaaaggaagtaaaaagtgtagaacagcaagttatcggcttcagtggtctgtcagatgacaagaattacaagaaactggagaggattctaacaaaacagctttttgaaatagactctgtagatactgaaggaaaaggagatattcagcaagctaggaagcgggcagcacaggagacagaacgtcttctcaaagagttggagcagaatgcaaaccacccacaccggattgaaatacagaacatttttgaggaagcccagtccctcgtgagagagaaaattgtgccattttataatggaggcaactgcgtaactgatgagtttgaagaaggcatccaagatatcattctgaggctgacacatgttaaaactggaggaaaaatctccttgcggaaagcaaggtatcacactttaaccaaaatctgtgcggtgcaagagataatcgaagactgcatgaaaaagcagccttccctgccgctttccgaggatgcacatccttccgttgccaaaatcaacttcgtgatgtgtgaggtgaacaaggcccgaggggtcctgattgcacttctgatgggtgtgaacaacaatgagacctgcaggcacttatcctgtgtgctctcggggctgatcgctgacctggatgctctagatgtgtgcggccggacagaaatcagaaattatcggagggaggtagtagaagatatcaacaaattattgaaatatctggatttggaagaggaagcagacacaactaaagcatttgacctgagacagaatcattccattttaaaaatagaaaaggtcctcaagagaatgagagaaataaaaaatgaacttctccaagcacaaaacccttctgaattgtacctgagctccaaaacagaattgcagggtttaattggacagttggatgaggtaagtcttgaaaaaaacccctgcatccgggaagccaggagaagagcagtgatcgaggtgcaaactctgatcacatatattgacttgaaggaggcccttgagaaaagaaagctgtttgcttgtgaggagcacccatcccataaagccgtctggaacgtccttggaaacttgtctgagatccagggagaagttctttcatttgatggaaatcgaaccgataagaactacatccggctggaagagctgctcaccaagcagctgctatccctggatgctgttgatccgcagggagaagagaagtgtaaggctgccaggaaacaagctgtgaggcttgcgcagaatattctcagctatctcgacctgaaatctgatgaatgggagtactgaaataccagagatctcacttttgatactgttttgcacttcatatgtgcttctatgtatagagagctttcagttcattgatttatacgtgcatatttcagtctcagtatttatgattgaagcaaattctattcagtatctgctgcttttgatgttgcaagacaaatatcattacagcacgttaacttttccattcggatcattatctgtatgatgtggtgtggtttgtttggtttgtccttttttttgcgtttttaatcagaaaacgaaatagaggcagcttttgtagattttaaatgggttgtgcaagcattaaaatgcaggtctttcagaatctagaactaggcataaccttacataatactaggaaaattatgagaaaggggaaatttttggttaaataagagtaaggttcaaacacaagcagtacatgttctgtttcattatgctcgatagaaggcttttttttcacttataaggcctgattggtcctacccagcttaacggggtggggtttttttgtttgttcagacagtctgttcttttgtaaacatttttagttggaaaaacagcatctgcattttccccatcctctacgttttagagaggaatcttgtttttgtgtgcaacataagaaaattatgaaaactaatagccaaaaaacctttgagattgcattaaagagaagggataaaggaccagcaataataccttgtaagttgcttttgtttgtaaaatctgagcttatagttttccttagtgagtaaattcataaggatgggaacatttaaattaagttaatgggcctttaaaaaaaaaaaaaggaaacactcatacctgtagttggaggatgaatactggagacgggttaccaatgtcaggttatactaaaactaaatcagaaagtctgaatgtagcacataatggttctcttctgttgtccaaggctgtaaaatggacagccttgtcacacctccccggtgctgttttacaacgtgagggtagacgctgtcagtaacccagagggaccaggccttcctaggttttctaggcagtcagctgttaaccactcacttagtaaatgtcataactacacctgctccaggaccaatcagtgaaacctgctcggaattaaaggcttcctctgggtgcctgctgaacaactgagctcatgtcatgggcatgtggtggtttctctgttgcctgaaagagccattaaagtcagtcgtgcgtgaagcatctctcttctaaaggatgtgtatttccataaatgctttctgaggatccggtacaaaatgatttcccaaagttctgaagtgccttgagaacatgtgggtccgagtgttataacagactcctcccccgggtcaccttttgcctggtcatcctgttagagtacatctttggaaatccagggtaatattctctttcagagatgctcattgtgtaactctgtgtagggagatagtcactttaaacagctcaaagtagctagctaaaggagtagccttaaatacctaaaagatgacagaagcatagcccttaacaaatcttcagcttgtctctcagtatttcccaatcatgaaaatcccttgctatgtctttcctactagaaatgttctagaatcgctggacggtggggtcagagggcagtcggtatttaggccgtgagcttcccatactactgcaggtccaactcctggcaaccgcgggctcaaggcaggtcattggaatccacgttttggccacagtagttgtaggattgcttttctgtatcataattttagaatgctcttaaaatcttgaggaagagtttttattttttatttatttttgagatggagtctctgttgcccaggctgcagtgcagtggtgccatctcagctcactgcaacctccacctcccaggttcaagcgattctcctgcctcagccacctgagtagctgggagtacaggcatgtggcaccatgcctggctaatttttgtatttttaatagagttgagatttcaccatgatggtcaggctggtctcgaactcctgacctcgtgatccgcccgcctcggccccccaaagtgctgggattaacgggtgtgagccacggcgcccagcccaggaagagtttttaaattagagctctgtttaattataccactgggaaatcatggttacgcttcaggcatattcttccccagagtactacttacattttaaatttcattttgtaaagttaaatgtcagcattccctttaaaagtgtccattgttctttgaaagtagacgtttcagtcattcttttcaaacaagtgtttgtgtaccttttgccaagctgtgggcatcgtgtgtgagtacagggtgctcagctcttccaccgtcattttgaattgttcacatgggtaattggtcatggaaatgatcagattgaccttgattgactgtcaggcatggctttgtttctggtttcaatctgttctcgttccttgtaccggattattctactcctgcaatgaaccctgttgacaccggatttagctcttgtcggccttcgtggggagctgtttgtgttaatatgagctactgcatgtaattcttaaactgggcttgtcacattgtattgtatttttgtgatctgtaatgaaaagaatctgtactgcaagtaaaacctactccccaaaaatgtgtggctttgggtctgcattaaacgctgtagtccatgttcatgccaaaaatggctgggaacgtttgctttatttacattcagtcagcgttgctttcagatcacactttatccacacaggaaagccagtcagcctataatgaagtagttattaaaataaatgtaatgaatatgtctacaaagtatagtttagtggtttattttgctaaaatgcacatatatttgatataatttagtttgagaagttcagctagtttttctcctttgtttgactttgtcaatttctatctggtttttaaggggctgagcttatcttgtgcatgcaaggttttgggtttttttatttttttttgagcacagccttttaccttttaatttggtgggggattttcctttaataaaaaaaaaaatgggccctc

SEQ ID NO: 59236 - DNA, 1065 bp, Homo sapiens
ttttttttttttagagtcaagatcttttatttcctgattttaaaaatcgtcaccatcatagacctcctggcttctcttgtatctgtgttctaatggctcccagcagtgccttcacacagcccctttattccccttcttgtgcctgcccatgagcctgagtgtgacagatcaattagctttgtccctccaaactgtgggagcaggactagactcttctggcaggcagagagctcctcctcggccagtgttcgagcctggtccaccactcctcagttcttcttgctcttggcttttgtggccttggcatccagcgtgctctgggcatgagtgaggtgcttcacagcatcaagcacaaggactccaggcagcaccagccacagggcattcatgaagacaaagtaaaaccagaagtagagagggtggcccagctctccgtgctggaatccgtcgcggtgctctgtcaggaagtagagcacatccccatagatctggcccacagagaccacaagctgtagaatgaagcggaggggatgctggcggagaaaggcgatcaccacccacaggctgagtggtccccacaggcaagctgtgatggtttccatgcacactgtgaagttgtcacccaggatgtatcggctgtctcccttggcatactctttccagagttgagataagaaggcttggtctccaagcaggtcttcgtagtagagaacgaaccagccctcgatcaccaggtgaatgaacccacacactgcaaaccagcacagggacagtcgccgccaagtccccaatgggacaaccgcagcacgacctgacaacagccatgtggtcacgactaagacccctgtgacagagaagaggccagccagtatatgccaggtggggcggtcattaggtacaaagttgtccagtcttaggtgctgaggccagtatgggtgcaaggggcccgcgttggtagtcatgtctttgtgggctgatggcaaggcgcgcgacggcagcggcctcccacgctggctccgggctctctttaggctgggtctcgcgccggacgcgtgggtcgacccg

SEQ ID NO: 59237 - DNA, 3395 bp, Homo sapiens
ttttttttttttaaaaatatgtttatctttaatgatccaagattctgcaagacacactgatatacccagaattgggtgggaaatacagcatctcagcagtgctactgccagcctgggggtggggagctggatgctggctgaaggacccccatggtgaagtcgattccaacctcacgggagcctcagtgccctatctccatggaaaccagcctgggcactgggatggggccctagggagcctgccatgaaacatctctgataggtatttccccattaaaaacaacccacaggtgcccacccccaccccaaagctacttgcccagctccccctcctctctgtgtttgtcgggccaaggataaagggaaatgggggagttgaccactttaacggacaaaacaaaagcagatttgttacctcctatttaggggaaggaaaaagggagggggaaagggtagtaagggagctgcacttcaagctcagaattctgccaagaccctagagcggctatggcagacagcggtgcatgactgccagagggcagcgctacccaaacccctggaggtaccctttgttactgctggggcccctgctgctgtgggggaaagacgggtcttcaaggctgcttcctgccatctagcgctgcccaatgtttggaccaaaaggggatggcacctaggatggctctacaactccatactcaagtacgaaaagagggctcccaggatctcaatgtggtatcagggatgagagtttgcccaaactccctccttcccaccctgctggactgtcagagctctgggctaggaagaactccagggaaggccaggatgagtgggggaaggagacaagaaaatggtctccaatttggcatcaaaacagagtaagttcaaagaaacaaaaccttgatttttttatagcaggttctcctggccagctcatgacagcaggtctccacccactcagggatggcccaataaaaagttgggcaaagcaagggcatggctaccctcagggcagtgcatggaactcagaaaagtgagtctacaggatgcaggagagaacagcagagcccacagctctgccactctgatatgtcctccatcagtcccacgtgccctaggcactgacctcatacctgcctcaggagcagcttccttcaggctgagtcctggcaggggaaagttcccaggcaggtgtcccagaaggaacatgagtgttctctgcagggccctgcctgagctcttcaggggatggagaggaggccacccactcctcatgccagagtgcaatgctccccagtcccttttcaagagggggaagaagccagcactgtgggccccaggtggccccatctcaggaatgacagggcattctgcaggggtggcacattctgaggctcttaggccctgtgcatctggatgaaggagaggacgtcctccttggacagcttgtcctggtcctggggcttctgggagtcatgcacacgaatgccatccccccactcccagaagagccggccatagtagcaaatgtgaaatggggcaatggagtctgcagggaggtcaaaagtagagtccttggttttcttgttgtagaagaacttcttcttgaagcttttgctgaatcccatagtccagggctcattcactgtcctgacgatgtagaggcccatgggtacaaagtgccggtcatcacgccctgtgtagctgagctttggggtgccactggagcccttgatgatcttcatctccaacctgacaaaaatcttctccatctcttccagtctgtacacctccttcaccctgatgggattcatgtcgggtcgactaggcttggaaacggctttcacaaatttctcggcaagctgaattcgctggttaaagtgctgctcccgaacgtcggtgccattcagcacaaggacatcgaggatgtggatggcactgatcttcctctgggccttcccctcccctttcagctcatgcacaatttccacagatagcagagtgtcccggggcagctctgtcttcaggtctagcttgatccagcggtctgactggcggccatcccatgtgtagatctgggatttccccaggccgatgaggaacttttgctcactgccagataccatgcagcggtagtcaaacacagggcggatcttctccagggttttagaggtgagcagtgtgggcttgtagctgaagatgtcaatctcagtgccctggattagctcaaagaacttcgatttagggtcggaggaagaaggagccacacgagcctggtctgggatcccccagagtcggaggcactccttccgtatctctgcctgtcgaggctcactcagtgtcgtgtcttgaacaaaggcatggattttcgccagagctttgatctgcagactacagtggctctcattggaccgtatcatgtagtcagtaaattcatggtctcccttgatcacctccagggggaccaccaagttgacgtcggaatccgtgttccgcagctgattgagtttaatattcactgcgaagaggtaatcccgaacatcatctatgcccaccttcaggcccttgcacaccacatacctctctgagttggcaggacggctggtaataggcttgaagagacaaactcgttcaaagcagcagtacagcaggtagacaagccccacactaaacggtgtgaacaggtcaaaggttttacagatgaagtggcctcctgtccggacaatggacagcgccatgaggaactgacacagaagcagctgcttgctgaggatctcctgcaggttctcctgcccctccaccgagaaacccccatcagccatcagaaaatggacacccttgcgatctgtgttatccaggacaaaattccgaaaagcagagatgttctctgggcgggtgatatctccatctccatcaatcccaccctcaccatagtagggttcgaagagttcactggaagcagagtagaagtcctccagcttgaagtcattagggcccttcaaagtcattccaaagccctttgcatgccacttcttcctccacagcacatactctgagaagccacctgggcctgcgcagacatcagcaaagtacagaagctcagcttcccggtccttcaccagtggcttcccataagagtcccgcggatttgtgaacatgcgatcaaatacaaaatccatgttagccatcttcattgctgccctgtttagaaagaagactcctcggatcatctcatagggattggcccgagtccgagctcgccgcatctcttccccatccaagacatcaaacacgctcttacactgcaacacactgtgaagcagctcttccccacaaaactctgtttcatcttcaataatcatctttctctttcccaccaccatccaatcgct

SEQ ID NO: 59238 - DNA, 1665 bp, Homo sapiens
  misc_feature (1)...(1665): n = a,t,c or g
gggcagggaatctggcttgattggcgtgctgagacgcacctggcgcaaccctcccttctgaatcgaagttcaagtcccgcggacactgcaaccatgaaggagagacgggccccccagccagtcgtggccagatgtaagctcgttctggtcggggacgtgcagtgtgggaagaccgcgatgttgcaagtgttagcgaaggattgctatccagagacctatgtgcccaccgtgttcgaaaattacacagcctgtttggagacagaggaacagagggtggagcttagtctctgggatacctcaggatctccctactacgataatgtccgtccactctgctacagcgactcggatgcagtattactatgttttgacatcagccgtccagagacagtggacagcgcactcaagaagtggaggacagaaatcctagattattgtcccagcacccgcgttttgctcattggctgcaagacagacctgcgaacagacctgagtactctgatggagctgtcccaccagaagcaggcgcccatctcctatgagcagggttgtgcaatagcaaagcagctgggtccagaaatctacctggaaggctcagctttcacctcagaaaagagcatccacagcatctttcggacggcatccatgctgtgtctgaacaagcctagcccactgccccagaagagccctgtccgaagcctctccaaacgactgctccacctccccagtcgctctgaactcatctctcctaccttcaagaaggaaaaggccaaamgctgttccattatgtgaagtggaaattggaggggggagacaaccccctacttcctcccttggggtgcagaggcacggggagagggaggatgagacaatttaggacactggacatgagtttttcagatggccacggtgagggcttggaaggagacaggaatggggcgaggaaggagccaggcccggcatgaggacctgacgctgagagagagccatcataccccaagccaggcactagattttggagggggcgactaccccagtgccccccccgctccagaggaaggaaagctgtgggggacggggggcatgctggcctcatgggcttgggggcatacagcagcctcaccttcagcttcatgcctcttccacacagcgtttccatgcaggtcaggggatgggaggggtccctgagcccttcccttcccctctaaggaggcagcaacggcagagtggggaagtggagcggcagctcccttgggggcctttagccccaggtgccttccgtaactgcaattcggaagtgcaggagctggtcagagcccaatgagaaggaaacctcatcctttgcatagccccnatgccctccatggagaggtgacatcatacattcacatgcttctcacctaagtcccccagggtccaagggagaagccccagacccccttctcttgcagagtgtgggggtggtggtgctgcaggggcagggctgggtgggggtcaccagactttttctgcccttagggtagtacagctggcatttgttttatagactcttgtctttggaattggggggagggggggagtgtttcaatctgttatatgttctgtgtttaatgaagaaaacctatttattaatgaaaaatataatacatataaagaaaaaaaaaa

SEQ ID NO: 59239 - DNA, 621 bp, Homo sapiens
  misc_feature (1)...(621): n = a,t,c or g
tcccgatattcccgggtcgacgatttcgtcgccgagcccagctccgccgccgagcgcctgtgccggcacggctacaccatggagcgcccggataaggcggcgctgaacgcactgcagcctcctgagttcagaaatgaaagctcattagcatctacactgaagacgctcctgttcttcacagctttaatgatcactgttcctattgggttatatttcacaactaaatcttacatatttgaaggcgcccttgggatgtccaatagggacagctatttttacgctgctattgttgcagtggtcgccgtccatgtggtgctggccctctttgtgtatgtggcctggaatgaaggctcacgacagtggcgtgaaggcaaacaggattaaagtgaacatcacctttttatagcattaaattcattttttaaaatgataaatgctggagggggccatctgatttgaataaagttgaaagaacatgttaaagtcagtcttaaggagtcacgtttgagtatgtaaattttgatctttctaatatgttggttgnaaaatcagttttaactgtatgaatctganttgcnatgagaattggaaagtagtacnagaataggtaattaatggcca

SEQ ID NO: 59240 - DNA, 6012 bp, Homo sapiens
gagggcggggaagaggcgtgacggagattcctgaggtgtagtagcctgaggttcccttatgtggccctatagctgttactgaaggaagtagcctacgtccacgcctacaactgaagtctcttgacaaacacctcacccctgcctccgggatgaaagggggtaacctagacctgaatgggcttgaccatctcacaactgctcgcgtgacgaccgcattcgtggcaggtaagaagattgctgtatcaactcaagaaagcagtaacttcactgtctttgtattttgaattgcaacaacaactttgatatcaacaatgaagcaatgatatctaagaacaaaagagtatttgccaacagtcatcataatatcaagtgattgtataagcagaaacaagctgtcacagacctgtgcgtcagctaatatatggagaatgctttcttctgatactatttacttagaggcagttttaatataaatcatttcaattatatctacatcaaataaaataaaaatgagtgaagcccccagattcttcgttggaccagaagatacagaaataaatcctggaaattatcgacatttcttccaccatgcagatgaagacgatgaggaggaagatgattctccaccagaaaggcagattgtggttggaatatgttccatggcaaagaaatcccaaatcccaaacccaatgaaggaaattcttgaacggatctccttatttaaatatatcacattagtagtatttgaagaggaggttattttgaatgaaccagtggaaaactggcctttatgtgattgtcttatttctttccattctaaaggatttccactggacaaagcggttgcctatgcaaaactcaggaatccatttgtaatcaatgacttgaatatgcagtatctcatacaagataggagagaagtatatagtattcttcaagctgaaggtattttacttcctcgttatgctattttgaaccgtgacccaaataatcccaaagaatgtaatctgattgaaggggaagatcatgtagaagtaaatggggaagtttttcaaaagccatttgtagaaaagccagtcagtgcagaagatcacaatgtttacatttattacccaacttctgctggtggtggaagtcaaagactctttagaaagattggcagtagaagtagtgtttattctccagaaagcaatgtacgaaaaacaggctcatatatatatgaagagtttatgcccacagatggtactgatgttaaggtttatacagtgggtccagattatgcccatgctgaagctcgaaaatctccagcacttgatggcaaggtggaacgagacagtgaaggaaaagaagtaagataccctgttattctcaatgcacgagagaaattaattgcttggaaagtctgccttgcttttaagcaaacagtttgtggctttgatttgttacgggccaatggacagtcctatgtctgtgatgtcaatggcttcagttttgtgaaaaattccatgaagtattatgatgactgtgcaaaaatacttggaaatattgtaatgcgagaacttgctccacaatttcatattccatggtcaatacccttagaagctgaagatatcccaattgtaccaactacatctggaactatgatggaacttagatgtgtcatagctgttatacgtcatggggatcgaacaccaaaacaaaaaatgaaaatggaagtgagacatcagaaattttttgatctttttgaaaagtgtgatggatataaatcagggaaattaaaactcaaaaaaccaaaacagttacaggaagtgctagatattgcacgacagcttcttatggagctagggcaaaataatgattctgaaattgaagaaaacaagccaaaacttgaacaacttaagactgtattagagatgtatggtcatttttctggaataaatcgtaaggttcagttgacctatctccctcatggttgtcctaaaacatctagtgaagaggaggacagccgaagagaagaaccatctttacttttggttctaaaatggggaggtgaattaactcctgcaggcagggtccaggctgaagaacttggaagagccttcaggtgtatgtatcctggaggtcaaggagattatgcaggatttcctggttgtggtttacttagattacatagcacctacagacatgacctcaaaatatatgcctctgatgaaggacgagtccagatgactgcagctgcttttgcaaaggggcttttagctttggaaggagagcttacacccattcttgttcaaatggtgaaaagtgcaaatatgaacggtcttttggatagtgatagtgactctctgagcagttgtcagcaacgtgtgaaggcaaggcttcatgaaatacttcagaaagacagagattttactgctgaagattatgaaaagcttactccatctggaagcatttctcttatcaaatcaatgcatttaattaaaaaccctgtgaagacctgtgataaagtttattccttaattcagagtttgacttctcaaatcagacatcgaatggaagatcctaaatcatcagatattcagctttaccatagtgaaacattggagcttatgctacgtagatggtccaagttagagaaagactttaaaacaaagaatggaagatatgatattagtaaaatccctgacatatatgactgtataaaatatgatgtccagcataatgggttccttgaaattaggaaaacacaatgggaattatataggctttcgaaggcattagcagatattgttatccctcaggaatatggtataactaaagctgaaaaactggagattgccaaaggctactgtactcctctggttagaaaaattcgctcagaccttcagaggacacaagatgatgacactgtaaataaacttcatcctgtgtattctagaggtgttctgtctcctgaacgtcatgttcgtactagattatattttaccagtgaaagtcatgtacattctttgctgtctattcttcgctatggtgccttatgcaatgaatcaaaggatgaacagtggaaacgagctatggattatttaaacgttgtcaatgagctcaactacatgactcagattgttatcatgctttatgaggatcctaataaggatctttcctcagaagaacgctttcatgttgaattacactttagtccgggagccaaaggttgtgaagaagacaaaaatttgccatctggctatggatatagaccagcttccagagagaatgaaggcaggagaccttttaaaattgataatgatgatgaaccacatacttctaaaagagatgaagttgatcgagctgtgatattgtttaaaccaatggtatcagagccaattcatatacacaggaagtctccacttccaagatctaggaagacggctacaaatgatgaagagagccccctgagtgtgtctagcccagagggtactggtacctggctgcattataccagtggtgtgggtactgggcgtcgaagacgcagatcaggggaacaaatcacttcttcccctgtctcccccaaatcattggctttcacatccagtatttttggctcatggcaacaggttgtatctgaaaatgctaattacctgcgaacaccaagaactcttgtggaacagaagcagaatcctactgtagggtctcactgtgcgggcctgtttagcacctcggtgctcgggggttcttcaagcgcacctaacctacaggattatgctcgtactcatcgtaaaaagctgacctcttctggctgcatagatgacgccacacgcggttctgctgttaaaaggttttatatctcatttgctcgacacccaaccaatggctttgaattgtattccatggtgccatctatttgtcctctagaaactcttcataatgccctatctttaaagcaagtggatgaatttcttgcttccattgcttctccatcatctgacgttccacggaagaccgctgaaatttcctctacagctttacgttccagtccaataatgagaaaaaaagtatctttaaatacgtatacacctgcaaagatcctcccaacaccaccagctaccttaaagagcactaaagcaagcagcaaaccagctacaagtggaccttctagtgcagttgttcctaatacctcatctcggaaaaagaatataactagcaaaacagaaacgcatgaacacaaaaaaaacactgggaaaaagaaatgaaatcttagcagaagctggaactttttatacttataaaaatagtatgttcttatgtttctccttatgcatttatgtgttcacttaaaaatgtttttaaatctaaggttttctttgtttatgttcaggtaaggaactgttgtcatgatctggaaatgtttaaaacaatgtttgttagcattctgtgagcagcaaaacttatagtgataaaaatcgattgttgttaatatgatgtttaccatgtgcacatagtaatgaaaaggaacataaaagcccagcaggctcgtaccaaagtcacagcagtaatgctatgtactgcagagtctgatgagctggcctttgtgcacacttttattttcatgggattgcatcttagctgttaaaacttctagattgaaatttgacagccagggttacatattggggacttttaaagtgtctttccaaagagatttcattaaccgtttagattagaatatctttcccaattgttacagtgacatatatgctgcaatatttaacaactggagtattagccacatgggttattttttcaatctgtgttttgaatttttttattgtgtgttatttaaaatattacatatgcagctgggagaactacacctttgtgcacatagatttatatattaatttgtagaaaatattttctttatatatttccttaccatacaaggtgccttgttcatcaggaaaacttttgttttgtattttgacaagaaaggcaccttcagagtttctttttaagtatagttgacaagtgtataaatgttacacttactttcagagttctttttagatctaaagaagtcagttcaaaaatggaaatcaacaatgttaggagaaatctgaattctgttaagttagtaagtattatgtatagcatctgtttttaaccatttccattcttatccctagtgtatcagttgatcacactaagaaagcttaaagattgagcatttgaaataaatgctctttataaatgattagatttttgaagggatattgaaatcattgcgctgtgatttcatctgtgatgtgaaaaatcaatttattatccttggtgctttcccccccaccaatgcacaaataattgtgaacagcttgaaatgacttaaactgtaatccaaatgggacaatctgataagaatttcatgcattggtagttaaataacttaaattgctaaagctttagcttgaaatttatgtttagaaaaactattgatttcccatggtatgaatataactattgtaattcttcaaatgagactcttctcaccttaaatagtcatatattaattaacttataggaaataagcatactatatgttagctgttttaaaaggtaccagatgtaagagtcataaatatatgcaattaaagaagttcatagatttcacatgaatgtaaatgtgttatatggagacatgtcttgtaaacagttgaatgtatgtaagttttctgtttgtgaaaatgtagttaatgtactcactgtggaggtcataaggaagctactttttttttaaagtggaacctaattaaaatatttccagaatcaaaaaaaaaaaaaggggggggccgtttaaaagaacccttggggggcccaagtttaacgggggatggaaaggtaaaattttttcccttatggggggccaaataaaacccaacttggaaattttggaaaagaaccttactttggggggggaaacatatgggcccaccctccttacaaaatttaaaggttttaggg

SEQ ID NO: 59241 - DNA, 754 bp, Homo sapiens
ggcacgagcaggaatgtctgaggtggcaacacttctcttcagccagacagcactggccagtttggagtctgtccatcctgcaggccacaagctctggatgaggaacttgaggcaagtcaccagcccctgatcatttcgcctaaaagagcaaggactagagttcctgacctccaggccagtccctgatccctgacctaatgttatcgcggaatgatgatatatgtatctacgggggcctggggctgggcgggctcctgcttctggcagtggtccttctgtccgcctgcctgtgttggctgcatcgaagagtaaagaggctggagaggagctggcaccttctgtcctggtcccaggcccagggctcctcagagcaggaactccactatgcatctctgcagaggctgccagtgcccagcagtgagggacctgacctcaggggcagagacaagagaggcaccaaggaggatccaagagctgactatgcctgcattgctgagaacaaacccacctgagcaccccagacaccttcctcaacccaggcgggtggacagggtccccctgtggtccagccagtaaaaaccatggtccccccacttctgtgtctcagtcctctcagtccatctcgagcctccgttcaaattgatcatcatcaaaacttatgtggctttttgacctttgaatagggaattttttaaattttttaaaaattaaaataaaaaaaacacatggctcacccttccacccaaaaaaaaaa

SEQ ID NO: 59242 - DNA, 2065 bp, Homo sapiens
gccgctgatcggccgtcggaatccccgcggcgacccacgcgtccgcccacgcgtccgagcggcggggggcagtgtcgcctcggtctagggacggcggcggagtcggtggtccctgcgcgatggccacctcggtgttgtgctgcctgcggtgctgcagagacggggggactggccacatccctctgaaggagatgccggccgtgcagctggacacgcagcacatgggaacagatgttgttattgtaaagaatggaagaagaatatgtggaacaggaggttgtttagccagcgcacctttacatcaaaacaaaagctattttgaattcaaaatccagtccacaggaatctggggtattggtgttgcaactcagaaggttaacttgaatcagattcctcttggccgagatatgcacagtctggtgatgagaaatgatggagccctttaccacaacaatgaagagaaaaataggctgccagcaaacagtcttccgcaggaaggagatgtggtgggtattacttatgaccatgtcgaattaaatgtatacttgaatggaaaaaacatgcattgtccagcatcaggtatacgagggacagtgtatccagttgtttatgttgatgacagtgcaattttggattgccagttcagtgagttttatcatacgcctccacctggttttgaaaaaatattatttgaacagcaaatcttctgaatgtatttgctgttcaaacttgtatttctgcactgttaaaaaatgttcatcatttaataaaactttacctggcctatagatgaaaatatattcttaaaaatatgcttgttgatgctgtctaaggaaccaatgtattcagtataccaccctgaagttgtgatttaaaatactttatgttttgtgaaatgaaaataagcatttgggcagtttatttaattcttatttaaataaatagaattatgggtttaattaacagtataacatgactatatatacatatatatttaaagggaattctttcttacataatatatttgttttgatagagatgtaaagttgggtgtgtgtttttgtcactctgaagtttagacctcattaaatatttgacatctacagttggataattttgccgcttagtgtccttttttatatacaatataacaaagtgagagaaatttatattactggcaatttcatttttggcagtctatttctgtatcatgtaccgcttttcttaaaacttaaattgcttattttgttgtgtaatgtcattgcttttgatttgctttgtgaaaggagataaacgtttcagtaattgtcagagcattttgttgcctcaggctgtgttacctcaatttcagagtaagtagtggttgattagtaatgtagtatacactggcagacatctagaatagtatgatgctttacatttaaatgaggttattcttttaaggacttttatttgtatgttttctgtaaggaataataaaataattgtaattaaggaatataccatactatattaaacacattcttcctattttgttagttatacactaaattcacatcacccgtgattatttcagttcagagataagtgaatcctcttcatgaccctgagtctttgcctgggtcttaagaatcactgtcctttagttaacgccctgtgacctgaaccaatcactctatacatctttagatacgttgtctgttttcaaatgagcatggcaaggatgcatacatttccctcctttatcaactagaaacagtacattgttcaggaaaacatgagtgttagaattagaaacagatccaaattgtagttttgctgctcatcctattttctcctctccaagtctcagattcccatttataaaaggagcaatcatactgacataagattctatgattaaataaggtaatacgtatataacaccttaataatcataggcacttgcgccaggcgcggtggctcacgcctgtgatcccggcactttgggaggctgaggcgggaggatcacgaggtcaggagatcgagaccatcgtggctaacatggtgaaaccctggctctact

SEQ ID NO: 59243 - DNA, 982 bp, Homo sapiens
  misc_feature (1)...(982): n = a,t,c or g
tttttttttttttgtggaaaacaacaccttatttattcagggtgtaatactgtctacttcctttcagaagacttgaaaaagatcaaaataggataaatggacagttactactaaacgattcaaatacttgggcagtatctttccctcttaaccctttcacacgtttttaaagtgtcaaaattgatgaatggtataaattcaaaaggaaaattcttttctactgaaaaggacatccagctcgcacaaacggtggttcagctgaaggcaaggcgtttctggttttcctctgcactcgggcggatcgttaacttccccaagttacaactgagttgctctttccaggcttttcgaagcatctttaagtttccccaccaagtcctgtaattgttccatgctgcaactaaaactaatctctggataggatggggaatcagtgttctgtacacttaaggtcaccaaatatgcaggtctgtacatcctatgaagttgattggtctttatctgatattccaagcgccaagaaacatccgttatatgagggagagatctgcctatacttcccagtaggatttctagggaattcttattattctgatattccgtgcaaaacagttctattcgctctctgtcaaatttacagtcttctagataagtgcttagagttgacttgtcagctcggtgctttcctgcctctagtatgtaagttgcagctgctgcatgacaatgttttaaaaccactgggtcgatatgtttcaagtctggatgatctaacacggcctcgtccgcctgggcgtccagcagactctggaatgccgcccggaggagaagcgtgaaggcgttggagtcgaaggagcggggatccgccagcatctggaagcctttctgcacagactccgagagctccattgtgagcgcgccgtcggacgcgtgggtcgncgcgggatttcanggccgtctatcgcatggtccaatttnacacacc

SEQ ID NO: 59244 - DNA, 1329 bp, Homo sapiens
ccctggtccgcgggcgagctcgagcagccaaccccgggcgcgtcggggccatggacggcctgaggcagcgcgtggagcacttcctggagcaaaggaacctggtcaccgaagtgctgggggcgctggaggccaagaccggggtggagaagcggtatctggctgcaggagccgtcactctgctaagcctgtatctgctgttcggctacggagcgtctctgctgtgcaatctcatcggatttgtgtaccccgcatatgcctcaatcaaagctatcgagagcccaagcaaggacgacgacactgtgtggctcacctactgggtggtgtacgccctgtttgggctggccgagttcttcagcgatctactcctgtcctggttccctttctactacgtgggcaagtgcgccttcctgttgttctgcatggctcccaggccctggaacggggctctcatgctgtatcagcgcgtcgtgcgtccgctgttcctaaggcaccacggggccgtagacagaatcatgaacgacctcagcgggcgagccctggacgcggcggccggaataaccaggaacgtcaagccaagccagaccccgcagccgaaggacaagtgaagcagccccctgagcctcacaaggacctcctggctggtgaggagggggccgcgccaggctcccaggcctccacagagtcttcagcgcatcccccaacagcagcccctgccagtccctcgggtccaggcaaggccctgggggtctccttaaatgccacctcgggcaagtcccagtcccagtcctcggccacccccagctctggatcccagggccagctgccctctggctctggctgtggctcccgcctgtccggcagggcccagggccagcgtcgggcacagggcagctcccactggtctcggcaacacacccagccgcctggtacttcctccagcccctcccagtcagccctcccgtcctcggggcccctgcagccacccaacgtcacctccagcccggtctcacccatggtccagtctcccagcagcagcaacatccccagcagccccccagcaagtcctctggcaagccggaggacgcaacccccaagaccagcggacagcgccagaaggaatcgtcgaaacagcctgccagcagcgcctcagtgcccgagctggtcccctgccattccgggacctctctggagtacacttcggagtccaccaccgagatcacctgcagctggccacaccacaggcccccgtgcctgcagcactactggtgcctgaaacacctggcctgctaggaggctccaataaagctaacccggaccagaaaaaaaaaa

SEQ ID NO: 59245 - DNA, 4586 bp, Homo sapiens
gcgccggggcggagaaatgttttgtaactttactggcctgcttcctggccaagcagcagaacaaatacaaatatgaagagtgcaaagacctcataaaatctatgctgaggaatgagctacagttcaaggaggagaagcttgcagagcagctgaagcaagctgaggagctcaggcaatataaagtcctggttcactctcaggaacgagagctgacccagttaagggagaagttacgggaagggagagatgcctcccgctcattgaatgagcatctccaggccctcctcactccggatgagccggacaagtcccaggggcaggacctccaagaacagctggctgaggggtgtagactggcacagcaccttgtccaaaagctcagcccagaaaatgataacgatgacgatgaagatgttcaagttgaggtggctgagaaagtgcagaaatcgtcttcccccagggagatgcagaaggctgaagaaaaggaagtccctgaggactcactggaggaatgtgccatcacttgttcaaatagccatggcccttgtgactccaaccagcctcacaagaacatcaaaatcacatttgaggaagacgaagtcaactcaactctggttgtagacagagaatcctctcatgatgaatgtcaggatgctctaaacattctcccagtccctggccccacctcttctgccacaaacgtcagcatggtggtatcagccggccctttgtccggcgagaaggcagcgataaacattctagaaatcaatgagaaattgcgcccccagctggcagagaagaaacagcagttcagaaacctcaaagagaaatgttttctaactcaactggcctgcttcctggccaaccagcagaacaaatacaaatatgaagagtgcaaagacctcataaaatttatgctgaggaatgagcgacagttcaaggaggagaagcttgcagagcagctcaagcaagctgaggagctcaggcaatataaagtcctggttcactctcaggaacgagagctgacccagttaagggagaagttacgggaagggagagatgcctcccgctcattgaatgagcatctccaggccctcctcactccggatgagccggacaagtcccaggggcaggacctccaagaacagctggctgaggggtgtagactggcacagcaccttgtccaaaagctcagcccagaaaatgacaacgatgacgatgaagatgttcaagttgaggtggctgagaaagtgcagaaatcgtctgcccccagggagatgccgaaggctgaagaaaaggaagtccctgaggactcactggaggaatgtgccatcacttgttcaaatagccatggcccttatgactccaaccagccacataggaaaaccaaaatcacatttgaggaagacaaagtcgactcaactctcattggctcatcctctcatgttgaatgggaggatgctgtacacattattccagaaaatgaaagtgatgatgaggaagaggaagaaaaaggaccagtgtctcccaggaatctgcaggagtctgaagaggaggaagtcccccaggagtcctgggatgaaggttattcgactctctcaattcctcctgaaatgttggcctcgtacaagtcttacagcagcacatttcactcattagaggaacagcaagtctgcatggctgttgacataggcagacatcggtgggatcaagtgaaaaaggaggaccacgaggcaacaggtcccaggctcagcagagagctgctggatgagaaagggcctgaagtcttgcaggactcactggatagatgttattcaactccttcaggttgtcttgaactgactgactcatgccagccctacagaagtgccttttacgtattggagcaacagcgtgttggcttggctgttaacatggatgaaattgaaaagtaccaagaagtggaagaagaccaagacccatcatgccccaggctcagcagggagctgctggatgagaaagagcctgaagtcttgcaggactcactgggtagatgttattcgactccttcaggttatcttgaactgcctgacttaggccagccctacagcagtgctgtttactcattggaggaacagtaccttggcttggctcttgacgtggacagaattaaaaaggaccaagaagaggaagaagaccaaggcccaccatgccccaggctcagcagggagctgctggaggtagtagagcctgaagtcttgcaggactcactggatagatgttattcaactccttccagttgtcttgaacagcctgactcctgccagccctatggaagttccttttatgcattggaggaaaagcatgttggcttttctcttgacgtgggagaaattgaaaagaaggggaaggggaagaaaagaaggggaagaagatcaaagaaggaaagaagaaggggaagaaaagaaggggaagaagatcaaaacccaccatgccccaggctcagcagggagctgctggatgagaaagggcctgaagtcttgcaggactcactggatagatgttattcaactccttcaggttgtcttgaactgactgactcatgccagccctacagaagtgccttttacatattggagcaacagcgtgttggcttggctgttgacatggatgaaattgaaaagtaccaagaagtggaagaagaccaagacccatcatgccccaggctcagcggggagctgttggatgagaaagagcctgaagtcttgcaggagtcactggatagatgctattcaactccttcaggttgtcttgaactgactgactcatgccagccctacagaagtgccttttacatattggagcaacagcgtgttggcttggctgttgacatggatgaaattgaaaagtaccaagaagtggaagaagaccaagacccatcatgccccaggctcagcagggagctgctggatgagaaagagcctgaagtcttgcaggactcactgggtagatgttattcgactccttcaggttatcttgaactgcctgacttaggccagccctacagcagtgctgtttactcattggaggaacagtaccttggcttggctcttgacgtggacagaattaaaaaggaccaagaagaggaagaagaccaaggcccaccatgccccaggctcagcagggagctgctggaggtagtagagcctgaagtcttgcaggactcactggatagatgttattcaactccttccagttgtcttgaacagcctgactcctgccagccctatggaagttccttttatgcattggaggaaaaacatgttggcttttctcttgacgtgggagaaattgaaaagaaggggaaggggaagaaaagaaggggaagaagatcaaagaaggaaagaagaaggggaagaaaagaaggggaagaagatcaaaacccaccatgccccaggctcaacagcatgctgatggaagtggaagagcctgaagtcttgcaggactcactggatatatgttattcgactccgtcaatgtactttgaactacctgactcattccagcactacagaagtgtgttttactcatttgaggaagagcatatcagcttcgccctttacgtggacaataggttttttactttgacggtgacaagtctccacctggtgttccagatgggagtcatattcccacaataagcagcccttactaagccgagaggtgtcattcctgcaggcaggacctataggcacgtgaagatttgaatgaaagtacagttccatttggaagcccagacataggatgggtcagtgggcatggctctattcctattctcaaaccatgccagtggcaacctgtgctcagtctgaagacaatggacccacgttaggtgtgacacgttcacataactgtgcagcacatgccgggagtgatcagtcagacattttaatttgaaccacgtatctctgggtagctacaaaattcctcagggatgtcattttgcaggcatgtctctgagcttctatacctgctcaaggtcattgtcatctttgtgtttagctcatccaaaggtgttaccctggtttcaatgaacctaacctcattctttgtgtcttcagtgttggcttgttttagctgatccatctgtaacacaggagggatccttggctgaggattgtatttcagaaccaccaactgctcttgacaattgttaacccgctaggctcctttggttagagaagccacagtccttcagcctccaattggtgtcagtacttaggaagaccacagctagatggacaaacagcattgggaggccttagccctgctcctctcaattccatcctgtagagaacaggagtcaggagccgctggcaggagacagcatgtcacccaggactctgccggtgcagaatatgagcaatgccatgttcttgcagaaaacgcttaacctgagtttcataggaggtaatcaccagacaactgcagaatgtagaacactgagcaggacaactgacctgtctccttcacatagtccatatcaccacaaatcacacaacaaaaaggagaagagatattttcggttgaaaaaaagtaaaaagata

SEQ ID NO: 59246 - DNA, 2321 bp, Homo sapiens
tagaagcaggcaagttgggtaacggctctcggcaaagttcgagaagtgcctatggccatgagtgagctgggcactcggaagcccagcgatggcactgtttctcatctgctcaatgtggtggagagtgagcttcaggcagggagggaaaaaggcgaccctacggagaagcaacttcagatcatcctggaggatgcacctctctggcagagattcaaggaagtcactaatgagatgattgtgaccaagaatggcagacggatgtttccagtcctaaagattagtgtcacagggttggaccccaatgccatgtactccctcctgctggactttgtccctacggacagtcaccgctggaagtacgtcaacggggaatgggtgcccgctggcaagccagaggtctccagccacagctgcgtctacattcacccggactcccccaactttggggcccactggatgaaagctcccatctccttcagcaaagtgaagctgaccaacaagctcaatggaggcgggcagataatgttgaattctctgcataaatatgaaccccaggttcacatagtgcgtgttggaagtgcccatcgaatggtaacaaactgctccttccctgaaacccagttcatagccgtgactgcctatcagaatgaggagataacggctctcaaaatcaagtacaatccttttgccaaagccttcttggatgccaaggaaagaaatcacctaagagacgtaccggaggctatctctgagagccagcatgtgacctattctcacttgggaggctggatcttttccaatccagatggagtgtgcacagcaggaaactccaattaccagtatgccgctcctctgcctctgcctgctccccacacccaccatggctgtgagcactattcgggtctccgaggacaccggcaggctccctacccttctgcgtacatgcacagaaaccattctccctcagtgaatttgatagaaagctcaagcaataatctgcaagttttctcgggacctgacagctggacttccttatcctccacaccccatgccagcatcctgtctgtaccccacaccaacggaccaatcaatccagggcccagcccctacccgtgcctgtggaccatcagcaatggtgccggaggccccagtgggccaggcccggaggtgcacgccagcaccccaggagcatttctcctcggaaacccagctgtgacttcacccccttctgtgctctccacccaagcacccacttcggctggtgtggaggttctgggggagccctcgctaaccagcattgctgtgtccacctggacagcagtggcctcgcatcccttcgcgggctggggtggcccaggagcgggtgggcaccattctccttcctcactggatggttaagcaggatcctaggagcctctttgcacagcgatccttccatgtgtagagtgcttagaaaccccatcaactgatctagtgagtcagactgtggaatctcccttcccactagctggaggtggaggtgggttattacagaagtcatactgggagagggttcagtttggatgatgctagttagatcatttgcatctctccaccattttcttctgcactcccattttctctgcagcttattcttgccatgcttaggtgacagaagtttgttaagtaccatccttgtgccctgcctcttattctcaaatcgttctggaaagcctcacttccttttctgtggagaaggtgcaaagctgttaaatgagctcagagtttacctagctaaggccactgcttcctgctttgtgaagcctggaaagtatgtgtggccacagggctcaggttcacacttctgctttgagaccaggatggggtgtaagccatagagtaaggttaacaaaaagaataaagctaatcatgtattacaaacagcagtgtgcccagacttgtggaaatgaagtcatgtcactcctctgctcagaaaccttcaatggttcaccattaccagtggaatgaagtcaattctcctcactataactggggtgtggtagtttaagcctataatctcagcccttttggaggccaaggtaagaggatcgcttgaggtcaggagttcgagaccagcttgtgcaacaaagtgagagcctgtctctacaaaaaatagtcatgcacacaaaattagctgggcatggtggcctgtgcctatagtcccaactacttagaggaggatcgcttgatctcaggaggttgaggctgcagtgaattatgattgtggcattgcactccagcctgggtggtagatcaaggctttgtttcatttgaaaaaaaag

SEQ ID NO: 59247 - DNA, 2276 bp, Homo sapiens
cagcccggcctacagtgcggacacaggacagaggggagccaggttctttgcactgaccaatgctgagagcagaccctcggagcagccgggttggaagtgtctctccacagtcaccagacagatccaggataggatgggcagcccagtgcaccgagtgtcattgggggatacctggagcaggcaaatgcaccccgacatagagagcgagaggtatatgcagtcctttgacgtggaacggctcaccaacatccttgatggaggtgcccagaacactgcactccgcaggaaagttgagagcatcatccacagttacccggagtttagctgtaaggacaattatttcatgacccagaatgagcgttataaggctgccatgcggagggcattccacatccggttgatagctcggcgcctgggttggttagaagatggtcgtgaattaggctacgcttacagagccctttctggagacgtggccttaaatatacacagagtcttcgtgagagccctcaggagcctgggctcagaggagcagattgccaaatgggacccactctgcaaaaacatccagatcatcgcaacgtatgcacagacagagttgggacatgggacatatcttcagggcctggagactgaagccacctatgacgcagccacccaggagtttgtgatacacagccccacgctgactgccaccaaatggtggcctggagacttgggacggtcagccacccatgccctggtccaggcccagctgatctgctcaggagccaggcggggcatgcacgcttttattgtgccaatccggagtcttcaggaccacaccccactgccaggaatcatcattggggacatcggacccaagatggactttgatcaaacagacaatggcttcctgcagctgaaccatgtgcgggtccccagggagaacatgctgagtcgctttgcacaggtcttgccagatggcacctacgtcaaactcggtacagcacagagcaactaccttcccatggtggtggtgcgggtggagctgctgtcaggggagatcctccctatactgcagaaggcctgtgtcatcgccatgcgctactcggtcatccgccgccaatcccggctccggcccagtgacccagaggcaaaggtcctggactaccagacacaacagcagaaactctttcctcagctggccatcagttatgccttccatttcctggcagtcagcctcttggagttcttccagcactcctacactgccattctgaaccaagacttcagcttcctgcctgagctccacgcactgagcacgggcatgaaggccatgatgtcagaattctgcacccagggagctgagatgtgccgcagggcctgtggcggacatggctactcaaagctgagtggcctgccatcactggtcaccaaattgtcggcctcctgtacctacgagggtgagaacacagtgctctacctgcaggtggccaggttcctggtgaagagctacctgcagactcagatgtcccctggctccacgccacagagatctctctctccatctgtcgcatatctcaccgcacctgacctggccaggtgtccagcccagagggcagccgacttcctctgcccggagctctacaccacggcctgggcacatgtggcagtaaggctcataaaggactcagtgcagcatttacagaccctgacgcaatccggagctgaccagcacgaggcttggaaccagaccactgtcatacacctccaggctgctaaggtgcactgctactatgtcactgtgaagggttttacagaagctctggagaaactagaaaatgaaccagcgattcagcaggtgctcaagcgcctctgtgacctccatgccatacatggaatcttgactaactcgggtgactttctccatgacgccttcctgtctggtgcccaagtggacatggcaagaacagcctacctggacctgctccgcctgatccggaaggatgccatcctgttaactgatgcttttgacttcaccgatcagtgtttaaattcagcacttggctgttatgatggaaacgtctacgaacgcctgttccagtgggctcagaagtcaccaaccaatactcaggagaaccctgcctatgaggaatatataagaccacttttacaaagttggagatccaagctatgaaataaccaacagtattcaagaagcaaccagcaccatcatgtgataatggtactatggcatatatgcaacattaaaattttaaattagaaaaaaaaaa

SEQ ID NO: 59248 - DNA, 1727 bp, Homo sapiens
gcgggacccgcgaggagtcgcgccgaggacggaggccacgatacctgcgtggctggggctgcgggctccggggtcaccaccctgggcgacccggaggtggcgcctccgccggccgcagctggagaggagcgtgtccccaagccgggggagcaggacttgagcaggcacgcggggtcaccgccgggcagcgtggaggagccatctcctggaggagaaaactcacctggtggcggaggctccccttgtttgtcctcccggagcctggcgtggggttcttctgcgggaagagagagtgcgcgcggagatagcagtgtggaaacgcgcgaggagtcggagggcacgggcggccagcgctcagcctgcgccatgggtggtcccgggaccaagagcggggagcctttgtgtcctccgttactgtgtaatcaggacaaagaaaccttgactctgctcattcaggtgcctcggatccagccgcaaagtcttcaaggagatttgaatcccctctggtacaaattacgcttctccgcacaagacttagtttattccttctttttgcaatttgctccagagaataaattgagtaccacagaacctgtgattagcatttcttcaaacaatgcagtgatagaactggcaaaatctccagagagccatggacattggagagagtggtattatggtgtaaacaacgattctttggaggaaaggttatttgtcaatgaagaaaatgttaatgagtttcttgaagaggtcctgagctctccattcaaacagtctatgtccttgaccccaccattaattgaagttcttcaagttactgataataagattcaaattaatgcaaagttgcaagaatgtagtaactctgatcagctacaaggaaaggaggaaagagtaaatgaagaaagtcatctaactgaaaaggaatatatagaacattgtaacacccctacaactgattctgattcatctatagcagttaaagcactacaaatagatagctttggtttagttacatgctttcaacaagagtctcttgatgtttctcaaatgatacttggaaaatctcagcaacctgagtcaaaaatgcaatctgaatttataaaagaaaaaagtgctacttgttcaaatgaggaaaaaggtaacttaaacgagtcagtaataactgaagagaaagaaacagatggagatcacctatcttcattactgaacaaaactacggttcacaatatacctggattcgacagcataaaagaaaccaatatgcaggatggtagtgtgcaggtcattaaagatcatgtgaccaattgtgcattcagttttcagaattctttgctatatgatttggattaattctatataattttggacttttaaatattaaggttaaaaaatacctgtatctaaaattgattctgttaactgttgtcttaaaactaaaggtattaaagtataaaattaaaatttgcaattttttttaaaaaattgcaattttgattctcatgggggaaattggagaaaatttttttttttttgcctctggagtttaaagtttccttatggagataagttttgtgattcctgtaatagatgggtatgttttctatttgagagttaaaacatttgagagttaaaacatttagttttaatacaacctatgtatatatacttctgtgttaatttttgctttgtcattaataaaatttaaaaatattcaaaaaaaaaag

SEQ ID NO: 59249 - DNA, 1357 bp, Homo sapiens
ttttttttttttaacatttatataccaagtttattgagacctcctgagacttaaaccctgtagaaaacagatgaatcaaacccaggccccattctcgggaagctcacagtgtgaaaataggtaactacaaaaacacagccaataagtgctttgaaacaaggaagaacataaaaaagatgtagtgttcgaaaacctggaatcaaaaactaaccgcggagaaaggtaggaggatgttctagactcccagagaagagctggggaacatccagaaaggctcttgctgccgacacagccacatcccctaggtctctggagttcactgcaggctggcccattgcagggaggtgtagaccaccttaccatcaggctgcggagaacagaggagcagggtctttctgacgctggttccaaggcgcccagcagcaaccaggtcttggagtgggatggtgtcctcgggggcccagcactgagcgatataatgggcgtggaagcggagggggtcaccaggatagaccaggaagtcacctccgaacttgccagccgcactgaggaagaagcctcgctcccacaggtctctgtagatactgtagcgcagctcgtgggcagggcggccggcgtggggccagtctttagactggacacgccagtccaggggcctggccttgaccggtcgaggcctggcagtggccagctggacaaggagagcagatctgggcaagggggctaccccatttgagggtcctgcttgggaagacgaggggccagcttcctcctgctctcccgaagcctggccatcactggtctcatcctctttggcagcctggctcgagccggcctcctggcttgagctggcccctgaagcctgttctagtttctgcttcttagcagcctggccctccgtaatcttctccaggagctcctgacgacgggtctcccgggcctcagctgccaaggcgctctgctcctggaagctctcctcttgctggcgcttgaaggatgtcagggccaggctgtggtgccgagagtctggacgcggggcgctgaccagagtcacggcgccgatctcggccaagagccgcgcctcttcgggcatcagcagcagcgggaggcccaggcgcgagttctggcggggcccgcggggcagggcgcctaccgtgcggccccccacacccaggcgctcccggagggcctgcaccgcctcggctccccacaccagggagcggccgttcgccacctccaccaccagcatcctccccaattgggagcgctcagtccgcctccttgcctcccttcagaatgtcccactgtccaccgatagaaccagcgagtcacctcataaacagtaattcgcagtcga

SEQ ID NO: 59250 - DNA, 2003 bp, Homo sapiens
cacgggccgcagcggcagtgacgtagggttggcgcacggatccgttgcggctgcagctctgcagtcgggccgttccttcgccgccgccaggggtagcggtgtagctgcgcagcgtcgcgcgcgctaccgcacccaggttcggcccgtaggcgtctggcagcccggcgccatcttcatcgagcgccatggccgcagcctgcgggccgggagcggccgggtactgcttgctcctcggcttgcatttgtttctgctgaccgcgggccctgccctgggctggaacgaccctgacagaatgttgctgcgggatgtaaaagctcttaccctccactatgaccgctataccacctcccgcaggctggatcccatcccacagttgaaatgtgttggaggcacagctggttgtgattcttataccccaaaagtcatacagtgtcagaacaaaggctgggatgggtatgatgtacagtgggaatgtaagacggacttagatattgcatacaaatttggaaaaactgtggtgagctgtgaaggctatgagtcctctgaagaccagtatgtactaagaggttcttgtggcttggagtataatttagattatacagaacttggcctgcagaaactgaaggagtctggaaagcagcacggctttgcctctttctctgattattattataagtggtcctcggcggattcctgtaacatgagtggattgattaccatcgtggtactccttgggatcgcctttgtagtctataagctgttcctgagtgacgggcagtattctcctccaccgtactctgagtatcctccattttcccaccgttaccagagattcaccaactcagcaggacctcctcccccaggctttaagtctgagttcacaggaccacagaatactggccatggtgcaacttctggttttggcagtgcttttacaggacaacaaggatatgaaaattcaggaccagggttctggacaggcttgggaactggtggaatactaggatatttgtttggcagcaatagagcggcaacacccttctcagactcgtggtactacccgtcctatcctccctcctaccctggcacgtggaatagggcttactcaccccttcatggaggctcgggcagctattcggtatgttcaaactcagacacgaaaaccagaactgcatcaggatatggtggtaccaggagacgataaagtagaaagttggagtcaaacactggatgcagaaattttggatttttcatcactttctctttagaaaaaaagtactacctgttaacaattgggaaaaggggatattcaaaagttctgtggtgttatgtccagtgtagctttttgtattctattatttgaggctaaaagttgatgtgtgacaaaatacttatgtgttgtatgtcagtgtaacatgcagatgtatattgcagtttttgaaagtgatcattactgtggaatgctaaaaatacattaatttctaaaacctgtgatgccctaagaagcattaagaatgaaggtgttgtactaatagaaactaagtacagaaaatttcagttttaggtggttgtagctgatgagttattacctcatagagactataatattctatttggtattatattatttgatgtttgctgttcttcaaacatttaaatcaagctttggactaattatgctaatttgtgagttctgatcacttttgagctctgaagctttgaatcattcagtggtggagatggccttctggtaactgaatattaccttctgtaggaaaaggtggaaaataagcatctagaaggttgttgtgaatgactctgtgctggcaaaaatgcttgaaacctctatatttctttcgttcataagaggtaaaggtcaaatttttcaacaaaagtcttttaataacaaaagcatgcagttctctgtgaaatctcaaatattgttgtaatagtctgtttcaatcttaaaaagaatcaataaaaacaaacaaggggaaaaaaa

SEQ ID NO: 59251 - DNA, 1328 bp, Homo sapiens
ggtagccacatggcaaatgcatgtcaaagcactttgaaaacagaaaatcctattcaaatgataggtattatttagaaagctggctttataaatgcatgtttttggcagcttcaattaaagttaggatcctcctaagagaaattatcattgtaccttcttttgtgaagtcaaagccttcaagacagtactcaaaattcaataaataggttttactatgtagatgaacaaagctttaaagtgaataaggacagcagtgaagggcaagtcaaggatagatacttcacaagccaactgaatgaagaccatggattcgttagctctgagccgtttaacatttcatattatacttagcaggaatgtatgacaatattactttgattttttgctggtcccgcttaattactgcatccagttgcttccttttttcattttcttcttgtagttttctttgtagctgtatcttttgatatttcatgtgatctacactctgctctagttcattagcacgtttctcattttggattgacagtgatgccagtttcttactatcttgttgcttcttctgtaagacctgaactctcagctttgcagcatccacctttttacgaaactctttctgtaattttaccttcattgcaacatcagaaagatctttgttttccagctcctgtagctgcttttgtgtttcagttagttcgacttttgcctgttctgcatcatgctctagctttgttactttcaaagtatactgcttgcttacagacttggcatcgttacctgtttttattaattctttaatcagatcttccttcatcttgatgttaactgtaagttctctcattttttgtttggcttcagtaagtatgcgttctgaattctttaatttttgcaaattcaattcttgactctcctggagacaatcaatctttaaatcttcattctccgaatctgacttttgtgtttcatcctgagtatcactcaattcaacaagggaacagagtctggcttctgaatccatgaacgacttctacatctagttccagatttctcttggccttctgattcttcatcatcactgttatcagaaaattggcagtggaggacctcatctcgttcttctacgtgatccaacagcatctgactttgtgttcgaaatccagcaaatattcgatccagagagtacataggcggacttgtgtggaccttgcaagtgattccccctcctggaatcttgtcttgatgggatataaatataatgccccaaatgagtatcaaatggtacagtatatggtctcttttcagggatcctggcatatggcccgtctcca

SEQ ID NO: 59252 - DNA, 1297 bp, Homo sapiens
tcagacaccgtgtcctcttgcctgggagaggggaagcagatctgaggacatctctgtgccaggccagaaaccgcccacctgcagttccttctccgggatggacgtggggcccagctccctgccccaccttgggctgaagctgctgctgctcctgctgctgctgcccctcaggggccaagccaacacaggctgctacgggatcccagggatgcccggcctgcccggggcaccagggaaggatgggtacgacggactgccggggcccaagggggagccaggaatcccagccattcccgggatccgaggacccaaagggcagaagggagaacccggcttacccggccatcctgggaaaaatggccccatgggaccccctgggatgccaggggtgcccggccccatgggcatccctggagagccaggtgaggagggcagatacaagcagaaattccagtcagtgttcacggtcactcggcagacccaccagccccctgcacccaacagcctgatcagattcaacgcggtcctcaccaacccgcagggagattatgacacgagcactggcaagttcacctgcaaagtccccggcctctactactttgtctaccacgcgtcgcatacagccaacctgtgcgtgctgctgtaccgcagcggcgtcaaagtggtcaccttctgtggccacacgtccaaaaccaatcaggtcaactcgggcggtgtgctgctgaggttgcaggtgggcgaggaggtgtggctggctgtcaatgactactacgacatggtgggcatccagggctctgacagcgtcttctccggcttcctgctcttccccgactagggcgggcagatgcgctcgagccccacgggccttccacctccctcagcttcctgcatggacccaccttactggccagtctgcatccttgcctagaccattctccccaccagatggacttctcctccagggagcccaccctgacccacccccactgcaccccctccccatgggttctctccttcctctgaacttctttaggagtcactgcttgtgtggttcctgggacacttaaccaatgccttctggtactgccattcttttttttttttttcaaagattgggaggggggggggaaatatataaataaatcatgaaatcaaatgccaccccggccgaaattccaaaatttataaatcgaaaaccctgaaaacccccaaagagtactcttaaatggggcaagggcccccatgtaatttcttttctttaaaacagggttgggcctttttttataaaactatcccc

SEQ ID NO: 59253 - DNA, 936 bp, Homo sapiens
  misc_feature (1)...(936): n = a,t,c or g
ttttttttttttgcaaagaccacagtgctttactttttgtcttagcagaggagataacttgagggacagcccccaaggcgccaggtagccttcaggggcgggcagggttgggggaggtaggagactcggaccggcagccctggctccagcttcatcatctgtgtcttccctctctggccaggctcttcgaggggatgcaggaggctgggcacggtgagctggcagggggcttggtcttcgggtgcccagcaggttgtcagctcctgtttctgatggactcacctgcaatgattccggcataaccgggacagctgcctgcacttgccactggtgaggatgatgatgcctgtgatgaacagcacagctgcgaccaacagcccccgtttccggagggtgtgttcatcatagaagaaggggtcatcctcatgaaaaccagatggcttgagggtctgggggtctgtctggacgtctgtgcttggggatggtctctcagagagcgtcgtggtgtcatcagtgggatgagctgctttggtgctcttgtgtgtctctggatctgtcactagaggcccatccgttccttccagttgctgggtctgggtctggggttgtggtgtttcatcagcaggccaggttggggttggagaggtgggctggagttctgtgtagactgcatctggggctcgtgtcgggacctgaatgtccatgatagttgagtctgctgaagaactggacgtggtatctttcaacgtctgtcctctggtggggagaatcaggccaacgatggtgagaagacacaggcgaccagagggcgacatgtcggagctgggggtcctaagccggcagcctcgtggagaaagggacacgccggtggctgcctcgtgccgaattgnaattnatggnttcctgcnnaaanccnnngtagcttgtacgtatgtc

SEQ ID NO: 59254 - DNA, 1407 bp, Homo sapiens
cggacgcgtgggaaatggcattaccaaattccaaatactacactcacagcgagcaaatggcatgaccaaagtccaaatactacactcacctgctgggggacacgatcacactgcaggatttcaaaggtttccgaggaggcctggacgtgacccacggacagacaggggtggaatcagtgtacacaacattccgggacagggagatcatgtttcacgtttccacaaagctgccatttaccgacggagacgcccagcagctccagagaaagagacacattggaaatgacatcgtggccatcatcttccaagaggaaaacacgccgtttgtcccagacatgatagcctccaatttcttacatgcctacatcgtcgtgcaggtcgagaccccaggcacagagaccccatcctacaaggtctctgtcactgcgcgggaagatgtgcccacctttggtccacctctgcccagtccccccgttttccagaagggcccggaattcagggagtttctgctcaccaagctcaccaatgccgagaacgcctgctgcaagtcggacaagtttgcaaagctggaggaccggaccagggctgccctcctggacaaccttcacgatgagctccacgcccacacacaggccatgctgggactgggcccagaggaggacaagtttgagaatggaggccacggggggttcctggagtcttttaagagggccatccgcgtacgcagccactccatggagaccatggtgggcggccagaagaagtcgcacagtgggggcatccctggcagcctcagcgggggcatctcccacaacagcatggaggtcaccaagaccaccttctcgcctccagtggtggcggcaacggtgaagaaccagtcacggagtcccatcaagcgacgctcggggctcttcccccgcctgcacacgggctcagaaggccagggcgacagccgggcacgatgtgacagcacatccagcacacccaagaccccagatggtggacactcctctcaggagataaagtctgagacctcatccaatcccagctctccggaaatctgccccaacaaggagaagcccttcatgaagttgaaggaaaacggccgcgccatctcccgctcctcctccagcaccagcagcgtcagcagcactgcaggggagggcgaggccatggaggagggcgacagtgggggcagccagccgtccacgacctcacccttcaagcaggaggtgtttgtctacagcccgtccccgagcagcgagagccccagcctgggggcagctgccaccccgatcatcatgagccggagtcccacagatgccaaaagcagaaactccccgagatcgaacctgaaattccgctttgacaagctcagccatgccagctctggtgcgggtcactaat

SEQ ID NO: 59255 - DNA, 1329 bp, Homo sapiens
cgcacgggcgcgcgcagctgttgacgcgcttcttagctggtgcgcgccggagcccaaattccaagtggaaactgcaggcgcacgagggaggaacgcgtggagcatgaaaaggcagggggcctcctctgagcgaaaacgagcgcggataccgtccgggaaggccggagcagcaaatggatttctcatggaagtttgtgttgattcagtggaatcagctgtgaatgcagaaagaggaggtgctgatcggattgaattatgttctggtttatcagaggggggaactacacccagcatgggtgtccttcaagtagtgaagcagagtgttcagatcccagtttttgtgatgattcggccacggggaggtgattttttgtattcagatcgtgaaattgaggtgatgaaggctgacattcgtcttgccaagctttatggtgctgatggtttggtttttggggcattgactgaagatggacacattgacaaagagctgtgtatgtcccttatggctatttgccgccctctgccagtcactttccaccgagcctttgacatggttcatgatccaatggcagctctggagaccctcttaaccttgggatttgaacgcgtgttgaccagtggatgtgacagttcagcattagaagggctacccctaataaagcgactcattgagcaggcaaaaggcaggattgtggtaatgccaggaggtggtataacagacagaaatctacaaaggatccttgagggttcaggtgctacagaattccactgttctgctcggtctactagagactcgggaatgaagtttcgaaattcatctgttgccatgggagcctcactttcttgctcagaatattccctaaaggtaacagatgtgaccaaagtaaggactttgaatgctatcgcaaagaacatcctggtgtagccagacctctctgagagacatggatatcacaggatgaaggtagaactataatctgcaattctctatgacacagctttaaccttcttctctggccaggacagtcgcaatctttgttttaagtttcacatggccatggagaatgtgcccaagaagaaaaagaatttgaaacagagatacagtcacttcctttgcttagtcttaccagtgattgtcatcatggttaaagctggtctgtgcttcttccatagacagaagcttagtctgttttcagtggaattaattgatgaactgggaaaattttaactgcatggtatgaattcagagtgtgacttaagggtcaattcaaagcagtattttgacttttcatttgtaaaataaaaatttccactattacaaaaaaaaaa

SEQ ID NO: 59256 - DNA, 1999 bp, Homo sapiens
acgcaattcccgggttgacccacgcgtgcggcgcgccccagcctgcggggccgcccttcagggcgcgcaaggtgcgagtctgtccagccggcagcaccccaggccggatggacgcttgttcctggatctgtgccccgtgagcgctcaacgccctggtgtgttcactgaccatggtgcctgggctgcggcgccgggcggggcacggcgggacttttcgggacctttcctggggggagcctcgctttccccgcctccagcctccgcccggatggcaggcgggcggggccccagtccaggccttgagacccagaagggagcgaaggtttttgctgcgccaacgcagtgaccgaaggctccgctcacgcccggcctgatcctgcctgaagatggtgccactggtggctgtggtatcagggccccgtgcccagctctttgcctgcctgctcaggctgggcactcagcaggtcggcccccttcagctgcacaccggggccagccatgcggccaggaaccattatgaggtgctggtgctgggtgggggcagtggcggaatcaccatggctgcccgcatgaagaggaaagtgggtgcagagaatgtggccattgttgagcccagtgagagacatttctaccagccaatctggacactggtgggtgctggtgccaaacaattgtcctcatctggtcgtcccacggcaagtgtgattccatctggtgtagaatggatcaaagctagagtgactgagttgaacccagacaagaactgcattcacacagatgacgacgagaagatctcctaccgatatcttattattgctctcggaatccagctggactatgagaagattaaaggcctacctgaaggtttcgctcatcccaaaatagggtcgaattattcagttaagactgtagagaagacatggaaagctctgcaggacttcaaagagggcaatgccatcttcaccttcccaaatactccagtgaagtgtgctggagcccctcagaagatcatgtacttatcagaagcctacttcaggaagacagggaagcgatccaaggccaatatcattttcaacacttctcttggagccattttcggggttaagaagtatgcagatgccctgcaggagatcatccaggagcggaacctcactgttaactacaagaaaaacctcattgaagtccgagccgataaacaagaggctgtatttgagaacctggacaaaccaggagagacccaagtgatttcatatgaaatgcttcatgtcacacctccaatgagcccaccagatgtcctcaagaccagtcctgtggctgatgctgctggttgggtggatgtggataaagaaactctgcaacacaggaggtacccaaatgtgtttgggattggggactgcaccaaccttcctacgtcaaagaccgctgctgcagtagctgcccagtcaggaatacttgataggacaatttctgtaattatgaagaatcaaacaccaacaaagaagtatgatggctacacatcatgtccactggtgaccggctacaaccgtgtgattcttgctgagtttgactacaaagcagagccgctagaaaccttcccctttgatcaaagcaaagagcgcctttccatgtatctcatgaaagctgacctgatgcctttcctgtattggaatatgatgctaaggggttactggggaggaccagcgtttctgcgcaagttgtttcatctaggtatgagttaaggatggctcagcacttgctcatcttggatggcttctgggccaaaactgcagtcactgaatgaccaagagcagcacgaaggacttggaacctatccttgtaaagagttccttgatgggtaatggtgaccaaatgcctcccttttcagtacctttgaacagcaaccatgtgggctactcatgatgggcttgattctttgggaataataaaatgaaataatacttttattttctgaataaaagtttgtcactgaaaaaaaaaa

SEQ ID NO: 59257 - DNA, 3679 bp, Homo sapiens
tttttttttaccgggcaccaacgttggttttaatggcatcaacacccaggaggtcacacgtcagttctggttggcaacgtctaggggtgaggggctgtggcctccagtcggccccacagcctttgagaactggctgcccggtcccacccgcttcccgccccgccccactgaaaaaacactaaacgattgcactgacagacagaccccagagcgcccggcctcccacacacccacggggctgtcagagtcaaccagggctttggcgtcactcggcggtggcccggggctgcgcccaggatagtgtttatcaaatgtgacacaggttcatttacaaactggggctctggaaggtctacttctgtggctctaagagacttgtctctcatggcttctctcggagctaccggaagttggacctggataacgctgtgtaggttggttggtttatttgtaaggaatgtgtaaggcattttggtaagttgaacagtaacttctttttccaaagaggaaactcagacagaggtgccctcctttgagctgctgccgtcctctgccttttccagctgttcctgcagcttcttcaccgtgtccttctcccttgccagctgctcctgggtcgtcttcagaagctcctgcagtctcgtggcggcgcgccccaggtcacttgttaacttcttctctttttctagtctctccttcagctgtgaggcctcctctgtttctgaagactctagggggccggctgtgcggagcttctccaattcttcttgtaaccgacatgccgaggtctgagcctcctcaaactcggccgtgagcttctgccgctgtgtctgctcatcctccaggatggcttctgtccactccagctgcgtcttcagctgaacggggtcctgctcggctgggggcgcctctggggaggaagctggggccccagctatgtcaccatcctctacgtggctcttcatttcactcaactgctgcctgaccagggcaagctcatcgctctgtttctgggcttcgctcttggcggcatcgagctgagattgagattctaggagaagttgcctcagccctgccacctccttggcgtagttctggcactcggcgctggcggccgccatgtgcttttccagctctgcctccaaatgcgacgtgtgctccctcacctggtccgaactttcaagttctccttttagcttctctacaatctcttcgagatgcttcactgtgacccgggacttctggagctcctcctctgcggcgcccaccttggccctccacacctgctcctcctcctccacgctcttctgcaggtctctgagcatgccctccgtctccgccaggatgctgcggtactggtcacactcggcctgcagtgtgctctgcgtctcctcggcctccctcaacttggaggccaggtccgaggagggctccgcgggagctggcgggtgcttcagcagcgtggggcctttctctttgagatcctgcagccactcggtgtaattctgttgtgccaagacagagagttctgggagcagagccagcagggcctccatggtctgcgcctcaatcagacagagctgcttctccgattcctccttggcctgggtcagggagtgcagcttctccttgcaggcctgctcggccgtggccagtgcctccatggccttccagttcttctcccggaggtcattgttcttcactttctgctgctcgacggcctccctgagctcgatggcctccttctccagacccgacacctgggactccagctccttgaggcgagtctgctgctggtcagcctccgcctggctggcctggacgtcctgggcatcccgcgcctggcccgcctccagcagggcctcaatggaacggattctctctgtgagctgggagttctctgccctggcctcctggagctgcccgtggaggccactcagctcctcgcatttgctgcgcacctccgcctcggaggactgtaacttgctgtgcagctcggccatctgctgctgttgctcctgggccttctcggcatccgcccggaggctggcgtggctgctctgcgtgtggcacagctcccggctgacctcgtccaggcgcttctgcagggcctcctcactctccctgtgggacgcctgcagctgcaggacctgcttctcgaaggcagctgccttggcttccagagctttccgctgctgctcatcttgccgcacagcctctgacttctccaccagctctttgctgaccttgctgagctcctgccgaagcttggccagctctgcgttctgcttgctctccacctggctcgtggcctggttcaaggcatcccgcaggatggagttctcctgctgcaggcgggccagctgcgtgttggggccattctccagctgctcctgaagagtccggatcttgccctgcagctgctgcacctccttcacgtgctcccggtagctggcctgcatgcgtgcctgcacagccgtgatctcctgctcccgggccaccagctgctttttcactttggcctccccggctgctgctttggccttttctgctgccatctccttgttgagctccctcagtttgctcttggcgacagccgcatcttcctgttctgtggccagcagtttttccttctcttccagctggcgtttcagaatcgccacagggtcacccttctgagtggccttgtgccaggtgtcctgaatgatgccagccttctcagacaggatctcgatgagccgctgggcctcgccctcgttgaacaccatgctcccaaccgtggagaccagcgtcttgtaggggaggtagagagggccgtcggcatctgggggcccttttttctttgaaccagacttcttcttggcaggagcctcttgctttggtgcctctgggctctgggccacatctgtatttctgccctccttgggagcagtttccaagatggcagccttcgaagtgagaacctggatggaattcactacagagctgacagctggttccacttttgccacttttttctccttcttctttttgtccttgggggaggaggccagcttctcctggggcatggctggaactgtggcgacaggagcaacgataatggggggctgcactggggttggagccacagccacagcaggagcccgcactggttctcgaaggaggacagtcacattgggggctggatcatgatcaggtatcttcccattaggtttctcttcctttttcttggtctttcctttcttctccactgttttctccttctttttcttctcgactttctggtggtgagttttcgccatctccttgcgctggttggctagggcttcttcatatgacgtttccttcatggagaaagtcgacaccaggaagatgccaatggcagaaacaaccatgaatcctccaaagaccacaacccccaaggtttgagtgtcgtaaatatccatcctggcttgctttcctttcactaggaggtctgccccggcctttgcttcaacagagagggaaatggcacctccaggacctcagaaccggaagcttctttctgcagccagagacgcgagagggaaagcgagagggcaggagccgccgccttcgcagccgccgcggagccgggagagaggagccggccaagcctccgccaagaaaaagcccccgagcagctgtagacgctgcgact

SEQ ID NO: 59258 - DNA, 5824 bp, Homo sapiens
agcgtccgcgggggctgccagggtatttcgggaagggggcgtgaggaggcggcggcggcagcggcgggtagggcaggcagcagagggaaggagaaagaaaggaaggaagagggcggggagtcctcagaggaggaggcgggaccggccgggcacctcacctctcggcggcggcggcggcggcggcggcggcggcgggcggccggggaggcggcgccgccccctgcccgcggtcttctcagcgcagtcgggcgcggacccgctggtcccgggcagcggccaaggctactggggcgggagcagtgggccggtcggcggcggcagcggcagcggcggaggaggaggaggctggagtgggcgcggaggcgaccgccatggcgttcctcaaactccgtgaccagccatcactggtgcaagctatatttaacggagatcctgatgaagttcgagcactaatatttaagaaagaagatgttaactttcaggacaatgaaaagcgaaccccattgcacgccgcagcttaccttggagatgcagaaatcattgaacttcttattttatctggagctagagttaatgccaaagacagcaaatggttgacacctttacacagagcagttgcatcttgtagtgaggaagcagttcaggtacttttgaagcattctgcagatgttaatgctcgagacaaaaattggcaaacccctttacatatagctgctgctaataaagctgtaaagtgtgctgaagctttggtacctcttctgagtaatgtaaacgtatctgatcgagcagggaggactgcattacatcatgcagctttcagtggacatggtgagatggtcaaactactcttgtctagaggtgccaatattaatgcttttgacaagaaagataggcgtgctatccattgggcagcatatatgggtcacattgaagtagtgaaattgcttgtgtcgcatggagctgaagtgacatgcaaggataaaaagtcttatacacctcttcatgcagcagcctctagtggaatgatcagcgtagtcaagtaccttctagatcttggagttgatatgaatgaaccaaatgcctatggaaatacacctcttcatgtagcctgctataatggacaagatgttgtagtgaatgaacttatagactgtggtgctattgtgaatcaaaagaatgaaaaaggatttactcctttgcactttgctgctgcatcaacacatggagcattgtgtttagagcttctagttggcaatggggccgatgtcaatatgaagagtaaagatgggaaaaccccactacacatgactgctctccacggtagattctcccgatcacaaaccattatccagagtggagctgtaatcgactgtgaggataagaatggaaatacccctttgcacatagcagcacggtatggccatgagctgctgatcaacactcttattacaagtggtgctgacactgcaaagcgtggcatacatggaatgttccccctccatttggcagccttaagcggcttttcagattgctgcagaaaacttctttcttcaggatttgatatagataccccagatgattttggcaggacttgtctacatgcagctgcagctggagggaatttggagtgcctaaaccttctgctgaatactggtgcagactttaataaaaaggacaaatttgggagatctccactgcactacgctgctgccaactgcaattaccagtgcctgtttgctcttgtgggatcaggagcaagtgtgaatgaccttgatgaaagaggctgcacacccctgcactatgcagctacatcagacacagatggcaagtgcctggaatacttattaagaaacgatgcaaatccagggatccgtgataagcaaggatacaacgcagttcattattcagctgcttatggtcaccgtctatgtcttcagctgattgcaagtgaaactcctctagatgttttaatggaaacctcaggaacagacatgctgagtgattcagataatagagcaacaataagccctttacacttggctgcctatcatggtcaccatcaagcactggaagtgttggtacagtctttgttagatcttgatgtcagaaatagtagtggaagaacacccctagatcttgcagcttttaagggccatgttgaatgtgtggatgtactcattaatcagggagcctcaatcttagtaaaagattacattttgaagaggacacctattcatgcagcagcaacaaatggtcattcagaatgcttacggctattaataggaaatgcagaaccacagaatgcagtggatattcaagatggaaatggacagacgcctctgatgctatctgttctcaacgggcacacagactgtgtttactcattgctgaacaaaggagcaaatgtagatgccaaagataagtggggaaggacagcgttgcatagaggggcagttacaggccatgaagaatgtgtagatgcattacttcaacatggtgctaagtgcttacttcgggatagcaggggccggacgcctatacacctgtctgctgcctgtggacacattggtgttcttggagcccttttgcagtcagcagcatctatggatgcaaatccagccacagcagacaatcatggatatacggcacttcactgggcttgctacaatggtcacgagacatgtgtagaactgcttttagaacaggaagttttccagaaaacggaaggaaatgcttttagtccattgcattgtgccgtgataaatgacaacgaaggtgctgctgagatgttaattgatacattaggtgccagcattgtgaacgccacagattcaaaaggaagaactcctctccatgcagccgccttcacagaccatgtagagtgtttacagctgctgctcagccataatgctcaagtcaattctgtggactctacagggaaaacacctcttatgatggctgcagaaaatggacaaacaaatacagttgtgagttattggtaatctaagaaacatgttcataaacataagaattgatgcactttttcctcccagagatgctggttagcagtgctagtgcagaactgactttacaagataacagtaaaaatactgccctccatttggcttgtagcaagggtcatgaaactagtgccttgttaatactggaaaagataacagatagaaacctcatcaatgcaaccaacgcagccttgcaaacgtgagtactgtcagtatctagtataaactttgtgacctataattataaaaatgataaatggatttttttaaacatgtgactattggaataggctttcattaggtcatagaaagcaattttaaataggttttacaactagtcaaaactctatttcgtaaaatgatcacaactaaaagccatattatttaaaatgcttttgaactgaaattttattataacattgacaataatgtatttttttccttaatccacctacctaattttctgaaggaaagtagtactattttgtgtattctgtggaaatcaactgtaataatatgttacttgaaactaacaataaatgaggtaagaagctttatgtgtgtctgtaagccaataaggtttcttaaagaatcaaaatttttaataatgtgagcagccaacctccagatagactgacagagatcttacatcagtgtctctcattgtcccttgctattccattttgaggtttagtaaagataaaaatcttagaatattgttgcccgttctgggattagtcagatcccttgaaggtccaaaaattagtcatgatgcttgtaagctgttttcaaagcctattagaatttatgctactgcagtttacagtttttaatgtatagtctgtatctttaccagcctcattccttaacaacggaggaatgcaatttcaatggtaaaatgtttttaaacattgaaaagaaaagtaacaaaaggattgggtgaaggtagggacctgtcgatgggacctatggctgagcttgatgccgagctacacgttgacaaggtgtgacagtgcactgcacagaggttctgctctccctgcccccatctttgttattaggactaggtttctcgagtttgtacctcttggtcttcacaagttgacaaaaatgctctttgacagccaggtgtgtatgtgtatgtgcatgcacatgcacatatgtgtacatgtatcatgttttttcccctagacctctgcatgttgctgcccgaaatgggctaacaatggtggttcaggaacttttgggaaaaggagcaagtgtgcttgcagtagatgaaaatggctataccccagctttggcctgtgctcccaataaggatgtggctgattgcctggctctcattttggccaccatgatgcctgtctcatcaagtagtcctttatcatccttaacattcaatgccattaaccgttataccaacacctcaaaaacagtcagctttgaagctttgcccatcatgaggaatgaacctagctcctattgcagtttcaataacattggaggggaacaggagtacttatacactgacgtggatgagctcaacgactccgattctgagacctactgagaggctgaggaggagggagttctcacagtatagccttcaaactgtgctttttcaggacaaaggcactttgatattcacgttgatattcaacctaagaggaaagatcccacagtgagccaatgttaagagatctgatggcattaggaggaagagttttaaaggaattctcttctgaattccctgagggaattttctagaatctcagaattgaaagagacctgaggttcatccagtctctaacctcttaacaaatgcaggagtcccttctacaagggtgatctttccaccttgaacacttccaagtgactctacctcaccaagcagtccattcagttgttgagcagctctaactgttagaaaggtcttccttagatggagttgaagcctccctcccggtaacttctgtctttgggcctgggtctgtcctccaagagaaccctgagaatgttggaaggatgaatctcgcacattctgccatgtcttctcttttacaggctgtttgacttctctgctgaagtgatttccagaaggactcatttgacacactattagatttaccacatctaatgaaatccaaggtgtagctataaagtgacaagctgtttttaatttatcacatacaccagaacttctatcctgcatcacttatatgtaaatgatgctgttaccaaaaacattaaggtagttcttgcgaatgccaccccactaagaaaactatttcattacttttgtaatccatctgtgagagtctgccccccagcttaaccacttcctttggtctgcacccaatgaagggaaaccccaaagtactgtctcaaatggtatttgaactacgccagtattgttggaataagtacattaattacttgaatgaatgaacacagcaccgtagaaatttcctttatggttacaccttgtatgtctaaagcattcaggccctgttctgtagtgtttcttatcctcacacagagtagaaaagcctgtttgcttttatttaacttattacataaaagatgacatctgaaatatctgatgtgtatttataaatacccagcttcttgctctagaactactttgggtgaaatggtggtaatagcaaatgacctcctttaacaagacactcatctcaaacaatgccatttagttcaggagatctctaagtgtagctgtaaattttggggttaatttggcttatattggaccttttaaaagaaataaagttttttaatgcaat

SEQ ID NO: 59259 - DNA, 1695 bp, Homo sapiens
cccacgcgtccggtgagcttcctggagcccagagatgagaagataaagatgccgctcctacgaggactgctgtggctccaggtgctgtgtgcgggccctctccatacagaggctgtggtacttctggttccttctgatgatgggcgtgcttttctgctgcggagccggcttcttcatccggaggcgcatgtaccccccgccgctgatcgaggagccagccttcaatgtgtcctacaccaggcagcccccaaatcccggcccaggagcccagcagccggggccgccctattacaccgacccaggaggaccggggatgaaccctgtcgggaattccatggcaatggctttccaggtcccacccaactcaccccaggggagtgtggcctgcccgccccctccagcctactgcaacacgcctccgcccccgtacgaacaggtagtgaaggccaagtagtggggtgcccacgtgcaagaggagagacaggagagggcctttccctggcctttctgtcttcgttgatgttcacttccaggaacggtctcgtgggctgctaagggcagttcctctgatatcctcacagcaagcacagctctctttcaggctttccatggagtacaatatatgaactcacactttgtctcctctgttgcttctgtttctgacgcagtctgtgctctcacatggtagtgtggtgacagtccccgagggctgacgtccttacggtggcgtgaccagatctacaggagagagactgagaggaagaaggcagtgctggaggtgcaggtggcatgtaaaggggccaggccgagcatcccaggcaagcatccttctgcccgggtattaataggaagccccatgccgggcggctcagccgatgaagcagcagccgactgagctgagcccagcaggtcatctgctccagcctgtcctctcgtcagccttcctcttccagaagctgttggagagacattcaggagagagcaagccccttgtcatgtttctgtctctgttcatatcctaaagatagacttctcctgcaccgccagggaagggtagcacgtgcagctctcaccgcaggatggggcctagaatcaggcttgccttggaggcctgacagtgatctgacatccactaagcaaatttatttaaattcatgggaaatcacttcctgccccaaactgagacattgcattttgtgagctcttggtctgatttggagaaaggactgttacccatttttttggtgtgtttatggaagtgcatgtagagcgtcctgccctttgaaatcagactgggtgtgtgtcttccctggacatcactgcctctccagggcattctcaggcccgggggtctccttccctcaggcagctccagtggtgggttctgaagggtgctttcaaaacggggcacatctggctgggaagtcacatggactcttccagggagagagaccagctgaggcgtctctctctgaggttgtgttgggtctaagcgggtgtgtgctgggctccaaggaggaggagcttgctgggaaaagacaggagaagtactgactcaactgcactgaccatgttgtcataattagaataaagaagaagtggtcggaaatgcacattcctggataggaatcacagctcaccccaggatctcacaggtagtctcctgagtagttgacggctagcggggagctagtt

SEQ ID NO: 59260 - DNA, 926 bp, Homo sapiens
tccctttctctttcctgcatgatgtctgctgccttcaatgccttgctgtgttgctggggatctgctctgtttagacttggctgccggtggcaccattttggcgtttaacacatttgtatatgtggcaccattggggctttggcaccatttggacttagctgcctgtggagctgtttggaactgagggatagaacgcaaggatctcacttagcccagtggatggcagtcaattaatggagcgagtggcttagtccttgtcatgctgccaagtgcaagggcctttccatgctcagaatcaccatgaagacgagagctatctctcttgctgcagacgccacggagtttgtgcaggggcgcagcgctccagccatggcgcgttcgctcgtccacgacaccgtgttctactgcctgagtgtataccaggtaaaaataagccccacacctcagctgggggcagcatcaagcgcagaaggccatgttggccaaggagctccaggcctcatgggtaatatgaaccctgagggcggtgtgaaccacgagaacggcatgaaccgcgatggcggcatgatccccgagggcggcggtggaaaccaggagcctcggcagcagccgcagcccccgccggaggagccggcccaggcggccatggagggtccgcagcccgagaacatgcagccacgaactcggcgcacgaagttcacgctgttgcaggtggaggagctggaaagtgttttccgacacactcaataccctgatgtgcccacaagaagggaacttgccgaaaacttaggtgtgactgaagacaaagtgcgggtttggtttaagaataaaagggccagatgtaggcgacatcagagagaattaatgctcgccaatgaactacgtgctgacccagacgactgtgtctacatcgtcgtggactagcc

SEQ ID NO: 59261 - DNA, 2872 bp, Homo sapiens
ttagagctcgggtctcctcgccacagctccgagtctttcgttctgggaggcccaggcggcttcgcgttctgagaataaacagaacctctgttgctctgcgacttgcaggcactgggagattcgtagctaagacgccagggcatcccggaagctgggaaatgggactgttgacattcagggatgtggccgtagaattctctttggaggagtgggaacacctggaaccagctcagaagaatttgtatcaggatgtgatgttagaaaactacagaaacctggtctctctgggtcttgttgtctctaagccggacctgatcacctttttggaacaaaggaaagagccttggaatgtgaagagtgaggagacagtagccatccagccagatgtgttttcgcattataacaaggacctgttgacagagcactgcacagaagcttcattccaaaaagtgatatcgaggagacatgggagctgtgatcttgagaatttacatttaagaaaaaggtggaaaagggaggagtgtgaagggcacaatggatgttatgatgaaaagacttttaaatatgatcaatttgatgaatcctctgttgaaagtttgtttcaccagcaaatactttcttcttgtgccaaaagctataactttgatcaatataggaaggtctttactcattcatcattgcttaatcaacaagaggaaatagatatttggggaaaacatcacatatatgataaaacttcagtgttatttaggcaggtctctactctaaatagttaccgaaatgtttttattggagagaaaaattatcattgcaataattctgaaaaaaccttgaaccaaagctcaagccctaaaaatcatcaggaaaattattttctagaaaaacaatacaaatgtaaagaatttgaggaagtctttcttcagagtatgcatgggcaagagaaacaagaacagtcttacaaatgtaataaatgtgtagaagtttgtacccagtcattaaaacatattcaacatcagaccatccatatcagagaaaactcatatagctataacaaatatgataaagatcttagtcagtcatcaaatcttagaaagcagataatccataatgaagagaaaccatacaaatgtgaaaaatgtggggatagcttaaaccatagtttgcaccttactcaacatcagatcattcctaccgaagagaaaccctataaatggaaagaatgtggcaaggtctttaaccttaactgtagtttataccttactaaacagcagcaaattgatactggagaaaacctttacaaatgtaaagcatgtagcaaatcttttactcgttcctccaatcttattgtgcatcagagaattcacactggagagaaaccatacaaatgtaaagaatgtggcaaagcctttcgctgtagttcataccttactaaacataagcgaattcatactggagagaaaccttataaatgtaaagaatgtggaaaagcttttaaccgtagttcatgccttactcaacatcagacaactcatacaggagaaaaactttacaaatgtaaagtatgtagcaaatcttatgctcgttcttcaaatcttattatgcatcagagagttcatactggagagaagccttataaatgtaaagaatgtggcaaagtctttagccgtagttcttgccttactcaacatcggaaaattcatactggagaaaatctttacaaatgcaaagtatgtgctaaaccttttacttgtttctcaaatcttattgtgcatgagagaattcatactggagagaaaccctataaatgtaaagaatgtggcaaagcctttccttatagttcacaccttattcgacatcatcgaattcatactggagaaaaaccatacaaatgtaaagcatgtagcaaatcttttagtgactcctcaggtcttactgtgcatcggcgaactcatactggagagaaaccctatacatgtaaagaatgtggcaaagcctttagttatagttcagatgttattcagcatcggagaattcatactggccagagaccctacaaatgtgaagaatgtggcaaagccttcaactataggtcatacctcactacacatcaaagaagtcatactggagagagaccctacaaatgtgaagaatgtggcaaagccttcaactctaggtcatacctcactacacatcggagaagacatactggagagagaccctacaaatgtgatgaatgtggtaaagccttcagctataggtcatacctcactacacatcggagaagtcatagtggagagagaccctacaaatgtgaagaatgtggcaaagcctttaactctaggtcatacctcattgcacatcagagaagtcatactagagaaaaactttaaaaatgtaaaacatggagcagattttttacttgttacccatgtcttattgtgcatcagataatttatatgggagtgaaaccctacaaatgttaagaatgtggcataacctttaactattttcaagccttacacaatagcagagaatataaactgaaaaaatccatacaaatattaaaaatgtggcaaattattttaaactgtgctcaacccttactcaagataatccatactagagaaacactatagatgtaaaaatgtgaaaagttttattcaaaatatcaaacttatgagtcacctaggggttcatagaaaaaggaagtttgcagatgcaataaatgtgaggaagtatttaataaaaaatgaagtctaaatgtgtcagagaatttatgtgagaaaggactaaagcacagacactttcagcctttatactaaataagagtatttttgctcagatatcttaaggcaaataatagtatttattg

SEQ ID NO: 59262 - DNA, 739 bp, Homo sapiens
cccacgcgtccgctccgcccttccggctggccccgctcagtcacccgcagcaggcgtgcagtttcccggctctccgcgcggccggggaaggtcagcgccgtaatggcgttcttggcgtcgggaccctacctgacccatcagcaaaaggtgttgcggctttataagcgggcgctacgccacctcgagtcgtggtgcgtccagagagacaaataccgatactttgcttgtttgatgagagcccggtttgaagaacataagaatgaaaaggatatggcgaaggccacccagctgctgaaggaggccgaggaagaattctggtaccgtcagcatccacagccatacatcttccctgactctcctgggggcacctcctatgagagatacgattgctacaaggtcccagaatggtgcttagatgactggcatccttctgagaaggcaatgtatcctgattactttgccaagagagaacagtggaagaaactgcggagggaaagctgggaacgagaggttaagcagctgcaggaggaaacgccacctggtggtcctttaactgaagctttgccccctgcccgaaaggaaggtgatttgcccccactgtggtggtatattgtgaccagaccccgggagcggcccatgtagaaagagagagacctcatctttcatgcttgcaagtgaaatatgttacagaacatgcacttgccctaataaaaaatcagtgaaatggtcaaaaaaaaaa

SEQ ID NO: 59263 - DNA, 997 bp, Homo sapiens
ttttttttttttggccttgaagagtttatttactcattcactcagcagcattcaccaagccctactgtgtgcattggctgggcaaggggtggtgttgggggtagagtgagcgttgctggcagggggagccggggtggatgtgaagcagcccacaggtcaggcctccatatctggaaagagcaggaacccggaaaagatgctgttggcaccctccatgcccagtagtgagttcttgtcggtggcctgcaggaagacgttctccccctgctccagcttgaggaccatgccaccggtggtgacctggaaggtgttgtaggcatagtcacagaaggtgaccaccttctgtgcacgctcccggccacgcatgaggttcacgcacaggttccctcgagagctggcgtggtaggtgaagtagtagagaccgggcaccttgcaggtgaacttgccactgcggggctcataattgttgttcatgttggtgatcacgtggtcgaagcggatggtctggtcccggcgcagggggacgttgatggttcttgtggcagagaaggcgattttctgggtggccttgtagtctcccgattcacctttggggcctggggctccaggggcccctgggccacctttagggcccatggggcccttggggccgacttttcctggattcccaggaatccctgggtctcccttctctccgaactcaccatggtctccagccagccctggaagccctttctctccttttatccctggggtcccaggttggccatcggggccaggtgtcccagggatacccgggatgccagggatggctgggggcccggtgcagctgagctgggcctgggagatatcgattaggcccaggagcaggagcaacatcagtactgggatgctgccccatgggatcttcatcatcatactgtgtcagacgcctcctgggaagctggtgtcctgtgaggccactgggctgagcagcagtgggaccaggagccgagag

SEQ ID NO: 59264 - DNA, 3687 bp, Homo sapiens
gagccccggcagagcagtcgcccgtgagcccccgcaactcagacgcgctcggcctcgcgctccggggctgggaccaccgagggcgagctgcagccttcgccacccggtccgccgccggactccgcctcccacaaacagcccggcaaggcccttttccgccgctccctcatccagcgaagcctccttcccagcttccccggcggcggcgccgtgacgtcacttccgttctccagcgcgcacgtgggaggaagtgctggtgccctctgccgctgctcccgtctctttggttacgctcgtcagccggtcggccgccgcctccagccgtgtgccgctatgggagtcccggcgttcttccgctggctcagccgcaagtacccgtccatcatagtcaactgcgtggaagagaagccaaaagaattcaatggtgtaaagattccagttgatgccagtaaacctaatccaaatgatgtggagtttgataatctgtatttggatatgaatggaatcatccatccctgtactcatcctgaagacaaaccagcaccaaaaaatgaagatgaaatgatggttgcaatttttgagtacattgacagacttttcagtattgtaagaccaagaagacttctctacatggcaatagatggagtggcaccacgtgctaaaatgaaccagcagcgttcaaggaggttcagggcatcaaaagaaggaatggaagcagcagtcgagaagcagcgagtcagggaagaaatattggcaaaaggtggctttcttcctccagaagaaataaaagaaagatttgacagcaactgtattacaccaggaactgaattcatggacaatcttgctaaatgccttcgctattacatagctgatcgtttaaataatgaccctgggtggaaaaatttgacagttattttatctgatgctagtgctcctggtgaaggagaacataaaatcatggattacattagaaggcaaagagcccagcctaaccatgacccaaatactcatcattgtttatgtggagcagatgctgatctcattatgcttggccttgccacacatgaaccgaactttaccattattagagaagaattcaaaccaaacaagcccaaaccatgtggtctttgtaatcagtttggacatgaggtcaaagattgtgaaggtttgccaagagaaaagaagggaaagcatgatgaacttgccgatagtcttccttgtgcagaaggagagtttatcttccttcggcttaatgttcttcgtgagtatttggaaagagaactcacaatggccagcctaccattcacatttgatgttgagaggagcattgatgactgggttttcatgtgcttctttgtgggaaatgacttcctccctcatttgccatcgttagagattagggaaaatgcaattgaccgtttggttaacatatacaaaaatgtggtacacaaaactgggggttaccttacagaaagtggttatgtcaatctgcaaagagtacagatgatcatgttagcagttggtgaagttgaggatagcatttttaaaaagagaaaggatgatgaggacagttttagaagacgacagaaagaaaaaagaaagagaatgaagagagatcaaccagctttcactcctagtggaatattaactcctcatgccttgggttcaagaaattcaccaggttctcaagtagccagtaatccgagacaagcagcctatgaaatgaggatgcagaataactctagtccttcgatatctcctaatacgagtttcacatctgatggctccccgtctccattaggaggaattaagcgaaaagcagaagacagtgacagtgaacctgagccagaggataatgtcaggttatgggaagctggctggaagcagcggtactacaagaacaaatttgatgtggatgcagctgatgagaaattccgtcggaaagttgtgcagtcgtacgttgaaggactttgctgggttcttagatattattaccagggctgtgcttcctggaagtggtattatccatttcattatgcaccatttgcttcagactttgaaggcattgcagacatgccatctgattttgagaagggtacgaaaccgtttaaaccactagaacaacttatgggggtatttccagctgcaagtggtaattttctacctccatcatggcggaagctcatgagtgatcctgattctagtataattgacttctatcctgaagattttgctattgatttgaatgggaagaaatatgcatggcaaggtgttgctctcttgccattcgtggatgagcgaaggctacgagctgccctagaagaggtatacccagacctcactccagaagagaccagaagaaacagccttggaggtgatgtcttatttgtggggaaacatcacccactccatgacttcattttagagctgtaccagacaggttccacagagccagtggaggtaccccctgaactatgtcatgggattcaaggaaagttttctttggatgaagaagccattcttccagatcaaatagtatgttctcctgttcctatgttaagggatctgacacagaacactgtagtcagtattaattttaaagacccacagtttgctgaagattacatttttaaagctgtaatgcttccaggagcaagaaagccagcagcagtactgaaacctagtgactgggaaaaatccagcaatggacggcagtggaagcctcagcttggctttaaccgtgaccggaggcctgtgcacctggatcaggcagccttcaggactttgggccatgtgatgccaagaggctcaggaactggcatttacagcaatgctgcaccaccacctgtgacttaccagggaaacttatacaggccgcttttgagaggacaagcccagattccaaaacttatgtcaaatatgaggccccaggattcctggcgaggtcctcctccccttttccagcagcaaaggtttgacagaggcgttggggctgaacctctgctcccatggaaccggatgctgcaaacccagaatgcagccttccagccaaaccagtaccagatgctagctgggcctggtgggtatccacccagacgagatgatcgtggagggagacagggatatcccagagaaggaaggaaataccctttgccaccaccctcaggaagatacaattggaattaagcttttgtaaagctttcccaaatcctttcatcattctacagttttatgctatttgtggaaagatttctttctcaagtagtagtttttaataaaactacagtactttgtgtatttcttttaactgtgtatatttctactgatctgatctcactgtttatgttgctttccaaagatgtatgttgcataatacagtggatctgaatttattattgcttataaaacacatttgatggaataggagtactggtttttcataatggttaaaaatgaaaccagctgtggatttcaaaacacagtgtattctagatcatctaagatccatgctgatttttattgcacaagaattaggtttgaactcttgagctggaacctcagcaaactagagtatatattgttcagtatttctttggaaacatttcattaatgtacttgtcttacagaaatttctgaactttagtaaaaaaaaataaagttaaacttttaaaaaaaaaaaaaaggggg

SEQ ID NO: 59265 - DNA, 3210 bp, Homo sapiens
  misc_feature (1)...(3210): n = a,t,c or g
ttttttttttttactgattaagagcttaaatgtttatttaaaacagaaatgccaaaccactccactctcaacctttcaagcaacctggctaacaataaactagttcttctgcaacaatgttagagcagaggagtaactcaggttatactgtaactcaaaagcaatactactagaaaacttaaaacacctagcactgcataaagaaaaaaagcaggacaaaatttaaagagaattagctacagaaaaccattcaaaggcatttctactgcctcatcttttactccatccccctttgaactggtttctgtttgcatacttgtttggtgggaaaaaaaatcatatggctgtcccaggcacaatatgggaaagtgcaaactgtctctaaggcacagaacttagattctcagccagattaatagcaaatctagacttcccaagggaatatgctagagaaaatgaccacagcgttccactgctagggaaaggctcccctatgaacaagaccagggcactcacccacccccggcactcactttcaccccaccttctcagcaacctgcccatgtccatcagctccatggcagaagcaatcctcatgatgaacaccccaaactgaccccagcctcctcaggccctgcctgagatgatgagcattaagaatacaggaacatgacaggtcaatcggtccctcaagaaaatcaaagttgcatttacatgctgaaccaaaacccactgttacagtttatgacaacccccgcaagtccccagaacttgcaactttaatcaaagtttggctgcttcccttatttcaagaaaaggtttcagtgattacattagtactaatgtactaggcttcccagaactgagaaaacaatgggaacatcaaaccaaagaagatcccattgaacagagttgcctgtcccgagcaatggggttctccccaagcatcagcctttatgccaccagttttggagaaatggcaaaatttccattgcacaagacctcccacaatgttgataagattatcaaacattttggtctggggaagatgaaacaaaattaatttagctgtttataggaaggtgggatgtgagactcatcaaaggtaggatgtgtgacacaaaataccacaggaacattttacaaggctaggtggaaatacaaagctcacatccttaaggaaaccatcaaatacttgcctagaactttctatatgaagttttgttcttctatgacactatttctctttggtaaagctagcttgtttctatctacaaagacacagtgagtacaggattagaagtgagctctcagccaaattccttttgcaagttctacctgttctgttaggcttcagggactcccagggtttggtgctggctttgggccactcaggtaggaaaaatgatacagattcattcgttaccacatggcttcataaaacaccaaaaggggaaaaatactgactagacattcagaaagaaagtggttggggctgctgatatcaagatcagaaccctaagagccatgaaggcagaggctcaaagaagtcttttcatgggcagaagactgagagccctctaagccctctctaagataccaagtagaggcagctaaaggaggacctcttctccttcatgattttctcttaaggctattctgactgccccatggactcaattctctgagacacctcatccctcagagacacctcatcccctcatccacagttaggaaatcccaccctgcattggtcacagcctgaaacaccagctgtgtgatgaggagggtcctgccctttctctattcctcactgaagaaatttcaatcaaccctcagaggaaaagcaacctaagcctacctttcctcctaaagcatttagctgcacagagtaactgaactttttcgaaacaagccctagattgactccatcagacatattttcctggactcagggctcccaagagggccagactacttcaccactctgcagaggacactgggcgggccacacctgattccagcccactccaactttacacttctccctctcccacccagaggggtaatgcctggtactgaattcccaaggcagcttccaatcaatggtgaaaatgatacatgggatataagctgctaccagcgcaattaaggtgagcactgtgtctcctcttcaaaggtgggatcaacagatgaggtacagagctgctgttgctatggcagtcactgatgacaaagccagggccatgggggcccttccattctccaaaacaataaaatcactcctagatcctatctaaaaggcaatgccactctccaaatgtacaaggaaagtgcttcagagcctctgccttgcgctccttttctgcaagtgaacaaagccaggaaagctgctctctgcattcggtaagtgtgctgtgaagttctttgggtcccagtctcctgggggctctataggctcaggagactagaggctgggtctacaggagtctgttcccaggaggcaccaggaatctgaatctaagtcaggctttggatccatttccatctcttcctttgctgtctgagttcctttggaatgcatccccacctgctgccctccttctaatttcttgttcaacttctgcagttgggtaaaaatctggaggttttcttgctgtagcttctgttgttcagccagacactttaacaccagaccctgcaatctctcaacctccacctgcagagagctgcacgcacacgcaggaggagtcagtggtgttcccttcccagcacaggttactgcaggattcagccgaggtgacgaggcttctacttggggtttgtgttccaaaggagcttcagaggccactttgagtccttgcagctcttcatagggcagggtatctttctcagattctgaaaacgctgcactgagaggagatgggctgtcaggcatggggataaattctgcattttccagctcctttcgaagccagccaggacaggagctgctggccccattactgttccccatggcctctgtgggactgattaaaccttccattcctcggtctgcttccattgttcctcggaagcctccacttgggtcaggagtttcagattcctgctgactgtcctcttcttcaccaccgccgcccccgccgcccgnncgcntgggtcgncgcgggtgcgaagacccacctacaggactctcattagggagcggcg

SEQ ID NO: 59266 - DNA, 1427 bp, Homo sapiens
acgcacgcaagcggctccagggtacgtccccgccacgcgcgctcgcaggatcggtgcgtggtgacgtttcgccggcgcgggcgccatcccggaagcgcgagcaaggccgccagatgtgcaggcagcggaggaggagaaagagatggacctcccggactcggcctcgagggtcttctgcggccgcatcctgagcatggtgaacacagatgatgtcaacgccatcatcctggcccagaagaacatgctggaccgctttgagaagaccaatgagatgctgctcaacttcaacaacctgtccagtgcccgcctgcagcagatgagcgaacgcttcctgcaccacacgaggaccctagtagagatgaaacgggacctggacagcatcttccgccgtatcaggacgctgaaagggaaactggccaggcagcacccagaggccttcagccatatcccagaggcatccttcctggaggaagaggatgaagaccccatcccacccagcaccacgaccaccattgccacctcagaacagagcacgggctcatgtgacaccagccccgacaccgtctcgccctccctgagccccggcttcgaggacctgtcccatgtccagcctggctccccagccatcaacggccgcagccagacagatgacgaggagatgacgggcgaatagccctgctgcccggtgccttgagggggtctcagggcagcagcatacaaggtggcagcgggtaaccctgccttgttctgtcatccagggctcctttgctgccccgttctgtcacccagggctcctagggggacaaggctctctcccgaggggtgtggaattcctgggggggtctttaattctgggctccttccttcctcagaacatctctattctgcaagacccctctgccatgccagggcacgcccattccagctggagtcgtggggctgggcacaggggaatttttccagagctgagcctgacgtctgctctgaagaatgcttagaaggttcccagacaccagagccagatgtcccccaccaccggtcaggacctccttgaggtgcacaagcacggtctcctctgagttcaccccagcccacccccgcacccactaattctgcttttcctgccccttgctccgtaaaagtatcaaatactttctccttggtatctcaaggaggtttctgagataggtagaagtcttgagacggaggctggccatccattcagccctgagcgtgctgagttctgtgtttctctgaatagaggtgtggaacctgaggggccagcaggcctctctgaaggcctccatggagcaaacggagccacctcgggaaagagtttaatggaatatttttgtacccgatgtttacagatgctgttgggaagttatcaataaaaagacaccattactaaaaagggaaaaaaaaaa

SEQ ID NO: 59267 - DNA, 1075 bp, Homo sapiens
cttaaaggatccgggagctaagccagacccgggtggcggtggcagctgcgaaacccagggagccgatgccacgtgacccaatgtggacttcttttaaacctttctaatgcccataacccagcctcagacccatggagcccacgagagactgcccgctgttcgggggcgccttttccgccatcctccccatgggggccattgacgtaagcgacctccgaccggtcccggacaatcaagaagttttctgccatcccgtgacggaccagagcctgatagtggaacttctcgagctgcaggcccacgtacggggcgaagcggctgcgcggtaccactttgaggatgttggtggcgtgcagggggctagggctgtccatgtggagtctgttcagcctctcagtttggagaacctggccctgaggggccgctgtcaagaagcctgggtcctctctggcaagcagcagatagctaaggaaaaccagcaggtagcaaaggacgtgacacttcatcaggccttgctgaggctgccccagtaccagactgatctcttgcttaccttcaatcagcccccgtaaggaggaaggaacgggcgggtatctcatgactgggttcccaggagaatcgggctgggagggacagaacagggagactcactggtgggatcctccaaggaagcaggagtgggccagaggtttggggtaactgatacccaggtcctctggggaacaggaattggcaatttccaaacctcaggcctggatgatgttctgtctccatctgttcccccaccccaagccctgacaacaggtcatctcttggccccgaaaatctgtcacctgcaccctggagcctgggtgactttgaacagctggtgaccagtctgacccttcacgatcctaacatctttggtccccagtaaaggcgctgaagcactgcatgatgttgctgagaacttggggactcggttctgtgagggggaaaagaggttgaaaagagggtttcctcttatttcttccctgtgcgtaaacataagacaatccctcttcagaataaacttgctttataatcaaaaaaaaaa

SEQ ID NO: 59268 - DNA, 1778 bp, Homo sapiens
attgatgccttcggaccgcccgttgagcccgtcgacccacgcgtccgccggatctcattgccacgcgcccccgacgaccgcccgacgtgcattcccgattccttttggttccaagtccaatatggcaactctaaaggatcagctgatttataatcttctaaaggaagaacagaccccccagaataagattacagttgttggggttggtgctgttggcatggcctgtgccatcagtatcttaatgaaggacttggcagatgaacttgctcttgttgatgtcatcgaagacaaattgaagggagagatgatggatctccaacatggcagccttttccttagaacaccaaagattgtctctggcaaagactataatgtaactgcaaactccaagctggtcattatcacggctggggcacgtcagcaagagggagaaagccgtcttaatttggtccagcgtaacgtgaacatctttaaattcatcattcctaatgttgtaaaatacagcccgaactgcaagttgcttattgtttcaaatccagtggatatcttgacctacgtggcttggaagataagtggttttcccaaaaaccgtgttattggaagcggttgcaatctggattcagcccgattccgttacctaatgggggaaaggctgggagttcacccattaagctgtcatgggtgggtccttggggaacatggagattccagtgtgcctgtatggagtggaatgaatgttgctggtgtctctctgaagactctgcacccagatttagggactgataaagataaggaacagtggaaagaggttcacaagcaggtggttgagagtgcttatgaggtgatcaaactcaaaggctacacatcctgggctattggactctctgtagcagatttggcagagagtataatgaagaatcttaggcgggtgcacccagtttccaccatgattaagggtctttacggaataaaggatgatgtcttccttagtgttccttgcattttgggacagaatggaatctcagaccttgtgaaggtgactctgacttctgaggaagaggcccgtttgaagaagagtgcagatacactttgggggatccaaaaggagctgcaattttaaagtcttctgatgtcatatcatttcactgtctaggctacaacaggattctaggtggaggttgtgcatgttgtcctttttatctgatctgtgattaaagcagtaatattttaagatggactgggaaaaacatcaactcctgaagttagaaataagaatggtttgtaaaatccacagctatatcctgatgctggatggtattaatcttgtgtagtcttcaactggttagtgtgaaatagttctgccacctctgacgcaccactgccaatgctgtacgtactgcatttgccccttgagccaggtggatgtttaccgtgtgttatataacttcctggctccttcactgaacatgcctagtccaacattttttcccagtgagtcacatcctgggatccagtgtataaatccaatatcatgtcttgtgcataattcttccaaaggatcttattttgtgaactatatcagtagtgtacattaccatataatgtaaaaagatctacatacaaacaatgcaaccaactatccaagtgttataccaactaaaacccccaataaaccttgaacagtgaaaaaaaaaaaaaaggggcggccgttttaaaggatccttcggggggcccaagtttacgcgggcatgcaacgaaatagttttttccttataggg

SEQ ID NO: 59269 - DNA, 1564 bp, Homo sapiens
ctagtccagcgtggtggaattcaggatggccgtcatggcgccccgaaccctcgtcctgctactctcgggggctctggccctgacccagacctgggcgggctctcactccatgaggtatttcttcacatccgtgtcccggcccggccgcggggagccccgcttcatcgcagtgggctacgtggacgacacgcagttcgtgcggttcgacagcgacgccgcgagccagaggatggagccgcgggcgccgtggatagagcaggagggtccggagtattgggacggggagacacggaaagtgaaggcccactcacagactcaccgagtggacctggggaccctgcgcggctactacaaccagagcgaggccggttctcacaccgtccagaggatgtatggctgcgacgtggggtcggactggcgcttcctccgcgggtaccaccagtacgcctacgacggcaaggattacatcgccctgaaagaggacctgcgctcttggaccgcggcggacatggcagctcagaccaccaagcacaagtgggaggcggcccatgtggcggagcagttgagagcctacctggagggcacgtgcgtggagtggctccgcagatacctggagaacgggaaggagacgctgcagcgcacggacgcccccaaaacgcatatgactcaccacgctgtctctgaccatgaagccaccctgaggtgctgggccctgagcttctaccctgcggagatcacactgacctggcagcgggatggggaggaccagacccaggacacggagctcgtggagaccaggcctgcaggggatggaaccttccagaagtgggcggctgtggtggtgccttctggacaggagcagagatacacctgccatgtgcagcatgagggtttgcccaagcccctcaccctgagatgggagccgtcttcccagcccaccatccccatcgtgggcatcattgctggcctggttctctttggagctgtgatcactggagctgtggtcgctgctgtgatgtggaggaggaagagctcagatagaaaaggagggagctactctcaggctgcaagcagtgacagtgcccagggctctgatgtgtctctcacagcttgtaaagtgtgagacagctgccttgtgtgggactgagaggcaagagttgttcctgcccttccctttgtgacttgaagaaccctgactttgtttctgcaaaggcacctgcatgtgtctgtgttcgtgtaggcataatgtgaggaggtggggagaccaccccacccccatgtccaccatgaccctcttcccacgctgacctgtgctccctccccaatcatctttcctgttccagagaggtggggctgaggtgtctccatctctgtctcaacttcatggtgcactgagctgtaacttcttccttccctattaaaattagaacctgagtataaatttactttctcaaattcttgccaatgagaggttgatgagttaattaacaggagaagattcctaaaatttgagagacaaaataaatggaagacatgacgaaccttccagagtccaaaaaaaaaa

SEQ ID NO: 59270 - DNA, 2271 bp, Homo sapiens
tttcgtgccccctccgagaggggagaccagcgggccatgacaagctccaggctttggttttcgctgctgctggcggcagcgttcgcaggacgggcgacggccctctggccctggcctcagaacttccaaacctccgaccagcgctacgtcctttacccgaacaactttcaattccagtacgatgtcagctcggccgcgcagcccggctgctcagtcctcgacgaggccttccagcgctatcgtgacctgcttttcggttccgggtcttggccccgtccttacctcacagggaaacggcatacactggagaagaatgtgttggttgtctctgtagtcacacctggatgtaaccagcttcctactttggagtcagtggagaattataccctgaccataaatgatgaccagtgtttactcctctctgagactgtctggggagctctccgaggtctggagacttttagccagcttgtttggaaatctgctgagggcacattctttatcaacaagactgagattgaggactttccccgctttcctcaccggggcttgctgttggatacatctcgccattacctgccactctctagcatcctggacactctggatgtcatggcgtacaataaattgaacgtgttccactggcatctggtagatgatccttccttcccatatgagagcttcacttttccagagctcatgagaaaggggtcctacaaccctgtcacccacatctacacagcacaggatgtgaaggaggtcattgaatacgcacggctccggggtatccgtgtgcttgcagagtttgacactcctggccacactttgtcctggggaccaggtatccctggattactgactccttgctactctgggtctgagccctctggcacctttggaccagtgaatcccagtctcaataatacctatgagttcatgagcacattcttcttagaagtcagctctgtcttcccagatttttatcttcatcttggaggagatgaggttgatttcacctgctggaagtccaacccagagatccaggactttatgaggaagaaaggcttcggtgaggacttcaagcagctggagtccttctacatccagacgctgctggacatcgtctcttcttatggcaagggctatgtggtgtggcaggaggtgtttgataataaagtaaagattcagccagacacaatcatacaggtgtggcgagaggatattccagtgaactatatgaaggagctggaactggtcaccaaggccggcttccgggcccttctctctgccccctggtacctgaaccgtatatcctatggccctgactggaaggatttctacgtagtggaacccctggcatttgaaggtacccctgagcagaaggctctggtgattggtggagaggcttgtatgtggggagaatatgtggacaacacaaacctggtccccaggctctggcccagagcaggggctgttgccgaaaggctgtggagcaacaagttgacatctgacctgacatttgcctatgaacgtttgtcacacttccgctgtgagttgctgaggcgaggtgtccaggcccaacccctcaatgtaggcttctgtgagcaggagtttgaacagacctgagccccaggcaccgaggagggtgctggctgtaggtgaatggtagtggagccaggcttccactgcatcctggccaggggacggagccccttgccttcgtgccccttgcctgcgtgcccctgtgcttggagagaaaggggccggtgctggcgctcgcattcaataaagagtaatgtggcatttttctataataaacatggattacctgtgtttaaaaaaaaaagtgtgactgcccttcagggtaagcgcacagcccaggctggagtcagtgtctgcccctgaggtcttttaagttgagggctgggaatgaaacctatagcctttgtgctgttctgccttgcctgtgagctatgtcactcccctcccactcctgaccatattccagacacctgccctaatcctcagcctgctcacttcacttctgcattatatctccaaggcgttggtatatggaaaaagatgtaggggcttggaggtgttctggacagtggggagggctccagacccaacctggtcacaaaagagcctctcccccatgcatactcatccacctccctcccctagagctattctcctttgggtttcttgctgctgcaattttatacaaccattatttaaatattattaaacacatattgttctctaaaa

SEQ ID NO: 59271 - DNA, 2108 bp, Homo sapiens
gacgatcggaggacccgcccggaattccggcaacgacgccttcgcgggagacggccacctagagcattgggcgttgcagattcctgagggccgctggccaattggcgcgctcgtctgaatggcgtttggcgcggagcagtgacggctgcgataatagcgaggcagcagtgcagctttcagagggtccgggctcagaggggctatgattcggagggttctgccgcacggcatgggccggggcctcttgacccggaggccaggcacgcgcagaggaggcttttctctggactgggatggaaaggtgtctgagattaagaagaagatcaagtcgatcctgcctggaaggtcctgtgatctactgcaagacaccagccacctgcctcccgagcactcggatgtggtgatcgtgggaggtggggtgcttggcttgtctgtggcctattggctgaagaagctggagagcagacgaggtgctattcgagtgctagtggtggaacgggaccacacgtattcacaggcctccactgggctctcagtaggtgggatttgtcagcagttctcattgcctgagaacatccagctctccctcttttcagccagctttctacggaacatcaatgagtacctggccgtagtcgatgctcctcccctggacctccggttcaacccctcgggctacctcttgctggcttcagaaaaggatgctgcagccatggagagcaacgtgaaagtgcagaggcaggagggagccaaagtttctctgatgtctcctgatcagcttcggaacaagtttccctggataaacacagagggagtggctttggcgtcttatgggatggaggacgaaggttggtttgacccctggtgtctgctccaggggcttcggcgaaaggtccagtccttgggagtccttttctgccagggagaggtgacacgttttgtctcttcatctcaacgcatgttgaccacagatgacaaagcggtggtcttgaaaaggatccatgaagtccatgtgaagatggaccgcagcctggagtaccagcctgtggaatgcgccattgtgatcaacgcagccggagcctggtctgcgcaaatcgcagcactggctggtgttggagaggggccgcctggcaccctgcagggcaccaagctacctgtggagccgaggaaaaggtatgtgtatgtgtggcactgcccccagggaccaggcctagagactccgcttgttgcagacaccagtggagcctattttcgccgggaaggattaggtagcaactacctaggtggtcgtagccccactgagcaggaagaaccggacccggcgaacctggaagtggaccatgatttcttccaggacaaggtgtggccccatttggccctgagggtcccagcttttgagactctgaaggttcagagcgcctgggccggctattacgactacaacacctttgaccagaatggcgtggtgggcccccacccgctagttgtcaacatgtactttgctactggcttcagtggtcacgggctccagcaggcccctggcattgggcgagctgtagcagagatggtactgaagggcaggttccagaccatcgacctgagccccttcctctttacccgcttttacttgggagagaagatccaggagaacaacatcatctgagcatgtgtgctctgcactggctccactggcttgcatcctggctgtgttcacagccttgtttgctgcttccatcttccccagtactgtgccaggccttctccccctccccagtgtcctctcctctcagggaggccattgcacccatatggctgggcaggcacaggcagtgaggccgaggccaatagcgagtgatgagcgggatcctaggactgatctgtagcccatgctgatgtcacccaccagggcaatccatctggaggcctgagcaccctggcccaggactggcttcatcctggcactgaccaggaaagactgcctctgaccctcttagcagacagagcccaggcatgggagcactctggggcagcctggctcaggtttattgattttcgtctgtttaccctatccattaatcaatacatgtaattaactcctaaaaaaaaaa

SEQ ID NO: 59272 - DNA, 1464 bp, Homo sapiens
caagcaagctgcctgctcagatggcagggaatgggggaaaacagggagacagtttcctgtttgagatgttgggagatgcttcgagtagtatatttactggaaatagacattcaacttggatgtccctttttggaaatgtgcctgcgtccagggctgggttggggccccattgaactttggctctgacacagctgttgccacactcaacggaactgaatctatgtttgtcttccccggcatccttcaccccaactctccccgccacaacatacatcccatgccagcctggggaccctcaaaggtggcttcatcattaggtttgtggctgggtcctactgaagtaagtcttggcactcagagggataggaattgaatgaagacatgagattcctctgcgggaggcctctctaggaaatctgtggactcacacgtttactaatgttgctgcagccccgcacccaccttggccttgggcagccatactctagggcttttgtaacctctccatgtgaggaactcaaattagacctgggtttggaggcggtgctccgagctggcctttgggggaggttttgtgcgaggcatttcccaagtgctggcaggattgtgtcacagacacagagtaaacttttgctgggctccaagtgaccgcccatagtttattataaaggtgactgcaccctgcagccaccagcactgcctggctccacgtgcctcctggtctcagtatggcgctgtcctgggttcttacagtcctgagcctcctacctctgctggaagcccagatcccattgtgtgccaacctagtaccggtgcccatcaccaacgccaccctggaccggatcactggcaagtggttttatatcgcatcggcctttcgaaacgaggagtacaataagtcggttcaggagatccaagcaaccttcttttacttcacccccaacaagacagaggacacgatctttctcagagagtaccagacccgacaggaccagtgcatctataacaccacctacctgaatgtccagcgggaaaatgggaccatctccagatacgtgggaggccaagagcatttcgctcacttgctgatcctcagggacaccaagacctacatgcttgcttttgacgtgaacgatgagaagaactgggggctgtctgtctatgctgacaagccagagacgaccaaggagcaactgggagagttctacgaagctctcgactgcttgcgcattcccaagtcagatgtcgtgtacaccgattggaaaaaggataagtgtgagccactggagaagcagcacgagaaggagaggaaacaggaggagggggaatcctagcaggacacagccttggatcaggacagagacttgggggccatcctgcccctccaacccgacatgtgtacctcagctttttccctcacttgcatcaataaagcttctgtgtttggaacagctaaaaaaaaaa

SEQ ID NO: 59273 - DNA, 937 bp, Homo sapiens
caaaaatgtaaaattagccaggcgtgggggcatatgcctgtaatcctagctacgtgggaggttgaggcaggaagatcacttgagcccaggagtttgaggttgcagtgagctatgattgtgccactgtattccagcctgggcagcagagtgagatgctatttcaaaaaaataaagtaaattaaaaaaaaataagagcctttgatggcaaatgttagaaaaatatgtaaataaaaacattggcacttttaaataggtcatcctgtcccaaagaggtagtgtttcccccaatacccacagcccctcacacaggcgtgtgcgcacacactcacggctcatggatcctgttttggtgaaccggactgacttcttcttgcctgccactccaggtgatgatgaccaaacggaccaaagacatgggcaagttcagttctgtcaccgtgtctaccattgatgaagaggaagaggagattgaggctagggaagttgctgactcatatgcacagaatgccaaagtgattgaaaaacagctggagcgcaaaggcatgagcaagaggcgactgcaagagctggctgaattggaagccaagaaagcgaaaatgaaggggaccttgattgacaaccagttcaaataaccaggcctttttctaagccctagactagaggcaagcatttagatcaggaggcaaagtaatttcttgattacatagacggattcctatttatgccctagcagaaggctttacgttgtttcccattgattctcctacattcagtgaggtctttaactgagtccatttaacttgctttctttttttttttggaaacaaagctttgttttttcccccaggagggagggcagggggctaaaatggccccactgaaccccacccctctagcctggggaaaaaattgagactttgtcttttcaaaaaaaaaa

SEQ ID NO: 59274 - DNA, 1609 bp, Homo sapiens
tccgtagtgggctaagggggagggtttcaaagggagcgcacttccgctgccctttctttcgccagccttacgggcccgaaccctcgtgtgaagggtgcagtacctaagccggagcggggtagaggcgggccggcacccccttctgacctccagtgccgccggcctcaagatcagacatggcccagaacttgaaggacttggcgggacggctgcccgccgggccccggggcatgggcacggccctgaagctgttgctgggggccggcgccgtggcctacggtgtgcgcgaatctgtgttcaccgtggaaggcgggcacagagccatcttcttcaatcggatcggtggagtgcagcaggacactatcctggccgagggccttcacttcaggatcccttggttccagtaccccattatctatgacattcgggccagacctcgaaaaatctcctcccctacaggctccaaagacctacagatggtgaatatctccctgcgagtgttgtctcgacccaatgctcaggagcttcctagcatgtaccagcgcctagggctggactacgaggaacgagtgttgccgtccattgtcaacgaggtgctcaagagtgtggtggccaagttcaatgcctcacagctgatcacccagcgggcccaggtatccctgttgatccgccgggagctgacagagagggccaaggacttcagcctcatcctggatgatgtggccatcacagagctgagctttagccgagagtacacagctgctgtagaagccaaacaagtggcccagcaggaggcccagcgggcccaattcttggtagaaaaagcaaagcaggaacagcggcagaaaattgtgcaggccgagggtgaggccgaggctgccaagatgcttggagaagcactgagcaagaaccctggctacatcaaacttcgcaagattcgagcagcccagaatatctccaagacgatcgccacatcacagaatcgtatctatctcacagctgacaaccttgtgctgaacctacaggatgaaagtttcaccaggggaagtgacagcctcatcaagggtaagaaatgagcctagtcaccaagaactccacccccagaggaagtggatctgcttctccagtttttgaggagccagccaggggtccagcacagccctaccccgccccagtatcatgcgatggtcccccacaccggttccctgaacccctcttggattaaggaagactgaagactagccccttttctggggaattactttcctcctccctgtgttaactggggctgttggggacagtgcgtgatttctcagtgatttcctacagtgttgttccctccctcaaggctgggaggagataaacaccaacccaggaattctcaataaatttttattacttaacctgaaaaaaaaaaaaaagggggggccgttttaaagaatcaaattttacttccccgggcttgcaaggtaatagtttttttatggggccacctaaattaaattcccgggccggcttttaacaacgtggggaggggaaaaaccctggggtaaccaaatttaatcgctttgaaaaaaatccccttttcgccagggggggaaaaaaaaaa

SEQ ID NO: 59275 - DNA, 1945 bp, Homo sapiens
ggcacgagaacagatcagacattttgtaatgatgcctgaaataaacactaaccacctcgacaagcaacaggttcaactcctggcagagatgtgtatccttattgatgaaaatgacaataaaattggagctgagaccaagaagaattgtcacctgaacgagaacattgagaaaggattattgcatcgagcttttagtgtcttcttattcaacaccgaaaataagcttctgctacagcaaagatcagatgctaagattacctttccaggttgttttacgaatacgtgttgtagtcatccattaagcaatccagccgagcttgaggaaagtgacgcccttggagtgaggcgagcagcacagagacggctgaaagctgagctaggaattcccttggaagaggttcctccagaagaaattaattatttaacacgaattcactacaaagctcagtctgatggtatctggggtgaacatgaaattgattacattttgttggtgaggaagaatgtaactttgaatccagatcccaatgagattaaaagctattgttatgtgtcaaaggaagaactaaaagaacttctgaaaaaagcagccagtggtgaaattaagataacgccatggtttaaaattattgcagcgacttttctctttaaatggtgggataacttaaatcatttgaatcagtttgttgaccatgagaaaatatacagaatgtgaatatgtaggtaaatgattacagaaaaatttatctgcttaacaaacttagaatgactttttccttttaaatttagttctatcattaatttatcattaaatttagttctatcatttggtactatcattaatgtattatatacactgatactttaaaacttgtgtggaaaaaactaacttataattttgtatcacacaccctggatatgtgttctgtttctaagcgacatttgtgagagattattgtaaaatgagagcgagcaaataaaacttaatttaatctttgcagatacatacttatgggaaatttgaacaaatgagtgaaactctgtgtttttagtaggctgtgataaacatttccggagcacttgcagaggacttgctatttgccaggtgctttatgtatcattaaatttttctcatagttcagaaaaatgtgcaaaggaaactattgtctcgctccttcaaaacagtcttaattaactttcatattagcagattaaactagcagagcaggttcaagggaaattaaatgatatggaccctaatttgtatcattctgagttgattgtgtggtttattcattctggaaacatgttgatacttacagtcagccactgcttttgataagtgatattgattaggttgaatcttcttgtaaatagtatttaccagttagcaaagtctgtgttttcagaattacagtgagcacagaggtgttcataaaatgggaattgagtcccactcggtaagagttgcttaaacttgacactgttgacatttgggctggataaaacccctgtggtggggtctgtgctgtgcattgcaggatggtgagcagcgtccctctcatgtgacacccacagttatgccggatgttgccagatgcccctaggggacagagtcaacccccaactgaggaccactgtcctacagagtcaggaaatattgtagggagaaaaaaataacaacaacaaaggcctgtgttaatgttaaatagatgagattatggaatgtgtatattaatgttaaaaattgtaccttgatcaatgtactttttataaacttgccatagatatctcagatttgaaacctcaagacagatttattattcttaaatgctgtatgataatgaagaaaaataaaaatttatttcttgcaaagttaaatgtttgttaaaattcaataggaatgactcattttatgggttaactttggggcaatttataattt

SEQ ID NO: 59276 - DNA, 2287 bp, Homo sapiens
ggggttattgaggaacatggcgttgctggtgcgagtccttaggaaccagactagcatttctcagtgggttccagtatgcagccgattgatacctgtgtctcctacccaaggacagggggacagggctctgtctcgcacttcccagtggccccagatgagccagtcccaagcatgtggtggatcagaacagattcctggaatagacatacagctgaataggaagtatcacaccacacgtaagctttctactaccaaagattccccacagcctgttgaggagaaggttggtgctttcacaaagataatagaagccatgggattcacgggacctttgaaatacagtaaatggaagattaagattgcggccctgcgcatgtatactagctgtgtggagaaaactgacttcgaggaattctttctaaggtgtcagatgcctgatacattcaattcatggtttcttataaccctactccacgtctggatgtgtctagtccgaatgaagcaggaaggccggagtgggaagtacatgtgtcgtatcatagttcattttatgtgggaggatgttcagcagcgcggcagagtcatgggggttaatccctatatcctgaagaagaacatgatcctcatgacaaatcatttctatgcagcgatcttgggatatgatgaggggatcctttcagatgatcatgggctggccgctgccctctggagaaccttcttcaaccggaaatgtgaagaccctcgacatcttgaattgctggtagagtatgtgaggaaacagatacagtacctggactccatgaacggggaggatctgcttctgacaggggaggtgagctggcgccctctagtggagaagaatcctcagagcatcctgaagccccattctccgacttacaacgacgagggactttgatgggctgggccctccgcacggcccgccagctggcttcgaggaacctccaggagagaagtgcctgttggtccaggaccctgcagaaagtggcctgaactgacctctgaacagcatctgtcaaatacctggccccatttgtgttgagtttcctcttagtgtgcccaggagtctgatctgctggggtacagggctgggagaacccctagctctcccggggggtcctctcccttaggggaagccccgagtgagagtcccccagcacacactcccccaaccccctccaacaactacatgtgactgatagcttttcccaaaggccaaggaaggggatggggtaggtttcaaaagggaaaccccccaggggcctgctgtgggcttagggagcagattgtaatgctgccgagtccggtcggtgaccacgcgttgtccctcggctttcagccatggggttgagttggccattaaaagaaacagagacttctctctgccatggcccttctttattccagggacttagaaacttgcctgagatggtggacgcagtaatgagggcaccgcgcagctcagttagagacggagaaagggaagaggctgggatggtctctgctgctcttgcctctagttcatggagatgtgtctctgttcaggccaagatacagccagccaggcctgtcgtctgggacccaggaggcctctgatgaccaagggctttcacatcctaagtcatttggaaggaggccttgagaacaaagtcacctttgtcactcccagtgaactgaatgaggaacatgctgtctcctgtcttggcctcccctttcatgagatactggggagaagagaacattcctcctggcttagttgtagcagacccagacctgtgcccagctttggtcccccttcccaacttctgaagcacgtgctgcagagccaccttggtctgagcacctgaggaccagcccctcctccctcagtgcgggtcatctcttgggggattttcttaaagtgaagaaagggggtggggaaccatattgcccctccctcccccatcaaacttccttcatttaacttgctataaaatgagtcatataaagaaactctatatgggtgaggtatatcccacttctgtgaaaacattacaaatcaaaccgcttctctcagtttatttaagatgcttttgttgcgagcggagctctagagtgaagcctcctgtgtgtgtgtgagataataacaccttgtaactcattacagctgggcactatttacataaaccagagctgagccaggcaggaatttgctgattaatttatttttaatggagtgaagtataccatgcaccaaaataaactttactgtgtgtacctaaaaaaaaaa

SEQ ID NO: 59277 - DNA, 2649 bp, Homo sapiens
ctttttgggagacatcttcggcagggcccctggaagcaagaaaatggggtgctggccttttcgaagcaggtgcagctttgggaaaacaaaattttccctttcctcctccttttacacaatgtgggtccaggttggaacctcaagcataaagggccaaaataaaaagggtttataatttaaaactccctccttttcaaaaggcaatgtggccaacaaagggtccaactttttaaaaataatttgctttttttttttttatgtacttggcctctctcctgacgcctcacaccattaagcatggagaaaagggaaaaagggcaaaggaagtcaaaaaactgaactaggattcgggcaacagcctcaggctgcccaacagaacaggcttttagggaactggacacacagaccagctgtgaccctgactttcacattgatgggtgaatggcaagtaggaggtaatgaaatctggaaatgacaggggagagaaggcaaagctgcctggagtgtcagtcccggaggcatttgcccctctcccccgggggccagccagggacttcccagttcaggaaggccacaacacttgtggcacattaattccgagcttggcccggcttctttcctgtgccctctgcctctgtgggcaggggaaggaggaagggtgtggtcccttaggatctccaagtgctcttccagctcccaggagcagggctgagatcccagagtcagtgcaatgaactgtccattccagtgaggaaaagggagggtgtggcttcgggactgcacatcacacacaagcccactgcagcgtggggagggtgggcatgggacacaaaagggtctggggctgtctccagacagagaagtccttgtggggagctgaaccgggcccaggtcctgctcaggagtcaggtcatgtagcgggtgatggcacggagggcgtacagcagagcggcttgcatgcgcgcctccaggagcagcaagttcacgtggaccttctctgagtggcggaagtgcctccagaagaggttgtacattcttcgggtggtcttctctgggtagcaggccactgtcttgatatagaccttgaggttccgctccaggagctggttcacctccccataatcatagtcatcatatctgatgccaaagacgcagtggatatagttccagatggccctgcggagcacggaggtgtccacaccactgtgcatggcgatggtattgtaggtgaggctataggctgcctggaacttctcatccagcagctgcccaccctcagggtaaagccgctggatcagcgagtagccatggtcttcccaggtataatcctgggcccggaaggtagggggtgcctgagcccctctccgagtgaagtcctcatatccgaaagtagggtcttccacaaagcacagcatgtctgggtgtggagagggctccaggatgtcagctgagggggtcaccagcaggctctctgacttctccagctcaaagcggctctccatctcctcctgggacgtcccctcatcccgcagcaggctctcctgcagctgctgcatgcgctccatcagcgcctccacgtcgcgggcagactcaaagcccccagagttgttcaacgggtccctgcttggggggctgctctgttcactagggggtgtaggtgcctggggggcagggctgccatctgcatccccctcagggaggatgccacagccaaacacgaaggaggagagcgagtggcagtgggtgagcaggaccagagcctgaatgagctcggccagggaccaagtgtgctcgccggtcttcagcaaggcctggatgtgttccttggtgatgagccatggccgatgcgccagcaacttgttgatctcgctgagtttgcgcagcttctcgggggcccggtggaggcccagcagccactcagggtcaccaccagtctgcagaaactcggccatgtgggagcctaccaggtaagaacactgatggcgggcggcagccatgatggcaatgtagtggcgccaggagctggccaagggaccatccgtgtgcagcagcaggtagtgcaggcgccagaagctggtaaagtagtcagggtgcaggcccatcaccactgccaggttgtctactcgcccagaggacatcagtgcctccagccccaggtgctgctcgaggctctcagccccctcccgaaggacctcctccacggggatgaaggcgctgggccctcgagggcctcgccgagcccggctctccctctgctcctctccggggcccgagtcgccgacgccgcccggggcgaaccgcaggtagtccttgagctctgcgcggcactcggagtccgccacgatcatggtgcgcgccaggacccggtcgcggctcgccgacgacccgtgcacccgagtgggtttcggagggaccgcccgaaatgaagccgggactgggcgccgccggggagcttctagaaccccggggcgtctctcggggctccagaacgctccggaatccgagaacggccgctttggtgctggactcttcccccagtcgggcttcgggaacggcgaaacgcctcgggggcctgggaagggccgcagcgcaggggttttcacggcctcggaagtccgcaggggccagggctgctcccggacccagcgc

SEQ ID NO: 59278 - DNA, 5800 bp, Homo sapiens
cctcaggatgcactgttgccagtcagcgttactcattttattccctagggaacagtgggtttggtagaactctcttctaaatctctttttcatagaatttaaattataaattggtcatttactgttgtcacacaatattgcgttgctgaattttccactgattatattcattttatttcctcccagaacttggtttcttgtttttctgctcactgtccacacccactccaccccaaggctggaataattctcttggagcaaaaaaatcatctttttctttgtatttcattgaacgttctctttacagtgttaggtaaaccgctgctgcgcgttttgtcccgcgtctcgccccgtccgtctcctgactggccgctcttgtccttcctcccgctttttcttctctcgtcttgcggtctgaagatgccctcggccaccagccacagcgggagcggcagcaagtcgtccggaccgctcaccgccgtcgggtatctccgggagtgaggcggccgcgggagccggggccgccgcgccggcttctcagcaccccgcaaccggcaccggcgctgtccagaccgaggccatgaagcagattctcggggtgatcgacaagaaacttcggaacctggagaagaaaaagggtaagcttgatgattaccaggaacgaatgaacaaaggggaaaggcttaatcaagatcagctggatgccgtttctaagtaccaggaagtcacaaataatttggagtttgcaaaagaattacagaggagtttcatggcactaagtcaagatattcagaaaacaataaagaagacagcacgtcgggagcagcttatgagagaagaagctgaacagaaacgtttaaaaactgtacttgagctacagtatgttttggacaaattgggagatgatgaagtgcggactgacctgaaacaaggtttgaatggagtgccaatattgtccgaagaggagttgtcattgttggatgaattctataagctagtagaccctgaacgggacatgagcttgaggttgaatgaacagtatgaacatgcctccattcacctgtgggacctgctggaagggaaggaaaaacctgtatgtggaaccacctataaagttctaaaggaaattgttgagcgtgtttttcagtcaaactactttgacagcacccacaaccaccagaatgggctgtgtgaggaagaagaggcagcctcagcacctgcagttgaagaccaggtacctgaagctgaacctgagccagcagaagagtacactgagcaaagtgaagttgaatcaacagagtatgtaaatagacagttcatggcagaaacacagttcaccagtggtgaaaaggagcaggtagatgagtggacagttgaaacggttgaggtggtaaattcactccagcagcaacctcaggctgcatccccttcagtaccagagccccactctttgactccagtggctcaggcagatccccttgtgagaagacagcgagtacaagaccttatggcacaaatgcagggtccctataatttcatacaggattcaatgctggattttgaaaatcagacacttgatcctgccattgtatctgcacagcctatgaatccaacacaaaacatggacatgccccagctggtttgccctccagttcattctgaatctagacttgctcagcctaatcaagttcctgtacaaccagaagcgacacaggttcctttggtatcatccacaagtgaggggtacacagcatctcaacccttgtaccagccttctcatgctacagagcaacgaccacagaaggaaccaattgatcagattcaggcaacaatctctttaaatacagaccagactacagcatcatcatcccttcctgctgcgtctcagcctcaagtatttcaggctgggacaagcaaacctttacatagcagtggaatcaatgtaaatgcagctccattccaatccatgcaaacggtgttcaatatgaatgccccagttcctcctgttaatgaaccagaaactttaaaacagcaaaatcagtaccaggccagttataaccagagcttttctagtcagcctcaccaagtagaacaaacagagcttcagcaagaacagcttcaaacagtggttggcacttaccatggttccccagaccagtcccatcaagtgactggtaaccaccagcagcctcctcagcagaacactggatttccacgtagcaatcagccctattacaatagtcgtggtgtgtctcgtggaggctcccgtggtgctagaggcttgatgaatggataccggggccctgccaatggattcagaggaggatatgatggttaccgcccttcattctctaacactccaaacagtggttatacacagtctcagttcagtgctccccgggattactctggctatcaacgggatggatatcagcagaatttcaagcgaggctctgggcagagtggaccacggggagccccacgaggtcgtggagggcccccaagacccaacagagggatgccgcaaatgaacactcagcaagtgaattaatctgattcacaggattatgtttaatcgccaaaaacacactggccagtgtaccataatatgttaccagaagagttattatctatttgttctccctttcaggaaacttattgtaaagggactgttttcatcccataaagacaggactacaattgtcagctttctattacctggatatggaaggaaactatttttactctgcatgttctgtcctaagcgtcatcttgagccttgcacatgatactcagattcctcacccttgcttaggagtaaaacaatatactttacagggtgataataatctccatagttatttgaagtggcttgaaaaaggcaagattgacttttatgacattggataaaatctacaaatcagccctcgagttattcaatgataactgacaaactaaattatttccctagaaaggaagatgaaaggagtggagtgtggtttggcagaacaactgcatttcacagcttttccagttaaattggagcactgaacgttcagatgcataccaaattatgcatgggtcctaatcacacatataaggctggctaccagctttgacacagcactgttcatctggccaaacaactgtggttaaaaacacatgtaaaatgctttttaacagctgatactgtataagacaaagccaagatgcaaaattaggctttgattggcactttttgaaaaatatgcaacaaatatgggatgtaatccggatggccgcttctgtacttaatgtgaaatatttagatacctttttgaacacttaacagtttctttgagacaatgacttttgtaaggattggtactatctatcattccttatgacatgtacattgtctgtcactaatccttggattttgctgtattgtcacctaaattggtacaggtactgatgaaaatctctagtggataatcataacactctcggtcacatgtttttccttcagcttgaaagcttttttttaaaaggaaaagataccaaatgcctgctgctaccacccttttcaattgctatcttttgaaaggcaccagtatgtgttttagattgatttccctgtttcagggaaatcacggacagtagtttcagttctgatggtataagcaaaacaaataaaacgtttataaaagttgtatcttgaaacactggtgttcaacagctagcagcttatgtgattcaccccatgccacgttagtgtcacaaattttatggtttatctccagcaacatttctctagtacttgcacttattatcttttgtctaatttaaccttaactgaattctccgtttctcctggaggcatttatattcagtgataattccttcccttagatgcatagggagagtctctaaatttgatggaaatggacacttgagtagtgacttagccttatgtactctgttggaatttgtgctagcagtttgagcactagttctgtgtgcctatgaagttaatgctgcttattgtctcattctgacttcatggagaattaatcccacctttaagcaaaggctactaagttaatggtattttctgtgcagaaattaaattttattttcagcatttagcccaggaattcttccagtaggtgctcagctatttaaaaacaaaactattctcaaacattcatcattagacaactggagtttttgctggttttgtaacctaccaaaatggataggctgttgaacattccacattcaaaagttttgtagggtggtgggaaatgggggatcttcaatgtttattttaaaataaaataaaataagttcttgacttttctcatgtgtggttgtggtacatcatattggaagggttaaccctgttactttggcaaatgagtatttttttgctagcacctccccttgcgtgctttaaatgacatctgcctgggatgtaccacaaccatatgttacctgtatcttaggggaatggataaaatatttgtggtttactgggtaatccctagatgatgtatgcttgcagtcctatataaaactaaatttgctatctgtgtagaaaataatttcatgacatttacaatcaggactgaagtaagttcttcacacagtgacctctgaatcagtttcagagaagggatgggggagaaaatgccttctaggttttgaacttctatgcattagtgcagatgttgtgaatgtgtaaaggtgttcatagtttgactgtttctatgtatgttttttcaaagaattgttcctttttttgaactataatttttctttttttggttattttaccatcacagtttaaatgtatatcttttatgtctctactcagaccatatttttaaaggggtgcctcattatggggcagagaacttttcaataagtctcattaagatctgaatcttggttctaagcattctgtataatatgtgattgcttgtcctagctgcagaaggccttttgtttggtcaaatgcatattttagcagagtttcaaggaaatgattgtcacacatgtcactgtagcctcttggtgtagcaagctcacatacaaaatacttttgtatatgcataatataaatcatctcatgtggatatgaaacttcttttttaaaacttaaaaaggtagaatgttattgattaccttgattagggcagttttatttccagatcctaataattcctaaaaaatatggaaaagttttttttcaatcattgtaccttgatattaaaacaaatatcctttaagtatttctaatcagttagcttctacagttcttttgtctccttttatatgcagctcttacgtgggagacttttccacttaaaggagacatagaatgtgtgcttattctcagaaggttcattaactgaggtgatgagttaacaactagttgagcagtcagcttcctaagtgttttaggacatttgttcattatattttccgtcatataactagaggaagtggaatgcagataagtgccgaattcaaacccttcattttatgtttaagctcctgaatctgcattccacttgggttgtttttaagcattctaaattttagttgattataagttagatttcacagaatcagtattgcccttgatcttgtcctttttatggagttaacggggaggaagacccctcaggaaaacgaaagtaaattgttaaggctcatcttcatacctttttccattttgaatcctacaaaaatactgcaaaagactagtgaatgtttaaaattacactagattaaataatatgaaagtcaaaaa

SEQ ID NO: 59279 - DNA, 1729 bp, Homo sapiens
ccctgatgcacccacctgcccaaaagcagtgccgccggacaggcaccttgcagagcaaacttctgtgccgagcagccttgtggtgactgcgacagtgaagtccatggttcgggagccaggggagggccttgccgtgactgtcaagtcttattggtgcttataaaactggaggactggacctgccttctccacccactggtgcctccctgaagttttacgtgccttgcaagcagtgcccccccatgaagaaagaaggcctgagggctaggggccggggctggcctgcgtctcagtcctgggacgcagcagcccgcacaggttgagaggggcacttcctcttgcttaggttggtgaggatctggtcctggttgggccggtggagaaccacaaagctctctggaggaaggacggggcctctgttctcttctacctggcccatcagcagataactgactcctttcttcatgggggggcactgcttgcaaggcacgtaaaacttcagggaggcaccagtgggtggagaaggcaggtccagtcctccagttttataagcaccaataagactgacagtcacggcaaggccctcccctggctcccgaaccatggacttcactgtcgcagtcaccacaaggctgctggcacagaagttgctctgcaaggtgcctgtccggcggcactgctttgggcaggtgggtgcatcaggggctgaaggagattcctctgttttctccggaggttgggacttggggggcagcttgactttaggctcagttccccgtttggggccgggcccttgcccttctttggcagtgccccgcggcagggtcttgtaggaggctgagaagccatcagcggtgacactgagatctgagacgaactggacgaggagttcattcccttcggaggagatggagcccgggactgcgtcgccgcagaacttccccagcctccgggagtcgtcgctcacggctccgttgaacacgctgaccgagtcatagcggcagtaggtgtccggctccaggtcaaacttctcgaaggtcagcgcgatgacctggtccgggggcgcgatgatgtgccaggaacagctgatgcccggggggtaatcggactcgggccagttgggcgtggtcagggttccctgggccttctccagccgccccccgcaaaattggtgctcagtgcccgaggtggcccgcccgctgtaccagagcaggaagcctcgtcctcctgtgccctcatccgtcgtcatcctcagggtcacctggttgccgggggcgactaggggcgcaggccggaaggtcccacaaaagcgtccgagccgctggccggaagtcccagacccagcgaagacctccagagcatcgtagcggcaggcggggtgcagctccaggtcgaagactcggaatgagagggacacagtctggccctcggggaccgttatggtccagatgcactccttattaggggggtagaggttggggaacccctcacttgccacgtaacctgattcccccttcacatcccctccgcacaggaacacgggtctggtgtagttgggggtctggccctgggcaaaaggcagcagggcgcaggcagtgaggaggggccccaggagggaggctgtggctgcaggcagcatggccccgggggaaaggcgctggggtcctcaagacagaggcagcagctgaattttgcagagcagcagcagcggtggcggcagcagcaggat

SEQ ID NO: 59280 - DNA, 2480 bp, Homo sapiens
tttcgtggcgctgcgggcgcagctccggtgcaagcgaggacacgacacatgcagtggcttctggactgcgcgatgactggacgcaagtaacttctaggtctgcagacaagaggaagagaagatgaaggaagactgtctgccgagttctcacgtgcccatcagtgacagcaagtccattcagaagtcggagctcttaggcctgctgaaaacctacaactgctaccatgagggcaagagcttccagctgagacaccgtgaggaagaagggactctgatcatcgaggggctcctcaacattgcctgggggctgaggcggcccatccggctgcagatgcaggatgaccgggagcaggtgcacctcccctccacctcatggatgcccagacggcctagctgccctctaaaggagccatcgccccagaacgggaacatcacagcccaggggccaagcattcagccagtgcacaaggctgagagttccacagacagctcggggcccctggaggaggcagaggaggccccccagctgatgcggaccaagagcgacgccagttgcatgagccagaggaggcccaagtgccgcgcccccggtgaggcccagcgcatccggcgacaccggttctctatcaacggccacttctacaatcataagacctccgtgtttactccagcctatggatccgtgaccaatgtgagggtcaacagcaccatgacaaccctgcaggtgctcaccctgctgctgaacaaatttagggtggaagatggccccagtgagttcgcactctacatcgttcacgagtctggggagcggacaaaattaaaagactgcgagtacccgctgatttccagaatcctgcatgggccatgtgagaagatcgccaggatcttcctgatggaagctgacttgggcgtggaagtcccccatgaagtcgctcagtacattaagtttgaaatgccggtgctggacagttttgttgaaaaattaaaagaagaggaagaaagagaaataatcaaactgaccatgaagttccaagccctgcgtctgacgatgctgcagcgcctggagcagctggtggaggccaagtaactggccaacacctgcctcttccaaagtccccagcagtggcaggtgtacactgagccctggttgctggccccggccggtcacattgactgatggccaccgcctgacgaatcgagtgcctgtgtgtctacctctctgaagcctgagcaccatgattcccacagccagctcttggctccaagatgagcacccacaggaagccgacccaggcctgaggggccaggaacttgctgggtcagatctgtgtggccagccctgtccacaccatgcctctcctgcactggagagcagtgctggcccagcccctgcggcttaggcttcatctgcttgcacattgcctgtcccagagcccctgtgggtccacaagcccctgtcctcttccttcatatgagattcttgtctgccctcatatcacgctgccccacaggaatgctgctgggaaaagcagggcctgccagcaggtatgagatctagcctgctttcagccatcaccttgccacagtgtccccggcttctaagcctccaatatcaccctgtgagcctcgcacagctcagccccaacacagaggtgagaccaggaataaggccacaagtatctcactttctctgcagaaatcaatctttacttcatcagagagacctaaagcgattcttacaaggagcttgctgcaagaaacacggtcattcaatcacattgaggagggtccacatggcattgagagggtgctgcccgctcaatgcccagcagcagctctggaaggcagtgctcagccccatcaccactgtcccgtggatgcctgtgtacctcttgccttttctgggcttgcgtttctctcctctagtgggtggggatgactttcaatgactttcaatacttcccctgaaggaagaatgataaggagaaatgtctgttttgaggaaagggctttgaattccccagatactgaacaatttgtgtttgtgactgatggagaatttcaggaatgaatgagaaagcctttgcgaaactatgcaacagtttacatcagtcatgtgaagtatttgtctaaaacagagcaaactgaagaccaaattattctcctgttgaggtccgtggatggcagatttaaagggaagaaccacaaaggcttgcaaagataggagaggctccatctctaatgcatgtagaagctccttacgggtgcccatcaagagcatagcttggaagccaccatgctgtgcggaactgcgtcagggcaaatgtcacagcaggatttccccaacccagctccatcatcacagacacagagagctgcaggggaggcctgcccactgttttgtcgactctgccctcctctggcagcatagatccttaggtgctcaataaaggtgtgctgtattgaactgaaaaaaaaaa

SEQ ID NO: 59281 - DNA, 2500 bp, Homo sapiens
tacggctgcgagaagacgacagaagggtacggctgcgagaagacgacagaaggggacactagaggaagtcgtgctacccccgcggagttgtcgtgtgttctggattcattccggcaccaccatgtcgaaggtttcctttaagatcacgctgacgtcggacccacggctgccgtacaaagtactcagtgttcctgaaagtacacctttcacagcagtcttaaagtttgcagcagaagaatttaaagttcctgctgcaacaagtgcaattattaccaatgatggaataggaataaatcctgcacagactgctggaaatgtttttctaaaacatggttcagaactgcggattattcctagagatcgtgttggaagttgttaatatctgctacttggaacatacgattgcctttcagaataaatattggtattttttgttgttgtaaaattgaaatcaggcatttaacatactatgaaaacaccaggagtcaatgattaatgaaaggtgactcatctgtccctttttgttgtccatactcttcctatgaagagggaatgcgtatgaattaaggctactactgtcacagaagatcatagtctttgatgctacctcacaacacaaacaggtagttcgttgggggcaaatgaattagccaactgttaactggaagcttttgataatttttttttttagaacaatttggaacattaaaatttactgaatcgtatatattcatctgagataaaaatataaaaagaattatggaccctggatggcaatttgcttgatagcatctgatttgcagactcataatttgatttttaattaaatatataggttatgatgaagtgaatagacatatcagtgaacagttaactatattaaatttttatcatttactttttttaagattcagacctcagttatataaatttcagtttaatatcaaccaaaaaattaaaattttaatctaacccttatgtgtataaattggtgtcccataccagcttttaatggtggacctatagaatccagtacttttaatggtgggaatttacagtagaagcatcctttgctgagttatacattcctttatcaatctcttttgatacaacatttaaaacaagtagcttcaagaaaccactggtgttttgaggatagtatttctaaatagcattcaggaacagagtattattgcacagatctgaagatcaaaaaaaagctcaaggaaatacagatcggaagtgctgatgagttatatttattgaaaacccaacttttaaggaagtgctaagatcagtcacccatgtgaataagaagccaggaaaggaaagatggggaagcccagatcaccaggcttctattaaggaggaaagcaacagaggaaacagtgaaggggaacagaagggggtagcaaagtgttacagaaaagcggactggatagacaaaactgcagaaggtgtatgttggggagaactgaaagggaaaacaaaatacttgacatagtcttaagtagaagaaggcagttagagaaaacaaagtatctactggccttgtcaacatacagacttcaaaataccccttatgagaatccaaagaatgatgtgtgtaagggaagattttatttgcccttccggaagaaatcagtatctatgcaaatcttgaaagacaaaatcaaagcccattaatgattcagaatcagtgcttgacctcctgtattctgaatggtgaactctggaagcagggattgtgtctggctctttttagagctggaagtgtagtggctttcattaaatacttgctgtaaagtctttctaagaccaattattatcttagcatgtttcagtatcttctctatcataggccctaagttcattgggggaaaaaaaataagaagattcaacagaatcagcatttgaagtgtaccattggtagttgtttatgaaattaccagatattcataaatgtgacaaatgaacagcaggattatgaattatcaaaggaaaaagtatttgctgaggtgaaaaaatctgatgtttgaggaagtttttatttttatttatttgttttgttttttttttttttggagggcagacttttttgcccaaggcttttcctgcctcagcctcacgagtagctgggactacaggcatggccccaccacgcccagctaatttttgtatttttagcagagacagggaggaagtttttatttttataaacaaaatctgatgttcagaggccccgtttcttacaataaatgttgagtcttagttaagcaggaatttatgaacacccatttcctgactttttgctttaatttagatttttctccatcctgtttctagcacaaaaatttgcctgctgtgttacaaaaataaatttatgttgtcctgtgccataaagtgatatatttaatatttttattctttggttttgaacattgtaagttcctaaaaacattttattaaacaagtagacattttgttattaaaaaaaaaa

SEQ ID NO: 59282 - DNA, 782 bp, Homo sapiens
  misc_feature (1)...(782): n = a,t,c or g
cgatgtagtccgaccagttatagatcttcacggtctcggcggcctggctgatagaggccaccaacatcaagggcaacagggcaatggctttcatggttcgatttcctggcggttttagggctgtttttatggcaggcgatcaaggatcaaagcgttacagaatcaggacataggtcttgcgcacggtttcctggatatcccagataccggtgctattggctggcaacatcagtgcgtcaccggcttgtatgtgcagggtttccccgtcgtcgggcgtgaaggtgcagcgcccctggatgaaatggcaaaactcctgggacgtgatctgccgacgccagcgccccggngtgcaggcccagatgccggtctcgacgccatcgttgtgctccacgctcaaggtggaggccacggcgatgggcgcgcccaggggcaccgccaccggtgatgaatctggcagtggggtgttcagcgtgtctttgaattgcatgatgctcatgggttttcccctgtgggtggaacgagtcagtgcatgaagccttccatgaaaccggcaacgccggttgccagcttgcggcgccagggcgcagtgttggagttggccaagacctggtcttcatggacaaaactacgaatgatcgcgttgtaacccagccagcggcacggctccggctcccaggccttgagtgctttgaggccgccttcgcgaatcacccagggttgttgggtcagcaaggtgtcgcggccgaggatcaaatcggccagggtgcggccgctctagagga

SEQ ID NO: 59283 - DNA, 1895 bp, Homo sapiens
ttttttttttttgcagaaccttgaaataaaacatgttttacagtaagttcacacacaggcttaatgcaaaccagagtaatgcacagatgattgccaagaccatattgacaaattgtgattagattataacgcatagtagcctgccttacattcagcaagttcaaacaggacacaaaaccagtcaactgaacacagagcagctctcttcagaagcacttccaatgagtgatgcagagatttcaaaaatacaaagcaggcaacttatatacagcaaatcctcacactgcctggacatgtgccacttttttgttgtttttaatatatttttccttcctggttgctaatttagactgaattcttaaggatttatcttgatgacttagaaaaatacacctgtcctttctcactttgtttcaggtagtacagtcatgaaattgagtaagtctcttaaaaaaatgaaagtccacagatcccattgtggaaggtttcaggaacccctccccaggtaatgatcacgggatcttcaacagctcaaggagtgctccaacagctccaaaataaccctcgtgttccgaaaaaagtgctttcaactgccccttggaccaataatccaaagcatatgccaaaagccgcatggcgatcgtattaattctcaagaaatttccaacaaataccacctggttaatgttttcattaagggcacacattcttgctattgagccaatgttgttggtgatggtgatcaaagtcgctctggccaggtcctctttactgacagcctctcgcttctccttgctcatcatgtttccaaagcttgaagccacagcccagcctggcagtccaaacctctcatagtcccctccataaatatctcgtactagtttatccactttggtgctatctccacgagatgccatttcaagagcttcttcaaaagtggtacagccagtaagaagacagcagagaccaaaaaaagttcctcctccaagactagtacctgtgacccgtttgtaattatctttggaatatactgctaagatgctaacccctgagccaatgttcaccagaagcagaggatacggatttttcaaatcaaatggtaacttctgacacttttcagaatcagcagggttttcaaagtaatagcactgtgaccgtccattgaatccgactgagtcaatgtataaaattcctttgatcaagcaatctagttcatccagtttgcaaagctgaagatcacctattgtgagaaaatcctgctcaaatttgtacgctccacctccagtggcacaaaagacagtgtggagactcgagaagtttttatctctgcccatttgaataaaagcaggcatgtcatgagtgggaaagcgtataaagtgcagattgcctttgcgtccacacagagtcaggtccttcagctcgaggtgcacgtcccgaatgcctgtagacccataagccacattggaggtcaggtacttccgaatgcttttaagactttccacttcttcctcttcttcttcagcagtgatgtctttgggttcaaaatataccagcttgaccagagttccaccgatatccagtccaaaccatggaaaaagcggccgctttttcctcaggctttcgacgcgctggcgggagaccgaggtggggccgctgtaagagcccagtcgatcccgcctcgtgccctcagccgaggccccgaccgcgggcaccgacgcgctgctcgcccggcgccgcagtggctcctgccgccgcccttcggggtccccggccgcctgctccccagccgacgagacggaggtggcggaagccctgccgtggcgctccatgggcgcgccgagccggcccgctcccatccgcagcagcagtcgctgccgcccgagcaagccccccag

SEQ ID NO: 59284 - DNA, 998 bp, Homo sapiens
gtgatcttctccggaactcccgggtcgacgatttcgtactgagcgcgcgaggtgaggagttgtgcagggtttggggaaaggaaggctggcttggcgagagggcaggtttgcgggctttcgcccccttttccaaagaccaacaaagagtccttccccaactcccaactcaaccccttttggaactatgtgtggtggttgggaccctgtggcgcatccttgtcgctcgtgtccttctcatgcccggcgacgcgtctttgtggtaacgccctgctgccatctcttttcttctctatgcgaggatttggactggcagtgagaataagagacaacgattcacgtctactttctaggatgacttccatgtgctccatctcgcgcgtccctgagcatgttgaatttccaaatcctaaataagccgcgcggtgtagtttgtattatgttgcgtttctctttctgctttcctcgccctttctccatcatcctttaggctctacagagtgaaggtttaaatccaaggtcatggcaaaacatctgaagttcatcgccaggactgtgatggtacaggaagggaacgtggaaagcgcatacaggaccctaaacagaatcctcactatggatgggctcattgaggacattaagcatcggcggtattatgagaagccatgccgccagcgacagagggaaagctatgaaaggtgccggcggatctacaacatggaaatggctcgcaagatcaacttcttgatgcgaaagaatcgggcagatccgtggcagggctgctgaggcctgtgggtgggacacccagtgcgaaaccctcatccagttttctctccatctcttttctttgtacaatcccatttcctattaccattctctgcaataaactcaaatcacatgtctgcaagaaggcctccaaatatacaaacaatcccattagtcagcagtggaccctgtcttttattaagtgaaagaagaaactgagtctgaaagtactctag

SEQ ID NO: 59285 - DNA, 1780 bp, Homo sapiens
tttcgtgcccccggggctatcgggccgatgagcgacgggcgccgggccagaagcggactcctagaagaggggagcagcaaggatggaatgacagccgcgggccggaggggatgctcgaaagagctgagcggagatcctacagggaataccgaccctatgagacagagaggcaggcagacttcacagctgagaagtttccagatgaaaaaccaggtgataggtttgatcgagacagaccgttgagaggacgtggaggcccgagagggggtatgcgcggcagaggcagaggtggccctgggaacagagtttttgacgcttttgaccagagaggaaagcgagaatttgaaagatatggtgggaatgacaaaatagcagtcagaactgaagacaacatgggtggatgtggagttcgaacctggggatcgggtaaagataccagtgatgtggagccaactgcaccgatggaggaacccacagtggtggaggagtcccagggcaccccggaagaggagtctccagccaaagttcctgagttggaggtagaagaagaaacccaagttcaagagatgactttagatgagtggaaaaatcttcaagaacagaccagaccaaagcctgagtttaacatccggaaaccagaatccactgttccttccaaagccgtggtgattcacaagtcaaaatacagagatgatatggtaaaagatgactatgaggacgattcccatgttttccggaaacccgccaatgacatcacatcccagctggagattaattttggtaacctccctcgtcctgggcgtggagccagaggaggcacccggggaggccggggaaggatcaggagggcagagaactatggacccagagcagaagtggtgatgcaagatgttgcccccaacccagatgacccggaagatttccctgcgctgtcttgaaagagccctgtttcccagcaccgcggagctgcactgcacacctgtggggagacttttccagctgggccaagggagtcagactctaagaacaatagatgttgcttttcccgtgtcatgtaaatttgttgcacttttttgggctgagctgttagaggggcttctccagaggctcgagagcaggccatttcccaagaagatgaagaatggtgactgtgtttttattgaaggaatttcaaatgaagaataatgtttaaaatgtgtatatagagatagtatagactcctccgcggaagcatggagggaaaggaggttgtaaaatagactccatggagactcttaggaagcagtagattcccgggggctgtgcctttagcgttagaggaaacacatagagctggaactgttaatggaaagcagtcacagctgagttttcggagaccaagaaattaaaatacaattgcacttactgtttacttgtaaatgttatcttctctcctggaatattttgagttctggttttcacttaaccaatcatttaaaaatcgctattgtgtagccactggccaccactctgtgacacagaatcagagaaagcgttgatttttaatggtgatttaaactacctcgtggtttctgtgtgtgtgcacacacacatctagtgtttgggtggtttttaggaagaatattaagtatgtgacttcaaaaaccatgttatttaacctgccaatcaaatggaaagggatcatggcaaaagcaaataccgcatccttttcttccgcagaactagagtcagagttcggcagctgcgtacaaaggcctctgccctcggcttgagcaaaagt

SEQ ID NO: 59286 - DNA, 3190 bp, Homo sapiens
aaattcccgggtcgacgatttcgtcgccgccatcctcggcgcgactcgcttctttcggttctacctgggagaatccaccgccatccgccaccatggtgaacttcacggtagaccagatccgcgccatcatggacaagaaggccaacatccgcaacatgtctgtcatcgcccacgtggaccatggcaagtccacgctgacagactccctggtgtgcaaggcgggcatcatcgcctcggcccgggccggggagacacgcttcactgatacccggaaggacgagcaggagcgttgcatcaccatcaagtcaactgccatctccctcttctacgagctctcggagaatgacttgaacttcatcaagcagagcaaggacggtgccggcttcctcatcaacctcattgactcccccgggcatgtcgacttctcctcggaggtgactgctgccctccgagtcaccgatggcgcattggtggtggtggactgcgtgtcaggcgtgtgcgtgcagacggagacagtgctgcggcaggccattgccgagcgcatcaagcctgtgctgatgatgaacaagatggaccgcgccctgctggagctgcagctggagcccgaggagctctaccagactttccagcgcatcgtggagaacgtgaacgtcatcatctccacctacggcgagggcgagagcggccccatgggcaacatcatgatcgatcctgtcctcggtaccgtgggctttgggtctggcctccacgggtgggccttcaccctgaagcagtttgccgagatgtatgtggccaagttcgccgccaagggggagggccagttggggcctgccgagcgggccaagaaagtagaggacatgatgaagaagctgtggggtgacaggtactttgacccagccaacggcaagttcagcaagtcagccaccagccccgaagggaagaagctgccacgcaccttctgccagctgatcctggaccccatcttcaaggtgtttgatgcgatcatgaatttcaagaaagaggagacagcaaaactgatagagaaactggacatcaaactggacagcgaggacaaggacaaagaaggcaaacccctgctgaaggctgtgatgcgccgctggctgcctgccggagacgccttgttgcagatgatcaccatccacctgccctcccctgtgacggcccagaagtaccgctgcgagctcctgtacgaggggcccccggacgacgaggctgccatgggcattaaaagctgtgaccccaaaggccctcttatgatgtatatttccaaaatggtgccaacctccgacaaaggtcggttctacgcctttggacgagtcttctcggggctggtctccactggcctgaaggtcaggatcatggggcccaactatacccctgggaagaaggaggacctctacctgaagccaatccagagaacaatcttgatgatgggccgctacgtggagcccatcgaggatgtgccttgtgggaacattgtgggcctcgtgggcgtggaccagttcctggtgaagacgggcaccatcaccaccttcgagcacgcgcacaacatgcgggtgatgaagttcagcgtcagccctgttgtcagagtggccgtggaggccaagaacccggctgacctgcccaagctggtggaggggctgaagcggctggccaagtccgaccccatggtgcagtgcatcatcgaggagtcgggagagcacatcatcgcgggcgccggcgagctgcacctggagatctgcctgaaggacctggaggaggaccacgcctgcatccccatcaagaaatctgacccggtcgtctcgtaccgcgagacggtcagtgaagagtcgaacgtgctctgcctctccaagtcccccaacaagcacaaccggctgtacatgaaggcgcggcccttccccgacggcctggccgaggacatcgataaaggcgaggtgtccgcccgtcaggagctcaagcagcgggcgcgctacctggccgagaagtacgagtgggacgtggctgaggcccgcaagatctggtgctttgggcccgacggcaccggccccaacatcctcaccgacatcaccaagggtgtgcagtacctcaacgagatcaaggacagtgtggtggccggcttccagtgggccaccaaggagggcgcactgtgtgaggagaacatgcggggtgtgcgcttcgacgtccacgacgtcaccctgcacgccgacgccatccaccgcggagggggccagatcatccccacagcacggcgctgcctctacgccagtgtgctgaccgcccagccacgcctcatggagcccatctaccttgtggagatccagtgtccagagcaggtggtcggtggcatctacggggttttgaacaggaagcggggccacgtgttcgaggagtcccaggtggccggcacccccatgtttgtggtcaaggcctatctgcccgtcaacgagtcctttggcttcaccgctgacctgaggtccaacacgggcggccaggcgttcccccagtgtgtgtttgaccactggcagatcctgcccggagaccccttcgacaacagcagccgccccagccaggtggtggcggagacccgcaagcgcaagggcctgaaagaaggcatccctgccctggacaacttcctggacaaattgtaggcggcccttcctgcagcgcctgccgccccggggactcgcagcacccacagcaccacgtcctcgaattctcagacgacacctggagactgtcccgacacagcgacgctcccctgagaggtttctggggcccgctgcgtgccatcactcaaccataacacttgatgccgtttctttcaatatttatttccagagtccggaggcagcagacacgccctcttagtagggacttaatgggccggtcggggagggggaggcgggatgggacacccaacactttttccatttcttcagagggaaactcagatgtccaaactaattttaacaaactaattttaacaaacgcattaagaggtttatttgggtacatggcccgcagtggcttttgccccagaaaggggaaaggaacacgcgggtagatgatttctagcaggcaggaagtcctgtgcggtgtcaccatgagcacctccagctgtactagtgccattggaataataaatttgataaggtggtgaaaaaaaaaa

SEQ ID NO: 59287 - DNA, 2123 bp, Homo sapiens
attgaacgcctgcgatagatcgcgttaggcacgggccgacccacgcgtccgccactgggcatctctttcaaggtttctgctgggtttctgaactgctgggtttctgcttgctcctctggagatgcagcgtctgttgactccagtgaagcgcattctgcaactgacaagagcggtgcaggaaacctccctcacacctgctcgcctgctcccagtagcccaccaaaggttttctacagcctctgctgtccccctggccaaaacagatacttggccaaaggacgtgggcatcctggccctggaggtctacttcccagcccaatatgtggaccaaactgacctggagaagtataacaatgtggaagcaggaaagtatacagtgggcttgggccagacccgtatgggcttctgctcagtccaagaggacatcaactccctgtgcctgacggtggtgcaacggctgatggagcgcatacagctcccatgggactctgtgggcaggctggaagtaggcactgagaccatcattgacaagtccaaagctgtcaaaacagtgctcatggaactcttccaggattcaggcaatactgatattgagggcatagataccaccaatgcctgctacggtggtactgcctccctcttcaatgctgccaactggatggagtccagttcctgggatggtcgttatgccatggtggtctgtggagacattgccgtctatcccagtggtaatgctcgtcccacaggtggggccggagctgtggctatgctgattgggcccaaggcccctctggccctggagcgagggctgaggggaacccatatggagaatgtgtatgacttctacaaaccaaatttggcctcggagtacccaatagtggatgggaagctttccatccagtgctacttgcgggccttggatcgatgttacacatcataccgtaaaaaaatccagaatcagtggaagcaagctggcagcgatcgacccttcacccttgacgatttacagtacatgatctttcatacacccttttgcaagatggtccagaagtctctggctcgcctgatgttcaatgacttcctgtcagccagcagtgacacacaaaccagcttatataaggggctggaggctttcggggggctaaagctggaagacacctacaccaacaaggacctggataaagcacttctaaaggcctctcaggacatgttcgacaagaaaaccaaggcttccctttacctctccactcacaatgggaacatgtacacctcaaccctgtacgggtgcctggcctcgcttctgtcccaccactctgcccaagaactggctggctccaggattggtgccttctcttatggctctggtttagcagcaagtttcttttcatttcgagtatcccaggatgctgctccaggctctcccctggacaagttggtgtccagcacatcagacctgccaaaacgcctagcctcccgaaagtgtgtgtctcctgaggagttcacagaaataatgaaccaaagagagcaattctaccataaggtgaatttctccccacctggtgacacaaacagccttttcccaggtacttggtacctggagcgagtggacgagcagcatcgccgaaagtatgcccggcgtcccgtctaaaggtgttctgcagatccatggaaagcttcctgggaaacgtatgctagcagagcttctccccgtgaatcatatttttaagatcccactcttagctggtaaatgaatttgaatcgacatagtagccccataagcatcagccctgtagagtgaggagccatctctagcgggcccttcattcctctccatgctgcaatcactgtcctgggcttatggtgctatggactaggggtcctttgtgaaagagcaagatggagcaatggagagaagacctcttcctgaatcactggactccagaaatgtgcatgcagatcagctgttgccttcaagatccagataaactttcctgtcatgtgttagaactttattattattaatattgttaaacttctgtgctgttcctgtgaatctccaaattttgtaccttgttctaagctaatatatagcaattaaaaagagagaaaaaggaaaaaaaaaa

SEQ ID NO: 59288 - DNA, 1464 bp, Homo sapiens; identical to SEQ ID NO: 59272

SEQ ID NO: 59289 - DNA, 801 bp, Homo sapiens
ttttttttagaccaacattctttaatcacaaaggcacttgaggacccctacaaacccaaagtctctgccaagagtggccctgcagacgccccacctgccaccctccatccacccatccatccacacactcagagttcatcgtgacctgcagagggctccacactaggcttgatgaagatgccttccatggccttccacgtattgtgcgtgttggcactgggcatgccgtggacctcatgctgcccacggatggggcttccatactgctcacccgtgactgacaggaacacagaggtgcccacatgctggaagcgcacagcagcctcacgctcccagtgctgtccagagcagcgcactgtccataggtccaggtcgtcgccctcgccgtcttccccaaaggcactcacctcctggttgttggacagcggcgacgggaagtggtgcgtgtgcaggttcttgcccgtaagcacatgcgtgagcctcaccgcctgcccgcagcgcaccggggacccgcgcgggcacccgccctccgagccgccgcggatccgccagtagctattggcgtcgtccgacgcctctacgccggtcaccgattgctggccgctgccggatccgtatttgatgtcgtgcgagtgcagccgcacgcggtggtgcgtattgagcagcttcagcaccgacccgcaggtcacgagctccgcaccggtcttggcggcaccaccgcccggcactaacagcgccagcagcagccccaacagcaccggccaggcagccccgccgcggcccgcgctccacatcgccccg

SEQ ID NO: 59290 - DNA, 1589 bp, Homo sapiens
tttcgtgcctcgtggaggacacagcagcatgggacagtcagggaggtcccggcaccagaagcgcgcccgcgcccaggcgcagctccgcaacctcgaggcctatgccgcgaacccgcactcgttcgtgttcacgcgaggctgcacgggtcgcaacatccggcagctcagcctggacgtgcggcgggtcatggagccgctcactgccagccgtctgcaggttcgtaagaagaactcgctgaaggactgcgtggcagtggctgggcccctcggggtcacacactttctgatcctgagcaaaacagagaccaatgtctactttaagctgatgcgcctcccaggaggccccaccttgaccttccaggtgaagaagtactcgctggtgcgtgatgtggtctcctcactgcgccggcaccgcatgcacgagcagcagtttgcccacccacccctcctggtactcaacagctttggcccccatggtatgcatgtgaagctcatggccaccatgttccagaacctgttcccctccatcaacgtgcacaaggtgaacctgaacaccatcaagcgctgcctcctcatcgactacaaccccgactcccaggagctggacttccgccactatagcatcaaagttgttcctgtgggcgcgagtcgcgggatgaagaagctgctccaggagaagttccccaacatgagccgcctgcaggacatcagcgagctgctggccacgggcgcggggctgtcggagagcgaggcagagcctgacggcgaccacaacatcacagagctgcctcaggctgtcgctggccgtggcaacatgcgggcccagcagagtgcagtgcggctcaccgagatcggcccgcggatgacactgcagctcatcaaggtccaggagggcgtcggggagggcaaagtgatgttccacagttttgtgagcaagacggaggaggagctgcaggccatcctggaagccaaggagaagaagctgcggctgaaggcgcagaggcaggcccagcaggcccagaatgtgcagcgcaagcaggagcagcgggaggcccacagaaagaagagcctggagggcatgaagaaggcacgggtcgggggtagtgatgaagaggcctctgggatcccttcaaggacggcgagcctggagttgggtgaggacgatgatgaacaggaagatgatgacatcgagtatttctgccaggcggtgggcgaggcgcccagtgaggacctgttccccgaggccaagcagaaacggcttgccaagtctccagggcggaagcggaagcggtgggaaatggatcgaggcaggggtcgcctttgtgaccagaagtttcccaagaccaaggacaagtcccagggagcccaggccaggcgggggcccagaggggcttcccgggatggtgggcgaggccggggccggggccgcccagggaagagagtggcctgagcccaagccgcaccggagcagcggctggattgaacgccccagattggggcccgagatgtggccctcggtttcctttcataaaggagttgtgtccccagcccttccactccagtaaagaactgaattggcaaaaaaaaaa

SEQ ID NO: 59291 - DNA, 3738 bp, Homo sapiens
tttcgtggatgaaggaggctgtgcctccgggttgcacgaagagtccgagtcatttctcagaaggttttgataggtgggccttagaggagacgccgccgagcaccgcaagaactggaaaacacacccctctctgtctgcctgggagagccacggaaattggcacttctctgagtgaagctgaggagaaggctgtaaatctgccaaaacagccttgaagtattcttttgtcatgaggaagtgacggctgctggagggaggtgaacaccacaaggagagatggcatctggcctgggccccgcctagcagcagctccacctcctaggccaggccctgtgggatgcgccactagaccaccatggacggatcccacagcgcagccctgaagctgcagcagctgcctcccacaagtagctccagcgccgtaagcgaggcctccttctcctacaaggaaaacctgattggcgccctcttggcgatcttcgggcacctcgtggtcagcattgcacttaacctccagaagtactgccacatccgcctggcaggctccaaggatccccgggcctatttcaagaccaagacatggtggctgggcctgttcctgatgcttctgggcgagctgggtgtgttcgcctcctacgccttcgcgccgctgtcactcatcgtgcccctcagcgcagtttctgtgatagctagtgccatcataggaatcatattcatcaaggaaaagtggaaaccgaaagactttctgaggcgctacgtcttgtcctttgttggctgcggtttggctgtcgtgggtacctacctgctggtgacattcgcacccaacagtcacgagaagatgacaggcgagaatgtcaccaggcacctcgtgagctggcctttccttttgtacatgctggtggagatcattctgttctgcttgctgctctacttctacaaggagaagaacgccaacaacattgtcgtgattcttctcttggtggcgttacttggctccatgacagtggtgacagtcaaggccgtggctgggatgcttgtcttgtccattcaagggaacctgcagcttgactaccccatcttctacgtgatgttcgtgtgcatggtggcaaccgccgtctatcaggctgcgtttttgagtcaagcctcacagatgtacgactcctctttgattgccagtgtgggctacattctgtccacaaccattgctatcacagcaggtgcaatattttacctggacttcatcggggaggacgtgctgcacatctgcatgtttgcactggggtgcctcattgcattcttgggcgtcttcttaatcacgcgtaacaggaagaagcccattccatttgagccctatatttccatggatgccatgccaggtatgcagaacatgcacgataaagggatgactgtccagcctgaacttaaagcttctttttcctatggggctctggaaaacaatgacaacatttctgagatctacgctcctgccaccctgccagtcatgcaagaagagcacggctccagaagtgcctctggggtcccctaccgagtcctagagcacaccaagaaggaatgagactcgcctccctctatttataactgtcccctccaggctgacagtggttcaaccctgaatcctaaaacttgcctttcaagtctcattttgtttctaactgagaactctatggatgatgatctcaaaaagcctttgtctctgggaaaggatgcgttatcttggtcttggaaatttcaaatgatgagggttgggggatggaagcattattccaggtggacgggatagaatccagcctctgcctggattagcccagggggatttggaaagcctttctaccatccttgaggatggtaactgagcttcctctgacagtgaccaaaggatgctgtatccttcagagctaaggcaagacagagagtctgctgttaattctcaaatccagcgaaaggctggacatctctaaatctcgtcttcctccacctcatgtgcatgcctgatctcaccctgacactcctgatgccgcatctgtgatagcactcgtgttgccttcacatggcaggctgggccaaccctgggtgggaaggttctgacattgtgtttttcagaaatgtacatctgccttccagtcatctgtgcccttctagggaagatgtgcttgatatgttcaaattggatctactctgaaaacgaaacttggttttggtcctgtgaggactacttgtttgtccacctcctccaccaaaggaattaggaagttaagagaaggggaagaatatggaggataggagagggtgatgatgctttagcccattaaggaagaaaagttccccttactcttacaaaaggtgattgcaccacttaaaaaaggataggtagaaaatctggccattttatgtgttattttttttcctgcataccagtgccccctggaaagatggggatgctcatttcagagacagcctcttcacctgtcctccgtctctccattacagagccacaagccaagcttgagttactggttaatttccttgaagtcaatagagactctctgggtcctcatccccatgcatatatgtctgggagaagcaagcattctccaaaacagggctgttgctttcttcctggccgcatatgtgactgtcttcccctagactgatggtatacttttgagaggggcggataaaggtttgcaaactttaatgggcataaggatcccctagaagcatatgtaaaatgcagattcctgcaccccaactgcagacactgttaagtgggactggagtggggcccacgggtctgcattcttaactggtaccaccagtgattctgatgcgatgcttcaatcccgagatttcacatctggaaagcctaagaatttacaaagatgttctgctaaaacccccagggccccatgcagtcttgctagaaaatttcctccctagggttcctttggaaggttaaatactccccataggatctgtggcatttctccatccaatgaatactacttagagctacactcaccacttccctagacagcctttaataggcatgataacagtgttaatagaccagtgtgatagatcacttatctttatggattgtgcttaatactgatttagtatcttgactccaaaaactgacatctgttgtctgtgataaccacttctgtattgcgtcttaaccacttctgtattgtgtggtcttaactgcctaaggcggcaatgggcagtgggcccctttcccttaggatgggtatcaattcaacaatatttataaggcatttactgtgtgctaagcatttggaagacccaggctacaaaataagacatagttcctgccctccaggccagcagagggaggcacaaatacccaggaatctctgatgggtgtgaagtgcggtcgtgggccacagaaaatgaccgtcatgggagaccctgctaaaggtcggaccctgagcccaaaggggtattcagaagtggagatgattttggccccactcatagatgggtggcaaatctaagatttgtataaagcatataaaatagggtgatcacccccgaggcagaggggccagcatttgcaaaggcacagagctaagaggagctgggcaaagaaaggaaagccagggaaggttggtgggagatgagtctcaaagctaagtagtggaagctgggcacagtggctcatgcctgcaatcccagcacttttgggaggccaag

SEQ ID NO: 59292 - DNA, 2141 bp, Homo sapiens
cggacgcgtgggataagatctgtgctctcacgtagggtggatgaggggctgccaagttagcaatgaatgtttcccatttcttcttagtttatggactttccataaactcaggatggcagtttggttggttggagaaggatatggtgatggcgggagttacaatacgttacttataggggaagataggcttttgaaaggttaaagcttaaaagtgagaatggaaaagggatgaatgaatgaacatgatgaggtgagagggaagaggtaaagggaaaaggagaacttactacgtctagctggaggattgtaaatgcaccaatcagcatgctgtgtctagctcaagaactcaagctccatgaggagatgtttcattgtcgagagcagtcatgatggcctgcactccacacaatgcaacagagtgaaagagcaggttctgcttctttggtgtagtcctgaagcttcctaagaaacttcacatcaggtgatggataggagcaaccctgtaaaaccagccttagactatttttcaaacaggctggtgaattaccagatctccgtcaagtgcagtaaccagttcaagttggaagtgtgtcttttgaatgcagaaaacaaagtcgtggacaaccaggctgggacccagggccagctgaaggtgctgggtgccaacctctggtggccgtacctgatgcacgaacaccccgcctacctgtactcgtgggaggatggtgattgctcacaccaaagccttggacccctcccagcctgtgacctttgtgaccaactccacctacgcagcagacaagggggctctgtatgtggatgtgatccgtgtgaacagctactactcttggtatcgcaactacgggcacctggagttgattcagctgcagctggccgcccagtttgagaattggtgtaagacatcacaatcccattattcagagcgcgtatggagtggaaacgcttgtagggcttcaccagtctttcccagggaactccgatgaagtgttccaacaaaatgagcgagtgaaccaagaagaggatgacattagatccaggagatacaacagaggagataatctccaggatgcctgtgaagaaagatccctggatcccaggatgattataggacaagttgttcataatccagcaggccagaagacttccagggaaactcattcaaggaggtgaaaatgatggatgactcctccaagatgaaaatggaccagccgcagtggctcacgcctgtaataccagcactttgggaggctgaggcaggcggatcacttgaggtcaggagtttgaaactagcctggccaacgtggcaaaactccatctctattaaaaatacaaaaattagccaggcatagtggtgcatgcctgtagtcccagctacttgggatgctgaggcaggaagaattgcttgaacctgggaggcagagtctgcagtgagctgtgatcaggccattgcattccagcctgggtgacagagtgagaccatcacaaaaacaaacaaacaaacaaataaataaataaataaataaataaataaataaaaaatctggacctcccaccaagggtgggaaacatcagaaagctcagaggaccacacctgcccgttcacctgtcctgggctcctgctgaagccagggctaccagatgggggcaaaagacctcccttacgcaagtcccaaaccaccattacctcccacgagtacagggaggcggggtgttcgtgcatcaggtacggccaccagaggttggcacccagcaccttcagctggccctgggtcccagcctggttgtccacgactttgttttctgcattcaaaagacacacttccaacttgaactggttactgcacttgacggagatatggtaattcaccagcctgtttgaaaaatagtctaaggctggttttacagggttgctcctatccatcacctgatgtgaagtttcttaggaagcttcaggactacaccaaagaagcagaacctgctctttcactctgttgcattgtgtggagtgcaggccatcatgactgctctcttgagctagacacagcatgctgattggtgcatttacaatcctccagctagacgtagtaagttctccaagtacccaccggcccacgcgtccg

SEQ ID NO: 59293 - DNA, 907 bp, Homo sapiens
tgcagagttgggagtgactccagagcctccagcgagatgctgctgattctgctgtcagtggccctgctggccctgagctcagctgagagttcaagtgaagatgtcagccaggaagaatctctcttcctaatatcaggaaagccagaaggacgacgcccacaaggaggaaaccagccccaacgtcccccacctcctccaggaaagccacaaggaccacccccacaaggaggaaaccagtcccaaggtcccccacctcctccaggaaagccagaaggacgacccccacaaggaggcaaccagtcccaaggtcccccacctcatccaggaaagccagaaagaccacccccacaaggaggaaaccagtcccaaggtaccccacctcctccaggaaagccagaaggacgacccccacaaggaggcaaccagtcccaaggtcccccacctcctccaggaaagccagaaagaccacccccacaaggaggtaaccagtcccaccgtcccccacctcctccaggaaagccagaaagaccacccccacaaggaggcaaccagtcccaaggtcccccacctcatccaggaaagccagaaagaccacccccacaaggaggcaaccagtcccaccgtcccccacctcctggaaagccacaaggcccacccccagcaggaggcaatccccagcagcctcaggaccctcctgctggaaagccccaggggccacctccacctcctcaagggggcaggccacccagacctgcccagggacaacagtctcctcagtaatctaggattcaatgacaggaagtgaataagaagatgacagtgtttcaaatgccttgaaacataatgtgatcatgctctaacttcaatataccaataaaataatcagcttgcaatttcaaaaaaaaaa

SEQ ID NO: 59294 - DNA, 5812 bp, Homo sapiens
tttatagcagcagcagaaatataccaccctagaggacacacctccttttagctaggtacctataaatgtccaggattttctattcaattgagaagaacccagcaaaatggggatctccacagtcatccttgaaatgtgtcttttatggggacaagttctatctacaggtgggtggatcccaaggactacagactacgcttcactgattccctcggaggtgcccttggatcaaactgtagcagaaggttctccatttccctcggagtcgaccctggagtcaactgcagcagaaggttctccgatttccttggagtcaaccctggagtcaactgtagcagaaggttctctgattccctcagagtcaaccctggagtcaactgtagcagaaggatctgattctggtttggccctgaggctggtgaatggagatggcaggtgtcagggccgagtggagatcctataccgaggctcctggggcaccgtgtgtgatgacagctgggacaccaatgatgccaacgtggtctgtaggcagctgggttgtggctgggccatgtcagctccaggaaatgcctggtttggccagggctcaggacccattgccctggatgatgtgcgctgctcaggacacgaatcctacctgtggagctgcccccacaatggctggctctcccataactgtggccatggtgaagatgctggtgttatctgctcagctgcccagcctcagtcaacactcaggccagaaagttggcctgtcaggatatcaccacctgtacccacagaaggatctgaatccagtttggccctgaggctggtgaatggaggcgacaggtgtcgaggccgagtggaggtcctataccgaggctcctggggcaccgtgtgtgatgactactgggacaccaatgatgccaatgtggtctgcaggcagctgggctgtggctgggccatgtcagccccaggaaatgcccagtttggccagggctcaggacccattgtcctggatgatgtgcgctgctcaggacacgagtcctacctgtggagctgcccccacaatggctggctcacccacaactgtggccatagtgaagacgctggtgtcatctgctcagctccccagtcccggccgacacccagcccagatacttggccgacctcacatgcatcaacagcaggacctgaatccagtttggccctgaggctggtgaatggaggtgacaggtgtcagggccgagtggaggtcctataccgaggctcctggggcaccgtgtgtgatgatagctgggacaccagtgacgccaatgtggtctgccggcagctgggctgtggctgggccacgtcagccccaggaaatgcccggtttggccagggttcaggacccattgtcctggatgacgtgcgctgctcaggctatgagtcctacctgtggagctgcccccacaatggctggctctcccataactgtcagcacagtgaagacgctggtgtcatctgctcagctgcccactcctggtcgacgcccagtccagacacattgccgaccatcaccttgcctgcatcgacagtaggatctgaatccagtttggccctgaggctggtgaatggaggtgacaggtgtcagggccgagtggaggtcctataccaaggctcctggggcaccgtgtgcgatgacagctgggacaccaatgatgccaatgtcgtctgcaggcaaccgggctgtggctgggccatgtcagccccaggaaatgcccggtttggtcagggctcaggacccattgtcctggatgatgtgcgctgctcaggacacgagtcttacccgtggagctgcccccacaatggctggctctcccacaactgtggccatagtgaagacgctggtgtcatctgctcagcttcccagtcccggccaacacctagtccagacacttggccaacctcacatgcatcaacagcaggatctgaatccagtttggccctgaggctggtgaatggaggtgacaggtgtcagggccgagtggaggtcctataccgaggctcctggggcaccgtgtgtgatgactactgggacaccaatgatgccaatgtggtttgcaggcagctgggctgtggctgggccatgtcagccccaggaaatgcccggtttggccagggttcaggacccattgtcctggatgatgtgcgctgctcaggacatgagtcctatctgtggagctgcccccacaatggctggctctcccacaactgtggccatcatgaagacgctggtgtcatctgctcagcttcccagtcccagccgacacccagcccagacacttggccaacctcacatgcatcaacagcaggatctgaatccagtttggccctgaggctggtgaatggaggtgacaggtgtcagggccgagtggaggtcctataccgaggctcctggggcaccgtgtgtgatgactactgggacaccaatgatgccaatgtggtttgcaggcagctgggctgtggctgggccacgtcagccccaggaaatgcccggtttggccagggttcaggacccattgtcctggatgatgtgcgctgctcaggacatgagtcctatctgtggagctgcccccacaatggctggctctcccacaactgtggccatcatgaagacgctggtgtcatctgctcagcttcccagtcccagccgacacccagcccagacacttggccaacctctcgtgcatcaacagcaggatctgaatccactttggccctgagactggtgaatggaggtgacaggtgtcgaggccgagtggaggtcctataccaaggctcctggggcaccgtgtgtgatgactactgggacaccaatgatgccaacgtggtctgcaggcagctgggctgtggctgggccatgtcagccccaggaaatgcccagtttggccagggctcaggacccattgtcctggatgatgtgcgctgctcaggacacgagtcttacctgtggagctgcccccacaatggctggctctcccacaactgtggccatcatgaagatgctggtgtcatctgctcagctgctcagtcccagtcaacgcccaggccagatacttggctgaccaccaacttaccggcattgacagtaggatctgaatccagtttggctctgaggctggtgaatggaggtgacaggtgtcgaggccgagtggaggtcctgtatcgaggctcctggggaaccgtgtgtgatgacagctgggacaccaatgatgccaatgtggtctgcaggcagctgggctgtggctgggccatgtcggccccaggaaatgcccggtttggccagggctcaggacccattgtcctggatgatgtgcgctgctcagggaatgagtcctacctgtggagctgcccccacaaaggctggctcacccacaactgtggccatcacgaagacgctggtgtcatctgctcagccacccaaataaattctactacgacagattggtggcatccaacaactacaaccactgcaagaccctcttcaaattgtggtggcttcttattctatgccagtgggacattctccagcccatcctaccctgcatactaccccaacaatgctaagtgtgtttgggaaatagaagtgaattctggttatcgcataaacctgggcttcagtaatctgaaattggaggcacaccataactgcagttttgattatgttgaaatctttgatggatcattgaatagcagtctcctgctggggaaaatctgtaatgataccaggcaaatatttacatcttcttacaaccgaatgaccattcactttcgaagtgacatcagtttccaaaacactggctttttggcttggtataactccttcccaagcgatgccaccttgaggttggtcaatttaaattcatcctatggtctatgtgccgggcgtgtagaaatttaccatggtggcacctgggggacagtttgtgatgactcctggaccattcaggaagctgaggtggtctgcagacagctagggtgtggacgtgcagtttcagcccttggaaatgcatattttggctctggctctggccccatcaccctggacgatgtagagtgctcagggacggaatccactctctggcagtgccggaaccgaggctggttctcccacaactgtaatcatcgtgaagatgctggtgtcatctgctcaggaaaccatctatcgacacctgctccttttctcaacatcacccgtccaaacacagattattcctgcggaggcttcctatcccaaccatcaggggacttgtccagcccattctatcccgggaactatccaaacaatgccaagtgtgtgtgggacattgaggtgcaaaacaactaccgtgtgactgtgatcttcagagatgtccagcttgaaggtggctgcaactatgattatattgaagttttcgatggcccctaccgcagttcccctctcattgctcgagtttgtgatggggccagaggctccttcacttcttcctccaacttcatgtccattcgcttcatcagtgaccacagcatcacaaggagagggttccgggctgagtactactccagtccctccaatgacagcaccaacctgctctgtctgccaaatcacatgcaagccagtgtgagcaggagctatctccaatccttgggcttttctgccagtgaccttgccatttccacctggaatggatactacgagtgtcggccccagataacgccgaacctggtgatattcacaattccctactcaggctgcggcaccttcaagcaggcagacaatgacaccatcgactattccaacttcctcacagcagctgtctcaggtggcatcatcaagaggaggacagacctccgtattcacgtcagctgcagaatgcttcagaacacctgggtcgacaccatgtacattgctaatgacaccatccacgttgctaataacaccatccaggtcgaggaagtccagtatggcaattttgacgtgaacatttccttttatacttcctcatctttcttgtatcctgtgaccagccgcccttactacgtggacctgaaccaggacttgtacgttcaggctgaaatcctccattctgatgctgtactgaccttgtttgtggacacctgcgtggcatcaccatactccaatgacttcacgtctttgacttatgatctaatccggagtggatgcgtgagggatgacacctacggaccctactcctcgccgtctcttcgcattgcccgcttccggttcagggccttccacttcctgaaccgcttcccctccgtgtacctgcgttgtaaaatggtggtgtgcagagcgtatgacccctcttcccgctgctaccgaggctgtgtgttgaggtcgaagagggatgtgggctcctaccaggaaaaggtggacgtcgtcctgggtcccatccagctgcagacccccccacgccgagaagaggagcctcggtaggtggtcgctctcagaccccactgtccaccggggcgcagacccctgactcggggacttgggatgttcctcttggtgtcatattccaactcagattgagccctacattgtgctgcacctggtcatacggagttgaatcagacctggttcccgcctcccccaaggctcatggtccttggaggacccgttgcagggtgaggtcaagagagttctgacctggatggcccatagacctgacgtcccagaatccatgcttctcatctgcaaaatgaaaatgtcaatacttacttcttagcactgttgagagggttacttacataaaggaattttggtgaaactgcaaaaaaaaaa

SEQ ID NO: 59295 - DNA, 2393 bp, Homo sapiens
gaccagaccggcccccccgagactatagccttcactttccctcggtccaccatggagcccttgtgtccactcctgctggtgggttttagcttgccgctcgccagggctctcaggggcaacgagaccactgccgacagcaacgagacaaccacgacctcaggccctccggacccgggcgcctcccagccgctgctggcctggctgctactgccgctgctgctcctcctcctcgtgctccttctcgccgcctacttcttcaggttcaggaagcagaggaaagctgtggtcagcaccagcgacaagaagatgcccaacggaatcttggaggagcaagagcagcaaagggtgatgctgctcagcaggtcaccctcagggcccaagaagtattttcccatccccgtggagcacctggaggaggagatccgtatcagatccgccgacgactgcaagcagtttcgggaggagttcaactcattgccatctggacacatacaaggaacttttgaactggcaaataaagaagaaaacagagaaaaaaacagatatcccaacatccttcccaatgaccattctagggtgattctgagccaactggatggaattccctgttcagactacatcaatgcttcctacatagatggttacaaagagaagaataaattcatagcagctcaaggtcccaaacaggaaacggttaacgacttctggagaatggtctgggagcaaaagtctgcgaccatcgtcatgttaacaaacttgaaagaaaggaaagaggaaaagtgccatcagtactggcccgaccaaggctgctggacctatggaaacatccgggtgtgcgtggaggactgcgtggttttggtcgactacaccatccggaagttctgcatacagccacagctccccgacggctgcaaagcccccaggctggtctcacagctgcacttcaccagctggcccgacttcggagtgccttttacccccattgggatgctgaagttcctcaagaaagtaaagacgctcaaccccgtgcacgctgggcccatcgtggtccactgtagcgcgggcgtgggccggacgggcaccttcattgtgatcgatgccatgatggccatgatgcacgcggagcagaaggtggatgtgtttgaatttgtgtctcgaatccgtaatcagcgccctcagatggttcaaacggatatgcagtacacgttcatctaccaagccttactcgagtactacctctacggggacacagagctggacgtgtcctccctggagaagcacctgcagaccatgcacggcaccaccacccacttcgacaagatcgggctggaggaggagttcaggaaattgacaaatgtccggatcatgaaggagaacatgaggacgggcaacttgccggcaaacatgaagaaggccagggtcatccagatcatcccgtatgacttcaaccgagtgatcctttccatgaaaaggggtcaagaatacacagactacatcaacgcatccttcatagacggctaccgacagaaggactatttcatcgccacccaggggccactggcacacacggttgaggacttctggaggatgatctgggaatggaaatcccacactatcgtgatgctgacggaggtgcaggagagagagcaggataaatgctaccagtattggccaaccgagggctcagttactcatggagaaataacgattgagataaagaatgataccctttcagaagccatcagtatacgagactttctggtcactctcaatcagccccaggcccgccaggaggagcaggtccgagtagtgcgccagtttcacttccacggctggcctgagatcgggattcccgccgagggcaaaggcatgattgacctcatcgcagccgtgcagaagcagcagcagcagacaggcaaccaccccatcaccgtgcactgcagtgccggagctgggcgaacaggtacattcatagccctcagcaacattttggagcgagtaaaagccgagggacttttagatgtatttcaagctgtgaagagtttacgacttcagagaccacatatggtgcaaaccctggaacagtatgaattctgctacaaagtggtacaagattttattgatatattttctgattatgctaatttcaaatgaagattcctgccttaaaatattttttaatttaatggaacaaaggagaagccactttccccaggacgcaagactctcccctccactgtccgggacagcgttcgccctttagcggggaggtcattacagcctcatggcctctaccaaggccccagatcacaggatctcctgggccttggagcacctcacgctgggggaatcaatccctgagggactcagaatcttctccgtgcaacctggaa

SEQ ID NO: 59296 - DNA, 1206 bp, Homo sapiens
ttttttttttttagtatttataatcatttacttgtagcgaactgtttaaagttaacacttgtttaaatttttttacactatagcatttatgcaatggtttacagaattcatggagttatttttatcagtatgggaattaattaaaaccttgaatctttgttttgtctgcttctctgagcacaagcctggtcagctggtccctgcgggtcctaccagccagcttctctgtagggctctcggccgcgtccacctctgctctcccaccacaaggtcacaaactcccacgcagtcctgggtcaccccgcagctgctctggagacttggctctgggcgtctcgtggcccaagtgctccaagttggaagtttctgtgggcctcgtgtaggggatgccgtgctgggtgagcaaacctttcagccttttgatctcctttgagagttctttatgagccttcctgcagttttccagggtctcaaaccccaagctgtcaggacctccctccagctgggtgggttcattttcttctggggtctttaagtagccagcatcctcaaaaagtgtcctcagcaacttctcatggccctggggggtgatcagctcatcggccaggtcctgctctacctggtcccactgccgctgcagggcctctggcagggttgggtacactagcaaggcgtgggggtggcagacgaggggggtctcgaacgtcagcgcgtagacgcaggtgctcggctcggacacatgggccagccggttgctttttccacacgccagctccaccttgctctgccggctccgggaacggcaggcgtcaccgtccctcatccacatgcccgtgaaggtgttgttggcgatctcccactcgtgccagatgccgaggatcccactgtaggcgttccagcggaaggtctgctcgtgctgggtcacgttgtggaacgggcagaactcatacttgtacgtggactccaccaggctgaagcacttgcccgagagtcggaagagatgcacgggtccagacacgggtgaaggatccctcttggcctggaggcgactggcctgaggcaagaacgggttgttcaccccaaacgcgttgggctcctccaccaccttcatcttcgctgcacctgccggcgcgggcccgccggccgagagcccgaggagcaacaggagccgcgccagccccgccgccatcgcgccgcagcggccgc

SEQ ID NO: 59297 - DNA, 2870 bp, Homo sapiens
tttcgtgtcagtggcgctagcggcggacccggctgggcagttccttccccagaaggagagattcctctgccatggagtcctacgatgtgatcgccaaccagcctgtcgtgatcgacaacggatccggtgtgattaaagctggttttgctggtgatcagatccccaaatactgctttccaaactatgtgggccgacccaagcacgttcgtgtcatggcaggagcccttgaaggcgacatcttcattggccccaaagctgaggagcaccgagggctgctttcaatccgctatcccatggagcatggcatcgtcaaggattggaacgacatggaacgcatttggcaatatgtctattctaaggaccagctgcagactttctcagaggagcatcctgtgctcctgactgaggcgcctttaaacccacgaaaaaaccgggaacgagctgccgaagttttcttcgagaccttcaatgtgcccgctcttttcatctccatgcaagctgtactcagcctttacgctacaggcaggaccacaggggtggtgctggattctggggatggagtcacccatgctgtgcccatctatgagggctttgccatgccccactccatcatgcgcatcgacatcgcgggccgggacgtctctcgcttcctgcgcctctacctgcgtaaggagggctacgacttccactcatcctctgagtttgagattgtcaaggccataaaagaaagagcctgttacctatccataaacccccaaaaggatgagacgctagagacagagaaagctcagtactacctgcctgatggcagcaccattgagattggtccttcccgattccgggcccctgagttgctcttcaggccagatttgattggagaggagagtgaaggcatccacgaggtcctggtgttcgccattcagaagtcagacatggacctgcggcgcacgcttttctctaacattgtcctctcaggaggctctaccctgttcaaaggttttggtgacaggctcctgagtgaagtgaagaaactagctccaaaagatgtgaagatcaggatatctgcacctcaggagagactgtattccacgtggattgggggctccatccttgcctccctggacacctttaagaagatgtgggtctccaaaaaggaatatgaggaagacggtgcccgatccatccacagaaaaaccttctaatgtcgggacatcatcttcacctctctctgaagttaactccactttaaaactcgctttcttgagtcggagtgtttgcgaggaactgcctgtgtgtgagtgcgtgtgtggatatgagtgtgtgcgcacatgcgagtgccgtgtggccctgggaccctgggcccagaaaggacgatgaactacccgcagtggtgatgatgcctgaggcctgggggttgaccactaactggctcctgacagggaagagcgctggcagaggctgtgctccctcctcaggtgcgctctggctggctgtgggggactggctgtgggggactccgtttactaccacagggagacagagggaggtaagccatcccccgggacaccttgctgctgaccatcctaggctgggctggccccaccctcacccccacccccagggtgccctgaggccccaggcagctgctgcctccactatcgatgcctcctgactgcacactgaggactgggactggggttgagttctgtctggttttgttgccattttggtttgggaggctggaaaagcaccccaagaagctattacagagactggagtcaggagagagcaggaggccctcatgttcaccagggaacaggaccacaccggccactgaaggagggcaggagcagtcctccctctgaatggctgcagagttaatgttcccagcccagtcccctttcgggggccttgggagagtttaaggcacctgctggttccaggacctcgctttccatctgttcttgttgcaatgccatcttcaaaccgttttatttattgaagtgtttgttcagttaggggctggagagagggagcttgctgcctcctgccttgctacactaatgtttacagcacctaagcttagcctccagggccccacctctcccagctgatggtgagctgacagtgtccacaggttccaggaccatttgagattggaagctacactcaaagacactcccaccaggctctttctcccttttcctcttctcactgccctggaatcaacaggctggttgctggttagattttctgaaacaggaggtaaaatttttctttggcagaggcccctaagcaagggaggggtgttggagagccagtgcccttaagactggagaaagctgcaatttaccaagttgccttttgccactgtagctgaccaggggactaggttgtagaggtgggaaggcccctctgggctgatcttgtgccattcttgaccttggacctgcttggttaaggagggagtgggccagaccagagtgccaggagctaatggagccaggcctgacacctaggagtggtccaaagccttcagcctagatggtgcaaagctggggccagcctgtcttcaccggcaccctcacctgtgacaccaagacccaccccaatccagacttcacacagtattctcccccacgccgtctatgaccaaaggcccctgccaggtgtgggtccacagcagcaggtatgtgtgaaagcaacgtagcgccccgcggactgcagtgcgcttaaccaactcacctcccttctcttagcccaagcctgtccctcgcacagcctcgcacaaaccacattgcctggtggggcccagtgtactgaaataaagtcgttccgatagacacgtcaaaaaaaaaaaacccgaattc

SEQ ID NO: 59298 - DNA, 2143 bp, Homo sapiens
tacggctgcgagaagacgacagaagggggctttgaccgggtcgtggcagccggagtcgtcttcgggacgcgcctgctcttcgcctttcgctgcagtccgtcgatttctttctccaggaagaaaaatggcatccgttgcagttgatccacaaccgagtgtggtgactcgggtggtcaacctgcccttggtgagctccacgtatgacctcatgtcctcagcctatctcagtacaaaggaccagtatccctacctgaagtctgtgtgtgagatggcagagaacggtgtgaagaccatcacctccgtggccatgaccagtgctctgcccatcatccagaagctagagccgcaaattgcagttgccaatacctatgcctgtaaggggctagacaggattgaggagagactgcctattctgaatcagccatcaactcagattgttgccaatgccaaaggcgctgtgactggggcaaaagatgctgtgacgactactgtgactggggccaaggattctgtggccagcacgatcacaggggtgatggacaagaccaaaggggcagtgactggcagtgtggagaagaccaagtctgtggtcagtggcagcattaacacagtcttggggagtcggatgatgcagctcgtgagcagtggcgtagaaaatgcactcaccaaatcagagctgttggtagaacagtacctccctctcactgaggaagaactagaaaaagaagcaaaaaaagttgaaggatttgatctggttcagaagccaagttattatgttagactgggatccctgtctaccaagcttcactcccgtgcctaccagcaggctctcagcagggttaaagaagctaagcaaaaaagccaacagaccatttctcagctccattctactgttcacctgattgaatttgccaggaagaatgtgtatagtgccaatcagaaaattcaggatgctcaggataagctctacctctcatgggtagagtggaaaaggagcattggatatgatgatactgatgagtcccactgtgctgagcacattgagtcacgtactcttgcaattgcccgcaacctgactcagcagctccagaccacgtgccacaccctcctgtccaacatccaaggtgtaccacagaacatccaagatcaagccaagcacatgggggtgatggcaggcgacatctactcagtgttccgcaatgctgcctcctttaaagaagtgtctgacagcctcctcacttctagcaaggggcagctgcagaaaatgaaggaatctttagatgacgtgatggattatcttgttaacaacacgcccctcaactggctggtaggtcccttttatcctcagctgactgagtctcagaatgctcaggaccaaggtgcagagatggacaagagcagccaggagacccagcgatctgagcataaaactcattaaacctgcccctatcactagtgcatgctgtggccagacagatgacaccttttgttatgttgaaattaacttgctaggcaaccctaaattgggaagcaagtagctagtataaaggccctcaattgtagttgtttccagctgaattaagagctttaaagtttctggcattagcagatgatttctgttcacctggtaagaaaagaatgataggcttgtcagagcctatagccagaactcagaaaaaattcaaatgcacttatgttctcattctatggccattgtgttgcctctgttactgtttgtattgaataaaaacatcttcatgtgggctggggtagaaactggtgtctgctctggtgtgatctgaaaaggcgtcttcactgctttatctcatgatgcttgcttgtaaaacttgattttagtttttcatttctcaaataggaatactacctttgaattcaataaaattcactgcaggatagaccagttaaaaaaaaaaaaaaggggcgccctttttaaaggacccttggggggccccaagcttccccggccttgcaacgtattaattttctccttatggggggcctaattaaaccctccctgggcaccttgggaaagaacccttccttctggggggtgccatattggaccaacccccctacagacattaaaggctttagggtaaaattaacctttttacgggttttg

SEQ ID NO: 59299 - DNA, 915 bp, Homo sapiens
tttttacagagctcattttatttaagtcctattttagaacaaaggaaacagtcttaggcaaggcaaactcacagttggctactcaatgtcttttatttctgcctgttttttggccccagaaaatgcaatattttgacacagaaaaaaacattaggatgagtgtgaaatcaaatacgattctggtttttgagctgacatttattcatttggagccacatggctgtcccagggcctggtccccaggtcatgtgcttaaagcttccaggcggttctcatcatgatgatgaagtacacatcagtgtcaatggatgcgctcacacctgcatagtagttcatgaactcctcaggggtcaccaatccatctttgtcatagggtgaatcaaagttatccagaaatttcctaaatacttgttcctcactccattccccattctggtactttgggtggtgttttgcattatatacttcacgaaggtcttcgattgttataacaccatctccagtcttgtctaactttctaaaagcttgcatgattacctcttttctggctctggacattggaggtcttaatgtgagaagaaattcattgaagtctattgttccatttccatctttatcaaacctctggaaaagttcttccacctcttctttttccatgaccacagcataatcatttaaccctttcataaattctttaaaatcaagggttcgattattatcgtcatccataattctaaacactctgccaagtcctttgatcccagcagagcccctggccaggcactgcagtcggagtctttcaatggggtcggtggccgtggtgagctttttcttggcctggatcgccatctctcggtcatggcgcgctgtccctgccatcttaaatgctaaccttttgccaccagttgcttcgaa

SEQ ID NO: 59300 - DNA, 1343 bp, Homo sapiens
ctgcgcttggccgaggggctgcctcaacatggctgcgcccttgtcagtggaggtggagttcggaggtggtgcggagctcctgtttgacggtattaagaaacatcgagtcactttgcctggacaggaggaaccctgggacatccggaacctgctcatctggatcaagaagaatttgctaaaagagcggccagagttgttcatccagggagacagcgtgcggccaggaattctggtgctgattaacgatgccgactgggagctactgggtgagctggactaccagcttcaggaccaggacagcgtcctcttcatctccactctgcacggcggctgagggcccttctctgggcctgggcacccttagaggggagaacgaagcaatcagacatccccttgggccctgcttccaggtctccctgtcccccttgcctgccttcttccctgctctgtcccctaagctccctccaggcagggaaaagaggccaggtgctaaaaatgagcctttctcaagcacgtgagcagcggaaggcagacaggcgccagagcccagcactcccttttccagcagctgtggtgggggagggttcccctccagtttgtcaagagttgaaggaggctctgtggccaggtgacctggctgccttccactccttgtacctcagtctaaacatggagtggccgctgacaaggcgctccagccccagagccagcgtcttcatggggaagatgaatggacctgagtagctgaaggaaggcccctccctacccaaagactggaggcttctcagcctcaatttccctgtctgtacagctgagggctctgcctgtcccccactgctatcagtatggaaccccagctggggtcccctattgagtgccgactccccccaccgccagcagctgctcctccagccacacccctcctgctccccccacccctagcccttgaccctggctggcctgccccgctccacaggccaccagatgggctcctgagaccctccccaggctgcttacagctcattctgctgggggtagagatgaggggagggagtaagttaaaccttggactagcaagtagaagcctggggggatgcgtgtgcctcagtttcctcctccacaactgaatatagtggctgaaaactggggagatacttgatggcgcgaatgtccgttttctctcccttcccacctcctgcaggaagcaggacggggcaggcagcacctggtaggcacagtgctttgcccctcctccccttcccttctggaagtcttggggcctcagtgcttgcaacagccggccttgggcaaataaaagactaggttgtttactaaaaaaaaaa

SEQ ID NO: 59301 - DNA, 2520 bp, Homo sapiens
gggcggcgcgctgcagtgcggggacccgctcgctcgctcgccagccgtccccgcgccccgcgtccccgcgcagccgcctcctggcctcgggcgccgcgcatccaggaaggaagcagccaccctcgccatggcctccccgcccgcctgcccctcggaggaggacgagagcctgaagggctgtgagctgtacgtgcagctgcacgggatccagcaggtcctcaaagactgtatcgtccacctctgcatctccaagcccgaacgccccatgaagttcctccgggagcacttcgagaagctggagaaggaagaaaacaggcagattttggcgcggcaaaagtcaaactcacagtcggactcccatgatgaggaggtgtcgcccacccccccgaaccctgtggtgaaggcccgccgccggcgaggaggcgtgagtgccgaggtgtacaccgaggaggacgccgtgtcctacgtcaggaaggtgattcccaaggactacaaaaccatgactgcgctggccaaggccatctccaagaacgtgctcttcgctcacctggatgacaacgagaggagtgacatattcgatgccatgttccctgtcactcacatcgctggggagactgttatacagcaagggaatgaaggagacaacttctatgtcgttgatcaaggggaagtggatgtgtacgtgaacggagagtgggtgaccaacatcagcgagggaggcagcttcggggagctggcgctcatctacggcacccccagggctgcgaccgtgaaagccaagacggacctcaagctctgggggatcgaccgggacagctaccggcgcatccttatgggcagcacgctgaggaaacgcaagatgtacgaggagttcctcagcaaggtctccatcctagagtccctggagaagtgggagcgtctgaccgtggcggatgcgctggagcccgtccagtttgaagatggagagaaaattgtggtccagggagagcctggggacgacttttacatcatcacggagggcaccgcgtccgtgctgcagcgccggtcccccaatgaggagtacgtggaggtggggcgcctgggaccctctgactacttcggggagattgcactgctgctgaaccggccccgggcggccactgtcgtggcccgggggcccctcaagtgtgtgaagctggaccggccccgcttcgagcgtgtgctggggccctgctctgagatcctcaagaggaacattcagcgttacaacagcttcatctccctcaccgtctgagcacagctcccgccctgcagccccagctccccagtgtggtggccgtgccctgctcgtctgtgtcgggggcccgggagccgctgtgtgaggtgtgggccgggtggggctgggtcccggcagcgtgaggactgccccttccccggactcactttttggaataaatgatcaccttgtgcatttccaaatcaaaggacaagcggacaaaatgcatcccaagatcaaggaagggacaggccagcttcctccccacacgcctccccggctgcctctgtgggcttctcctggggggcccaccccacccctgccagtctcctggagatgcttgaggatcggtcctccccagaaccaggccaggacgttgcccctggggcctggtgaccctgtgaggtcaggtcccccagattgaggtctgagtgtgggcaagtgtgtcaaaaggggctgccccccaggggagatgaggctgagagcagggagttgaggccgaagaagtcaaggcccctcccgcaaatgtgtacccctgcccgcgccactgcaccccgccgcacccccacctcccccgggggccctgctgcggatgccggagtgggagagtctctgagctgtgagattgatcttgcccctaattggagaggaagccgggcgccaagacacacggggctcctgccttgggagccagggccgcggccgcaggtagaccccagtagggggggccgggctcgaagttcctttgggaggggctggcgggactccagcaggccgtcctcacctttcttagaaagtccacccagggcaagttgatgttgggggaaagcagaagtcaagccagccgcgggccccacacgccctgacccgctcaaccgacttgtcccttaaatgtgtcttggatcccgcagtgatgacgtgagccagccaggcccgaaagggtgaggccagtgcagagaagcttcccaggggattcctgggttcccccgaaagacaagcgaggtcattgcagttcacccgatgttgctcctgtcccgtgcgtcccggggaggctgtccttggtccgaggctgctcgttgcagcccctcccctgctggcggttacgatgcgtggggtccccctccccacccagccccggccacgtcgccgtgtcccgcctgtgcctgtgacgtccctgtggacctgtgagccatccccccccttatctctgctctgaatactgcatgaagcattaaacgtgcaatgaagcggacgcgtgggtcgac

SEQ ID NO: 59302 - DNA, 1549 bp, Homo sapiens
gaattccgccgctgctacacgcctggtgggcagcatgtcggcaacagcggctgctcgtaagcggggaaagccggcctctggggccggggctggcgcgggggccggcaagcggcggcgaaaggccgactctgcgggggacaggggcaaatccaagggtggcggcaagatgaatgaggagatctccagcgactctgagagcgagagcctagctccaaggaagcctgaggaggaggaggaggaggagctggaggaaactgcacaggaaaagaagctgcgcttggccaagctctacctagagcagctccgtcagcaagaggaggagaaggctgaggcccgtgcatttgaggaggaccaggtggcggggcgcctgaaggaggatgtgcttgagcagaggggcaggctgcagaagttggtggcaaaagagatccaggccccagcctcagctgacattcgcgttttacgggggcaccagctctctatcacatgtttggtcgtcacccccgatgactcagccatcttctctgctgccaaagactgcagcatcattaagtggagcgtggagagtggacggaagctgcatgtgattcctcgagccaagaagggtgccgagggaaagccccctggccacagcagccacgtcctctgcatggccatctcctccgacggcaagtaccttgcctctggtgaccgcagcaagctcattctcatttgggaggcccagagctgccagcacttgtacaccttcacaggacaccgggatgcagtgtcgggtctggcattccgcagaggcacccaccagctctacagcacatcccacgatcgctccgtgaaggtgtggaatgtggcagagaactcctacgtggagacgctcttcggacaccaggacgctgtggctgcactggatgccttgagccgggagtgctgtgtgacggctgggggccgggatgggactgtacgtgtgtggaagatccccgaggagtcccagcttgtcttctatggccaccagggctccatcgactgcatccacctaatcaatgaggagcacatggtgtccggcgcggacgatggctctgtggccttgtggggtctctccaagaagcgaccacttgccctgcagcgtgaagctcacgggctgcggggagagccaggcctggagcagcccttctggatatcgtcggtggcagccctcctcaacacagaccttgtggccacaggctcccacagctcctgtgtgcggctttggcagtgtggggaaggcttccggcagcttgaccttctctgtgacatccccctggtgggttttatcaacagcctcaagttctccagctctggggacttcctggtggctggggtagggcaggagcacaggcttggccgatggtggagaatcaaagaggctcggaattctgtctgcatcatcccactccgcagggtccctgtacccccagctgctggttcctgacactcttatcctccttatttaagtccttcccaggctatgccccaccctctttgtattaaaagcctcctcttttgggcaaaaaaaaaa

SEQ ID NO: 59303 - DNA, 1918 bp, Homo sapiens
actgagctgaaatcctaaaggccgcggagtcggcggtgttgtaggtagcggtaccttgagtggcaacagaattcgattaaattacaatgggaaacatttttgaaaagctctttaaaagtctacttgggaaaaaaaagatgcggattcttatattgagtttggatacagctggaaaaaccaccatcttgtataaattgaagctgggggagactgtgcctgccgtccctacagtaggtttctgtgtggagacagtagaatataaaaataacaccttcgctgtctgggatgttggcagccacttcaaaatcagacctctgtggcagcattttttccagaacacaaaaggtgccagaagcccaggaagcacacatcaaggctcacttgccagcggggtgctgccaataaaatgtagtcacgtggaatttggaatgtggaaaggaggtagaagtcatcctttcctcccccatagcagcaggtgtgcaggctctggtggtcagctggactccatactcccccaccagtcaccagcctggggaccgtggggctgcaaggacctcagcagcggtttcccaagtttcctgacttcttccatcctctggaaatcagctgtggtaaagtagcctgaaagccagtggtgcaaccccatccccacaaccttcaccacctctagcacctccagtgataagcactaattgcctatatacaacccttttttgtttgaaatatctagagtaatttctgttttcctatctggggtagtgtaacataagaagaaatatatatttggtctctgcccccagttcctaacacaaagctcctaaaacccttggaaattcctgaatgatggcggtgctaagagcattgtcctttgttaatttatcatttttcttttctcctaggtgttttttcctttttaaacttttcttttaggttagggggtacatatgcacgttcgttatatagctaaacttgtgtcatgggggtttgttgtacagattatttcatcacccaggtaccaagcctagtacccaatagttttttctgctcctctccctcctcccaccctccaccctcaggtagggcccagtgtctgttgtttatgagttctcatcattttgctcccacttaaaagaacatacagtatttggttttctgttcctgtcttagtttgctgaggataatggcctctagctccatctgtgttcctgcaaaagacatgatctcgctgttttttatggttgcacatcttttgttctaacatttggtccttaaacctggttcctgacacagagctcctaaatcccttggaattttctgggtgatagaagcgtcctttgttctcatgaggtgactcttggtgggctccttatttggggactggtcaccaaaaagacctatggttggaagcgttgtgctgtcagccccattccccatcctctggcgtggggagtagagctggagctcaatcatgcctacgtgataaagcctccagaaaactccttaaaagacaggacttggagagcttccgggttggcgaacacatccatgttccaggagagtggtgcaccccaactccacaaggacccttccaaacctcaccctgtgtatctcttcaactggcttcatcatttgtgtcctttaaaatatcctttgtaataaatcagcactagtaagaaaactgttttcctgggttccatgagctgttctagcaaatgttcaaacctgaggagggagttgtggggacctccaatttacagccagttggtcagatgcataggtgatgcttggccttgcacctggggtctgacatgcggatggtcctgtgtgactgagcccttaacctgtggagtctggtgctcactctgcttagggcttctcttgcctttttagtgtctatctaggcggccggacgcgtggg

SEQ ID NO: 59304 - DNA, 2538 bp, Homo sapiens
ttttttttttttccaaatacagcttttaatagtacctgtgtgatagctccctctcactgtttttaatcttttataatgtgaagatttagaaccaatccttaaatagtaagaaagttagaacacaatctaatacagaatcaatcatattcaggacaccctgaatgcaaatacttcataatacagttttatagtttaatggacaatgtttaacatggcacctctcaaatctgatatatctgtgtggtgcttacaatttgccttacactttcatttaaagttaccctgttctccactcaccacatgtataaaatatcctattttttctcttaatgttttacaaaccggtaattttcactatcagtagcggatctttttataactcaccctatgttgcccaaaatacaccaataatataatgattagattaaaaaacttggcatcttttttaaaaaaatgtgctttcttttccatgtataagattctactataccatttgtgaatgacaccctagttacataacacctacatatctgcccctgtgagaatttaccttagtcttctaagactctatcttcaacagttagataagtcaataaccagagttccaagaaaagtagttactttttaagaccaaattattgggataactggtcttgtcaatatggcttaacattaatatggctataacatagggactagcccgttttttttttttattaacaatgtgacctgatcacaattctttaaagtctagactagttttccgtatgttttccccattttattttgacatcatatcttttaaaaacaaaaggatgcgaacatttgcccttctcaatgtttttttttttcccatagatgtagtttcacttatttccttcaggctttttatcagcaagaagcaatgtctgattttgataccacccatttgctatgaaaatataagaaggcgtcatcttcaaagcaacactccagttgggcttcttcatcgtttagctgcatgatttcttctacgacatttgtaacagacacaacgtatatagaatttcagtttgggtttttttatccttttttttcttttttaaaataagtatgttttctgcttatttgtgttttcttttctttgaatatattgcacaatattttattattaaaaaaaggttttatgtctcaggcaaaaagtttttctccttcaatcgggaggtgttaatgtgtattattttctaaaagaggtaagtggttgtctgtgtggccatcctcaaaaggaacagaattgacaggtttataggatccaagtctgaaacgacagcaaattatttcaactataaattttccaattccatgtaacatgcctgttgttgaaaagattcctccaacaataccacagagtcttacaaaaaactgccagaatggcatgtgctcctcagtaactgtcaccataagagaactgagatcatatttcataaatatcccagagactccatggctgcctgcagcatggttaatgatacgttccctttctgtcacagaaaactgatgggtgtctgctgatattttatatgtatgtagttttgttggcacaactgtaataaaatattggaacatctggttgtgatctatagcaattttttcagttccatctaaaggattaataattgctggaacaagctctccaaaagacaaatgatctattctatgagaaaaattgtaagattcatggttgacaagtgctgccaaatgtgcatgaccacgaggatgtggaattgccttgcccactgttatgtgaaaattccctgctactttattgacatatagatggccatgaattctgcatgcatttggagactgtgatgaatcatcttctcttggtggaagagctgttgatgtacttttaaaagcacttttaaatatcacatcttgaagtgaatgctcttcttgtagcctactctgaatcagctgcagcatcctctgccactctttctgctgtggtgaaagatcaaatactgttggttcataaactaaaccatctgcagatgcaaccattgtttctgctaaatccaatacatccgctccaacatattgacacttcatggcaacagtaatatctatattaattcttaatttgctagaaaaatccttgtctacttcgtattcatacttcatccatgtatcttgatatactgagaattccattatggttaataaagccatagttgtaaatgctattagagaaactgtacctccactggctgaagtctctacatagctctcaggaaccttcggaaaggcatccaactcttttaccaaacttaaagtttttttccgattcagtcgcctcatcttcaggaaaaccttcctcttccttcatatagtcatgcttgtgttatggtcccagcctaccgccatgtttcacagaagcccgggtcgccggttgagagcttgtctacttccgattatttcaactagccgggtggtgccaccccagcttggtattatgcccatctctttgtggacgaatctgatcttactcctcgtgcc

SEQ ID NO: 59305 - DNA, 2824 bp, Homo sapiens
acccgggagggagatgcggccggggctcaggctccttgcagattcctaaccagcataatgctggagccgggagccaccaacctgcagttttcagaatggccgtgttggacactgatttggatcacattcttccatcttctgttcttcctccattctgggctaagttagtagtgggatcggttgccattgtgtgttttgcacgcagctatgatggagactttgtctttgatgactcagaagctattgttaacaataaggtaacaaggagggagcgcattcttccaccttctgggtgctgctgagtatctttctgggagcagtggccatgctgtgcaaagagcaagggatcactgtgctgggtttaaatgcggtatttgacatcttggtgataggcaaattcaatgttctggaaattgtccagaaggtactacataaggacaagtcattagagaatctcggcatgctcaggaacgggggcctcctcttcagaatgaccctgctcacctctggaggggctgggatgctctacgtgcgctggaggatcatgggcacgggcccgccggccttcaccgaggtggacaacccggcctcctttgctgacagcatgctggtgagggccgtaaactacaattactactattcattgaatgcctggctgctgctgtgtccctggtggctgtgttttgattggtcaatgggctgcatccccctcattaagtccatcagcgactggagggtaattgcacttgcagcactctggttctgcctaattggcctgatatgccaagccctgtgctctgaagacggccacaagagaaggatccttactctgggcctgggatttctcgttatcccatttctccctgcgagtaacctgttcttccgagtgggcttcgtggtcgcggagcgtgtcctctacctccccagcgttgggtactgtgtgctgctgacttttggattcggagccctgagcaaacataccaagaaaaagaaactcattgccgctgtcgtgctgggaatcttattcatcaacacgctgagatgtgtgctgcgcagcggcgagtggcggagtgaggaacagcttttcagaagtgctctgtctgtgtgtcccctcaatgctaaggttcactacaacattggcaaaaacctggctgataaaggcaaccagacagctgccatcagatactaccgggaagctgtaagattaaatcccaagtatgttcatgccatgaataatcttggaaatatcttaaaagaaaggaatgagctacaggaagctgaggagctgctgtctttggctgttcaaatacagccagactttgccgctgcgtggatgaatctaggcatagtgcagaatagcctgaaacggtttgaagcagcagagcaaagttaccggacagcaattaaacacagaaggaaatacccagactgttactacaacctcgggcgtctgtatgcagatctcaatcgccacgtggatgccttgaatgcgtggagaaatgccaccgtgctgaaaccagagcacagcctggcctggaacaacatgattatactcctcgacaatacaggtaatttagcccaagctgaagcagttggaagagaggcactggaattaatacctaatgatcactctctcatgttctcgttggcaaacgtgctggggaaatcccagaaatacaaggaatctgaagctttattcctcaaggcaattaaagcaaatccaaatgctgcaagttaccatggtaatttggctgtgctttatcatcgttggggacatctagacttggccaagaaacactatgaaatctccttgcagcttgaccccacggcatcaggaactaaggagaattacggtctgctgagaagaaagctagaactaatgcaaaagaaagctgtctgatcctgtttccttcatgttttgagtttgagtgtgtgtgtgcatgaggcatatcattaatagtatgtggttacatttaaccatttaaaagtcttagacatgttattttactgatttttttctatgaaaacaaagacatgcaaaaagattatagcaccagcaatatactcttgaatgcgtgatatgatttttcattgaaattgtattttttcagacaactcaaatgtaattctaaaattccaaaaatgtcttttttaattaaacagaaaaagagaaaaaattatcttgagcaacttttagtagaattgagcttacatttgggatctgagccttgtcgtgtatggactagcactattaaacttcaattatgaccaagaaaggatacactggcccctacaatttgtataaatattgaacatgtctatatattagcatttttatttaatgacaaagcaaattaagtttttttatctcttttttttaaaacaacatactgtgaactttgtaaggaaatatttatttgtatttttatgttttgaatagggcaaataatcgaatgaggaatggaagttttaacatagtatatctatatgcttttccccatagggaagaaattgactcttgcagtttttggatgctctgacttgtgcaatttcaatacacaggagattatgtaatgtaatatttttcataagcggttactatcaattgaaagttcaagccatgctttaggcaagagcaggcagcctcacatctttatttttgttacatccaaggtgaagagggcaacacatctgtgtaagctgccttttagtgtgtttatctgaaggccgttttccattttgcttaatgtaactacagacattatccagaaaatgcaaaattttctatcaaatggagccacattcggggaattcgtggtatttc

SEQ ID NO: 59306 - DNA, 2416 bp, Homo sapiens
ggtggacttctaactttttctgcacaggaatttggaagactttgttatggcaggtgccgtactcttactttacaaacaaacattaggggcagcccaggcagcacacctttctggatttaccaaaaatacacattttcctattctactgttgctttaccacatggttcagttgtagcctcagaattactttatggaagaaactgagtgtagacagagagtatgaggtctgatggtcatggaataattgttttgagtccacagcatcatggaaacctcttgggaatagagtataggcttcccagtgatgttagtcttatccatcctcctctatacatgtgagatgtttcaggattcagtggcctttgaggatgtggctgtcagcttcacccaggaggagtgggctttgctggatccttcccagaagaatctctacagggatgtgatgcaggaaaccttcaagaacctgacctctgtaggaaaaacatggaaagttcagaacattgaagatgagtacaaaaatcccaggagaaatctaagtcttatgagagagaaactctgtgaaagtaaagaaagtcatcactgtggagaaagcttcaaccagattgcagatgacatgctgaacaggaaaactcttcctggaataacaccatgtgaaagcagtgtgtgtggagaagttggcacgggtcattcatctcttaatacgcatatcagagctgacactggacacaagtcatctgagtatcaggaatatggagagaatccatatagaaataaggaatgtaagaaagccttcagttatcttgactcctttcaatcacatgataaagcttgcactaaagagaaaccctatgatggtaaagaatgtacagaaaccttcatttcccattcatgcattcaaagacacagggtaatgcacagtggagatggaccttataaatgtaagttttgtgggaaagccttctattttctcaatttatgtcttatccatgaacgaattcacactggtgtgaaaccatataagtgtaaacaatgtggtaaggcctttactcgttccactacccttccagtacatgaaagaactcacacaggagtgaatgccgatgaatgtaaagaatgtgggaatgcattcagttttcctagtgaaattcgtagacataaaaggtctcacactggagaaaaaccctatgagtgtaagcaatgtgggaaagtcttcatttctttcagttccattcagtatcataagatgactcacactggagagaaaccctatgaatgtaagcagtgtgggaaagcctttagatgtggctcacaccttcaaaagcatggaaggactcacactggagagaaaccctatgaatgtaggcaatgtggtaaagccttcagatgtacctcggaccttcaaaggcatgaaaagacacacactgaggataaaccctatggatgtaagcagtgtgggaaaggctttagatgtgcttcacaacttcaaattcatgaaaggacgcacagtggagagaaaccccatgaatgtaaggaatgtggaaaagtattcaagtatttttcttccttgcgtatacatgaaaggacgcacactggagagaagccccatgaatgtaagcaatgtggaaaagcattcaggtatttctcttccttgcatatacatgaaaggacacacactggagataagccatatgagtgtaaggtatgtggcaaagccttcacttgttccagttccattcgatatcatgaaaggactcacactggagagaaaccctatgaatgtaagcactgtggtaaggcctttatttccaattacattcgatatcatgaaaggactcacactggagagaaaccctatcaatgcaagcaatgtggcaaagcctttattcgtgccagttcatgtcgagaacatgaaagaactcataccattaatagatgagaaatccttttagtggaagcaacgggagaagctttctgttgtcccacttcctttgaaacacaagaaaagagagtggtgaaagaacctctggataactgctttttgaattgagaagagagacttgcgataggacaataaaatctagaagaacttggatggtttcgtaatacaattcacctatagccaatcttgcatgagatttcaaaggcacagaaaaggaaggcatcagtcacatattagaggccccacacagggagagaggtgtgtggctacccgcttccagcccattttcctgattctttggcttgttaatcggagaatatcccccaaatcacttgtctctgttcctcagagttgtaggtctccagatatgtccccagtgctccacattaaagataacatgcccactttgctgtttcttcagaaatgttaaaatgtttaccagagaactaataaatgttgttatggctggaaatactc

SEQ ID NO: 59307 - DNA, 5138 bp, Homo sapiens
ctgctgctgcttctgccgctcccggggatgcccgcggctcctgggacccggccggttacctgctctactgcccctgcatggcggctttgggaaccaggccgatcacttcttgggctctctggcatttgcaaagctgctaaaccgtaccttggctgtccctccttggattgagtaccagcatcacaagcctcccttcaccaacctccatgtgtcctaccagaagtacttcaagctggagcccctccaggcttaccatcgggtcatcagcttggaggatttcatggagaagctggcacccacccactggccccctgagaagcgggtggcatactgctttgaggtggcagcccagcgaagcccagataagaagacgtgccccatgaaggaaggaaacccctttggcccattctgggatcagtttcatgtgagtttcaacaagtcggagctttttacaggcatttccttcagtgcttcctacagagaacaatggagccagagattttctccaaaggaacatccggtgcttgccctgccaggagccccagcccagttccccgtcctagaggaacacaggccactacagaagtacatggtatggtcagacgaaatggtgaagacgggagaggcccagattcatgcccaccttgtccggccctatgtgggcattcatctgcgcattggctctgactggaagaacgcctgtgccatgctgaaggacgggactgcaggctcgcacttcatggcctctccgcagtgtgtgggctacagccgcagcacagcggcccccctcacgatgactatgtgcctgcctgacctgaaggagatccagagggctgtgaagctctgggtgaggtcgctggatgcccagtcggtctacgttgctactgattccgagagttatgtgcctgagctccaacagctcttcaaagggaaggtgaaggtggtgagcctgaagcctgaggtggcccaggtcgacctgtacatcctcggccaagccgaccactttattggcaactgtgtctcctccttcactgcctttgtgaagcgggagcgggacctccaggggaggccgtcttctttcttcggcatggacaggccccctaagctgcgggacgagttctgattctggccggagcaccagaccctctgatcctggagggaccagagtctgagctggtccttccagccaggcctggcagccagaggtgctccgggattgcaaactcctcttctcacctgccaaagatggagaagagtgccagggacccctcaaggagggagacgctccatatcccagggcataggacttgcaggttcctaggagcaggagcatctcccatcgcacgtgctttctgctcttctgggaatttctcacactggcaaagcagtccagcctccgtcttctggtccactctgctctgagcagcctgggatgctgaactcttcagagagatttttttatagagagatttctataattttgatacaaggtcatgactatcctagaactctctgtggtttttgaaaatcattgaattctattaatgtaggtacctaaagtgaccttaactgaatgtggatgaggctggggctggtgtgggtcttttggctgcttttcaaggtgtcccccaatgtggccctcaagagccatccccactgcctggccagagccattgttgtcccctacttcctaggccatttctggggcttgggggatgaatgctgtcctgtgctgtaaacactatgcaaatggaagttatcggttgtggtgctgtgcagcgctctgtgggcgactaagtgccactcacgcagcatgttcctggcaaggagcacataccatcaagccacactatcatggtattgttctcacagtcttttggtggttgatggccactgcaaacctggcaccatcagatctcttctgatctcttgccccagtggggcctggttggtagaatgttggcattcggttgatatccaaagcctgttctcccagccgtcctcctgcagctggagccttcaggccgtattctcacgagggaacgtttgccaaggctctgacctcacagaagatgcccagggcccagaagccatcagaattatcagtggagaagcaccttttgactcttcccttccaatgtaatctctgccaacaccatgaggcttaaggtgctctaagtcatgagtgttttggtctcaaatgctgcagttttaataatctgtgactcctgagagcccatggttttttgaccttgtggttctaaaattccttgtctgacccctgtagatcttttccttgccatgtcacctcccttggcctttgatcctggaaaggtggcagagcctccactgagccaggcccagagctccttgcagtgccttcttccttgtttacctgtgggaggaaacactttttttgtcaggggcagcctggttcagagctcagaggtcacactgtatcaaagatctcaaacagcaaagtcagcatttgctgtatagagctgccacccaactctaagcaggagaaactgtacagaaagggctttgctatttttcccttttgggaaaacaatgaagtgttttaagtcctgggtggactgagagatggtttgcctgtccagacttgctctcaagcctcatccagagaaggagctgcagatgagggagcccgtacactccctgccaccactaggttgtaagcctgtagctggctggctgatttcattttggaattcatttgccatccacagccttacactaggcacacactttagagtctggggctccagtggggcccgcctaattttttttccccccaagacagggccttgctctgtctcccaggctggagtgccagtggccatgatcatggccttactgccagcccttgatctcccccaggctcaagcgatcccttcctgccctcagccctctctggtagcctgagacctgcatgccccagctcccaaatcacccttgattcatatccagcagtaataatcacttgtgttcctgaaagaaagggcaccagaagttctagcaaaattcagttgtgttctgtgagctagcactttttcctctgacccaattttcttacctataaaatggtgataaaaaccgacaggttgttcaaaggcccagatcagctaaagcatgtatataagagcacgttgtaaacttgaaagagacaaaggcacaaatgtggctgttgattaatttgactgcttctcgttgctcgtcacctccatgccaggcactgtgcttgctaattgctttatgggggcattctcttatttattccccagccctgggaaataggagctgtcattatccttctctttctgcacaaggaaaaattaatgccctgagaattgtcataattttcccaaggctgcccagctggtggtgttaagccagaatttgacctcccagagccagtttccattagctgccatgctctgctgcctctaattcacagaatgcactttctaccctgtgtgccatggagacctcctatggaaaaatgatcagccaccttaccttctactgggtacctgctgtgagtctgcctatgccagaaggattaaggaggggaggttacccaagaaacaaagcctacatgccgcttacagcccccgttggatggttgctcagtacaacagtcttgcattcagcaggtgtttgttcatcacctactatgtgtcaggctctatgctaggtactggggatacaggagagaatcaagcgtaaagtctttgttctcaaggaatttgcattctagaaagtagaagatgtaataaatgtactgtgggacatgttaataagtgctataaagaaatataaagggtttgggagcaaaaagagggagtggatctattttagatgagcccaggtaagacctctctgaagagctgtcatgaaggagggagggagcacattcctggcagagaaaacagcacgtgcaaaggccccgagactggagtgtgttcctgaagagcagccaggaggccagcatggctggagaggcaggcataggcagggaaccgagcagcaggtcagagcaggcgagctgacattctgcagcctggacggccatggcaggaagcttttagttggagagatacaggaagcctcctagggttctgagcagaagaggggcatgagctgattcacattctgaaggacctctctagctggccagtgctgaggaggttggagagagaaagggtgaaagcagagagaccagtgcagggctgttaacagggttgcaggcgagagactggggtgctgggctcccctagactaggactccagtgccctcctctcccaagagacaaaggccattgcattgaaggaggtgggaaatgattagattctgaacatatgtaattatttttcagtctttttcaaagatacaaatatttacatagttttaatcatgtaatatatacaatttaatgtcctagtgttttacttaatagtgtatcatgttttccctgttggtatgtagcctggataaatgctcttaattataaaaaattctgtcgaggagtgttccatagtttattgttttcctattatgagaatttaggccaagtgtggtggctcatgcctgtaatcccagcactttgcgaggccgaggtgggcagatcacttgaggtgaggagttcaagaccagcctggccaacatggtgaattatctctactaaaaatacaaaaaaataataataatagccaggcgtggtggcacatgcctgtattcccagctgcttgggaggctgaggcaggagaatggcttgaacctgggaggtggaggttgcagtgagccgagatggtgccactgcattccagcctgggcaacagagcgagactccatctcaaaaaaaaggagacttcatgtgcccccaatttttccccaattgttatttgaaaaaatatttttatttgtaagagtttttctttatttaaaatgttcattaataaagttgttggacgggaagcaaaaaaaaaaagttgtttaagataaattcccagaagtgaatttgttagatcaaacacttaaaactttttgttatggaagaattcaaatataaataaaaaattgtgagtaataaaatgaactcacagtttcaacaatg

SEQ ID NO: 59308 - DNA, 1029 bp, Homo sapiens
cggcggcgcgcgatcgaggtcgggtcgccgtccagcctgcagcatgagcgcccccagcgcgacccccatcttcgcgcccggcgagaactgcagccccgcgtggggggcggcgcccgcggcctacgacgcagcggacacgcacctgcgcatcctgggcaagccggtgatggagcgctgggagaccccctatatgcacgcgctggccgccgccgcctcctccaaagggggccgggtcctggaggtgggctttggcatggccatcgcagcgtcaaaggtgcaggaggcgcccattgatgagcattggatcatcgagtgcaatgacggcgtcttccagcggctccgggactgggccccacggcagacacacaaggtcatccccttgaaaggcctgtgggaggatgtggcacccaccctgcctgacggtcactttgatgggatcctgtacgacacgtacccactctcggaggagacctggcacacacaccagttcaacttcatcaagaaccacgcctttcgcctgctgaagccggggggcgtcctcacctactgcaacctcacctcctggggggagctgatgaagtccaagtactcagacatcaccatcatgtttgaggagacgcaggtgcccgcgctgctggaggccggcttccggagggagaacatccgtacggaggtgatggcgctggtcccaccggccgactgccgctactacgccttcccacagatgatcacgcccctggtgaccaaaggctgagcccccaccccggcccggccacacccatgccctcctccgtgccttcctggccgggagtccagggtgtcgcaccagccctgggctgatcccagctgtgtgtcaccagaagctttcccggcttctctgtgaggggtcccaccagcccagggctgatcccagctgtgtgtcaccagcagctttcccagcttctctgtgagggtcactgctgcccactgcagggtccctgaggtgaagtaaacgccggcgctgggcttggccagtcggcaaaaaaaaaa

SEQ ID NO: 59309 - DNA, 3952 bp, Homo sapiens
cggaatcactgactggcacaggtgttgggaaaatgatccacagtctatttctcataaactgttccggtgacatatttctagagaagcactggaagagcgttgtgagccagtctgtctgtgattatttctttgaagctcaagagaaagctgctgatgttgaaaatgtaccacctgtcatttcaacacctcaccactacctcatcagtatctaccgggataagctcttctttgtatctgtcatacagaccgaagtgccacctctctttgtaattgagttcctacatcgagttgctgacacttttcaggactactttggtgagtgttcagaggctgcaattaaggataatgtggtcatagtatatgaactcttagaagaaatgttagacaatggatttccactggctaccgaatctaacattttgaaagaattgattaaaccaccaacaattctacgctctgttgtcaactctattacaggcagtagtaatgttggggacacactccccaccgggcagctgtccaacataccatggcgtcgggcaggggtaaagtacacaaacaatgaagcctattttgatgttgttgaagaaatagacgcaattatagataaatcaggatctacagtctttgcagaaattcagggggtcattgatgcttgcattaaactatctggaatgcctgatctctccctttctttcatgaaccctaggcttctggatgatgtcagctttcacccctgcatccggttcaagcgttgggaatctgaaagagttttgtcatttattcctccagatggaaatttccgactcatatcataccgtgtcagctcacaaaatctagtggcaataccagtgtatgtgaaacatagtatcagctttaaggagaacagttcttgcggcagatttgatataacaattggaccaaagcagaatatggggaaaactattgaaggaattacagtgacagttcacatgccaaaagttgtgctgaacatgaacctgacacccacacaaggcagctatacatttgatccagtcaccaaggtactaacatgggatgtgggaaaaattactccacaaaagctcccaagtcttaaaggactggtaaatttacagtctggagcccccaaaccagaagagaatccgagcctcaacatacagtttaagatccagcagcttgctatttcaggcttaaaagtaaaccgtttggacatgtatggggagaaatataagccatttaaaggagtcaaatacgtcacgaaagctggaaagttccaagtgaggacatgagaagaggccaaaattcctcaggaccagtttgttttccaagtgtcattacgatgtatcactattaggtaccaagtgagtgggaatacatattctagttaaagcatttgtgtctagctacacaccgctaacaaagttacttagttatcaatgtaggattcttaaggagctttaagctaaggaaaccttttagtgacttagcttattttgtatcttttcacttaggaagattttggaggtgatttttttccataggaggataccatctggcggctgcacattgtaacagtaaaggcagaaagctgtagtgataacctctctcctaaaagagttaactggtctcatccagcagaagctatcttaaatctgtgatgtgtcaggtgcagccaaatatcacaccttctgatcttagccatcccaaaccagtatctgtcccgagaggaaattccccccacccccagaagtttacagaaaactgcctcttcaagtgtttgccttattcagcttttcacttgtgccattaagcaagcactgtagcaaaagccacttccacatggccctggcagggagcactgctgctccatgctccattctcactgtacttggtattgtattttttataaataagatttttatgtaaagcttacaatttgatttacagggaccttgctgcagtaaataccatctcaattttgtgccactggttcagctgttagcacagtaaaaaaatcatttgtatcaaaggggcaaatgctttattaaggtagtaaaagggaacattacttctgcttttaggaagttactgcaagcacaagcatttgtgcttttaagcaaattaaagtagtaaaagaaaaacttaagtgaaacctttgccatcttcatgttttataatataaagcttacccaacaccagttaagccatggttaacctaaatgcctcatgccccagttcagcaaaaggaggaaaatgtgcctgcctcacagtcatcagtctttttaaatcttttttgttgttgttcttaagggtttgaatttgtctgcattccttgtctttaggggaaattcccttttcatattgtgtgcttcccaaagctatagtcatagatttcttccagaaactattgtcataattgtcactggagtgcttaaatatacgtactatactgacaaaatacatggaagtgagttataatgaggcagaaacaaaatcctcggtaacattgatgatactctaccgatcaccgtggttttggaaagtcagtcaacagttgtattattgcactcaatttcattgtgacattttatttaacttcttcatcttggtggtccttgcccagttattttgcctcattagacatcaagaaatggagaaagactgaaagttaatatcttaagtgcttgttcttcatgtttccttcttgttatttatgctattctctttgtggctccattcttctttcaatcttctcagcttataaccgtctttcccttatgctaaggatagcccttacactcatcccatctatgctgtcaagggctgctggttggtgctggtacaaggagcccactcagcagttttcttacctttgcctgccctgcctttcatggaataagaaaggcaacgttttgcagcttccaaatttctgaagaaactaatctcagattggcagttaaagtcaaaatgttgccaaatatttattccttttgcctaagtttggctacccggttcaattgctttttatttttaatgtcttgactcttcagagttcgtacctcaaaagaacaatgagaacatttgctttgctttctgctgaatccctaatctcaacaatctatacctggactgtccagttctcctcctgtgctatcttctcttctatccaagtagaatgtatgccaggagctccttccctctagcaatttctactaaaatgtccaagtagaatgtttccttttacaatcaaattactgtatttattaatttgctagaatccagtaaatcattttggtagctctggctgtgctatcaataaaaagatgaaagcaacaagttgattttttttaggtctactattgattgaacattctccaatgggcaaggctcattgtcaaagcagggtgaacatgatcagattttcttctgcatcatcacacaagctgcgagtgttgctgcaaagcacttctcagtactccttccctaacctcagtatgttaatagccattaatacttggcttaagcatcaccattctggccacagtctgagagattagtgatcaaagctcccttccctatcactaccaccacctactgataacaaagatttctgaatacttagtagtagtaaaatatttttcaagcacagagttacagctaatcctggatcacttgttctaaattcataagggagtatatcaagagcaaatgaagtaaatgattctttcctgcgtgtgggagtcaccatcattttattcaaagggagttcctgtgataggttcattccttaagtggtgctacagaaggaccctaggaaaatgctgatcttgtcctgagaggcaactgatttgagaaaatgattatactacagcaggaaggcagcaccagtgaacatatggtaaatggcaaaaacaagacagttttagaaactgctaattcagtagcagccttg

SEQ ID NO: 59310 - DNA, 2768 bp, Homo sapiens
tgcggccgcaatagtacgctcgcgcggcggtggcgggtggtggtccttggaacgcggtgggcggacagcggcacggcctcccctcccctccggacgcaagccgaagtacgtgagaggagacttccggccactgcgttgtagtcggcccggctgcaaagcgtttttctgcaggctgttttcccaggttccctcggcctgtacctcgcgcactcctcttgctccaggtccttcagtctccgctcgtctcaccgtaggctgtgacgacatgagcaacaaagaaggatcaggagggttcaggaaaaggaagcatgacaatttcccacataaccaaagaagagaagggaaggatgttaattcatcttcacccgtgatgttggcctttaaatcatttcagcaggaacttgatgcaaggcatgacaaatatgagagacttgtgaaacttagtcgggatataactgttgaaagtaaaaggacaatttttctcctccataggattacaagtgctcctgatatggaagatatattgactgaatcagaaattaaattggatggtgtcagacaaaagatattccaggtagcccaagagctatcaggggaagatatgcatcagttccatcgagccattactacaggactacaggaatatgtggaagctgtctcttttcaacacttcatcaaaacacgatcattaattagtatggatgaaattaataaacaattgatatttacgactgaagacaatgggaaagaaaataaaactccctcctctgatgcacaggataagcagtttggtacttggagactgagagtcacacctgtcgattaccttctgggagtggctgacttaactggagaattgatgcggatgtgtattaacagtgtggggaatggggacattgataccccctttgaagtgagccagtttttacgtcaggtttatgatgggttttcattcattggcaacactggaccttacgaggtttctaagaagctgtataccttgaaacaaagtttggccaaagtggagaatgcttgttatgccttgaaagtcagagggtcagaaattccaaaacatatgttggcagatgtgttttcagttaaaacagaaatgatagatcaagaagagggcatttcttagaatctaacgttactcagttactaattcttttgagaactcctaagagaccaatttgtaagacttatttagtatttcatttaactttattgtggcttttacatagaaacatattcagttgtacttgttttaaattgtatacaagctgtacataaaattagccaaatgaatcatttcttatatcttattcatgaaagtttgcatacagatgtttgcatatatgcctttttgaatttttgctggttaacctttatcatttatctttgtaatgtgaacatgcttcagagtgtaccttttgccataacctattttaatttactttttctgaagtttggagtgataatttttagtggaagcaatttgtaatttaagttggtagttatattatatatagaaaagattttttagttaaacttctggacatgagcgtcctgtttaaatttcttgttaatatcgtgccaagcctcaaaaataggcttattccatggaacaagaattaaaaatgaataagctatcaatatataatttaagtacaagtttaggctgggcgtggtggctcacgcctgtaatcccagcactttgggaggccgaggtaggcagatcacgaggtcaagagatcaagaccagcctgaccaacgtggcgaaacctcgtctctactagaaatacaaaaattagctggatatggtggtatgtgcctgtaatcccagctacttgggaggctgaggcaggagactcgcttgaacctgggaggcagaggttgcagtgagccgagattgcgccactgcactccagcctgggtaacagagcaagactccatctcaaaaaaaagaaagaaagaaaaaaagaaagtacaagtttataaagtattatagtgaaaaattcgcattctggctgattttaagccatttaaaatttatataaaacaaccttccataaaaatttgacaggtgcccagatgttgctttctccatttattttttgtttttttttaatcacagtaggtctgatagagaattggagctaaattataatatttttgttggtaaagttgagttatatacttgtacatacaatggaaatgcttttagtagtgattatttagcaatttttgtttttgttatattaggcatgtttggaggctttcctattctagcatttaaatttaaattttattaaaattaaataatttaaatctagcatttaaatttaaataatttaagtctagcatttacttttaaataattataatgaagttttgaaatactaagttaatccagacctttagttgtcccatggtgttaataaagttgccaaagaagatgtattatgaacaattcagcaataagacaattgtcaacacagttgagaataacaatggtaatcgttagtaatatttagaattggaatttgcctactgaaatagttatagatgattacttgtgatgtgaaactgaattgagcatgacaaccagacatttccagttggttttgtaagttttgagaatctagatactgggttttattttttgaaagattagctctgtttgtaagggctgattccttgaaaatgtaattttccagaaaaacacctaaagaaaataaaacatggacatgcctagtaaaaaaaaaaaa

SEQ ID NO: 59311 - DNA, 984 bp, Homo sapiens
aggccggttccggcgaagttaaaccctcggagctggcctcggactgctggggcgttaccccttcggccacccccgctgaccatggcagtgtttcatgacgaggtggaaatcgaggacttccaatatgacgaggactcggagacgtatttctatccctgcccatgtggagataacttctccatcaccaaggaagatttggagaatggggaagacgtggcaacgtgtcctagctgctctctcattataaaagtcatttatgacaaagatcagtttgtgtgtggagaaacagtcccagccccttcagccaacaaagaattagttaaatgctgaagaagccttcaggaatccaaatcctgaacatttggaatgagcccagatagaaatatcgaatgcaaagctactggcttcacagagacaaccatttatgatttgctgttctgtaagagtgtggattctttctatcaactgcctgatatcatcttcaggaagcaagtccataacatgacatatctggattttgtgcttagaaccttaaattggaagcattcttaattatgcatctaaatttaaaagaagataatttcaaaacagtgctttctttcccttggtttcatcattttcatatcttaaaccaaattacttcggtatctgacaacagcatcatctacctcagtcattaggatttcttaataaaaaagagattgtatttttgacttggttattaagattattaaaattagcccttcctttgaaatatgacatcagctttgctgttctaaatttaaaattagttgcttcatcagtaccacatttccagtttctataccaagccagtctcctcagttttcccattagaatggacatgttctgttcagcgtgtcatttctgtaatgcttcatgcagagagtttggtcatagtattaaagagaaaatacagtgaggtcacaatgtctccagagctaaaagttagtgaacaagacagat

SEQ ID NO: 59312 - DNA, 1974 bp, Homo sapiens
cccacgcgtccgctctggcgcctggttccgcgcgccggagcgcgctagccgcattgcgagccgaacccgggagctggcgccatggtgctgttgcacgtgctgtttgagcacgcggtcggctacgcgctgctggcgctgaaggaagtggaggagatcagtctgctgcagccgcaggtggaggagtccgtgctcaacctgggcaaattccacagcatcgttcgtctggtggccttttgtccctttgcctcatcccaggttgccttggaaaatgccaacgccgtgtctgaaggggttgttcatgaggacctccgcctgctcttggagacccacctgccgtccaaaaagaagaaagtactcttgggagttggggatcccaagattggtgccgcaatacaggaggagttagggtacaactgccagactggaggagtcatagctgagatcctgcgaggagttcgtctgcacttccacaatctggtgaagggtctgaccgatctgtcagcttgtaaagcacagctggggctgggacacagctattcccgtgccaaagttaagtttaatgtgaaccgggtggacaatatgatcatccagtccattagcctcctggaccagctggataaggacatcaataccttctctatgcgtgtcagggagtggtacgggtatcactttccggagctggtgaagatcatcaacgacaatgccacatactgccgtcttgcccagtttattggaaaccgaagggaactgaatgaggacaagctggagaagctggaggagctgacaatggatggggccaaggctaaggctattctggatgcctcacggtcctccatgggcatggacatatctgccattgacttgataaacatcgagagcttctccagtcgtgtggtgtctttatctgaataccgccagagcctacacacttacctgcgctccaagatgagccaagtagcccccagcctgtcagccctaattggggaagcggtaggtgcacgtctcatcgcacatgctggcagcctcaccaacctggccaagtatccagcatccacagtgcagatccttggggctgaaaaggccctgttcagagccctgaagacaaggggtaacaccccaaaatatggactcattttccactccaccttcattggccgagcagctgccaagaacaaaggccgcatctcccgatacctggcaaacaaatgcagtattgcctcacgaatcgattgcttctctgaggtgcccacgagtgtattcggggagaagcttcgagaacaagttgaagagcgactgtccttctatgagactggagagataccacgaaagaatctggatgtcatgaaggaagcaatggttcaggcagaggaagcggctgctgagattactaggaagctggagaaacaggagaagaaacgcttaaagaaggaaaagaaacggctggctgcacttgccctcgcgtcttcagaaaacagcagtagtactccagaggagtgtgaggagatgagtgaaaaacccaaaaagaagaaaaagcaaaagccccaggaggttcctcaggagaatggaatggaagacccatctatctctttctccaaacccaagaaaaagaaatctttttccaaggaggagttgatgagtagcgatcttgaagagaccgctggcagcaccagtattcccaagaggaagaagtctacacccaaggaggaaacagttaatgaccctgaggaggcaggccacagaagtggctccaagaaaaagaggaaattctccaaagaggagccggtcagcagtgggcctgaagaggcggctggcaagagcagctccaagaagaagaaaaagttccataaagcatcccaggaagattagaatgcaaatggacattctctgggaggtggggcataccatagcccaaggtgacatttcccaccctgtgccgtgttccccaataaaaacaaattcacaagaaaaaaaaaa

SEQ ID NO: 59313 - DNA, 2313 bp, Homo sapiens
cgggtccggcgggcggttggcttgagcgggaccggagctgaggcaggaagagccggcgccatggtggagaaggaggaggctggcggcggcattagcgaggaggaggcggcacagtatgaccggcagatccgcctgtggggactggaggcccagaaacggctgcgggcctctcgggtgcttcttgtcggcttgaaaggacttggggctgaaattgccaagaatctcatcttggcaggagtgaaaggactgaccatgctggatcacgaacaggtaactccagaagatcccggagctcagttcttgattcgtactgggtctgttggccgaaatagggctgaagcctctttggagcgagctcagaatctcaaccccatggtggatgtgaaggtggacactgaggatatagagaagaaaccagagtcatttttcactcaattcgatgctgtgtgtctgacttgctgctccagggatgtcatagttaaagttgaccagatctgtcacaaaaatagcatcaagttctttacaggagatgtttttggctaccatggatacacatttgccaatctaggagagcatgagtttgtagaggagaaaactaaagttgccaaagttagccaaggagtagaagatgggcccgacaccaagagagcaaaacttgattcttctgagacaacgatggtcaaaaagaaggtggtcttctgccctgttaaagaagccctggaggtggactggagcagtgagaaagcaaaggctgctctgaagcgcacgacctccgactactttctccttcaagtgctcttaaagttccgtacagataaaggaagagatcccagttctgatacatatgaggaagattctgagttgttgctccagatacgaaatgatgtgcttgactcactgggtattagtcctgacctgcttcctgaggactttgtcaggtactgcttctccgagatggccccagtgtgtgcggtggttggagggattttggcacaggaaattgtgaaggccctgtctcagcgggaccctcctcacaacaacttcttcttcttcgatggcatgaaggggaatgggattgtggagtgccttggccccaagtgaactcaagatttggcagccccagagatgccaactgcagcatgcccacctgtattccctgtccccttccttcatgaaggcatctccaggcaaggaaaactgaagtcattggcccgatacaaaacatttcctgcaacgaaggaggtggtgccgacgtgctgcttcccatcaccagcagctgctcgacaaggggcgcagggtggctgtctttgttccagcactgttcaggctgcctgtcatcccgggcctgccagctcccctgagtgatgagcacttccaagcacccctctgccctttctctgtccttatgctgtcccggcctcgccagccctctggggcattgtgggagatgcctgccaggaatgagcaagctctgttgctcgggagcctcttgtcaccttcttggacttattccccacctgataccttatagagaaaagtgtgaattcaggtggagagtaggcccaggccccatgaggcaccagtggaagcacagctccaagttcagacaggtgcccttagagaggaaaaccatgacaggcaaatgcatttcctctggagtttgagaccctgacaaacaacaggtggcatctggtgtgctgttcttgagttttcgtttaggattagttgagttccagctgggttttgggagaaaggagatgctaccaagtcttggatgttagggcgagaccctgcaagttgagtattagagagcttgtctttcaaggcaggttcctggggcttcagggctaggagggaggagcctgcccttttaacagaaccccagtcacatgcggctcaagtcactcagaggctgttgcatttcagggctatgttggtcctttgtttacctcctaaaccacagctgtttgtgtttcacatatgttgtgaattttccttggttctttttaaaggaatgataataaagttacttgctttaggatttgcttgtttttcttccacttcagaagcttctgagagggaatgggatgatcctaccagttgccttttcagacctgaggctctaactcaagagattcctcctctccctcaccattcctgccaccattttttctgggtgatgcagcaagagttaaattgttcacattctagaatgtgtcgaagcttctggctccaggtgtctaatggataattcagctaaatagcggctattttcagtggcaagaattataataataaagggcagtcacaagt

SEQ ID NO: 59314 - DNA, 1759 bp, Homo sapiens
tttcgtgcgggccggtgcgcctggcagtcggctgcgtactcctgcgagcgccggagaggggctggaggcggggcgagggcgcggctcgaggcatccctgcagggcgctcctccgagtccctcggcgctctgagcccacagggaagaaggaggggccggcgtcagtgacgtcagcgagaccgaggtgagcgtgggcgttgccagtggtgctctgtcagtgcctatggattatggcagggaaagtaaaatgggtcactgatatcgagaagtcagtgctgatcaataactttgaaaagagaggatgggtccaagtgacagaaaacgaggactggaatttttactggatgagtgtgcaaaccatccgaaatgtgttcagcgttgaagctggatatcggctctcagatgaccaaatagtcaaccattttccaaaccactatgaactgacccggaaggacctgatggtgaagaacatcaaaagatacaggaaggagctggagaaagaagggagtcctctggcagaaaaagatgaaaatggaaaatacctctatctggactttgttccagtcacctatatgctgcccgctgactacaacctgtttgtagaggagttccggaagagcccgtccagcacctggatcatgaagccttgtggcaaggcccagggaaagggcatcttccttatcaacaagctctcacagatcaaaaagtggtcccgggacagcaagacatcttcgtttgtgtctcaatctaataaggaagcctacgtgatctctctctatattaacaacccgttactaattggcgggaggaagttcgacctgcgcttgtacgttctggtgtccacgtaccgtccactgcgctgttacatgtacaagcttgggttttgccggttctgcacagtgaaatacaccccgagtaccagtgagctggacaacatgttcgttcatctcaccaacgtcgccatccagaaacacggggaggactacaaccacatccatgggggcaagtggacagtgagtaacctgcggctctacctggagagcacccgcggcaaggaggtgaccagcaagctgttcgacgagatccactggatcatcgtgcagtccctgaaggctgtggcgccggtgatgaacaatgacaagcactgctttgaatgctatggctacgacatcatcatcgacgacaagctgaagccctggctgatcgaggtgaatgcgtccccgtctctcacgtccagcactgccaatgaccgaatcctcaagtacaacctgattaatgacaccctcaacatcgccgtcccgaatggtgaaatcccagactgcaaatggaacaagtcgccacctaaggaagtcctcggcaattacgagattctgtatgatgaagaattggcccagggtgacggggctgaccgggagctgagaagccgtcagggtcagtctctggggcccagagcaggccgatcgagagactcagggagagcggtcctcaccacctggaagtgagtcccacctggaccttatcaaaactactcactccacctgggcccctgctgaagccctattttgaaatttcccttttgtagagcttttttcctttcctaagccctgtaaataaacgaaggcacttctttggaaggttatggagtctgtttgactagtgctaaaggaaacaattcatgcggatgtataaaactcgctctttttttttttaatttttaacctaagcagaattttcatattaaaaactcacttttttgacag

SEQ ID NO: 59315 - DNA, 1783 bp, Homo sapiens
ttttttttttttaaacatttaaaaattttatttagagacaagtctaccatgtcaccgtaagtttatgctactgctggaaatgaacaaatgtagccccataaggaagaaaagttgagagatgccatatgtttaaagacatggtagtcagacttctttgtaatcacatttctatgataaatgcatagtataatttttgaaggtataaagacaatttctaaggatttatattctagttaatacctacaactctaaacattacttaatacctcatttaagctgatttctttttctctagtcactttgcaaatggaaatgtaagaattgaaatttgtggctctaccctcaagattctcaaattaaaacacagctaccatatacatggccagatcaaatgcttagcgatgtttgaagtgttcacaagagaactatgagcgtataaactgtatgatattctatgacacagtaagtgtgataaagttagtacaaagtatttaaagatatgtcagtcagctctttttatatagaaaaacaaaatcttttacatacggaatggaaattttgtagaacagaagttttttaaaatttatattaaacattgcttaactagtaaatcctgtcagtgtagaaataatttttttgtaattctcaaagaagaaaatagtatacgctttaattcatggttacgtagttggctggaaaaatgccagtttgacctcgaagttttccttcccaccaatcaaaatgtgaatctgtttttgatataactgtgattctgtctccagcttgaaaattcaaatccccaggctgctgtccttcaaatgaatacagcgctgtcacttctatgggttgattcaaattgccaactctctcatgatagctggaaagtccaggatagagcttatattcatttctgttactttgagagccagagttcagctggactggtgcagatgactgctgtggtcttgacaatggctttggaggtaattctttagcagaagacttcctctgctcccttgctgcttttcttgcattgattcgttgtccttcattttcatacttttcagtaaaggaatcaagaatttcataaagatcttcggcttgagcaggccgcggtgtatctccaaataaaatgtcataagctcggatatcttgacaataaaattttctattagtttctttcctttcaatcaaacagctcccttctaaagacacgcctgcaaagagtccccttgacttgcagtacgtgaagacggcagcggagcttctcagggccacgtttccttccaagttccttcccaagggcccaaccgccacagtcaagttccctccgagggtcagatttccgccttttgcaaaagcttctacagcacggtcataattcagaattatcaccaagtctgatacctcaattcctatttcaaatcctccaccaaggccagctatcccaatggctgagggtgcagaccattttccatctggaaggcgcgccactacaatcccgctgcctcctctggcagtcaccaggaacccggctttgatcacagacagaattgcaaggcctttagccttcgcaattacgtgagcaggaatgatcttatcaggtccatttctggaagttatttctgtgaattctcttaatattttggcagccttttttgcttctgatttcaaattggaaggtatagggttattcacgtcataggaccgcctccgcaggcgcactggagccgattgcgcaggcgtggctctcacaacgcgctgccctgttggcgttggtgcg

SEQ ID NO: 59316 - DNA, 1132 bp, Homo sapiens
  misc_feature (1)...(1132): n = a,t,c or g
ttttttttttttaataccattctgtgatttaaacttttctattggtgacttttagttgtataggcacggaaaggaaaatcaattgttttctttaatgctgagaatttttgttaatatttctggacatttcataaaacatcttttgttgacattctacaaatgatagcatccaataatgtcccaatactttcttcttgtgaagagagtttatatatctttttgacttctgtaatattcattatttcaggaagatttttcagagaaacctgatgaccttctacttgagatattaggtattcttgatttatttgtttttctccctcttcaatgtaaacaattagaattgaagtgtcatttgctgagataccaaattttttcaaagcctctgaaatattgttatttggggaaaggttgaaaataatttcagtagatagagttcttgtcttcatttttcccagtttgtagaggtgaactgctttgtttgctgccacaagtatctgaaatggatcaacaatcactgtaggatttatcagtgatccatcgatggtgccttccatggcctttcttctcaagtctcccgcattttttacatctttaaataacagaagggttaccctgcattcgggaaataggtccagctgatgtgttaactgcatttcacagataagcaggattctacatccggcccccagtgcgtctcggaagagctcccgctccgaaacaaagctcacaacttccggaagcgatggccaatccccgtcttcttcgagccagtttccggataggccggctcggggtggccatctgtttccgggtcctggtaggagggttgcttccgcccatggtcccgcccattcttccgcctccccaacctgggtcccgtcaacggacgcgaaggagaacaggggctgtatatcacttccggcgaaggaaatggaagaatctatgggctgggaccggaagctggggtctggttttgagtctcggctttgtcttaacctgtgttgggcgttgcaccgggcgacctcagtttcttcctgtacaaggaaaagtactgaccaaaatgagttctacatacatttccgctgctggagatttctttnntccaccggcnctcaatagtggtctcatg

SEQ ID NO: 59317 - DNA, 1299 bp, Homo sapiens
  misc_feature (1)...(1299): n = a,t,c or g
ttttttttttttacaaaccaggaatatattcacttttattcatttccacgattatgagtatgacacagcatatacatatatttagataatatataaaacatagaataaacccgcaggaagaaatattggttctgggaattcctttatgggccatctttaattctgtaagttcatggtaaaaggtatctccccccacactggggggtnaggcggcggaataagctccagcgtttcatgcgccactcacaggactggcttacccccactggcacttacaatggcagtcacagagttacgggcatgttcaccggtgtccatgacaaggcaacaccaagtataaataacaggaacttacaggcagagcaaactaagataaatatgtttttgcatcgtcctccacatagtttccttttaaaaagaagagtcacatccaggggtctatccctcgagtcacaattccagttattgctttgccttgttctgaactgggagatacagtttgaactctgccggcagctcatcttctgagtagagtctgtctgagaagtaaacccgtcggatgcgacaatttgcatggatctgcactctgagggtctcgatgtaattggtgccgtatgctcgccgtgtgaagtctagcaagttgaactgaatctggttccagccgtcatccagccgcatgggcatggtgcagatgaagggtttgacccgggtggtgctctggtagttacttgcccgaaagcgacgacgcacattcttgtcatctagtacctgcacttcgaaggtaaaatacttcttcaggtttttgataatcatgacaaggaaaggaagtttaattcccagcgtcttcttggggtctgcagggcatgtgatatatgtggtgcttacatttgtcccttcaatctctagcaccagggactggatgtcattatcagtgattcttttgatgtggccattccgtacctttttgtcccagatttgcagaggcttgctgccgatgctgtagaggatggagaggaagccgctctggaacgtgtttttgaacatctcgccggcggccttctcctaagccgcccccggagccgacctaggccccggagtagatacaggcaccgagcgtcgagggcacagcagcaggccggccctgttccgaagaagggtggttgagctcctggcctccggatctgcagccactgatggccggactcggacgcggcaacgctaagtccgcgatcttcagctcctaagctgcgagctcagaacggaaaccacagcaactaccgtccgcgccgcggtatttcc

SEQ ID NO: 59318 - DNA, 2342 bp, Homo sapiens
gcaggttgttgtcgggataccagatttcctactccgagaggccccgggtccctctgccacaacttctgtcgctctgccgcctgcaccgtgacccgcactattcacgggagccctagagaggacaccgggacacccagaagccgggaaatgatgtttcaggattcagtggcctttgaggatgtggctgtcagcttcacccaggaggagtgggctttgctggatccttcccagaagaatctctacagggatgtgatgcaggaaaccttcaagaacctgacctctgtaggaaaaacatggaaagttcagaacattgaagatgagtacaaaaatcccaggagaaatctaagtcttatgagagagaaactctgtgaaagtaaagaaagtcatcactgtggagaaagcttcaaccagattgcagatgacatgctgaacaggaaaactcttcctggaataacaccatgtgaaagcagtgtgtgtggagaagttggcacgggtcattcatctcttaatacgcatatcagagctgacactggacacaagtcatctgagtatcaggaatatggagagaatccatatagaaataaggaatgtaagaaagccttcagttatcttgactcctttcaatcacatgataaagcttgcactaaagagaaaccctatgatggtaaagaatgtacagaaaccttcatttcccattcatgcattcaaagacacagggtaatgcacagtggagatggaccttataaatgtaagttttgtgggaaagccttctattttctcaatttatgtcttatccatgaacgaattcacactggtgtgaaaccatataagtgtaaacaatgtggtaaggcctttactcgttccactacccttccagtacatgaaagaactcacacaggagtgaatgccgatgaatgtaaagaatgtgggaatgcattcagttttcctagtgaaattcgtagacataaaaggtctcacactggagaaaaaccctatgagtgtaagcaatgtgggaaagtcttcatttctttcagttccattcagtatcataagatgactcacactggagagaaaccctatgaatgtaagcagtgtgggaaagcctttagatgtggctcacaccttcaaaagcatggaaggactcacactggagagaaaccctatgaatgtaggcaatgtggtaaagccttcagatgtacctcggaccttcaaaggcatgaaaagacacacactgaggataaaccctatggatgtaagcagtgtgggaaaggctttagatgtgcttcacaacttcaaattcatgaaaggacgcacagtggagagaaaccccatgaatgtaaggaatgtggaaaagtattcaagtatttttcttccttgcgtatacatgaaaggacgcacactggagagaagccccatgaatgtaagcaatgtggaaaagcattcaggtatttctcttccttgcatatacatgaaaggacacacactggagataagccatatgagtgtaaggtatgtggcaaagccttcacttgttccagttccattcgatatcatgaaaggactcacactggagagaaaccctatgaatgtaagcactgtggtaaggcctttatttccaattacattcgatatcatgaaaggactcacactggagagaaaccctatcaatgcaagcaatgtggcaaagcctttattcgtgccagttcatgtcgagaacatgaaagaactcataccattaatagatgagaaatccttttagtggaagcaacgggagaagctttctgttgtcccacttcctttgaaacacaagaaaagagagtggtgaaagaacctctggataactgctttttgaattgagaagagagacttgcgataggacaataaaatctagaagaacttggatggtttcgtaatacaattcacctatagccaatcttgcatgagatttcaaaggcacagaaaaggaaggcatcagtcacatattagaggccccacacagggagagaggtgtgtggctacccgcttccagcccattttcctgattctttggcttgttaatcggagaatatcccccaaatcacttgtctctgttcctcagagttgtaggtctccagatatgtccccagtgctccacattaaagataacatgcccactttgctgtttcttcagaaatgttaaaatgtttaccagagaactaataaatgttgttatggctggaaatactcactgatgcccaactcttctatagattgagttggtttaagaggtctactttgtattgcaagcattgttgtttctacggattagcgagcctgttcttgattaaaccaactagatggga

SEQ ID NO: 59319 - DNA, 889 bp, Homo sapiens
ttttttttttttctgattgacaatgagaatatttattgagggtttattgagtgcagggagaagggcttgatgccttggggtgggaggagagacccctcccctgggatcctgcagctctagtctcccgtggtgggggtgagggttgagaacctatgaacattctgtaggggccactgtcttctccacggtgctcccttcatgcgtgacctggcagctgtagcttctgtgggacttccactgctcaggcgtcaggctcaggtagctagctgctggcccgcgtacttgttgtttgctttgtttggagggtgtggtggtctccactcccgccttgacggggctgctatctgccttccaggccactgtcacggctcccgggtagaagtcacttatgagacacaccagtgtggccttgttggcttgaagctcctcagaggagggcgggaacagagtgaccgagggggcagccttgggctgacgtaggacggtcagcttggtccctccgccgaatattacaatgcctctacccatgtagagcacacagtagtaatcagattcatcctctgcctgggcccccgtgatagtgagggcagatttgttcccaaggatggagccagagaagcgatcagggaccccagaagagcgagtgtttgtgttgtacatgagcgtgcgtggagcctggcctggggtctgctggtaccagctgggggagtaactagtagagcctgagccagagctcaagccacaagtgagtgtgactgtccctccaggggacattgagaacgatggctcctgggtcaccacagtctgagaatccactcctgatccataagcaaggagtccgaggagaagcatcatccaggccatgggtggggacactcatgaaggctag

SEQ ID NO: 59320 - DNA, 2711 bp, Homo sapiens
tttcgtggcgcggcgcatgtcccggccgagtgtggcgcagcagtggcggcgcttcccattcgccatgcgccgggggtgggtgcccgaaggttgcatgatggaatttgaacattacttcaagaggttttgtattttggattagttaattgggtttgtcctctgctgactgtttcttcggatgcattttttggtgtgctcttgagggattaaatgcaaagagatcacaccatggactacaaggaaagctgcccaagtgtaagcattcccagctccgatgaacacagagagaaaaagaagaggtttactgtttataaagttctggtttcagtgggaagaagtgaatggtttgtcttcaggagatatgcagagtttgataaactttataacactttaaaaaaacagtttcctgctatggccctgaagattcctgccaagagaatatttggtgataattttgatccagattttattaaacaaagacgagcaggactaaacgaattcattcagaacctagttaggtatccagaactttataaccatccagatgtcagagcattccttcaaatggacagtccaaaacaccagtcagatccatctgaagatgaggatgaaagaagttctcagaagctacactctacctcacagaacatcaacctgggaccgtctggaaatcctcatgccaaaccaactgactttgatttcttaaaagttattggaaaaggcagctttggcaaggttcttcttgcaaaacggaaactggatggaaaattttatgctgtcaaagtgttacagaaaaaaatagttctcaacagaaaagagcaaaaacatattatggctgaacgtaatgtgctcttgaaaaatgtgaaacatccgtttttggttggattgcattattccttccaaacaactgaaaagctttattttgttctggattttgttaatggaggggagctttttttccacttacaaagagaacggtcctttcctgagcacagagctaggttttacgctgctgaaattgctagtgcattgggttacttacattccatcaaaatagtatacagagacttgaaaccagaaaatattcttttggattcagtaggacatgttgtcttaacagattttgggctttgtaaagaaggaattgctatttctgacaccactaccacattttgtgggacaccagagtatcttgcacctgaagtaattagaaaacagccctatgacaatactgtagattggtggtgccttggggctgttctgtatgaaatgctgtatggattgcctcctttttattgccgagatgttgctgaaatgtatgacaatatccttcacaaacccctaagtttgaggccaggagtgagtcttacagcctggtccattctggaagaactcctagaaaaagacaggcaaaatcgacttggtgccaaggaagactttcttgaaattcagaatcatcctttttttgaatcactcagctgggctgaccttgtacaaaagaagattccaccaccatttaatcctaatgtggctggaccagatgatatcagaaactttgacacagcatttacagaagaaacagttccatattctgtgtgtgtatcttctgactattctatagtgaatgccagtgtattggaggcagatgatgcattcgttggtttctcttatgcacctccttcagaagacttatttttgtgagcagggggccattcagaaaccattgagcaaaataagtctatagatgggactgaaacttctatttgtgtgaatatattcaaatatgtataactagcgcctcatttttatatgtaatgatgaaaactatgaaaaaatgtattttcttctatgtgcaagaaaaatagggcatttcaaagagctgttttgattaaaatttatattcttgtttaataagcttatttttaaacaatttaaaagctattattcttagcattaacctatttttaaagaaaccttttttgctattgactgttttttccctctaagtttacactaacatctacccaagatagactgttttttaacagtcaatttcagttcagctaacatatattaatacctttgtaactctttgctatggcttttgttatcacaccaaaactatgcaattggtacatggttgtttaagaagaaaccgtatttttccatgataaatcactgtttgaaatatttggttcatggtatgatcgaaatgtaaaagcataattaacacattggctgctagttaacaattggaataactttattctgcagatcatttaagaagtaacaggccgggcgcggtggctcacgcctgtaatcccagcactttgggaggctgaggcgggcagatcacctgaggtcaggagttggagaccagcctgaccaacatggacaaaccccgtctctactaaaaatacaaaattggcagggtgtggtggcacatgcctataatcccagctacttgggaggctaaggcaggagaatcgcttgaacccgggaggcggaggttgcagtgagccgagatcgcaccattgcactcctgcctgggcaacaagagtgaaactccatctccaaaaaaaaaaagaaaaagtaccaaagggaaattatttgtttttgaaataccagttcaactttggggattatttttcctttgaaggaaaaaaaaaggcttaagggttaggatttttaagtattcccaaagatctgaa

SEQ ID NO: 59321 - DNA, 2380 bp, Homo sapiens
ggacttccgtttcggtccagccgggctgcggccattgtttgtgtggactgagtgttttggccatcccggtccactctcacaggctccgttaagtgacatgaactctcaggaggactgagccagaagcggacagggcaagacgagctgtgcttgaaggaagaggggcagaaaatcgagggtcagggactgagaagctactccggtttagaaaccccagagacacccgtgtagatgggtacatcacggcttctctcccacgttaagacttaataaagaaagcctgatctttgaccagatggcagtaacatttgaagatgtgactattatttttacatgggaggagtggaaattcctggattcttctcaaaaaagactctacagggaggtcatgtgggagaactacacaaatgtcatgtcagtagaaaactggaatgagagctacaaatcccaagaagaaaaattcagatacttagaatatgaaaatttttcctactggcaaggctggtggaatgctggcgcccagatgtatgagaatcagaactatggggaaactgttcaagggacagattccaaagacctcacacagcaagatcgttcccagtgtcaggaatggttaatactctccacacaagtaccagggtatgggaactatgaactgacttttgaaagcaaaagtctcaggaacttaaaatataaaaattttatgccttggcagtccttagaaacaaaaaccactcaagactatggtagagaaatctacatgagtggttcacatggttttcaagggggcagataccgtcttggcatatccaggaaaaacctctccatggaaaaagaacagaagctcatagttcagcattcttatatcccagtggaggaagcccttccacagtatgttggggtgatatgtcaagaagacctactgagagattcaatggaagaaaagtactgtggatgtaataaatgtaaaggaatttattattggaactcacggtgtgttttccacaagagaaatcaacctggagaaaacctctgtcaatgctccatccgtaaagcatgcttctctcagagatcagacttgtatagacatccaagaaaccacataggtaagaagctgtacggatgtgatgaagttgacggtaactttcatcagagctccggagttcactttcatcagagagttcacataggggaggtaccttatagctgtaatgcatgtggtaagagcttcagccagatctctagtcttcacaatcatcaaagagtccacacagaagagaaattctataaaattgagtgtgataaagacctcagtagaaattcattacttcacattcaccagagacttcacataggagagaagccttttaaatgtaatcagtgtggtaagagttttaatcggagttcagtacttcatgttcatcagagagtccacacaggagaaaaaccatataagtgtgatgagtgtggtaagggtttcagccagagctcaaatcttcgaattcatcagttagtacacacaggagagaagtcttataaatgtgaagactgtggtaaaggctttacccagcgctcaaatcttcaaattcatcagagagtgcatacaggagagaaaccttataaatgtgatgactgtggaaaggactttagtcacagctcagatcttcgcattcatcagagagtccatacaggggagaaaccctatacttgtcctgaatgtgggaagggcttcagtaagagttcaaagcttcacactcatcaaagagtacatactggagagaaaccctacaaatgtgaagagtgtggcaagggattcagtcagcgttcacatcttctcattcatcagagagtccatacaggagaaaagccctataaatgtcatgattgtggaaagggttttagtcacagttctaatcttcacattcatcagagggtccatacaggagagaagccttatcaatgtgctaagtgtggtaaaggtttcagtcatagctcagctcttcgaattcatcaaagagtccatgcaggagagaaaccttacaaatgccgtgaatattataagggatttgatcataattcacatcttcacaataatcatagaagaggaaacttataaatattgttcatttagttaacagctttaatcaaagtttacctaacctttaaaccctataaatcctgctgttaaggaaatcttataaataacacaagtaatcccaagcaacatttatagtttcccctatctcccactaagaattatttgcttcaaaaggagatctttagaaaaaaccctatatatttaaaattatagtgtatttttctttacctactataaatataatacagtcataaatatattaaacatttaaggagaaaacaa

SEQ ID NO: 59322 - DNA, 1029 bp, Homo sapiens
tccatgcggtggaattcgctgtctgcaacaaagtgctgcttgggttgcagaggggtgggtgcctgtaagtgtggtgcacatttacacacatttctacaaaatgactctaccttgtggcacattgaagataattgtgtaagtagttatctctgaaaactaatatgccacctaatgctttaacacctgactctgcaggggtagacgattgttggatttgtccagccgtggtcctggtttcgtgttcagtgtctgcacgtcctgccatcatcactgccacacttactgttgacagctgtccctgctgcatgctcttagccagctccatcctgtgctctcagctgatatttcacaggctgggcctggtgtgctctggtgactcagtttactgtttcaggatgcacctctctctgactgtacggaaactatcgaagggctcgagcttacagagcagacctttagtcccgctaaatctctctcttttagaaaggtactcactgccctgtcctcactacctgtctatgcgccttgctcccctcccctcccccctccccgtctcctctcttcaggcattgctcttagttactgaagtagcttcaaatggatctttaacctgtttgtgagattgtacagaaggttctgttctatctacttgattctttaattaaaacatttgctatgaggtgtgataacaatttccagcattcgaagttgttactgagaaatggccagtctgagcaacgtggtgcatttctgcagttccgcacgggactttggtcagtgcgtgttttgggtttcagaatttgccttttccatgactctgactgcagacagcctcttctgggcagtctgttgctgttggcagcggccactcccgagtgcccttccaccctcgctggttcaactttgactgtaaatgtcatgaatgtagccactagaggtcatatcattgaaagatgtcatttcagaggaatggggaattcagacagtctttgtcagcccttgataaaatgtatttatttgtacctcaaa

SEQ ID NO: 59323 - DNA, 1708 bp, Homo sapiens
tttcgtgctgtctgagcagcggttgcggaccgagcgaacttggcccaggagcccgggcctagggagaggcgcggcggcggcgggagcgcgaacggctggagctggccttcttcgccttctcctcggctgtggagccctggtggggggtctgcgcccggtcaccatgacgacgccggcgaatgcccagaatgccagcaaaacgtgggaactgagtctgtatgagctgcaccggaccccgcaggaagccataatggatggcacagagattgctgtttcccctcggtcactgcattcagaactcatgtgccctatctgcctggacatgctgaagaatacgatgaccaccaaggagtgcctccacagattctgctctgactgcattgtcacagccctacggagcgggaacaaggagtgtcctacctgccgaaagaagctggtgtccaagcgatccctacggccagaccccaactttgatgccctgatctctaagatctatcctagccgggaggaatacgaggcccatcaagaccgagtgcttatccgcctgagccgcctgcacaaccagcaggcattgagctccagcattgaggaggggctacgcatgcaggccatgcacagggcccagcgtgtgaggcggccgataccagggtcagatcagaccacaacgatgagtgggggggaaggagagcccggggagggagaaggggatggagaagatgtgagctcagactccgcccctgactctgccccaggccctgctcccaagcgaccccgtggagggggcgcaggggggagcagtgtagggacggggggaggcggcactggtggggtgggtgggggtgccggttcggaagactctggtgaccggggagggactctgggagggggaacgctgggccccccaagccctcctggggcccccagccccccagagccaggtggagaaattgagctcgtgttccggccccaccccctgctcgtggagaagggagaatactgccagacgaggtatgtgaagacaactgggaatgccacagtggaccacctctccaagtacttggccctgcgcattgccctcgagcggaggcaacagcaggaagcaggggagccaggagggcctggagggggcgcctctgacaccggaggacctgatgggtgtggcggggagggtgggggtgccggaggaggtgacggtcctgaggagcctgctttgcccagcctggagggcgtcagtgaaaagcagtacaccatctacatcgcacctggaggcggggcgttcacgacgttgaatggctcgctgaccctggagctggtgaatgagaaattctggaaggtgtcccggccactggagctgtgctatgctcccaccaaggatccaaagtgaccccaccaggggacagccagaggaaggggaccatggggtatccctgtgtcctggtctatcaccccagcttctttgtcccccagtacccccagcccagccagccaataagaggacacaaatgaggacacgtggcttttatacaaagtatctatatgagattcttctatattgtacagagtggggcaaaacacgcccccatctgctgccttttctattgccctgcaacgtcccatctatacgaggtgttggagaaggtgaagaaccctcccattcacgcccgcctaccaacaacaaacgtgcttttttcctctttgaaaaaaaaaa

SEQ ID NO: 59324 - DNA, 814 bp, Homo sapiens
cgattcgcgccggccgccctgcgtacgctcgcaaggcgctcgcagactccggagtcgccaacatgtcgaccgccatgaatttcgggaccaagagcttccagccgcggcccccggacaagggcagcttcccgctggatcacttaggtgaatgtaaaagctttaaagagaaattcatgaagtgtcttcataacaataattttgaaaatgctttgtgcagaaaggaatcaaaagaatatttagaatgcaggatggagagaaaattgatgctacaagaaccattggagaaactgggatttggagacttgactagtggaaaatcagaggcaaaaaaatgaattttgatgagaagacccctgggccgtgttcagtggtctctcaggacggagggcatcatcctgcctcttaggttggctgaggcctgcgtgtggtgtccttagaaatgggcttcgaatagaagctccagccctgtgggggcgtctcctgggtagggagtggcgtcccgttttcccttaggagggtgtttctgcattgaacccctgagtgggacggcgttcccggcaaagctgggagggaggcgagcgtggggcaagacccttgtcttcgaggccggggccctcttgtatggggcggttttatgttgcagtcctctgatactttctgagttcaaagaggtaaatgtataaatttcagtcccttctgaacacagatatcatcagaaaattaccattccctagcaggatgttttcgtgtttgtattcgtatatgccagttcatttcctttgaaaaaaaaaaaagggggaccccaaaaaaaaaa

SEQ ID NO: 59325 - DNA, 7471 bp, Homo sapiens
tctgcggcgctcggagcctcccttgcgatcccacggccgggactgcccggagtgcatgggcgcgggccagggacgctgagcggtcgcgccatggagggcgccgagccccgcgcgcggcccgagcgcctggccgaggccgagacgcgggcggcggacggcgggcgcctggtggaggtgcagctgagcggcggcgccccgtggggcttcaccctgaagggcggccgcgagcacggcgagccgctggtcatcaccaagattgaagagggcagtaaagccgcggcggtcgacaagttactggctggagatgagatcgtcggcatcaatgacattggtctctcagggtttagacaggaagcgatttgcctggtgaaggggtcccataagaccctgaagctggtcgtcaaaaggaggagcgagctgggctggaggcctcactcctggcatgccaccaagttctctgacagccaccccgagctagcggcctccccgttcacctccaccagcggctgtccttcctggtccggccgacaccacgcgagttcttcctcccacgacctgtccagttcctgggagcagacgaacctacagcgcaccttagatcacttcagctccttggggagcgttgacagcctggaccacccctccagtcgcctctcggtggccaagtccaacagcagcatcgaccacctgggcagccacagcaagcgcgactcggcctacggctccttctccaccagctctagcactcctgaccacaccttgtccaaagccgacacgtcctccgcagagaacatcctctacactgtgggcctctgggaggctcccaggcagggtggccggcaggcccaggccgcaggcgaccctcagggctcggaggagaagctcagttgtttcccgcccagggtccccggtgacagcggcaaaggccccaggccagagtacaatgccgagcccaagctggctgcccctgggaggtccaattttgggccagtctggtatgttcccgataagaagaaagcaccatcatccccacctcctccccctccccctctccgcagtgacagctttgctgccaccaagagccacgagaaggcccagggccctgtgttctcagaggcggctgcggcacagcactttacggccctggcccaggctcagcctcgtggtgaccggagaccagagctcaccgatcggccttggaggtcagcacacccggggagcctcgggaagggatcgggaggcccgggctgcccacaggaggcccacgcagacggcagctggccgccctccaaggatggagcttccagtaggctgcaggcctctctgtccagctcagatgtgcgcttccctcagtctcctcatagcggccgacaccctcccctatacagcgaccacagccccctctgtgctgacagccttgggcaggagccaggggctgccagcttccagaacgacagccctcctcaggtgagggggctcagcagctgtgaccagaagctggggagcggctggcagggtccccggccctgtgtgcagggagacctgcaagcagcacagctctgggcgggatgctggccttctgacacagcccttggagccctcgagagtcttcccccacccacggtgggccagagcccacgccatcacctacctcagcctgagggtcctccggatgcccgcgagacaggacggtgttacccgctggacaaaggggccgagggctgctccgcgggagcccaggagcctcccagggccagccgtgcagaaaaagccagccagaggctggcagccagcatcacgtgggcagatggggagagcagcaggatctgcccgcaggagacgcccctgttgcactccctgacccaggaggggaagcgccggcctgagagcagtccagaggacagcgccaccagaccgccaccgttcgacgcccacgtgggcaagcccacccgaagaagcgaccgctttgccaccaccctgcggaatgagatccagatgcatagagccaagctgcagaagagccggagcacagtggctctgactgcagcaggggaggcggaggatggcaccggccgctggagggccgggttgggaggtggcacccaggaaggacccctcgctggcacctataaagaccacctgaaagaggcccaagcccgggtcctgagggccacgtccttcaagcgccgcgacttggaccccaacccaggagacctatacccggagtcactggaacaccggatgggggatccagacactgtcccccacttctgggaggcaggcctggcccagccaccctcatctacaagtggcgggccccacccgccccgcatcggaggccggagacggttcacagctgagcagaaattgaagtcctactcggaacctgagaagatgaacgaggtgggcctcacgaggggctacagtcctcaccagcaccccaggacatctgaggatactgtgggcacgtttgctgacaggtggaagttttttgaggaaacgagcaaacctgttccccagaggcctgcccagaagcaagctcttcacggaatcccgagagacaagccagagaggccgcggacagcgggccgcacatgtgagggcacggagccctggtcgcgcaccacctcccttggggacagcctcaacgctcacagcgcagcggagaaggcagggacttcagacctgccgcggaggctcggcacctttgcagagtatcaggcctcttggaaggaacagaggaaacctctggaggccaggagctctgggcgctgccactcagcggatgacatcctggatgtgagcctggacccacaggagaggccgcagcacgttcatgggaggtcccggtcttcaccgtccacagaccactacaagcaggaagcttctgtcgaactgcgaaggcaggcaggggaccccggcgagcccagagaagagcttccctccgcagtccgggccgaggagggacagtccacgccgagacaagcagatgcccagtgtcgggaaggcagcccaggatcacagcagcacccaccgagtcagaaggcaccgaacccacccacattctctgaactatctcactgccggggagccccagagctgccccgggagggccggggccgagcgggaaccctacctcgagattatagatactcggaggagagcaccccagcagacttgggaccccgagcccagagccctggctcacccctgcatgctcgaggacaagactcgtggccagtgagctcagccctgctctccaagaggccagccccacagaggccaccgccacccaagcgcgagcccaggagatacagggccacagacggcgcacctgctgacgcccccgtgggcgtcctcggcaggcccttcccaacgccatcccctgcgtccctggatgtgtatgtggcccgcctgtccctctcccacagcccctctgtgttcagcagtgcccagccccaggacaccccgaaggccactgtctgtgagcgtggaagccagcatgtgagcggggacgcatcacgtcctctgccagaagcactgctccctcccaagcagcagcacctgcgcctgcagacggccaccatggagacctcgcgctccccctcgccccagttcgccccccagaaactgacggacaaacctcccctgctcatccaggatgaggattcaaccaggattgagcgggtgatggacaacaacaccacggtgaagatggtgcccatcaagatcgtgcactcggagagccagccagagaaggagagccgccagagcctggcatgccccgccgagccacctgccctgccccacgggctggagaaagaccagatcaagacgctgagcacatctgagcagttctactcgcgcttctgtctgtacacgcggcagggtgctgagcccgaggccccacatagggcccagccggctgagccccagcccctgggcacccaggtgccccccgagaaagaccgctgcacctcccctccagggctcagctacatgaaggccaaagagaagactgtggaagacctgaagtcggaggagctggccagggagatcgtggggaaggataagtccctggccgacatcctggatcccagtgtgaagatcaaaaccactatggacttgatggaaggcatcttccccaaagacgagcacctcctggaagaagcccagcaacggaggaagctgctccccaaaatcccctctcctagaagcacagaggagaggaaagaggagcccagcgtgcctgcggccgtgtccctggccaccaattctacctactacagcacgtcggcccccaaggcggagctgctgatcaagatgaaggacctgcaggagcagcaggagcacgaagaggattcgggaagcgacttggaccacgacctgtcggtgaagaagcaggagctcatcgagagcatcagccgcaagctgcaggtgctccgggaggcccgcgagagcctgctggaggacgtgcaggccaacaccgtgctgggggccgaggtggaggccatcgtgaaaggcgtctgcaagcccagcgagtttgacaagttccggatgttcattggagacctggacaaagtggtgaacctcctgctgtcgctgtcaggccgcctggcccgggtggagaatgccctcaataatttggacgacggcgcttctcccggtgatcggcaatcactgcttgagaagcagagagtcctgatccagcagcacgaggacgccaaggagctcaaggagaacctggaccgccgcgagcgcatcgtctttgacattttggccaactatctgagcgaggagagcctcgcggactatgagcacttcgtgaagatgaagtcggccctcatcatcgagcagcgggagctggaagataaaatccaccttggtgaagagcagctgaagtgcttattggacagccttcagcccgaaaggggcaaataagagaccagtccccggtggaggaggggcacggggcctccgagctccagctccgttcccaaggatactcgtgaagaccccatctgtgttcatggcctggaaagagacttctcccatagcaaagaggctgttataaaagcaataacttttgtgtttgtgtgggatgatttatttaattttttagtttcccctttgattgctgagagccattttcctttacacataactacacctgacaccaggctctgctggatgtgagtttccactgcatgggctgtgggctgggcctgtggtgcctgccgagtggtcactgtcagtgggaaacccgttgttcctcccgtcttcagatgctgagccaactgcttggacagcagccagcgcgtcatgacgtgcatgagagggggaccctggtgctcatcttctcttgtcattcatccaggcatgggctgccaggttttgtccctgctcgttcaacagtgtgagcatttgtctctgttatctaatgatgttctctgacccagcagaaatcatcatcatgatgatgataatttattaactttttggaagggtgaatagtttcctaatggttaaaaaccaactgtgaaaggaaccacctgtgtggttgggttcactcattctcagattaaattgccacttaaagaaataacgtgcatgctttaaaaaacacagtcacgcaccaagcaggcaaatagctttagtccttctcacctcacatcacagttgttctgcaaagtaaaattttttggttaagagcgtgtccagtagtaatgtgcttgttagctgtttctcaagaccaacagaagattttttcagttactttccccccatgtattttgtatgcatatgattgtccgtgataattgggctacttttccattgtttcctccttaaatcgtttagcatggcatgagggccacattccatggacgggaagacccccttcctcttcagaggtcccgtgggacctacacagcctccctgagcttggatcctttttcctgccccatgaagttttaaagattcctatgccccatttcccttgattgaaatggcaggattcctaaagagagccctggtttgttaaaagaaaacactgtcatgcctgtcagttccccaattgacaagtcacagactgggagaaaatatttgcaaatcgtgtatctgacaaaaggtttgtgtccaggatgtacaaagaactctcaaaccggatagtaagaaaacaaacagcccaagtgaaaagcaggcaaaagacttgaatagacacttcaccaaagagcatacacgcgtggcaaacaagcacacgaaaagacgttcagccgccgatggcttggttataatttataacttacttatttttatctaataattggagattcagtgtatttcttcaaaaaatgtttaattaaatgcatgttaatggtgagtgaatcccttgggtgacttcgtgtttaggtcgtattagggcatttgttggatcaacggatcattttaaccctgacttccccttattcccataaaagaagttttccagtggaatggagatttcattttgtcagcagcagtgaccacagccttaccaaagcagacgcgtgcgcgtgcacagatgcacacacacagatgtcttaaaagactagaatccacacttcctgagccagaggggccgtgttgacggtaatgcattctctatagagccaagtccaaactggcaagctcaatgatgcaggcaataaaccgcctttttggcagcctaccaatgccaaaaggataaatgtctttccaaaagtgtgtattcctgttaaattaagctcttgctaacttgaaaaatccctgttctgccagcgaagcttcctcctcctctccagctggtaggtacttgcgtgaatgctggtcagtctgaaaaggtgaagctggctgtgcacttacccccatctttctccctcggggagacgacccaaggaatttcaaaatattttgtttggcagagcttttacctgttattctttgccctcaaatacagtattggggtcattttgatgatatgtgtgtaaaatgtgaataatccaattggtgtctgtactcagccttttgatgtctttttaggactttctcttctacacagcaatacgtcgtgctcgagtatccttgtagcaaagcacatagagccagctgtcctgtcagttcccctgtttgcctctgaaacgtctggttagtggggacccaaagattctagtgagtcaacatccataactctgtatctagttgtattattcatagaaaatcaatctggtgctaatggttggccctggtgttgttgggtggcagctgctccttcgccctcttgtagtgtggctgtggagggctctgcctatggggggtggcctgtggcttgtatccttcagtccaccacagcaaatgtgtgtagatttcatgctcgacacttaccactcacctatcaacagatcatcctgcttgactggtaacaaaataaatagtgtatcattcaaaaaaaaaa

SEQ ID NO: 59326 - DNA, 963 bp, Homo sapiens
tttcgtccggcgggtcggtgagcgcggcccgggccggacatggcggcgctctacgcctgcaccaagtgccaccagcgcttccccttcgaggcgctgtctcaggggcagcagctgtgcaaggaatgtcggattgcacaccctgttgtgaagtgcacctactgcaggactgagtaccagcaggagagtaaaaccaatacaatatgcaagaaatgtgctcagaacgtgcagttgtatggaacgcccaaaccttgtcagtattgcaacataattgcagcatttattgggaataaatgccagcgctgcacaaattcagaaaagaagtatggaccaccctattcttgtgaacagtgcaagcagcagtgtgcatttgacaggaaagatgatagaaagaaggtagatgggaaattgctgtgctggctgtgcacactttcatacaaacgggtccttcagaagaccaaagagcagaggaaacacctgagtagctcttctcgtgctggccaccaggagaaggagcagtatagtcgcctgagtggggggggccattataacagccagaaaacactttctacatcttcaattcaaaatgaaatcccaaagaaaaagtccaagtttgagtcaatcacaactaatggagacagcttctccccagacctggctctggactcaccaggcactgaccactttgtcatcattgcccaactgaaggaagaagtggctaccctgaagaagatgttgcatcaaaaggatcaaatgattttagagaaagagaagaagattacagagttgaaggctgattttcagtaccaggaatcgcagatgagagccaaaatgaaccagatggagaaaacccacaaagaagtcacagaacaactgcaggccaaaaaccgagagctcctgaagcaggcagctgctttgtccaagagcaagaagtcagagaagtcaggagctataacctctccatga

SEQ ID NO: 59327 - DNA, 1349 bp, Homo sapiens
ccggtccggaattcccgacgacgatttcgtctgacttccccttagcaaccaagtcgcggcgcttggttccccagcaaccgggagacgcgtctgctgcgtggaaccgccgagttcccagcgcttgagaaggaaaattctggatctgttatctgtgaggaggccactccgttgacagttgtgtaaaactctgctgctttccccagctccaacctctctggtcttcaacaacactatcatcagggaaaacgtgggggaagatgaaccagccgtgcaactcgatggagccgagggtgatggacgatgacatgctcaagctggccgtcggggaccagggcccccaggaggaggccgggcagctggccaagcaggagggcatcctcttcaaggatgtcctgtccctgcagctggactttcggaacatcctccgcatagacaacctctggcagtttgagaacttgaggaagctgcagctggacaataacatcattgagaagatcgagggcctggagaacctcgcacacctggtctggctggatctgtctttcaacaacattgagaccatcgaggggctggacacactggtgaacctggaggacctgagcttgttcaacaaccggatctccaagatcgactccctggacgccctcgtcaagctgcaggtgttgtcgctgggcaacaaccggattgacaacatgatgaacatcatctaccttcggcggttcaagtgcctgcggacgctcagcctctctaggaaccctatctctgaggcagaggattacaagatgttcatctgtgcctaccttcctgacctcatgtacctggactactggcgcattgatgaccacacaaaaaagcttgcggaggctaagcaccagtacagcatcgacgagctgaagcaccaggagaacctgatgcaggcccagctggaggacgagcaggcgcagcgggaggagctagagaagcacaagactgcgtttgtggaacacctgaatggctccttcctgtttgacagcatgtacgctgaggactcagagggcaacaatctgtcctacctgcctggtgtcggtgagctccttgagacctacaaggacaagtttgtcatcatctgcgtgaatatttttgagtatggcctgaaacagcaggagaagcggaaaacagagcttgacaccttcagtgaatgtgtccgtgaggccatccaggaaaaccaggagcagggcaaacgcaagattgccaaattcgaggagaagcacttgtcgagtttaagtgccattcgagaggagttggaactgcccaacaccattcttcccccacccctggaaaaacttccaaaagtagagaaaataaaggac

SEQ ID NO: 59328 - DNA, 1329 bp, Homo sapiens
ttttttttttttaaaaggtcaattctattttattggttctgagagggaggattcacccagtggatccttttccctacactctcccctcccccaatattgaggctctctcccaactactgcctattcagcattctctatctaaccctccttccccttctacttcctatactatcctacccctggccagcagtaccccaaggccaggccctcagctgtgggggcgtgtgctgagcaccaagcagagggagctgagcccggcgccagccttctccagttctgagcaggacacaggtaccagggtgacatcagagagcttctgcagtgcctcctggctgttgggcagatccccacctccacggtgcaggaggaaagggggcacaccaggcaacccaggacgaagaaagagacagtcagcagctgcgtcatctgggagggtcagggaggcatatgggtgatctgtcagcactgccattgcccggacagccttttgggcagcgtcgctgctgcctgccacaacagtgcgaggtccccccatgccgcagagaccgcgcaggtgggagggacccgagactggcacagtggagacggcgaagtcccggaacgtgtccgccacgatctcagctcctcggtgattggtccatttggagaggcctacgaaaaactcccggccggtgaagagaacgtcagtgccatccagcgtcgcgttctcgtctcctatttccacaattcggagccccaggtcttgcagggctttgcggactccatcgacctctggcctacgagcggggctccagggccgcgtgattagggccgtgtccccttggatcacggccgtgtcgccaagcagcggtcccagcggcaatgactcctcaggtggcagttctagcagctgtagccccagtcgttgcctcagtttacctcccagcaccccgtgctccctttgagctttggccagatccagagcgggaaggccagcccccgcaccttcccccgacgccaggctctctgggactccccggatcagggcatgggagcagcggcccagcccctcccccggcgtccccatcccatccacacagactccccctccaaccgctcggatttcttagttttcttgtttcttcacctgtctccagcggccacccccactcctgtcgcgctgtgatctcggctggggccccaccccccgaggacagagttggtggagaagggagtccccgtcttcaagcctcggggactgggagctctggcttttagcgggggtccttgtgtaggcgagctcatatactacgatggggcaggggcgcgacggtctggcggctccggggc

SEQ ID NO: 59329 - DNA, 1058 bp, Homo sapiens
gagatgttgcacgcgccgagagggcgggccacggccgcactccggagactcgcggatgctacgcgcaccatggctggaggctgtcgcgccccttcctcaccgcccacggtctcgcttcctgaactccgttcactcctagcctccggacgggcccggctcttcgacgtgcgctctcgcgaggaggcggcagctgggaccatcccaggggcgctcaacatcccgggtatagggtggagaggggacgcccaggtggtggaatagagaccgttcaggaggttctttgccaatgggacctcatttaggatggaatggggaaggcactgattatgggggtcctgcattcccgggagccagccctcagcttccgtaggaaggactgatggggggcggatcttggcatcggaactggcccatccagtttgagaagacagcaggcggagaggagaggggcagaccagcttctcttgacctccccaaatctggacgcctgagggggcatcccgccccgcctcctcacagcttagggagtggcttgcattcaaaagttgtcggtttctgttccttgaaattggggtgggggtaggggatggttatcatatgttgtttgggggcccccaggacccagcccttccaggcccagcttccgaacctgagtgccaaattgctggctttcccttctaccctctccactcctccagtgtccgagttggagagtgctctgcagatggagccagctgccttccaggctttatattctgctgagaagccaaagctggaagatgagcatctcgttttcttctgtcagatgggcaagcggggcctccaggccacgcagctggcccggagtcttggatacactggggctcgcaactacgctggagcctatagagaatggttggagaaagagagttaggcaggaggcagcttactgattgccaccccctggccccttaatggccaccttaacctaagggtgtgaacgggctgacttggtgaattgggcaactccttataagtgttgtgcacacaaaagcatcaaataaagaacatttaatcaa

SEQ ID NO: 59330 - DNA, 2018 bp, Homo sapiens
  misc_feature (1)...(2018): n = a,t,c or g
ttttttttttttggactgcttagaaaattcagctttaatggccccagcccttctgtctgagtctagtagtccagggcacagatgagggccacaccacgctttatccagtgtcgctggggctgatgggtggggatctccacagcaatgacatagttggtagagtgtcctgtggttgatagtgttccagcacgagtcagtgtcttgtagatggggcacaggtaaaagtcctggtcctgggccttgcggttgggtgttggcaagagccagataacggccatctctgtgtacagctccttgggctgagactcagccagctggaaggcctctggatcccagcgggcaccttccaggaataatccatggatatagcaccctacttggggtctttgtgttaactctgatggtgcctcaaacatcaccttgaaatcaaaggagatggtgtcaatggagatgacaaatttgcgggcaaaattctgcagagtgcctgttaagaaagcctgggggaagaagaatccactgatccagaagacagctgggatgccatcttggatccaggcctgcagaaagtccaggcgttgcagcaggtccatgacccatgatgacagaggcttgagcgatgggtaggccttggcactccagagctcaggcacagtattgttgtacaggctggcagccatcagctccagctgagaggacatcactaccagccccttgagtgccttgagtaggtcttgcagtgtctgtgtgatcacctgcagcagccgattgtacctaatgacctcttgtactagtactgtgttcattgattcctcatacagcactgggtacttggccatcacccattgcaagttgataggctcaggcaccttgagcagaatgttttgggtgacgtcctccactatctcctcccggccctggctgcctgcagaagatgatttgggttgcagctggatgatggtgcccaggagggcgaacgtctcgttctgggcaaaggtgatgttggcattgtcatgcaggccaaagatctcaggcatatcattgagtgggaggctcttgatgtaggagaggtagccgtggaggtcgtaggtaggcgggatctggtggtagatgcccgaggcgctgtagctgtgctcaggggagagcacgtcagggttgtagaagtcctccaagatgttcatgatgcagcgccggtcccagtcatcagtgacacggcccccgtaattgatctcccctgccgtgtacttgaggaccttgtaggggatgtcatcatattcgtccaggaacatcttgagctggctgatgcagatgcgcagatctccatccgtgaactcataggggatgttgaagcccaggggcccaaacttacggcgctccagggcgttcccatggaacaagcacagagacagcagcagagacttgaactccatcaccttgtggcaggagttgaggaagtcttcaccaaggctactataggacttcagcaggttggccctgacaccgcgtggcggctcaatggtcatcttggagccgttctgcaggatggacactgggaacttgttgctgggcaggctggtgagccagaggcggaagtccctgtgtaccttgtcggggttgatgtgctcgatgaggcgttctagggctggcatccagcttggtgccaggtggcagttctggaagaagacccatttgcccctctctatggagctgcgcatcatggcttctgcccgagggccctgcccctggcccagggagatggcagagagctttttggagaacttcatttcttcggcaaacttgtagaggtcggcagcagggtctgtgccgggtgacagcacaaagatgaggggtgtggtggagttggagtctttgaacaccactgacagattggctgtctggggttcaatgaagcgtggctccaggttggtgaccaaaaagtcctgcatggcgttggtaaccttgtccccacgcaggcagcgcctcgtaccaagctgnnnntntcatgtcgtaacgtaatcaag

SEQ ID NO: 59331 - DNA, 2746 bp, Homo sapiens
ggtgctggtgggcgcacaggtgcacctgatgtcactgtgggcacgacagctgggccagaggaccaccaccagctggtaggacacagcaccctcgcgtgctgggagcagttgggtgcactttggcgctctgtgtcttgtgactggaagctgtgtttatggtattttgcaaatactaacataaatgggcactcagtaaacacccagttagaaaacgttttatggacacggaacgctccactgtaacgggcaggcagaacacactcctttcccaggctcatcaattaaacagaaaacaggggagctctcctcaccccagcctggccctgtgctccccaatggcccctgcgaggcccctaccatggcctgcctgggagacacaaactatgacaggaacacactggactgatacagaatgaggccagacacacccatgcctgtgcctcccaagagcgaccccaggacagtggggcagacagaggtgtctacactggcagaaacaagggctggagccacacgtgatgctcggacacaaacggcacgcagctctgcagcctggccacacacccttcgcgtatgactccactcctcagggttcacggggctgtgtacagagactctctctgctgacacgatggccacacgcccttcgtgtatgactccactcctcagggttcacggggctgtgtacagagactctctctgctgacacgatggccatatggccttcgcgtatgactccactcctcagggttcgtggggcttggagactctgctgacatgataccacagacaattcattacctccccgcggctgcttcccgcatgccaaaggggacaggatcaaagtccttgtctgatgacaaaaactctacacgtgcaaaataaaactaaaaaaataaaataaaagagctgaaggtggtctagagttaggtcttggcagaggccgcaggctctggagactgaagaaactcataggggtcgtgggtgacgtctggctgctccccgacactcaggcgagaagggcttcccaggtggtgctggtccctctcggaggcgttggacagggagctgaggttggacgacggccgagagccgccgcgctccgcctgtgcttcgtgcaggtcctgcaggagcttcgtcgtctcatccaagttcaaatggctgtcgtcagggtccagctccttcttcaccttccccagagagctgagcatggagatatccacagaaacgtcgggataggacttcatcgacatgaactccagaacagagctgctgctgtctcctagggtgtccccaaccttggcttcatctggaggcttcatgggaacatttcttctctgcttcagctggaagagcgtcctagagtggtctccgcctgtgatctggtccaggaggtcgtccaccactttcttgctgtagctcccagcatccttcacaaactcctgcaggctcagcgcacactgcacgcctgtctcatctccgtaggctgagtagagcagctccatctcgtccgacttcaagtcgccaaatactgaattattctgcatcgaaagcgcagtagtggcactggagagaaaggtgactttgtttcttctctcgtctttgaagcccagcgtggtgaagcctgggagtagcttactggagagcgagctcaagtccaccgggtgggtctcctcctcatcagcgtccggctcggccgtgttgaccacgctgtagagcaggctcccgtccccgttcctcttcagatagcccatcttgccgcctgggaggaaccggttgatcctgtcccgagcttcgtcagctgcgtgctccaccagcgccagcacgtgctcctctgcggtactgtccgtcaagctgcaggcattcccttcaggctcaaacatgcagctgataacttctctactcggctttttggatttcttggcagtttctacttgtactggtacaacttcagggacaggttcctcaacagctgtatcttcattgcccaaaagagctgcctgtttgctcatcatcttaaagcctgcgtgaaggatcttcttcgccaacttgtagtacacggtatctggcctattgtatgtcattgcattatcacacatcagcttgaaatctgccttaaattccgtaactgacttgtattcattagctacaattttgtctttcatggtgccaaaatccatgggatgttttattatcattgaatatccaggagcaattgcatccgtgacaggaaaagcaaaaaatccatggggatcttttctctgaagctggcggaggaagtgttccaggagttgctgaataggtgtgctctcattttcggctggctgtgtccggcacgctcggactggccgatctgggggcggctccacctccaccttcttcccaggatcaaagtcgtcagcctctccctccgtgtcacagtgctccctctctcgcttccgcttcttctcttcctttcgcttccttctttcctcatcgtccagatgcttctccttctcggacttcttcttcttcttctttttcttttctttgtgcctctctcgctcatggtctgacctgtcatcatagtaactggagtcgtggccggatcctgagagttcagtcacttcacttcctccgaccttcaggactagctttagaggcttctccaggggcttgtcggcataatcctcgtaggacgagcgccactcggccttgtgcttcttgtgcttcttgcccatggcggcgccggcggcgggcccgaggc

SEQ ID NO: 59332 - DNA, 1697 bp, Homo sapiens
cctggcggatggagacatgctgcccctgctgctgctgcccctgctgtggggggggtccctgcaggagaagccagtgtacgagctgcaagtgcagaagtcggtgacggtgcaggagggcctgtgcgtccttgtgccctgctccttctcttacccctggagatcctggtattcctctcccccactctacgtctactggttccgggacggggagatcccatactacgctgaggttgtggccacaaacaacccagacagaagagtgaagccagagacccagggccgattccgcctccttggggatgtccagaagaagaactgctccctgagcatcggagatgccagaatggaggacacgggaagctatttcttccgcgtggagagaggaagggatgtaaaatatagctaccaacagaataagctgaacttggaggtgacagccctgatagagaaacccgacatccactttctggagcctctggagtccggccgccccacaaggctgagctgcagccttccaggatcctgtgaagcgggaccacctctcacattctcctggacggggaatgccctcagccccctggaccccgagaccacccgctcctcggagctcaccctcacccccaggcccgaggaccatggcaccaacctcacctgtcagatgaaacgccaaggagctcaggtgaccacggagagaactgtccagctcaatgtctcctatgctccacagaccatcaccatcttcaggaacggcatagccctagagatcctgcaaaacacctcataccttccggtcctggagggccaggctctgcggctgctctgtgatgctcccagcaacccccctgcacacctgagctggttccagggctcccctgccctgaacgccacccccatctccaataccgggatcttggagcttcgtcgagtaaggtctgcagaagaaggaggcttcacctgccgcgctcagcacccgctgggctccctgcaaatttttctgaatctctcagtttactccctcccacagttgctgggcccctcctgctcctgggaggctgagggtctgcactgcagatgctcctttcgagcccggccggccccctccctgtgctggcggcttgaggagaagccgctggaggggaacagcagccagggctcattcaaggtcaactccagctcagctgggccctgggccaacagctccctgatcctccacggggggctcagctccgacctcaaagtcagctgcaaggcctggaacatctatgggtcccagagcggctctgtcctgctgctgcaagggagatcgaacctcgggacaggagtggttcctgcagcccttggtggtgctggtgtcatggccctgctctgtatctgtctgtgcctcatcttctttttaatagtgaaagcccgcaggaagcaagcagctgggagaccagagaaaatggatgatgaagaccccattatgggtaccatcacctcgggttccaggaagaagccctggccagacagccccggagatcaagcatctcctcctggggatgcccctcccttggaagaacaaaaggagctccattatgcctcccttagtttttctgagatgaagtcgagggagcctaaggaccaggaggccccaagcaccacggagtactcggagatcaagacaagcaagtgaggatttgcccagagttcagtcctgg

SEQ ID NO: 59333 - DNA, 4041 bp, Homo sapiens
gtccttcccacccttagtcccaggcatctgactaccgggaacctcagccagagtccgggagccccccaccccgtccaggagccaacagagcccccgtcttgctggcgtgagaatacattgctctcctttggttgaatcagctgtccctcttcgtgggaaaatgaaccagaagacaatcctcgtgctcctcattctggccgtcatcaccatctttgccttggtttgtgtcctgctggtgggcaggggtggagatgggggtgaacccagccagcttccccattgcccctctgtatctcccagtgcccagccttggacacaccctggccagagccagctgtttgcagacctgagccgagaggagctgacggctgtgatgcgctttctgacccagcggctggggccagggctggtggatgcagcccaggcccggccctcggacaactgtgtcttctcagtggagttgcagctgcctcccaaggctgcagccctggctcacttggacagggggagccccccacctgcccgggaggcactggccatcgtcttctttggcaggcaaccccagcccaacgtgagtgagctggtggtggggccactgcctcacccctcctacatgcgggacgtgactgtggagcgtcatggaggccccctgccctatcaccgacgccccgtgctgttccaagagtacctggacatagaccagatgatcttcaacagagagctgccccaggcttctgggcttctccaccactgttgcttctacaagcaccggggacggaacctggtgacaatgaccacggctccccgtggtctgcaatcaggggaccgggccacctggtttggcctctactacaacatctcgggcgctgggttcttcctgcaccacgtgggcttggagctgctagtgaaccacaaggcccttgaccctgcccgctggactatccagaaggtgttctatcaaggccgctactacgacagcctggcccagctggaggcccagtttgaggccggcctggtgaatgtggtgctgatcccagacaatggcacaggtgggtcctggtccctgaagtcccctgtgcccccgggtccagctccccctctacagttctatccccaaggcccccgcttcagtgtccagggaagtcgagtggcctcctcactgtggactttctcctttggcctcggagcattcagtggcccaaggatctttgacgttcgcttccaaggagaaagactagtttatgagataagcctccaagaggccttggccatctatggtggaaattccccagcagcaatgacgacccgctatgtggatggaggctttggcatgggcaagtacaccacgcccctgacccgtggggtggactgcccctacttggccacctacgtggactggcacttccttttggagtcccaggcccccaagacaatacgtgatgccttttgtgtgtttgaacagaaccagggcctccccctgcggcgacaccactcagatctctactcgcactactttgggggtcttgcggaaacggtgctggtcgtcagatctatgtccaccttgctcaactatgactatgtgtgggatacggtcttccaccccagtggggccatagaaatacgattctatgccacgggctacatcagctcggcattcctctttggtgctactgggaagtacgggaaccaagtgtcagagcacaccctgggcacggtccacacccacagcgcccacttcaaggtggatctggatgtagcaggactggagaactgggtctgggccgaggatatggtctttgtccccatggctgtgccctggagccctgagcaccagctgcagaggctgcaggtgacccggaagctgctggagacagaggagcaagccaccttccccatgggaggcgccacccctcgctacctgtacctggccagcaaccacagcaacaagtggggtcacccccggggctaccgcatccaggtgcgcagcttttctggggagccactgccccaaaacagctccatggagagaggcttcagctgggggaggtaccagctggctgtgacccagcggaaggaggaggaacctagtagcaccagcatctacaatttgaatgacccttggacacccactgtggacttcactgacttcatcaacaatgagaccattgctggaaaggacttggtggcctgggtgacagctggttttctgcatatcccacatgcagaggacattcctaacacagtgactgtggggaacagcgtgggcttcttcctccgaccctacaacttctttgacgaagacccctccttctactctgccgactccatctacttccgaggggaccaggatgctggggcctgcgaggtcaaccccctagcttgcctgccccaggctgctgcctgtgcccccgacctccctgccttctcccacgggggcttctctcacaactaggcggtcctgggatggggcatgtggccaagggctccagggccagggtgtgagggatggggagcagctgggcactgggccggcagcctggttccctcttccctgtgccaggactctcttccctccactgccctccttcacatccccctctgagccaggagcctcctgaccctgtgatgcctgacacaggggacactgaaccttgttgatgccagctgtactgagttctcatccacagaggccaggcatggcccagcctggagccgtggccgagggcttccctagatggttccctttgttgctgtctggctttcccgaatctttttaggccacctccaaggactctaaaagggggctattccctggagaccccagagtagggttgccagtcctgcaagtccatagctgagctggaaaggatgcttctgctcacattccctctcatccaggtcctttccttctcgtcttcctctctctcacctacttcctcctcctcctcctgttcctgccttctcttctatcctgcaatttctcccaggaatcctgaggggcatatccctatgtgcccagcccctgggtactcccccagaccctcagttttcagttcaagttccgtctcctctccagccctatggaagtctcaaggtcacgggactcttaatcaagagtggccaatccctgtgtgtcgttcccttgtgtctgttgcttattgggagtaggagttgctcctacccctgtcctggggctgggtgtgtttcaggacagctgcttctgtgcatttgtgtctgcctgcctcatgctctctatagaggaggatggtcatcgtgacagcagcagctcaagttagcatttcaagtgatttgggggtgcaatgataatgaagaatggccattttgtaccagggctctgtattctgcaacagcctgtttgggaggctggagtggaaacaaagggtgggcatcaaagatgagaagccaaagcccctacaactccagccacccagccaggaggggctgtccaatcacattcaggcatgcgaatgagctgggccctgggtgaggtgggggtctggcctagtggggaggggcctggcctgggtggggcagggcctggcctggtccaggcttgggctccattcccatcactgctgtccctcctgaggtctggattggggatggggacaaagaaatagcaagagatgagaaacaacagaaacttttttctctaaaggactggttaaatcaattctgatacagccttacaatacaatagtatgcagctaaaaaataattgtatgtctttatatactaatatgtaataatcttcaggtgaaaaaggcaagccacagaaatgtgtatagcgcacttcccatttgtgtttcagaaaggagtagaatataaacacataattgcttatgtatgcctattcagaataaatgggtaacactgattacttttgggaggggaaccagtaggttgaggacaggagagggaagggtcttaacacttacacccttttgtacattttgaattttgaaccatgtgactgtattacctattcaaaataaacaataaatgggcccaaaaaaaaaa

SEQ ID NO: 59334 - DNA, 4323 bp, Homo sapiens
ccaacttatttaaaacaaaacaattttgtaggtattattatacccatttcacagatgatgataaatgagaccaatagaagttaaataacttgccaaaggccacacagctggtgagtgatggagaacgaattaaaactcaagtgagcataattctaaaagccatcttctcgttagtgtttctcactatccaggtctgcctttgccttatttaactgaagttaagccatccttacctgtgatcacctagcctctcagtttggggggatcattacagcgggtttttaactcccaatgttctggtccagtttgctttacatgttcttatttatacattgtcaaggatgacctcaggacagtacagcaaggacacagtggcacttcacattttgttcccacgaaatgactggggcataatctcagatcatcttcctttagaatgtggaaacatcagcagaagaatattagtctttatacaagtcaaatccaaaatgacacatgtgaaaactaatagagctgactttcagccatgatagctttggcacacctcacatccctttgttcaacctctcttccctcaacggagagctgcattcctgggaatttctgttgtgcacttttcccacttgccctgctgtcatttaaaggtgaacattctagttttgctaagaaaaccctttccttcatttggaatgaacagcaattttattacttttgaccttaaaatgagtttgctgccttcaaatcttttcagcgccttcatcacgctctgcttcggggcgatcttcttcctgccagactcctccaagctgctcagcggggtcctgttccactccagccccgccttgcagccggccgccgaccacaagcccgggcccggggcgcgcgccgaggacgcggccgaggggcgagcccggcgccgcgaggagggggcacccggggacccggaggccgccctggaggacaacttggccaggatccgcgaaaaccacgagcgggctctcagggaagccaaggagaccctgcagaagctgcccgaggagatccaaagagacatcctactggagaagaagaaggtggcccaggaccagctgcgtgacaaggcgccgttcagaggcctgcccccggtggacttcgtgcccccaatcggggtggagagccgggagcccgccgacgccgccatccgcgagaaaagggcaaagatcaaagagatgatgaaacatgcttggaataattataaaggttatgcctggggattaaatgaactcaaacctatatcaaaaggaggccattcaagcagtttgtttggtaacatcaaaggagcaactatagtagatgccctggatacactttttattatggaaatgaaacatgaatttgaagaagcaaaatcatgggttgaagaaaatttagattttaatgtgaatgctgaaatttctgtctttgaagtaaatatacgctttgttggtggactactctcagcctactatctgtctggagaagagatttttcgaaagaaagcagtggaacttggggtaaaattgctacctgcatttcatactccctctggaataccttgggcattgctgaatatgaaaagtggtattggaaggaactggccctgggcctctggaggcagcagtattctggcagaatttggaaccctgcatttggagtttatgcacttgagccacttatcaggaaaccccatctttgctgaaaaggtaatgaatattcgaacagtactgaacaaactggaaaaaccacaaggcctttatcctaactatctgaatcccagtagtggacagtggggtcaacatcatgtatcagttggaggacttggagacagcttctatgagtatttgctgaaggcctggttaatgtctgacaagacagatctggaagctaagaagatgtattttgatgctgttcaggctatcgagactcatttgatccgcaagtctagcagcggactaacttatatcgcagagtggaaagggggcctcctggagcacaagatgggccacctgacctgcttcgcggggggcatgttcgcactcggggctgatgcagctcccgaaggcatggcccaacactaccttgaactcggggctgaaattgcccgtacttgtcatgaatcatataatcgaacatttatgaaactgggaccagaagctttcagatttgatggtggtgttgaagccatcgctacaagacaaaatgaaaaatactacatcttacggccagaagttatggagacttacatgtatatgtggagactgactcatgatccaaagtacaggaaatgggcctgggaagccgtagaggccttggaaaaccattgcagagtgaatggaggctattcaggcctaagggatgtttaccttcttcatgagagttatgatgatgtgcagcagagtttcttcctggcagagacattgaaatatttgtacctaatattttctgacgacgatcttcttccactggagcattggatcttcaatagcgaggcacatcttctccctatcctccctaaagataaaaaggaagttgaaatcagagaggaataaaaagacattttatattttattctgctccattcccttcactgtataccttaataattccttttctggtaatcaggcacatgatgaactttgattagtaggtctgtgattaagttcttaaattgttttgcagtcttttatgtttattatcataggtataggtggacctaaattccttatcatatcctttattaattcagccagtgtatccaccagttttttgtttatgtttttaagtaacctattatctctggatttcatgaaggtgtaatatcgtttttgttaaactgaatagaattgtatagcgatgacttcttaattataatttgatttgactgcaaaactttttcctcctctaagaggagatgatgtctgctttaagctgtaatgttttgccatgttgcaaaaagccataataataagtataaaaaagctttttcctttacaatttcatgttaatctggtttgtctgtccaccagagacagatcttctgtgacagcctccttatgcaggtctatcattatttgatagaatgtcttctaaaatacttcactcacattgtaattcaaattagaaagtcattccaaaaggatcatgtcatgttgacctcatttcatcggaactgcagtatatttttgttggttaattatattagtgttttctattttgtaaatgtgtcctttaattttactttaaatgccctgtgtcatttctggattatatactagttaatttcttccattccctactacacagagaggtgagctttcaaattttgcagagctctgctatcactgaattacatttatctgaagaaaatagtacaacttaatggattagcttttgggtttaactgaatatatgaagaaattgggtctgtctaaagagagggtatttcatatggcttttagttcacttgtttgtatttcatcttgatttttttctttggaaaataaagcattctatttggttcagatttctcagatttgaaaaaggctctatctcagatgtagtaaattatttcctttcagtttgtgaaagcaggatttgactctgaaagaagctttgccaattttacttattcgtgatcaatcaaggaaaatctaataaattttaggccaaataagaatatagcatatttagtatggttatagtcaacacagagatcacaacttagaagaaatataaagaaatggccactccccatcccccacagtcctggagtaaatcaaaatcaatatatgattcttttaaacattaagtttgaaataggaatggttttctcaagaatagatttggtgtgataccttgtgtttgcttacattggcccactatatatacatatatatttatgtagatatacttccatgaaagggctaatacgatgcatatactgaagggcaaggactttgaccatgtgaattttcagccgagaatggtcagaaagatcagtacaaccccatggattaggctgaaacatatgaaattgctgcatttgtagtttaaaaactgtcagcagtttcatatggttccacctaatattattgaagacaattattttcttagctatcaataggcttaatagttttagttattttagcttttgaaagtgttttaaaagatttcctttatcggacaggaccatctttatgacctgctttctgtttttcaatatcatacattggtgtatgtcaaagaataaattagtaaaattagtaaatgaaaaagactcttccgtacatcattatttccatgcta

SEQ ID NO: 59335 - DNA, 1464 bp, Homo sapiens; identical to SEQ ID NO: 58749

SEQ ID NO: 59336 - DNA, 1029 bp, Homo sapiens
  misc_feature (1)...(1029): n = a,t,c or g
ttttttttttttagcagacacagacacagatgtttattccaggaagaggtctaagaaacgagcttcttagagcatgtgtcacggggcagccagtcctggggctctcagagccagccccctcccttcagcagctgaagcaatagcgcccccattttacaggcggagcatggaagccagagaggtgggtgggggagggggtccttccctggctcaggcagatgggaagatgaggaagccgctgaagacgctgtcggcctcagagccctggtaaatgtgaccctttttggggtctttttcaacccagacctggtcaccctgctgcagctgaagcaccatgccccctgacaccacctggaagagccccttgttggtggtgtcacagaagcccagggagcgtcggacctggccccttgaggaggagacgatggacaggcagatttcccactgggacagcacctggaaggtgaagtagtagtagccgggtacagtgcagacgaatcggccggagtggttctggtacggttcttcctggttggtgatgaccgtgtcgaagatgaccacgttgccccccattggggggttccgccgaatggcggagaaggctggcctcggctggtccttgatgtttcctgggctgcccttggtgcctttaattcccgggatgccacgggccccgagggggccgctgggccctgggtagcccaccttgccggggtttccagagggcccaggttccccctggtctcctttaaggccttggatgcctgtccggatgccaggggcccccggctccccttgctcccccttgaggcctggccgcccccgtctgccaggtcttcctgcctcccctttcttcccgtctggtgctcggcacaagtcctcggtcaccatagaggccagcgatatggccagcacacagagcaccagccatccccggggaccctccatgatgcctctgcctcctgttgtcgactgccgctgcatgcgaattcgacctcacaggactaggggtctcgaanttttttttct

SEQ ID NO: 59337 - DNA, 2178 bp, Homo sapiens
attggctgttgctaggaaccgtctcaaggccttatgggccctggttacggaagccgaggaaggctgagcgcgggctctcaaggaaagtagtcgcggaatctcagttagcggtggagaggcagtatgtccggttcaatggcgactgcggaagctagcggcagcgatgggaaagggcaggaagtcgagacctcagtcacctattaccggttggaggaggtggcaaagcgcaactccttgaaggaactgtggcttgtgatccatgggcgagtctacgatgtcacccgcttcctcaacgagcaccctggaggagaagaggttctgctggaacaagctggtgtagatgcaagtgaaagctttgaagatgtaggacactcttctgatgccagagaaatgctaaagcagtactacattggtgatatccatccgagtgaccttaaacctgaaagtggtagcaaggacccttcaaaaaatgatacatgcaaaagttgctgggcatattggattttacccatcataggcgctgttctcttaggtttcctgtaccgctactacacatcggaaagcaaatcctcctgaggaggccttgctgaagttagaaagtgcatccactttggggcgaaaactagagacttgcttgggggctgcagaagtgccctctcctcgaatcctgccagttgcattcttcccccttggagccaagacgattggccagacatcacctcagatctgagaccagcgtcttccatctctcagagccttactcccaaagtacctgctcactgttccgtgttgaacaattgccggtgtttcctctcttcactggtttccatgagtacccttatatttcacaactttctgttcataagttatagtgacattgctctttggtaaaaatgcctgctttccaatactttgattgcatattagacattcttaacagggcggcagtctagtgttgaaagttttatttttccatttttcttttaagtaaattttttttaaaaaattctgatttagggctaggtgtggtggctcaggcctgtaatcctggcactttgggaggccaaggtgggaagatcgcttgaggccaagagttcaagaccagcctgggcaacatagcgagacccctatctgtattaaaaaaaaatctgatttaattcttttatttatcataaggggtttaattcctgaagtaaaggtttgcacctattaaacttaaaactgccaaatgatttttgttcttttatgtgcgtgataaaaatacaaagaatggtgtggccacctcctccctttcaagctagggcagcaggtagctcttcccagcccctgagcccagccccttcccaagtggtgccggacaaaaaactacatggccctttcgtgtcttgggggtggaaagggagggatgaattggggtgatagaaccctggtgaattcagagtaatctttctttagaaaactggtgttttctaaagaaacaggataggagtttagagaaggcaccaaagctttcactttggtttggcaccagtttctaaccatctgttttttctaccctagctatcttttattggtaaaatataaatgtataattatgtttgtagagctttaccaaggagtttccctccttttttgtttgttgattagcaaatttttgattctccattttccaaaagtaagagactccagcatggccttctgtttgccccgcagtaaagtaacttccatataaaatggtatttgaaagtgagagttcatgacaacagaccgttttccatttcatctgtattttatctccgtgactccaacttgtgggtttgttctgtttttccatgagaataaaatactggcggtttttttctcagatgtgtgttcattgagaagtaggttactagaattatgttactgtgtcttattggttcaatgatgatttctctggcatattagacttttattttttcccccatggaagcacttgaggaaataaatagtacactggctgttttctgccagcaactgtggtgatttttctccctgtcctttgagaattgctagtctgcttctgagccattgtcatatccagcagggagcagcttggttcaagaaggaccatagaggctgctcagcatctcctccctccctcccagcttgccagggatttgatgagacaggaaactg

SEQ ID NO: 59338 - DNA, 791 bp, Homo sapiens
gcggccgctgcggccatgggtgctgtcgctgggctccatggtgggcctcatgacctacgggcggcgccaattccagtccctggacacgacgatgcggcgcctgatcccgcccttccgcgaggcttcggccaagctaaccacgctggtggatgccgacgccgaggccttcaccgcctacctggaagcaatgaggctccccaagaacacacctgaggaaaaggacaggcgcacggcggccctacaggagggtctgaggcgggcagtctctgtgccgctgacgctggcggagacggtggcctcgctgtggccggccctgcaggaactggcccggtgtgggaacctggcctgccggtcagacctccaggtggcggccaaagccctggagatgggtgtgtttggcgcatatttcaacgtgctcatcaacctgagggacatcacagacgaggcatttaaggaccagatccaccatcgtgtttccagcctcctgcaggaagccaagacccaggctgcactggtgctggactgcttggagacccggcaggagtgacgaaaccccagggacagcaggaccttcgacgctggaaggatagcctcgcttcccaggtgcagctcccggcaggtctggacagttccacagagcacggtactggccctgtcctcagttcccgtccacccttcaaccagtggctcctgggagacttttcctccctgcctcagctccctgcccagccagcctcctgtctccagagaagttctccattaaaaaataatttagcaaatcaaaaaaaaaa

SEQ ID NO: 59339 - DNA, 754 bp, Homo sapiens
ggcacgagcggaaggggatctccgcccctgccactgggccatggagactgtggcacagtagactgtagtgtgaggctcgcgggggcagtggccatggaggccgtgctgaacgagctggtgtctgtggaggacctgctgaagtttgaaaagaaatttcagtctgagaaggcagcaggctcggtgtccaagagcacgcagtttgagtacgcctggtgcctggtgcggagcaagtacaatgatgacatccgtaaaggcatcgtgctgctcgaggagctgctgcccaaagggagcaaggaggaacagcgggattacgtcttctacctggccgtggggaactaccggctcaaggaatacgagaaggccttaaagtacgtccgcgggttgctgcagacagagccccagaacaaccaggccaaggaactggagcggctcattgacaaggccatgaagaaagatggactcgtgggcatggccatcgtgggaggcatggccctgggtgtggcgggactggccggactcatcggacttgctgtgtccaagtccaaatcctgaaggagacgcgggagcccacggagaacgctccaggagggcctgtccatcctcgctgtcctttccctgttctccccctgccccccgtctctatcctctgtggccttcagctaatttctgctcccctgagattcgtccttcagccccatcatgtgctttgggatgagtgtaaataaaacggggctgtggcttgggaaaaaaaaaa

SEQ ID NO: 59340 - DNA, 1308 bp, Homo sapiens
cagagccggttcctggaaagagctggttccctggcaggctggagggcaggagctggggccacgctggtctgggatagttgggcagggaggctgtctacctggtctccagaatggacggccctgtggcagagcatgccaagcaggagccctttcacgtggtcacacctctgttggagagctgggcgctgtcccaggtggcgggcatgcctgtcttcctcaagtgtgagaatgtgcagcccagcggctccttcaagattcggggcattgggcatttctgccaggagatggccaagaagggatgcagacacctggtgtgctcctcagggggtaatgcgggcatcgctgctgcctatgctgctaggaagctgggcattcctgccaccatcgtgctccccgagagcacctccctgcaggtggtgcagaggctgcagggggagggggccgaggttcagctgactggaaaggtctgggacgaggccaatctgagggcgcaagagttggccaagagggacggctgggagaatgtccccccgtttgaccaccccctaatatggaaaggccacgccagcctggtgcaggagctgaaagcagtgctgaggaccccaccaggtgccctggtgctggcagttgggggtgggggtctcctggccggggtggtggctggcctgctggaggtgggctggcagcatgtacccatcattgccatggagacccatggggcacactgcttcaatgcggccatcacagccggcaagctggtcacacttccagacatcaccagtgtggccaagagcctgggtgccaagacggtggccgctcgggccctggagtgcatgcaggtgtgcaagattcactctgaagtggtggaggacaccgaggctgtgagcgctgtgcagcagctcctggatgatgagcgtatgctggtggagcctgcctgtggggcagccttagcagccatctactcaggcctcctgcggaggctccaggccgagggctgcctgcccccttccctgacttcagttgtggtaatcgtgtgtggaggcaacaacatcaacagccgagagctgcaggctttgaaaacccacctgggccaggtctgaggggtcccatcctggccccaaagacccctgagaggcccatggacagtcctgtgtctggatgaggaggactcagtgctggcagatggcagtggaagctgccctgtgcaactgtgctggctgcctcctgaaggaagccctcctggactgcttcttttggctctccgacaactccggccaataaacactttctgaattgagaaaaaaaaaa

SEQ ID NO: 59341 - DNA, 1640 bp, Homo sapiens
  misc_feature (1)...(1640): n = a,t,c or g
ttttttttttttgccagtgcagaaacgtttaatagaaataaaaaggtctgcatagagccgaggctcggagccacccctctgccgcacatccagtacagagaggattctataaagttcacactttttcattaagtagtagtagaaatacggtgaggccctgagactggcctggtgagcgaggaaaggccgctgggcgcttccactctgcaggccggggctgaaataacccgagttccgttctcacagaaaggtgcggctgccacctcttgacacagaggccggatgggcaggtgtcctcgatggccaggccgtatcagggtacaaccgcagcagtgcaaggggcttcctcaaggacaaatggctaaaaatgtcacggtgaaaatgtcatccccaaagagttcgttctccctagacccgtgggggcaacccagccttcaccgtgacactggccatctgcaaagtgccaactgttcttcatcgagcacgtgattacgtcactttcttcctttttgtgcgttttgtgcagcccctgccaaaccagccccctaggatgggggccgagctaagcggtgcaccccggtccccaggcggggcctcctctctgcttctgcacagcgacttccgactgtggctgccttcttcaccagcacgcaggggagtcgccagtgagaaaatgggatcctgccacctgctataggcggggatctccaagcccagctcggccatgaggagccgcatgacgtcatcacacttcccatgtagcttcagggcagcccagtcatccttcggggtccactgcaggttcacgatgtaaagcttcggccgccggctagggggcttggtcatgcaccagaggcgtgggtacttctttagaaccttcaggctggaccctagacacaggatggtgtctgctctgctggcagcctcggtcgccgcttcccagttcagaggctgccccaacgtccccctctccccaaagtgcacaatggtgtcccgcagctgggtcccacacttgtggcaggtccggcctgtctggtgtctgtggagggcagtgcgctccgtcacatcgaacacccgcacgtactccctgttgggaacgcaggaggtacagacttcaatgtacatgttcccgtggagctcggagatggccgtgcgcggcagcccactcctcaggtggagcccgtcacagttctgagacaccacatgctgcaccagcttctgctcatgcagacgggtgatgctcatgtgggtgagggttggctcggcctcgctcaggtcggcagcactaacgcttctccctttctgaagcagtgtccacactccattagggccccggtagtctgggatagacgctgcttggagcgcagcgcgtcgagctccagcttcatgctggcgttctctgaggccagcttctccacctcctgctgcagctccgccttctgcttctccagctcctccttctgcgtcacccgcttcacgcggcagctggcagcgtacccgcggttcttgagcgtgcgccggcgctgcttcagctgaacgaactcctccttgaacaggccccgcaggtgctggttcagctcccgcaccgacatggtcagaattccnccgcnctgtcctagtgtcgtcgataggaccaccct

SEQ ID NO: 59342 - DNA, 1840 bp, Homo sapiens
tttcgtggagcatggcgtggagacacctgaaaaagcgggcccaggatgctgtgatcatcctggggggaggaggacttctcttcgcctcctacctgatggccacgggagatgagcgtttctatgctgaacacctgatgccgactctgcaggggctgctggacccggagtcagcccacagactggctgttcgcttcacctccctggggctccttccacgggccagatttcaagactctgacatgctggaagtgagagttctgggccataaattccgaaatccagtaggaattgctgcaggatttgacaagcatggggaagccgtggacggactttataagatgggctttggttttgttgagataggaagtgtgactccaaaacctcaggaaggaaaccctagacccagagtcttccgcctccctgaggaccaagctgtcattaacaggtatggatttaacagtcacgggctttcagtggtggaacacaggttacgggccagacagcagaagcaggccaagctcacagaagatggactgcctctgggggtcaacttggggaagaacaagacctcagtggacgccgcggaggactacgcagaaggggtgcgcgtactgggccccctggccgactacctggtggtgaatgtgtccagccccaacactgccgggctgcggagccttcagggaaaggccgagctgcgccgcctgctgaccaaggtgctgcaggagagggatggcttgcggagagtgcacaggccggcagtcctggtgaagatcgctcctgacctcaccagccaggataaggaggacattgccagtgtggtcaaagagttgggcatcgatgggctgattgttacgaacaccaccgtgagtcgccctgcgggcctccagggtgccctgcgctctgaaacaggagggctgagtgggaagcccctccgggatttatcaactcaaaccattcgggagatgtatgcactcacccaaggccgagttcccataattggggttggtggtgtgagcagcgggcaggacgcgctggagaagatccgggcaggggcctccctggtgcagctgtacacggccctcaccttctgggggccacccgttgtgggcaaagtcaagcgggaactggaggcccttctgaaagagcagggctttggcggagtcacagatgccattggagcagatcatcggaggtgaggacagcgtctgacgggaagcctgatctggaaccttcccaaggactcaggcaagcctttgtggctggatcatgagaggagggactccatcttgagccatgtcccccagccatggcatggctgcactgtaaacgccaatcggggggtcaccaggatcaaccgcaggctttcttcagtcccttggtcagaccataaactgcatttttgattctttgtggattcaaaccctaggatccatcagtcttgcaaggacattgaatattaggaggaaaaagtcatggaaaaaataaagccatttagaacctgggtttcaacgctagccctttctggtttgccataggccctgccaagatactgcaggtccatccaggcctctgctatctgcatctgcagtgggcttcccaggaacttgactgtctttcatttgatctttatttttttttatttaatattttaaactttattttaaaaatatttcaaacataagggcggggtgtggtggctcatgcctgtaatcccagcactttgggaggccgaggcgggcggatcacctgaggccaggagttggagaccatccaggccaccatggtgaggccctgtctctaccaaaaatacaaaaaattagccagatattgtggcagg

SEQ ID NO: 59343 - DNA, 2320 bp, Homo sapiens
ggtggcgctggcggttgctgtcagctgattcccggggttggtggcagcggcggtagcagcaatggactttctcctggggaacccgttcagctctccagtgggacagcgcatcgagaaagccacagatggctccctgcagagcgaggactgggccctcaacatggagatctgcgacatcatcaacgagacggaggaaggtcccaaagatgccctccgagcagtaaagaagagaatcgtggggaataagaacttccacgaggtgatgctggctctcacagtcttagaaacctgtgtcaagaactgcgggcaccgcttccacgtgctggtggccagccaggacttcgtggagagtgtgctggtgaggaccatcctgcccaagaacaacccacccaccatcgtgcatgacaaagtgctcaacctcatccagtcctgggctgacgcgttccgcagctcgcccgatctgacaggtgtggtcaccatctatgaggacctgcggaggaaaggcctggagttccccatgactgacctggacatgctgtcacccatccacacaccccagaggaccgtgttcaactcagagacacaatcaggacaggattctgtgggcactgactccagccagcaagaggactctggccagcatgctgcccctctgcccgccccgcccatactctccggtgacacgcccatagcaccaaccccggaacagattgggaagctgcgcagtgagctggagatggtgagtgggaacgtgagggtgatgtcggagatgctgacggagctggtgcccacccaggccgagcccgcagacctggagctgctgcaggagctcaaccgcacgtgccgagccatgcagcagcgggtcctggagctcatccctcagatcgccaatgagcagctgacagaggagctgctcatcgtcaatgacaatctcaacaatgtgttcctgcgccatgaacggtttgaacggttccgaacaggccagaccaccaaggccccaagtgaggccgagccggcagctgacctgatcgacatgggccctgacccagcagccaccggcaacctctcatcccagctggcaggaatgaacctgggctccagcagtgtgagagctggcctgcagtctctggaggcctctggtcgactggaagatgagtttgacatgtttgcgctgacacggggcagctcactggctgaccaacggaaagaggtaaaatacgaagccccccaagcaacagacggcctggctggagccctggacgcccggcagcagagcactggcgcgatcccagtcacccaggcctgcctcatggaggacatcgagcagtggctgtccactgacgtgggtaatgatgcggaagagcctaagggggtcaccagcgaagaatttgacaaattcctggaagaacgggccaaagccgcggaccgattgcccaacctctccagcccctcagctgagggccccccgggtcccccatctggcccagcgccccggaagaagacccaggagaaagatgatgacatgctgtttgccttatgagtgtggggtctggcaccctgcagcccaggtccccactgctctcacacccttaggctgggacctccctccctcctctggtgttaaggctgctttgggggtggcttgttacccccttttcctcctctttgaagacggagctgccccagctgtggctgggggtgtggaggcagtgggatgaactgggggacaggtctgcgctgcagtgggatctggctgctctgcctcctttcccaccccagctgaccatgagactttgctgagaagtggaggccccaggacaggctggctggctggctggctgcttgacccagtgtgactctccttcactgagtgataccctgctccgggcccatgccccaaggagcccttcagagcccacactgccagtcgaggcctggctggaggctggccacagtggaaattctgccgagcctcttgtcccttccctgctctgctgcatggggccccatggctttggctggccactgagggtagggtgtggaggtgtggaggccccctgaggagctgcggcggcccaggtacgaagctgcaactctgcgcgcagtgggcgagatctcatcagccccaggctgcaggtgaggcttcaggggatgctggggccccactgcccctccgctgccttgccctccatccttcctctgttccttctggccgggcaccacagcactggggctcacctcttggttgatcctcttgtactgggagaggtgccttttgtatccccgaattaaaggtagaaaaccaaacacaaaaaaaaaa

SEQ ID NO: 59344 - DNA, 1589 bp, Homo sapiens
ttttttttttttggcttttcatcctcttttgttaaaaacagactagcaccactgtgacgcgtgccacgagacaccaagacggcccagtcacagaggaaaaacccgaacacgacacagaactgaggagagtccaggcctgggctggtgggggccacacccgcgggccctggttgctgggaggcatggggctcaggcctgggcgcctcgggccggggtctccgggcctcacttggccggccgcgtgatgaagcgcgtggagaagtcgaacaggtcccgattgatcttgcgcaggttgcgcacctcgtcctccagctccgtcacacggacgcgcagctggtcctggccgccgagcacgctcttctccatggtgctgcacaggacggcctgcagctgctccgtgcggtccaggtagctgggctccgagccctgctggtggaggcccaggcgcagagtgaggcccccgtggcgcggctcgtccccgtgctcggcgcccagcaggtgcttgttgaagtggggcagcggcaggctgggcctgaagtctgagctcagcatgctgacgggcgccagcaggatggcggcattggtgactgggcctttgagggccaccgtccggatgcactgcttgctctgcacgtcccagaggcgcacggtctcgtcgtgggagcctgagagcagcacgctgccgtcagtggacactgacaggcaagtcacctggttcctgtgccctttgaagaccttcccggcgtcctgctctgggtggaagctcctctccctctgtccgggccaggtgaagaggtcgacctggaagatggagccctcactgcccccgcagaacatatggtgctcagccaggtccatggtcactgccatgatggacacgtcaaagaggacggagagcagcagctcccccgaggagacctcccatagcttcaccgtctggtccagtgaggaggtggccacccgggccagggggcccccaaagccgcagtgcaggtccgtgatggggagcgcgtggtgagaccagacgtgcctgggcgccggaatcctggaggggtcggcctgcagcacgctgcagaggctccaaaccagcaccaggcagtccttgccccctgagatgaagtggctgctgtcccctgtgaactgaaggcaggagacgtcctggtagtgtcgactcaggatgaccagaaggttcccggtggagacctcccacaggtggatgctttctgcaactcctgccaggacgtagagaccattgggtgatgcagtcagacaggtgacaggcccggggcacatgatcttctgctggagctggtccttccgctggagctcccaggcgctgatgtaattcttgcccagctgcgccgccagcagatactcgccattgagcagcgccaggccgcggggtcccgcctggccgccgcggtaggtgagcaggttggcgcccgagtgaagttcccacacgatgcagctccacatcggggccgccgagtccgtacacacggccacatacatgggcgccgcccccgcgcgtccgcggacgcgtgggcggacgggtgggtcgacccggaaatgccgtggcgcaatgtcag

SEQ ID NO: 59345 - DNA, 8029 bp, Homo sapiens
ttttttttttttacagggagaggaaattctgttaattccacgtttattaatcacacagctctctgcagactagacactaaaacacacaattgtcaaaaactagaaaaatgagttatgtccacgttttaaaagcaaaactttataaatttcttaccacactcattcccaagttttatcccacaaagtatagcatgaaacaatgacaacatacatattattcaagtaaaatgctatttaaaatagctgcacacaggtaattaaaacactaggatccagtttttagaggaaaaagtcatgtggcacaatttcaagttcataattgaagttaacagtaaaacagatttgctcacatttgcttctgatctttatttctgctgtctctctttagtagaataaagaaatggcacttcacataaaatcatatttaaaagctactaaaatggataaacagatgcagatcagctctttaatgagaatccctgcatagctggaggaagttcaaggataattgttttttcaaggcaaatagactcttgttacgtggctaatttcatgtacattatcatcgctgggaagttcctgctgagaactcacggtagctatgccagaaaagtactttcttcacaggaggtgttgaaataatgccggataaatgcaagtaaggtcaatatctccctcttggtctagatcaggagctggcaaactttttctttaaggagacaagtagtaaatcttttaggctttgcaggctatactgtccctgtcccaactattcaactctgccaagaaagcagtcccagacaataccataaatgaatgggtgtggctatgctctaataacattttgtttatggacactgaaatctgaatttcatagaattttcaggtgtcatgaaatattgttcttcttttgattttctgcccaatcatttgaaaacatataaaccattcttagctcacaggttgtataaaaacaggtggcaggccaggtttgattcgtgggccatagtttgccaacccctgatctaatggtccttttctagtccatgttgtaaaatgtatatatttttaaaatcccgttacatatggctactttatttaaaaaacaacaaaaacgttcagttaaaaataattctctttcttcccacaaccaagggccattttactaaacaataagctatttcctttaattagaaaattgatcaaggatatacaatgagtctctggcctcaatttatgaacccatgagccaaatatgcaagaagactcaaaatttgccacccagccaaagaatctactggcttacaatgttaaaaatttatttggaagtattcctgcacacatctcagcatcggtaatccagagttataaaaaataatgttggagcatttgtattctttttttgaggcggagtctcgctctgtcatccaggctggagtgcagtggcgtgatctctgctcactgcaagctccgcctcctgggttcacgccattctcctgcctcagcctccagagtagctgggactacaggcacctgccaccacatccgactaattttttttgtatttttagtagagacggggtttcaccgtgttagccaggatggtctcgatctcctgatgtcgtgatctgcctgccttggcctcccaaggtgttgggattacaggcgtgagccactgtgcccagcccagcatttgtattcttaatagaaaaaggatggatacatctaaatcacaagtaattaaaatgttatataaaaccacctaaaaactacacaaataaagagaagacattaactgtcaaaatgctgagtatgtgattcttgacagggccggggcactgtcactaggagatgaatttcagctcttccttctccttgggaccttgggaatgtggctagtacactccaggccagatgctaggcagctccctgtgtgcccagggtcttgccagacctttagttactcaaccatagcttcccagtggctcaatgagggatgttaaatcctaggtggggttcaggagtaattgcatccagcactactttcattcacattttccttccacaacccagaataaccacaagatgtaagtggagtctacacagacagagatggggaaaggaaggtgcttcgtctccacctacttggccgcctaattggatttgcatctgtttaagattacggagtctttctttcaaagtgagaggcaacgccggtcatagcggcttttgttttttgtgcgttatttgaatgatgagctgtaaaaactctcattagataaaaggtgcctgaaattcaagggctcatgcctcttctacaaagtgggttggcaattacagaaattctttcccttttgggttgactgtggtgaaagtacttttgctcttttggaggtgagggagcagcaccacaccaggacagaaagaacaggctcaggtgacagccacttactcaggctcaggtcggtgggcaagtgggcactggcctcctcccatcttggcaaagccactgacagtaggcaaggaagggctgggcggtgctgctcgtaacaatggctcttgtatgtccttagaattttcatttttttgtgaagtgcttttactttctctctggctcacagtatcgcaaggagctaagtaaggcctgtatggaatctccactgtatccatgggatgggaggtgctgaacacacgcccaaggcaacaaggccactcagggaaggagccaggccatgccactgcgtgccttccatcctaccaagctgcttctgctattctttgctttacacttcagctcatttactcaaggaaatgaaatgaagtggcaaacaggacagaaatgaaaatagaattctttaagtggtaaatttgggacaataaaggcatcaattaaaatatggttcaggaatagggagaggtgctccttcgtgcctcacagaagcacggacaattctgtgctatttattgtctttgaaagagggttcactcaaacctctgccgcaacacctccagatgcacattcggtgtcttctgtgcctgagctggcagatgcccggggaggggtgctgtgcccctcacctgccctgccagtcacagtcaagggtctccttcaaggtgctctgggcccatgttctgtagcgacatgggggatggttgtgccactgcccaggcagtgatcaagcctttgtgacggcccatggggctgggcctgccttgtgctgtgcctgctctgaggcagctggggctgtggtggggatccagggcctcattctgtaaacccagtgctggttctctgggagtctgcagccacaggcacgtggcacatattggtccctagttacattaagggcaggggtaggatttgcatctgtttaagattacaaggactggatgagttctgaaaaattcataattctgaaaacctattagtttatttaaaataatggatggcatgtacctatatatgtagataagtctccttttaaatttttttaaagaaccaaagaatcctacaagcccccgtaacacacatacttgagttccagatactcatcaatgccatacttggacccctctcgcccaaggccggactgcttcactccaccaaaagggcactccacagaggaaattaatccttcgttgacgccaaccatgcccacttccagctgctctgccactctccagatctgggctgggtcttgagagtaaaaataacctgctaacccaacatcagctgcgttagcgattgctatagcctcctcctctgtatcgaacttgataactggtgccagaggcccgaaagtctcttcatgagtgcacagcatgtcctgggtgacattgcacagcagggtaggctcaaagaaattttttccaagttggtgtcgttttccacctgtcacaacggtggcacctttagaaacggcatcattcacctgtttctccaccttttctaccgctttttcattaattaatgggccctgagtagttccttcctcaaatccattacctacgcgcaggttcttcttcatggcctcggcgaatgcttttacaaaggcatcatggatgcccctttgcaccaagaattggtttgagcaaacacaagtctgtccagtgttcctaaatttagatgccatggcccctgctacagcctggtccacgttggcactgtcaaatactataaatggagcaaggccgcccagctccatagagacccttttcacagagtttgctgcgtggtgcaacaggatctttcctgtagttgttgaaccagtaaaggaaattttggacaccagaggatcagtacaaattgcctcccctacttccttggcattctttcgagaacagggaataacattgtatacacctgaaggaatcccagcctggcttgcaagcaacaatggatccaaatcaagaagaaatccctgatttacctcagccagggccagggcggagaagggcgtgtcttcggcaggcttcaccacgacagtacagccggctgccagggcggcccccaccttccgggtgatcatggcactggggaaattccacggggtgatgactgcagccacgcctatgggctgcttgaggaccagggcccgcctgtcctttgccggggtgtagataatgtctccgtaaacacggcgggcttcctcagagaaccactctaggaaaaaggcggaatagagaatttctccatgtgcctccttcagtggctttccactttcagctgtgattattctggcaaggtcatccttattttgtatcattaaattgtaccacttccgaagtaatgaactcctctccttggcggagacctccctccagcggcagaaagcctcgtaggcagcgcgcacggcggcgcgggcctctcgcaccccgcagtcggctaccatgcccagagcggcgccgctggcaggagtcttgcacggggaaggtggcggcggccgggagccagcggccgcccacgaagctgtcggtgcgcagcagcgccgcagagaggcccgccaggcgcccagcgtagcagcggagctgggccgggccgggcgcaggcccggaggcagggaccaggccgccggcgcgggggcggaggcggcagcctggaaacgtcgacccgaggcgccgggccccacagctccgcagccaaatgcaggtcgccatggcccgggcaacgacggcgacaggaaacaggttgtggcctggcctgctgatcatgttgggttctctctgccatagaggttcaccgtgtggcctttcaacacacatagaaataggacacagagctctggagtttcttcagcttcacaatgggcgtgttaactacagagagctgttactagaacaccaggatgcgtatcaggctggaatcgtgtttcctgattgtttttaccctagcatctgcaaaggaggaaaattccatgatgtgtctgagagcactcactggactccgtttcttaatgcaagcgttcattatatccgagagaactatccccttccctgggagaaggacacagagaaactggtagctttcttgtttggaattacttctcacatggcggcagatgtcagctggcatagtctgggccttgaacaaggattccttaggaccatgggagctattgattttcacggctcctattcagaggctcattcggctggtgattttggaggagatgtgttgagccagtttgaatttaattttaattaccttgcacgacgctggtatgtgccagtcaaagatctactgggaatttatgagaaactgtatggtcgaaaagtcatcaccgaaaatgtaatcgttgattgttcacatatccagttcttagaaatgtatggtgagatgctagctgtttccaagttatatcccacttactctacaaagtccccgtttttggtggaacaattccaagagtattttcttggaggactggatgatatggcattttggtccactaatatttaccatctaacaatcttcatgttggagaatgggaccagtgactgcaacctgcctgagaaccctctgttcattgcatgtggcggccagcaaaaccacacccagggctcaaaaatgcagaaaaatgattttcacagaaatttgactacatccctaactgaaagtgttgacaggaatataaactatactgaaagaggagtgttctttagtgtaaattcctggaccccggattccatgtcctttatctacaaggctttggaaaggaacataaggacaatgttcataggtggctctcagttgtcacaaaagcacgtctccagccccttagcatcttacttcttgtcatttccttatgcgaggcttggctgggcaatgacctcagctgacctcaaccaggatgggcacggtgacctcgtggtgggcgcaccaggctacagccgccccggccacatccacatcgggcgcgtgtacctcatctacggcaatgacctgggcctgccacctgttgacctggacctggacaaggaggcccacaggatccttgaaggcttccagccctcaggtcggtttggctcggccttggctgtgttggactttaacgtggacggcgtgcctgacctggccgtgggagctccctcggtgggctccgagcagctcacctacaaaggtgccgtgtatgtctactttggttccaaacaaggaggaatgtcttcttcccctaacatcaccatttcttgccaggacatctactgtaacttgggctggactctcttggctgcagatgtgaatggagacagtgaacccgatctggtcatcggctccccttttgcaccaggtggagggaagcagaagggaattgtggctgcgttttattctggccccagcctgagcgacaaagaaaaactgaacgtggaggcagccaactggacggtgagaggcgaggaagacttctcctggtttggatattcccttcacggtgtcactgtggacaacagaaccttgctgttggttgggagcccgacctggaagaatgccagcaggctgggccatttgttacacatccgagatgagaaaaagagccttgggagggtgtatggctacttcccaccaaacggccaaagctggtttaccatttctggagacaaggcaatggggaaactgggtacttccctttccagtggccacgtactgatgaatgggactctgaaacaagtgctgctggttggagcccctacgtacgatgacgtgtctaaggtggcattcctgaccgtgaccctacaccaaggcggagccactcgcatgtacgcactcacatctgacgcacagcctctgctgctcagcaccttcagcggagaccgccgcttctcccgatttggtggcgttctgcacttgagtgacctggatgatgatggcttagatgaaatcatcatggcagcccccctgaggatagcagatgtaacctctggactgattgggggagaagacggccgagtatatgtatataatggcaaagagaccacccttggtgacatgactggcaaatgcaaatcatggataactccatgtccagaagaaaaggcccaatatgtattgatttctcctgaagccagctcaaggtttgggagctccctcatcaccgtgaggtccaaggcaaagaaccaagtcgtcattgctgctggaaggagttctttgggagcccgactctccggggcacttcacgtctatagccttggctcagattgaagatttcactgcatttccccactctgcccacctctctcatgctgaatcacatccatggtgagcattttgatggacaaagtggcacatccagtggagcggtggtagatcctgatagacatggggctcctgggagtagagagacacactaacagccacaccctctggaaatctgatacagtaaatatatgactgcaccagaaatatgtgaaatagcagacattctgcttactcatgtctccttccacagtttatttcctcgcttcctttgcatctaaacctttcttctttccgaactttttgcctatagtcagacctgctgtaccacctatttcc

SEQ ID NO: 59346 - DNA, 2400 bp, Homo sapiens
ttttttttttttaccaaattgccttttatttacatacgagaaaatctcaccgtgtgtccagctggccccgtcacggccgctgaaggcagcactgctgggcaaggagaaacaaggccacacctgcaacctgggctgcagggtgaggtggctccctccgcacaggccccaggacacccaccatggcacaggccaggctgctgcccccacacggcctccacgaggtcacgggtccatctccacaaccccaaggcagtaagcagtgtgcctcgctttcgccaagctgggccaatgaagaggccccgcccccaccctcaggccccgccctctccccttggaaaacaggtggttttttcctaacacaggaaaacagaaaatgagcacgctttctatggctgccaaagtacaaggagaggctctgccctgggagccactgcatggatggtgggcaaggtccgggagccagctccaaggagcaggaagcagggggccatgacggcaggacaggcccagccatagccccgggaagagagactgccctgtacatccaggtccgggagcctcttccggctgagcagggccgcgactcggcatggccccagcacccgagcaggtctggagggccctcagagcggggcaggggcgggcacgctggggaggggcagctccagggccggcgtctccgcagcctgtgccgggctgggcttccggtgatccagctgttccagcttctcgccgagctgggagtaaagctccttcactgcctctccgctctggcctgtaggctccagggccttctgcaacgcctccagcttagacggggccaccctggggtgcaggtgaatgaggagccgcagcgcgtgccggtgcacgttctccttccttggagaggcggtgaggaagaagccatcgaagaggctgctgcagaagtcctcaagggcaaattcgtcggccagcagcgcaaggttgcccgtgagcaggtggaggaagatgtcgccaaaggccaagtcgccaaaggtctccaccagcccgggcagcaggcggaggagcgcgttcttgttcctctgcttggtgatgtgcaggacgtagtacagccccacctcgcaggccatgcgctgctcctgcagaaacttagtgaagctttcgggaagtgtgtttggatatgagactggggctttctcctcagccggaagtttctgatccacattgaaagtgtagtcatccaccaggaaggacatgagcatcgggaggaacctggtgatgagctctacctccatcttgggctccttgaagacctggctgtcgatcatgtcccaggctccctggcccagcgccagcagccggagcagcagcaggaggtcggggctgtccctgggcagtgtctcctggccgaccagctcctgcaggtgcctgactgtgctcagtgccagcgtgttgatggcgaaggggtcacacaggatcatggacaggtcccccagcacctgctcctggcccttcttgacgccatcgagaaacccctgcagctcccgcgccctcttgctgtccacgaaccgctctcggatgcaggcgtccaggcaccaggtgaacttgtggcacgggtccacggtgcagatttcacccacgtccaggtcgtgcagggacatgagcagctcagcccgcagcgtgcagtagtgcacattccgcgtgcgcaggaagagcgtgcgcagaaactgcagcaccatgtcgtacagcttcacgttcttccccaccatccgcgtcagccgctgcaccacctcgccctggcgcctggtcttgggggaaggactgaaaaagttgtgcaggacagagagctctgtactgaagagagcgctctccttctccaggatgtactgcttcaggagtggggaaacctcgtccccgaagagggcctggttgtcttgccagatctgccgcctcacctccacggcgcaggctcgatacagctccttgtcagccataaccagcttcagttttttctccggaaccttgggcaggtgcttcatgacgcacatcaccacgggctgcagggacggcatcttcaccagagaaaagctcttctccagaaggtcttccagcttcttgtacctttcctcagccttcccctccgaagcgatggctgacactcgctccagcagcttgtcccgcagctcatcgaataccgactggtggaactccagccgcggcgtcccgtgcaggtccaagaaggggagggctgactgaagagatggcagcagcacaccattctctgtctggaactgctcgatggccttgagcggctccgtgcagttggtcagggtctccttcaggtcctcgccgttggccacgcccaggtcctgcagccccgcgaacatggccgaggccccggccaccgcccggcctcgtgcc

SEQ ID NO: 59347 - DNA, 858 bp, Homo sapiens
ggcggctgccgtgagctgactgacgttccgggaacgccgcagcagcccgcgccgcccgcaggctagccgagccgcgccgcccgggcctcgcccgcccgcctgcccgccatggtgtcatggatcatctccaggctggtggtgcttatatttggcaccctttaccctgcgtattattcctacaaggctgtgaaatcaaaggacattaaggaatatgtcaaatggatgatgtactggattatatttgcacttttcaccacagcagagacattcacagacatcttcctttgttggtttccattctattatgaactaaaaatagcatttgtagcctggctgctgtctccctacacaaaaggctccagcctcctgtacaggaagtttgtacatcccacactatcttcaaaagaaaaggaaatcgatgattgtctggtccaagcaaaagaccgaagttacgatgcccttgtgcacttcgggaagcggggcttgaacgtggccgccacagcggctgtgatggctgcttccaagggacagggtgccttatcggagagactgcggagcttcagcatgcaggacctcaccaccatcaggggagacggcgcccctgctccctcgggccccccaccaccggggtctgggcgggccagcggcaaacacggccagcctaagatgtccaggagtgcttctgagagcgctagcagctcaggcaccgcctagaatccttcgatctcgcttcaggaagaaaagtacctcatcctcggccaccgaaaccacgtgagtgagatgagccaacagcaccggatccacagaatgtttcttctctgccttaaagagctattcactaataacatagaaatccgc

SEQ ID NO: 59348 - DNA, 1510 bp, Homo sapiens
tggaggtggagctggcagatccggcgggcagcgatggccgcttggcccccggcagcgcatgcagcggcagcggcagtggcagtggtgggcggcggcggcgagccaggcgccccaagaggaccatccatattgactgtgagaagcgcatcactagctgcaaaggcgcccaggccgacgtggtgctctttttcatccatggtgtcggcggttccctggccatctggaaggagcagctggacttctttgtgcgcctaggctatgaggtggtggctcctgacctggccggccacggggccagctctgcgccccaggtggccgcagcctacaccttctatgcgctggctgaggacatgcgagcaatcttcaagcgctatgccaagaagcgaaatgtgctcattggccattcctacggtgtctctttctgcacattcctggcacatgagtacccagacctagtgcacaaggtgatcatgatcaatggcgggggccctacggcgctggagcccagcttctgctcaatcttcaacatgcccacctgcgtcctgcactgcttgtcgccctgcctggcctggagcttcctcaaggccggcttcgcccgccaaggagccaaggagaagcagctgttaaaggagggcaacgctttcaacgtgtcatccttcgtactccgggccatgatgagcggccagtactggcccgagggcgacgaggtctaccacgccgagctcaccgtgcccgtcctgcttgtccacggcatgcacgataagtttgtgccggtggaggaagaccagcgcatggccgagatcctgctcctggcattcctgaagctcatcgacgagggcagccacatggtgatgctggaatgccctgagacggtcaacacgctgctccacgaattcctgctctgggagcccgagccctcgcccaaggctctaccggagccactgccggcgcctccagaagacaagaagtagccgctgggccggcggggcatcgcttggtgagcacagccgcagcaggaggaggcccgagcctgcgccaggtctgcagcgcagaccacctgggcgggccgttcgctccggtgggcggggccaggtcagggagacgcccccaggctgcctgggcggggcgtggcatccgagggagcccagcggacattccgctctccgcttccgtcccgcggggcccatcggcgttttggggccgcagccgggaccctcacggaagatgaccttgtacagaagctctccctcaccttccccccaacgccacggccaaggcaggccccccaccccgctgtcttccgtgtcagccgtgcttgatcctgggacccacgagccccacagggaccctcgaggccccatcccgttatccgagacccttcctaccccccattcctcggcgctgggatctatttttgcccaagggggggggatgggggggctggcgccaccgaacctgcacatctcaacttgtaactcaataaacagaagtgacaatcggaaaaaaaaaa

SEQ ID NO: 59349 - DNA, 2177 bp, Homo sapiens
ccgttgctgtcgcctcaaaggattggctaaaagcaagcaactggattgaacaccctaagaagaaagattcacactgcaccaggagacatcagaaagaatgaaaactctgccgctgtttgtgtgcatctgtgcactgagtgcttgcttctcgttcagtgaaggtcgagaaagggatcatgaactacgtcacagaaggcatcatcaccaatcacccaaatctcactttgaattaccacattatcctggactgctagctcaccagaagccgttcattagaaagtcctataaatgtctgcacaaacgctgtaggcctaagcttccaccttcacctaataacccccccaaattcccaaatcctcaccagccacctaaacatccagataaaaatagcagtgtggtcaaccctaccttagtggctacaacccaaattccatctgtgactttcccatcagcttccaccaaaattactacccttccaaatgtgacttttcttccccagaatgccaccaccatatcttcaagagaaaatgttaacacaagctcttctgtagctacattagcaccagtgaattccccagctccacaagacaccacagctgccccacccacaccttctgcaactacaccagctccaccatcttcctcagctccaccagagaccacagctgccccacccacaccttctgcaactacacaagctccaccatcttcctcagctccaccagagaccacagctgccccacccacacctcctgcaactacacaagctccaccatcttcctcagctccaccagagaccacagctgccccacccacacctcctgcaactacaccagctccaccatcttcctcagctccaccagagaccacagctgtcccacccacaccttctgcaactaccctagacccatcatccgcctcagctcttgctgtcccgcggagctgcagactgaagggagcaacggcaagaaagaagtgctgagcggtttccaagtggtgctggaagacacagtgcttttccctgagggcgggggacagcctgatgaccgtggtacaatcaatgacatctctgtgctgagagtgactcgccgtggggaacaggctgatcatttcacccagacacccctggatccaggaagccaggttctggtccgggtagattgggagcggaggtttgaccacatgcagcagcattcagggcagcatctcatcacggcagttgctgaccatctatttaagctgaagacaacatcatgggagttagggagatttcggagtgcgattgagctggacaccccctctatgactgcagagcaagtagctgccattgagcagagcgtcaatgaaaaaatcagagatcggctgcctgtgaatgtccgagaactgagcctggatgatcctgaggtggagcaggtgagtggccggggtttgcctgatgatcatgctgggcccattcgggttgttaacatcgagggcgttgattccaacatgtgctgtgggacccatgtgagcaatctcagtgaccttcaggtcattaagattctgggcactgagaaggggaaaaagaacagaaccaacctgatatttctgtctgggaaccgggtgctgaagtggatggagagaagtcatggaactgaaaaagcactgactgctctgcttaagtgtggagcagaggatcatgtggaagcagtgaaaaagctccagaactccaccaagatcctgcagaagaataacctgaatctgctcagagacctggctgtgcacattgcccatagcctcaggaacagtccagactggggaggtgtggtcatattacacaggaaggagggtgattcagagttcatgaatatcattgccaatgagattgggtcagaggagaccctcctgttcttaactgtgggcgatgagaaaggtggtggactcttcttactggcagggccacctgcgtctgtggagaccctggggcccagggtggctgaggtcctggaaggcaaaggagcagggaagaaaggccgttttcagggcaaggccaccaagatgagccggcggatggaggcgcaggcgcttctccaggactacatcagcacgcagagtgctaaggagtgagggcttagggcactcacctcctgtttccacaggaatcttttggtcaataaaatagattgactcaaaaaaaa

SEQ ID NO: 59350 - DNA, 2211 bp, Homo sapiens
atttgagaccccattgatgagctctttcactgcgcacctgccctgccagtggcctttctggtcccagctactgaaaccggtgagctgctccagggtgaggctgctttctggctcctggtgtatttggacacagataggcccttagtgtccagaggcgccccatgcagccctcatggtcagcaggacacccaggatagaccccctccacgcagcacctgggccctgggagcggctgcttttaggatgccacctgttcctgggcgccttgtttttagcttctgacctgaagatgagcgggggagcgcggtggcgagggcacgtgggcgtggctcacggtctcctctctgtggcaggtacatgtcccagagcaagcacacggaggcccgggagctcatgtactcgggagccctgctcttcttcagccatggccagcaaaacagtgcagcagacttgtccatgctggtcctggagtccctggagaaggcggaagtggaggtggctgacgagctgctggaaaatctggctaaagtgttcagcctgatggaccccaactctcctgagcgcgtgacctttgtgtccagagccctgaagtggtccagtgggggctccgggaagctgggccacccccggctgcaccagctgctggccctcaccctgtggaaagaacaaaactattgtgagtcgaggtatcattttctgcactcagcggacggggagggctgtgccaacatgctggtggagtattccacgtcccgcggcttccgcagcgaggtggacatgttcgtggcccaggccgtgctacagtttctctgtttaaaaaacaaaagtagcgcatcggtggtcttcacgacgtacacccagaagcacccgtccatcgaggacgggcctccgtttgtggagccgctgcttaacttcatctggttcctgctgctggctgtggacggtgggaagctgacggtgttcactgtgctgtgtgagcagtaccagccatccctccggcgggaccccatgtacaacgagtacctcgaccgcataggacagctgttcttcggcgtcccgcccaagcagacgtcttcctacgggggcctgctcgggaaccttctgaccagcctcatgggctcctcagagcaggaggatggggaggagagccccagcgacggcagccccatcgagctggactgaactggccaggccacgtggagacaccacggtcgacgacggctggagggacgtttcagaggcgagtcctgggtggctcctcgccttgggggctcctggccctgaggctggcggtggccgcatgccggcgcgtgtctgtttctgtgcggcggctcagggtggcacggctgctgctcactgtgctgctgggacccaagagtggggcgtcgcccctgctggccgccgcgtcccccgagattgacccacaataaagcacaggccttaccgcggcgtcaccctctcccactcctttgttctgggtcctttcgggagggctgatgggcagcacaggaggcccgtcctcggggggctgcgcacatcacgctccttgccgggcgtccggcacagctgcggtcaccaaagcaggtgctggccctcggacctgagagcccagccagggcccatgtggtctgcaaatgggagcggctgtttttgaacacggggtcattctgcagtcaggacgaaccggtccccgtcgcagacggagtgcacgtgccctgcgccacatcctcacgctcggtggagggacgcgtgcggcgggacggtgcctacgggtacttgcagctgtgtcccatgtggcatcccagagctgcgccctgctggtctctgtgagcgccacgctgctgtgctggaaatgccgctttaaaaagggataccgtgggactctgcccgtctctttcataacgcaatatttatttgtattgggtgacgattgattctttcgacctaacattttgggttttaaccaaataaccggtccaggagtgagcagctccgttctgtcagatgctactccaaatgttaccagaacgatgacaaaaggggagacgctctattttttcacagttaaatgacagttgtagattgatacgcagttgtgcatgggaaggggaaacgcacagctttatttactgtaaagtggaatttcaggaaggcttgtgtgaaccgttgcgcataaataaaccctttctaccgggctgtgcaaaaaaaaaa

SEQ ID NO: 59351 - DNA, 901 bp, Homo sapiens
ggcacgagggggggcgggggtggtggggcttcttgactgagccgctgagggtgcgggctgaccctgtaagtggctgcggcgggaagatggcggagctgcgcgtgctcgtagctgtcaagagggtcatcgactacgccgtgaagatccgagtgaagcctgacaggaccggtgtggtcacggatggtgtgaagcactccatgaaccccttctgtgagatcgcggtggaggaggctgtgcggctcaaggagaagaagctggtgaaggaggtcatcgccgtcagctgtgggcctgcacagtgccaggagacgattcgtaccgccctggccatgggtgcagaccgaggtatccacgtggaggtgcccccagcagaagcagaacgcttgggtcccctgcaggtggctcgggtcctggccaagctggcagagaaggagaaggtggacctggtgctgctgggcaaacaggccatcgatgatgactgtaaccagacagggcagatgacagctggatttcttgactggccacagggcacattcgcctcccaggtgatgctggagggggacaagttgaaagtggagcgggagatcgatgggggcctggagaccctgcgcctgaagctgccagctgtggtgacagctgacctgaggctcaacgagccccgctacgccacgctgcccaacatcatgaaagccaagaagaagaagatcgaggtgatcaagcctggggacctgggtgtggacctgacctccaagctctctgtgatcagtgtggaggacccgccccagcgcacggccggcgtcaaggtggagaccactgaggacctggtggccaagctgaaggagattgggcggatttgagcccctcccagagatggcaataaaactgactctcaacaaaaaaaaaa

SEQ ID NO: 59352 - DNA, 1763 bp, Homo sapiens
gccatcatggcggcggccacgaggcctgtccggctcccggaagcaggctgtgaggggcgggagcgctgctggaacccgagccggagccggagccacagcggggagggtggcctggcggcctggagccggacgtgtccggggcgtccccgcagaccggggcagcaggtcgtccgggggcccaccatgctggtgactgcctaccttgcttttgtaggcctcctggcctcctgcctggggctggaactgtcaagatgccgggctaaaccccctggaagggcctgcagcaatccctccttccttcggtttcaactggacttctatcaggtctacttcctggccctggcagctgattggcttcaggccccctacctctataaactctaccagcattactacttcctggaaggtcaaattgccatcctctatgtctgtggccttgcctctacagtcctctttggcctagtggcctcctcccttgtggattggctgggtcgcaagaattcttgtgtcctcttctccctgacttactcactatgctgcttaaccaaactctctcaagactactttgtgctgctagtggggcgagcacttggtgggctgtccacagccctgctcttctcagccttcgaggcctggtatatccatgagcacgtggaacggcatgacttccctgctgagtggatcccagctacctttgctcgagctgccttctggaaccatgtgctggctgtagtggcaggtgtggcagctgaggctgtagccagctggatagggctggggcctgtagcgccctttgtggctgccatccctctcctggctctggcaggggccttggcccttcgaaactggggggagaactatgaccggcagcgtgccttctcaaggacctgtgctggaggcctgcgctgcctcctgtcggaccgccgcgtgctgctgttgggcaccatacaagctctatttgagagtgtcatcttcatctttgtcttcctctggacacctgtgctggacccacacggggcccctctgggcattatcttctccagcttcatggcagccagcctgcttggctcttccctgtaccgtatcgccacctccaagaggtaccaccttcagcccatgcacctgctgtcccttgctgtgctcatcgtcgtcttctctctcttcatgttgactttctctaccagcccaggccaggagagtccggtggagtccttcatagcctttctacttattgagttggcttgtggattatactttcccagcatgagcttcctacggagaaaggtgatccctgagacagagcaggctggtgtactcaactggttccgggtacctctgcactcactggcttgcctagggctccttgtcctccatgacagtgatcgaaaaacaggcactcggaatatgttcagcatttgctctgctgtcatggtgatggctctgctggcagtggtgggactcttcaccgtggtaaggcatgatgctgagctgcgggtaccttcacctactgaggagccctatgcccctgagctgtaaccccactccaggacaagatagctgggacagactcttgaattccagctatccgggattgtacagatctctctgtgactgactttgtgactgtcctgtggtttctcctgccattgctttgtgtttgggaggacatgatgggggtgatggactggaaagaaggtgccaaaagttccctctgtgttactcccatttagaaaataaacacttttaaatgatcaaaaaaaaaa

SEQ ID NO: 59353 - DNA, 954 bp, Homo sapiens
ttttttttttttcctgaatgacacccataacagctttattttcaaaggcgggatccctccccgggcttgtgatgggacggcgctgtgggcccgagcagcagagccgtgcaggacaggcatgggcaggggtggggcagctggcccgggaggccggcaggtcccagaagacacctcacacgggttccatctgcagctcctccccgtccacagcctcaatctggtggaaggcagcgtgggagccgatgaccaccagggtggctcccagcacccagaagacggccgagcccgcaccagccagccagaagaaggggaaggagatgcctccagccagagcatactgatgcgctgggctcacctctcggccaaagagcacaagcttggactccaaggtgcgcagatagagaatgtaacaggcgccgaaaaagacagccagagccaccagcaacataggggacgtcaccacacagtacaggatgaggcccaggaacacgaacacatagttgctctggtagtactccacgttgcgtacgaggcgctggcacagctctcccaggttgcggggccgtgagaagcgctgctggtccacgaaggtgctccagggccggatggtcgcgcggcgccgctccagccactcccggcctgcaccggagggaatcagcttcggcagcagggtcgtgccgctcagcccttccgcctcggcatctttctgctggtccttctgcgctgccatgtttgcgtcgtgaggggtagagctgctgtaaccagcccggtaccctgaagaccccgccggccccgcccgacgccggccccacccagcggagtcgacgtggcgcagccccggagcagctggggactgtagttctgccgccgagtattgtgggagttgtagtcctgacggtgactaagaggatgggcgctatatggcgggttttacggccttcatcagggtccaat

SEQ ID NO: 59354 - DNA, 2159 bp, Homo sapiens
aaactgattgcaggcagtatgtaggcatctttcattcagaatggacattaatatcttgaatagagaagaaagcttttagaaatgtatcatttgtcaaaattgcatgccttttaaaaaatgataaagagagatgctgagtgttttgtatgttagcatcgactctttctttttatttctgttcagactcaagtttttagaagctagaatatagatccctttaagaaaaaaaaaggaagaaagaagaatttgctggttagtcgacctctgtttaagaagtgcttcatcctcctcctccacctctccgtggtgtttctctgcagctctctgtaggttagggttctgtgctgcctggcagaatgctcatgtgttagctgaatagatatcatcgacagacatagaccactataggttttctttccttgtgaattccaaaatgccatccaaagagtcttggtcagggaggaaaactaatagggctgcagttcacaaatcaaaacaagagggccgtcagcaagatttattgatagcagccttgggaatgaaactgggttctccaaagtcgtctgtgacaatctggcaacctctgaaactctttgcttattcgcagttgacatcacttgttagaagagcaactctgaaagaaaacgagcaaattccaaaatatgaaaagattcacaatttcaaggtgcatacattcagagggccacactggtgtgaatactgtgccaactttatgtggggtctcattgctcagggagtgaaatgtgcagattgtggtttgaatgttcataagcagtgttccaagatggtcccaaatgactgtaagccagacttgaagcatgtcaaaaaggtgtacagctgtgaccttacgacgctcgtgaaagcacataccactaagcggccaatggtggtagacatgtgcatcagggagattgagtctagaggtcttaattctgaaggactataccgagtatcaggatttagtgacctaattgaagatgtcaagatggctttcgacagagatggtgagaaggcagatatttctgtgaacatgtatgaagatatcaacattatcactggtgcacttaaactgtacttcagggatttgccaattccactcattacatatgatgcctaccctaagtttatagaatctgccaaaattatggatccggatgagcaattggaaacccttcatgaagcactgaaactactgccacctgctcactgcgaaaccctccggtacctcatggcacatctaaagagagtgaccctccacgaaaaggagaatcttatgaatgcagagaaccttggaatcgtctttggacccacccttatgagatctccagaactagacgccatggctgcattgaatgatatacggtatcagagactggtggtggagctgcttatcaaaaacgaagacattttattttaaatttttaatttgaggggaaaagaaatgttttacagatgaaggaatgttttatagtaatttaatttgctcctgtagctgcattatttcttgattagaggtttgggcatataaccagattaaagtgaaggaactttctgttgtttttgtagcaccgctcagctgtcttgtaaaacagtgaacacacgctttctggttctagtaatcctgggtgtttatcacgttcagagaaactcaagctattgcatgattagccccctatctggcaaggaaaccccatacagaagaaacaacaaacctgcgcctgcaccgcctctgcgtcctgggtagtctgtgcttgtaatccagcatgtttcacagagtaagcctgttgtgactttgcttttggggtctatgtcattggtttctgatgcttgtacaaacacgcacacacaaatggataaaacagcacctctggctgttacattaccataaaccatatcacatgcctacattttacaaatgatttctggtttctcttagttcttctctaacatagtactttctttccagcaaaagcaaaatgtgttttcagatttgttactttaataaaggttatccataccaataaaaagtgtacaacacagcattttctgttaaattattattggttttcagttgtaatttggtattttttctggcatgcgtttattaatttattaaattggcttttagaaaaaaaaaa

SEQ ID NO: 59355 - DNA, 412 bp, Homo sapiens
tacggctgcgagaagacgacagaaggggagtctgaagatggcggcctcagcagcgcgaggtgctgcggcgctgcgtagaagtatcaatcagccggttgcttttgtgagaagaattccttggactgcggcgtcgagtcagctgaaagaacactttgcacagttcggccatgtcagaaggtgcattttaccttttgacaaggagactggctttcacagaggtttgggttgggttcagttttcttcagaagaaggacttcggaatgcactacaacaggaaaatcatattatagatggagtaaaggtccaggttcacactagaaggccaaaacttccgcaaacatctgatgatgaaaagaaagatttttgagactgcagcctattaataaagttaacataactgagaaaaaaaaaa

SEQ ID NO: 59356 - DNA, 2144 bp, Homo sapiens
gaccccagcctcccctctgctttgcatgggacctaagtctccatttacagaactcactatttgcctcttgtgggggaagtccccagatgtcagccttctcgtgggaattataagaagtatgagccccagagctcctttagtctctccccagccagagtccacatattttcccccatgttttgtgggtgaaaaggcccttcagaaccctaaatccacccagtttatatttgttgctgggctgcgtcattctagtcagaatctgggaggatgccaccatacgtagaggaggccatgagggtctcacctgtaacattctgtagatatgacttgtttattctgtctactgtgagtgcctgactctgagtagaatcaaggccgggggattgtcatctgctttgtttatgaaattatgccaagccccaagaagagcgatgcacaaatgaggtgttttgaatgtatgtgttgaatgagtgaaccccaacctttggagaaccccagtgagcctctccagatgtctgagtgggcctgtggctcctttttcagcaccaagggacccctcttctgtctgtgtcaaggagaaagaccagccagaaggaatctcagacatcctttaccagtgccatcgcagacttggtttctatgtgtttttccaaacagtgagtgatacaggccattgaggcagaatgctgagagctgcttcaagtgagggggaagagaaaagtaacaaacatgaatcacagcacccccagcagattttccagagttttaggctctagggacccctttgtttgctgtgtcttagatcattgagtccctacaagaaccctgtgaggttcgtcttctcactactccctgttccagaggagccaaccgaggctccgagaggtgcatcttcaagacagagccagtaggggacagaggcacctctgtgtcttggagggggatggacactcaccttctaaccagtagttccaaaaagtgtggcacagtgataaagtcccaggaggggcccaggcaggtggcataggaggagatgggtttagttagaaaggctggaaccagggactcccaacagcttctccccagtgccgggctggaaagttagcatcctgcagatctcattttcatactagggggacaaggagggacatgggagtcagtggtaacaccatggaccaccagaggatcgggatctggaactcacaccaagaagcaccaacccttcagggacttgtgcatatggagaacctgggtgcccatggtgaaaagcgttctaggctttcaaagtaacattgcatgtgaggatggagaatgataaaacgattcctgccttcaaggcatcgtcccggtgtttgtcagctgtggggcaacagcaccctctgtgtcagcaacctgcatgaagagcatcatccctgcaagtcctcaaggcctggggaggcctcatcccctcctcatttcagcaacagcacacaggacaatacgctctagaagaactctttgacttaaaggtatatgattgtttttgttcctttaacatgaacgtgagtctggagaaacagctacggccatcccagccctggccaaggggaaaatgccggaagactccagggtgggaggaagcgcgtcccaaggcccaggatctgcgaggcgacttggggaaaacgcaggcaggacctgctgaagctcacacccgtggaccacccagactgcctgccgctacaggatgccctccgcatctcccaggacttctttccggcatcagtgtggacattgaccccactggactgcagtcacagtggactcccaaggggcaggatccacctctgatgttcagtgaagactaccagaaaagtctgctagagcagtaccatctgggtctggatcaaaaactcagaaaatacgtggttggagagctcatctggaattttgccgatttcatgactaaccagtgtggttgaggagtgggcccagggcaccttcaaactcaaccccaatgatgaggacatccacacagccaacaagtgccacctgaaggtggtcacggacctcaggttgtggatgtggcagacctgcttcacgctctcgggcctcctctgggagctcatcaggactatgggggattgggcagaggtgttcctgctcca

SEQ ID NO: 59357 - DNA, 1316 bp, Homo sapiens
ccggcgcctgggttggcgctgcggggcggaggcggtgtctgagcgccgctccggctctgctctctctcgagcttcggcacccgcccgagccgctcgcgcgcccgccacctgtctgcccactcggctgtctgtctgccctcccgccgccagctcctgcctcgggcctgccctctccggtctcggtgctccgaggggcgacgagaagcgcgacggggccgtggcgcaccgggcagggcgcgcggggcgcacggcctgggggcgcacggtgcggcgccggcccatgaggctttccagcgcggggagcggcagcgccggccggccatggggggtagcctgcgggtggccgttctaggcgccccgggcgtgggcaagacggccatcatccgccagttcctgttcggtgactaccccgagcgccaccggcccacggacgggccgcgcctctaccgacccgcggtgctgctcgacggcgccgtctacgacttgagcatccgcgacggcgacgtcgctggccccggctcgagccccgggggtccggaggagtggccagacgctaaggactggagcttgcaggacacggacgccttcgtgctcgtctacgacatctgcagcccggacagtttcgactacgtgaaggccctgcggcagcgcatcgcggagaccaggccggcgggcgcgcccgaagcgcccatcctcgtggtaggcaacaagcgggacaggcagcggctgcgcttcggaccgcggcgcgcgctggccgccctagtgcgcaggggctggcgctgcggctacctcgagtgctccgccaagtacaactggcacgtgctgcgtctcttccgcgagctgctgcgctgcgctctggtgcgcgcgcgccctgcacacccggccctgcgcctgcagggggcgctgcatcccgcgcgctgcagcctcatgtgacccgatcggacagtgccatccatgggccccaccttgtgactgggacaatcagggacctggattggacgggatcgcccaacttcactgggactggacagggaagtctccgccctgattggatgaggaaagctccaacccagtctcctaagcgactggcccccttttgaacctcattggacccaaccaggtcccaagctccattggagatgaccagtcctttctgggacctcaatgggtcacaatcccattggatggaaaggacttggctatgaacttgactggaaacacgcagcctgctcctggagcttcactggacatattctttatgccacacctaccacgggataataaaagggaaaataatttgaaaaaaaaaaaaaagg

SEQ ID NO: 59358 - DNA, 2077 bp, Homo sapiens
tgaattcccgggtcgacgattcgtgtctcaggacgcatggagccagggctggaagtctccatctgggcaggcgccaggcagcccctgcaggctggggaggtggaggctgctggagtcaagaggaaccaggtgagggtgttggagcataacaggcttgggaggcaggcagaaacctgcccttctgcaaactctatctcttccccctcctgggagcagacaggatggcgctgtggcctgaaagcagctgtccctcctgtgtgcaagctcggactgctgcacccagacagattccatctctgaccttccacttgttcgtctccagctcgccatggccaaacagctgcaggcccgaaggctagacgggatcgactacaacccctgggtggagtttgtgaaactggccagtgagcatgacgtcgtgaacttgggccagggcttcccggatttcccaccaccagactttgccgtggaagcctttcagcacgctgtcagtggagacttcatgcttaaccagtacaccaagacatttggttacccaccactgacgaagatcctggcaagtttctttggggagctgctgggtcaggagatagacccgctcaggaatgtgctggtgactgttggtggctatggggccctgttcacagccttccaggccctggtggacgaaggagacgaggtcatcatcatcgaacccttttttgactgctacgagcccatgacaatgatggcagggggtcgtcctgtgtttgtgtccctgaagccgggtcccatccagaatggagaactgggttccagcagcaactggcagctggaccccatggagctggccggcaaattcacatcacgcaccaaagccctggtcctcaacacccccaacaaccccctgggcaaggtgttctccagggaagagctggagctggtggccagcctttgccagcagcatgacgtggtgtgtatcactgatgaagtctaccagtggatggtctacgacgggcaccagcacatcagcattgccagcctccctggcatgtgggaacggaccctgaccatcggcagcgccggcaagaccttcagcgccactggctggaaggtgggctgggtcctgggtccagatcacatcatgaagcacctgcggaccgtgcaccagaactccgtcttccactgccccacgcagagccaggctgcagtagccgagagctttgaacgggagcagctgctcttccgccaacccagcagctactttgtgcagttcccgcaggccatgcagcgctgccgtgaccacatgatacgtagcctacagtcagtgggcctgaagcccatcatccctcagggcagctacttcctcatcacagacatctcagacttcaagaggaagatgcctgacttgcctggagctgtggatgagccctatgacagacgcttcgtcaagtggatgatcaagaacaagggcttggtggccatccctgtctccatcttctatagtgtgccacatcagaagcactttgaccactatatccgcttctgttttgtgaaggatgaagccacgctccaggccatggacgagaagctgcggaagtggaaggtggaactctagccctgaagtcacgccttggccctgacatccccacatgcccgcagagatcctctttgagtgtctgtctttgtccaggtttcagacatttctaggttggggaagatgctattgggaaacctcttctccgtgacacagaatgttctgggtgggagccgcccttcttcatcttagagaaccaagtgcctcctgtctgaaaggtgagggtggcctgacctgggcctctccctgcccctccataggtgggtttgtagggtcttgtgttgcttctggtctctccaggcttggctgagacggacggtagacttccaccatgtaccgatcacatcccagctctgcatggcccctgctaaggctcaggtataacctcaccttccctggctcatcttggccttggggagttgcctttaggcttgagtcctcaagcctctccttttcgtccataataaaatgtttaagttattaagatccttaaaaaaaaaa

SEQ ID NO: 59359 - DNA, 1704 bp, Homo sapiens
gcatcgcaggcgccctcctcgggcctcccggccgggggcgccaacggggagagcccggggggcggcgccccctttccgggcagcagcggctcttccgccctgctgcaggcggaggtgctggatctggacgaggacgaggacgacctggaggtgttcagcaaggatgcctcattgatggacatgaactccttcagccctatgatgccaacatcccctttatcaatgataaaccaaatcaagtttgaggatgaaccagatttaaaggatctcttcatcacagttgatgaacctgaaagtcatgttactacaatagaaactttcattacgtataggattattactaagacatctcgtggggaatttgactccagtgaatttgaagttaggagacgatatcaagatttcctttggttgaagggaaaactggaagaagcacaccccactctgattattccaccattgccagaaaagtttatagtaaaaggaatggtggaacgctttaacgatgacttcattgagacacgcaggaaggctttacataaatttttgaaccgaattgctgatcatccaactttaacatttaatgaagacttcaaaatttttctcactgcacaagcttgggaactctcttctcacaagaagcaaggtcctggcttgctaagcaggatggggcaaaccgtcagagctgttgcgtcctcaatgagaggagttaaaaaccgcccagaggagttcatggaaatgaataactttattgaactatttagccagaaaataaatttgatagataaaatatctcagagaatttataaggaagaaagggaatattttgatgaaatgaaagaatatggcccaattcatattctgtggtcagcgtcagaagaggatctggttgatactctaaaggatgttgccagctgcattgacagatgctgtaaggccactgaaaagcggatgtctggactctcagaggccctgcttcctgttgtacatgagtacgtgctttatagtgaaatgttaatgggtgttatgaaaagaagagaccaaatacaagcagaactggattccaaagttgaagttttgacctataaaaaggcagatactgatctgcttccagaggagattggaaaacttgaagataaagtggaatgtgctaataatgccctgaaagcagattgggagagatggaaacaaaatatgcaaaatgatatcaagttagcatttacagatatggctgaggagaatatccattattatgaacagtgccttgctacgtgggaatcattccttacatcacagaccaaccttcacttggaagaagcctctgaagataaaccttaatcccattgaggacttctgtttgatctttgggagacagcatttattaaccaaagttattctttctggatctgccgtgtccttataaagtggatgaaaaatgttttgtacccatctggaaaaccaacaacttgaaatctcaggtattccaggtcactgacatgaatttgaagatatatctatctgtatggatatatatctatatgtatatagatatataaatacagagagatatctggcttggttttaattatgttcttaaatttgtgtgccaataattgcatatagatttttttcttaaatatttgactgtggaacatgccattttaaatatgttgtaaggactgttttaataaaaagtttagtatg

SEQ ID NO: 59360 - DNA, 2309 bp, Homo sapiens
gctaaataaaatgggggaaccccagggtttttccctccccccggttttaaaacacgggccccgaaattgaattttggggccccaaaaaaaaaatatttcttttccctcccccgggcataaaaattgatcctttaaaaagggccccccctttttttttttttgacagtttttaattgtgcctttattcaacttagttcattaaaaatgttttaaagatcctataaataaagtgaccactcacatgggatataggtcacccctcagcatgttattttttttcttaaaaagcagtatttcttacaggaatcttactgatcacacggtagttacaataatgtcagatatgatgtatacagtctaaacgagacagtccagttaagaatatacataatgtaaaaatacacatattaaaagttagccaagtggacagacgcatgcgggggtggggggagcaggtgacaggaactcctttaacaatcagtagagggcccagatgcaaagaatctggttttccccgttacagtaaacagctttcactaacgtatacaggtatttcatacacatctaaacacacaagggtaagttgtgacctgctacacatagggtctaaagtggtgtaattgtgattttcctgtgatactcccaagaaaactataaatagtgaaccccatgcaagtactgggaagcactagtcttttatcacaggttgaacctgaggaggtttaactcttgacattagtatctgtaaagagcgtacggctctttttgctatgttttctccacaactgacatgcacttggtgtgggagaattctgatggctgtctgacctaagagtgataactactattcaaaatgtgggtaccttttcagtaatactgagttacacatttaacattaaaaaaacaaaaacgtggatcatccacagctttaagccggaaggcagaagggagtgtgtctgaatgttaatgttttcagttatactattttgtgtttctcccgctgtactccagagtgacactggtacactgctgctttccgtaacaacacaggcactagtttgaactcagacaaaacctgaaacagaagaaatgccactctttctccagggtcttttaagaaactcgatcaaaattataaattattcaagtttccttttgagtggtgtctttatgtgtgtaactatctagagaacaaaccaaaccagaaatgtctacccctgcaagagtgaggactttgggtgtggttctcttaggagtcagggaccttcagcagtttacagtcagggccgttttctcacacagcccgtttaccctgcgtttgtgccaactgtgatggcaaatgccgttttgcgggggttgcgcttcacaactcaggcctaaagatcctcttagggagatctctctagctgagtagaaaacttctagcccaaaaaggcggcgggttctgtgaacctgaagagaagactcagggtctctctgaaagcctttaaattactgctggaattacaagttcctattagtgagaaaagagcattaaaataacctgaaggtctattttattggcaacttagaatgcaaagtattttatttttaaacttttaaaatttgaaaacaagctagcctacattaaataatatagtttccaaagctgaatgtgctcacttggagctcagtttttctgcttgaaacacaaacacaacttcctaacactcctaggtgggaacactactgtttcatgatctgtgattggatgaactgatcgatctcagttggtaacatcccttttttttccttggtaagggtttaaacaattctagaagagatgcattttttctggttttacactgacaatttcatcccgaacgtctcctgggaggcatagaccatgtacaggaatccatcttcatctttctcactctcatacacctctgagattggtgtggagacgctgaccatgctgtgtccgttcaccaacaggaagaaggcctgattagcattgagctgtaagcgccttctaattatcttgatgagctcactcatgttgacatggtcaggtacaaggaactttgttttatccagaacaggaagctgcttctcacccttgtatcgttctattatcaccgggattttggttggatgctgctctcgaataagtcggacatcttctactctttgttcgaaggtgcggcgctgcttgaaggtcttctccgacggcatggtgcggggatctgggcggcggcggcggcgacgacgcgagggtcccggcggctcccgggggcggcggctgctgcggcggcgaatccgactct

SEQ ID NO: 59361 - DNA, 1948 bp, Homo sapiens
ttttttttttttcaatgtcaaatgcactttactgggcccctgggcctcccaacactgtcctcaccaaggctggggcaccccattcccagcaccaccagctgcccaggaagcaggacggatagagggaacacatgtggaatggctgttctcctaccccagagggtgccggatgatgttgacagcacggctgcttccctctcccctgcagcttctgtccccacccagcagcttggcctttcccatagcagggaagggggatacctggggcttcaaaccagccacctgctcctgcttaaaatggggcaaggggccatttgcaaaattcttcgaggggcagtggtgaggtagaaggggtggcagcctgctcctgtctgggagagggctgggcagacactgggagccgggcagacactgggagccgggctggctcttgcttcaggcccagagccctgggccctgctcgctgaggaagctggtggttggagcggcgaggttcaaccagctgaggctggagggagtactgggtggccaggaggggtagccagtccaactcggctctcctcagcacccccagccatgggtcaccagtcccgctcagcaggttctcggtaggggaggcctaagagcctgaagacatccttctcagtgggagtgggcagcactcggccaggccccaccttgcagccatgggtgttccggaccacagcagtgctgagggcatgttctgacagactcatgcccttggttttggccagggctcgcatggagcggttgaagtgtgcagagccggtgaagtagagcagggcacaggcaaactcgctatagggcaccacgatgatgtccaggcgccggtgccgccgccctggccctgggagccggcacacccccaagtacttctgttgctgaccattctcctcttggctcaccaagtcatctgtgaggaacccttcctgccgaagactgtcaaggaggcggctgaagataccccggtgggaccggccatctgggtgagtgatgagcacgtcgacatcaccacaggtcgcctttccccgtcggtatgaaccacatgccacacacagcagcccagagttaaaggcctgggctgctttctggactgtctgctcaatctctgtagcctcctccctgggcatacgttccaggaagtcactgtaatgcttcaggccgatggcctgctgggttgtcagggaggcctggctgcggatgtcttccagacttcggaagccctgttggtaccacatctgggcagtcttggtcccagctccccagatgttggagaagagctccaagacaggcacgctctcactgatatggtccagcttccgcaaatgcccgctctccaggatctctatgattttctcagccatccgcttcccaatcccagggatactgcaggcctcctagaggaggaggaggcagaggcaagaaagaagagtgaggagatggaagaggtagagccagtggaaaggaagctgactcctctagcagatgctgacataaaagccagcctggctgcttggcaactgtgtggctgtgtaaagcttgggtgtagttgaagatgagaattttggatagaatgagggctgggtaatttgtcttttggttcccagaaggatggagaccagcagtaagaagtagaaaataatgatgatattagtcaccaccaccaccaccaccatcatcatcattccaacagcaagagctaacatttactgagggcttactctatgtcaggtcctgtgctacagggaccatttcatttaatagtagcccctttttactaatgagaaaactgatgctttgagagtttaagtaacttgtctggagtcacacagttagtgaatgacaggaaccagagttcaaaccctggtctgttaggcttcagaagccaaacttcttttaaacaactttttaagcgggacaccaaggc

SEQ ID NO: 59362 - DNA, 1435 bp, Homo sapiens
ggaggaattcctgtccctaccacaggcagtgaacggcggctgtcaggggacctcagctccatgccaggccctgggactctgagcgtccgtgtctctcccccgcaacccatcctcagccggggccgtccagacagcaacaagaccgagaaccggcgtatcacacacatctccgcggagcagaagcggcgcttcaacatcaagctggggtttgacacccttcatgggctcgtgagcacactcagtgcccagcccagcctcaaggtgagcaaagctaccacgctgcagaagacagctgagtacatccttatgctacagcaggagcgtgcgggcttgcaggaggaggcccagcagctgcgggatgagattgaggagctcaatgccgccattaacctgtgccagcagcagctgcccgccacaggggtacccatcacacaccagcgttttgaccagatgcgagacatgtttgatgactacgtccgaacccgtacgctgcacaactggaagttctgggtgttcagcatcctcatccggcctctgtttgagtccttcaacgggatggtgtccacggcaagtgtgcacaccctccgccagacctcactggcctggctggaccagtactgctctctgcccgctctccggccaactgtcctgaactccctacgccagctgggcacatctaccagtatcctgaccgacccgggccgcatccctgagcaagccacacgggcagtcacagagggcacccttggcaaacctttatagtcctggccagaccctgctgctcactcagctgccctgggggctgctttccctgggcacgggctccagggatcatctctgggcactcccttcctgccccaggccctggctctgcccttccctggggggtggagcagggtccaggtttcacacttgccacctcctggaggtcaagaagagcagagtccccgtccctgctctgccactgtgctccagcaccgtgaccttgggtgactcgtccgctgtctttggaccgctgtgtttcaatctgcaaaatggggatggggaaggttcaatcagcagatgacccccaggccttggcagctgtgacattgggggcctaggctggcaactccgggggctcaacggtggaaagaggaggatgctgtttctctgtcacctccacttgctccccgacaggtggggcacagacctctgttcctgagcagagaagcagaaaaggaggttccctctctctgctccttcactgctgacccagaggggctgcaggatggtttcccctgggagaggccaggagggcctgatcccaggagacaccagggccagagtgaccacagcagggcaggcatcatgtgtgtgtgtgtgtgtggatgtgtgtgtgtgggttttgtaaagaattcttgaccaataaaagcaaaaactgtcaaaaaaaaaa

SEQ ID NO: 59363 - DNA, 2075 bp, Homo sapiens
gctaaaaaggacgcgccggtcccacaaggattttggacaagcccaggaggcgaaccgcactcggcgaacctgggagctggcgcgaagcctgctggtaatgcgcttgtgcgcctggcccgcgctgctggcgcgccacgagcagctgctgtatgtttccaggaaacttctaggacagaggctattcaacaagctcatgaagatgaccttctatgggcattttgtagccggggaggcccaggagtccatccagcccctgcttcggcactacagggccttcggtgtcagcgccatcctggactatggagtggaggaggacctgagccccgaggaggcagagcacaaggagatggagtcctgctcctcggctgcggagagggatggcagtggcacgaataagcgggacaagcaataccaggcccaccgggccttcggggaccgcaggaatggtgtcatcagtgcccgcacctacttctacgccaatgaggccaagtgcgacagccacatggagacattcttgcgctgcatcgaagcctcaggtagagtcagcgatgacggcttcatagccattaagctcacagcactggggagaccccagtttctgctgcagttctcagaggtgctggccaagtggaggtgcttctttcaccaaatggctgtggagcaagggcaggcgggcctggctgccatggacaccaagctggaggtggcggtgctgcaggaaagtgtcgcaaagttgggcatcgcatccagggctgagattgaggactggttcacggcagagaccctgggagtgtctggcaccatggacctgctggactggagcagcctcatcgacagcaggaccaagctgtccaagcacctggtagtccccaacgcacagacaggacagctggagcccctgctgtcccggttcactgaggaggaggagctacagatgaccaggatgctacagcggatggatgtcctggccaagaaagccacagagatgggcgtgcggctgatggtggatgccgagcagacctacttccagccggccatcagccgcctgacgctggagatgcagcggaagttcaatgtggagaagccgctcatcttcaacacataccagtgctacctcaaggatgcctatgacaatgtgaccctggacgtggagctggctcgccgtgagggctggtgttttggggccaagctggtgcggggcgcatacctggcccaggagcgagcccgtgcggcagagatcggctatgaggaccccatcaaccccacgtacgaggccaccaacgccatgtaccacaggtgcctggactacgtgttggaggagctgaagcacaacgccaaggccaaggtgatggtggcctcccacaatgaggacacagtgcgcttcgcactgcgcaggatggaggagctgggcctgcatcctgctgaccaccaggtgtactttggacagctgctaggcatgtgtgaccagatcagcttcccgctgggccaggccggctaccccgtgtacaagtacgtgccctatggccccgtgatggaggtgctgccctacttgtcccgccgtgccctggagaacagcagcctcatgaagggcacccatcgggagcggcagttgctgtggctggagctcttgaggcggctccgaactggcaacctcttccatcgccctgcctagcacccgccagcacaccctcagcctccagcaccccccgcccccgcccaggccatcaccacagctgcagccaaccccatcctcacacagattcaccttttttcaccccacacttgcagagctgctggaggtgaggtcaggtgcctcccagccctgcccagagtatgggcactcaggtgtgggccgaacctgatacctgcctgggacagccactggaaacttttgggaactctcctcgaatgtgtgggcccaaggcccccacctctgtgacccccatgtccttggacctagaggattgtccaccttctgccaaggccagcccacacagcccgagccccttggggagcagtggccgggctggggaggcctgcctggtcaataaaccactgttcctgcaaaaaaaaaa

SEQ ID NO: 59364 - DNA, 1600 bp, Homo sapiens
ttttttttttttctttgtattataaactgacttttaataataataaaaaatctatcaagaatttaacgagaagaatctgtacattttaaagtaaaccagtgcacaatgcgctggccctgggccctcccccatttcccgcagcagggctaaagcgggtcctcctttgtctctgatgcaagatacagtgacaaggccactgcctgccctcgtgtatgctgcggcaagagagggaagcgcaccctggagggcgggaggctcggatgccagatgccgggagggcttcaagctcccaggcctgggggcagcagggagcccccacctgaactcaccacctgccaggggtgacaggcgtccccccgcttcctccccagctgtgacctttccctgaaggcataccgaagctggggggacaaactgccgagggggcttgtgtgggtccctcctccccagcaggcagggtggcttcctgtgctctggctggtgatgtcccaatcgccctgctctgagaagttaccatcaagaaaataaatcacagaagccaccgcccggtgtttcccagtgaccctctaacccgtgtgacatggcacctcaggtggggctccatcccctccagctccaaccctggctggccacctctcaggcccttgtagccagtcactcaaagagagcgagttttaacaccggccaaccgctggagaatggagggtgggggaaggaatcacagtcgatacctcaaaacgacaccttacaaccctaatattaacaaacaggaaacaatgacattttttaatttttcaataatttagtttttcttttgtgctcttttttttttagtagaagcaggaacagttgtcaatactaccttctgttggtcccctgttagacaacatacctttctttgaaatgtaaaatgtcaaatatataatcacacaactttagaaaaaacaaactttgacaacaccaacaacaaaaaatcccaaaataaaccagagatttcatgccatataaataaagtcagagcaaatctcgtgcccagggctggtggccccagttccaggggcggtgatgtccagagctggtgtggctctcggggatcctctggtaacaggcgtgatggaggccccgtctctcctttcccgacagagccaagtcttttccaagtccaccaagcaggttagtacagggttagggtgaacctggaagctaagatgaggaggaggagacacgtgtggtcacctggaatgtggacgttgaaggaaaccggggtttcaaaagtgcaggcggagccatcccgagggagccgggtggccccatgtggcctccatgacgttcccttgggttctggggacgcaggagccgaaggccaggcaccagctgctcccatcagctctatgggtctccagcacccctccagcttctggcaggcgtgtgaagaatgggccggcccagggccaatcagccagctcgtcatcacagcgagggtggccaggcttgtcccggaaggaggcagggaggacgctgggcaggtcccggaacgggcggctgcggaagccttgggccatccctggagaagaaaagcgctgcctgctgtgtcctccct

SEQ ID NO: 59365 - DNA, 1129 bp, Homo sapiens
ttttttttttttgtggcaacacgtttaattctgtggccaggctagcctgtctccaaggcctggtggacagcacgtcaccagaggctgccgcaggagcaggcagggccagccctgcaagaggagtgcaggcaaaggcgggggctctgaagtggctgctggaggcagcaggccccgggctgggagtgctcagtagccgtcgttagcccaggtgacctcgtagtcggggtacttggctttgattttctcagttgaaatggcgtgctgggcaggaccataggccatggaatagccgtacacgtgaatcttcttgtcctgactctggtgggagatgcgcccgccgcccagacactcacagtcgcagccttgcttctgcatgtcgcccgacactttgtcgtagatgtccgcatggtactcagcccacttgtagccgcgcacgatctccttgctctctgcagccggagccccggagcggggagccgagtggactcggatcagcacatacttgaagacgccgtcggagtcgatgtccacatcaggaatgagagcgaggtccgccaccgccatgttcctcctcccggagtcccctcctcccacccgacccgggggccgcttgtactgcgggaggcgggctctgcgagagcgacgaccaatcccgtcggggaatgcttcccaaggcccagcgcctcagccaattgtaccgccgaccgaggcacgtgctgaccaatcgcaatccagttccttgccgccttgcggctccgccagccccgcttaaaggaaacgtggaatcgggaatgggtggtgatgaaatcagccaacggagaagttcctctccagcggggtccggtggcacccttggaacggggcagttaggcggcccgcgaggctgctcgcaccacgctttgccctccaggctcccacctgggaacgccccgtcccttggtccttcctctcctaaccaggtgtcagctctggccaggcccaggtgctctgcttcccctgttcaggtcccctgccccttcggctgggagacttgcatatcggcctgaagacctccctgcggtttttcccagctcctgcagggcccagactgcagcggctggaggcgaagggacggcagggcgcgtggcgt

SEQ ID NO: 59366 - DNA, 1944 bp, Homo sapiens
ggggggttttggttcgagaccctagtcaccgtgctggaattccggaagagctgggtgctgacggcgctgggcgggtcaggggcggagagcgtgctaaccaatgacttgagggagtagggggccgggtttgggccctcagttgctaagggctacccgagtgggaagcggttcaagagatggggtgaagggtggttcaccggttcttcaagtcctcagccttctggcccgcggaagttaagcaaccaagaggcgggcctaagaccggaagcaggaaggagggcgcaggaagcagggcgccgcagcctgtcgtacggtccttctgtgggtctgtcggtgccgagggcaggatggagaagctgcggctcctgggcctccgctaccaggagtacgtgactcgtcacccggccgccacggcccagctggagacagcagtgcggggcttcagttacctgctggcaggtcgattcgccgattcgcacgagctgtcagagctggtgtactctgcctctaacctgcttgtgctgctcaatgacgggatcctacggaaggagcttcggaaaaagttgcctgtgtcgctgtcccagcagaagctgctgacatggctgagcgtgctggagtgcgtggaggtgttcatggagatgggagctgccaaggtgtggggtgaagtgggccgctggcttgtcatcgccctcatccagctggccaaggctgtactgcggatgctcctgctgctctggttcaaggctggcctccagacttcaccccctatcgttccactggacagagagacccaggcacagcccccggatggtgaccacagccctggcaaccatgagcagtcctacgtggggaagcggtcaaaccgggtggtgcgaaccctccagaacacgccgtccctgcactccaggcactggggagctccccagcagcgggagggacggcagcagcagcatcacgaggagctgagtgcgacccccacccccctggggctgcaggagaccatcgcagagtttttgtacattgcccggccgctgctgcacttgctcagcctgggcctgtggggtcagaggtcgtggaaaccctggctcttggctggtgttgtggacgtgaccagcctgagcctcctgagtgacagaaagggcctgacccggagggagcggcgggagctgcggcgccggaccatcctgctgctctactacctgctgcgctctcctttctacgaccgcttctccgaggccaggatcctcttcctgctccagttgctggccgaccacgtccctggcgttggcctggtcacaaggccgctcatggattacttgcccacctggcagaaaatctacttctacagttggggctgacagacctcccggaaggagggtgtggggaggggtggggcagggagcccctcttccctaataaaactgactccggcagcgtcccagcgtgcggcctctccgtgcctaccggccaggccacacacagccctggtcgccaccagcgttcctcccaggacacccttgactgcgctctcctgtgacgatgccactgcagcccgcaccttgtcactgctgggccaagaagccttcactaggagtgggatccaggctcctctcccacagaaagcggtgacttcacctcatggagcccgggaagctgcttgcctcggcagccataggagcgaacactgctgctctctcgctggcccctggtgaggacaggaagcctgaacccgggtgatggctgaacgctgcccagcgtgtcttctggctggggccctccgtcctgccccttctccgcagggccctgtggctctggcagccccaggccatggggttgccagcctccctgtgacagagcctggtgaacagtgagcctggctcccacgcaagtggccctttaagccctgcatcctcggttgagagtaaaaggcttttctcccttaga

SEQ ID NO: 59367 - DNA, 911 bp, Homo sapiens
gcggccgcggcggtggcggagactgtggctttaagagcgtgccgggagcccgagccccagccgggccgcgcttcgccgctgcgcaccccagcggagccaagccccacgctggccggacagggccgcctgtcgccggtcattccaaggaagtcaaggacgagcatacctctttaactcagtagttaatgtgggctgtgggcctgcagaagagcgagtgttgctaacaggactgcatgcagtcgcagacatttactgtgaaaactgcaaaaccactctgggctggaaatacgaacatgcttttgaaagcagccagaaatataaagaaggcaaatacatcattgaactagcacacatgatcaaggacaatggctgggactgattggacagcatctacccaacccagtgtccacgttgaacgccattcaaccgaacattcttcccaagcgtgagagagtgactgaacacttggttcccatcccatttaaggggccttgcccatcccggggcatccctcccacccctgacgcccatctttcctggtgaccggcctcctaaatcgctgtctctctgtcctctttgctttgtatctgtttgtgaagttgatcctgggcttctctctctgttctagttttgggctggaaaacaaaacaacaaaaggaacagatccttgaccggcatggcggcagcccaccttggtaagggccccagggcccatgcgagagctgcctgatggcctcttgtcaggagagccagtggcacgggggcgtgaggaagagggaaaggggaaactctaagggtcctggcgcggggaaggggtggaagggtggaggtaggaacaaaattgcgccgctcctggagacctgataacttaggcttgaaataattgacttgtctaaaaggacaaagagaaa

SEQ ID NO: 59368 - DNA, 974 bp, Homo sapiens
  misc_feature (1)...(974): n = a,t,c or g
tttttttttaacaaaccttttttttttttttattggagataggaaacagtgaagtcccacataccataccctacaagacacaaggtgcgcagacgagccttggctatgtaccggcgctgcaggaagaggctgtccgccgggcctgggctgctccagctacgcggggaggcggccccattgcaaagtgcagtttctccgcggaggtgggcggtgggtcagtgggcagagggccatggtttccatgttaagggaagcggacgtgcatcttggtctcaatgtcgatcccctgccagatcttcaggaagtcctcgaaggtgatcccctcgtacacctgatcaggctccatctgccccatgcacacgctggccgcctccatcatggccccgtcggcgatggagcgagcggactccttctcgatgtgagggtttcccgacagcagctcctcgaccacatttcgatattcttccagagtgatgcggccgtcgctgtccgagtcgtacatgtggaacagaaatctcagcttctccttccgggacagctccacctgttcctcgtccatggtggtgtcgatgggccggaagtaggacatgatggtcaggaagtcctcgaaattgatctcatcagccaggccactgggtcccttgcgcaggttcctgttgtcgaagaaggcacgaacaattttggatcggatggggttgagctccaggtccgggacattgttgaagttctccttgcgaatggtaggctgatctccactcagctgcttaaatctccgatggagctgctcgatctgatccgatgagaagccggtcttgccctcagagtcccgcacctcctcagacgcggagtggcagcgcccatggtgccgcggcggggnccccggggcgcgcgtccctctcaggccccgcactggcttcgntgcgcagcggcgggactggcctcgggtccggcctcgggtcgggacgccggcgaag

SEQ ID NO: 59369 - DNA, 3128 bp, Homo sapiens
gcggccgctccctcccggactcccggcctcccggcctccctggtcccgcctgggaagggatgcaaggaagccctccggcgctgcgctccgaggtgggagacagcgtccccctccgcccctcgggtcctggcgcctcagagcccggcccaggccgcggaacggtgatgctcgggccggacgggcgggcgcggatccctgcgtcccgctgaaaatgtgtgtctgacatgcaagctcagtggggcagagacccgtggattgctgtgccctgccctccggacctggatcatgaaggtgttgggaagaagcttcttctgggtgctgtttcccgtccttccctgggcggtgcaggctgtggagcacgaggaggtggcgcagcgtgtgatcaaactgcaccgcgggcgaggggtggctgccatgcagagccggcagtgggtccgggacagctgcaggaagctctcagggcttctccgccagaagaatgcagttctgaacaaactgaaaactgcaattggagcagtggagaaagacgtgggcctgtcggatgaagagaaactgtttcaggtgcacacgtttgaaattttccagaaagagctgaatgaaagtgaaaattccgttttccaagctgtctacggactgcagagagccctgcagggggattacaaagatgtcgtgaacatgaaggagagcagccggcagcgcctggaggccctgagagaggctgcaataaaggaagaaacagaatatatggaacttctggcagcagaaaaacatcaagttgaagcccttaaaaatatgcaacatcaaaaccaaagtttatccatgcttgacgagattcttgaagatgtaagaaaggcagcggatcgtctggaggaagagatagaggaacatgcttttgacgacaataaatcagtcaagggggtcaattttgaggcagttctgagggtggaggaagaagaggccaattctaagcaaaatataacaaaacgagaagtggaggatgacttgggtcttagcatgctgattgactcccagaacaaccagtatattttgaccaagcccagagattcaaccatcccacgtgcagatcaccactttataaaggacattgttaccataggaatgctgtccttgccttgtggctggctatgtacagccataggattgcctacaatgtttggttatattatttgtggtgtacttctgggaccttcaggactaaatagtattaagtctattgtgcaagtggagacattaggagaatttggggtgttttttactctttttcttgttggcttagaattttctccagaaaagctaagaaaggtgtggaagatttccttacaagggccgtgttacatgacactgttaatgattgcatttggcttgctgtgggggcatctcttgcggatcaaacccacgcagagcgtcttcatttccacgtgtctgtccttgtcaagcacacccctcgtgtccaggttcctcatgggcagtgctcggggtgacaaagaaggcgacattgactacagcaccgtgctcctcggcatgctggtgacgcaggacgtgcagctcgggctcttcatggccgtcatgccgactctcatacaggcgggcgccagtgcatcttctagcattgtcgtggaagttctccgaatcctggttttgattggtcagattcttttttcactagcggcggtttttcttttatgtcttggtataaagaagtatctcattggaccctattatcggaagctgcacatggaaagcaaggggaacaaagaaatcctgatcttgggaatatctgcctttatcttcttaatgttaacggtcacggagctgctggacgtctccatggagctgggctgtttcctggctggagcgctcgtctcctctcagggccccgtggtcaccgaggagatcgccacctccatcgaacccatccgcgacttcctggccatcgttttcttcgcctccatagggctccacgtgttccccacgtttgtggcgtacgagctcacggtgctggtgttcctcaccttgtcagtggtggtgatgaagtttctcctggcggcgctggtcctgtctctcattctgccgaggagcagccagtacatcaagtggatcgtctctgcggggcttgcccaggtcagcgagttttcctttgtcctggggagccgggcgcgaagagcgggcgtcatctctcgggaggtgtacctccttatactgagtgtgaccacgctcagcctcttgctcgccccggtgctgtggagagctgcaatcacgaggtgtgtgcccagaccggagagacggtccagcctctgatggctcggagatgatggaccgtggaagggaagcgtctgtggggagtgagcgcttagatggccagcagctgctccttctgggaagctcgcaccttggcaacagaacagccctctagcagagcgtcagtgcagtcgtgttatcccggcttttacagaatattcttgtcctattttagaattttccggagtagtttatttgcagtctgttgattatgtgcagtagacccgggacactgcgttttaccgatcaccttgaatgtggtgcctggatgtgcctttttttttttccctgaaattattattaattttctattgtgagttcatcagttcatagtttttttagtaaagaagcaaaattaaaaggcttttaaaaatgtacaacttcagaattataatctgttagtcaaatatttgttattaaacatttctgtaatatgaagttgtaatcctggccgtgagcttggaagcttacttttgattcttaaagcctatgttttctaaaatgagacaaatacggatgtctatttgccttttattgtaacttttaaatgaaataatttcatgtcaatttctattagatatatcacttaaaatatttggttttaaatcacaagaatatgtattctttaataaagataatttatgatcatggtataattaattgaaatttattaaaatctgtttttattaatttttttgacttgagcttatctttatacaaaattccagccaattttttttttttactaagatgatttctatattaacatgctattctccaagacaccaaattaatgcagggttaattgg

SEQ ID NO: 59370 - DNA, 1820 bp, Homo sapiens
ccggggggtggaattcagctgcgactgcagttctgaagcctaactggttgcccgtgccgcctcggaggtgaagtgtactgcgctgattggcttccaggcgccggccgcgtgtgatgtcccgggcaacgattggctctcgcctaccgggggcttctctcaccgggactcgggactcccgggaagtggaccggcagaagagggggctagctagctgtctctgcggaccagggagacccccgcgcccccccggtgtgaggcggcctcacagggccgggtgggctggcgagccgacgcggcggcggaggaggctgtgaggagtgtgtggaacaggacccgggacagaggaaccatggctccgcagaacctgagcaccttttgcctgttgctgctatacctcatcggggcggtgattgccggacgagatttctataagatcttgggggtgcctcgaagtgcctctataaaggatattaaaaaggcctataggaaactagccctgcagcttcatcccgaccggaaccctgatgatccacaagcccaggagaaattccaggatctgggtgctgcttatgaggttctgtcagatagtgagaaacggaaacagtacgatacttatggtgaagaaggattaaaagatggtcatcagagctcccatggagacattttttcacacttctttggggattttggtttcatgtttggaggaacccctcgtcagcaagacagaaatattccaagaggaagtgatattattgtagatctagaagtcactttggaagaagtatatgcaggaaattttgtggaagtagttagaaacaaacctgtggcaaggcaggctcctggcaaacggaagtgcaattgtcggcaagagatgcggaccacccagctgggccctgggcgcttccaaatgacccaggaggtgggctgcgacgaatgccctaatgtcaaactagtgaatgaagaacgaacgctggaagtagaaatagagcctggggtgagagacggcatggagtacccctttattggagaaggtgagcctcacgtggatggggagcctggagatttacggttccgaatcaaagttgtcaagcacccaatatttgaaaggagaggagatgatttgtacacaaatgtgacaatctcattagttgagtcactggttggctttgagatggatattactcacttggatggtcacaaggtacatatttcccgggataagatcaccaggccaggagcgaagctatggaagaaaggggaagggctccccaactttgacaacaacaatatcaagggctctttgataatcacttttgatgtggattttccaaaagaacagttaacagaggaagcgagagaaggtatcaaacagctactgaaacaagggtcagtgcagaaggtatacaatggactgcaaggatattgagagtgaataaaattggactttgtttaaaataagtgaataagcgatatttattatctgcaaggtttttttgtgtgtgtttttgtttttattttcaatatgcaagttaggcttaatttttttatctaatgatcatcatgaaatgaataagagggcttaagaatttgtccatttgcattcggaaaagaatgaccagcaaaaggtttactaatacctctccctttggggatttaatgtctggtgctgccgcctgagtttcaagaattaaagctgcaagaggactccaggagcaaaagaaacacaatatagagggttggagttgttagcaatttcattcaaaatgccaactggagaagtctgtttttaaatacattttgttgttatttcaaaaaaaaaa

SEQ ID NO: 59371 - DNA, 1251 bp, Homo sapiens
ctttgcaatatgaaatataatttttcaagtcaaaaaagaataaaatacttcaatctgtattaatgcaatttctctttaaaacttttaaacgtttttaatatataagagatatgttacagtttctttaactttaataaagctgcagtatcctggtttcacaggaactcctggcccttccacgaacattcaaaaaggatccactgtgttctataataagtatcataggaacccacccacaaaggggaacacactaaacagtccacacatcccatagcactactatcatcttcatcataattattactgttcattttttcctactttaagaaaatggaaaacttgtggggttttcttcttttggaagcttcctattgaagtaaagtgtaaaaactatcattactagaatgtcgccgttcctattatttatagagcatgcatttcaggtgttcaggtttcccaggctacagtactttttatgcagatatcctggcaaattcctttacttaaaaattaaattttaaaaatgagcggatactacagctttccaagctcctctcggatctcagagtgttggtggggccgggaaggagaagggagagggggggcacccagggaggcaggcgagcgctggggaaagaggatggggaggggttcccccttcccccagcacggtgcgcactagcagcgcccgctgcctttaagaaaagatgcggatggcctgagtgaccgcggtgtggcagaccgggcactcgggctcgctcttctcacagatgcgattggcgcactccatgcagaagaggttgtggccacagggcaccagcgcggcaatcacttcgctctcgaagcacacggagcagtcgcggctgcctttacgccgaagcccggagaaggaggatgaagagctggaggaggagctggacgaagaggaggagcacgacgtgtccgacggctgcaagccaggcagctgtgcccccagcccgttggcataagcggcgtaggccaggcctcctccacccgggtcgctgcgcacccggcgagccaggtggtgctctcccgcccccggggccatgtgcaagggtggagacaggcgcgggcagctggtgccagggtgcagccggcggtgcaccaatagccccaggttggcgttggagggcgcactggcgccacccccggggaagaccacggaggaggaagaagcagacgaagatgcagaagaagagcaggaagaagataccggagctgcaggtccgc

SEQ ID NO: 59372 - DNA, 1448 bp, Homo sapiens
ggagacacacaaagtagaccttgggctcccagagaagaaaaagaagaataaagtggtcaaagaaccagagactcgatactcagttttaaacaatgatgattactttgctgatgtttctcctttaagagctacatccccctctaagagtgtggcccatgggcaggcacctgagatgcctctagtgaagaaaaagaagaagaaaaagaagggtgtcagcagccctaggaaaggaagtaaaaagaagccagtcaaagttgaggctccggaatacatccccataagtgatgaccctaaggcctccgcaaagaaaaagatgaagtccaaaaagaaggtagagcagccagtcatcgaggagccagctctgaaaaggaagaaaaagaagaagaggaaagagagtggggtagcaggagacccttggaaggaggaaacagacacggacttagaggtggtgttggaaaaaaaaggcaacatggatgaggcgcacatagaccaggtgaggcgaaaggccttgcaagaagagatcgatcgcgagtcaggcaaaacggaagcttctgaaaccaggaagtggacgggaacccagtttggccagtgggatactgctggttttgagaacgaggaccaaaaactgaaatttctcagacttatgggtggcttcaaaaacctgtccccttcgttcagccgccccgccagcacgattgcaaggcccaacatggccctcggcaagaaggcggctgacagcctgcagcagaatctgcagcgggactacgaccgggccatgagctggaagtacagccggggagccggcctcggcttctccaccgcccccaacaagatcttttacattgacaggaacgcttccaagtcagtcaagctggaagattaaactctagagttttgtccccccaaaactgccacaattgctttgattattccatttatgctggagattacaaattttttttgtgaaaaaatcagatcttggtgaggacctcgagcagtaagatataaataactcccataagcttagcgttccagtaatggaacactaggcataaatggtttattcagttgtgcaaatgaaagccatctgacagttggctcacattgaacacctgtggagattaaggacgaggacaactatattgatgggcttggatgaactggggcagggcagctcatatttcgggagccaggagaacgagtgagtgctaaaacctcctgttttctgtgttaaacattccgtccctgtttgagacatcagtatgtacagttaacttttgttgagtgtttagcaggtactagggacatactagtgttttccttaatgtatttaatcttcataattatgaaatgggtgctattattagccccatcttatagatgaggcaactgaggttcagggataaagtaataaaattgcctggggtcacccagcccactaaaaaaaa

SEQ ID NO: 59373 - DNA, 1404 bp, Homo sapiens; identical to SEQ ID NO: 58848

SEQ ID NO: 59374 - DNA, 1427 bp, Homo sapiens
tgatttatacgtaaaacatgttagtgttatttctgctttacataaacttataaggattttttatttaaaggatttaaaaatataacacagtcaatataaacatgtactgggaattataaaccattctttcttctaagcactggatgagatactaaaaacatacagtatcttaccaatagccattaaaataggctaaaatcgaaaaagaaaccattgtaacaaggttattaatcccccaactttcaatgctgagttccttcatcatccatgtggcaatccagaggatgacatctaggcagggtgggtaaaattattctgggaaaatggccaactgttacttgggacaaaattaaggtttaattgctattatgggttgttccatttaaagtttttatgtggggctatgggtttccactggagctaaaaatttggcttttaactgtttccaaatcagaactagcagaggagagaagtaaataaagccaatggcactcccttcagaggctcaaaatggttagattttgatggcagatttaaccctagcgagttttcagtcagtccatttagatgatcctgtaggttcatacaaatacactgaaccgttggtttaacttctcttccttcctcaaagtttatgataaagagactcatccctgtattgggagtgactgacataagttcagatctgctcagagtggctggtaaggaacacttaaggtcagtcagaaaataatcaaacagacttctcatgtaagcaccgtgactcacaactaagacactggctgctaatcctggaataccgctgtctgaattaactttagagctgtgattttttcctaaaggaaatatctctgccaaagaagtttccagacagttgcttggagatccttgggaaaactgttctttttgatccgcttctttcaggattagttgacaaagaaattcaaaaaagtctattccacgcattttcacctggtccagcgtctctcctccgggcggtgtaaacacagggcactcttccctggctgctttggccatggccctcagctcacttagcgctttgccttctacaaccccgtatttcctttcccgaagtcttgagtcatactttaccgtcatatctttgcaaaatttgcttctctccaaaattccatgcatggtctgctttgtcctcatgagatcactggagaaagcatgagtaaacttcacattattcagaaatataccagcagctgctgcttgtttaaatccagtttctgaaagaggttcatctactccttgtccttggattattttctccttgttaaatcttgtttctccatgccggacaacagtcagagcgaagcgagccatgttcccggagccgcgtcccgtcggtggccccgcgccgcgctgcccctgcactgcgggctacctcccccacgaaa

SEQ ID NO: 59375 - DNA, 1433 bp, Homo sapiens
ttttttttttttgcaaaatagtggcggtcgttttaatcaagtctcattacaacggcagaattaggaatgagtcccacctagcttccacatgcgtgggcagcagctgtcacacgggcctgtcgtggcactcagcccatggcacagacatatgtggctcagggcaagaaccagtggatggggctctgcacaggaacgctggcctcgggatgggagacccggcctgcccaacactgctcagagcccctcccaactctgacaacaggctcgggtcaggactccccgaaatcaggcaccctcctgctccactgctgagatccccaacgggccagacctagcttggaaactttcttccacctggctggccaggaaggcagcaaacagagatgatgactcggaatgatgggctattcggaaatggctagggaaacaactgtttccctactgtcctggcgggacccaccctgggctaacgggcttcccaaggaagtcctagtggctctggggtcctgaagtccccaaatgggaacctaggctgagagaagcaaggctgtgagggcatccaaagggctgcctcaggttttgttcctgagaacgaagcgtggccccggaggctcaggcgtgctcagtggggccagggccaccagcatgggagtgggcaggggctgccacctgtagggggccagcactgggctccggggacgccagcagaggggccgagaggccatcagcagagtctgtgtcgaggtccagcctcccgtaagcttcgcacagaggcaggtcattagcttcgcaaaggcttgagctggacgagtaatactcctcctccagctcgtagaggtcaatggagatctcgtctcgcagcgtgatgagcttccggtcgcactcctcctgcagtgtgcgcagctgctggttgcgctggtcaatggcctcgttcacggaggggaagtcattgaggatcaggaactgcttgaggtcggacaccagcttcatcagggactcgccggctcggatgatgttggcggctcgcacatgcatctcgtaattgtcctgttcaccctgagtggcccgtgacacctgcgtctcgtcctcaatcttggcggtcttgatgatctcggtgaagttgtccatgatggacttaatgtcgtccttcagccgcttgttgtaggactgcagcagcgtctccttgctctggggcagggctctctgctgggccatggccgagcctcaagcagcgcagcggggagaccttggacccgccccagcgcccgcacaccagacgccgcgtccgccgggtcggcctagggcggggtggtcaagtgcctctgcgacccgcactttcccgcgtctctcccacggcctggccctcccgccgcagtctctcttccccggccgccgcggtccgaaaacctagtcagccgccgcagcctctcccg

SEQ ID NO: 59376 - DNA, 1667 bp, Homo sapiens
ttttttttttttataaatcagcaagtatttattttaaataataaaacttgtggtttatactcatacatatttacaaaaatgctttgctatagaaaaatagaatcaatcactgaatccagaccaccacagtggagaacctcctggtgaagctgtgttttttcccacactggaaacacagagtagccctgtttctgcacacgttagtgcaccgctgctacgtgtggccgcccagctgtctgcaggctgtgccgaccactgcctctgtctccaggaagcagaggcagaagtgatccttgctgaggagggccatcgagtctccgcttaaatgccagcacagagagagcactgcaaagtcgccttccccaggcacctgcaccgacatgcagcccgctggggaccacaggtagagcctgctgcctcccgtgcagatggccagccgcggctgctgcgggtcccactgaaacgcgcgcactggggacagctgctcgagcaccgcgaacagcctcagcttctgaatgtcccagacccagacggcattgggaatgttgtcgttccttgtcgccaggaagtagctgtcaggactaaatgccagcattcctatgccgattttcgggtttgctctgtcggtaacaggtttcagtgtctgtaaggagactgggacagaggcgatctcatatttactctctgagctcgggagagggccggccccggcccggggcggcgggaaggagaggcagcccagtcccagctgtgggctcttctcggcctccttatacaccactatcttgggatcattaatggctgcaggatgcccaaactccgtgatcattttccaagtcacgtgattaaggatgcgcacctttccatcatagctcccaactgccaggaactgactgctggggctccaggccacagacttgatgcccagggaccactcgtaagcgctgtacgtggacaacaaccggccatccaatgagtacagcagaatcttgtactccaagcaggtgtcccacactgccagcacacagccgtttggggcccactcaatccctgtgagatcctgggtgtccgtatcaaaatgccgcaggagctgccaatcactgcagacgaagatgctcacgtaatctttgcagtcgcgccgttctgccagcgccatgtagcggccgtccctggtgaaggtgattccctgcagacaagctttcgggtatttgatgtaagacacggattttgtgcacaaggaccagacggttatccgcagatggaattccgtggtgttgagaatgtggcgcccgtccgggctccagcacgaggccaccagcccggctgagccctcgtctattttgcagtgccattcgggctgctctaaagaccagacctgcaccagccctcgcttgtacatggcgcacaggatgaagagcgagtctgccgaccactcgatgtgctggatctggtctaggcacgtgtacagctgaaggatctgaagggtgttcacatcccggaccactaaccggtactggacacaggaagccaggtacttgccgtccggggagaacttgcagagtaagctggagagcttgaatacctcggagaagttcatggccgccgcctgccgcgggcgccaccctgcgcccgaaaacccgcgggacccctgggcgcgcacaacagcc

SEQ ID NO: 59377 - DNA, 1886 bp, Homo sapiens
cacgaggccgcaagctgagtcctttccgctcctttgccagcaccgagctcttccacttccatgttcctgaggacacattcctggctgtttggaacctcatcatcttcaaggagcaagggggaacttttggggaccactgcccagaccaaagtgtgactgtgtatttccggtccggggcaccccctgtcatcaatcccctgcatacacacttcccaggggacacagctgtgcctggggttttctcactgaccctcagctggacactgcccaaccgcacctcaggcatctttaacgtcagcagccccttacctggggactggttcttggctgcccaccttccccaggcccacggccacatctctgtcaagggtctccaggatgagtgtcagtacctccttcagccgcagctgattgtccggcgtttgctggacgtcgctgtgctggttcctggccggccctcagagcaaaccctctccccacacaatcgctcagccctgtacaaggtctttgtgcccagcttcacttacagggtttcagcacagctggtgtgtgtggggggccgtggggtatctgcctgccccctgtcactgcgtctgcgtcccaaagccccacccctgcacaactcaagctctgtggcctgtggaggtgcctcaggatgccagctggagctggcactgcccccctgggggcactgggtctacgtgcgtgtggaaacatcatcccggggccctggtaggaccatccgcttccagctgtgtgtgcagttgcaagagtgcccacagcccggcctgctccgagccctggtccctggagctgccatgaacatgccccagtccctgggcaaccagccactgcccccagaaccgccatcccttggaacccctgcggaggggcctgggaccacgtccccacccgagcactgctggccagtgcgcccgactctgcgcaacgagctggacaccttctctgtccacttctacatcttctttggcccaagtgtggcccttccccctgagcgcccagccgtgttcgccatgaggctgttgccagtgctggacagtggaggcgtcctcagcctggagctccagctcaatgcgagctccgtgcgccaggaaaacgtgacggtgtttggatgcttgactcacgaggtgcccttgagcctgggggatgcagcagtgacctgttccaaagagtccctggccggcttcctcctctctgtcagtgccaccaccagggttgccaggctgcgaatcccattcccgcagacggggacctggttcctggccctccgctccctgtgcggggtggggcctcggttcgtgcggtgccgcaacgcgacggccgaggtgcggatgcgcaccttcctgtccccatgcgtggacgactgcgggccctacggccagtgcaagctgctgcgcacacacaattatctgtacgcagcctgcgagtgcaaggccgggtggagaggctggggctgcaccgacagtgcagatgcgctcacctatggattccagctgctgtccacactcctgctctgcctgagcaacctcatgtttctgccacctgtggtcctggccattcggagtcgatatgtgctggaagctgcagtctacaccttcaccatgttcttctccacggtatgcggtggtgtctgcatcttatcactgggtgcttgtgcatggtggtgggtcacagtctgtatttccaccacgttctccgagggtttgggaatgtctgtgccttcactgtgtcttctacagacagagacagcagtgcttcccaaactgtcatgcatagataatggtcatttttgtaagacacattggagtaaatgaacaaaactgtttgcaacttaataaagtaagtttgggcctccaaaaaaaaaa

SEQ ID NO: 59378 - DNA, 901 bp, Homo sapiens
ttttttttttttctttacaaagataatctttattcataatcacaggccacaggggtgagacctgaggtttgggttctgtggtgaaggagaacccctgtcctcctgtcccttgccctgggcctctgctggctgaggagggacaaggtgagggggcccccatggtgctcagacaaccagagcctccctggcagggcaggagtgtgggtgccacagagacaagccccttgcagagctgacctggagcccaccatccccatagcctgtgtgagcatgaagcgaggacccccgggtgggctgtgccctgggcttgtcactgatgccagtggaggctggcacctgcccctctcggcacctgagacagtgagggaaggtagctgctgccgtgaagaacaaagatgctctgagcacacacttgctggggctgagctgaggggcacacggaggcaggccctgcccgtggtctggtcagctgtccctgccgccgctacttttctggtctggggctgtagccttggtcaggttcccagcttccctcttgagaacgctgagcaaagtctgggagctctccaggatcttgaggtaggcggcctccgtctccgcgatggtccggtcgaactcgttgcgagaggcaatcttgcgtgccaggttctcgttgacgcgggccagcttctctgtcagctgcctcacctcattctgcagccgctgcttctcgtcctcctcctcctggatctgccggcacagctcctcccgcttctggcacagctcctctatgcacttgaccagctcgttgttgtagttctgcagcgccgcgccctgctgggtcatggtcaacgccgcccggggccccaccaccccaaccgccgcggaagcagcgctgtccgcgcctgcgcacgactccccc

SEQ ID NO: 59379 - DNA, 1340 bp, Homo sapiens
ctttgaagaagatgaagacaggaacttgtgtctaatagcatatccattgaaaggggaccatggaattgtggacattgtagataattcagactgtgaaccaaaaagtaagctcctaaggtggacaacaaacaaaaaacatcatgtcttagaaacagaaaagacccctaaggactgggtgcgtcagcaccgtaaagaggagaaaatgaagagccataagttagaagaagaatttgagtggctaaagaaatctgaagtcttgtactacactgtagagaagaaggggaatataagttcccagcttaaacactataacccttggagcatgaaatgtcaccagcaacagttacagagaatgaaggagaatgcaaagcatcggaaccagtacaaatttatcttactggaaaacctgacttcccgctatgaggtgccttgtgtccttgacctcaagatgggcacacgacaacatggtgatgatgcttcagaggagaaggcagccaaccagatccgaaaatgtcagcagagcacatctgcagtcattggtgtgcgtgtgtgtggcatgcaggtgtaccaagcaggcagtgggcagctcatgttcatgaacaagtaccatggacggaagctatcggtgcagggcttcaaggaggcacttttccagttcttccacaatgggcggtacctgcgccgtgaactcctgggccctgtgctcaagaagctgactgagctcaaggcagtgttggagcgacaggagtcctaccgcttctactcaagctccctgctggtcatttatgatggcaaggagcggcccgaagtggtcctggactcagatgctgaggatttggaggacctgtcagaggaatcagctgatgagtctgctggtgcctatgcctacaaacccatcggcgccagctctgtagatgtgcgcatgatcgactttgcacacaccacctgcaggctgtatggcgaggacaccgtggtgcatgagggccaggatgctggctatatcttcgggctccagagcctgatagacattgtcacagagataagtgaggagagtggggagtgagcttgctagctgctccagtacttgagagcgactctgtgtcccaggcacagctgtgctgcgtcagggaggaagccagtatggccaggtggtggctcctgcagcctggagctgatgtgcagtggcctctgtgagccccagcctgagccagtcccagctgtgcttggagtctttatttattttaactattttcttcaaacattccacatttggatggatgatacctctttcttccctgagtgtatatgttctaatacaaatctttttgtttattgtaaaa

SEQ ID NO: 59380 - DNA, 3203 bp, Homo sapiens
ttttttttttttcaattttttttggaagggcaagacagccattaaagaacaatacagctcagagggaagggagatacagcaaacaattacacaaacgcagtatgcacgctccttgccgacagggctgcccagtatgcacgctccttgccgacagggctgcccagacggcaaacctcttcatggacatcatgttaaaataaaaggacttggcctgcattccccagggagaccccctattccactgtagacagctctcctcacgaattttttgaaagaacccaaggactcccctttctggtagtcgaaacctgtgcattccttggtgacctccggagagagaacatgggccggcagtggggacagagggcaccgggactctgctgggtgtagtgcttcacattcagaaccgcctggatgctttgcatagttacctctgatatcacaagatgcgtcaggaagagaaacgacacgcacaccatgagggaggcagccctcaagcagcggattcctttcaaagaaagacccaggggcttctcccctcctcattcagagctgacagctatgagctttaacccggttcaaagtggaagacaaagtgagagatatctcataaaaatttcggccagaacaaaaaaaaaaagtaaaattaattttccttaaagacaactagaaagaaaagggtccccccaacccaccttttttttttttttacttgaaatctgccagccagacaggatttctgaggttaatctgcttctgttaatcctcaatttaagcctttatcatttttctctgactagagacatccatgaaaagccacctgttattcacaggggctgcgcttcaggaaaccaaccaaatgcagaagcagagaacttaaatattgtaaataagttaactgggcatgaaaatacaatgccttggtgttcaggtggtgacaactgctctttaagaggggacaagaaattggggggtaggggacacatgggaaaaaaccacacattttttggtcatgagaaattggactttaaatccgcgccctgcacacgcaattcatttagaccttttcgtgaatcttctccactttcacaaacaacctatccagatcattcctcaggtcatctagtaaacccttggctgattccagattgttctcgttggtttctattttgaccgagtatgcaaccaaactgtccacagcagtcctgagcattttcaagtccgcctccacttggctgactgaggctttcaggttgtctagagaagaaagtctgtccaggaagtcctgaggaggcagacgggcggcctgggcttggtcctgactgagcagcgtgtgcacctgctcctgcaccttctggagtgattccacggtgctggggagctcgcccacactcctcttcagctcctccacgtcaccgtagagcaccagctgggtctcgcccaggctcctcaccgtgctggccaggccatcctggtctgcctctgaggacccgaggccttccaggcgcccctgcagggcggccaggcgctgctcgtgctcctggctcttggacaggagggactccaggctctcggtctggcgcgcagaagccacctgcatggagagcaccccatcctccacgtgctggagcctggagtccagtccctgactcttttgctggagtgcctcaaaggcttccgagtgtctgaagcctccgtcctccttcggcccgtgggaatcggacttcagctggcggagctcttcctccagtctccggatctcctccgggaggcgggagacggactcctcagacctgagaagcttctccgtgagggcctgcagggcgagccgctccgtgtcggccgcctccttgaaagcctgctgctcctgcttgaggctcaccagctcgcggacctcggtgtagatgtcagactccatagtctgaagggtacttctcagggcctccatgtcccactctctggacttggctgaggtctgtatctccttcacagcttcctttaaggctttcaaatcctgcttgttcccctcagattcttccagggaggcaacctttgccttcatgtcattgatctccttctggctcctcttctggacttctgtgaagatggcgatgttgtcgttgatggatttggtgagctccgtcagccgctcctccaccgtgttctccagggacgtgaagtcccgctcccgggcgtccttcaccacatggatcccatccgagaggtctttgagaatctcattctggagtttctgcagcacttcgctgatccggctgacctcactctccccttgcttcacagctttctctgtgaggtcttgtttatgttgggagcttctcaagatggactcaaaagttccaaatgtggcttgcaaagactgcaccttctgctcgacgccctgcaagccctggcccagctcctccctctgccgggagaagtcctggtggctgcgccggacctgctggacctcctccaggacgtggtggacgcaccagcccgagaaagcggccgccgccaccagggcgaggtagaagagaaagttgagcgccctgccgagcctgcgcgagcaggacgccgaggacgaggcggcggcggcggcagcggcggcggaggcggaggaggaggaggaggacttgccgccgccgccgccgccgccgcggtggccgcccttgccgtgcgcctggttctgcgggtgctgctgcgggtgctgctgcgggtgcggcgcgggcggcggcggcggctgctgcggcgccggcggcggcttcttcgccacgtcatccgcgccgcccgacgggtgggcacccttctccgaggggctcgcggcgccgtggccgcccttggagcccctttgtttggccgagggcatggcgggcgcggcggcggctcgggccgcgggctgggaggcgagcgagcgcggcgcgcggcccgggaaacttgcaggggctcccccgggactgggcgagcggcacgcgggcgctgctggcgtcggagcggcgagaggacgcgcggccgacgggtgggcacccttctccgaggggctcgcggcgccgtggccgcccttggagcccctttgtttggccgagggcatggcgggcgcggcggcggctcgggccgcgggctgggatccatgtggtgaaggacgcccgggagcgggacttcacgtccctggagaacacggtggaggagcggctgacggagctcac

SEQ ID NO: 59381 - DNA, 2629 bp, Homo sapiens
tttcgtggaagccataaaaattgggccttgagagacagtttgaggtaaggcgttgtatatattgcagatagctctgaggtttttggagtgtaccatgctgtcttcctggcaaggaggcccaagaccgcggcaactactgctctggcttctgatcctcgcagcctgggagacgggtagtggccagctccactactccgtccccgaggaagcaaaacacggcaccttcgtgggccacatcgctcaggacctggggctggagctggcggagctggtgcagcgcctgttccgggtggcgtccaaaagacacggggaccttctggaggtaaatctgcagaatggcattttgtttgtgaattctcggattgaccgcgaggagctgtgcgggcggagcgtggagtgcagcatccacctggaggtgatcgtggacaggccgctgcaggttttccatgtggacgtggaagtgaaggacattaacgacaacccgcccaggttctccgtaacagaacaaaagctctcaatacctgaatccagactgcttgactctcgatttccactagaaggcgcatctgatgcggatgttggagagaacgcattgcttacttacaaactcagtccaaatgagtattttgttcttgatattataaacaaaaaagacaaagacaaattcccagtgcttgttctgcggaagctgctggatcgtgaagaaaatcctcagctaaagttgttgttgacagcaactgatggaggcaaacctgaatttaccggatctgtttctctgctgatcctggtgttagatgccaatgataacgcccctatctttgacagaccggtttatgaagttaagatgtatgaaaatcaagtgaaccaaacattagtaatacggctcaacgcttctgattcggatgaaggaataaacaaggaaatgatgtattcatttagctctttggtcccacccacgataagaaggaaattttggataaacgaaaggacgggagaaataaaagtaaatgatgctattgactttgaggacagtaacacttatgaaattcatgtagatgttacagataagggaaacccacctatggttggtcactgcacggtcctagtggaactactggatgaaaatgataattcacctgaggtgattgtcacttctctgtctctcccagtgaaagaagatgctcaagtgggcaccgtcattgccctaatcagcgtttctgaccatgattcaggagccaacggacaggtcacctgctctctgacgcctcacgttccgttcaagctggtgtccacctacaagaattactactcattggtgctggacagcgctctggaccgcgagagggtgtcggcctatgagctggtggtgaccgcgcgggacgggggctcgcctccgctgtgggccacggccagcgtgtctgtggaggtggccgacgtgaacgacaacgcgcctgcgttcgcgcagtccgagtacacggtgttcgtgaaggagaacaacccgccaggctgccacatcttcacggtgtctgcgtgggacgcggacgcgcaggagaacgccctggtgtcctactctctggtggagcggcggttgggcgagcgctcgctgtcgagctacgtgtcggtgcacgcggagagcggcaaggtgtacgcgctgcagccgctggaccacgaggagctggagctgctacagttccaggtgagcgcgcgcgatgggggcgtgccgcctctgggcagcaacttgacgctgcaggtgttcgtgctggacgagaacgacaacgctcccgcgctgctggcgtctcccgctggcagcgcgggcggtgcagtcagtgagctggtgctgcggtcggtggttgcgggtcacgtggtggctaaggtgcgcgcagtggacgctgactctggatacaacgcgtggctgtcgtatgaattgcagtcggcggcggttggtgcacgcatcccgtttcgcgtggggctgtacacgggcgagatcagtacgacgcgcgctctggatgagactgactcgccacgccagcgcctactggtgctggtgaaggaccatggcgagccgtcgctgacggccacggccactgtgcttgtgtcgcttgtggagggcagccaggcacccaaggcctcgtcgcgggcttcagtgggcgtggcgcccgaggtggccctggtggatgtcaacgtgtacctgatcatcgccatctgcgcggtgtccagcttgctggtgctcacgctgctgctgtacactgcactgaggtgctcggcggcgcccaccgagggcgcatgtgggccggtgaagcccacgctggtgtgctctagcgcggtggggagctggtcttactcgcagcagaggcggcagagggtgtgttctggggagggcctgcccaaggcggacctcatggccttcagccccagccttccaccatgcccaatggtagatgtggacggggaagatcagtctattggaggggaccactctaggaaggtgggttattacgttttcattttccttttgtgctttatgaataatattttctcttaccgcattttctcaaatatgtatcagaatatttcatttttgtctacattccatttatgcttgaatatttctagtgatacctttgtaata

SEQ ID NO: 59382 - DNA, 2265 bp, Homo sapiens
aagcccgcagtgccggaggcccgcagcgccggaacctcagaggcgggtcgcagcggcgcagaggaggtcagctgcgggagcgtttccggggacggtgccgccatgagattgaccccgcgcgcgctgtgcagcgccgcccaggccgcctggcgggagaacttccccctgtgcggtcgcgacgtggcgcgctggttcccgggccacatggccaaggggctgaagaagatgcagagcagcctgaagctggtggactgtatcatcgaggtccacgatgcccggatcccactttcaggccgcaaccctctgtttcaggaaacccttgggcttaagcctcacttgctggtcctcaacaagatggacttggcggatcttacagagcagcagaaaattatgcaacacttagaaggagaaggcctaaaaaatgtcatttttaccaactgtgtaaaggatgaaaatgtcaagcagatcatcccgatggtcactgaactgattgggagaagccaccgctaccaccgaaaagagaacctggagtactgtatcatggtcattggggtccccaacgtgggcaagtcctccctcatcaactccctccggaggcagcacctcaggaaagggaaagccaccagggtgggtggcgagcctgggatcaccagagctgtgatgtccaaaattcaggtctctgagcggcccctgatgttcctgttggacactcctggcgtgctggctcctcggattgaaagtgtggagacaggcctgaagctggccctgtgtggaacggtgctggaccacctggtcggggaggagaccatggctgactacctgctgtacaccctcaacaaacaccagcgctttgggtacgtgcagcactacggcctgggcagtgcctgtgacaacgtagagcgcgtgctgaagagtgtggctgtgaagctggggaagacgcagaaggtgaaggtgctcacgggcacgggtaacgtgaacgttattcagcctaactatcctgcggcagcccgtgacttcctgcagactttccgccgtgggctgctgggttccgtgatgctggacctcgacgtcctgcggggccacccccgcgtgtgagactttgccttgaacttgtccgggtagggagggccggaggcatgtggcctcccagacctcctgacctgggtggttgaggctcaagacagctcacccggtccagaagctccatgctggtcactagggtgctgtgctctctggcgccccacagcctggccagctccagggaccccagttgcagggcccaagcaggtgggagtggacaccaggcttcccagtggacgtccctgagcagctccgcatgcttggttctcccggagcttcctgctcaggcctcttgagaaatggatgctgtctcagaaggagttaaagctataacctgtaacctttaaaatctccagttaaagggcctgtttcttactggcctgtgaggtgcaccgtagtgccttgggcctgtgtgttaaagctgctctcaccagtggaacctaagaaatgagcaggttggcagctagggtttgtgttggaggctttcggtccagtgtcttgcagtcctacaacaagtgagaggcttgctgccatcagagaggtttatttcacacttacaggcacacacagacacagaccagagactcccagcagcagagcccaagcactggcttcgcccctcagtgccctggggcatgttcagggcagggttgagggggacgccctgcacatggctttgctgtgcaatgactggaaggccgcccggcatgggcagtagagacccctggcctctgagcaccttctagctcacgggtagtgggattctgcattagtggggctgagagatgtgggggcccctccagccccattatagtgcacctgaaggggtccacagcctgtgtcctagaagagggaagaggaaggaaggtgggtggggctggtagtatggactaaggtgctgcaggacctggggccagggacatcctgtgcagaagctccggctgcctctttgcggtggtggcctgaccgtcccacagcagcctccaccagggccctggtgctcagtggcccctctttgctggctggctgcctctgctgccccataccccacacactcatcagcctgaagttagcccctgagtgccacctgcatcgtgccataaccctgaccgcctggggcaggaagtatttaagttggctgggtcagatgctaatgtgctgaatcaacagtcattgcagatcacg

SEQ ID NO: 59383 - DNA, 7153 bp, Homo sapiens
gccagcagtgctgttggaactgctctgccaaaatttgccatccgagggatgctgaaaacctttgggcttcatggagtcgtcttagatgttgattcagtgaatgaactggtgcaggtagaaacgtacctccgcagtgaaggtgtgctggtgcgatactggtatcctattgacatgttggaaaggcccccagcaggctaccgaaggactgccaccaatgggctggtcacactggacaataccaaccttcaaattcacagggagctgctgcgctgcgaggctgcgctggccaggctgtactgccgcatggccctgctcaatatcttcgccccgaagttgcctcacttgttcactcgcctcttccacatccctgccatccgggacattaccctggagcacctgcaactgctgtccaatcagctcctcgcacctcctctcccagacggcaccatcagctccagctcgatcctcctggcgcagtctttacagcattgcatccattcccagaactgctccgccacggacctcttttaccagggcaactcccagacagtgagagagtggctcaacgtggccatcacccggaccctgcaccagggcgaggagagccttttagagctgacgaaacagatctgctctttcctgcagacagcaccagagcagttcccctccgaagagttcccaatttccgaatccaaagtcaacatggacgtgaatttccccggggcagcttttgttgttgtgtcttgtaaagaaagtcaatctggattccgcaaagactcctctctgtacaaggcaccgtgggcacgggtgctcgtatatggcctcggccacaaagtgaagcgaaatggccagctgaacctcatcgaggccgcctgttacccgcgggacgcgtccccagccaacactgggcttgcacctccccccaccgctgaccagtacccctctgtggtcctctccacagacagggtccacatcaaactgggggtgtctccacctcctggagcagtcctggtgttacattccctgcccctggagttcccactggctatggccttcgcagagcagctgctgtcctggaaatcagaggacagtgaagggaagtccgaagatgagcctgacaccattccgacatccgtcctcctgcaggtggtggagctgctaggaaacttcttgtggaccacggacatggcagcctgcgtgaaggagcttgttttccatctcctggcagagctcctgcgcacggtgcacaccctggagcagaggcggcaccccgctggcctgtcctcctcaatcgccctccagctgaacccctgcctggccatgctgatggccttgcagtcggagctccacaagctgtacgacgaggagacgcagaactgggtctcaggcggcgcctgcgggggctccgggggggcggcggccggtgaccagggcaggttctctacgtattttcatgcactcatggaagggtgcctggctgtggccgaagtgaccctgcctactaacatgagtgtcacagccagtggggtgacctcagcgaccgccccaaatctcagtgactcgtcctcctcctcctcgtcctccccaggacagaccccacagagtcccagcctcctctccaagaggaaaaaagtcaagatgaagcgggaaaaggcctcctcgtcgggcaagcgccagtcttcccgcaccgtggactcggaccccaccgtgctcagcatcggaggcagcaagcccgaggacatgctgtggttccaccgcgcactcaccctgctcatcatcctccgccacctcaccaggaaggacccacaggggctgggcgtgacgagtgacgccatcgccgatgcctgccaggccctggtgggccccaccgcccacagccgcttgctggtgatctccgggatccccacccacctggacgagggcgtagtcagaggcgccatccgcaaggcctgcaacgcccacggcggggtcttcaaagacgagatctacatcccgctgcaggaagaagacaccaagaagccaaaagacaaggccgagggcggggacgggaaagttgagcccgagaagacactggccttccccggcacagacagcatggaggtcagcacgtccagcagcctgacccccgccatgagcatcagcgcctccgcctccaccagccaggcctccatctgcagctcgcagggcatctcccaaaccgtcagcgacctctctgtggatccgctgcctgccggcctcgagctgcccatccctccgggcctgttggagccccacgcggtgtccagccaggaaagcctggacatttccctgtgcagcaccggcagcctgggcagcctgggcagcctgggggagcccctggacaatgcagagacggcctcggtgtcggacatgggctccatgtacacagtcacttccctggacaaccagcccctcgccgcccgccccatcaaaggcttcgcagtcgtggagataagatcccgagccaaaattgagaaaattcgagcaagtttatttaacaataatgacttgattggtttgtcaagtttggatggtgaagatgaattgatggaaatgtcaacagaagagattctaaccgtgtctgtagtaaatcagagtctctttgatactcaagggagcccagggttagaagattatttcaatgataagtcaattaaaggggagaagctggtgcccggagccagagaggttctgacggagatatttaagagttgtgcccattcagagcagacgctgagcctgacaccagcgaagcccatcagagtctctgacatttatcttagcaaagagcagatcaactcccagaccccaggcaacctcctccacctcttcttcaccaatgtccggccgccaaaaaaggtgctggaggatcagctcacccagatcctgaggaagtatggcgtgccaaagcccaagtttgacaagagcaagtacagcaaggccgggaaggagcagcaccccgtgaaggtggtgagcaccaagcggcctatcaccaagccgcccgccaaggacaaggctgtgctcaacagcgtcagcaggactgccttaagtgagaagaagccaactgtgaagccaaaatcaccagaaaagagcaaaccagatgaaaaggacccagaaaagtcacctaccaaaaaacaagaagtccctgaggaaaaatacctgacgctggaaggatttcacaaatttgttattgaccgagccaggcaagatatccgtagcgtctggagggcgatcttgtcctgtggttacgatcttcactttgagaggtgcgcatgcatcgatgtccgacatgcacagaaggcctcaagaaagtggaccctggagatggacgtggcacttgtgcagtacatcaaccagctatgccgccacctcgccatcacacccgcacggctccatccccatgaggtgtacctggaccccgcggatgctgctgaccccagagtggcctgtctcctgaacgtgcccatcgagagcctgcgcctgcgcttcgccttgctgcagtccctcaacaccacactggagaccttcttcctgcccctggtggagctgcgccagacacccatgtatacccacagcatcgccgccctgctgaaggaggccaaagggctgatcttctatgacacgaaggtgaccgtgatgaatcgagtgctgaatgccactgtgcagaggacagcggaccacgcggcccctgagatcaccttggacccactggaaattgtgggaggggaaatcagagcttctgaaaactcctacttctgtcaggctgccaggcagctggcctcagtgccgtcgtctcagctctgcgtcaagctggccagtggcggtgaccccacatatgccttcaacatccgcttcactggcgaggaggtccatggcaccagcggctctttccgccacttcctgtggcaggtgtgtaaggagctgcagagttcctcgctgtcgctgctgctgctgtgccccagctcagctgtcaataagaacaagggcaagtatatcctgaccccgagccccatcacctacggggaggagcagctgctgcacttcctggggcagctgctggggattgcaattcgggcagacgtcccgctgcccctggacctcctgccctccttctggaagacgctggtgggcgagcccttggaccctgagcaagacctgcaggaagcggatatcctcacctacaattacgtcaagaagtttgagagcatcaatgatgagaccgagctggaggccctgtgcgctgagatcgcctcccagcacctggccacggagagccctgacagccccaacaagccctgctgcaggttcacctacctgaccatgacgggcgaggaggtggagctgtgcagccggggccggcacatccttgtggcgtgggagaacaaggacatctacgcggcagccatccggagcctgcggctgcgggagctgcagaatgtggagtgcgtgacggccgtgcgggccggcctgggctccatcatccccctgcagctgctgaccatgctcagcccactggagatggagctgcgcacctgcggcctcccctacatcaacctcgagttcctcaaggcccacaccatgtaccaagtggggctgatggagacggaccagcacatcgagttcttctggggggccctggagatgttcacccaggaggagctgtgcaagttcatcaagtttgcctgcaaccaggagcgcatcccgttcacctgcccctgcaaagatgggggtcccgacactgcccatgtgcccccgtaccccatgaagatcgcccccccagatggcacagcaggttccccagactctcgctacatccgcgtggagacctgcatgttcatgatcaagcttccccagtactcctctctggaaatcatgctggagaaacttcgttgtgccattcactaccgtgaagaccccctcagtggctgatgggagggagccccagaattaggctgtcactgaggcacccactctgctggcttgggaagccaccactgcggcccgtccctccagggccctgcgtgaggagttggcaacattttgcttttccaaactttcgtccacattccagggcctcctggaagacttaaccttttgtctttgtacgtttcgtgatgggttggttcttttgctgcctgtttgtggtctatttgtaggatagtttagttcccagacagtttgtgtctaatttgatcttcttggacattgtccctcatggccaccagattctaatgccataaggccccagctggttccccatcacagaaccacccagcaggaagccgggggtacaatgacctcggccacacagagcgctcgtgctttcagcagagcgcctccacagacaagcctgtggccagccctgccctccagcctcgagctggagttgctccagaggcagccccagcaggcctccctccacatagaggtggctgggccaattgcccaaacacgtgagacacacagggagctttatgtgttcatcttcctgctttagaacttgctcccggtcttggtttttctgaggaaaagcccacagtggttcccctgcccctcccatacctccctatctgccgtctgtctctttgggccctggtctgacagttttcatctgaggcctcctcgggagcaggagacttaagggttcatcccgaccttagttcacagagcctagctgggtgcatcccagccggcaggggggtgaggaagacacccagagatgggggggacaatggttcaggtggggggcctcctccgagactctggttgagaggaaagcacatgattcaagcctaccccacaaaaaaggagcacaaaatgctcagaaatggcccttcctccctgcagtgacgtaggacaagggaaagggccacacccattttcaaaagagtggactgaggtgctctgctcaatttggggtctgctttagtgacccagacactcaagtccagatggagactccaggggggtccttctgcccctctggccagccccacccagcactccccatcaccccatgtaagtgtgtatgccagggctgagctgcctccaggctcacccactgcatctttgccccaaataggtctttgtccagtggtactttgttcatgagcagcacaggccatcttgttggacactgtcactttgggccttgccaggtctcacagaatcacatcgctgtatttattgtataatattgtgaatattggaagttttgagtgagtgctgtctagaaggttttggagtgtggatgctggtccaagaaagaagatgtgccctggcctgctggaaagattgtgaattctagagatagagccgttagcatccatctcctccctgtaactcttaggaaatgcatcaaggaccattatagaaaggatcccctgacctaaggatgaaatcgacctagggttaatcatgacagctgcatcagttgtattggatgcaagtcaactctggaggtgagtgcccgcaagcagttcccctgctttgaaagaagatggtcagcccgctgcctccccagcggccacagctcctttgagtgtggggggtcacagccaggatgtattcctgacaataaggatccttttattttcatttctgcataatgaaagagcctttcgatttattagaagtggtttttcctccctacatctttaaattcttggttctctttagtcctcatcccttgaatggacttgtcagctacctccccaggaggagttcagaagcttctgttggccatcacttgagtagatgacaagctgtaaggtatctgctgctaacgtggctgcttctccgagagcacattgaggtccagacagatccaaaccttggccctaaaaaatgtgtgctgtaaagttacttgatgtatatttattataattatttatggttgcatttaacaaacttttcattcaatctgatgctatttacaccatgctgtgtaaaggaagctcactaaaggaaaaaagtcacaccaataaataaccttcatctaattttgatttaccttaaaagttgtgtgaacacctacccttgctgagcaagttcaaaggctggcatgcttggatggctctgatatttaagtgctgccaagtggctaggaattaaagtgtttctaattattatggtc

SEQ ID NO: 59384 - DNA, 2966 bp, Homo sapiens
  misc_feature (1)...(2966): n = a,t,c or g
ggtgggtgagcagcatgggctttgaggagctgctggagcaggtgggcggctttgggcccttccaactgcggaatgtggcactgctggccctgccccgagtgctgctaccactgcacttcctcctgcccatcttcctggctgccgtgcctgcccaccgatgtgccctgccgggtgcccctgccaacttcagccatcaggatgtgtggctggaggcccatcttccccgggagcctgatggcacgctcagctcctgcctccgctttgcctatccccaggctctccccaacaccacgttgggggaagaaaggcagagccgtggggagctggaggatgaacctgccacagtgccctgctctcagggctgggagtacgaccactcagaattctcctctaccattgcaactgagtcccagtgggatctggtgtgtgagcagaaaggtctgaacagagctgcgtccactttcttcttcgccggtgtgctggtgggggctgtggcctttggatatctgtccgacaggtttgggcggcggcgtctgctgctggtagcctacgtgagtaccctggtgctgggcctggcatctgcagcctccgtcagctatgtaatgtttgccatcacccgcacccttactggctcagccctggctggttttaccatcatcgtgatgccactggagctggagtggctggatgtggagcaccgcaccgtggctggagtcctgagcagcaccttctggacagggggcgtgatgctgctggcactggttgggtacctgatacgggactggcgatggcttctgctagctgtcaccctgccttgtgccccaggcatcctcagcctctggtgggtgcctgagtctgcacgctggcttctgacccaaggccatgtgaaagaggcccacaggtacttgctccactgtgccaggctcaatgggcggccagtgtgtgaggacagcttcagccaggaggctgtgagcaaagtggccgccggggaacgggtggtccgaagaccttcatacctagacctgttccgcacaccacggctccgacacatctcactgtgctgcgtggtggtgtggttcggagtgaacttctcctattacggcctgagtctggatgtgtcggggctggggctgaacgtgtaccagacacagctgttgttcggggctgtggaactgccctccaagctgctggtctacttgtcggtgcgctacgcaggacgccgcctcacgcaagccgggacactgctgggcacggccctggcgttcggcactagactgctagtgtcctccgatatgaagtcctggagcactgtcctggcagtgatggggaaagctttttctgaagctgccttcaccactgcctacctgttcacttcagagttgtaccctacggtgctcagacagacagggatggggctgactgcactggtgggccggctggggggctctttggccccactggcggccttgctggatggagtgtggctgtcactgcccaagcttacttatggggggatcgccctgctggctgccggcaccgccctcctgctgccagagacgaggcaggcacagctgccagagaccatccaggacgtggagagaaagagtgccccaaccagtcttcaggaggaagagatgcccatgaagcaggtccagaactaagtgggagtggaggcaggccctccacagaagctctgcagcaggggctgggagagcagaagggcaggccctgcaactcaggctgggagtatcgaaccctctgcctagggccggagttgctgccagtacccgctccctctgctcatccatccttgattatttggcttctaggaacagttgacttcccagaatgcagtgggctgctgggcacccctctcacggttggggaggattctgtaaataaaggtgccccttgggttggggcagtggtgacgagctgtgggaagagccctggataggaagccactgagtctgccctgggctctgataaaaccttcaccattaacttgctgtgtgaaccttgggcatgtggctttcccttctctgggcctcagtctgttcatcctccccaaatggataaatgaaaacctcttgggaggcccttacaataggatctgttgccatgctcaaaatgaagttacctgaaataaggtgcttcctgcttcctcctagagatgggtgcctaaagaaaggacttagcatatgagacttctgggtacccaatggggctgggtgggcatgcttgtccacttgtgtggtgcttaggacttgccaatgcccaggcccaagggacaaaaagaacagagctttttgttctcatgggctgggccctgctacctccgagggcaccctgcagggcaattgcatgttcatccccaacccccacattccccatcctccaaacccactgggtctcatgcccaaaagaagaagttgaaggcatggggagccaacattttatttgaaggaagccacagaggcttgaaatttcaattaaaacacaaagttttatgagtaccttgaagctccagaatgtgctggggaaaggggttgtgatggccaggaggaggatacccttcaaaacgggctgttccctaaccagatagaaatgggaaagggaaaaaattggcagagaaagtctagactctctggcctaccatggagcctaggcccaggcccccaagatcccaccttccccaacccccatgggactggagatttttgtagcttccattggaccatgaggggcatgatgggaggcctgagttagggtgaccttttttgtgagcgtctcatttgaattttatcttcactggggtcatagatgtagcagcccacatcgccaatgttcacacctttggggacaaacaggtagccgtagcangggacgtggcagtaggggactccatcatgctcagcatgacttccagcagtcagggtcttgtggcaacgcttgcacctcagaca

SEQ ID NO: 59385 - DNA, 1608 bp, Homo sapiens
ctgatgtaaacacccgagccgggctccaaggcccgggaggtcagaaaaccgggccgcgggcggcaccgacagctggggcccgggtcagggacacgcggaggtcaggccggtgaaggcggcaggaagctggagcacgatcccaggaggaacaatcctgcaccatgactcaacagccacttcgaggagtgaccagcctgcgtttcaaccaagaccaaagctgcttttgctgcgccatggagacaggtgtgcgcatctacaacgtggagcccttgatggagaaggggcatctggaccacgagcaggtgggcagcatgggcttggtggagatgctgcaccgctccaaccttctggccttggtgggcggtggtagtagtcccaagttctcagagatctcagtgctgatctgggacgatgcccgggagggcaaggactccaaggagaagctggtgctggagttcaccttcaccaagccagtgctttctgtgcgcatgcgccatgacaagatcgtgatcgtgctgaagaaccgcatctatgtgtactccttccccgacaatccccgaaagctgtttgagtttgatacccgggacaaccccaaggggctctgtgacctctgccccagcctggagaagcaactgctagtgttcccgggacacaagtgtgggagtctgcaacttgtggacctggcgagcacaaagcctggcacctcgtctgctccattcacgatcaatgcacatcagagtgacatagcctgtgtgtctctaaaccagccaggcactgtagtggcctcagcctcccagaagggtacccttattcgcctctttgacacacaatccaaggagaaactggtggagctgcgccgaggcactgaccctgccaccctctactgcattaacttcagccacgactcctccttcctctgcgcttccagtgataagggtactgtccatatctttgctctcaaggatacccgcctcaaccgccgctccgcgctggctcgcgtgggcaaggtggggcctatgattgggcagtacgtggactctcagtggagcctggcgagcttcactgtgcctgctgagtcagcttgcatctgcgccttcggtcgcaatacttccaagaacgtcaactctgtcattgccatctgcgtagatgggaccttccacaaatatgtcttcactcctgatggaaactgcaacagagaggctttcgacgtgtaccttgacatctgtgatgatgatgacttttaaggaccctgggggctgtgctagggacctgcagtggcagaactgcagagctgagccttggcagtggggcgtgcttggaagccaccagccagcaagcattaatggggctggtgcccactttccactcagcagagctatgtctaaataaagagctcacttccccccagcacttcttgatgactgtagatcccccaagggccaggccgagagacccaggaaggcagcgaccccttgggatccctaacctggaggaaattgccagggacccagagggagtgccctaatccaacctggggatttttttaaaagcttcctaggaagagatgatctccgatgtgatgaatacgaataaaaggcccttaatggc

SEQ ID NO: 59386 - DNA, 1979 bp, Homo sapiens
cccacgcgtccgggcggctgacgtggccgctggagctcaggcggtggtttcggctgggatggcgaagagcaacggagagaatgggccgcgcgcgcccgcggccggggaaagcctgtcgggaacccgggagagcctggcccagggccccgacgccgcaaccaccgacgaactcagctctctcgggtctgactcggaggccaacggcttcgccgagcgccgcatcgacaagttcggcttcatcgtgggctcgcagggcgccgagggcgcgctggaggaagtacccctggaggtgctgaggcagagggagtccaagtggctggacatgctcaacaactgggacaaatggatggccaagaagcacaaaaagattcgtctgcggtgccaaaagggcatcccgccttctctgcggggccgtgcttggcagtacctgtcaggaggcaaggtgaagttacagcagaaccctggaaagtttgacgagctggacatgtcccctggggaccccaagtggctggacgtgattgagcgtgacctgcaccggcagttcccattccatgaaatgtttgtgtcccgggggggccacggccagcaggacctattccgtgtgctgaaggcctacacgctgtaccggcccgaggagggctactgccaggcccaggcgcccattgccgctgtcttgctcatgcatatgcctgctgagcaagccttctggtgcctggtacagatctgtgagaagtacctgcccggctactacagcgagaaactggaggcgatccagctggacggggagatccttttctcgctgttgcagaaggtgtcgccggtggcccacaagcacctcagccgtcagaagatcgacccgctcctttatatgacagaatggttcatgtgcgccttctcccgaaccttgccctggagctctgtgctgcgtgtctgggacatgttcttctgtgaaggggtcaagatcatcttccgggtggggctggtgctgctgaagcacgcgctgggctcccctgagaaggtcaaagcctgccagggccagtacgagaccatcgagcgactgcggagcctcagccccaagatcatgcaggaggcctttctggtccaggaggtggtggagttgcccgtgacagagcgccagattgagcgcgaacacctcattcagctgcggcgctggcaggagacccggggtgagctgcagtgccgctccccgcccaggctgcatggtgccaaggctatcttggatgcagaacctggtccccggcctgccctacaaccttcaccatccatccgcctgcccctagatgcccccctccctggctccaaagccaagcccaagccacccaagcaggcccagaaggagcagcggaaacagatgaaggggagagggcagctggagaagcccccagccccaaatcaagccatggtggtggccgctgcaggagatgcatgtcccccacagcatgtgcccccgaaggactcagcccccaaggactcagcccctcaggatttggctccccaggtctcagcccaccaccgctcccaggagagcttgacgtcccaagagagtgaggacacctacttgtaaccctggcagctaaggcctccagggcggggtctccatataactacacggttcatgaactgacattccacatcctgcccaccctctgagggccaagctgcctggccactgggctgggctggagtctggctggtccaacacagattctgcctggtccaacacagattctgcctgagcctccttatttattttctttacagtggcactcaggctggcccagccagggcaggcagaagctagggcctggggggtggggcctccttcagccccctcctcctgggggatgctccccagggttagggtgctggtgtgaggggaaagggtggggtgttctttgtgtaaaatagaaacatggttttgtacagaaataaacagccttgtatagagaaaaaaaaaa

SEQ ID NO: 59387 - DNA, 1618 bp, Homo sapiens
agcttacctgcttttccattacctgttccagcaccatgtcttacagttgttgcctgcccagcctgggctgccgcaccagctgctcctcccggccctgcgtgccccccagctgccacggctacaccctgcctggggcctgcaacatccccgccaatgtgagcaactgcaactggttctgtgagggctccttcaatggcagcgagaaggagactatgcagttcctgaacgaccgcctggccagctacctggagaaggtgcgtcagctggagcgggacaacgcggagctggagaaactcatccaggagcggtcccagcagcaggagcccttgctgtgccccagctaccagtcctacttcaagaccattgaggagctccagcagaagattctgtgtgccaaggctgagaatgccaggctggtggtgaacattgacaatgccaagctggcctctgacgacttcagaagcaggtaccagacggagcagtccctgaggctgttggtggagtcggacatcaacagcatacgcaggatcctggatgagctgaccctctgcaagtctgacctggagtcccaggtggagtccctgagggaggagctgatctgcttgaagaagaaccatgaggaggaggttaacaccctgcgctcccagcttggagaccgcctcaacgtggaggtggacactgcccccactgtggacctgaaccaggtcctgaacgagaccaggagtcagtatgaggctctggtggaaactaaccgcagggaagtggagcaatggttcgccacgcagaccgaggagctgaacaagcaggtggtatccagctcagagcagctgcagtcctgccaggcggagatcatcgagctgagacgcacagtcaacgccctggagatcgagctgcaggcccagcacaacctgcgagactctctggaaaacacgctgacggagagcgaggcccactacagctcccagctgtcccaggtgcagagcctgatcaccaacgtggagtctcagctggcagagatccgctgtgacctggagcggcagaaccaggagtaccaggtgctgctggacgtgcgtgcccggctggagtgtgagatcaacacgtaccggagcctcctggagagtgaggactgcaagctcccctgcaacccatgcgccaccaccaatgctagtggcaactcctgtggaccctgtggcacctctcaaaagggttgctgtaattgaaaagcttgtatcctctttgaagacatctacaaagccatttagatcaaccacaggaaggatcctcaagtcctgacttttctggagctcagctgacatcaagaaacctcatcttgcctctatgttatttctagaatgctgaaaagctttcctgacccaagcaaagacacacatcatcaacttccaatgtctggacaactccttcctgttgagggtcgagcctgtttgtttctaaagatgttcagctccctgtaatctgagctcccagttactacttaaggtgtttcctgaaccgtactactgcatttcctgttttccttttttctttggcattctctggaatgcaaggaggagacttcatttacttcccaataaacttcatttctctggcataaaaaaaa

SEQ ID NO: 59388 - DNA, 955 bp, Homo sapiens
  misc_feature (1)...(955): n = a,t,c or g
ttttttttttttcaacattaaatgactatttatttttcaggtttaaaagatttcaaaatacatatgtacaagataaataaactccccaaaaattatgtcatcaaatatatttaaaaaaaaaattcaaggtaggcaacttagatcaccttggcaaagaacacattaactaagatgaaccagggacaagtcccctaaacatcaggatgaaatttcttttctatgcctactagctgactggccttccttttctgtgttgagttgtgtactctggagtcaccagcctctggtagattatcaagcatctcttcctcatcagccttttgtttctgtcttgcatgcttctctgtccactgtctggcattcttgaggaaggctggcttattatatttaaattctgaggatatgtcagccatgagcgggtcatcagggttgggttctgacatgagcagctgaatagaggtcaacacagttgcgatgttgagggatggtctccaagcaccttttggtggcaatttgagaacatccagacaaatccttccagcagaatcaatgtttggatgataaattggagtgagaaatcggatctgaggaggttcaaatgggtacctctcaggaatgataacttctagcttaaaaacacctttctcataaggtgtgttggctccacctaatatttgagctcgcaggtcatccatttggtctttatcttgccaacatgtgatgcctgggggtggctctgtggctaacatgtgcagctctctcttcagacgtgaagctctctgcatgatccccaagtagaaggaaccacacacagttcactgctccacactaagagctgcctgggatgcactgagctgacacccctcacaacgcagcaacgcgcggaccaacggggtaccagcgcctgcgcgacctctacgaattccaccacactgactatgactcgaanncccgc

SEQ ID NO: 59389 - DNA, 1029 bp, Homo sapiens
cccgggccgacccacgcgtccgcggacgcgtgggcggacgcgtgggctcagcccaacatggcgatgcacaacaaggcggcgccgccgcagatcccggacacccggcgggagctggcggagctcgtgaagcggaagcaggagctggcggaaacattggcaaatttggagcgacagatctatgcttttgagggaagctacctggaagacactcagatgtatggcaatattattcgtggctgggatcggtatctgaccaaccaaaaaaactccaatagcaaaaatgatcgaaggaaccggaagtttaaggaagctgagcggctcttcagtaaatcctcggttacctcagcagctgcagtaagtgcattggcaggagttcaggaccagctcattgaaaagagggagccaggaagtgggacggaaagtgacacttctccagacttccacaatcaggaaaatgagcccagccaggaggaccctgaggatctggatggatctgtgcagggagtgaaacctcagaaggctgcttcttctacttcctcagggagtcaccacagcagccataaaaagcgaaagaataaaaaccggcacagcccgtctggcatgtttgattatgactttgagattgatctgaagttaaacaaaaaaccacgagctgactattagaagacacattagtgcagaagcttccaggctgtagagccctgcttcccttctctgacctcacaaagataaacatccttcacctgagttcgtggccatccacctctgctctcccagacccagtgcctgtgactttgagtagtttgttctaaatgtggtgacaaacaagtcatttctgtaagacattgggtcttactttatgtcatttttagtaacagaactgcaggaagatcaagacaatgttgtaatcccggcaagttgctaactgtgcgtttctcccttcttagaatgaatgtctcccccaaaactggctggcaccagcttcatctgtgatacccttcaagaaatgttctctggttttgttttatg

SEQ ID NO: 59390 - DNA, 1516 bp, Homo sapiens
ttttttttttttagaggagactgaaaaagataatttattccatcagaggcatcacaattacagattacagacatttgcatgcaaatgtctgtaatctgtaattaatatgcagggttagagcgctgcgttttaacatttaacattcatgagtaaacagagatggccggtgggtaaatatcttgccaaggtggttcctggtattaagccttttgagtcttaagatgacaaatccctagggatcaggtggttttcccgcacgaactcttgtcaatgagaaatccctcagccccttttgtcttgggtctcacagctccagaagtgagccgggccagaacgaagccatcctagagtccccaaggacagccctcccgtggaccccggctagggcccccagagtctcatcctcaggagtgcgccagctctgggcctgcgtgccggcggggtctgcagccacaggtcccgcgagtcccggacacttccaggacgtggtctcctggtgagacagctcctccgggtaccagtctcgactcctccgggcaggcgacaacaaagtcgagtcccgccctccacgttcgcctgctgcgcgctcttgtcctctctcggccgcgccaactctggggcacagctggctcctcctgggggcgatgcagcatcacagggctccggcccaccccgggccagggcgccgaccctccctgccggaccctctctagaaggccgcgggtctgggtctggctcatcccttaaagattccaagattgggcgcactctgagctccccaaacacaaaatgatgggatccctgcgcgtgcccccacgtcacagagtggtaggggtccaggggcattctaattataaacggggctcaatcacaccccaaaattctaaacgcctccacccctaacctgcaggtgcaaacagcacccctatttcattgccggcagctactttgtactttcgtactgatagacaaagatagtgacaacaaagacggaaagaaacaagcatcgaaagctacatgaagggggtgcagcgctgttctaaaacacaaaatgccgagccccgttttccctttccctccccgctcggtcctgcgcccaccccgtcccgcgctggccactcaggcaagctgtaaatggatataggtaaagatgcaggaggtgatggagaaggcgatggctgcgtagatgaagatggagaggtgcggaaaatggtcgagatagcagccctcgtccagtggaggcgcctccttctgggcggggggcgcgatgcggccttcgggggctgcccggcgcggcccccctgcgccctcccgcccgcgcgccgaccagccttcttgcccgcggccgacgccgacctgggcccgcaggcagcgggagggtcttccgggggaggcttgtcaaacaggccttcggactcggggtccgggcgaatctgctcgagaccccagggtctgcgccgaaacagcccgtcagccatgggcaggatcgcgggtaggtgggtcagccgggtctggg

SEQ ID NO: 59391 - DNA, 1088 bp, Homo sapiens
acccacgcgtccggctatggttgcttggagagtgcatccggcccggtacttgtgatcggaggagagccggatcgtccttccttgaaccctctgggtagggctgtgctgaggggctgggcggggagcacaggccgtgtccgctcgcttgcaccttttcagactgccgtgtcaggcctcgagccgggcccacctggagccctcccctgcccacccgcccccagcgcccgatatccgcccccggcccagaagggccgggctcggtcatccccagtcccgtcgcggccactgacccttgagatcagccctcccctccccaccttcccgtcccaggccagcccagggcccgaagcccacccactcgcgtctctagcagccgctcttgtcctctgggtacggctcgcgggagtgttggttaccatggtgaagctggcagccaaatgcatcctggcaggagacccagcagtgggcaagaccgccctggcacagatcttccgcagtgatggagcccatttccagaaaagctacaccctgacaacaggaatggatttggtggtgaagacagtgccagttcctgacacgggagacagtgtggaactcttcatttttgactctgctggcaaggagctgttttcggaaatgctggataaattgtgggagagtcccaatgtcttatgtctcgtctatgatgtgaccaatgaagaatccttcaacaactgcagcaagtggctggagaaggctcggtcacaggctccaggcatctctctcccaggtgttttagttgggaacaagacagacctggccggcagacgagcagtggactcagctgaggcccgggcatgggcgctgggccagggcctggaatgttttggaacatccgtgaaagagatggaaaacttcgaagcccctttccactgccttgccaagcagttccaccagctgtaccgggagaaggtggaggttttccgggccctggcatgacgagctggagcagatcgtgctgcacaaccggagaagacagaattacctctgctcttttaatatataatgatggctccccaataaaattaggagaaaatgtaaaaaaaaaa

SEQ ID NO: 59392 - DNA, 1078 bp, Homo sapiens
ccaaccccgcgcgccacccgcggcttcctccgctcggggtcctcgttcggcctctgctggcctccgcgactccgcggtgcccgcccccgttgagttcaaaaggacgcgcggagcggcgccggcccttcaccagcagcccgtccgactggaaagatctgcctcttctccaagaaactcaaccactagtgacaatgaccagcctcctgactactccttctccaagagaagaactgatgaccaccccaattttacagcccactgaggccctgtccccagaagatggagccagcacagcactcattgcagttgttatcaccgttgtcttcctcaccctgctctcggtcgtgatcttgatcttcttttacctgtacaagaacaaaggcagctacgtcacctatgaacctacagaaggtgagcccagtgccatcgtccagatggagagtgacttggccaagggcagcgagaaagaggaatatttcatctaatgactcccaggccccaaggagcttattcctggctccatcgctaacacgttgactgcttattatgggaaagttttctctgaagccagggagaagcattgattgatgtgggcaaatccaagctccagccaggtcgcagtcccaaatgccgacatcactgactccagggaccagggacatggagaaagctgtttatgatatctttaaccaggccctcttactagagctggtgtttgtgactggccaacaagatgtggctatgccaggggacatctgagtatgtgcccagtcatcttttttcacaggttgaagggagagaaaagattttgagttaaggtcattggctgctctactctgtcccctacctggtcacctagtgatagccccagtggagatactgtccatacaaggtcttcccagaggctggataccacagtaaaaggccaggccaggaggggtaggagactatggagatcttacctcctgataaatgtgctacaccccctaatctgagcccttcctttccgtgttccccaacaacctcatgcttacgtgatttttattcaaattaaaaattttcattgctaaaaaaaaaa

SEQ ID NO: 59393 - DNA, 1103 bp, Homo sapiens
ttttttttttctgaaaggtcatctcgtgcgactttaatatttatatccgtagtttcacttggttcctcatttttatgttttttttttaaattaaacacaggttatcaaagtgtaaatgaaaggtaattgtttattactggagaagagaaaaatgtatacaagaaagtctagattctttctccacatgcactacttttggaataaagttccaaatatcaactttgaagatacttacaaggataaatttttcttaacaagtgaccaattactgtgttgtggacattttttcatagaatccatatactgtaaactaaatatattcttatagtttacaggaagcttggagcaattatgtattaacagagaagatggtattatattttactgcaaaatattataaaagtgatacaattttgtggctcttaaatgtttaattacttgatttcaacaggacaatgaaaaaaaaccaaaaatcatcaagacaggcctggctttaaggttttttgtattcgattcgttctactttcacatcatctccaattagctgatacacataggtgaccactgtagaagcctggatatccatcaacacaaatgatggaataatgtttgtttccaaggcattatatgccccagtggcagaacctggattaatgtagaatttattttcatgctcaaatgcttcaaatttgtgtgtgtgtcccgagataagaatgtccacatcaaattgcctctgcaacagggctaagctggccatatctccccatggaataacttgatgtccatggatcagaccaattttgaactgtccaacagtcacaactttctgttctggataattcagattctcatcgaagtctcctctcacaatatgaacatcaccagccagagtcttgagatagtcataactctctttggtgcaaaggtttcctgtgcagagaatgtgctgaatttttcctggcaccaggagttttttgaatttagctggcaaactgttgcaccggtgtgggatgtgcagatctcctaataccaacaccaatctgtgcccagccatcctgtcaccgggctccgctcagtcaccaccaccgtcgccgccctcttcc

SEQ ID NO: 59394 - DNA, 748 bp, Homo sapiens
  misc_feature (1)...(748): n = a,t,c or g
ttttttttttttaagggagaacagttttattagcatcacagggtccatttttccctttccatccaagcatccagagtctggtgtcctttaatcagttggcaggttcaacctggaggccactggagctgccggcccccaagtacatgaatgtgcagatgatacacagattgtgcacccagcttcccatcgttgatcacaagtcggtatccatctcccaggccctcagcctttgctgtctgcttggccacaaggagtaggtgtcctagaagctgctggtcttcttcttcagcctggctaatccgaggaatgggcttcttaggaatgaccaggaagtgcacaggagcctgaggggccacatcacggaacacaagacactgctggtcctcatagagaatgtcagctgggaggctcttgtccaggatccgggagaagatggttggggctgctcccccaggagttgcctgctgggccttggccacttcattcccatcagtcacacctgcagctcctcggacctgccccccgcgcacccccgtggccgccacggctctgcgcgccgcgcgcaacccagcagccagcaccacggctgccgccatcttccctgagccgcgggaacctctcacccgggtcagcactcggctccgcggccaaccgtgggtggggactccgggcncggcgaacgcgtgggcgnacgcntnctcacccanngtnnaacnnntnctaaatttcccnnnaaagaaagcagcct

SEQ ID NO: 59395 - DNA, 1016 bp, Homo sapiens
cggtgactgcaccgcccgccctgccagacccgcccggaacggggctcgtcgccgccagtagccgcagcaccgcagccttgggcctcgcgccggctatggccgtgccctggggctgagccctcaggttgtgaccgagattcccgacgagagagactgaggggaagagaggaaggaggggcgggctcctggcaaggcattcgctcctgagcggaatcctgcaaagatggagaaggaggagacaacccgggagctgctgctgcccaactggcagggtagtggctcccacgggctgaccatcgcccagagggacgacggcgtctttgtgcaggaggtgacgcagaactcccctgcggcccgcactggggtggtcaaggagggggaccagattgtgggtgccaccatctactttgacaacctgcagtcgggtgaggtgacccagctgctgaacaccatggggcaccacacggtgggcctgaagctgcaccgcaagggggaccgctctcccgagcctgggccagacctggacccgtgaagtcttcagctcctgcagctctgaagtggttctgaacacaccacagccatcagcactggaatgcaaagaccagaacaaacagaaggaagccagcagccaagccggggcagtttcagtctccaccccaaatgcaggactgtagaagcggccaggaagaaaaccaccccctcttaaggttgtttttgtgaccgttctttggagcattgttctaaaaatgggaaattacatattgctgtgccaagggcaacaaacacctgcagttaaaggaataccttccgcgaggcggcttttcggagcatgcatgtttatagctccagccaggccagaccgagggctgctgcataagccctgcttggtgcatttctttacttgcaaggggacagagtgtgggcttaggtttgggactagagggggctttggcaactatggtgctcaggtgattatccttcgctcgtttatccaataaacaattatcaagcaaaaa

SEQ ID NO: 59396 - DNA, 5416 bp, Homo sapiens
  misc_feature (1)...(5416): n = a,t,c or g
tttttggataatgaaactttttatatctgttttgcacaaatccccaccaagtaatttcagcataaagcaaaccaaatggcagacgaaatgatgttaggtatccttgtaggtttacttcataatacataacctctaatccatgtccatcttcttgtttctgcttttaattctgccatttcctcttaaaatttagggtttaacaaagacaacagggctgtttgccaaatcgcagctattaattcacagcatagaaaagtcaaagctatagcaaaaaattgctaatctgcacaactttaaaaaatagttcagtacatttttgttataaaattcatttacaggaggttattcacatgtacttgtcaaatttactcctgataattcacaaaaacatacaactcaacaaactgtgcacaataaatccaaggcaaattatatacaaagaaacaaaacaagcttttaagtagcacatattcatttgaaataactaatattgaaagaagacagggaactttcttttaatgccatggcaaagacgaagcgaagagccacacttcacaccttgtaaaaagaatagccctgttcaacaacgctgcgctgacagccacatcaggaggggccacggtgaacataggaaatggctttggcaaatacttgtaccaactggaacgagtgaagtttcaaaagtaatgtgaggtacaactgcattccgctgtgaaaggccgtcacaggacacaggctcgtctgttagaaaggatgatctagttctaccattaattcttgcagaatcagatctgctgagtggtgaaccaacaggtgaacacaacgtaagaacaggcatcaaacttcactggaaataatattgttcagtgtgtggcggcaaaatatgcattttagagaaaacttatttctcaaatcatgtgttaatagtattaacatgagcagcgtgagagacatcctgaccccaacgtttttgccatgcctccctttagaagcttaggagtttgtacattccctaagtggtcagcactacaagtgtctgctaaaatgggcacttcatcaagataacaggaaagcaaacttaaagtaacgagatttcttcccaaaggcacatggaagaagctgatagagcccttgacccagacagaatgggacccatccctacccgtcctgaactgtcgcacactgcatggccaaagacaaactctccacccccacagaggaagcagtggctgactctggggacaaagcactccaggaagtcacctgctccctgggtttcaggagtattcagttgaccgtctggacaccagtgagggagacacaggtaatgaaatcaaatgctcaaacttttggcaaccgaaagttgttttttaaagctctttataatctgctcaagtagaatttctaacacaaaacccttttttgcttaaaaagcagatgacaaaggaaatgtcaaataatgcacatgaatcttcagctattttcctacccccaaatgagatatggggctgcacagcattcattacagatccctagtttttacaactgtcaactgtacattctcatgtttaggatactccagttcactgcgtggatatttggaaaactggacaaaatcaggcagcccacccctcccttgtcccgagattcctcgatctccattcaccatgaccaattttttcccccacaaaagcactattaccttttattagtagctggaaacacctatcagatattctaaacagcatgtatttttaccaggtagatgatttctgaagatcacaggaagtctaccactctcttcccagttctgaactcctctggttacgcttcattttaaatcgggtgcttctttcccgcccaaaatattctatttggcctgccccagtggttcccaagctgcctggtgatcagaatcccttgggaaatgttgaacacacagcttcccaggctttctggaaaactagttagatctgtctgacaatctgtaagctgaggcgattcttccacagctgacccagcgctaatctagcatttggcaaccaaatgtctgtacctcaccagtcacacaaggctcacaatatgctgggagcatttgaatgatagctcaagaattattctttcactccatattcttctctctcaagaagattaggaattttagctagggaactatgtgcatactgaaacaggtaaatgaactcatcacagaaatataataccctgggccaatgcactctatctaaaaatgcaccatgtcagcaaaactttacctaacataaccgtgctgcccaaagtgtcccctaggagactccaggtttttggggggttttttgctttttttaatagagccagagacacctgacccaccagcactaactcagcttattccaagctaggctgttaaataattatctgtcttgctctaacaatggttgaaaggacccgccctcctcccatcttttttttttttggtaatataaagtttgttctgttgaaaactgattaacattttaaacagggggaaagaaaagcggtctactagattaaattttaaaaggattttgttatttgctatacaaatatacatttcaacttttacaacattcactccagtctgacctccttgtctatagaagactaagagatcaacatttccagtctctgacttcaaggacattattacggatacacaatgccctctgaaagcttttgcaaatgacagaaaatactgaagatgaccagaggctcaggtgttaaggatgcattttccatgttttccaacagcacacaaactccttacaaaaaacaagcttatctagatggtcccacgagctggtcatcttcagtttacaatatgctgtggctgctggcccatgtcactgggctttcctataaaagctttcttttcttggaactgctgtcctcctgctccagtgtcctcttgtcccacctagagttcctcctggtgtgatgggtctcggaaccacacttctcctgctccccttcactgaaagccctggcctctctcctgtgacagagctcctcttccgggtcatcacatttgctctgacacgtggaagcctcgggactggcagctggaggttcgccccgcacgggaggtttgtggctgctcagagcagccactacagcagcgggctgctgtacatggctcaggtcctggtgaacgacagggaagcccggctcgcccgtaggaggtgttgctccaggatgctgggggctcgagggttgtggatcccaaaggaatattcctcctttgacctcaatgcccatcctcttcagcagtcgtgggtcctgaagttggtcatgaacaggaggtctttcagggtcctttgaagtaacagtaagagtaatttccttggagtcagagggtgtgtggtatagagaagcagcaacagatgtcttggcaaatccactgtctagcttgctgctgggcaaaccaccctggggtctggacccctctggggctatggtaggagggtgagtgagacttctctgcagcacaggcttgagtttcagaatcttcactgcatcatgtctatagtttttgtcacaggtcttaataatggcaccacgcttctgagcatcctgaatcagctgattccaatgctggttttccatcagggtcctcaaatgtccgaggatgaagaggctgtacttggctcgtgtgatggtgacattcaatctctgcaaacttgccaggaatccaattgaaccttggatgctatttgctctgacacacgtaacaataacacaatccttctgccgaccctggaatgcatccacagtgtctacttctgctggtccttttctatcgaactctttgtccaaatccttctgaatcatcgtcttctgggccttgtaatgagttattatgccaatgtttcgaaaactaacatcctttcttttgtctttaataagcttaattatttccatcaccagttttatttcttgaacatttatatatgagtcattatcccgtctttctgaaccatctccaacatcaaacacaaggtatggctgaaatggccaatctgatgaacatcgaatggcttctgtctgtctatttgtttttaagtttctgttataaacataattagaagggaagaggcatatgtctggatgcatcctgtactgaacagtgagctgtagaatgggcagcctgctgatcatgttgtgttctacattctcttccagcagtctgcagaagcgagccatcattgactggtcgtagccatactcctgtgctttcatagagatgactgtcggagggagctgcttaggatctcctactaggatgagcttattgcagcgatggatgagtggagtaagagtctcaatttcacaagactgtccagcctcatcaacaatgacacagctgaaggggacacccccttgcccacggaaagcagactcaagtagtaaaccaccacttgtgctcaacgtgcagcagatgatatgggactctaagatgatgatactctgtgttttctgtgggcgtccttgaacctctttaattttagaagcaagttcctgcctttccttagaaactttggaaatgttttcatctaattcttgcctctgtatttcccgtccacctcggcatagagctcgctgccgggaaagctcatccagctgataatctagaaattcctttcttttatgcatcgcctgaacatgagaaggtaactcttttttcattctgtggtttacttggctgtccaaactgaactttagaacctcactattaatagacttttctggacccagtcgtactaaatttatatctccacagtttcctaaaggattcttcttgtctttacatttttctttgaattcaaggataatttttttcatgagttcatcaacagctgcattggaaggtgcacacacgaggacacggttttgtttgattttggcattggagttttcgtctgaatgccccttcctctggttctctgtcagtagacgatagaggaggccaacaatagtttttgattttcctgttccaggtggtccatgaatcaagcagattttggcaactgatggtgagtgtttcaccatagcatatgcagtttctattgctttcttttgatcttcattgaaatctcttaagtacgcaataattctctcagatgttgtagtcagtaaatcttttgtacagaagtccatagggtttggattcagaacagctctagccagttggttccgactacccaacagagacatggctttcaacttcctttgtgtagttaccagagaactgattacaatacaattcacaagttcgtttaaattggccggaaagttctcttgagtctggatggaaaggtaacactcagttttggaattccaccgcacttannnanggnctacaatanagggctcgatggcg

SEQ ID NO: 59397 - DNA, 1456 bp, Homo sapiens
ttgtggggaatgggtaaaacctcacccctccctgctttattttcacattttttaacaaaggccccagggaaagggggaaaggtccaaacctgtggaaaaagaaggggctccctgtctccagggtcttgtttaaggttttctcccaattggcctagggccccagcccacttccctcactggcctcaaagccctggagttgagccctctaggcagtcaagggcaggcaggagatgggccagagaggggaggatgtgttctttaggtacagaatccctgaccacggggtccagtgcctgtgggccaaccaccaggaagctgtgcatgcccacagcccgaggcccctggtaatcgcagaggtaattatccccaacatgggctgccactactggttccatatgagcaagccgcaaggcctcctggaaaatgcgggggtccggcttgggccagccagcagcctcggaggtcagcacaaagtcgaagtgttcacgcaggccaaggccccccaggatgccctctagccgtcggtcaaagttggagatcactgccagtctcagaccccgtgtgcggcactccctcagggtgtcctcagccccatccaacacctgccaggtgcaggggtggctgaagtctttataaagctgttcagcgatgggggctacagcctgagcatcctggacacccgccaggtggaaggtctgcaggaccacatccagccaccactggcgggaggttaggccgtggctcaggccgtagttggggaagctgtggctctgagccctgtatgcctgcctgaagccttgttccagggctgagggctccacctccagcccatgggcccgggccttggtggcataggcctcccctaaggggtggcggagcctgagcagcgtgtccttcacatcccacgtcagcagtcgtatctgcagccggtgtgccatggaggaggccaagtccaccccagttctgcctcaggtcccacggtgggtcccaggggaagctgagctggataagaccacctctgcgcaacctaacaatcacctctttccaggccttgtgggtcagatttgctggctaacatgaagcacttgggaaatgtcttcacagcacaagatcccaaggtcacagtgagtcagtggcacagccaggaccagaacccaaacttccagactctctggccagttcttccactgtaccatgagatatatttggattttaaaaattggtgaaccttttctccccacctccagggctcgggaaaggcgaagtccaggagcccggacctgacgcagaatgtctatagctgccgtcggcagcgtgagctggggcggcggtcctaggggccttggccgcggccgaccccttgggtccccttctcagctgtagggcgtccacggctccgggccggttcctgggcccaggacccgcctgactctcaagtaagcatattgaaaccgca

SEQ ID NO: 59398 - DNA, 1636 bp, Homo sapiens
ttttttttttttaataaacataagagtggttttattgattacatacaattttagctatattaatatatattataaactttaagaattagaaataagtgacttttattttttaaccaagaataatctaagttatggcagcatgttcaatgaaaggtaagtccggcacaatttttctatatctgtttctcagataatcaggaacatcatccaagctttacattacgataccataatgaccctcagaacacaagttccattaagtagaaatgaagcatcatatgttttcttttttaggaaagacccccccttttgttgtatagacatacccctaataatcttactctactgtacaaataacttttcacccacaagagctgcctcaagtaactttcattttggaaagctatcaaggcatgagacagagtagcaaaatgccactctggactttgcatcttggagtttcaattttgctttaggatttagaccccagtttataattaaaaccaaatcattcccacattattatacttatgtaggaaagccttgctgtgtccactgttaacacaaagatagaaaatgtcaaatagtttaagcaagtatttggcagaccacagacatgaaacagtgccgtcggaaacggaaacactttagtgttttagaggtgaagagattgatgggtgtcattcaaatttctcatctccttcttctacatctttcagattgagtacttccaaagaacctttgcctttagtttccttttttattagctcatcaatttctcggaagcagcccgggtcaatcagacatacgatttctaactgttggccataatcttcactttctatgaccttgatcagtggcttgagcttttctttcagcttcttgccttcattgactggaaggatgaaccgaagcctcatgtgagcacgttctatcttcattttctcttttaactgctttatcacttccaaagcctgctgttttgtactcttgttggttttcaccgaatagtggatgtccttcatggctctctcaataaggatcacggtgtatggtctctttgtttcaggattcacacatttgtctgccacaatagttgcaatgtccctaaacatctgctccagttgtgtgtgtctttctttatctgatacttgaacttctcctttagtcaaaatctgcttacagatttcagtttggtcatctgttccaaacgcactgatgagatcttcctttttggcaacctgacctttagaaacatttacaaacactgagtgggtctgcagaacttcatcgaggtctttttccacgccgctccgccagccgacgaccttgtttttgtagcaggcgatttcgaagcgcttcccggcacgcttcatccgtaccacggccacattggttaggcggatctggttggtgggggtgaagatcgacatcgcggctgttcaaagacccagaagccggcgaaccagggctgacccgcgccgtccagcctgaaggccaccagcgcctcgcggtaacgaccgatcggcgcgcggcactgacccaaccaccagtgcgcggcgccgcgactcactagcttcaggcagccgtcacagtgtgtctggcaggcttacttactgcgcaggcgtcaggtgga

SEQ ID NO: 59399 - DNA, 2017 bp, Homo sapiens
gttttcccckggtacctagcaattaatgtactgycaagtttgaattcaaacctgaatgatcctggttgcaataattcatagtwcatgacttcaattgtttaggattactaaactaaagrccatccacttcttttttctatgtttcctatcactgaagttctttatatttaataactactatggtagactaattatctctagtggaatctaaatcccaaaatattactttgtctttatcaatttaataactggatacataaatgcaaatttattttatatattagtaaacacattttcatttaaaaaacagcatttttggtggcaagtgactgtttctgtaataaagagaaagtatgttttcacatacaatcttgaatttcatcatgttttgtatgctacctgctgtgacatgcactttaccatgacactaaatgccttagtacacacacgaatgaccactgtcaggaatcttgagattttgacattttttggcgtttatttaaaaataaaattattttctctagagcatgaaggaaaaatttaaaagtatttctgctgtgctagttctgtaaaaagttaaaaaatgagaaatggcggcaccattttataatcctgtgtttttcaaggagtggagggtcaaattgttaagaaaaatatttacataagctattagcaatcataattagagtgtcatagaattctgcatgcagcgactaaggaggaatccctagaagtccaggtgcttcttgcctccggccatcatgccacagcctgggcccagccgcttggcggattctgccagatccattttgcttgagcggctcactgtgtctgacaagtctggaggcaaatgcagtcgctcaatggtgaatagcttcctttttaatttaaaagctaagtctttgacatctgattcatcacagatcaagttattaagccgaggaatctgccgtatatgaatcaatccatgataatccttatacaatgggttagtttctctctcagaaccaataaatgattccagaccaactactacatctgacaaggttgtgacacgggcaataatggctttattctggatcagatgtgttggcattgtgatgatgcaggctgaaagagaggttctcagaagaccacggagaacatagaggaacttggtaaggctgtgactgttgccaccattttctgcacagcaaatatcgtctccccataaaggtgagccaagattctgaattcctattcttaaaatgtttctctgttttttctgaggattggatccatcaaatccttcctcataaatgatgttctggataaactgaagcagctttgtgtagccaggggtcaaagaacagggttctactttgagagttgaagatattttctctggaagaaaaaatccatgccaatttgaagcctcaattagttcttgtggcattctttttgatgcatcataatagtgaccaaatcttgaagatgatactggtccaatctccatcttgggtaataactggtaacgccaagctattttcatcttaatattagattctggtgttttatgattgtatacatcttcatcaaattcctttttacatttatcatcaagtaatggtgctggaagttcctgtaaaatgttggcaggatcctctttagcagatgcaaccaacaaagtatgcccattgacaattccttctgccaggaaatacttgaagagcaaaggtgagtaaatattatatttatcctcctcaattagaagaactgttccaacggctaaacctccacctaagagctggtctagggctgggagcccggttgataccagcagctgtccattccgcaccgacggtcgcgtgcccgcaatggacaccagtcgagggccgctgtcgttggtcacgctggctctaggacccctcctctggaaactggtgacgttgctcttgctggctgtcgccactgcagacccagtactcgcggcaacactaccgcaggttgccactgccgccatcttagagcctccagt

SEQ ID NO: 59400 - DNA, 1416 bp, Homo sapiens
ggagcagcggccggtggggagggcgctcggcggcggcctgcggccatggccaccgtgatggcagcgacggcggcggagcgggcggtgctggaggaggagttccgctggctgctgcacgacgaggtgcacgctgtgttgaagcagctgcaggacatcctcaaggaggcctctctgcgcttcactctgccgggctccggcactgaggggcccgccaagcaagagaacttcatcctaggcagctgtggcacagaccaggtgaagggtgtgctgactctgcagggggatgccctcagccaggcggatgtgaacctgaagatgccccggaacaaccagctgctgcacttcgccttccgggaggacaagcagtggaagctgcagcagatccaggatgccagaaaccatgtgagccaagccatttacctgcttaccagccgggaccagagctaccagttcaagacgggcgctgaggtcctcaagctgatggacgcagtgatgctgcagctgaccagagcccgaaaccggctcaccacccccgccaccctcaccctccccgagatcgccgccagcggcctcacgcggatgttcgcccctgccctgccgtccgacctgctggtcaacgtctacatcaacctcaacaagctctgcctcacggtgtaccagctgcatgccctgcagcccaactccaccaagaacttccgcccagctgggggcgcggtgctgcatagccctggggccatgttcgagtggggctctcagcgcctggaggtgagccacgtgcacaaagtggagtgcgtgatcccctggctcaacgacgccctggtctacttcaccgtctccctgcagctctgccagcagctcaaggacaagatctccgtgttctccagctactggagctacagacccttctgatcacagcacccaggagcttgtctccaggaaggcggccccgtcccctactcatacccaccacagagcaccagccagtgccaacgccaggctgctatttatctccctatcccaccccctaccccacctaacacatttgcactgccgggaatggacactggaagtgccaggaggaaggaaggctggtttggtggggtagtggggaggtcagggaggcggggccaagggtgtcccacattcccaacaccgccctctgatcaccatgggaatctttggactcaggacagggccaggcgcagggctctccctcctctccccttcgctgtcccctccccctggagggcatggtgtcggggggtggcactgagctatgagtcccggggatggtgaggaacgccacagacagagccaccctaggagtgagtatagtgctggtgactgtgtttcatagccccagtccagggctgtctaagaaataaagatcatcagactccacctggaaaaaaaaaa

SEQ ID NO: 59401 - DNA, 1780 bp, Homo sapiens
ttttttttttttcttatttaaaatattttaatttctaaaaagcttaaatcatattaaaatttaaacaatttcattgtacagtacttgacaatacatttcaacaaactgaaaggcaaaccagtaaatcagttttgcttactttctaagcttaataatgtacagactcttgctcttcaagaagatgcaaaaatcagcaacagtacaagtgaaatatttaaataggaaatctgaaacaaaacgggattcaatctgatcaaatcccacaattaattgaagttttcattttattcaattgtgaataaaatagcagacactgtttcatccaataagccaatgatatcagcttaggagaaattgatctgcctgggcttgtgcaagacaagaacagttaccttctgctgaaaggatgtgagttttccaaatttggttttcatgtcatagtttccaaataaatgaaccgctccaccaaaaacgacagtctagttgctacctatcttccagggtttcatcatacagccatttataagcacaatctttggaacgctctatagtttcaaaaagtgttttgaagtcttgagggtgcatgttaactactttctcatcctcctgttttcctatttgcatcaatatatctctcgcatcaagtggagtcaatgaacgtaagtggtctattacagtggcgctgcgcctcccaaaacagtgctttaacaagtgaaaaaatatattatagttcataggtgttaagttcttggtaaataaattttgacgaggaatcatttgaataagatacagcttttgttgtaattggtctaataattccctacgctttgggttttccagcggccctttccgggtgtatatatcaaatgatgaccaaggctccatgtgcagaaccttaatctcacaagctaattgccagataacacttaatacatgatacaagtctggatttccgggatctgccattagtttctggaattctttttcaccaataaacatatttacttctattcgtccaaatttatatatagaagtacaggaatacaagtcatatgcgagtttccaaagtgcccttttctcacctctacttgggaacattccaactacttttaaagggatgtctgctgtccaaggaactgcttctattcccaaattcttaaagagccctcgagaagacatagcaggtggttttattactccaccacttctaggatctagtttaaagaagtcacagtgaatcactcgtagttttccatccagattttttcctaaggactccaaatgtggaataaaagttttgtcactttcgagcgcaaccactttggcaccagcttcaagtaatgcctgagtcaggattccaggacctggattgcactccagcagtaggtgtggaggtctacttggttttcccaaatagatttgcgccagggtctcagccaatctccgatcggttacgtaacgcttaaagtctaagctggccttagacgccttccttggcggattcctgaaatccggttcgggccacagctgcggagaggagtcagagagcccacagtggttcctcgccggcaaatgctttcgcgtcgccgcttcagaccctaaaatgcaaaagcgaccagcgcccgccaaggcggagagcctcagccgccgaggaagcccgaccactgggatccacatgtccttgtctctcaggcccgctccaagaatcacctagtgcagctactacagtgaaccccacgcagggtatcccacgtggaacattttctggcgtccgggccag

SEQ ID NO: 59402 - DNA, 3298 bp, Homo sapiens
ttttttttttttagcatgtaattctatttttatttcttgactacataacctagcaggggtctaatactgaccgtttcaatttaaatgctggaaaaatactgaccaagactttctgtgaaaaagataatggaaaacagaaaccagttagtaaagccatgcaaataggaagtgattttcagccccaagaggactttgtatcatctatggctccatttaaacccaagtagcatctgtcctggtggattttgaacatccttttgatttaacacagaagaaggtttgttctaccctttaaaagcatatcctcttttttcccccaacagactcctcaacaagtggcttctaagacaagactggggttgttttcttactgaaaatcctgtgtttatccagtcttttccttttcaatttctgagtttagcttacctaacagcaaaacagaatcctcaaatttctcacagagcaatgaaaagcaaaacagttggtttctctgatcaacatcattttcagtatgaaaacaaaagttatgactcatagacctttgaaatatttacaaattgtactttaaacaacgagatttttcagtgtgcttataaaacaaagtaaagggatcagaaaatgtggttcaagtcaagtgtgcaaagctctcgaagaaaggtcctgcagcctggacaggagtacaaatattctcttatacaagttaaatgtactcttttcctccacaacatttttgaaatgaaacagcaaatgcatttatactcacaaatcagtcaaaaggcctcttctccttattaagccctttacacacagatgataaaagcaaggttttcctacaatagatgtggccctaccacatattcaagatacaatcatcctaccatcagttaggttatgctttaaatattttgaaatcaggtatccttaactactgatttccttttagaaactatcttgagtgttagattttcataattacaccatttttaacttttagctttttaaacttctagacaaactatatgtttaagcaaaaacaaaaataaaaatcctcaaaaaaagtaatatcagagttttaatttcaaccagctggcacaacaatgaaagtgtcagactttctgaaagtactcgagaaataatgaataaattcttaatgttttcccctccaccgcccttttttattctccaagattaggaattactacggattaggtttttgaaaataaagtttcctttttggaaaatggtctacattcagaaatgtcttagaacaagcatttaaaaaaaactaataaataatcataaatcaaaatacattaaaataaaattacagtacatcatcgctcctagaaaattcaccatacaagacgatcctttcaaaggttcataaataaaagtcttcttgactcgaaatcgtttcctgcatcgtgatgaaaagtatgcagaaaactaagaagaatcgcaagttttcagtagggtgatgtccaaactacttgatctggtgcggggcggagagactgttttgcttttgatccaagtgaagacaatagaaatgtgctcgtcccacttcctcaagtcctcaaaaccttgtcttgcccgggagctgcccctttcaggcagagttggaggtgctgcggagaagccggtgcccgtgcggctgcgagtgcggctgtgggtgtgggtgcggtatttggtgcggatgcgggtgcgggtgagggtgtgggtgcgagtgaggatgagagtgtggatgtggatgtggatgcggatacgggtggagctgctggggctgaggcttgggttggggctgaggctggggttgtgattggggctggggttgcggctgaggctgaggctggggttggggctggagctgcggctgcggctgcggctgcgaggggggctgctgctggaccaggtgctgctgcttctgccgcgtggatttgaccgccaggatggcctgacgattcttgtactgcaccatctgcagcgtgatctcggcgttccagccctggtcttgcgggcaccgaaagtcgatctccttgccctctgccatcaccacagtgaagtacatgtacttgcccttgcgctccacacagtccacggtcttcatgttggagaagtgcagttccttgagcttgaccggcggctcgaggctggcgacagcggggccactgggttgggacggctcggccggcccctgcccgggctgttgttgctgctgctgctgctgctgttgctgctgctgctggtgttgcagctgcttgggcgggataagcagcagcccttcctcggtgaggatgcaacactttttcttccagagctgcaacaacccgtcgctgcgcttctccagcacgccctccttcagcgctttgcagccgctactctccagcatcctcccagcataagaggggccgccgcttggctcggcctctccgtttccagccgcgcgggccgggggcagcagcagcagcctcgcgccgtcctcgccccagcggctcccacggccgcctgcccggagcgcgcagaggaggctaacacgcaggaggcagagcggcggcggcggctctgggtcccggcagagggacagccgcgtcctgatgcgccacaaggtcccggagctccgagctgccgggcctctgccgtcctcttgcgagcgctcactgaagggcactggccgggccccctcgcggcgcttttgaatgggccatcttccccacccccgagtgacacccagcggaaaaggcggctcctggcgcccgcaccgcgggggaaagcccagctccaagaggcgctcggcagccggcgcacgcctcattaacttggggcctttccaaagcccgctgcgtccacgccctccagcgtctcttgctccgcctctcgccgcccacttgcttccgcgctcgttcccctggaaggcgacccggacccgagccccggaaactcctctcctctacccagggcgatcgcccaaggagccctggctgcctgactactgccgacgctcacagggcgctgcgaggccatcccccgcgtcccgcttctccccggcccgcgggactctctgctaacagcctcagaaagtgaggacgggggcgcggaggcgggggcagcctccaggcagtgctgcctctcggttcttgggaattagcccgggggattcgcgctgggctccgagagcccgcagaaccagcgtcgtgtcctgggcgagctgggaggccggggccgagtcccgcgagtcccgcgagtgtgcctcccccggacgcctaggtaaacaactgagcgcacagaggccgagaggact

SEQ ID NO: 59403 - DNA, 1941 bp, Homo sapiens
  misc_feature (1)...(1941): n = a,t,c or g
ttttttttttttctaatttaattctttatcattcaagtagagagacaggcattttccaaagcaaacccaaccctcgtgattatttctagccagggtgaagctaaggaaggtagcagtaggtggtaggatcagcaccttggttccaggcatcacgccagtcattttatttccatcatcatccttgtgaagaaatggaagtctggagaggtgaaatgatgaaggcaatctggccacaaatcttccttctggatcctgctcttcagggcatgcatctcccatgctgaaggttaaaatgggggtcatttgccaacaaatttgggagtccgcttctccctgaaggctgccatgccctctagccggtcccgggttggaatattctgggcatagcacatcccttcaatggccatcccagatgcaatgtccacctccgttcctcggtcaatggctactttgcccagccgcacggcaatgggggcctggggcaggatctcctgggccagtgctcgtgcccgctggtaggcggcgtccccctcctcgttctgggccacagcgtgattcaccagccccagtacgtgggcctcagttccactcagtcgtcggcccgtgaagatgagctccttcgccagggccacccccagacaacggggcagcctctgagtccctcctaccaggatggagggagcagggtgggaatcagcatgggaagtgggaacccagagaaggctcagcctgggactcagccaagacttctcagaggagcagggttcaggtgggagggcagagcccagaacagagggcaaaaaaggaaagcagcgaaggaccctggatggggtggaattgggcgggtgctgtagttgcgattacctgcccccgggaggagccctcgcgtggtctcaatcagtcccatgactgccgaggaagctgctcagatagaacaaagtgaggcctccctcccccatccggtcccccagtgctaatcccgggggccacagctgcctctgctgtctactcgcccctctagccacttgccccatggtctggccacagccaggcctctccagactctgcctttggaagagccctagcccagaagtcaggagcccaggcccttatttcaccatgcccctttgatggagttgtaagtcaccagcaagtctcacccttcccaagcctcaaaggtggaagaaagatggctggccctcttctgtctgcttcagagagccgctaaggatcacacgaggtacgacgcttggaacaaggagagttcctaggaggtgccccatatctatttgtggattactattaataggttctctggcttagccctggcctggcctagaatgtcagtgactcctgctcctgctacagtcgtccgttccagctttgtcacagcctgaaattgccctgactgttccagtccatgtcctcctgagttctgcttccttccttcgagaaacttgccttgactgacgcacccccccgggtctgtctccttttctgaattccctcagcatggaccatgtgaacgtgggcagaagggagtgggttttacattcactccgtcttagtcttccccaaaaccctgtgagttagttgcgtgaacgtgggcatgtgagaaggagagttggggctagaccagcctggtattttggtgcctggacacctggtcagttccttctctttgacctgcattgtgtagacagaagctactttcatgcctggagctacacatttttatatgttgctcctggggtggcaggagagagcggtggggggagaagggaagacattcagactttgcctaactgcatccaagaaggctgctcctaatcaccaggtcagtcacctgagaaaatgatcagttatcttctttatcccctcccattcttcaaacaaagctcaatgaattgcccttcaatgatatgatctcaaangggctcc

SEQ ID NO: 59404 - DNA, 1120 bp, Homo sapiens
accgttcgataaccctcgggtcgacccacgcgtccgctgtgctgcgcggcgcggcgcggcgcggcacggcacggtgggagtgtctccggctggcctgcagggagaacaccgactgagacctcaaaccctggctccagtgtcatggaatccgtcacctttgaggatgtggccgtggagttcatccaggagtgggcattgctggacagcgcacggaggagcctgtgcaaatacaggatgcttgaccagtgcaggaccctggcctccaggggaactccaccatgcaaacccagttgtgtctcccagctggggcaaagagcagagccaaaggcaacagaacgagggattctccgtgccacaggtgttgcctgggaatctcaacttaaacccgaagagttgccttctatgcaggatcttttggaagaagcatcctccagggacatgcaaatggggccggggctgttcctgaggatgcagctggtgccctccatagaagagagggagacaccattgactcgagaggaccggccagctctccaggagccgccttggtctctgggatgcacgggactgaaggccgctatgcagattcagagggtggtgataccagtgcctacactgggccaccgcaacccatgggtggccagggattctggtgagtgagtgctgcgtggaacacgtggccagagggccctgctgtccttgtgttctgtccaggaacttgtatcctatcctgcctgcatttcctctgactgcaggcactgccgtggcaccatagagaggatacagaaggcctctctcattatttgtgtgtttaagtgggagggcacttccagtgacagatctttaagaaagagagggctcactcaaccacagcaaaggccagacctctctttgggcaacatgaaattcttgactacacgataatgttgattttgaaaaattatgattgaatttactagaaatggcctgtgttttaactgtgtttttataaatgaggttcaggccggttgcagtggctcatgcctttaatcccagtgctttgcaaggcctaggcaggaggattgcttgaggccaggagttcaagaccagcttgggtaacatggtgagacccctatttcta

SEQ ID NO: 59405 - DNA, 2740 bp, Homo sapiens
gtcgacgatttggtgtgcctccctcccgccgccgcctcttcctcggtgaggcgctcttccagcgggcaggcagcatggcggccgtggagacgcgggtgtgcgagacagacggctgcagcagtgaggccaagctccagtgtcccacttgcatcaagctgggcatccagggctcgtacttctgctcgcaggaatgttttaaaggaagttgggctactcacaagttactacataagaaagcaaaagatgaaaaggcgaagcgagaagtgtcttcctggactgtggaaggtgatattaatactgacccatgggcaggttatcgatatactggtaaactcagaccacattatccactgatgccaacaaggccagtgccaagttatattcaaagaccagattatgctgatcatcccttaggaatgtctgaatctgaacaggctcttaaaggtacttctcagattaaattactctcatctgaagatatagaagggatgcgacttgtatgtaggcttgctagagaagttttggatgttgctgccggcatgattaaaccaggtgtaactactgaagaaatagatcacgctgtacacttagcatgtattgcaagaaattgctacccttctcccctgaattattataatttcccaaagtcttgttgtacctcagtgaatgaagtcatttgccatggaataccagacagaaggcccttacaagaaggtgacattgttaatgtggatatcactctttatcgcaatggttatcatggggacctgaatgagacattttttgttggagaagtggatgatggagcacggaaacttgttcagaccacatatgagtgcctgatgcaagccattgatgcagtgaagcctggtgttcggtacagagaattgggaaacattatccagaagcatgcccaagcaaatgggttttcagttgttcgaagctattgtgggcatggaatccacaagctttttcatacagctcccaatgtaccccactatgctaaaaataaagcagttggagtgatgaagtcgggccatgtatttacaattgagccaatgatttgtgaaggcggatggcaggatgaaacctggccagatggttggactgcggtgacaagagacggaaagcggtctgctcagtttgagcacaccctcctggtcacagacactggctgtgaaatcctaacccggcgacttgacagtgcacggcctcacttcatgtctcaattttaatttctcccaagatggcacatctcagtaccttcttactgtgctatgcattttattgagagtacagaaaggaagaggaacctttttttaatcacttgttttgttttgactatagataagaaaggactacagcatttgatgtgtgtcctcaagaacttgtcttgggtctgaaaaagctgagaagaataaaggaaacattgctcaactcttcagccccctccccctgcacacctgttttctcatttgccctttgagcacttttacttaaacttgcttgtagttgcttttatcactgccgcaaaacagccatcaagagccatctgctttccaggtgaacattggaaatgagaatctttgaaacttagcaatatgtgttgcaccagattttttaaattatatatatggaaatatatatgtatacattttaagttctgtatacataattaccaaacactatgtgacctggagtttgtgttgtttctgctctgacaggtttatatgttcttacaaatggatccatagtttgcagtgatttaattcctggttgggatttggcctcccctctcccccatgctaattatttacccttgtaattgtgcatagggaagcactcacccaatgagactttctccaatgtggactctgtgtgtcagtgaatgaatgtagtaaaattcactttggaaggttatcaggcttttaaaaatctagtttatggcaaaaatagccattttccaagtggtggctgactgttgcagggaatgagaatttcataatacactgctatttcagacctctgtttggtcagaaatggaaaagaaaaagccccctttcttcccttttctgttttacttcaagggcataccttggaggtgctcagagaagcgtgaagtttgcactatggtggaggatggggaaagagttctaaagtgtctccagctgtgaacccaggaggtcaagtgggctattaaaatctaacgttgagtaaatgtgatagtgatgagaaaggaattttgtgtactgtaaccttgcagtagagatgcagctgtccttcgtgtgtggaaacacacctctcctttacatagttgggaacctcattagaaatgacctcagctgccccatatatacgttcctttccagcagttgtcccaagtaggagtgtatccaagtgaagacatatcaaatcacaaagtcattgtcattagagtgtacttgattacctgggcatccttgtaatataatttcataccactgacacattatacttgtaagagaacatctttcccagagtgcctcagaccttattgctttaaaatataataatgttttcattacttttattatttgaatgatttagtaaagttgactgaatctggtatagactttgggagtatgtgtgtgaagtttttatcaaactgtaatatttgtgaatggaatgccttgcaatatgaatgttaatataatgtgtaaagggagattaaaaagtttgaatgattatcctaaaaaaaaaa

SEQ ID NO: 59406 - DNA, 2222 bp, Homo sapiens
gtcaaaagggctgtagcacaggatggagtttgatttatccctcctcccccaacacctaggaactgaatctttttctttttattttttgagatggagtcttgctctgttgcccagctggagtgcagtggtgtgatctcagcttactgcaacctctgtctcccgggttcaagcaattctcccatctcagcctcctgagtagctgggattacaggcacacaccaccacacctggcccagctaattcttttttgtatttttagtagagacggggtttcaccatgttgcccaggctggtctcgaactcctgagctcaggtgatccacccgtcttggcctcccaaagtgctggattacaggcataagccactgtgcccggcctgaatcttgtcttttgacaataccaaagaaatagggggtagctagagtaaagaacctagggcctggacctgggctggacagtgtatccctttaggtgtgggaactgggtatttccctggggtctgtatgcctttgtcttgtcatttgcttttagggcagatgacactttttcccacccttttaaagctacaagtctatcttctttcttgacccatttcaggagggagccctctcctttatcctgatataatatttaaaagacagaacaagaaagcatgtagccctaatgataggagattatcgcatagagttcagagactggaaactgaattttccctcgactttcactttgtgggtaaatcacccaattttaggctcttttctgcaaggatggccaaaattaatcatttttaaaaagtagattcatgcccactgcccttgggtgagggggaagaatacgggggttcccagaagcccccatgtgatccaagggtttgtattttttttttaagtttgttcatatttgtatgtacatgactatttaaagccaggggattatctttctataaatgtataactggcaacctgtatcttccctctttgttgcccatatagccggagccctttttctcatttgagaatctcttccctactaagtgttaagcttagagtgaagggcacctcctactggaccaaaggagaggggattggagaattgttttaagttttatacattaaggacagaattccatcttcccacccccagccttattgaggacagctctctacccatcctgattaaactgcagctatagctgaaaaaaattattgtaagaaaaatacacagcaaaacagagctggaaggtggtaagtgtaaaagatatggaaagatgtaatcaccaaagaagctgcccaaatggcttcctgctatggaggagagtgatttggcccttacctcacctgccttcctgattcaaagaaacttgccactagcaggactgggcccaggagccccatttgccaatctcttctcttcttgggagtctgggaaaggttgtatagttctcaggctttaaaggtgtagaagacagtatggagaataagagaaggatgttttatagtcctctgtttcagtgccttccccatgcccatggagctgtcccaaaacccatccctcagtatttgttgatgccaaagacacgaaccccatggaactggggcaacttcggcagcagtacacttagcaatgaggctgtgttgatgaggaagtgcgcagcatcatacttggtatagaagctggccaggagatagagcacaataggagagatgctgaggaacttgcgggaagaggtaaactggagcccatagtccatttgctcccagtgtgtcagtagccgagcctttccttggtcaggagtctcaaagggtgtccctttcaccgtatgaaggaagacatacgtagccaggttatggatgacgttggtcagggtccagacaacaggaatgctgaagaaggggatgctgagtagaaccatatgcagcaatcctaccaagatgatgtaggccagccagatgcctcggctattcatcactcgggtgttggggtttacttcgctgtgtgccacccccacattcatcctgccagctcagatccccgtccggctatgggcgcggcgccggctaccacacctgaagtctccaggaagtaacgcctctccttctgcccctttcctattggaggaacagaatcagcgctgccaccacccattggttggtggtctgtaatgcagaagcacagttggttgccatttctgtcgttcgcaagatacagtgcccgcccctctcc

SEQ ID NO: 59407 - DNA, 1584 bp, Homo sapiens
tgggatagcgcgcgaggccctcggtcggacgggacgctcgggattcagggactgcctcggcacacgggaagttgccctacaggcgcgggagaaagcgcaggcggcggcttggcagggagaggcaggctgcagtgcacattgggtcaggcacacgcgaggggcagcccccgagggccgtcccagagtcccccgcgccgccggggtcctaacggggtgcaccgtcttccgccgcacgtggattcagcgcgatgcccaaatccaagcgcgacaagaaagtctccttaaccaaaactgccaagaaaggcttggaattgaaacaaaacctgatagaagagcttcggaaatgtgtggacacctacaagtaccttttcatcttctctgtggccaacatgaggaacagcaagctgaaggacatccggaacgcctggaagcacagccggatgttctttggcaaaaacaaggtgatgatggtggccttgggtcggagcccatctgatgaatacaaagacaacctgcaccaggtcagcaaaaggttgaggggtgaggtgggtctcctgttcaccaaccgcacaaaggaggaggtgaatgagtggttcacgaaatacacagaaatggactacgcccgagctggtaacaaagcagctttcactgtgagcctggatccagggcccctggagcagttcccccactccatggagccacagctcaggcagctgggcctgcccaccgccctcaagagaggtgtggtgactctgctgtctgactacgaggtgtgcaaggagggcgatgtgctgaccccagagcaggctcgcgtcctgaagctttttgggtatgagatggctgaattcaaggtgaccatcaaatacatgtgggattcacagtcgggaaggttccagcagatgggagacgacttgccagagagcgcatctgagtccacagaagagtcagactcagaagatgatgactgaaagggactcgggactgaaggtctcctggaagcttctgggtctcactggaccatcaggactgctgccgcccctctggagagagcagctttttatttgtctgtagacagggaacatgatgggcactgacctcctgtaaagaataaaactgtgggccgggcgcggtggctcacgcctggaatcccagcactttgggaggccgaggtgggcagatcataaggtcaggagattaagaccatcctggctaacacggtgaaaccccgtctctactaaaaatagaaaaaaaaactagttgggcatagtggcatgtgcctgtagtcccagctactcaggaggctgaggcaggagaatcacttgaacccgggaggtggaggttgccgtgagttgagattggaccactgctctccagcctgggcaacagagtaaaactctgtcccaaaaaaaaaaaaaatacaaccttgcaggatgtctctcctggagacagcaagagggaagaggagggagagggctctttcttagaaaagaggcctttggtgagcccagaagtttgaaaccagcctgggcaattcagcaagatcccgtctctacaaaaaataaaaaaaaattagtcgtggtgcca

SEQ ID NO: 59408 - DNA, 1072 bp, Homo sapiens
ttttttttttttaagttgaaaaataccttgtttaagacctccctgggacccacaggggcacgtgtggccgtaagcctgtggcagcccaatcgttagcctttttcttctttgagcctctctaagtacatctgcagggacttctggatggagtctttggagatgaagctgacgaagttctgcacgtccgcatcgcgctgcgtgaccaggcggctggccgtggcctttcgcatcatggccttggtcagctgtcgagcatggtctggaatggccatccactgggctatcgctgacagcgcagtgctctgcacctgctcctccgggaccacctggtccactatgcccacctgcagggcctccgccggcgggaagagcagccccagctgcagggcacgctccgccgcccggtgcccgatggtgttctccagggtgtctttcaaccagaaaggggcgatgatgcccagctgggtctcattgagtcctatgcagtacctggggttgtccgccaggatgcggtagtcacaggtcagggccaccaggcagcctccagcggggcaggctccgttgatggcggagaccagcaccaggttggactggtacaaccgcagccacagctcctgaacggccttccagtacccagcgtagtgggcggggctcctcccacacatctccgtcaggtccaggccggccgagaagacacccgggcggtccgaggtcagaatgacaccgcggaagctcttgtcattctccagcttctccaggctgatgaccagctccgtcagaaactccaggctcaggctgttcactggggggttcttgaatttcatcacagcgacccctgcgcccgcgtccggctccaccagcacccgctggctcccgaagcgccgcgcgccgtctccgccgccggccgcccgctccgtccgcccgagggccgcgcccgggagccgggcccccgcccggagcagaacgcgcgccgggactcgcacagaagccaccagcgccatcttgaccgcaacgcgcgggataaaggtcgcgggctgagctcgcctcctggggagggggcggcacgcaacta

SEQ ID NO: 59409 - DNA, 1878 bp, Homo sapiens
gccaacatcttatcatctccttctaaaagaggacagaagggtaccctaattggatattctcctgaaggaacacctctttataacttcatgggtgatgcttttcagcacagctcccagtcaatccctagatttattaaggaatcactaaaacaaattcttgaggagagtgactctaggcagatcttttacttcttgtgcttgaatctgctttttacctttgtggaattattctatggcgtgctgaccaatagtctgggcctgatctcggatggattccacatgctttttgactgctctgctttagtcatgggactttttgctgccctgatgagtaggtggaaagccactcggattttctcctatgggtacggccgaatagaaattctgtctggatttattaatggactttttctaatagtaatagcgttttttgtgtttatggagtcagtggctagattgattgatcctccagaattagacactcacatgttaacaccagtctcagttggagggctgatagtaaaccttattggtatctgtgcctttagccatgcccatagccatgcccatggagcttctcaaggaagctgtcactcatctgatcacagccattcacatcatatgcatggacacagtgaccatgggcatggtcacagccacggatctgcgggtggaggcatgaatgctaacatgaggggtgtatttctacatgttttggcagatactcttggcagcattggtgtgatcgtatccacagttcttatagagcagtttggatggttcatcgctgacccactctgttctctttttattgctatattaatatttctcagtgttgttccactgattaaagatgcctgccaggttctactcctgagattgccaccagaatatgaaaaagaactacatattgctttagaaaagatacagaaaattgaaggattaatatcataccgagaccctcatttttggcgtcattctgctagtattgtggcaggaacaattcatatacaggtgacatctgatgtgctagaacaaagaatagtacagcaggttacaggaatacttaaagatgctggagtaaacaatttaacaattcaagtggaaaaggaggcatactttcaacatatgtctggcctaagtactggatttcatgatgttctggctatgacaaaacaaatggaatccatgaaatactgcaaagatggtacttacatcatgtgagataactcaagaattacccctggagaataaacaatgaagattaaatgactcagtatttgtaatattgccagaaggataaaaattacacattaactgtacagaaacagagttccctactactggatcaaggaatctttcttgaaggaaatttaaatacagaatgaaacattaatggtaaaagtggagtaattatttaaattatgtgtataaaaggaatcaaattttgagtaaacatgatgtattacatcatcttcgaaaatagatatgatggattctagtgaagaccaaaattacttctgtttactttctatcaggaagcatctccattgtaaatatgtatttacatgtttattacaaagacccaaatgaaaaatttttagtccattttttgcatagcctaaagataaaataggaataaaaagttctatatttatggattttctgtatataaaactggtttctaattataacttaagtccattaagtaaaatctgtattgcccctttaaatgtaaactaaattatttgggagaaacttcaacccctgatatgagataagcaatgagaatagggaagtgtataacatcccagtttttgatgtattacaaaaatcaccccctctataaaatgaattttttttacattatggtaaaaa

SEQ ID NO: 59410 - DNA, 2819 bp, Homo sapiens
tccctcagcgtccggccgaggcgcggtgtatgctgagccgctgccgcagccggctgctccacgtcctgggccttagcttcctgctgcagacccgccggccgattctcctctgctctccacgtctcatgaagccgctggtcgtgttcgtcctcggcggccccggcgccggcaaggggacccagtgcgcccgcatcgtcgagaaatatggctacacacacctttctgcaggagagctgcttcgtgatgaaaggaagaacccagattcacagtatggtgaacttattgaaaagtacattaaagaaggaaagattgtaccagttgagataaccatcagtttattaaagagggaaatggatcagacaatggctgccaatgctcagaagaataaattcttgattgatgggtttccaagaaatcaagacaaccttcaaggatggaacaagaccatggatgggaaggcagatgtatctttcgttctcttttttgactgtaataatgagatttgtattgaacgatgtcttgagaggggaaagagtagtggtaggagtgatgacaacagagagagcttggaaaagagaattcagacctaccttcagtcaacaaagccaattattgacttatatgaagaaatggggaaagtcaagaaaatagatgcttctaaatctgttgatgaagtttttgatgaagttgtgcagatttttgacaaggaaggctaattctaaacctgaaagcatccttgaaatcatgcttgaatattgctttgatagctgctatcatgacccctttttaaggcaattctaatctttcataactacatctcaattagtggctggaaagtacatggtaaaacaaagtaaatttttttatgttcttttttttggtcacaggagtagacagtgaattcaggtttaacttcaccttagttatggtgctcaccaaacgaagggtatcagctatttttttttaaattcaaaaagaatatcccttttatagtttgtgccttctgtgagcaaaactttttagtacgcgtatatatccctctagtaatcacaacattttaggatttagggatacccgcttcctctttttcttgcaagttttaaatttccaaccttaagtgaatttgtggaccaaatttcaaaggaactttttgtgtagtcagttcttgcacaatgtgtttggtaaacaaactcaaaatggattcttaggagcattttagtgtttattaaataactgaccatttgctgtagaaagatgagaaaacttaagctttgttttactacaacttgtacaaagttgtatgacagggcatattctttgcttccaagatttgggttgggggcactaggggttcagagcctggcagaattgtcagctttagtctgacataatctaagggtatggggcaaggatcacatctaatgcttgtgttccttatactctattatatagtgttattcatgattcagctgatcttaacaaaattcgtagcagtggaaccttgaaatgcatgtggctagatttatgctaaaatgattctcagttagcattttagtaacacttcaaaggtttttttttgtttgttttctagacttaataaaagcttaggattaattagaagaagcaatctagttaaatttcccatttgtattttattttcttgaatacttttttcatagttatttgtttaaaaagatttaaaaatcattgcactttggtcagaaaaataataaatatatcttataaatgtttgattcccttccttgctatttttattcagtagatttttgtttggcatcatgttgaagcaccgaaagataaatgatttttaaaaggctatagagtccaaaggaatattcttttacaccaattcttcctttaaaaatctctgaggaatttgttttcgccttacttttttttcttctgtcacaatgctaagtggtatccgaggttcttaatatgagatttaaaatcttaaaatgtttcttattttcagcacttacatcatttggtacacagggtcaaatagggcaaataattttgtctttgtataatagatttgatatttaaagtcactggaaataggacaagttaatggatgtttttatattttaatagaatcatttatttctatgtgttatgaaattcacttaatgataaatttttcaacatacttgccattagaaaacaaagtattgctaagtactataacatattggccactaaaattcatattgagattatcttggtttcttggaagagataggaatgagttcttatctagtgttgcaggccagcaaatacagaggtggtttaatcaaacagctctagtatgaagcaagagtaaagactaaggtttcgagagcattcctactcacataagtgaagaaatctgtcagataggaatctaaatatttatagtgagattgtgaaagcaaccttaaagttttgaagaagactgatgagactaggtgctttgcttcctttcatcaggtatctttctgtggcatttgagaacagaaaccaagaaacatggtaattactaaattatgaggctttgctttttgtttgcttttaagtagaaaaacatgttggcaacattgagttttggagttgattgagataatatgacttaactagttttgtcattccatttgttaaagatacagtcaccaagaatgttttgagttttttgaaagaccccaatttaagccttgcttatttttaaattatttccattcagtgatgttggatgtatatcaattatttagtaaataatctcaataaattttgtgctgtggcctttgctaaaaaaaaaa

SEQ ID NO: 59411 - DNA, 459 bp, Homo sapiens
ttttttttttttcaacatctaagtctttattaaggtgagtttttacaaacaagcatctatcccagtgtgggggatgaggatgggagaggaaagcggggcaggaagatgaggattctcatctattgataataaagctccaggttcatcccatcgtggatttcatagtcccccagagacacgtggtccttaaaaatcgtgtaccacttcttcaggacaatcttgttccaacgggtaccagtttgggctgcaatcagcttcttaaggtccccgatggtatcatccgtgttgcatttaacgcggaccttcttccccagacggtcgttgcaaacaacctcgatcatcctagctggagctcgaatcgcctcgaacctgccgacgccaccagctcctcacccgagcgctgaaccccggtcgcagttaacgctaggaaccctcgtgccgaattcttggcctcgaggg

SEQ ID NO: 59412 - DNA, 1479 bp, Homo sapiens
ggcacgagggctgaactgctgagtctgacacttaacaggacttcggcattcccctgaatacagactagatcagagattttatttttttaattgaaaagtaacttgggttctctttagaaacccttatttggtgtgcgcatctggctatttcacagagatttcagttttgcaaagaagtcggagttgatttcttccctcagacaagctattggttgttggtgggcaacagaagttgctcagcatagacaggggaaaaaacggttacggatgagactgaaagaaaacctcaaaggagaactctgagaattcatctcaggatgaagctgcaagggcaaaggagaagtacttgtgacacaagcaaatgggtccattgatcaacagatgcaagaagattcttctcccaactactgtacctcctgcaacgatgagaatctggctccttggaggcctgctgccattcctgctgctcctctctggcctgcagagacccacagagggttctgaggttgcaattaaaatcgacttcgacttcgcaccaggttcttttgatgatcagtaccaaggctgtagcaaacaggttatggagaaactaactcaaggggattatttcacaaaagacatagaagcccagaagaattattttaggatgtggcaaaaagcccacttagcctggcttaaccaaggaaaagttctaccccagaacatgactaccacacacgctgtggctattttgttttatacattgaacagcaatgttcattctgactttactagagccatggcctctgttgccaggactccacagcagtatgaacgttcattccacttcaaatatttacactactacctcacctcagcaatccagctgctgaggaaagacagcatcatggagaatggcactctgtgctatgaggtgcattataggacgaaggatgtccactttaatgcctacacaggggccaccattcgatttggccaattcctttccacatccctcctgaaagaagaggcacaggagtttgggaaccagacactatttaccatattcacctgcctgggtgcacctgtacagtacttctccctcaagaaggaagtcttgatccctccctatgagctgtttaaagttataaatatgagctaccacccaagaggagactggttgcagttgaggtcaactgggaacctgagcacatataactgtcagctgctaaaagcttccagcaagaaatgcatccctgatcctatagctattgcatctctctcctttttgaccagtgtcatcatcttttccaaaagcagagtataaagaaatcttgtggctccttttatttaaaaaaaatatttaaataaaatcttttttattggccttttggctagaaatggacatttattttccaggaaggatgatcccatcatacttctgctgaaaccagcgcatggccccctctttgctaattatcttatgcctttccttggacg

SEQ ID NO: 59413 - DNA, 1294 bp, Homo sapiens
aattcgcccgcgctgcaggaattctgcacgagcggagtcttattgtgtcgttatttggacaagaggcacattgacccaatttggagacgtattttggaaggaggtgtgaaaaagacagcatgaactttaccccaacacacacccctgtctgcagaaagcgaacagttgtctccaaacgtggtgttgccgtcagtggtcccaccaagaggaggggaatggcagattcactggagtcaacccccttgccttcccccgaagatcgtctggccaaactccatccttctaaggagctcctggaatattatcaaaagaagatggctgagtgtgaggcagaaaatgaggacttgctgaagaaactggaactctacaaagaagcttgtgaaggacagcataaacttgaatgtgatttgcagcagagggaggaagagattgctgaattgcagaaagctctaagtgatatgcaggtctgcctcttccaggaacgggaacatgttttacgcctctactcagaaaatgaccgactgagaatcagggagctagaagacaagaaaaagattcagaatctcttggctcttgtgggaacagatgctggagaagtgacctatttttgtaaggagcctcctcacaaagtcaccattctccaaaagactatccaggctgtaggtgaatgtgagcagagtgaatcttcagctttcaaagcagatcctaaaataagcaaaagaagaccatcgagagagagaaaagaaagttctgagcattaccaaagagacatacagacactcatcctacaggtggaagcactgcaggctcagctgggagagcagaccaaactttctcgagaacaaattgaagggctcatcgaggacagacggattcaccttgaggaaatacaagttcagcaccagagaaatcagaacaaaatcaaagagctaaccaaaaatcttcaccacacccaagaactgctctatgagagcaccaaagattttctgcaactcagatctgaaaaccaaaataaagagaagtcatggatgcttgaaaaagataatttgatgtcaaagattaagcaatatagggtgcagtgtaagaagaaagaagataaaattggaaaagtgttgcccgttatgcatgagagtcaccatgctcaaagtgaatatattaaggtaatgtccttatgtcgtaacgaagttgtttatttttctgggagagttgaaggaattccaaagaacctacaatttgtaatgtaagatccattcagtccaggaagctctggtagcagctgcctcaagaactaggt

SEQ ID NO: 59414 - DNA, 1150 bp, Homo sapiens
  misc_feature (1)...(1150): n = a,t,c or g
tttgaacggttgtatgacttctgcacgaggtttccggaagacgtggcggctctcgcctgggctgtttcccggcttcatttctcccgactcagcttcccaccctgggctttccgaggtgctttcgccgctgtccccaccactgcagccatgatctccttaacggacacgcagaaaattggaatgggattaacaggatttggagtgtttttcctgttctttggaatgattctcttttttgacaaagcactactggctattggaaatgttttatttgtagccggcttggcttttgtaattggtttagaaagaacattcagattcttcttccaaaaacataaaatgaaagctacaggtttttttctgggtggtgtatttgtagtccttattggttggcctttgataggcatgatcttcgaaatttatggattttttctcttgttcaggggcttctttcctgtcgttgttgggcntttattaggaaggagtgcccagtccttgggatccctcctaaatttacctggaattagatcatttgtagataaagttggagaaagcaacaatatggtataacaacaagtgaaatttggaagactcatttaaaatattgtgttatttataaagtcatttgaagaatattcagcacaaaattaaattacatgaaattagccttgtaatgttctttacaggagtttaaaacgtatagcctacaaagtaccagcagcaaattagcaaagaagcagtgaaaacaggcttctactcaagtgaactaagaagaagtcagcaagcaaactgagagaggtgaaatccatgttaatgatgcttaagaaactcttgaaggctatttgtgttgtttttccacaatgtgcgaaactcagccatccttagagaactgtggtgcctgtttcttttctttttattttgaaggctcaggagcatccataggcatttgctttttagaagtgtccactgcaatggcaaaaatatttccagttgcactgtatctctggaagtgatgcatgaattcgattggattgtgtcattttaaagtattaaaaccaaggaacccccaattttgatgtatggattacttttttttgtaaacatggttaaaataaaacttttgtggttcttttgaattttaaaaaaaaaa

SEQ ID NO: 59415 - DNA, 1654 bp, Homo sapiens
gcaacgccattaaaatgtgttccccccaggttttcccccgcctgcccgtgttaaaacccgccccccccccaaaaaaaataaccccccctaaaaaaaaaaaaaactcgcccccccaaaaaaaaaaaaatttttttttaattcattatctccatttttttttttttcattttttttcaaaatgtggatattgtttacttgaagcaacagtccaggattgtgaagtacaacacattttaaggatgagactttcctttcatggtcaagcaccagcatcatgcacacagcatcaggttatttaaaacaacacgcctgtgggaccccgttcctggaggaagacccgcttcagtgtgattgcctcccttgcttcactgcttttagttccaggcagtttcattgtacatccaagccttcctctgcgtgagagcaaaggctttgctcatcagccagccagtcttgttactatctggctactttttaaggttaaaaaataaaaggcagtttctttgctttgcaggcggcaaggcaggaggcgcaggcctcttcattgttcacatgtcacaggaggaggctctgagcaaaggccactggcaagttagggcaacaccaagaaggctctgcggagagactccctgtgggttggggcctggcaggaacggtgcctgtggactgtttatggtctgtccagttgaggcttggtaaacccaagtaaagtgttaaaaacctcagtacaaaagatcctcttaacacatctgggaaccaaattatttcttcttaaaaacacagtactaagtgttcacaaagcttttccctcccattctactacttggaaaacacttcatgcccatggggcccacagaccccaagagtcaaggacagagagaaacctgttcttcaaaagaaaaaaaaaagacagcagtacataaagtgcttctttttaatgaaacaaatccaagagatgtacagtcaggctcaagttgtgcagttcacaagcatggaggaaacagacagaacgacagcgttcaggacagtcagagctaacccaagacgaggctggacttgccgccagggggatttcttctggatggcactggggccggggccaccgggctgggcacaggcgcagcaggcacgggcttctcttcactctgccccaggctgcctggcaagtctgtgtccacattttcatgaatatcaccttctcccttcagatctaagaagtctccggagcttgcttcagaggagttccttctctgcagtccagatgactccaagtcttccctgccaccactagacttggcacctgctgacttggcccaagaagcttgattttcttcaggtgtcccaaagatattagaggccattttgttcttcctcacaggttgttctgttggttcatcaaaacctaatgaaaaattggatccaccacctggaggccgcaaaactcgggagctattcctgctgttggggtcgactcccttgaaggtggtggttgtggtcatggcgccgaggagcgaggtaggctggcgccggagcagaacgctcaaagggtcggacccgaggggcgctgggaaactccacacccaacagccgaccaccgctgctcgtgccgaattcctgcaggcgggtctatcgaggcgctcattggggccccact

SEQ ID NO: 59416 - DNA, 1744 bp, Homo sapiens
  misc_feature (1)...(1744): n = a,t,c or g
aggtggggtcttttaaaagggccccccttttttttttttttgtataaaggcactttattttaaaatcaacacatcctgcttttataaatcagttactcttcatttccaacttccatcacctgagtttgagagcagagtgcgtggtatttttctgggcttaaggtataaactgacatggcattcaagaacatgtccagcgggcagagcccatcagggcaacctctcggcacctgctccttcccgtggtaatagagctgcacaaaccactccttagattccaggtgctggtaaagttccatggtcaggtcaacagcaaacggtggccatttgtggtcaaaaatccccagggtcattaagagcggtatgaaggtcacatcatgagccgcatagagatacagctttctgatcttgtcgggggcagtggcagagtccatggctttcagcaggttgctctctaggatgtggaggaatgggcctactgccatctgaagactttccctgtcttccttgggcagtatgtacaaggatgtgtccacagctctctgttcgatcatccgtgcaaatctcttcagcatggggcagcttgggaggttgtgtgcctgctcggcagccacgttgtccaggaggatgaagaagtccactttatcactactgtcaatgcccatcctgtccttcacctttttcaaatcctctgagattcctggctgtaaagaggcagtctgcctccggcctctggttctctgcctcaggctccagcagctttggtagttgggatacaagacttctgaatctgcttcatcagtgtggatgatgatgggtccttctttctgacactggaaaagcccagccagcaaacaacgggtggactccagattccgaaaaatgttagtggaacgaataaagacctcctgtgggttgaaggttggtgaaagaaagggaatgtcttccacatagttcttcctcagtctctctcccaaggcaaacatttgctgcatgcccaccttggtcagctgcccagcaaacatgccccccttcagggtggtctcatggtattgagagtcgtaaggagaatatggtttcggaccaccagctagattggtgactgtgtaatcaaactgagtttggggtgggacctctaatagctgggggttccactctacctgctcctccagcgggagcggcttgagaggactccgagccccgtgtcgaaacacgacctgcaccattttcaacttcagcaggctgcggtcgaccggacactggccatcggcctcctgcagctcggccagggccacccgccgctggtgcaggcagtacgccagcgaggtcaggacgcccactggggtccacaagcgcatgctgaacacaccagtgatcatggtggtaggccctcgctgccctccgggttgaggctgcaggaggcaaacacaagtcttctgcgggcgccggggctcagcgggcgcccccaagtccgcgggaacctgcggatgcgtacatccagcccttcagcaagcagggaccgctgtgcctcccggccctgagggagaccccgagtgggaacgggggagagaacaagaggtggcagcagcgaagagtccctgggagttttaacccgggtcggggttggtcgctcctgctgcacaccgggccgggggagatcggatccttatcttttgcccgacgaggaacattcatnggnaccccaagttggcgnattccnccgcnctggngtagtgtactcgaa

SEQ ID NO: 59417 - DNA, 1907 bp, Homo sapiens
taataataaaaaataactttttaaatgggcaaaggctctgaatagacatttctccaaaaaacatatacaaatggccaatcagcacatgaaaagatgttcaacatcatcagccatcagggaaatacaagtcaaaattgcaatggtatacaattaatataccatttaacattcccaatagtagcctacaacttccatttccactgtggaaaacggtttggaagttcctcacggtagtcaagttacttaactgctctgtaaaatgaagttaatcacattcactttggatgaatgagttcatatatattagctataattactacagcaattatcattgtgtacattattactgattgggtcaaattattaaccccgtctccctaattcatttacttttgttactttggatgaatatttaaagtagtcttgaactgagatatgtatgtaaaggttctatcacattggcatataacatgtgctcaacaaatgaaagctataattatttatttccaaagagtttaaagattaaacttccctcaaaacaaacaaaaggcaaggtaacatcccaagctgtgaggggctgagtctctcctaggtgcagggcagcacaggaactggctgcacaaggccagagaggttacgtggcggctctcttcaaattagaccacacagagcgcttcattccctgtgcagtcttcacatcttcccagtccagtttgacgtctggaacctcatcttctggctctggatccttcctcaagggcccccggggggacgcaaccacaatgggcagagggccacattcctcccggatttccacaacatggaggcccttcttatcagccagctgttgatgggtttcctgtctggagagcccacggaagaggccctgggtgaggctgagcatattaatggacccagagaccttggcatacatgtctttgatgccaatgagccggcagatggtgatgatggccctgtggcagcggaggccgtaacctttgggttgtttcttcatcttgatatgcgtccttttaaatcttaatgaaatatcatggaatattgtatggtcttcatatcgttctatataatgcaaatggtgaactgctctgttctttgctttcctgaaagcatccatccgatcagtagctttcccaatagaaaaacctcaagtatcctggtatcaaaatcctcatatgtttcttcatcttcttctttcggtcccactcttctctctgctggatcatgtctgcctccaccttctcctgctcttccttgcttctttgggcaatggtctgcactgctccatttttcataagagggacattcagtccgggccatagaaaaccataacgcccttcaccaatgatctgacccctgttcagatcctttcttttcttctttttagttcttttgcctcttcctttttttgctccagcaccagtctctgctaaagcgcctttccacagctcatctgcagtcaatttagtgaagaaactatatggtctatactgctggctcatcaggtgactgggagaagaaatacagcattgtgtctgcagtgcacggctcaagctggcgtagggatgggtgtctctggttcccagtgatgacaaatggccattgccgagaacactcttccatgccaaaatggaagctgctggtaaggtgtttagggaacactgcctccccaataaatgacctgccgtcccgctacacagcacggggaggcagcccacagcgcgcaccgcggtcgccatgctggagtccgagccgcgcctcggcctccgcccagggcagccttgcccaccgcctaccgcgactgctcctcgtcaaacggcaagccttgggccgcagcggaattcctgaggcccgagtccacgcagcagcgcaggccggggtgagggact

SEQ ID NO: 59418 - DNA, 2552 bp, Homo sapiens
ttttttttttaagtggaatcagctatattttctacatttcccttttattcatccttttcatataattgatgttcttatagaaaactctgtaacagtcatttcatttaaatattatccgacctgaaagaaaccatgaatcagggatcagacaaaaatacatgatcaacttttacacatttcagtaggtgaaggaccagaaagaatcttagaaatcactgagcttcatacctggctgtacagacaaggaagctgggacccagagagggtgcagagttccagggtaagaggcccggtctctaaccttccagctcactgctcttttctgctataccagggcaccgctgtgcagtcatccaggctgccggggactagcttccccgacatggcaacaaaaactacagaactcgctcacatcttaaacatggccaaccttgactctgccaagatataaggtttagaatgagttgctaacattcaatttacagaattggatttgaactggaagacagactttccttagcactggtatttggtggaagtttataaactggtatttggtggaagttttaacactggctcttataagagctaaaccccgtgtgaggaaagttgctgtaacaacatcatagcacctttgcttcaacttcaaaagaaaaaaaggctatggtaaaaagctttaataacagacaatgtgatttcataggcaaccaattagcagattaatggatcatttaactttctttacttaaaaccaatactccactcaagaaagatgaacccaaaatgcatcctctaacactgaccaacataactaagtacaaatgaagtcaatggtgtaccccattagcatgctgcgttgtatgtcaataaaacaagccctcccccaccccgagccctggcccctggcaaaacatagataaatgattgtgcactgcgtgatgataccattaggtgagaactttggttcatgcagtcggctgccgcagaggttgcacccaaaacccgcagcaccggcacccaaagtcagtcagcggtggtggctcatggtgtcagccgtgctccttccacaacaccaggtgaatactgtggtcaggcatgctggtggcaaagaccaagcccgtgtcattgtgcccatccagtccattcagccaggatgcttcgcctgccaggaagcttgagcctctctttgatttcctgtactctggcagaggccagcgactaatcaggctctctgtccgcaagtccatgatgtacaggtagcggttgtcaaacagcagggcaaagatatctccaaagccaagcaaggccaagtttgctatctcaggagtcttgatgaccctgagaatatcataactggcaaagtcccactggtagagaccaagtgctgaactacagacaatgtatttgccatcaaaatgaagtcttggctgcaggcagatacttctatcctcagagacagacaatgtctttaagcacttacagttgatttctctcccaattggccaaatcttaatctcatatttgtctgcacttaagaggatgtagtctccaggactgtgcaagagagacttgactttgcacttctgcaaaactaccttggtgacccattccgtgtgcccggtgagtgtgttcaggcatgtcccagcagataaagcccatactttcacagtgaagtctgcagagccgctcaccaagatatccagttcatcattgtagtccacgctaaataccgcccccgtgtgcccccgaaagtgctgggtcctggctccggaactccattcccagcaagccacagtgttgtcaaaggagcctgtcacaagcttctgttcatcaaacttcaccgctgcacaagtgtgggtctggatgccataaacgcactgccctgtgctcacatcccacagctttgcagacaagtcatctgaccctgtacagagaagtccatctttgtagtaaagtgcatacactctggcactgtgtccaattaatgacgaggtttcaaaggcttcatggtcctccagttgcttcattctcaaaatagccttcaaataaaccttcttccagtgcaaagcgtcctgaacagaatcatctatctgccagcccaaatttttacatgcagtctgccacacctctgtacaggcacttatcaccttattccactgtttagagacgaggcagcatgtgagtaaagtctgaggatcgagccattttaacaaataaaaactgagctccaggggaaggagtttgaggaagtcccgcttgaggagagtctctaggttattggagagatgcctgagctggactgccccactcagactaatcaggtgatccagagtttcatttttctgcaagtccgtcagagaaagaaatgtaacagaaatgttatccagccatgtctcaaagtcctttctctccataaggttatggaaaaatttacctgagcgagcgccccggggcccgggacctcgcgccgggttcacagctactaggcacgctcggaccgccagagccttgcagcggccgggtccgctccgcagccatggcgcctgcggccg

SEQ ID NO: 59419 - DNA, 1557 bp, Homo sapiens
ctgaaaagacactaagaaaaattttacgaatgggatgaacatgctccagttaattgactacctactgcaatttgaatgttaacattaccccatctggtacagttacctagtgatgtacctattttcacaataccctgtttcagtgtgcttgtcttgattaaagaattcaaagtggagtaccgcaaacttgatatggaaaataaaaagaaagacaaggacaaatcagatgatagaatggcacgacctagtggtcgatcgggacacaacactcgaggaactgggtctatatcgtctggagttttaatggttggacctaactttagagttggaaaaaaaattggatgtggcaattttggagaattacgattagggaaaaatttatacacaaatgaatatgtggcaattaagttggagcccatgaaatcaagagcaccacagctacatttggaatacagattctataagcagttaggatctggagatggtatacctcaagtttactatttcggcccttgtggtaaatacaatgctatggtgctggaactgctgggacctagtttggaagacttgtttgacttgtgtgacagaacattttctcttaaaacagttctcatgatagctatacaactgatttctcgcatggaatatgtccattcaaagaacttgatatacagagatgtaaaacctgagaacttcttaataggacgaccaagaaacaaaacccagcaagttattcacattatagattttggtttggcaaaggaatatattgatccggagacaaagaaacacataccatacagagaacacaagagccttacaggaacagctagatatatgagcataaacacacatttaggaaaagaacaaagtagaagagacgatttagaagctttaggtcatatgttcatgtattttctgagaggcagtcttccttggcaaggcttaaaggctgacacattaaaggagaggtatcagaaaattggagatacaaaacgggctacaccaatagaagtgttatgtgaaaattttccagaaatggcaacatatcttcgttatgtaagaaggctagatttttttgaaaaaccagactatgactacttaagaaagctttttactgacttgtttgatcgaaaaggatatatgtttgattatgaatatgactggattggtaaacagttgcctactccagtgggtgcagttcagcaagatcctgctctgtcatcaaacagagaagcacatcaacacagagataagatgcaacaatccaaaaaccagtcggcagaccacagggcagcttgggactcccagcaggcaaatccccaccatttgagagctcaccttgcagcagacagacatggtggctcggtacaggttgtaagttctacaaatggagagttaaacacagatgaccccaccgcaggacgttcaaatgcacccatcacagcccctactgaagtagaagtgatggatgaaaccaactgccagaaagtgttgaacatgtggtgctgctgctttttcaaacgaaggaaaaggaaaaccatacagcgccacaaa

SEQ ID NO: 59420 - DNA, 1421 bp, Homo sapiens
cctttttttttttttctctgaagtggtgaattttaatattgtataaaaaatccaacttgttccacaagtacatatgtcctatgattttatgcatacatccatatacatatatcaaggtaaagtccaatacaaaaaaacagcatttcctatggccagtgttctacagaagtaagactgtgcaaactttatcgtatagtcaaatgagattgcacactaaggcaggatgaggcagaagcaagttgtgtccacagtatattacaaaataccttgcatagcttattcattctcacctggtaaattcatcttagaattctgaaggatttttttcctagataaatttatacaagttagtgtatacttcttgtctttgttctgtggcaaaccaggtttctcagtactgattgttttacttcacaacattattgatttaacaatagcctgagctttggggctctgcactgcgttcattgtaatccgtgatacaatgactacaaatgtgtcgcgatttctaatcttcatctgtatctcaggcgattttccagggcttccattctctgtgtcatttcttctaagcgctgtgttaattttcttacttcttcgtttgcaaggttctggaacattataaggttttcacatttgcattgatcgtgtttttcttccaaagggcttcctgaaggttttgttgaatgggaaagcttttgtgtagaccgtaaaagattgtcttcttcaaacagatatctgtgttgcactgttggctgttggaccgtttttggcagttcccctgctggagagtcctgtcttccatcggagtcttctagagctgagcagaaaaagatgaccaaaagaagtgatggttgtccacaggcatgtgtgtgttcttcaggaagctggtcccagaccacctccttacctacctgccataacctaaggttttttagttttgtttggtaacaccaaagattcaaaaaagcagttggttaccatgatacttatgaccactctagggcaattctctctcgtaagagaagcttggaccccctaagtacatcttaagaatgctcccaaaaatgtcatgtctagaaagtagggcagaaaaaaaaggtgaagttgttgagggattttagttgcagtggcagcagctccacttgaggcattttaacttgcatgaaacaatcaagaggcaaaacattctctactcagaaatctgaaaggccttccctccctgttacccctcatctcaagagttctttccctagaggggtaagacacagcacttagactgggatctaactggtgagccggggacatgagtacaaggaaaaataggcagaactgctatctgtaagcatatctggcgcagttagtaaactggagaaaagcatgcataacaaaatctgaagtctaaagggcagtctgatatt

SEQ ID NO: 59421 - DNA, 2006 bp, Homo sapiens
tttttttttttttttttttagggtggttaatattaacacatgctttattcaagagataatattcaaagagttaaatcctaagagttatccaccctacagtaaaaaggggaagtgggtaccacttatgacatgtacataaattccacttttatatttctgaataaagctgcaattgcttctttgatagagccatttcttaaaacttttgctaataaggctatgtgaactgtgttcagaaactttgacaacatgcacactcactcctctcaaagtcagtacccaggattttcactccaggctgagtacctattaagtaactaggacttcagactgcatgttactatatgaattcaatttgactcacctccagtatgtttatctaccacaactattgtttaaaataatcagatgaatgtttatcataactttataactcccccaaattatacttcagtatttaacatggtagtttcaaaaaataaatattcaaggccccagttttaaattttcctccaatgtaatccacaaagttgataatacatgttaggagcactactctaaaataaatgtagctttcttttaaaattacttgttgcaatagagatcacattctattccaaattctgataaggaatctgtttttttggtaatacaacaaaaatttgggatgagtcagtccttggaaaatcttaatagtagtcactgaacgaagtcaatcattccgagagccacaaacactcaaaaattactgctagcattgacaagttcttgtgttttttgatggttattgctttagttggcaatatctgaatacaagacaaaagaacatctcccattaagccttatgttaaatattacaaaacttatacagaagatagactcatagaggctataaagctgatgtcttaagtaactcacccatgaaatgggtgcaggttttttaaaggctatccaataatctttttactctaaaaataaatgcccctacttttcagtgttcccattcttcaacaggagactcgagcagcttaacagttttgctataaaaacaaaccattcttcttaacaaaccaagaatataaaaggaaacccaataaaggacgtacttttcacagttaacaataaataaaagtgcaataagtgttcaagtagggcatgtagtataaaaactacacatgagtatttagcataggtcatcttttaaaggctctccgagggtccctgccattacttattgtggtcatcactgtttgattactagctgttccttgtagttgtggatttataagtccccggccattgcttctgccagcatgtgaaaactggtgttcccttgattcagggccagtgtgaacaccatttcccactggtccaaatgtacctgtacccatattactattcatggaattattcttctgttcactctgtgcccctttgttctgctgtcctcgataatctgggttgggttcactgaaatttggcacttctgaataaaccatacaaaattccccaattttttgaagttcaccaccccttccagtataaagtgtcagacatcctttccacatggatgcataccctctggtcaaccgaataatatcccctggctgtataagacctccgatctcatcccacacggaaatagtgatgctgcccgttttatctgctactttgcacgatctcacttcatggccgtctttggttttggtcacgcgtcctatctccaggacaataaagacgacatttaagtttttcagtccgggcttaatatctcttataaaaataagtgggtcgttgaccctattcatattgggacaggcgcggctacggctgcggagacgcgagtgggcagggcggggtcaaagcttcccaccctcccgggacaggggcgaaggcagaggggcgaccttgggcaggggtggcgagagaaggggcaagaaagccgttagtcagggaccgggcaaaccagcccggacagcactgagcctaaaaaaagaaaaaaaaaa

SEQ ID NO: 59422 - DNA, 1066 bp, Homo sapiens
ttttttttttttatcattttaaaaatgtattttattcaacttggaaaatgagtacaaatccctgggtgttttttgtcagggaggagtggggagtaggcaggaaagagaagagggtaggaggcaaggtaaggtatgagcatcacagtggctgcctcaagaccctgcccagggagggtggggtgggctgggggttgagcacggagctcaggtccggaggaacaccatggtgaggaggcccaagacgtaggcggccaccaacttttgtcccagggagacgtgcaggacttgaggcagctggctgccgagttcgtccgggagtgggagcagcaggaaggccacagacacaatccccgtcagcaagaagaggaggaaggagctggtggccagttgctggcgggggtgctcctggaagtgtctggccgtgggtggtggtgtcccagcaggaggccctgggcgaggcgctggatctggctgtccctgaagctcaagggggtacgctggggctctcagaatggaggtaatgtccttgcgtcccaccactcggccctcagctccttcctcagacagctcaatgcggaagcggtcctggacatcatagtggctgggaatgggtgccacatggcgaatcacaatgtcaatgcaagactggggcttcacatatccctctgcgtcaaacaccgtgtatttggcaggtgctgtgcacaggactcggaagcgaagcgcagttcctgtggggttatagagggtcagcagctgtcggggtccgctccgctggtccgccctgaatactagatccgggggaaagaccaggaccgggacaacgggtcccaagggaggaggggcgccccgggacccccgcccagggggccccggacccaccagctcctggtcctggggcgccccacggcgcatgcaggctctgggcggtcggacatccgagggcagagctcaggggacagggcctggagtcagagcttgtggttaaagcacctgccagtcagcttgtggtcagattaatgttgccatgttccagagagtccttttctatacttccgccgtacggcct

SEQ ID NO: 59423 - DNA, 3913 bp, Homo sapiens
gctgcgtccagtgaacacttcagcacctgcagcacagaagggccaaggagctgcagtcctcgaccagcaggaggtttgctcctcagcccactcgctgcatccagatcagctcacccctctcccttccctgcccaccaggactctgatagcccctggcagccacagcccattttgccaagatgtctagagtagccaaatatcgccggcaggtgagtgaagaccccgacatcgacagcctgctggagaccctgtctcccgaggagatggaggagctggagaaggagctggacgtggtggacccagacgggagtgttcccgtggggctgcggcagagaaaccagacggagaaacagtccacgggtgtgtacaaccgggaggccatgctcaacttctgtgaaaaggagaccaagaaacttatgcagagggagatgtccatggatgaaagcaagcaagtggagaccaagacagatgccaagaatggagaggaaaggggcagagatgccagcaaaaaagccctgggccccagacgggactcagatctggggaaggagccaaagaggggtggtttaaagaaaagcttctctagagacagagatgaagctggtggcaagagtggcgagaagcccaaggaggagaagatcatccggggcattgacaagggccgggtcagggctgcagtggataagaaggaggcagggaaggatgggagaggagaggagagggcagtggccaccaagaaggaagaggagaagaaagggagtgacaggaacacaggcttgagcagggacaaggataaaaagagagaggagatgaaggaggtggccaagaaagaggatgatgagaaggtaaaaggggagcgtaggaacacagacaccagaaaagagggtgagaagatgaaaagagcaggtgggaacacagacatgaaaaaggaggatgagaaggtaaaaagaggaactgggaacacagacaccaaaaaggacgatgaaaaagtcaagaagaatgaacccttacatgaaaaggaagccaaggatgacagcaagaccaaaacacccgagaaacagacgcccagtggccccaccaagccctctgaaggaccggccaaggtggaggaggaggcagctcccagcatatttgatgagcctctggagagagtgaagaacaatgaccccgagatgactgaggtgaacgtcaacaactcagactgcatcacaaatgagatcttggtccggtttactgaggctctggagttcaacactgtggttaagctgttcgccttggccaacacgcgagccgatgaccacgtggcctttgccattgccatcatgctcaaggccaacaagaccatcaccagcctcaacctggactccaaccacatcacaggcaaaggcatcctggccatcttccgggccctcctccagaacaacacgctgaccgagctccgcttccacaaccagcgacacatctgtggaggcaagacggagatggagatcgccaagctgctgaaggagaatactaccctgctcaagctgggctaccattttgagctggccgggccccgaatgactgtcaccaatctgctcagccgcaacatggacaagcagagacaaaagcggctgcaggagcaaaggcaggcacaggaagccaagggagagaagaaggatctgctggaggtacccaaggccggggccgtggctaagggctccccaaaaccttcacctcaaccatctccaaagccctctccaaagaactcacccaaaaaagggggtgctccagctgccccaccaccccctccccctcccttggctccaccccttatcatggagaacctgaagaattcactctcaccagctacccagaggaagatgggagacaaagtcctccctgcccaggagaagaactcccgtgaccagctattggctgccatccgctccagcaacctcaagcagctcaagaaggtggaagtgcccaaactgcttcagtaggaccaggctgccaggcaccatctgccaatgccatgactgctcaggcctcacctcccagggctacacagaccctgcccaccccatccctggctgacctgctgtggatgtccctattctgccatgggagagtccaggcctgggtcacgctcaaggaaggatgccttatctcttctcactttccttttcttgtctctgaggctctccaaattttgctttagtacatggagctcaggtttctggacaagaagagtccttttagcacatcacttgagaagatggcactgtccagggcccatgtagctggcaagctgcaaaaggcctgtgatccaggaaagatgtcccacagggaccacatccaccccagccccactgccctccagggccaggattcaggcctctgaggagcccacggggcaaagctgctgggccagtggcactctgtgtgggaaaatggcagaaagatggagaggcatgggggcccaaaggggagcgtggggaggggctgaggataccccaaagtccaggctaattagaggatgtggcaggggcagtggcctggatgcacagtgcctgatgggagtaggctccagacaggaggagtgggacagacagcagctggacttgaaggtttgatgccaaagcagacattttcctcacacccacctgctgctgtatgaatagctgtgtatctgtttttccataagattttgataatatatacaaacctttagctgtgaatggctgtgccccacctgttgtcctgaactgtgagtcctgatcctaaccctgggctccctggaggactctagaagctcaggttccctgccacactatttgagttggccaagaaataaattcacatcctcagaaagtgcagcatggaggaaaatctgaactctaagcagaagactctccactgacctggttgtccaggtctagaaggccaggcctctactaggtctgctcctgaaccagtcctgctgcctggagtcagtagccagagttgttctcaggggtgctggggcagagtggagcccagggtgctgggatggctatattaggcatgttcagggatgctcattccatgactctgcctaaccatgggctcagggccaggtcctcacagcagtcacaggcccaggaaggcggcaggcagagaagtggagtgactatttggagaatagcacccatatctgtgtgccctagggctcagcaggggcctcatcttgcccagccctcaccaactgctcgccaattccacttctggcccccaactcaggaaatgctgacaatgctgccatgcccacatcggggtgtaggtgaaaggcatctttctgaatttcattctcttgaaggtgctgccaccccttggcactgtggaactgccaccttgggtctgtgtcacttgtaggtttctctgcctccaggttgcctcaacagcaggaggcacagcagtttcaccatctttgaggtgagggtggggtgccccagctaggaagcaagatcgctgtgctaggtctgaccaaaaccagagggcagtctagtcctgggggtaaagccctcagatcccagggtacactcttctccattccctccacccacttgcctgtcaccccagtcacctaagcaatcactgggcccagaggagaggagacagacacacactggctcctggacctaaagggtatgagctggagctaaggccagctagagcttccactgtcagccctcactgtcagccccactgcacccccctgtgcctgctgggcactgggcactagctagatgctttaggttgcttcagctgatccttcaactctgtgaggtggataccaatattctattttgcagatagaatttggcccagagaggttaactaatatatccatgatcacacagctaataaaagtcagagctcaggaaaaaaaaaa

SEQ ID NO: 59424 - DNA, 1231 bp, Homo sapiens
ctagaccctcttctctcccttcggcttctctctttcggccggcgccgccagttcctggggcacacccagaggtccccttctcgccgccgcctgcaactgcgagggtagcccggggccgcttggagtcgcccggacctgagaggctgctgcactgggcctcagccagccctccggatgctggtgctgccatccccctgccctcagcctctggcattttcctccgttgagaccatggagggccctccccgtcggacttgccgctccccagaacctggaccttcctcctccatcggatctccccaggcttcatctcctccaaggcccaaccactacctgcttattgacactcagggtgtcccctacacagtgctggtggacgaggagtcacagagggagccaggggccagtggggctccaggccagaaaaagtgctacagctgccccgtgtgctcaagggtcttcgagtacatgtcctaccttcagcgacacagcatcacccactcggaggtaaagcccttcgagtgtgacatctgtgggaaggcattcaagcgcgccagccacttggcacggcaccattccattcacctggcgggtggtgggcggccccacggctgcccgctctgccctcgccgcttccgggatgcgggtgagctggcccagcacagccgggtgcactctggggaacgcccgtttcagtgtccacactgccctcgccgctttatggagcagaacacactgcagaaacacacgcggtggaagcatccatgagccgggctgccgggtgccccaggtaccacaggactttgcagggagcctggactcctgtccagacacctggtgagagcctgaggctggtgttcagggccctggacacagacacagagcagccgcatctcaaaggcagagccctgcctgaaggaggaatccgtgagtaatcttcaggtcctccgtgttctggagctgagatgggaatgagcccctacacagaatggagtcctctagcctaaagatatcagctgttccatggcagagccttgactggatggaggtggggagtgtggtgtgtaaagtctctggcctcataaaaggtggctgtgggtcgtcaggaatctgcgccatcttcctgggggcttctgcggctgttgttgggggaagggaccccagtcctgccttccaccccccaaccaggcctgagactgatcaaacaataaacacgttttcccacttttga

SEQ ID NO: 59425 - DNA, 1183 bp, Homo sapiens
gaaaacttcttcctggcctgggctccgtgccgctctgtttgccaaccgtccagtcccgcctaccagtgccgggcgctccccacccctcccccggctcccccggtgtccgccatggccaaagcctacgaccacctcttcaagttgctgctgatcggggactcgggggtgggcaagacttgtctgatcattcgctttgcagaggacaacttcaacaacacttacatctccaccatcggaattgatttcaagatccgcactgtggatatagaggggaagaagatcaaactacaagtctgggacacggctggccaagagcggttcaagacaataactactgcctactaccgtggagccatgggcattatcctagtatacgacatcacggatgagaaatctttcgagaatattcagaactggatgaaaagcatcaaggagaatgcctcggctggggtggagcgcctcttgctggggaacaaatgtgacatggaggccaagaggaaggtgcagaaggagcaggccgataagttggctcgagagcatggaatccgatttttcgaaactagtgctaaatccagtatgaatgtggatgaggcttttagttccctggcccgggacatcttgctcaagtcaggaggccggagatcaggaaacggcaacaagcctcccagtactgacctgaaaacttgtgacaagaagaacaccaacaagtgctccctgggctgaggaccctttcttgcctccccaccccggaagctgaacctgagggagacaacggcagagggagtgagcaggggagaaatagcagaggggcttggagggtcacataggtagatggtaaagagaatgaggagaaaaaggagaaaagggaaaagcagaaaggaaaaaaaggaagagagaggaagggagaagggagaggaatgaattgaggaagtgaaagaaggcaaggaggtaggaagagagggaggaggaaaggaaggagagatgcctcaggcttcagaccttacctgggttttcagggcaaacataaatgtaaatacactgatttattctgttactagatcaggttttagggtcctgcaaaaggctagctcggcactacactagggaatttgctcctgttctgtcacttgtcatggtctttcttggtattaaaggccaccatttgcacaaatgaaaaaaaaaa

SEQ ID NO: 59426 - DNA, 1582 bp, Homo sapiens
accctggagctagcgtcatcgcgaaggaactcccacgaccggatggaagagcccagctgacacaaccaagacgagtctcagtgtctagggaagcttggggttctgctccttttacttcaggcgaacctgaactcagttaatgcaattttgaagcatgccctgaatagattcagtcattatcaagtcaaactaaaaacggtgaaaggttgcgactattaccaaataggaaaaacctgaagacataagaactacacatgaggaatatgtcatttagcactttcactttttgatctccacagaagacaatgagaagtcataccataacaatgacgacaacttcagtcagcagctggccttactcctcccacagaatgcgctttataaccaatcatagcgaccaaccgccacaaaacttctcagcaacaccaaatgttactacctgtcccatggatgaaaaattgctatctactgtgttaaccacatcctactctgttattttcatcgtgggactggttgggaacataatcgccctctatgtatttctgggtattcaccgtaaaagaaattccattcaaatttatctacttaacgtagccattgcagacctcctactcatcttctgcctccctttccgaataatgtatcatattaaccaaaacaagtggacactaggtgtgattctgtgcaaggttgtgggaacactgttttatatgaacatgtacattagcattattttgcttggattcatcagtttggatcgctatataaaaattaatcggtctatacagcaacggaaggcaataacaaccaaacaaagtatttatgtctgttgtatagtatggatgcttgctcttggtggattcctaactatgattattttaacacttaagaaaggagggcataattccacaatgtgtttccattacagagataagcataacgcaaaaggagaagccatttttaacttcattcttgtggtaatgttctggctaattttcttactaataatcctttcatatattaagattgggaagaatctattgaggatttctaaaaggaggtcaaaatttcctaattctggtaaatatgccactacagctcgtaactcctttattgtacttatcatttttactatatgttttgttccctatcatgcctttcgattcatctacatttcttcacagctaaatgtatcatcttgctactggaaagaaattgttcacaaaaccaatgagatcatgctggttctctcatctttcaatagttgcttagatccagtcatgtatttcctgatgtccagtaacattcgcaaaataatgtgccaacttctttttagacgatttcaaggtgaaccaagtaggagtgaaagcacttcagaatttaaaccaggatactccctgcatgatacatctgtggcagtgaaaatacagtctagttctaaaagtacttgaggtaaacatactaaaatgaattaagaggctgcattatatccagcagcaggtgtgaacaccctggggtgatgctggggctgagtgaattggacatttttcagcagggacacccaggccagtggcgggtcttt

SEQ ID NO: 59427 - DNA, 1230 bp, Homo sapiens
  misc_feature (1)...(1230): n = a,t,c or g
ttttttttttttctgataaaattatgttttaattgcctatggcatatattacataatggctcaaaattaatagtctggctgaaattaagaaaaacagctgatgatgacttagtaaatccttaattttaagtaagcttttggccaaaagtcaggggtagaattgactcaaaattaacagccttcaccatcttttattcattctgctgtgatacaactaaaatggccagtaaattctcccctgggtctcaggtaacagttttccaaaagtgaagtatcactttctctgcacagtggtgaaagccggcatttggatgggctggatcgggtggacaggctgaaacactggcttctttctcacttcagagtgtgttttcactgcagggagcagctgattccttttgatgatctgtaaggccagctgagtattaccattctgcagttcaaggtagactgccagcaagatggcctcagggggcacctctttaggatggatcattgaagccgcctggtggagacactttcgggctttgtcatattcgctcctcaggcagtaagcgctgccaaggttgaacagcatcacagtcctggcagagttgacggaactggggtagcactgaggggcccgcttaccagaggattccattgcttcattttcacctttgtctgatccttggtcctgctcatttgaagagatccctaaggagacatcagtgacattctccgggttcaagtgagtaatggcatcagatattctgtcgagagagatgagggcttctgcagcatataaatgtcccaaaaacttaagagatcctgacagcttgggctgctgaagaagtttatctgcatgattcaaagccatgaggttatcacccaaagccagagccacgtaggcactgcaagcaagtatggagcactttaagttttctaattcctgttttctcaatggagaagaaggtggagctggaatgaatttatctccatcatggcttttactgctgcaagtttcactgctttcgctgctctctgtgttcccacctaattgattactatttttagccccattttcctgctttggatcttgctgttcttcaggtagcagcaacaaggcatttctgagacatatggctgcaaactccatactggctacaggaatggccgaagactgccgaattccaccgcactgactagtggtctacgatnctcaattnnnnnncgcccccgcctctcccc

SEQ ID NO: 59428 - DNA, 2513 bp, Homo sapiens
ggagccgcgccgcatctcaggcgcagtctctaggggctgtgcgcatcctagggggggacatgtgcatctcaggggggctgctcgcatctggggggtgctgtgtgcatctcgggggggctgttgcatctacgcggggtggctgtgtccgcatctggagggggctgtgcgcaacccggggggggtgttgcgcgcatctagcaggggcggctgtgcgcatttcgggggggggctgtgcatatctggggggacacgtgcttatctctgggggcggctgtgcgcatcttgaggggtgtgtacatctcggggggcctgtgcgcatcttggggggctgtgtgcatccgcgggggctgtgcgcatctcggggtgctgtgcgctgctcctctgagctctgctctttcttgcagcgtttgcctcagcatggagggcggggccgcggcagccacccccacagcactgccttactacgtggccttctcccagctgctgggcctgaccttggtggccatgaccggcgcgtggctcgggctgtaccgaggcggcattgcctgggagagcgacctgcagttcaacgcgcaccccctctgcatggtcataggcctgatcttcctgcagggaaatgccctgctggtttaccgtgtcttcaggaacgaagctaaacgcaccaccaaggtcctgcacgggctgctgcacatctttgcgctcgtcatcgccctggttggcttggtggcggtgttcgactaccacaggaagaagggctacgctgacctgtacagcctacacagctggtgcgggatccttgtctttgtcctgtactttgtgcagtggctggtgggcttcagcttcttcctgttccccggagcttcattctccctgcggagccgctaccgcccacagcacatcttctttggtgctaccatcttcctcctttccgtgggcaccgccctgctgggcctgaaggaggcactgctgttcaacctcgggggcaagtatagcgcatttgagcccgagggtgtcctggccaacgtgctgggcctgctgctggcctgcttcggtggggcggtgctctacatcttgacccgggccgactggaagcggccttcccaggcggaagagcaggccctctccatggacttcaagacgctgacggagggagatagccccggctcccagtgatgcgcccggccggccctgggggttcgcggggtgtcttcttgcctgcccctgctgaggcgtcttcaggactgcaggctccggagagtggctctggcagcaggcgggcgcgtgggtgcagctgcatctgtttgagtgctgctttctggggtcaggtctccgcctcctctgcttctcctttctccgctgctatagaccagttcattgtgtgtggctcccgtgtctctgttgcccccttcagtgcagaaggctttgggtaggacttcgggtgttcggtcctggtcgcagagcacagatctttaaagaagcgagagaggaggccccaccctcctggcagcagatgcctggggcaaggccaggggaaactgggggggcctcagggacaggcctggaaaggccacgatggctgctgaattcaaacaaggagtccctccagcctgaataacacgtggcacaaatgggcccggcctttggcagaggagcaagtgatatgatgtgtaaagtatgttggtggtgaaagcaaggttccccaggagaggggagggactggcccctgggaagctctgagatgaggctgtggcccagctgtagtcctgaccttcctcttctttaaccctttagccctaggatggctttggtgggagaggggatagaagcccatgacttcagacagactttctcttggcagatgcaggcgggcctcctcccaggctgctccagacatgggggttggggatggggggcaccttgcagccccttcctgctggggctccctccttgtagcaccccccttgcggctcagctctggtttcctctcccaggctcacccaggctctgctcaggctgggaggcagagggcacaaaccttataattttttaaatgaaaaaccgctgctgctggctgtggctagagccccctggggctgctggagctgctgcctctgttctggaggacgagccttctccttatctgctgcccatctttccaggaagtcaggatggagtcagaacaactacagtcatcccccgtggtgtctgcacatcactccagccccataaagagtgtcatgttagctgagtcaccatttggcttcggcctggaaatagtgtgattagaacactgatcgtgtgcgaggccaggagatcaagaccatcctgactaacaaacacagtgaaaccccgtctctactaaaaatacaaaaaattagccaggcgtggtggtgggcgcctgtagtcccagctacttgggaggctgaggcaggagaatggtgtgaacccgggagatggcgcttgcagtgagctgagattgcactccagcctgggcgacaggctcaaaaaaaaaa

SEQ ID NO: 59429 - DNA, 1258 bp, Homo sapiens
acctctagtccagcgtggtggaattcagtgccctgagcgtctccatggcctgcctgagcccctcgcagctccagaagttccaacaggatggattcctggtgctggaaggattcttgtctgcggaagagtgtgtggccatgcaacaaaggattggcgagatagtggctgaaatggatgttcctctccactgccgcacagaattctccacccaggaagaggagcagcttcgagcccagggcagcacagactatttcttgagcagtggtgacaagattcgattcttctttgagaaaggcgtttttgatgagaaaggaaatttcctggtccctccggagaaatccatcaacaaaattggccacgctctgcacgcccacgaccccgtcttcaagagcatcacacactccttcaaggtgcagaccttggccagaagtctgggcctccagatgcccgtggtggtgcagagcatgtacatctttaagcaacctcactttggcggtgaagtctcccctcatcaggacgcctccttcctgtacacggagcccctgggccgggtgctgggcgtgtggatcgcagtggaggatgccacgctggagaacggctgtctctggttcatccctggctcccacaccagtggtgtgtcaagaaggatggtccgggcccctgttggctcagcgcctggtaccagcttccttgggtcagagccagcccgggataacagcctctttgtgcccaccccagtgcagagaggggccctggtcctcatccatggagaagtggtacacaagagcaagcagaacctctctgaccgctcgcgccaggcctacactttccacctcatggaggcctctggcaccacctggagcccggagaactggctccagccaacagctgaactgccctttccccaactgtacacctaaaggctctcgcagggcaggagccctcgcccctcccgggtgaagctgtgggctgtaaacaccagtgccttgctcagcctcctggttgcaacagggaggtcttgtctcccctcctgggctttcctcctgccctgtgggcagcagcctaggctgggtcaggggcttccctaagatcttcacctctctgcctccctactgccccaacatagccttgaggaggcttctcagccaccaaagggttctggccccttctcactctcctctcctctcagatggaactctggttattatggtgttagttatcgaataaaaacgacttcagaatgcaaaaaaaaaaaaaa

SEQ ID NO: 59430 - DNA, 1581 bp, Homo sapiens
ttttttttttttcacattcagttcttttatttaattttctagtggacaatttacatatctccctcaccctgtcttttaagttagtgtgacaattttccataataaactacttaaagagaagctttggtcaagaatggaatgaaatcgcaaaaaaacaaacaaaaaaattactgccttaaaaaaaccaacactttcaccaattttatattcaaacaaaaccacacggcattggcgtgatatgtgttttcagtgtttccttggggctggcttcctcgccatcgtgccacggcacagctgcggtcggccacagtttgtcatgctggatggcggaggctcactcagcttcacattatccggaggccctggatggaagactcgagggtcttgaaatcccaaattgtcatggctccatcgatgccagtagtgcaaaatttgcgacaatcttgcttgtccacctcataaatagagacttgagtgatgctattctggtgcagcgtctccaaggccgtgttgcggtcctcagttgtggctctcttgtccatgttgcggaagcgttccatggcagacatgttgcgttggatgctctgttttggaatatctaacttggagacgaaggtcaggcagccgcggtcatcgtagttaaagagcattgggcagcagtcatggccagcagccacgacgctgttctctgagacaaatgacacacttaggagcggcaggaactctgtcttcagagtcgagacctgcacactttttgaggcatcagcaacagacacggtgctgtcgtggctgacccaggccaggcggctcccactggcagagaagcttaccccgtggacccagccaccagtgccactgccaccaaactctgacatcagctgcccaaaaggcatcttgctgccccagggcgtgctggctggcttttcatccacttctttaatgtaggcagaaaacactctgcatttgaagtcacatgatcctgctgccagcaaaacgttgttgggatgccaatccaagctgaggactgtggagcgaatcggctttttaatgtgcttgctcacccaccagtcattttcagactcaaagtaacaaacagaaatgagtcgtgctccacttcccacagcaaatttgttctctaggggggaccacttcacaaaagtagctgcgcgattaattctcaggatcaccagggttggcttccaaacaccatctttctgactccagacataggcattgcggtctgccccacaagtgacaatgcggtcgctcttgggagcccagtcaatacctgtgatgtgtccgttgtgctccttgagttcatgagctttcacccactggctcccgttcttcttatagatgtgcacttcgtgattattgggactgagggcaatctgagtacgatccctgttccaggcatgacaggtgattggctctagtaaaaactgatgcagtgacattattcttagtgttttcaaaggagagaaagctgggatcgggggagtccggacgggctcggagcggaggattcgcggactctgggcagtcgacgcgaacaggctccgtcgggcgcgggcggaggac

SEQ ID NO: 59431 - DNA, 1528 bp, Homo sapiens
ggaattcccgggtcgacgatttcgtgctgagtactggggtccagaaagtgatcgctgccgtggtcgccatggggaagtcggattttcttactcccaaggctatcgccaacaggatcaagtccaaggggctgcagaagctacgctggtattgccagatgtgccagaagcagtgccgggacgagaatggctttaagtgtcattgtatgtccgaatctcatcagagacaactattgctggcttcagaaaatcctcagcagtttatggattatttttcagaggaattccgaaatgactttctagaacttctcaggagacgctttggcactaaaagggtccacaacaacattgtctacaacgaatacatcagccaccgagagcacatccacatgaatgccactcagtgggaaactctgactgattttactaagtggctgggcagagaaggcttgtgcaaagtggacgagacaccaaaaggctggtatattcagtacatagacagggacccagaaactatccgccggcaactggaactggagaaaaagaaaaagcaggaccttgatgatgaagaaaaaactgccaaatttattgaagagcaagtgagaagaggcctggaagggaaggaacaggaggtccctacttttacggaattaagcagagaaaatgatgaagagaaagtcacgtttaatttgagtaaaggagcatgtagctcatccggagcaacatcttccaagtcaagtactctgggaccgagtgcactgaagacgataggaagttcagcatcagtgaaacgaaaagaatcttcccagagctcaactcagtctaaagaaaagaagaaaaagaaatctgcactggatgaaatcatggagattgaagaggaaaagaaaagaactgcccgaacagactactggctacagcctgaaattattgtgaaaattataaccaagaaactgggagagaaatatcataagaaaaaggctattgttaaggaagtaattgacaaatatacagctgttgtgaagatgattgattctggagacaagctgaaacttgaccagactcatttagagacagtaattccagcaccaggaaaaagaattctagttttaaatggaggctacagaggaaatgaaggtaccctagaatccatcaatgagaagactttttcagctactatcgtcattgaaactggccctttaaaaggacgcagagttgaaggaattcaatatgaagacatttcctaaacttgccctgagtttgaaaatttgttaacaatacattaaaatcttaaagcatcaaattggtgttcgccaaggcattatgagactctactgtgttagggtatattcttttgtataaaacaaacaggtttttgaaaatattactgtatagttagttgttcagctaaactttgagaagaatttaattatgtctcatgaggtatcaaactatgtaattttgtccttgttatttttgtttcctttgtaatttacttgatgagtttatatcttcattaaagaatgttattata

SEQ ID NO: 59432 - DNA, 3565 bp, Homo sapiens
gcgagggtgacaggaaaccctgtgcagggagcgccgccatcttggaccagcccgaggaagatactgagggagcacaggagcagtcaccgctgccactgctactgccgctactgctgccggcgcgtctgcacctctcggcctgccagtgtacctgccggcgcctcggtcgaccgcccccgccccctctcccgctgcgtccgcactcctgttcctggtcctgacgcccccctcccgcccggaaagctgcccagccaccagcaaccccccagtgccaccatggcaactgcaccatacaactactcttacatctttaaatatattattattggggacatgggagtaggaaaatcttgcttgcttcatcaatttacagaaaaaaaatttatggctgattgtcctcacacaattggtgttgaatttggtacaagaataatcgaagttagtggccaaaaaataaaactgcagatttgggatacggcaggacaggagcgatttagggctgttacacggagctactacagaggagctgcgggagctcttatggtctatgatatcactagaagaagtacatataaccacttaagcagctggttgacagatgcaaggaatctcaccaatccaaatactgtaataattctcataggaaataaagcagatttggaggcacagagagatgttacatatgaagaagccaaacagtttgctgaagaaaatggcttattgttcctcgaagcgagtgcaaaaacgggagagaatgtagaagatgccttccttgaggctgccaagaaaatctatcagaacattcaggatggaagcttggatctgaatgctgctgagtctggtgtacaacacaaaccttcagccccgcagggaggccggctaaccagtgaaccccaaccccagagagaaggctgtggctgctagtgacctctttgctgtggcccctcatttgacctttcacctctgtctgttggaagcagtactttttactgcctcattgtcttctgtacatcttactgggtttaattaaaaaaaaagaaaaaactctgttgtaaaaacagtttaacacaatactaaactgctaaacaactagatgtaatcaggttatcaaaggcaagtagagtaataaatctctcctgcatggtaaatctagactttttttcccccttgtcctcgtgataagtatgtcaccaatatatgatttaaaccgagcactgatgctggacttcatgatttttaccctccctttggcaaggctttgtctcactgtacggtttaatttggtgatatcttaagcctttcttcccatccttaactgttcaagtatgtctgttgtaaccaataagtttattgctgtgaaattacttctgatggtagagaaggggttctataactgcttttgttttgttttggataaatttcctgttgtgtgggtggcatttttcttaacgagatttgcttctgtcttaacctcacacagggaaaatatccatttatcttctctctcgggcttaattaatagctttatctttttttataccattttatccttttctctttaacagaaagtaaatatgtataaaatttgaaggaatcgaactaacaatacattctgtgtatattattttaatgaagaaaataaattgattactggcattggaacagtataaaataccagtttgtacagtatgacctatatgtgaccatgttactcccttccatttcacacaaagaaatagacacaactgcagttcacaagtagtactggctccaccccttggtgctggcagtgtttggggacattatgctggaaagagctcctagcatcagaggattaacactagcagattctgttccatctttgcactgttgcttacctgctgattttcttaactgttcttgtgcaatcgacaatgtgctaacctgcttttctctttttgtaaacgtttttgcattacaggctgcattcttgccttactgtatagaaaaagaaaaaaggctgggtttactattgcacattttaagcttttatacctttatcttcttggaatggtcagattctgaactggacagtcagaaccacaggtctgctgttaagggattttaaattgtgcatttttaaccctacagtgaaataacttaagatatccctgtgttcacagtgtgaggggctgttttatgtcatgttggcataaattgttttgtaaaagggaaagtgtttctaaaggtgtttcagcgcttgtgctgatacaaagtaagttattactttgcaccaggtggtttggccactgaattaatactgtatagcaagagaaacaatcttatttttttggacaacatgttttattaagttcttcatttctgttgattttttttattgcatttatgattcagtggctgggaattgagaatttatttgaaatagaataggtaacacctcagcgtactatagaaaatgcactcagctcaactgctgtgtttaaaatacacattttaaatccctctttacagacactaacataaaagtacatctttctgggttgtaaacatgtggtagtaccagagtattgtatagtcaatgttaaataaaagccaaaactggaatgtgcagaaagtaggctttggttaatttgtggattcatttttatttttgtctttgtttaactttttaaaaaataagatttctggagtagattggtatattctgttaaagacttacagtgatccattttgcttacactgttgcatcacaagggactcacccagggaccatgacctgctggtgtgtgtgtatatttacaaaaacaaaacaaacaaaccacccattgggatataaggtagcaatcacaaactaaagactgcggcttgttgaggtgcaataccctgactcccaaagttagttacagtgggttttattgtttttgtgactgaaggatttattcagactgctgtactcttcatttgatgtaacaaaatgctattaatctaaatatttgtaaataaagtacctgtatctagattaaattaaaattggttgcattattttctgaactataatagggtttttcttcaggtgaacaatttgacgtgtcatcagtttttattgcagcactgtccatattcattgtataaagagaggtctacgtatgtagcatataaaaccacatcactaagtaatagacccacagctttattcttgtgtttacattacccttgaaatgttttcagtcaacccttttcagtgtaagatcagcacatttggtggctgatgctgttctcctttgactgtaccgggagccagattctatcatatgcatgtgtaatcccctgtaatacactcaggtgctcacaaatagagcagattgtcatattgtaacatgcgtgtgccagacaccgggcagtacactttggaaagaatgtgaaatccttttaatttttaatccatagcttactgcttgtgcagtcacctgcctctcgaggttgctcattgcccttggacctgtgaggaggccctcagattagtaattggtgcttagtactatttatgcttaaatagatcttccag

SEQ ID NO: 59433 - DNA, 2181 bp, Homo sapiens
gcggggaattcataccagcgtgctccagggcaatctgcagaaccaaatgtattctcataatgtggtcatcatgaacctcaacaacctgaacctgacccaggtgcagcagaggaacctcatcacgaatctgcagcggtctgtggatgacacaagccaggctatccagcgaatcaagaacgactttcaaaatctgcagcaggtttttcttcaagccaagaaggacacggattggctgaaggagaaagtgcagagcttgcagacactggctgccaacaactctgcgttggccaaagccaacaacgacaccctggaggatatgaacagccagctcaactcattcacaggtcagatggagaacatcaccactatctctcaagccaacgagcagaacctgaaagacctgcaggacttacacaaagatgcagagaatagaacagccatcaagttcaaccaactggaggaacgcttccagctctttgagacggatattgtgaacatcattagcaatatcagttacacagcccaccacctgcggacgctgaccagcaatctaaatgaagtcaggaccacttgcacagatacccttaccaaacacacagatgatctgacctccttgaataataccctggccaacatccgtttggattctgtttctctcaggatgcaacaagatttgatgaggtcgaggttagacactgaagtagccaacttatcagtgattatggaagaaatgaagctagtagactccaagcatggtcagctcatcaagaattttacaatactacaaggtccaccgggccccaggggtccaagaggtgacagaggatcccagggaccccctggcccaactggcaacaagggacagaaaggagagaagggggagcctggaccacctggccctgcgggtgagagaggcccaattggaccagctggtccccccggagagcgtggcggcaaaggatctaaaggctcccagggccccaaaggctcccgtggttcccctgggaagcccggccctcagggccccagtggggacccaggccccccgggcccaccaggcaaagagggactccccggccctcagggccctcctggcttccagggacttcagggcaccgttggggagcctggggtgcctggacctcggggactgccaggcttgcctggggtaccaggcatgccaggccccaagggcccccccggccctcctggcccatcaggagcggtggtgcccctggccctgcagaatgagccaaccccggcaccggaggacaatagctgcccgcctcactggaagaacttcacagacaaatgctactatttttcagttgagaaagaaatttttgaggatgcaaagcttttctgtgaagacaagtcttcacatcttgttttcataaacactagagaggaacagcaatggataaaaaaacagatggtagggagagagagccactggatcggcctcacagactcagagcgtgaaaatgaatggaagtggctggatgggacatctccagactacaaaaattggaaagctggacagccggataactggggtcatggccatgggccaggagaagactgtgctgggttgatttatgctgggcagtggaacgatttccaatgtgaagacgtcaataacttcatttgcgaaaaagacagggagacagtactgtcatctgcattataacggactgtgatgggatcacatgagcaaattttcagctctcaaaggcaaaggacactcctttctaattgcatcaccttctcatcagattgaaaaaaaaaaaagcactgaaagccatttactgaaaaaaaattgacagctagggttttttaccatccgtcattacccaaagacttgggaactaaaatgttccccagggggatatgctgattttcattgggcacatggactgaatcacataaattctcctccgtcagtaaccgtggcgattatacaaattatgtcttccaaagtatggaacactccaatcagaaaaaggttatcattggtcgttgagttatgggaagaacttaagcatatactgtgtaaacagtgccatacatttctaaaatcccaagtgtaggaaaaatatgcagacatacagatatataggccaactattagtaataatatgaaatatacttaaagagcttttaaaactttgaaaaaaaaaa

SEQ ID NO: 59434 - DNA, 1213 bp, Homo sapiens
ttttttttttttagttataatgactttattaaccttttgatctttcaacatttagatagtctttcttaatatttccaggagagtacctcatttttattttgaaaaccattcagcacatttatcttatgtaacatgcagagcatatatctatctgtatttttaaaattttcctgttactcattgatacatagtacttaattacatgttattccatgtacactgaaaacaatataggaaatatatacatctaagacttctactttgtacagtctttcattaaataagaatacttacacatacattttcagatatttctaccttcctgtatgtgtttggaattgtatggaaggaggcacttgaagaaatttgggccccttgggaggatggcagtggaagtccatgaagtaaagagcattctttaaaaagcagatttgattgcataccttttagttatttgagattctgagaattctgataaaccccaaagcagaaagattccttatacccttggaagatgggaaaggtgagggaaatatttgaagcagggtcagaacatccactaagaacatagcacctcagtagagcttacattatagtgccagggtagagttattactgaatagcttaggatgatgaacattaaccttcctacaggagtagtagcagctgatttggtgaccatcattggtcaccttttagtgtaactgcaaactaagaacaattatggcttgacatatactccatgtagggaagtgatgggagaggcagcctctgtgtggtccatccttggaagcactgcatcgattttgctcccctctggttttaaggagatcttttagacctttccttgctaactgctttcagtaaattcttgatggccttcgattctggattcagacatctcttctcacccttctttttcattgtagcaatgatctcaacacgtggacaaaattggcttgcaggaataatttcaagtttttctaaagaccttggattaacaggttgattactaatgctgatgcaggtacagcgtacagttctagagagaggtactccttgaatgccacttagagtcagaaagataaggcagcaaatcagaatggcagtttgattcatggtgctgagactggaggttcctctgctgtaggctcagaatatgtctaagcaattgaggaatgtctcccccttctgtcgtcttctcgcagccgta

SEQ ID NO: 59435 - DNA, 747 bp, Homo sapiens
tttcgtccgccgcgcgcctttgagtcagcaaactccgcggcccgcaagcccggctcggcccggccctgctctgttctgcccggaggagccgcccattgatcgtgtcctgtgctgaagatgtttccggaacaacagaaagaggaatttgtaagtgtctgggttcgagatcctaggattcagaaggaggacttctggcattcttacattgactatgagatatgtattcatactaatagcatgtgttttacaatgaaaacatcctgtgtacgaagaagatatagagaattcgtgtggctgaggcagagactccaaagtaatgcgttgctggtacaactgccagaacttccatctaaaaacctgtttttcaacatgaacaatcgccagcacgtggatcagcgtcgccagggtctggaagatttcctcagaaaagtcctacagaatgcacttttgctttcagatagcagccttcacctcttcttacagagccatctgaattcagaagacattgaggcgtgtgtttctgggcagactaagtactctgtggaagaagcaattcacaagtttgccttaatgaatagacgtttccctgaagaagatgaagaaggattaactgaaaatgatatagattatgattcagaaagttcatcctctgggcttggacacagtagtgatgacagcagttcacatggatgtaaagtaaatacagctccgcaggaatcctgaaaaataattctaatgttactatct

SEQ ID NO: 59436 - DNA, 730 bp, Homo sapiens
  misc_feature (1)...(730): n = a,t,c or g
ccgtgtggtggaattcccccccaaactgccggtgcagatgcccttgacccccagtaaccagcaacaagaccgtcactgtgtgaggaaagtggggcgccatcctcacccctgcacagcggcggcgactcctctagctcccaatgcaaaagcgtttaaagatgcagctcagaagcatcaccagcagcacaaggggaggtcccaagaaccagaacttacatcactgcctccgagttcagaggtttcctttcccaccttctcagaactttctgtttccatggcctcctctgccacctctgccacctcccctgatgtgctggcctccgtttccatcgcctcctcatggccgtcttccgcccggtgttccaagcccagctcaggcaagtctccgggcgcgaacagctggctgatggtgacatgctgcagcctggtcacatcagaaaccatgagggtggatctccggaggtcatcgatgtggacagactgccacagccctccgtggaagcccacataggctgttcctcttcccacccgggacagttttgtgatgaaatagacgaagatacggtcctcattttctcgtattttgttgatttcatttataacagaatacttagctgaggcaatgagctgggcgctacggattccatcttcaaaatctgtctgaaaaatgagaattttacatttggctgtattcgttaaacagtgtcggacttcgtaaggnntaggaatt

SEQ ID NO: 59437 - DNA, 1484 bp, Homo sapiens
ttttttttttttcatgctttttccctttccctttttttttttttaaacaagcagctcagcgatttgggaggttggttagtacaatacagagaacacagagagaaagtataaaatggcactgaacactaatgccaatacttatctcattgtggttataacgaaggatattattatttgtgttatttttgtctggaacataaatcaatgccattaacttgaacttgaggtatatacacaatacacacacaaccttaagcaaaatacttttcataagtaacattacattttaaaatattggaaacattcgaatatctgtgctgatttgtattctgacttaatggaacaagaagaaaataacattcaactagggagggttaaactgataataaagctcttaaaattcaaaatgtcttcctctccctttgtacttaccataggctacacaatgtcctgagaggattcattatgagaaaaatgtcaatcacagcttcaataacttactttggaaaaaactaatgagaaagcaaactggaaggtgagacttcatctttgttttcaaataagtggtcttaatttttcttcttatagaaaaagtttaaatcagtttattataaatatatctaaaccattaatttttgcagctttcaggtaaagtccagcacttcatttatacaaaatctatgagaagaggtcagtagagatcatctaatcttaagtcgtgacatcatccattcaagtccttggcacaatccctcgccagttagagcacagcatgcctggatatgccactggtgatctttaatagaagttagcttcaaaaactgggagatttctgctacagtcatgcattctttaacatcttgtttattagcaaaaatcagcaatccagcttttcttaggtcctcatgcgctaacattttatagagttcttctctagttacagaaatcctctctctgtctgtactgtccacaacaactattacaaactctgtgttagtatagtaagtgttccaggaagaacgaagagattcttggccaccaatatcccacattaggaaacgtgtattattaatcactatctcttctacattacttcctattgtaggagatgtatgtacaacttcattcatagaaaattggtaaagaatggtagttttccctgcattatccagcccaacaatgataactttgtgctcctggtgattgaacagtctccatattctagtgaagagaattcccattctcgggcagcggacccccccccctccagacacccgggccgcctggcttcccccggctcaggctgagggggaggagagagacgcgctggagcctccgcctctgctgctgctcccgcgctggtcgcgggcccgcttccagggaaccggagggaggccgaagcccaggccgccctgccgcgcgcaaggccccgccgctgccgccgcggcactcgcctggctcgcggacatcgccgccgcgttgtc

SEQ ID NO: 59438 - DNA, 2468 bp, Homo sapiens
ttttttttttttatagtctaaattttattatctccaagtcacaatgctgatcacaaatgggcaccctttaaaacagtaacaaaaaacaccaccacacatggaaaaatccttgcaactaaacacagtggaccaacagagacaactctcacagtgtcttaaggtctgggaatctgggcatgctgcccacaggcttgaggagacatcttcaggtttaaggcaaagggaacagcctacaaaaggcacaaccaccagctacccctagaagaatctcttagttatttcctccttgggggttacagattaagtgcctctccccactctccatcccacacctgtgactcagagtgattaggccagctgctagatggaaggaataaaaacagtgacattaccggggagagacacagccaccatctttgccctcaggttctgtagaaggacagggacagtggccaggttacccctggcagacgtatgtactgcagtaataggaatctcttccacagaggcagcagagaagtggtttagtgccatggatagggaggaaagataggagcccttgcccagaaggtgactggcttccttaggccttaagcccaggagtttttatattctgtctgcaaggacaaaaatagaattcggggaaaataaggtagtaacatctaaaacacttgtagcaggaaagacgtggagaagagcaattgcaaaggacagggtagactgcttgctggataatatttgcctttaaagagatgcattggtccacagcaactggaaaaggggtgtagcaagaagaatggaaagaagagaagcaaggccctctaattccacttacctcaaaagactgagccctgaggactatgtgaatacacacccctaaaggcaaaggctctcactccaccatccctttctcacaaaagcatctggtgtgccatctctccccacagtagggtattggccctcagcagagaacagaagcccatcatagtacaggtattgatggatgctcagactcctaaaaacctaagtcaaagagaagggctcctacccacctactctgagcttttctgcacaatgggaccctctgtgcagacagccatgcttccacagggttagagttaagggaatacaagtatacaagaggataacaaatgccaactaaaagtgaaaggccaggtctttttagacttggtggggaaggctggctgatacattctccattatctgggatgcacggaagagtcaaaagggaatccagaggggctagaaaaccagaagactagacttgtttcatttaaaggcagggagagagagcaagaaacagaaacaaagagaaaaaattaaaataatattaaggataagaagccaggctttaaaaatgaacatcttagaaaacaaaacaaacaggaaggagcttccttgggaacagaagacacttcaatttcccagaagtgaagaacagcagaagacatgggcttctgtatctagactcagaagcttggggctgtctggctctctctgctcccccgaacacagccaactcaagtgaagagtgaagatgggacgaggtccacttgtttctccctctctctagagcctgtcctcagaggaaggcaggggtcctcctctttcagctgtttgctggtaggagccacaccctatatctttgaagcccttctggtagtagatagccagctgtatttctcttctgagttctcacctctgctgctttttatatgatgttaagatttaaaatattcagaaacttgtattaactggaacccctgcttacaacctcaggtggagggggcttgatggtgactggctggggagtcctccggggtggggagggctttggctgcacctgctgctgggcggggttatagtaggtcactcctccatatacctgtgatggggcctgtgtattaggatacagatgaggcggtggtgggggaggcagtgcccctggagcataagggtaactgggattaccaaagttcatgacgcctggagcagaaaagtaagtaggagcaagcaactgctgaggtggtggctgtcctggagacatggacactggtgggggatagaggcctggattgggcagaggagctggtgtctggtggggatgtaaacctggataaggagaagaaaaaaactgaaaaataaagtaacatcattttcacaggatggcccggctggactgctcagtataatcaggctcagaatggaagtcctcaggatggacacaagaggaacttgttgcccaagcagccaggatggccagactcccaggctagcagcacaaagctcaggaggatgggttttgtggcactcccaacatatatcctcaggtactggaagcatataagcagagacacaaagcttacctgggtggggaaggttcattcctggctgcacaagcatgccctgtggaggcaaaagggaaaggcggtcaacttgggtataga

SEQ ID NO: 59439 - DNA, 1010 bp, Homo sapiens
tttttttttttccagcaacgctccttttaatatccggatgtccagagccacagcctgtgtgttgagccccgggtagggctgctggccggaggctgttggcttccagcagcagcacgacgtggctttttgaaaggagagcccggagagtggcggccagcaggggcccagccccatgggccgcgtgcctggtcccagctgcggcgtccctctggccagctacaaagtggaatgcttctcgaagggcacggtcaggaggcgggcggccgcctcgtccaagaaccagcacagtttcccggtgtggggctggaccagggcggcgggcagcgggttttcctcctggtcctccaaaatgcgcttcagaacagctgccttgccttctccagttgccacaaagatgacagttcgtgctgcattcaggacaggtagtgtgagggtcacacgctgtggcggtggcttcggggagtcactgatgggagccacaatcttctcccgctcctgtaggagggggtggtctgggaagagtgagcaggtgtgaccatcggggcccacccccaggatcagcaggtcgaaaaccgggatggagtccccttggaatgcctgtctcagcttcttggcgtagtcctcagccgcctcctccacaggcagctcggggttaatggtgatcacctggctttctgggatcggcagtctggagagaagatgcgtccggtagaggccgtacgtgctctcggcgtgatcgaagggcacgaggcgctcgtcgcagaagcccagcgtccagcgcgctaagctagctggcccggcaggggcgacggcggcgggtagctcgcgggctagcatcgagacgaggctcccgcccgacaagccgagcgcgaaacgggcgcgggcccctgccaggcagcatgctgcgcgctgggccaccagctgcgctagcgccgcacccagctcctgggaactcgagaacaccgagatgaggcccggggccggcgcggccatggcgagggcggcggcgg

SEQ ID NO: 59440 - DNA, 2118 bp, Homo sapiens
aaatggcggcctccatgttctacggcaggctagtggccgtggccacccttcggaaccaccggcctcggacggcccagcgggctgctgctcaggttctgggaagttctggattgtttaataaccatggactccaagtacagcagcaacagcaaaggaatctctcactacatgaatacatgagtatggaattattgcaagaagctggtgtctccgttcccaaaggatatgtggcaaagtcaccagatgaagcttatgcaattgccaaaaaattaggttcaaaagatgtcgtgataaaggcacaggttttagctggtggtagaggaaaaggaacatttgaaagtggcctcaaaggaggagtgaagatagttttctctccagaagaagcaaaagctgtttcttcacaaatgattgggaaaaaattgtttaccaagcaaacgggagaaaagggcagaatatgcaatcaagtattggtctgtgagcgaaaatatcccaggagagaatactactttgcaataacaatggaaaggtcatttcaaggtcctgtattaataggaagttcacatggtggtgtcaacattgaagatgttgctgctgagactcctgaagcaataattaaagaacctattgatattgaagaaggcatcaaaaaggaacaagctctccagcttgcacagaagatgggatttccacctaatattgtggaatcagcagcagaaaacatggtcaagctttacagcctttttctgaaatacgatgcaaccatgatagaaataaatccaatggtggaagattcagatggagctgtattgtgtatggatgcaaagatcaattttgactctaattcagcctatcgccaaaagaaaatctttgatctacaggactggacccaggaagatgaaagggacaaagatgctgctaaggcaaatctcaactacattggcctcgatggaaatataggctgcctagtaaatggtgctggtttggctatggccacaatggatataataaaacttcatggagggactccagccaacttccttgatgttggtggtggtgctacagtccatcaagtaacagaagcatttaagcttatcacttcagataaaaaggtactggctattctggtcaacatttttggaggaatcatgcgctgtgatgttattgcacagggtatagtcatggcagtaaaagacttggaaattaaaatacctgttgtggtacggttacaaggtacacgagtcgatgatgctaaggcactgatagcggacagtggacttaaaatacttgcttgtgatgacttggatgaagctgctagaatggttgtaaagctctctgaaatagtgaccttagcgaagcaagcacatgtggatgtgaaatttcagttgccaatatgatctgaaaacccagtggatggctgaaggtgttaaatgtgctataatcattaagaatactgtgttctgtgttattgttctttttctttttagtgtgtggagattgtaattgccatctaggcacacaaacatttaaaaggatttggactgcatttaattgtaccattcagaatggactgtttgtacgaagcatgtataatgcagttatcttctttctttcgtcgcagccagtcttttttgcttctcctacaaaacgtaacttgcaatttgccagtttattattgttggatacaaagttcttcattgataagagtcctataaataagataaatacgaagataaagctttattctttagtgttaaaatacagtatatctaataactagcctcattagtagagcagtatattaaaacaatgttttatgtaaaaagtgtttatcttcagcaccaaatacatgataaatgtatcaatcactatttataaacagagctttcaaacactcctcagaatattcttctaagtattttgatgaagtaactttgtaattatttgaacattgttttaatcattaggaaacactgattaactgcaagtcttcatgattctgtcatattaagaaacacctgtaggtttgcttcaaataaaggcatatataccaaggacttacagacaaaattaagaatgtcaatttaagttaataaaaatctcccaatatgaaaaaaaaaa

SEQ ID NO: 59441 - DNA, 669 bp, Homo sapiens
ttttttttactgagaaactgcagccatttttcagtcacgcacggctgatatttattatgtttattcataatttgattgcttgtttgtgcagtgcttagtggacagcacatctcagggagcctcccagaggcctggggtggaatacggtcatggaccatacaggaagcttcaccagactgggaggctgagggccttccccgagcctttctgctgatagggaaggcagagaaactgagagcatcaccatttcttcagttagtgctttctcctttctgtaattcctgttagtcatcatcatcatcatcctctggaacaaaaatgtcatgttcctcaagtagagcagcaaagttcttgctaatgagtgtcccgacatagagaaaggggatcacaatggagaacacacggagaaggccgaaggacattttcaccggtttgggcaaaatggcgccgctgcgggtaacgatgactgacctcgacggtaccaggctccggcctgagccgctccatgcggcggagacatcgccatctttcctcaagctaggcccgctccggagagccccggacctgacgggtgccaatactagccagcgagccgctccggacgccatgcccccagctccgcccctcacccgggcacccgcaccccaccgcccagccctcgtgacgaaa

SEQ ID NO: 59442 - DNA, 1652 bp, Homo sapiens
atggaacatttccattacgtggaatacaccaaagtcaagatgccctatgtacctgtccaaaactaccccatcaaggctcttttcagattgatgaatttgtccacactgaaagttcttcaacgaagatgcagctagtaaaccagaggcttgaaactgtcacagaggtgatacgttcctgtgctgcaaaagtcaacaagaatctctcatttacttggccaccagcagtttcctcacaacagtctaagttaaagcagtcaaacatgctgaccgctcaagagattctacatcagtttggtttcactcagaccgggattatcagcatagaaagaaagccttgtaaccatcaggtagatacagcaccaacggtagtggctctttatgactacacagcgaatcgatcagatgaactaaccatccatcgcggagacattatccgagtgtttttcaaagataatgaagactggtggtatggcagcataggaaagggacaggaaggttattttccagctaatcatgtggctagtgaaacactgtatcaagaactgcctcctgagataaaggagcgatcccctcctttaagccctgaggaaaaaactaaaatagaaaaatctccagctcctcaaaagcaatcaatcaataagaacaagtcccaggacttcagactaggctcagaatctatgacacataaagaattgaagaaaagttaagagctgccgaaatgcacagaggtgaaaatgacaaaccaaatggaatttctcttcagagttcagaattttcagatactaaggaggaagaaaggatccactacttcttgttcttatgaatgactctagaaaaatcagaatcaagttgtgggtggaaaaatcaacgtggcctttgagttcagttgttataaaccattgtgactattgttggtcaaagtattggtacttatattgttagtaattgcatcataattacattaccagtgttggaaaactaatgaagaaaacactgtaattgctactcagcaaatgtgaataaaaggtgtttgcgttattaggatgtctgttaagtaatcatttaatattattatattggtaatggttgtatgtgtgatgctatgcccagaatatgaagtatctgtttttgaaattcactttatttaaaagataagcagctgactgggcacggtgcctcatgcctgtaatcctagcaccttgggaggctgaggcaggtggatcacctaaggtcaggagttcaacaacaccagcctgaccaacatggtgaaaccccatctctactaaaaatacaaaaatcagccgggtctcatggcaggcacctgtaatcccatctactgaggcaggagaattgcttgacccaggaggcagaggttgcagtgagccaagatcacgccattgcactccagcctgggggacagagcaagactctatctccaaaaaacaaaaaagataagcagctttagaatatggcgcattcaaaacagtctcagtaacaaagacattaaaagaaaacaatttactttctaattaaaattttgtgtttcttaagatcaaatcatataggtaacttcatagacctaaattaaaagtgatttttggctggactggcaacaatgttcccaatgtctttactttttaaaaaaggctttt

SEQ ID NO: 59443 - DNA, 944 bp, Homo sapiens
cgggaattgttcgctttagtgccggcgccatggggtcggagctgatcgggcgcctagccccgcgcctgggcctcgccgagcccgacatgctgaggaaagcagaggagtacttgcgcctgtcccgggtgaagtgtgtcggcctctccgcacgcaccacggagaccagcagtgcagtcatgtgcctggaccttgcagcttcctggatgaagtgccccttggacagggcttatttaattaaactttctggtttgaacaaggagacatatcagagctgtcttaaatcttttgagtgtttactgggcctgaattcaaatattggaataagagacctagctgtacagtttagctgtatagaagcagtgaacatggcttcaaagatactaaaaagctatgagtccagtcttccccagacacagcaagtggatcttgacttatccaggccacttttcacttctgctgcactgctttcagcatgcaagtaggtatttcattaaacattcagaaaagttaccaatttacaagtgggtttttcatccccaaggaatacttctaacttagttgatatcaattcagagcatattttcccctagaaataatattaggaatattggccaagtgactatattcccagtttatcccataatgtagctaacaacttggaactagtgttgccagaattccactagcaaatagcagctgtatatatatgctgggaattctgatttcagtctgccttttgtaagagatgatatctgtcattaaaacagtcttcacatgtgatttttctgctcatattttttaaaaagtactggttgggccaggcgtggtggctcccgcctgtaatcccaacactgggaggcagaggcaggaggactgcttgaggcaaggagttcaagactagcctagacagcataataagaccccaatctcttaagaaataaaaa

SEQ ID NO: 59444 - DNA, 1902 bp, Homo sapiens
ccacacacaccacacacaaagagtgcaattgagagccttgggccaggacgctagaagatagggatgtagttgtcgattttggcgcggtggcgctgggcgatacattcagcgatccacacgatgttgcgacactcctgctccttgagcttcacgaaggcatagaagacaccaaagtggaactggttcaggaaggccaacttgttcagctttacctcgtgctcaaagaatcggtcctccagcgtcttgtctgcaccaggttgaggtagtcggcctggctgagcaccccggccttcaggccgcgcaccagtccctccaagtagccattgtccacgttaaagtaaagctccgggaagaacgacatggctgctgcgggagcggcgggactggtgcgcggcctgaaggccggggtgctcagccaggccgactacctcaacctggtgcagtgcgagacgctagaggacttgaaactgcatctgcagagcactgattatggtaacttcctggccaacgaggcatcacctctgacggtgtcagtcatcgatgaccggctcaaggagaagatggtggtggagttccgccacatgaggaaccatgcctatgagccactcgccagcttcctagacttcattacttacagttacatgatcgacaacgtgatcctgctcatcacaggcacgctgcaccagcgctccatcgctgagctcgtgcccaagtgccacccactaggcagcttcgagcagatggaggccgtgaacattgctcagacacctgctgagctctacaatgccattctggtggacacgcctcttgcggcttttttccaggactgcatttcagagcaggaccttgacgagatgaacatcgagatcatccgcaacaccctctacaaggcctacctggagtccttctacaagttctgcaccctactgggcgggactacggctgatgccatgtgccccatcctggagtttgaagcagaccgccgcgccttcatcatcaccatcaattctttcggcacagagctgtccaaagaggaccgtgccaagctctttccacactgtgggcggctctaccctgagggcctggcgcagctggctcgggctgacgactatgaacaggtcaagaacgtggccgattactacccggagtacaagctgctcttcgagggtgcaggtagcaaccctggagacaagacgctggaggaccgattctttgagcacgaggtaaagctgaacaagttggccttcctgaaccagttccactttggtgtcttctatgccttcgtgaagctcaaggagcaggagtgtcgcaacatcgtgtggatcgctgaatgtatcgcccagcgccaccgcgccaaaatcgacaactacatccctatcttctagcgtcctggcccaaggctctcaattgcactctttgtgtgtgtgtgtgtgtgtgtgcgcgtgtgtgtgcgtgtgtgtgtatgtggtctgtgacaagcctgtggctcacctgcctgtccggggtgtagtacgctgtcctagcggctgcccagttctcctgaccctcttagagactgttcttaggcctgaaaaggggctgggcacccccccccaccaaggatggacgaagaccccctccagagcaaggaggccccctcagccctgtggttacagccgctgatgtatctaaaaagcatgtcactttcatgttcctccctaactccctgacctgagaaccctggggcctgggggcagtttgagcctcctctcccttctgtgggtcgctcccagagccatggcccatgggaaggacagagtgtgtgtgtccttggggcctggggggatgttgctcctcagctccctccctcagccctgcccctctgagacaataaaactgccctctctaaggccaaaaaaaaaa

SEQ ID NO: 59445 - DNA, 762 bp, Homo sapiens
  misc_feature (1)...(762): n = a,t,c or g
taaaaagggccccccttttttttttttttgtccctaaatagcatgcgttcatgacgctggctcactttatttttggccccaggtcaggtctcccaaagggtttcccagcagtcacttcagagtctcctgcagagtcaccatcaagcagacctcttcctcgggaggccgtgtcgccaccccaacccttgacttctggtatcaccatctcctgtcacctgggctccagtctctgtccgatggcctcaacaggacatcaaagcatagctaccagtttgaaggtgccctcaggcttggcaggaaccacgtggacaaaagtcttgtagagcacagcacccttgggcagcctggtgatcagatccacagcctccgtgtttctgggatgaggcacgtagacctccttagtgtagcggactatcccctcttccagggcatacagacatttattcttcccaacacccacatgggcacctgggtgccagcggaaatggcgctgtgttgcaatgatgttcccagcatgaacatagtgaccttccattttcttaatgccttggcgtctgcctgatgactttccaccgaggtttttggagctaccacccgacttcttggatgcgtatctgacagcaagagctgtagccggagtggggcttagcaaggatgtaacggctgtccgggtcctcagcgccaacaccaccgacgccatgccggacgcgtgggtcgncccggaaaggccgtcgatgtccgcacgcgatcaatnggacccac

SEQ ID NO: 59446 - DNA, 3021 bp, Homo sapiens
tttcgtatgagaggctgtgtgagtttctgcagccgccgtcagaggagacctcagcatcatctagagcccagcgctggccctgcctccgcctgccccgccgccgccgtcgccgtttctgttcctgctactgtcccacctaaacaactcccgttacacggacaagtgaacaactgtggctgacctctccttttcttcctcctcttccaactccttctcctcctcccacttcccagccgcagcagaaagcccccaacccaactgacactggcacaactgcaaacggtgtcatccgcacaactttatctcgctcctcgggctcccctaaggcattggacccatcgccgcgtcttttattttttgcaaagttgcatcgctgtacatatttttgtccccgccacctccctctgtctctggagtgccctacagccccgcaaactcctcctggagctgcgccctagtgcccctgctgggcagtggcgttcccccccatcctcccgcgcccagcccctgctgctctgggcagacgatgctgaagatgctctcctttaagctgctgctgctggccgtggctctgggcttctttgaaggagatgctaagtttggggaaagaaacgaagggagcggagcaaggaggagaaggtgcctgaatgggaaccccccgaagcgcctgaaaaggagagacaggaggatgatgtcccagctggagctgctgagtgggggagagatgctgtgcggtggcttctaccctcggctgtcctgctgcctgcggagtgacagcccggggctagggcgcctggagaataagatattttctgttaccaacaacacagaatgtgggaagttactggaggaaatcaaatgtgcactttgctctccacattctcaaagcctgttccactcacctgagagagaagtcttggaaagagacctagtacttcctctgctctgcaaagactattgcaaagaattcttttacacttgccgaggccatattccaggtttccttcaaacaactgcggatgagttttgcttttactatgcaagaaaagatggtgggttgtgctttccagattttccaagaaaacaagtcagaggaccagcatctaactacttggaccagatggaagaatatgacaaagtggaagagatcagcagaaagcacaaacacaactgcttctgtattcaggaggttgtgagtgggctgcggcagcccgttggtgccctgcatagtggggatggctcgcaacgtctcttcattctggaaaaagaaggttatgtgaagatacttacccctgaaggagaaattttcaaggagccttatttggacattcacaaacttgttcaaagtggaataaagggaggagatgaaagaggactgctaagcctcgcattccatcccaattacaagaaaaatggaaagttgtatgtgtcctataccaccaaccaagaacggtgggctatcgggcctcatgaccacattcttagggttgtggaatacacagtatccagaaaaaatccacaccaagttgatttgagaacagccagagtctttcttgaagttgcagaactccacagaaagcatctgggaggacaactgctctttggccctgacggctttttgtacatcattcttggtgatgggatgattacactggatgatatggaagaaatggatgggttaagtgatttcacaggctcagtgctacggctggatgtggacacagacatgtgcaacgtgccttattccataccaaggagcaacccacacttcaacagcaccaaccagccccccgaagtgtttgctcatgggctccacgatccaggcagatgtgctgtggatagacatcccactgatataaacatcaatttaacgatactgtgttcagactccaatggaaaaaacagatcatcagccagaattctacagataataaaggggaaagattatgaaagtgagccatcacttttagaattcaagccattcagtaatggtcctttggttggtggatttgtataccggggctgccagtcagaaagattgtatggaagctacgtgtttggagatcgtaatgggaatttcctaactctccagcaaagtcctgtgacaaagcagtggcaagaaaaaccactctgtctcggcactagtgggtcctgtagaggctacttttccggtcacatcttgggatttggagaagatgaactaggtgaagtttacattttatcaagcagtaaaagtatgacccagactcacaatggaaaactctacaaaattgtagatcccaaaagacctttaatgcctgaggaatgcagagccacggtacaacctgcacagacactgacttcagagtgctccaggctctgtcgaaacggctactgcacccccacgggaaagtgctgctgcagtccaggctgggagggggacttctgcagaactgggtaaccctgaaaaggtttgctcagaacatcctttgctggccaactgcactgactccagaaagagacttctaagtgtaatcagagagcaaagcatatgctgtctgccccctggaagcaagaggaaggaagaatccaagggagtttatatggcggatattccacccaaccaaaatccaaaactgactgttcctttctgttgcactggagttgcttgagcctctgtgtctccccctcaggctgggccactcccatgttgagatcctaccttgaaggaatgggaacatagagcttgggaggccctctgtagagaatgctcctgtgaagcagagatttcaaaggactaaaatcttcattttaaatagagttaattttgcaaagggttgcaattgtttctcatgatctctgcttctctagaaatgtctctcattctctgctgagttcaggtctccaaataactatgggtgtaaaagcctgtttcctacttgcatatttatctttcagatcattttgtaactatctccctccttttttccctcgcttcccttattcagcaaatatttggtggtctcatgctcagtcctggtt

SEQ ID NO: 59447 - DNA, 3137 bp, Homo sapiens
ttttttttttttgaggatacagaagatttattcgaagtccaggtacagactggccaacctgcctctacagcgtccacagcgaacacagggctagacaagggaggagtttctcaaacggttttaatcggttctctccgcgtcacaagccatcgggtaaggcaacggaatgtgcgtggggtcccctgtggctccgcggtcacaatactgagcctggaattgctgttagcaaaatatacatttgtgtcaccataaaaaaccgcgccgccgcccctcgggtctcacaacaggtataaaaaattataaatatttacacccttgttacacgcttttacggaaaggggatcctaggagagcccccgggacaggacgcgggggcggtagaaagagcacaaagacaggaggagcgcccgccttccgggtcccagcatcagaggcaggcaaaacacagaaatgagactttggtccaaaatttgaaggaagaaaaaaccctgaagtttgagagcaagttttctaggcgactgcaggtgaaggcgtggtgtaaggcaaccggaggcgatgccagaggcggcgacacgcccgccccttccctgaagctcaggggctctaagataggaccggggctccctgtgcctgacccactgggcggccccgcctgctctctggaaactgggtcctgcctgtgacttaattacaaggaataaaataaaagtaacagcatacaaggtaataccacaaggaagtttagattacactcataccattgtatcatcttgctataaaaagttacttaaaactatttcttttgcatataaatgaaaaaagattagaatatttggtcaactggaaatattgctaggcacagacgtctgcaactgcaaagtatataatacagagattatgtcgaccagctccgcagctggagcagcggggagcccgcctgggggcagaagggaaggccctgggggcggggtgaagggagaatcacgtgacttgattagagggctggggttggggtgtcgcagccgcggccgccgcgccccagctgcatgatcctgcaggagccggccaggccccctgcctctctctggtgtgaccccctcaccccttgggtccccaggacaccccgggtgggtgtgtggctgcaggaaggcaggttttttaaggcacaaggaagccaagtcgtggtcggggcgcccacctgcaggccccacgcccgacacaggccccaccaaggcatggccccgagggtctggccccgggtgtggagggccgggaactcccgctgccacagtcaccaagagcctgagctgtccctgtcaccgcagggtgagcaaggtgaactagatttaatttttttaaaaacaggtaaactgatttctctttaaaaaaataaaatctctggtctgctaaggtcacttcagctgtttttaaagtggcttttctctggaatgatggaagttgtcgccagggggcccggccgtgggggcctgtgcccctagatggtggacttggagaaggagacccgcaggtggtggttctccccgaggtcgtggttgtgcaggtcaatgagggcctggaccgcctcctccacggagcccatctggatcagtgccatcttgcggtccttctggaagaacttgaatcctttgacgacgcccccattgctggaaaacaggaccttgagatcctcctcggagactgagggcgggatgttggagaggtgcagcgtggccgagggcgggaatatgttctggaagttcttggagcccggcttcttgaagcggtgcaggggtgagttgccgtagtccttggtcaggccctggtcctcctggccctcgcggggcagctgcacgttctggtgcttcgagagcgtgatgcggatgggcttcccgtgcagcttgtgcccgttcaggtggctcatggccagctgggcctggttgccgtccgccatctgcactagggcgttctccttcttattgaacaggatcttcacgcgctgcacgtcaccgtagacgccgaaaagaataaagaggctttggggtgtgactctctctgggttgaggttgctgaccagcaatacagaatttcctgcccccgccaggcccgggatggcgatccgacctgccgccgcagctgccgccgccgccgaggggatggccaggggggccagggcgccgtggacgttcggaacggaaaggccgaaggccgcggccatggtctggtccagcgagggctggctgtccccggaaggcaggtctgggcgtgtgtagtcacggctcttgtcattgttgtacttgacgttgaggctggtgagcttggaaaagtcgatgcgcagcgtgcagcaggcgttgtagatgttctgcccgtccagcgacagcttggcgtgctgggcgctcacggggtccgcatactgcagcagggcctggaactggttgttcttggtgaaggtgatgatcttcaacactgtgccgaacttggagaaaatctggtgcagcacatccagggtcacagggtagaagaggttctccacgatgatcctgagcacggggctctgcccggccatcgccatccctgcatccacggccgccgccgaggcagccaaggccaggttccccgactggaccgagttcaccgcctgcagggccgcctgggcccgcgcctggttgggagagctgtcggtcttcagctccttgtggttggagaactggatgtagatgggctggccgcgcagcacaggggtcaccgaggtgtagtagttcaccatggtattggcagcctcctccgtgttcatctcgatgaaggcctggtttttccccttcagcatcaggaggttggtgaccttcccaaagggcagccccagggagatgacttccccctccgtgacgtcgatggggagcttccggatgtggatcactctagaggggacgcctgcacttcggctgtcacctttgaacttcttgctgtcatttccgtttgctgcagaagccgagttgctgctcatgataaacggtccgttagtgacacaagtagagaaaagctcgtcagatccccgctttgtaccaacggctatatctgggacaatgccgtccatggcacacagagcagacccgcgggggacggagtggagccgccggaat

SEQ ID NO: 59448 - DNA, 1226 bp, Homo sapiens
ttttttttttttgaattcaacaagtatttattgagtgtctattatgtgctagatactgagacacatcagagaacaaaaccaaaagccctgcccttgtcgggcttacagtctagcacttaccgccagttaacctgcaggctacctggagccccgggcaagtcaccgcacctctgtgcctcggtcctcagctgcccaatgggagaataagcagacctggctcagacatgaatcatgtgcttggtgtactgcagatgccaaactgcatccccacaacccaccacgtagacagcagacagggctggaagttgatttttaatgataaagtacaatgaagggagggcagaggggctaagcctagctgtctggggtgctgtggtggtggtagactggctacacaaactgttgctgctgctgctgcttcttggtggccgccttgctggcgaggtccttggccttctctgtagctgccagtgccgtctcctttgccttctccttggcttccttggctgtctcaacaagtgttttggaaggggcctcgccttgcagcttagccaagatatattcaaaacccttcatagtcttggtcacgttgcttttgaaccgggcaagaccaaattcctggacagctctggagacaccaaataagctagaggagacccaggcttcccggcggatttcagtccagccactgttgtcagagttcacacagtaaacacatcgttcctccaccaccatcagccgggcgtggttgatgttccaggtgaaggtagtcatggtctgattctgtgggtccacaatagagtcctccaggacgtacaccgagtgagcaacattggcaggaaatagtcgctcggcccagcgtggcatcctgttggtcttggtcaggagtcgccgggacagcagtttctggtcaggggtcacctcccggtgtactatgtcttccgtcaagacatgtttgctatagggattcgggtaccgctgccagaaggcggcgaacacttggtcccaggaactccggagcacgctctggcccaggaaatacttcaccatcgtcccggccgaagcgggctcagcacccgcgcagcatcaggggtgcggagcctgggaggcacgcgagggccgggccgggccggggctcggcgcacacccgccgccaggctcgtagctcagtcaccaccgcaccgcgcccaagcagctgccgccgccgccgccgccgccatgagttg

SEQ ID NO: 59449 - DNA, 1221 bp, Homo sapiens
cggacgcgtggggagcaaccctagtgacaggagccgaagcagcagcgcaggttgtccccgtttcccctcccccttcccttctccggttgccttcccgggccccttacactccacagtcccggtcccgccatgtcccagaaacaagaagaagagaaccctgcggaggagaccggcgaggagaagcaggacacgcaggagaaagaaggtattctgcctgagagagctgaagaggcaaagctaaaggccaaatacccaagcctaggacaaaagcctggaggctccgacttcctcatgaagagactccagaaagggcaaaagtactttgactcaggagactacaacatggccaaagccaagatgaagaataagcagctgccaagtgcaggaccagacaagaacctggtgactggtgatcacatccccaccccacaggatctgccccagagaaagtcctcgctcgtcaccagcaagcttgcgggtggccaagttgaatgatgctgcccggggctctgccagatcctgagacgcttcccctccctgccccacccgggtcctgtgctggctcctgccccttcctgcttttgcagccaggggtcaggaggtggctcgggtgtgggctggagaggcagaagccctttcctgttggtgtcccagcacatggagccccttgggctgagcaccaagaccttgaaccttttttgttttaccttttttccaaataacagttgggagaaatatcaatgaaattctgggggtgggggtggggttgaaagggtggggtgggagatatggaggagtatgaattagggcttggagttggtaaaaacattcctgactatccttcttaaccacgtggctgatgtggggtaggtatgaggggaaggaagtggagtagcctaatgaaaaggggttctagttgagctctgtagataaatgccttgtttcagtgtggttggagacctggtgtcagataaaagaaactccatccgcacagacagatgcaaacagctcctctagttctgcagagctagttgagaactcaacattaatcattttaaaaagtactgtccttgaaatagatttgctgtgggaagaagggcagtgagtgtgggagaaaggagccgtgagcgtggggaaccccacagagcccaaaggactttttcagtattcgaaataaacaaaacaaaaacccatgaaaaaacccaacccagaaaaaaaaaa

SEQ ID NO: 59450 - DNA, 1260 bp, Homo sapiens
tgcgcgtgcgcagggataagagagcggtctggacagcgcgtggccggcgccgctgtggggacagcatgagcggcggttggatggcgcaggttggagcgtggcgaacaggggctctgggcctggcgctgctgctgctgctcggcctcggactaggcctggaggccgccgcgagcccgctttccaccccgacctctgcccaggccgcaggccccagctcaggctcgtgcccacccaccaagttccagtgccgcaccagtggcttatgcgtgcccctcacctggcgctgcgacagggacttggactgcagcgatggcagcgatgaggaggagtgcaggattgagccatgtacccagaaagggcaatgcccaccgccccctggcctcccctgcccctgcaccggcgtcagtgactgctctgggggaactgacaagaaactgcgcaactgcagccgcctggcctgcctagcaggcgagctccgttgcacgctgagcgatgactgcattccactcacgtggcgctgcgacggccacccagactgtcccgactccagcgacgagctcggctgtggaaccaatgagatcctcccggaaggggatgccacaaccatggggccccctgtgaccctggagagtgtcacctctctcaggaatgccacaaccatggggccccctgtgaccctggagagtgtcccctctgtcgggaatgccacatcctcctctgccggagaccagtctggaagcccaactgcctatggggttattgcagctgctgcggtgctcagtgcaagcctggtcaccgccaccctcctccttttgtcctggctccgagcccaggagcgcctccgcccactggggttactggtggccatgaaggagtccctgctgctgtcagaacagaagacctcgctgccctgaggacaagcacttgccaccaccgtcactcagccctgggcgtagccggacaggaggagagcagtgatgcggatgggtacccgggcacaccagccctcagagacctgagctcttctggccacgtggaacctcgaacccgagctcctgcagaagtggccctggagattgagggtccctggacactccctatggagatccggggagctaggatggggaacctgccacagccagaactgaggggctggccccaggcagctcccagggggtagaacggccctgtgcttaagacactcctgctgccccgtctgagggtggcgattaaagttgcttcacatcctcaaaaaaaaaa

SEQ ID NO: 59451 - DNA, 1035 bp, Homo sapiens
  misc_feature (1)...(1035): n = a,t,c or g
gaggcgccggtagtgaaggtgggaagtgttggagcaagcgtcactggcggtgagaagggggcggtaggtttttgctttaaccaactgagtctccttcaccttccaatctaaggaccagctaagacgatgaagtggaagggtgccaganccgcccctcctgctccctatgctgtgaggcagcccctttccatcactggcctctgcttccctctccccattccgctgcccagggctgctctgcagacccagctgggtgctggtcgggaagccagagcccgggcctcccccgactcaccattactgtggtttcctgtttggagggaggcagggggctgcaggttgctgctcaaggccccgtacccgcggtaactgtagttgaggccgccgttggcgtacacagggtcctgggagtaggaggaggctggcagtgagtaggtggagtgggtgatggctgcggagtcccgcgagtgctgcttgtccagggctatgggctcatcctgtgaggactggtagatctctagacgcatccgcttggctgcctttcttgtctcgctctcacaggcagctgccaggatgttttctgccatggccgaggtcagatggggtggcgtgggtctggtcatctccatgccgttcttcttcatgcgacggcaggacttgaggtacgtgcggatgcgcttgcgggcccgctcctggaactcagggaactgccggctgcaggactcgatgatggcctggatcttctccttgggctgcttggagatgggcaccatgcggtccaggttctcgtccacaaagagacgcacaaacatgttgaaggccttaagacgctcagggtccatgccttcagagtcgttcatcttgtcattgtcctcatggtcatcgtggtcatcgtcgtcatcatctgccgtcggggcccggcccactgtcaggtcctcagggcagccgctgacctcggtcttgatggaatcgtatctcccagagctgtaagggggggcctcgggggtgtcttccccccgcatttgacgcggatgg

SEQ ID NO: 59452 - DNA, 1085 bp, Homo sapiens
  misc_feature (1)...(1085): n = a,t,c or g
ccccccccaagtttttttttttctttttttttttttgtctagaaaaaaggcttttattgtcccaggctggagggcagggtcagaggtagctgacatcattgcagatgatgggctggcggctacgacagctcatgagagctgcaaagcgtgagacatccgcaggcagttcaggttctgggcgaggtgggcatgacagccgctttcctgccatagctgtccgccgagccctggccagccggcgccgaagctgctcagagaggccaagcaggaactgagggggccgagcacgggcacggtgcccacctccgtcacccccttcactccctgtctcaggcagctccatccagttgtgcaccaagtcagcaaagcaattgtcccctagtaccaggggctggcgactgcgacccctgttcagtagggctgctgtccagtcctctgcttccagtccctgccagtgctccaggcaggcgtctggggtggacttgggccgtggatggtggacaggtggtacactggctacaggggccctgctgggcatggggaggccactgactgagaggcactgcctacgaaggggctgtgctgagggtgctgggcgctgggatacaggcagttcttcctctcgccatgtgctgcctgacacctccgagaagccagagtcccagtccagggcatgctccctggggcctcccaaggctgcatccctgtcttctgtcaccactgcttcctcctcctcctcttcctcctcctccacacagcagactgagtcctcttccaaggcacccgaggcccctaagctggtggctgggctgcacatctgggccagtttgggaggttggctgcaggggaccaggcattgagggtgagcctgtgtcccgaccacacaacagttcccagcggagctggctaaggaagctgtcaagccgagcgctgtgcatgtccatgccagggcccccaccgaacctactagctcctcttggaaccccggcggagccgcgcggagagggctgggagggccggccagcggcgccctcaggaattccnccgcactgtactagggtcttcgaggnnnnnnnnccccgctc

SEQ ID NO: 59453 - DNA, 2208 bp, Homo sapiens
gcggtggaattcgcggagggagcgctgaccatggctccctggcctgaattgggagatgcccagcccaaccccgataagtacctcgaaggggccgcaggtcagcagcccactgcccctgataaaagcaaagagaccaacaaaacagataacactgaggcacctgtaaccaagattgaacttctgccgtcctactccacggctacactgatagatgagcccactgaggtggatgacccctggaacctacccactcttcaggactcggggatcaagtggtcagagagagacaccaaagggaagattctctgtttcttccaagggattgggagattgattttacttctcggatttctctactttttcgtgtgctccctggatattcttagtagcgccttccagctggttggaggaaaaatggcaggacagttcttcagcaacagctctattatgtccaaccctttgttggggctggtgatcggggtgctggtgaccgtcttggtgcagagctccagcacctcaacgtccatcgttgtcagcatggtgtcctcttcattgctcactgttcgggctgccatccccattatcatgggggccaacattggaacgtcaatcaccaacactattgttgcgctcatgcaggtgggagatcggagtgagttcagaagagcttttgcaggagccactgtccatgacttcttcaactggctgtccgtgttggtgctcttgcccgtggaggtggccacccattacctcgagatcataacccagcttatagtggagagcttccacttcaagaatggagaagatgccccagatcttctgaaagtcatcactaagcccttcacaaagctcattgtccagctggataaaaaagttatcagccaaattgcaatgaacgatgaaaaagcgaaaaacaagagtcttgtcaagatttggtgcaaaacttttaccaacaagacccagattaacgtcactgttccctcgactgctaactgcacctccccttccctctgttggacggatggcatccaaaactggaccatgaagaatgtgacctacaaggagaacatcgccaaatgccagcatatctttgtgaatttccacctcccggatcttgctgtgggcaccatcttgctcatactctccctgctggtcctctgtggttgcctgatcatgattgtcaagatcctgggctctgtgctcaaggggcaggtcgccactgtcatcaagaagaccatcaacactgatttcccctttccctttgcatggttgactggctacctggccatcctcgtcggggcaggcatgaccttcatcgtacagagcagctctgtgttcacgtcggccttgacccccctgattggaatcggcgtgataaccattgagagggcttatccactcacgctgggctccaacatcggcaccaccaccaccgccatcctggccgccttagccagccctggcaatgcattgaggagttcactccagatcgccctgtgccactttttcttcaacatctccggcatcttgctgtggtacccgatcccgttcactcgcctgcccatccgcatggccaaggggctgggcaacatctctgccaagtatcgctggttcgccgtcttctacctgatcatcttcttcttcctgatcccgctgacggtgtttggcctctcgctggccggctggcgggtgctggttggtgtcggggttcccgtcgtcttcatcatcatcctggtactgtgcctccgactcctgcagtctcgctgcccacgcgtcctgccgaagaaactccagaactggaacttcctgccgctgtggatgcgctcgctgaagccctgggatgccgtcgtctccaagttcaccggctgcttccagatgcgctgctgctgctgctgccgcgtgtgctgccgcgcgtgctgcttgctgtgtggctgccccaagtgctgccgctgcagcaagtgctgcgaggacttggaggaggcgcaggaggggcaggatgtccctgtcaaggctcctgagacctttgataacataaccattagcagagaggctcagggtgaggtccctgcctcggactcaaagaccgaatgcacggccttgtaggggacgccccagattgtcagggatggggggatggtccttgagttttgcatgctctcctccctcccacttctgcaccctttcaccacctcgacccgggaattccgg

SEQ ID NO: 59454 - DNA, 1015 bp, Homo sapiens
  misc_feature (1)...(1015): n = a,t,c or g
ttttttttttttcatatctgcatagttttatttctttctcaattccaccagaaaaagggattttcagaaaaaggcacagttgtgcttcctctaaagatgtagtctgcggtttgggaagtgctggttccctgaggttatctggagcgctggttgtaaagaagaaagttcttgtcttggcagagcaggcagagtttcaggcttcggcagctgcctcccgcagctaagaatgcccaggtgcccatgagcaccaggattataaatgctgacgccaggtttattccataataagaacttatgaaggtctgggctgacaccagcaggtgggtcaggagaacgataaggaggatgccccactttttcttctcacagccatcaaaaaatacaatgccccagaatacatgcagcaagataatgaccagcgtcatgaaagctgaataaaggaagaattgaggagaatctccatgaatgcccactgtgcctggccccaaggagtcagatagggtattcacaaaggaaaatactccactcatgattccaaagcccaagccagaaacataggccagcagtcgcatagagggtgctgtctcacctgggtttatactcttcaaaccttcactggctttttttaagagtttataatatgcaaatcggaacatttcttggatatagacagagacaaacgctccaaagatcagcagatatttctgtgttggtccatctttgttgtcaataatgactcttgccatgaaccaaacaagggacgaaatcagtagagacaccaaccagaagaaagctccggcgatgaggaagatgatacgcaacggctcggtggcgatggtgaagacataaagggcgagcgcaggcccgaaggcaatgaaggcgcagccgaagaacacggccgcagtcatggccaccgcggaaaccgacccgggggcccgttggggacgcgagatgctcccggcgcgggcggggttcggtgaattccaccgcnctggactagtgatctgcgatcaaa

SEQ ID NO: 59455 - DNA, 2646 bp, Homo sapiens
  misc_feature (1)...(2646): n = a,t,c or g
tttttttttttttaagactctgttatgattttatttcttcaattgttccaatcacagtttctaatacagaaataaaactattcagcgtctccgttcttgcttcattttgtttcacagagatctgcatttctgagtttccaggctccaatagcagttctgttaagaacagacagccagtatcatcctgagcactgaggtatgctttccatggccgagacccagccctactcattgcgatggtctggatgttcactacttgaagagccatctggagggtgtcaggatggaattctccccgccaaggcaacacttgctgatgagcaactttaaggctaagccaagttttctcaaaataatcagcagtaagctggcgattggggactagcatgagggctccagaatcagggagttcttgtaccctctccttgttctcttcaggaatcaagggtcctgatgcggcaaaggatgaagttttaggaagctctgggtcacaacgctctgccccctggcatttagagatagttgcccagtgggctttgccatacactggcaccagtgtgttgaagtctgaggcccagctattcacaggtctttctgccggatcctccaaaagtccaagagtagggtcagatttagggctacacagaatccgcttaacttcatcaatgccaactaagaggaggcgataatagaagagacctcggtcccgtacagccatatctttttcttcctctatgcagtaatacaacaaacgtcctagcatgtcctggcactcagcaggtcgggagaggaaaaggcgcagcaaagcagtgagcagctccatcttaacagctggaaatgtttccgacttcacattctcaacaaagtcctctaacacataaggagcattaggaattctttccccatggacaccaagtagccaaataagtgcttgcttcccctcactatcttgaatgttctcttcacagccgggcagggcctgacatacagcttcagtacactgaggacacaaccaaaccaggtctcggaaagtctgcaccaccactgtggtaatgtgctcttgtcgaagacccagcaactctgttaaaatctgaacacattgatctgtgtaagtcctggcaatgccacctatggcaaagatggcagcctgtgcaaagtccgcagacacatccgtgcagtaccctcgaagctcctctagcacctgctgcacattctcatcgttcaccagttcacacagcacctccactttctgtagtttgatgtagtggggctccgagtaggagcaaaaaaactttttgtagtggctgctaaagtgacctggtaaactatgcaagatctggcgtacatgacaaagagcaacaaaacagagctcacggctctctgaagaacaggcagctagcaaaggtcccttgacccgcacaaggacatcagtttgtacgtggggaaacatttttgccaagatcagaaaaagtttggtagctcccatcaccacacctgggctactgctcttgaggaaactatccaacagattgagaatgtcaaatagttcttcctcactgcggggttggtagcgtagcagaaagttcaatacttcagcctggccccattggtccagttttgacattcgatttaagagatggtgagcaatgggcttattgatgacaacgcctccttcctgtttcagaatttcctctagagacctcaagcagttcacaactacaattggatcctggtcacgcagcaaactgtataattcatttaccagggcaccatctacttcagagtctccatgaagattatgcatcttggcacatccaaggactaccactctcctgacatatgaagccttatcccgcagaccattgagaataggctgttgtatatactcctgcacaccaggcatcctgaggctacacatgctccgtaacgccagccctcgcaccattggattggggtctgagcagtctttgcacagcgtattgatggccaggagagccagatctggtttcaggggagcatatgtgcacatgtacagataaaccaacttcttctggacaatatctacagtggcactggccttcaccatttccataaaaacaccagacatgtccaagccttgagtcatgtacctaatcactcgctggatgacattccggtagcgcagcctatcagcttgaatgtgaggattgcacagagccttcttcagctccttcaccacgtcctcggagccaaggtacggcatcttcctaagagtcacagggcagctcccacagctcccacggtaactcgagggctccttctcgtcctgatgtgggagccatcggccggcaggccgttcgccccgcccacagatcgctcccgctacttctaggtcctccgccggatttccagcgccgcgtccgactgaccgcagacccctccctctccagttccagccttaattccccctccacgccgttctcatcgcggataggcccaatcttgctttctgcggaagtcccgcccccttgtcaagagaccaaacagaagagcgctgccggtctccccgcgagcgagcgctaagcgtagtcccgactccgaccttaggatgcccttcacgaaatcgtcgacccgggacattncnnacggtcctgcagtgggaggcat

SEQ ID NO: 59456 - DNA, 853 bp, Homo sapiens
ttttttttttttttgttgttgacatgttgaatattattaacccattttacagaggggaagcaaggctcagagaaagtttaaaagggacccaaggtcaggggcagaaatgggaggcagaggggaggcacccatctcacaccccacccctagggactaaagccgtagccaacagagcagtagtaatccgcgtcgtcttcaggctgcacgggactaatggtgaggacacaggcattgtgggcctcatccttggctgccgagaatcgatcggggatgtcagcaggccggtggtgatcctcctccgagcggtagtagaggagatatcgaggggcactgcctgcccgctgctggtaccaggacacaccgtagtccctgatggtgacgtgctgggggctgagcgtgcaggagagttgagccacttggcctgggaagaccagcagtgcatccagctgggccaggactgtctgggaaactgcgagacacaaacccactcagcctgagccccttccctcccacccctgccctgtgaaggcttggttggactccatggagactcccagtcccaaagggctcatagcccagtgctatgggattagcaatgaacggggtgcaggaggcctggttctgtgtgacttagggtgccctatctggacctccatctccctttgtgagtgaggggtttggagttagcccccaaatctccattagtgccatatcctcaaggatctgtgttcagttaaaggcccagagctcagaaggttggactagcagcctctaggtccctctgctacccacccacgtttctctgcagaactgcacgaattccgccacgctggtctagggtctcgattccgct

SEQ ID NO: 59457 - DNA, 1092 bp, Homo sapiens
tttcgtctggagccgagcgccgccgccgaagcttccgtctcgctcgctcgcgcagcggcggcagcagaggtcgcgcacagatgcgggttagactggcggggggaggaggcggaggagggaaggaagctgcatgcatgagacccacagactcttgcaagctggatgccctctgtggatgaaagatgtatcatggaatgaacccgagcaatggagatggatttctagagcagcagcagcagcagcagcaacctcagtccccccagagactcttggccgtgatcctgtggtttcagctggcgctgtgcttcggccctgcacagctcacgggcgggttcgatgaccttcaagtgtgtgctgaccccggcattcccgagaatggcttcaggacccccagcggaggggttttctttgaaggctctgtagcccgatttcactgccaagacggattcaagctgaagggcgctacaaagagactgtgtttgaagcattttaatggaaccctaggctggatcccaagtgataattccatctgtgtgcaagaagattgccgtatccctcaaatcgaagatgctgagattcataacaagacatatagacatggagagaagctaatcatcacttgtcatgaaggattcaagatccggtaccccgacctacacaatatggtttcattatgtcgcgatgatggaacgtggaataatctgcccatctgtcaaggctgcctgagacctctagcctcttctaatggctatgtaaacatctctgagctccagacctccttcccggtggggactgtgatctcctatcgctgctttcccggatttaaacttgatgggtctgcgtatcttgagtgcttacaaaaccttatctggtcgtccagcccaccccggtgccttgctctggaaggaggaagacctgaacatcttttccctgtcctttatttcccacacatcaggttggcagctgctgtgctttatttttgccctgtgttaaagtcctctcccaccccagcacctacctgttcctcaactagcacccccacatctctgttctaaatgttgttctcctgcaataaaggacgtttgaattaaa

SEQ ID NO: 59458 - DNA, 1534 bp, Homo sapiens
tctccaaggtcatcaatatttcatatctttgtttagtgcctttaaagaataaatatcagcattactttttaaatggttttattttatgtacaaataatgaacatacgttgtacccataaattctactttccaaaaacaggagctttttaaaagaaaaccacataacaacttttaaaaggcgctgggattcctctgcttctagatcaatgctgggctagaaaagtaaagtctgttctatcaggaatcacaagttggaactgagtattctccaaagtggaaattctagagtgtagtgtcactccaggcaaagattattcagttctcatccccagcatccacaactacctatcagaagggttaaaccaggtcaaaacagtccagcataattaggcttcatcaaacaatgtcattatgctcttctaagatgcaaataaaccaaaacaggaaatactaaaataaaaatatctgacactgccatacaaattgttagttcctttttgtatccccccttctataacattaacaaagggaatattttactgcaaagaatattttattttatacatcactagccatgaatttttgccattagttactatacaaatgctgcctagtgccattatccaaatagcacaaccattttacgtccacaattcacttctatagttacaagtagaattttcatgatttacttaagtacatctatcagtaaagatttaacactgagatgcaatctaacatccgtaatatctgatattatgtagatggcaatgcaggaaagatgtcttttaatcgcttttcatttaagtgaccttatgtaaaaaataaaataatttagcagttccaagtatccaaagggcattttcaaatgtacataaaagaaatggttacagagatttttaaggagcatcttccatgtccacatcctcttgtaactgctgtaccattttctcttccaactgtttccctttgcctgcaagaggggctcggataagatggatgttttgcttgacttctttgatatcctgaactttctgtagctctttatttttcttcaatctgttcattataaatttagcttggcgcttctgtttgatttcttcaactctcttcatcgcatcaatagttttattccatagctctcgctggtatttgataggttcatttctacgtttttcaaattcaaatgaattatccactgtaagctctttaccagctgctttccggaatgctttggtccacctaactttgcgaggattgcgcttctttttaaagtttttatgacatttagatttgcaaaatctgaacaccttgcaatcgttgcggacgaacatcatgccgtgtccaggatagatgggccccgaacagaaataacacttttcgatacgcatgttgaacccgcgtgtaaccccaccaaacaaacgccaagcttgagaggaagtgatgcaaccccgtcaccggaagttaccttcttcccccttccccgaccggaaaaaggcaagcgtccttcgttctcgcgggtctgttagaccag

SEQ ID NO: 59459 - DNA, 2222 bp, Homo sapiens
ccatagtatcagttcaagctaagaaagccttaagaattcaataactcaaaatctctttgagatttaaagttaaaaagtaatatgtttctaataatttctaatgtgcaggattaatgacaactgtattttgcattggcaaattatctcagccagaagagattcaaatgattttcgtcaatgccagtttataaactagcagcacatgtcaatgccaagcttgtgaatggattggctgagaaaaattatatgagttagaagggatctaagtgctatactggtcactgattctatttcacaaaagctaccatttttaaaagctgaaaatgtaattggtgttgacaaaaacatgttaagttcaattactctgtatagctaaatatagaaaattggttaatgtttaaagcaacttcttatttgttaagaagataattaaaaatagttaaaactgaacaattagctatacttttatattattaaaatccaatgaatttaacaaatgaaacccacaggaaaagagatgatataattcaaggcatagatttgacatgtcagaatacggcaaaaacaataaagatagcatcagtaaaacagttgtaaaataagtaaacaattttcaagtgtgcaaaactagtcaggaataaaagtgctatgtgtggatacctgggttttcaaatatttgtttcaaaaactttcagctggatgggtggaaaaactagaaagtattatataagtaaaaattttaaagaattatataaaaccctactttattatcttacattatgtccttgttatgtcacttgctgaatctgaggcctatttaattaccagatacaacacaaaaggaggtaaacacagtacatcacaaaggctgatttatcctgaaccgtaaaaaggctccttttcaaggtatacctgtggatttgtgtttcatcttatatcctcaggcacctctaggctgttgatgaatttgaaaaccggacaaccatgattttctataatttctaatatacatatttagtacatcttgcagaactgccctttaggtaggtcaatatttgggaagcaattgttacaggaaataaaaacaatttaaattcatgaaagtaaaccccatcactgccacaatttaaataatcattttaatgtgtaaatcctgaatatatcatgttagaagatgaagtcgatgtatttagcataatctgtcttgggatatttgacgtgtagatgactaaaaatacacttgtggtcgtttcttcactttgtattttagcgacccgtaccgcacctctttgcggcctttggtggttttcacagatttcatgctttgcgatcttcgaggccctttgtgtgttaacatctcattatctgaatatggcccctctgcttcttcatctgttttctcatctccgtctttcagtggaattccataacctgctgattcactgggggctggtttacttttcttttttgcttctggtagaggttggtatggtctttgtcccacaggctcatcaccttggatagttgttaaatcatgcatactgaagcttcttaaacgttcagttattgctccttggctctttactgctgcagtaacagcagcagtagctgcaaggtttaaaccttgccgtccaaagtttaccatggtttcatagcctcgttcctttgcttgtacaatataatcatcaatctccctttcctttgaagaaagaagtggatgaaggaattttctatatattaaacttgctcctttggtatagggagaaagcagccatatgacaaaagcaatcttcagctcatagtacaggggaaaccaagcaactgtttgatcggctactgtttcaatcacagtatagagagcaaaaacaatccagtacatcatccatcgaacatattccttcacgttttttgttttcacagctttgtatgaataatatgcaggataaagcattccaaacaccagcaccacggctctggagatcatccaggacaccatcttcacgggggcttgggccccacgtccgtggtgctggatgtggctctatcgtccacacggaggaaggagggtgggagggtggtgcagaacccacccgccccaggtgagaagcccaaaagccataggtggccacctacgatgacaccagaaaacaaatgaggctgcttcttcttggatgcccagctccaggcttctgtgaggaggagagactgttcgggtgacgaaa

SEQ ID NO: 59460 - DNA, 1247 bp, Homo sapiens
tttcattccttttggctactagtaaatcccaaattgcatatgaggttcccatggctgaggaggcagagggcgggcctgtgccatgtcccaagccacaagggaacaggcctgtgggcttttcccaacaagcaggctcagtgccagcctctgtgtcagcctccagggcacgccaaccttctcatggtgccccaagccccaccccaatgcacacataggaagtctccaggctgcttgggcagaggcacaatcattttagataaaaaaaaattgaacaaagagaccctcttgcgagaggtgagatgaggccctgccatgcaaaggagtcccagcagaggaggaagaattccatcctggagttcaagtttctgtgcagagacaggacctggggacagagaacggtcctccacccaatttcagctggtctgtcctcatcagctttgggctgagcctggggtgatgagaggtggagtctcccctggatggtgaccggacttctggccaaacttgcatttgcattttgcactcatgacgatgatgatgcccatggcgcacagaaccccagcgcagatgagcccgccaacctggaggctgtgccagtcatagtagaaaggactgtttttatcttctaggtcattggcgtccaggacaggaaagcctgccaggaacacaagcaggcccagggtcaccttctgcatgtcagagcgctggcctgtgtggttcaccaggctgagcagaggttccgggagaaatcgggctgccaggcggagtcctgcgtttatccgaagctgccacgccctaagcaaacctcacttcttttccttagatgatgtgttttgcctggtggaaggattgctggcagttgtggagaacttaaagtccccttccaggccacatcttgccgctggtacaatttcaggatcagcagaagatgctagcgtgaccaaagtcaggagatggggcaggggtggatatgagggagcggctggaacagcagggaggggtcagggtggggactctgggaccttagtcctggtcataacctgctccctgccctggggagaatgagaactgtctgccaggcaccaggctgcagtttcctagccaggctctttccgtgggtgctgggagccagacgcctgggtctacagagtgggtgctggtgggggcggctgcctcctagtccacataaggccccctgcactgtacaagcctccctacccctttcctcccctgtctcctgcacgaaa

SEQ ID NO: 59461 - DNA, 693 bp, Homo sapiens
ggctgcttctgccccaggagggagaaacaccgactccctggctttggcgccagaagcctggatcggctgccaggtgacttctatttctatctggttctcgtctgggggggccctggccgggcagccccccaacacttctcctgccctgaaacacggctctagccaacctgctccgctgcttcacctgcgaccgtctctgcgggggctgcacggcgccagcccctccagcccaccagggcattgtcctccagcccgtcatgcccagctgtgaccccggtccgggccctgcctgcctccccaccaagactttccgcagctatctgccccgctgtcaccgcacttacagctgtgtccactgccgtgcacacctggccaaacacgatgagcttatttccaagtccttccaagggagccatggccgagcctacctgtttaactccgtgtgagtctacctctttccttgtgcgtgtgcttgtgcttgtgtgtgagtgagtaattctcctctgtggagaaaggggggaatccatcaggtgatcttgtgccttcagtctttgcctccccttttgcaaagagggtctcaatctgaagttctcacatggggagccgggggagaattgaaatcataacggtggaaaaagaaggcccaggctctatacttacaggggtggattatcaaaggcaggggcctgccac

SEQ ID NO: 59462 - DNA, 1553 bp, Homo sapiens
ttttttttttttccatggcaaaacagccctttatcaagagttgcaggataaaaatagtctttgcagccagacatccctccaggcatgtcttctgacctgagaggggccagtgtcctgtacagtagaagccggggtttccgtgctgcacccgcagcaccagggcacgcaccgtggggaggcagccttgggctgtgcccgcgacagggcccctgcatgctgagcaacagcctcacatgagcaggcagcacggcctcctctccacgggagcctccaccgccggggctgtgagcttgagcaggggtgggtccccgcctgccctgaagccacagtcaggctggggggtcaccgtgtcaccaggcaggccaggctcagctgtctcagggctctcgggcccctcaggtgggggtcgctgcagcttggcagcagctcgctggcgcttcaggtcagccagggtgtggtgggccttgtcgtggaccagggtgtggggggtggtgctgtccagggggctcagctggtaggagacactccggtctagtcgcttggagtatagatgccgcactggggagccccctactcggccattgtgcggcctgaccacttcggggttgtcctcctccgggggcggcggcctgagctctgcgcctgtctggcggtcatcgttgtcctcgggcggctccgggctggtgggcggcggctgttgccacacgatggcctcctgggcgtgctgcttgcggtacaggtcggtgcgctgggttaggctcacccgcctcaccaccttcccgcggctgccggcgctggaggtgcggcggcgcagcaaggagcgctggcggctctgggcgcgcaggagggcgtcgtgcttgtgcttcagctccagcagcttggcccgcacctcctcgtccccgcacacatcaaggggcgtctcgtccatcagggactttgcgttcaggtcggccccgtgcgccacgagcagctccaccaggggcacctggccccagtaggccgcggcgtgcagcggctcccagccgtcttggtccttagcgctcaggctggctcggtgttccagcagcagggcagccgcctcgctgaacccgttggcggctgcgacgtgcagcagcgtggccccgtggtccaggggggcatggaggtctgccccggcctgcagccggctccggatgtcgtccagcatgcgcagttctggcacggcccgggcggcctcgatgctgtcctgggtgatgccacggtcggccatggcagtctccaggcagtccagcgtctgctcatcatcacacaggtcatagggcatgttcccgtcggtgttgaccgccaggagattggcgccactggcgatgagcagctccaccaggtgcaggtggccgcaggtggccgcagcatgcagaggcgtccagcactcactgtcacaggcattgatgttggccccagcctccaggagctgctgcaccatctctcggaaatcatcaatgcagcactggtgcagggccgtcaggccgtcctcgttggccaagtcagggctgaccccactcccaaggaactcc

SEQ ID NO: 59463 - DNA, 1210 bp, Homo sapiens
tgacatcattactccatgcttggcaccaggaaggaagtttgaaaatgtaatggggacaaaagccgtgcgtgacttcggtatacccagacttcattcagatttcttaaaaatctgctagggatgtctgttgaccagacgttggaaaacctttggtgtcagggagagtagaggagaagttctgattttcataaccctggtttcttatctaggcctgtttccttgcgtgaaaacatacatcaccaagtaatttgtagtacaaagaacaagagaagaaaccctaagaagatagcttatttgttatcctcccttttaatgactaaccttaatccaaatgaatccactgagaaccagcctgtggatgcctactgggctttcaccctggaccaggaatttttgacgtatgcctgtgttgaaggcactggatgcttgttttgtggaagacatgttcattgaggtaagtggctcatcgcttggtgtgtttggctctctttggcattatgcatagccaaggtcccagattttggccgctctcagtgggtgttcttgcatcagaactttaaaaaaattaacactaccttaacactgagactgtcaggtatttgtcagtatttatttctaatttcctactttaaatcttaggagacaaagtgtttctccaactggacgctgatttgaaacacaactagaatgctacaggtctctcttccagtatgcagctgctgtacctgaaaatttttccccataatttcccatctttagggtatgtccctgttatcaggtgtggaattaatgtgggtaaatttccatttcagttgaatttcctgtcatccccagcaaaacctgtgaatccttcttcaaagcatagaggaggcagagacaagtcttaaaccggcttcccttcgcttttaccaggtagcctggttcagtcccagctgggtcctgaaggagcacagtactagagcctgagtcatgttgactattaataaagtgcattaagtttgggtcaggcaaagtggtggcaaaagttcatgatgcaggacagaggaaacaagtggacaagacaagtggagcccagctctgttcgcatgggaggccgggcgatgctggcatgggtgtggttggccgagttctcatagctagagaaaggccgtgtaggtataagtgcttaatgtttcatctgtctgaaagaccagctatttgataatcttcc

SEQ ID NO: 59464 - DNA, 2701 bp, Homo sapiens
tttcgtgtggcaccatgagcagctcaggtggggcgcccggggcgtccgccagctctgcgccgcccgcgcaggaagagggcatgacgtggtggtaccgctggctgtgtcgcctgtctggggtgctgggggcagtcttcatctcccaaggccgccttcccagcgggctccgcctgcctccctgctgactcctgcccgtgtctcttgtttcaagcttgcgcgatctctggcctcttcaactgcatcaccatccaccctctgaacatcgcggccggcgtgtggatgatcatgaatgccttcatcttgttgctgtgtgaggcgcccttctgctgccagttcatcgagtttgcaaacacagtggcggagaaggtggaccggctgcgctcctggcagaaggctgtcttctactgcgggatggcggtcgttcccatcgtcatcagcctgaccctgaccacgctgctgggcaacgccatcgcctttgctacgggggtgctgtacggactctctgctctgggcaaaaagggcgatgcgatctcctatgccaggatccagcagcagaggcagcaggcggatgaggagaagctcgcggagaccctggagggggagctgtgaagggctgggcgcccctccctccctgtcccctcttctggctctgtgtgggtccaagtgaggcctggactgtccacgctgaggcacagcctggagaggggcctttgcacgtgtccctacacctggagtcctctgctcctttctccagactggcttaagccaggagccactggctgctggtgtgagggtctgggctgctggacttgaggcagagcctgcagcagctgtctggacactacccagccctactcctctgctgggtgggtctgcagatctcacaccacagacagggctgcctgtgacctgctgtgacctgggagcagcttcccctggagatgctggtcctggcttgaggggaggggcaagtgggaccctgccacctgggcactgagcagagggacctcccccagctctcttagcaggtggagccccagggcctgggacagcctgccgctgccagcaacctcccactgctgcctagggtgcagcgcccactgtcaccctgccttctgaagaagcccacagggctcctaaggtgcaccccggtacctggaactgcagccttggcagtgactggacagctgggtgggggatgctccctgctggccctgggaaccttggacaggccacctcaaggcccctcggctgcccctcctccctgggcctgctggggcccctaggttctgcccatcaccccccgcccctgctggccttggtgctaaggaagtggggagagcaggctctccctggcaccgagggtgcccaccctctccctggtgtggccccgtcaacatcagccacagcccagccccattagtgggttagtgggtctgacctcagccccactcaggtgctcctgctggcctgcccaagccctgccctcagggagcttctgccttttaagaactgggcagaggccacagtcacctccccacacagagctgtccccactgccctgggtgccaggctgtccggagccaggcctacccagggaggatgcagagagctggtgcccaggatgtgcacccccatattccctctgccctgtggcctcagcccgctggcctctctgaccgtgaggctggctctcagccatcgggcaggtgcctggtcgggcctggcttagcccaggtggggcttggcagaagcgggcgggtgtggaagatattccatctggggccaaccccaggctgggcctgcgctgagcttctggagcgcaggtactgggtcttgctaagtgaactgtttcccaggaacacctctcgggcccatctgcgtctgaggccgggagtggcatctgaggctgggagtggcatctgaggccaggagtggaggctggtgggctgggcgtggggttttctgggccctgcagtaactgccctggggacttggtgggctcctgggtcagcagcatcccacccctgggagtctggccagctgagcccagggtggcaggggcattatagcctggtggacatgtgccttcagggttcctccggggccaccttcctcaggccagtgctgggttcaaagggctgtgtgtgtgtgtgtgtgtgtgtgtgtatgtatatgtgtgtgggtgcacacatctgtcccatgtatgcagtgagacctgtgtacctcccacaaggagcaagggctttgcccgccctctgctcattcctacccatgtagtgggaccccgggcccccttctgcctggcttgcctgcttgtgccctttccagaggggtctcactgacagccagagacagcaggagaagggttggctgtggatcaaggaaggctgcccctgtaccctgtggggaaatggtgggtgcatggctggatgcagaggtggaaggccctgggccacaggcgagagtgggcgtgtcacctgtcccaggttcccagcaagtctgcagctgtgcagtcctggggtccctgaccctgtcgcccagggggcgtgctgtccagcaggggccctgccttgcaaggaacgtctcttccggcggctgggccgctcctgcctggtctgggctgtgtgtggcgccctttcctccttgtttgttcctctgtgttctgtgtgcgtcttaagcaataaagcgtggccgtggc

SEQ ID NO: 59465 - DNA, 1881 bp, Homo sapiens
tccataaactatatataatgagaatccttagctcattcggttgtggtgaggggccccagaccctgctccgggtcgcgtcctgggtgttctccatcgccgtcttcgggcccatcgtcaacgagggctacgtgaacaccgacagcggccccgagctgcgctgcgtgttcaacgggaacgcgggcgcctgccgcttcggcgtcgcgctgggcctcggagccttcctcgcctgcgccgccttcctgctgctcgatgtgcgcttccagcaaatcagcagcgtccgcgaccgccggcgcgcggtgttgctggacctgggcttctcaggactctggtccttcctgtggttcgtgggcttctgcttcctcaccaatcagtggcagcgcacggcgccagggccggccacgacgcaggcgggggacgcggcgcgggccgccatcgccttcagcttcttctccatcctcagctgggtggcgctcaccgtgaaggccctgcagcggttccgcctgggcaccgacatgtcactcttcgccaccgaacagctgagcaccggggcgagccaggcctaccccggctatccggtgggcagcggcgtggagggcaccgagacctaccagagcccgcccttcaccgagaccctggacaccagccccaaagggtaccaggtgcccgcctactagcggctggcaggcacagaccagggctccaaggccaccccaccaacgcaggccccagggtctccgggacctcccttgggtccttccagctcagtgccgcggacagagtaggtggccgctttgcgccatccggggccaagagggggtggacccgcgtgtctgggctgcccctgccaagttcccccagtccctcagcacctggccccaggactgaggtcctgagaaggggatagcactgcccaggacgtgtgtccctagcctggaatggactggcctggggaaggctttcccctcttgggccacacctgctcactctggggttgggggtccagctgccctctacgatcaggtgcaggggctgcccaggacaaagcgggggcaggggaaagacaccaccctcgccccaagactggggatcctggccactgttcccatcccatgtccctgtgggtagtgactgtctcgtttctgtcatgggggggcgtcccgtccggagccactctccactttctctcacaggctgctagaacagcccagccctgtcagtgttgtgatcatggtccagtcttcgggtttcacctcctagtactccacaagctgctcctctctctgtggccccggcccctgcccaggtgtgggtggttctggccaggaaggcacaaggtagctgtgggccaagacaccagccctgtcctagcccttcagtaagaccttgccaggagaggagaaggatgcctgggtgccaggcaagacaagcccctcagcaggagagaggcccagaggctccagctggccaccgtgccccacaagatggcccctgtgtggttccctttaccttggcttcctggcccagtccctgcctctccacctgcaccctgcttcctggcccagtcccaggttggagtccctctgcatagctgactactcatgcattgctcaaagctggcttttcacattaagtcaacaccaaacgtggttgccacatttcatcagacagacacctccctctggagatgcagttgagtgacaaccttgttacattgtagcctagaccgaattctgtgtggatatttaagtgaacatgtttacaatttttgtatatatcactctctccctctcctgaaagaccagagattgtgtattttcagtgtcccatgttccgactgcaccttctttacaataaagactgtaactgagctgaaaaaaaaaa

SEQ ID NO: 59466 - DNA, 1736 bp, Homo sapiens
ttttttttttttgcaggtcagaggctgtttctttatacaaaggcagacaacatggacacctcagcatgctgctgcagttcatgggggcccatcccaccgcttctggggagaggaatcggggtgggggcgcccgcagcaggggagagacactacacaggcctgggaccgccaagcacaccagctgcgagctcctgaagggcagacacatggacacacggacactgaaaccacgagcacggcacagccacagggaggaatggtggagctggggacagacatcggcagctactgccaactgctgccctcttctgccacgagttccttggcgaggagccttgtccgtgttactaaagagccacgtgactttatctgatggcagaacgtctcgctttctgcatctgtaagctgggccagtacaccgtactccacagggctgccgtgagtacagatgagactgaaacaggggcattgatcaaagtacccaacacagagcctggcacatagaggtgttcaataagtaacttttgtcaggagactcttagggaggaccttcagaaggccaagtgagatgacttccctagaaattctctcagggcatggggaccctggaggactccttggagcctgcagcccctggtgtgcccaaggccccagaatacaccgtgccagggctgttcacaggcgtggggggctggatgcccagggaggtgcccgcagaagctgggtagacactggaggaggtggggtttggaccaaagtggttctgcacatagcacaggccggaggcaggctggtacggaggcaaggtgggcatgtgcccgggggtgcaggagggccaggaggccagcttctgaccactggcgtgctgcgtctgggacacagggtggcttggggacaggtgagggtggcagctctgtgtggggtaggagccaggcaccgggttcagtttccggctctgggctgccctcctctcggctgaagaccctgagacgtacttgaacacggatatcctcctcatcaggctgaaggggaaggtctgatcgagcttcagcgccactcgctctgagaggtcgatggaatagcagtaggtgaggccataggccagcccgatggacagcccgcagacattactgaggaaagaggtctggggaatgagccacgaggcacccagcaggagccacggaaccaggactgagggcacaaccatgccaaacaccagggcccgcctcatccgagaacggacggtggtgactcccagcatggcaaaggccactggggtgaaacctctggcatcctccacttcccccagctttgacagtgatgacacagcctcgaatgacaggaagatgatagcggagaagatggcgaagatcacggtgaagaagcagtggcggacggtgcccacggttctctcgaaattgccagcaaagcgccagatgatgatagcgccgcagagcagggagatgggattctcgtagacaaagatgtaggttaccagcctgtaaacttgccagttgcgaagggcctcggacttcagcgtgaggcccgagggcgccaggggctgctgcagcaggaacaggcgaggcccggaaaccagcagcgagagcagcgcagtgaagaaggtggcggatggcacctcgggacacaagcaccagctgcgacacccgggccccgaggccgccatggccgccgtcgttcccgcgccccgcctcgacgccggctgccggtcctctgct

SEQ ID NO: 59467 - DNA, 5292 bp, Homo sapiens
atttttcacttgtgatgtcatgttggtgctcaaaaagttttagattttggaggatttcagatttcagattttcagattagtgctgctcagcttgtattctgtcagtgttgcgtgtcaaggtttttttttaacaaaatcaatttatgtatcatttcatggttctctgactcattgttagggacaaatatgccttcccatttgagccgcacaggattaaagcagctccgagctgcttcccagctctgacattttgccattctaaaaaatgagtttactcaccacttccccatcttactctttgagtattatgtattttcaattgaaaactgtagttttgtgatgatgaattggaaagctcaatagaacatgatctgtattccttgaagaaatgcaggatccactggaaatgaggtggagagagaccttttccacccatcagagtgaagcggtgtactctacaaggtgcattcctgacgaggaaggccctgtgtgctgtgctgccaattctggcttttcctcagttcaggtgtatgcccatgctactacgtttgtccatcagcatttttgttttggtttgttttcagatgtaaatgagaggaagcaaagatttttatggagactatcaataatctcaagaaaatacatattcaaaatggaattaaagccgtgcagtaagataagtttatatatgcaattccttaaggtaaaagtaaattataaaagattgaatcaggcagttctgctctttgtccaaaaggtaagattgcatgtgaaacatcaacaggaagttgccttttcctcctctggactctgggtatactttgtttgccatctgcgagatcagtccatggctgagagatggcataagtgagcctgagtgcagcagtgagcagcatcctgaggttagcattacacttctcccagtggagcccatgacttctgatcaggacgctaaggttgtggctgaaccgcagacgcagagagtccaggagggcaaggacagcgctcatctgatgaatggtcctatatctcaaaccacttctcagacaagttccatcccacctttgagtcaggtaccagcaactaaggtttcagagctgaaccctaatgcagaagtgtggggggctcctgtgttacatctggaagcaagcagtgctgctgacggtgtgagtgctgcatgggaggaggtggctggccaccacgcagaccgtggcccgcagggatcggatgccaatggtgatggtgaccagggccatgagaatgccgcattgccagacccgcaggagtcggacccagcagacatgaacgctctcgctctgggtccctcagaatatgactctctgcctgaaaatagcgagacaggaggaaatgagtctcaaccagacagccaggaagacccccgagaagtacttaaaaaaacattggaattctgcttatctagggagaaccttgctagtgacatgtatcttatatcacagatggatagtgaccagtatgtgccaatcacaacggtggctaacctcgaccacatcaagaagctcagcactgatgtggacttgattgtggaagtgctaagatctttacctttagtccaagtggatgaaaagggagaaaaagtaaggccaaatcaaaatcgctgcatagtaatattgcgtgaaatatctgaatctacccccgtggaagaagtagaagcactatttaaaggagataatttaccaaaatttataaactgtgaatttgcatataatgataattggtttattacatttgaaacagaagctgatgcacaacaggcttacaaataccttcgagaagaagtcaaaacttttcaaggaaaaccaattaaggcacggataaaagcaaaggcaatagctataaacacatttttgccaaagaatggatttagacccctggacgtgagcctgtatgcccagcagcgctacgcgacgtcgttctacttccctcccatgtacagcccccagcagcagttccccctgtacagcctgatcactccccagacgtggtcagcaacgcacagctatcttgacccacccttggtaactccatttccaaatactggatttataaatgggtttacgtctccagcgttcaagcctgcggcgtctcctctgacttctctcagacagtatcctcctcgaagcaggaatcctagtaaatctcatctgcggcatgcgattcctagtgcagagaggggacctgggttattagaaagtccttcaatatttaacttcactgcagatcgattaattaatggtgtccggagtccacaaacaaggcaagcaggtcaaactagaacacgggttcaaaacccttcagcatatgccaagagagaggctgggcctgggcgtgtggagccaggcagtctcgaatcctctcctggtttagggaggggaaggaagaattcctttggctaccggaagaaaagggaggagaagtttacaagcagccagacacagtctccaacgccaccaaagcctccgtcgccaagcttcgagctggggctgtccagcttccctccattacctggagctgccggcaatttgaagacagaggacttgtttgaaaacaggctatctagcttgataataggaccatccaaagaaaggaccctcagtgcagacgcaagcgtgaacacccttcctgtagtggtctccagagagccctcggtgccggcttcttgtgctgtatcagcaacgtacgagcgatccccctccccagctcatttacccgatgatcccaaggtggcggagaaacagagggaaacccacagtgtggacagacttccttccgccctcactgcgaccgcgtgtaaatcggtgcaggtgaacggagccgccacggaattgcgaaagcccagctacgcagagatttgtcagagaacgagtaaagagcctccttcttccccattgcaaccccaaaaagaacaaaagccaaacactgttggttgtgggaaggaggaaaagaagctggcagagcccgcagagagataccgggagcccccagccctcaagtccacacctggagcccccagagaccagaggcggccggcggggggccggccctcgccctcggccatggggaagcgtctcagccgagagcagagcactccccccaagtctcctcagtgaaaaccgtacgtctgggaggggtcgcagagcgctgtgttaaccacaaacgagacactctcccactcagtgcgagggcgagccgctggttaggagcttgcagtgtctgaggcctgtgggatcctcaagttggttttcttctgtgagttggattctccccctcttgaaaaaaaatcgatttttcaggatttaattaatacaaaccttattttaggttggtgcttaactggaggtgatgcataagtctgatttttttttccaagatagaaaaagcatttatcctaacaaattggtattttttattaagcctccatgtggctctgaatgcaagctatatatagtgagtttttctaaattaagggaactctgctttttttttttttttttaagtaactggtctgtaagtgcatatctctagaacgtccccgcagatgaatgagggccagtggccttggcagaggcaggtgtggcctcatagaggcagtgctggccgcgccagggcatcagtgctgatgtgggagctgtgcttccacctaagccgttggtaggggactgtggcatttaagaatgtagagagcgcatcctttttgatctcctgggcggagtgaacctgcaggggccaccccagaaaccttggttctgatgcactgcaagcaagtaaccagcttctcactccagtttcaagtggctattatgtaatataaattcaaagcacattgtgaatagaacctacatgaaaacatacactttgttgcccactgacatgttaccagaagttgtaccatgatgttgttttgacccctgtgagctgatggccccggccctgctctgtgcacatttctgtccgtgttccccagcactctggttggagagagtccacatcttcagctccgtgtggacatctccctgtacctctgcatcagcacatggatttaagagttatgtaatcgtgagagaatggtgtttgtggtttttccccctctttggctggtggaggataaagttcctgctcttttacctccaagacgagggcctcattgattcacttccagaagtgctgcacttctgaagaacaaggatgcactaaagttagcaagtttataataaagttaaatataaattattttgttttaaaatgcctcaaatttttctttattctaagcagcaaacattaaaataagaatatttcctgctaaatgtaaccatacactttattccacaaaatgttatttaacaagactgagggttttttttaagaaaaaattatttccatccaatatttaaagacttgaattttatttaaacttgaaaatgactttgccttaacttttgtataagacagcttaaagtccatggagcccggccctgggttggcgtgagtgggtcagagttactcagttactgcgtggatctcctgtcgctagttttactgagtaagcatactgtagtacaagagctagtagtagtttttgtaatataccttaaagatcttcaacagttgatcttttttcagaatgttggaaaatcctgtaaatgcaaatagtcaatactgtattaaatacgtgcacttggagtgtggcttcgcttggtacagttggtaaataatcaggaacatatggaaaaagggtacccctacagaggaaaattctgatacagattattgatatattataaatgttgctgttgagcgggatgtagataaactaaatgttgtggtttgaatattattttgatttgttgagattttcttttttctcttacatcggtgtgttgaactgattctgcctctttgctgcaaaagggaattggaaagtcttattaaaagcctccagatgttttcatactcttttaaaatgtatgtaaatgcatactaatcatatctaatgtgaaagagttttaaagtatatagagagcaaaaactggcaggatcgtaagtgaaggtgactagtaatctaatttaaatcacctgcagctaagcatgattgaccctgccagaggaaaacatgcctatttgaccatttcctttaaagcagttgccattattcaaatacagagaaatagccacagggctagtgtttttcaaatgcattttaaagaacatggggatttttttttgtagttgtcagttcactgaccaaaaaaaaaa

SEQ ID NO: 59468 - DNA, 1853 bp, Homo sapiens
attcccgggtcgacgatttcgtgcggagaggtcgcagtcattgctgtgagcaggacacagtggcggctgacctgggagaagttacagagggacggggtgggagagggacgaggagtcgggaatggcccccaggctctcgtcctgagcggtcggctggacgtggggcgccactgaccaccgtggagaagcccgggggaggggaggtgctttctggctgcacactgacctatgttggggtgcccagggcaggatgtacacgctgctgtcgggcttgtacaagtacatgtttcagaaggacgagtactgcatcctgatcctgggcctggacaatgctgggaagacgaccttcctggagcagtcgaaaacccgatttaacaagaactacaaggggatgagtctatccaaaatcaccaccaccgtgggcctaaacatcggcactgtggatgtgggaaaggctcggctcatgttctgggacttaggagggcaggaagagctgcagtctttgtgggacaagtattatgcggagtgtcacggcgtcatctacgtcattgactccaccgacgaggagaggctggctgagtccaagcaggcgtttgagaaggtggtgaccagcgaggcgctgtgcggtgtccccgtcttggtgctggccaacaagcaggatgtggagacgtgcctctcaatccctgacatcaagacggccttcagcgactgcaccagcaagatcggcaggcgagattgcctgacccaggcctgctcggccctcacaggcaaaggggtgcgcgagggcatcgagtggatggtgaagtgtgtcgtgcggaatgtgcaccggccgccgcggcagagggacatcacgtaggcgcagccgcgctgccgtcgggacggctggtcccctggtgctggaggagtggcctcctgttggctcccatgctgctgatctggggggtgggtttgctttgctttggggttcttctatttactttgttttctcgaagacaaactttcctctatgtctggaaaagcgtaggcatccggaggctttggaggggagtctggcagcccggctggcccaggccctgcagcggcagcctttccacagggcgcagcggcggcctttcgaggccctttctggggggtctgagggagacctggttgggaattggggctccagtgctcaggctggcttgggctgcatgaggacagccctgtgggaccctcgggagaccccgtggctgtctccgccccatcgaggaggaggcccgtcagccatggctgccatctggcttctgccctgtgaccccgtgaccccgtgaccccggaagtggtctggggctgatcttgccttgaggaagacccaggccatgttcccaaaggccagcgggggccctggattgtgatgcagcctcgggacagggctgaggcctgcgggggaagacctataccccacgcctgggcctggcttcacctcaccctaatcccccgggagggagctgactgatgcaaaaagctgagggggcctgctgggagtggctgtttttatgccccagccccgcaagttggggagtgtttgtgggggtccagagccctcccccagccaggagagaacctcccggaggggttctctgtggggccctgtgtcccctgctcgggagtaaggctggtcctggggtcctccctgcacggaccccactgggcctgccgagtgctgtgttcttcctcagtctggctgtgggcaggagcggcctgcccagtgtcacccagggtgagtgcaaaataaagacggcgagtgtggctctgtccatcccttccctcctggagggtggaggctcctggctgttggacacggaaaaaaaaaa

SEQ ID NO: 59469 - DNA, 1740 bp, Homo sapiens
ttttttttttttcagaataccaaactatatttactgtttacagtagtaaaggacaacaaataatgtacaaattggtgaataaacacaacagagccaacaaacatcccacccgagcccatacagcaaacaggaaatgagaacatttcagcaagatttcaagcaagcaagagatgatgggtcattgttcaggtgactgtaaaaaggcagagaatggccaccaagcagcaatggagcctcagggaaggacaataggcagaactatgaaaatgtttaattggtatagatcccaaaatatttcacagaactgaaatcaccagactaatgcataaattcaatacctatttggaaagcagcacggcacaaacccacgagaagaacatgaagtcatcattccatgggttcatttgtaaccacacttggaagtagctcttatacacgacaacataactgcaaattcagcaatacttagtcttacttttttatgtatagaccataatcattcatcagaagcaaatactagaagaaatctgaggccacaacaccattaccaaatgagaaatgtgggaatttcttcaatattaagagggagaaaaaggccaattttggttgtgccaatccttgcctgtgtaccaacgccaggtactgagcagggagtggggtgggaggggtggcaggggggtgggtcctgggcctcagaccccgaggttacatgcttgagggccagagagcacgtggggtcaaattaccaaaagactcggttattttttaacctttgaagaagcattccagtattttcccttcaacttttccatatactgacaaagcttaaatttgcaatatttagcattttaatcacctgtgcctgtaacagcaagtgacagtctgtcctccctaccaaccttgcccccaatacctgtccaacagctgcatccccactgcgggaaacaccaattctctatgtgactggagtgagcaggggagaggcaaccaactcaggagtcagatccctggccagactaaaagcgaacattcaggctataattttggggttaaaaaaatgttgtaggagggggggaaaacacaaatgagcacacaaaagtacccacaatatcttgcaactcattttacctgaacaaagataacaattctgattggcccaatttaagttacagattcatccctgcagatatagttttgagttgcacttgaagtacatcaaagagaggaaaatcatcgtggtgaatgtcctcgagtttccgcagacacctttgtggtcggcatggtcacgtgctcaccattcaacagcaatgcgaggatggacggcccgggctggggacgggccctctagaaactgtgccctgccaggctgctctccggcacacctcccgtctgctgctggaacacgtcgatggtgtcctcgtcctccatctccagctgtgctggagtgtcagtttcattgattggctgcccgtcgaacctgaatctgatctgcctcattgacaagccctgcctctcgcagtaggccttcatcagcttgctcagcggcgtgtgcctcttgatcttgaactgcaccacggagccgtcctgcccggccaccttcaggttgatgtggtcattctctgtcttcacaccctccttgggcttctcctcggacatggctgcgcgagcggcgcggggaggcggcgcgggggaagcagcgcggagcgggcgagtcacgctctcggccccgccgccctcccg

SEQ ID NO: 59470 - DNA, 1953 bp, Homo sapiens
ggcacgagaaaccacggaatttactgccggaagttcggcggccttcgccaaagagtgtgggctcggctagcaagctagaggggctcgtttccgccccgctaccgggcgggggcggccatcttagatgcgtgcaattaagggctttggcgggattggctccgcgtttgggctggtccgctgctccccacctaccagggtcggatccggagcccttccccgcggggcggggacctccaaacaaccgactcctttccaggtgaagggtgacttggctgaagaaacacttaaattctggaaatagcgactcagtatcatggccagcagccttaatgaagatccagaaggaagcagaatcacttatgtgaaaggagacctttttgcatgcccgaaaacagactctttagcccactgtatcagtgaggattgtcgcatgggcgctgggatagctgtcctctttaagaagaaatttggaggggtgcaagaacttttaaatcaacaaaagaaatctggagaagtggctgttctgaagagagatgggcgatatatatattacttgattacaaagaaaagggcttcgcacaagccaacttatgaaaacttacagaagagtttagaggcaatgaagtctcattgtctgaagaatggagtcactgacctctccatgcccaggattggatgtggtcttgatcgtctgcaatgggaaaatgtatctgcgatgatcgaggaggtatttgaggcaacagacatcaaaattactgtgtacacactctgaaccagtgaacattttggatgtttccgtgttctcctgtgtcatctctactgggccataggaccgggcaaacctaccttaaaataggcagaggaaagtttcatgagaagtagtgtgtttaacaagacagactttggttgctgtattcaagtatttggattatgactgtggaggagggcttgcttaagatatgtggttgtgtttttttgtggaaaagtaaggagttaggtggcttgataataggcagggaaaccagattgtcgggactatgacctttttctccagtatgctacctgatttgtttggctggccactaggtggcagcattggttctacttctctgctttttaagagaaatttcaggaaggatgatcattccagttagtttggcattttttgtcgtttgtgcacataacttggtgttatccttatgtcatcagattcctcctaggggagagtttttgttttaattacaaaattaaattctacattgttaccaagaaatttgtggtgataaaaatggaaaaataaaaatttggggagttagtgagggtctgtgcttatgtctatttgttctggacatgggtaatggagggttcacctgcaacttaatttcaaacagtcagacaaagggtcccaagcgggaggagaagcaaagtgagaaataagagataaaaatagacaagtcaaaaggcaggtttttagaatctcctcatggtgaactttttctctcttttgtccactgcatggtttctgtgattgaacctgcctgaatttaatcatgaaaacaagtgaaataatgtatgttaaatgcctggcagagtacttagcacagactagtgacccaataagatcagtgattgtcaaaaatccttatgagtcttctttaaaaaaataaaggccacttcctctcaaaaaattctcatacctgtcatctcagcactttgagaggctgagactggaggatgacttgagcccaggagtttgagacaaacctggttaacatagcgagaccctgtctctacaaaaaaaaaggaatttaaaatttacctgggcttgggggcgcgggcctgtggtcccagctattctaaaggctgaggcggccgtatgctttgagcctgggaggcggaagttgcattggcccggggaacaactttggttaattgaaactcctgactactggg

SEQ ID NO: 59471 - DNA, 1167 bp, Homo sapiens
tcagacaccgtgtcctcttgcctgggagaggggaagcagatctgaggacatctctgtgccaggccagaaaccgcccacctgcagttccttctccgggatggacgtggggcccagctccctgccccaccttgggctgaagctgctgctgctcctgctgctgctgcccctcaggggccaagccaacacaggctgctacgggatcccagggatgcccggcctgcccggggcaccagggaaggatgggtacgacggactgccggggcccaagggggagccaggaatcccagccattcccgggatccgaggacccaaagggcagaagggagaacccggcttacccggccatcctgggaaaaatggccccatgggaccccctgggatgccaggggtgcccggccccatgggcatccctggagagccaggtgaggagggcagatacaagcagaaattccagtcagtgttcacggtcactcggcagacccaccagccccctgcacccaacagcctgatcagattcaacgcggtcctcaccaacccgcagggagattatgacacgagcactggcaagttcacctgcaaagtccccggcctctactactttgtctaccacgcgtcgcatacagccaacctgtgcgtgctgctgtaccgcagcggcgtcaaagtggtcaccttctgtggccacacgtccaaaaccaatcaggtcaactcgggcggtgtgctgctgaggttgcaggtgggcgaggaggtgtggctggctgtcaatgactactacgacatggtgggcatccagggctctgacagcgtcttctccggcttcctgctcttccccgactagggcgggcagatgcgctcgagccccacgggccttccacctccctcagcttcctgcatggacccaccttactggccagtctgcatccttgcctagaccattctccccaccagatggacttctcctccagggagcccaccctgacccacccccactgcaccccctccccatgggttctctccttcctctgaacttctttaggagtcactgcttgtgtggttcctgggacacttaaccaatgccttctggtactgccattcttttttttttttttcaagtattggaaggggtggggagatatataaataaatcatgaaatcaatacaaaaaaaaaa

SEQ ID NO: 59472 - DNA, 1608 bp, Homo sapiens
  misc_feature (1)...(1608): n = a,t,c or g
agaaagtgaaaggtgaggcacggccctgcagattttccagcggatcccccggtggcctcatgtcgcgcagtggaaccgatcctcagcaacgccagcaggcgtcagaggcggacgccgcagcagcaaccttccgggcaaacgaccatcagcatatccgctacaacccgctgcaggatgagtgggtgctggtgtcagctcaccgcatgaagcggccctggcagggtcaagtggagccccagcttctgaagacagtgccccgccatgaccctctcaaccctctgtgtcctggggccatccgagccaacggagaggtgaatccccagtacgatagcaccttcctgtttgacaacgacttcccagctctgcagcctgatgcccccagtccaggacccagtgatcatccccttttccaagcaaagtctgctcgaggagtctgtaaggtcatgtgcttccacccctggtcggatgtaacgctgccactcatgtcggtccctgagatccgggctgttgttgatgcatgggcctcagtcacagaggagctgggtgcccagtacccttgggtgcagatctttgaaaacaaaggtgccatgatgggctgttctaacccccacccccactgccaggtatgggccagcagtttcctgccagatattgcccagcgtgaggagcgatctcagcaggcctataagagtcagcatggagagcccctgctaatggagtacagccgccaggagctactcaggaaggaacgtctggtcctaaccagtgagcactggttagtactggtccccttctgggcaacatggccctaccagacactgctgctgccccgtcggcatgtgcggcggctacctgagctgacccctgctgagcgtgatgatctagcctccatcatgaagaagctcttgaccaagtatgacaacctctttgagacgtcctttccctactccatgggctggcatggggctcccacaggatcagaggctggggccaactggaaccattggcagctgcacgctcattactaccctccgctcctgcgctctgccactgtccggaaattcatggttggctacgaaatgcttgctcaggctcagagggacctcacccctgagcaggctgcagagagactaagggcacttcctgaggttcattaccacctggggcagaaggacagggagacagcaaccatcgcctgaccacgccgaccacagggccttgaatccttttttgttttcaacagtcttgctgaattaagcagaaagggccttgaatcctggcctggaatttgggcagatatagcattaataaaactgtgcatctcaaaaaaaaaaaaaagggggggcccttttaaaagaaccaatttttacgcccgggggggggaaagttatttttttttttttggggccccaaaatttaattccggggccggggttttaaaaaggggggggggggaaaaacccggggggtccccaatttaatccttttggaaaaaaacccctttttccccgggggggaaaaaaaaaaaaagcgctgnnncnnnnnnnnnananntnnntantgtttacccggggggaaatatatattttttttttttccacccacaac

SEQ ID NO: 59473 - DNA, 2172 bp, Homo sapiens
ttcgagcatcgaggaccttagtccagtgcggtggaattcgacatgctcagcaaaataacaacgaaaccagagggggaactctctggcatgcaagttcaaacacgactctacaactacggcagaaaaagagagagagagaaactaaaaatatatatatatcctatttttttcacagctatcagtttctttcactgagctttcctaaatttaagcctctagaaaataataaatacttggatatcttacctacaaacatggacagatgtgtgtatgcgctcattttagagaacttgaatttttttttttaaaggaaggtgtcaactttggcttttgagtgtttggcatggttacaatgccttaaaaaaacagatgagcagcttagctactaaccatgctgaccactgttcggaacgggattgaatcacagaaaaacagcaaatggctctctcttacagagtgtctgaacttcaaagcacaattcctgagcacattttgcagagcacctttgttcacgttatctcttctaactggtctggattacagacagaatcaataccagaggaaatgaaacagattgttgaggaacagggaaataaactgcactgggcagctcttctgatactcatggtgataatacccacaattggtggaaatacccttgttattctggctgtttcactggagaagaagctgcagtatgctactaattactttctaatgtccttggcggtggctgatttgctggttggattgtttgtgatgccaattgccctcttgacaataatgtttgaggctatgtggcccctcccacttgttctatgtcctgcctggttatttcttgacgttctcttttcaaccgcatccatcatgcatctctgtgccatttcagtggatcgttacatagccatcaaaaagccaatccaggccaatcaatataactcacgggctacagcattcatcaagattacagtggtgtggttaatttcaataggcattgccattccagtccctattaaagggatagagactgatgtggacaacccaaacaatatcacttgtgtgctgacaaaggaacgttttggcgatttcatgctctttggctcactggctgccttcttcacacctcttgcaattatgattgtcacctactttctcactatccatgctttacagaagaaggcttacttagtcaaaaacaagccacctcaacgcctaacatggttgactgtgtctacagttttccaaagggatgaaacaccttgctcgtcaccggaaaaggtggcaatgctggatggttctcgaaaggacaaggctctgcccaactcaggtgatgaaacacttatgcgaagaacatccacaattgggaaaaagtcagtgcagaccatttccaacgaacagagagcctcaaaggtcctagggattgtgtttttcctctttttgcttatgtggtgtcccttctttattacaaatataactttagttttatgtgattcctgtaaccaaactactctccaaatgctcctggagatatttgtgtggataggctatgtttcctcaggagtgaatcctttggtctacaccctcttcaataagacatttcgggatgcatttggccgatatatcacctgcaattaccgggccacaaagtcagtaaaaactctcagaaaacgctccagtaagatctacttccggaatccaatggcagagaactctaagtttttcaagaaacatggaattcgaaatgggattaaccctgccatgtaccagagtccaatgaggctccgaagttcaaccattcagtcttcatcaatcattctactagatacgcttctcctcactgaaaatgaaggtgacaaaactgaagagcaagttagttatgtatagcagaactggcagttgtcatcaaacataatgatgagtaagatgatgaatgagatgtaaatgtgccaagaatatattatataaagaattttatgtcatatatcaaatcatctctttaacctaagatgtaagtattaagaatatctaattttcctaatttggacaagattattccatgaggaaaataattttatatagctacaaatgaaaacaatccagcactctggttaaattttaaggtattcgaatgaaataaagtcaaatcaataaatttcaggctttaaaaagaaa

SEQ ID NO: 59474 - DNA, 1023 bp, Homo sapiens
  misc_feature (1)...(1023): n = a,t,c or g
ccctctccccctttttaaaaccccggccccgcaatttaatttgggggccccataaaaaaaataatcacttgcccacccccgggccttaaaattggttcttttaaaagggcgccccttttttttttttttgagctttggacaaatttattgaaacatacaggcggctgttagcagagaaatcattccatgattgatgtgttacatttggccactaccttgaatgtataatttaaaaattatatttttcacaactaagcctttggccaaaaaagtcatttagcacatctttaaagatcaataagaaatggattttggacattaaaaagatcaagtcactgaattaaacagtagcaacccccattaatctagaatcccatagtgctgaaggtagaggtgtctgtgcaaagctagtcatttgttaacagcaatcagaagagatgggggcaggcacacctgtcagaggtggcagcagagctggcaggacaggacggctgggctggtctggtcaggtgagcatgtcccagagacagcagcaacagagagccgtccagcaggctgtgaggcaggtggatggtcctagctcatctcttctttggtcttctaccacatacactgtggttttaggaggctcctgaggtccaccctgccagccgtactgtgggtatccttggtaggggtacccttgaggaggtgggtagggtccccccataggtcctggacccattggttgtggtggataaggtgggtatggggccgttggaccagggcctggatatggtggagggttctcttggttcatcggggacctgtaaagtgcacctctcctctccacgaaccgactggataacggtcgggtctgaacctgaggagcccggaccagcccgcagtagacttgccgcacctgtctcagagcaagtgaggagcagccgggcgcctgacgtcacggccgctcccagcgccgcgaaccgggagtcacctgatcaccctggcaacgcgcggaattccnccacactggagtagggc

SEQ ID NO: 59475 - DNA, 3111 bp, Homo sapiens
ccctttagccaaaatcatacatacagttattgaaagctgaactatgatttgaacccaggtctaatccaactttaagtctgcctatgctcttttgttgcttcatggtcaggcaggtcaccttcctgggaagactggcatgtgggtaatttcctccgagcctaataaataaataaggctctttaaggtttaaaaagtgttcaattcggggctagaggcccactctggtcctcaggcacttgcagttccctccccgcaaccctaaaaaaaccctccctcctgccccaaaaggattagagttgttccccggccttcatgagccctaatacctataaaaccaagcagctactccctgtcaagggcattaatgtagtaaatggggaactgtgtgtttgcataactttagtaaaggctgcctaaaaactgttctatacaacaaaattttgcaagatatgtgtccatttaatgtatctttcacattgaaaacaaaagccaatatattttataattacagcctataatctaagtttttaaaatatataaccatagatgttatatttccccttcagaactgtagtagtgttcttaataaggctcactgttagtcaaatcttcatctccaaataatacaaatttgaatgttcaacagtcattcaaataaacatcatataactcaaaattaagacattcatactatagaaaccagtctttaattactaaagttaacatatattattgcaaactaacatagctcaatctatatttgctacactcctaaagtggccgcttatcagtaaggggaaacatttattattgacatgcattactgtgaacaagaaaataaatagggttttgaaaatatctcttaaaaatttaattttaattaacaaaaataaccattcaggttgctgaacattaaaatggccaatctattgaaaatggcttcaataattgcttttaaaaatgaatacaaaactaaacagtgattaaggtgctagcctcatgaataggacaattaaaatctaaaaacattagtgttgattttctataataaacttaagccaaaaacaatgacctcaatatttacttaagacttcttgttttcatacttttctcctcattaatataaaaacaaagagctcaaggcctcaccttggtttattcactgctggttttctatgtgctgaaactagactgtcaactctgtaagagcttggaccaagtctgtcttgttcaccactatgtcctacagcactctgcacagtgcctgggaaataggaggtgatcaacgaatatctcaataactgaatcaatgcaagaggagagtaaaataactttatttttatttttgcaaatcatcctctgctcaaactactataaactggcagctgtaatttctagaaatatgggttgaaaaaactcccagagatggaaggacctgatgaaacactgaaacacacaaatacacacacacacacacacacacacacacacacacacacacacacacgactgcatgagtcaaaattacttcatgaagtatgagatgtcaacattatgtaaataaaatttaatattgaaaaagtgatctggaagccctgtgaatttttaccctacacattttggaggacatcacatgggttaaagaaaacaccacaaaatctcatttgttcagataatcatttgaatgtttacatacatttttggttatttatttataactaatttaatttacatttcctcatattaacatatcctcttatttagtatgtaatcaaattatgtcagtgagaaaaatcctcatagtaccttgagttgctgattctgagaaaacactaaacatgaacatgtacaaaagaggcatttgaataaaacagcatgtgcatttttttaatatttgcacagtttgatctttgcatttctgtctggagaaaatatgaacaaaacccaggtttaccatgctaagataatggttcatatgactgccataaaagtagtacatacaaacaatgaaaacaaatcacatccttaggttccatgattaccgagatgatttcccctgccctaagtgctttattatatttcttaaaaaatataggagcagcagcttatcacaagtctccacaagtgcattaatgatggaatcaaaacaacacaacagattcataaggatgagagaactgcagaacaaccagaagtcagttttatgcttcttcttgttctggataattcagaattttgcggtgtgcctgtcgtaaatattgctgctgtttgaagtaaactttaaatgctccttttatggcaacaaacgcaattccacccaagattgtcctttgtaaattagagttaacactactgaacatcaatttaccaactattgtagcaatagtaggaaagacaagggctccacacaagattcgagtagcagagacatgatctgctaaaggattggcctcagctggaattcgaggaacaggacaacctatccctggaaatatactatttaaaatttgtagtttattcgagtatttgcgccacagtctaagcacatagtcctcccagcgaatcatcttgcctaatatcagcatgacaggaatagtaggaagtccaattaaaaggaataaaggatcagctctctccataacatccagaccttctttatgacctacaacctgcatcactgtcactgctccataagtcacagctgtccaatagatagagccgaccattattcctgctgcagcaaatggacaggcttttgagatcagtctatctgcaagatccaagacgtaaaccactggacccaattttggaaaaactattaggtattcagcattgcactgaggacatgccactctggctgtactgtttcctctttgcttttcatccacccagcgttgtagacaggcctggtgaacccattttgtagatcctctgcacctgcatggtctcacccattcagctgttctatcatcttcatcagtagcaaaacaaacccagcaacttctgtccagcatctgctgtagggcttggtccggcatcttccgcggagccggcgcacacggccttccccagtggacccgctcaaggccaggcccagggacaatagcactg

SEQ ID NO: 59476 - DNA, 695 bp, Homo sapiens
tcttcagaaggaagacagggcttctggttatacatctggaactcttttcccacaacaccaacattaagaaatgtgacatggggctgtgtttacatttgcataggaactcgcattataagttttatttggtgagttattggcttttttttttttaataacccacatcagtatatagaactttgcaataggcatttttgttttaacttcatttgtggcgcagttttattttcctacccttgtctttctattttctctttcatcggctttagacttaaactgtgttttatgtattgctgtaagcctctttaaaccctttataaaacaaagcagggaatacataaacaaatagttttttgtctttcgttttttttctttgtaacacaaatcgacttaaagcctccagagaagtagaatctgtagaccttccacactgccacctgattaaaggaattggtatgtatatgaaaatgcttgttgggcacattgcattttttggccattaacattaaaacactcattaatggcattttagcatgaaattactgcttttcagtggataaatcacattagatcaacaaaaacctctttggtcaacctcttgatctgatgaaccctgtatttattcttctttcctaccctcactgtaaattattcttttttgtgtggaattctatgtttagcatttgatttcttgc

SEQ ID NO: 59477 - DNA, 2887 bp, Homo sapiens
gcgtcgacgatttcggggcagctagtcccagtactccgagtcggtcgcgggccgacaggcatcccctgagcgcctgctgggctcttatcacgcgatggcatccactgtggaaggaggcgacacagctctgctcccagaattccccagggggcccctcgatgcctaccgagcaagagcgtccttcagctggaaggagctggcgctgttcacggaaggggagggcatgctccgctttaagaaaaccatcttctcagctcttgagaatgaccctcttttcgctcgttcccctggagccgatctgtccttggagaagtatcgcgagctgaacttccttcgatgcaagcggatcttcgagtatgacttcctcagtgtcgaagacatgttcaagagccctctgaaggtccccgccttgattcagtgcctgggcatgtatgactcttctctggctgccaagtacctcctccatagcttggtttttggatcagcagtttacagttctggttctgaaagacatctcacatatattcaaaagatcttcaggatggagatttttggatgttttgctctgaccgaattaagccacggcagtaataccaaggccattcgcacaactgcccactacgatcctgccactgaggaattcatcatacattcccctgatttcgaagctgccaagttttgggttggcaacatgggcaagacagccactcacgcggtggtgtttgctaagctgtgtgtgccaggggaccagtgccatgggctgcatccctttatcgtgcagatccgggacccgaagacccttcttcccatgcctggagtgatggttggcgacataggaaaaaaactcgggcagaacggtctggataatggtttcgccatgttccacaaggtcagagttcctcgccagagccttctgaaccggatgggagacgtcacccccgagggcacctatgtcagcccctttaaggacgtcaggcagcgctttggagcgtccctggggagcctgtcctcgggccgggtctccatcgtgagcctggccatccttaacctaaagctggccgtggccatcgctcttcgcttctcagccactcggcgtcagtttggacccacagaggaggaggaaataccagtgcttgagtatccaatgcagcaatggcgcttgcttccatatctggcagctgtctacgccttagaccatttctccaagtcgctcttcctggacctggtggagctccagcgaggacttgcatcgggagaccgcagcgccagacaggcagagcttggacgtgagatccacgccctggcatcggccagcaagcccctggcctcgtggaccacccagcaaggaattcaggaatgccgggaggcgtgtggaggacacggctatctggccatgaaccggttgggtgtccttagagatgacaacgatcccaactgcacatacgaaggtgacaacaacatcctgctgcagcagacaagcaactatttgctgggtctcctggcacaccaggtccacgatggagcttgcttccgcagtccgctgaagtcagtggactttctggacgcctatcccggcatccttgaccagaagtttgaggtctccagtgttgccgactgcttggactctgcagtcgccctggcagcatacaagtggctggtttgctacctgctccgagagacttatcaaaaattaaaccaagagaaaagatcaggaagcagtgactttgaagcaaggaacaaatgccaggtgtcccacggccgtccgttggcgctggccttcgtggagctcacggtggtccagaggttccacgagcacgtgcaccagccttccgtgccgccctcgctgcgggccgtgctggggcggctcagtgctctgtacgccctgtggtccctgagccgccacgcggccctgctctaccgaggaggatacttctccggtgagcaggcgggagaagtgttggagagcgccgtcctggctttgtgttcccagctgaaagacgatgcagttgccctggtagacgtgatcgctcctcctgactttgttctggactcaccgattggcagagccgacggcgagctctacaaaaacctctggggcgctgtcctgcaggaaagcaaggtgttggagcgggcatcctggtggccagagttttctgtgaacaaacctgtcataggaagtctgaaatcgaagctctagtgggactggcacacattcagccaagtctaatgaaacgaagggaactaatcagacgtggacctcaacttctgattccagaacacaccggagattgctgctgctttctgagcccgcacctgtgcgcctaaactgctgattggcctcaactgcccaggcggacgggagggaggcacccggccggctggactaatctgggatcgcggtgatttgcagcgtggaaaagaaatgcagatgatcatgtctaccctgatgcgctgtgggttttttgataattagaatttcgcacattcagttttcagggttcagctcctttctctaaagtaaacagcccattgtcagggatcttctggtcagacaacctgtgattcatctagattttttaccgagctccacttcattgagaagtcaatgatgccagtctggttctttgtcaactctccctcgggtttgttcacataattgaattatgtcataaccttattaatttgcacatagatcatctgaatgtcggtggtttaagacttaaggaggaacatctgtttgattactttcttttgtggaactggaaatttccatcgaggaaatgtttttttaaaaagtctaatgatttgaatgggcaattcagtctccaaccgcccccctccccctgccgccagttatataaaaatcactttattggtaaaaaaaaaa

SEQ ID NO: 59478 - DNA, 2063 bp, Homo sapiens
gcgcgatcgagaccctattgagtgccgtggaattcggctgcgcccatgtaacatcactagcgaccggtgacctctttttcccccttgcctggctcctgtggtggcaggctgggcacgaggaccatgctgggccggagcctccgagaagtttctgcggcactgaaacaaggccaaattacaccaacagagctctgtcaaaaatgtctctctcttatcaagaagaccaagtttctaaatgcctacattactgtgtcagaagaggtggccttaaaacaagctgaagaatcagaaaagagatataagaatggacagtcacttggggatttagatggaattcctattgcagtaaaagacaatttcagcacttctggcattgagacaacatgtgcatcaaatatgctgaaaggttatataccaccttataatgctacagtagttcagaagttgttggatcagggagctctactaatgggaaaaacaaatttagatgagtttgctatgggatctgggagcacagatggtgtatttggaccagttaaaaacccctggagttattcaaaacaatatagagaaaagaggaagcagaatccccacagcgagaatgaagattcagactggctgataactggaggaagctcaggtgggagtgcagctgctgtatcagcgttcacatgctacgcggctttaggatcagatacaggaggatcgaccagaaatcctgctgcccactgtgggcttgttggtttcaaaccaagctatggcttagtttcccgtcatggtctcattcccctggtgaattcgatggatgtgccaggaatcttaaccagatgtgtggatgatgcagcaattgtgttgggtgcactggccggacctgaccccagggactctaccacagtacatgaacctattaataaaccattcatgcttcccagtttggcagatgtgagcaaactatgtataggaattccaaaggaatatcttgtaccggaattatcaagtgaagtacagtctctttggtccaaagctgctgacctctttgagtctgagggggccaaagtaattgaagtatcccttcctcacaccagttattcaattgtctgctaccatgtattgtgcacatcagaagtggcatcgaatatggcaagatttgatgggctacaatatggtcacagatgtgacattgatgtgtccactgaagccatgtatgctgcaaccagacgagaagggtttaatgatgtggtgagaggaagaattctctcaggaaactttttcttattaaaagaaaactatgaaaattattttgtcaaagcacagaaagtgagacgcctcattgctaatgactttgtaaatgcttttaactctggagtagatgtcttgctaactcccaccaccttgagtgaggcagtaccatacttggagttcatcaaagaggacaacagaacccgaagtgcccaggatgatatttttacacaagctgtaaatatggcaggattgccagcagtgagtatccctgttgcactctcaaaccaagggttgccaataggactgcagtttattggacgtgcgttttgtgaccagcagcttcttacagtagccaaatggtttgaaaaacaagtacagtttcctgttattcaacttcaagaactcatggatgattgttcagcagtccttgaaaatgaaaagttagcctctgtctctctaaaacagtaaacatatcttacaaattaaaatgacttttaggctgggtgcagtggctcacacctgtaatcccagcactttgggaggccaaggcgagcggatcatgaggtcagaagatctagaacagcctggtcaacatggtgaaaccccgtctctactaaaaatacaaaaattagccaggcttagtggcgggcatctgtagtcccagctactcaggaggctgaggcaggagaatcacttgaaccctggaggtggaggttgcagtgagccgagatcatgccactgcactgcactccagcctgggtgacaaagcaagactgtgtctcaaaataaataaataaaataaaataaaaaaaaaaaaaagg

SEQ ID NO: 59479 - DNA, 1019 bp, Homo sapiens
gcacgagccccggtgcgcgggtatggcggccagcctgtggatgggcgacctggaaccctacatggatgagaacttcatctccagagcctttgccaccatgggggagaccgtaatgagcgtcaaaattatccgaaaccgcctcactgggatcccagctggctactgctttgtagaatttgcagatttggccacagctgagaagtgtttgcataaaattaatgggaaaccccttccaggagccacacctgcgaaacgttttaaactgaactatgccacttacgggaaacaaccagataacagccctgagtattccctctttgtgggggacctgaccccggacgtggatgatggcatgctgtatgaattcttcgtcaaagtctacccctcctgtcggggaggcaaggtggttttggaccagacaggcgtgtctaagggttatggttttgtgaaattcacagatgaactggaacagaagcgagccctgacggagtgccagggagcagtgggactggggtctaagcctgtgcggctgagcgtggcaatccctaaagcgagccgtgtaaagccagtggaatatagtcagatgtacagttatagctacaaccagtattatcagcagtaccagaactactatgctcagtggggctatgaccagaacacaggcagctacagctacagttacccccagtatggctatacccagagcaccatgcagacatatgaagaagttggagatgatgcattggaagaccccatgccacagctggatgtgactgaggccaacaaggagttcatggaacagagtgaggagctgtatgacgctctgatggactgtcactggcagcccctggacacagtgtcttcagagatccctgccatgatgtagccaggccaaaggacaagccaggttgcatgatgtgagggagatgagagactcctttttaaaaattgtgaaacctttttggaaatatgatttgtaagattttaataatgactgtttttggagatcaaaaaaaaaa

SEQ ID NO: 59480 - DNA, 1694 bp, Homo sapiens
gcggtggaattcgtgggagttgccttgacctgcagctccgccaccgcggacccgccttctgccctcagcagcagacgctctgtcccgcccgggcagctctgcgaggcagcggctggagagggaaccatggggactgtgcacgcccggagtttggagcctcttccatcaagtggacctgattttggaggattaggagaagaagctgaatttgttgaagttgagcctgaagctaaacaggaaattcttgaaaacaaagatgtggttgttcaacatgttcattttgatggacttggaaggactaaagatgatatcatcatttgtgaaattggagatgttttcaaggccaaaaacctaattgaggtaatgcggaaatctcatgaagcccgtgaaaaattgctccgtcttggaatttttagacaagtggatgttttgattgacacatgtcaaggtgatgacgcacttccaaatgggttagacgttacctttgaagtaactgaattgaggagattaacgggcagttataacaccatggttgggaacaatgaaggcagtatggtacttggcctcaagcttcctaatcttcttggtcgtgcagaaaaggtgacctttcagttttcctatggaacaaaagaaacttcgtatggcctgtccttcttcaaaccacggcccggaaacttcgaaagaaatttctctgtaaacttatataaagttactggacagttcccttggagctcactgcgggagacagacagaggaatgtcagctgagtacagttttcccatatggaagaccagccacactgtcaagtgggaaggcgtatggcgagaactgggctgcctctcaaggacggcgtcatttgctgttcgaaaagaaagcggacattcactgaaatcatctctttcgcatgccatggtcatcgattctcggaattcttccatcttaccaaggagaggtgctttgctgaaagttaaccaggaactggcaggctacactggcggggatgtgagcttcatcaaagaagattttgaacttcagttgaacaagcaactcatatttgattcagttttttcagcgtctttctggggcggaatgttggtacccattggtgataagccgtcaagcattgctgataggttttacctcgggggacccacaagcgtccgcggattcagcatgcacagcatcgggccacagagcgaaggagactacctaggtggagaagcgtactgggccggcggcctgcacctctacaccccattacctttccggccaggccagggtggctttggagaacttttccgaacacacttctttctcaacgcaggaaacctctgcaacctcaactatggggagggccccaaagctcatattcgtaagctggctgagtgcatccgctggtcgtacggggccgggattgtcctcaggcttggcaacatcgctcggttggaacttaattactgcgtccccatgggagtacagacaggcgacaggatatgtgatggcgtccagtttggagctgggataaggttcctgtagccgacacccctacaggagaagctctgggactggggcagcagcaaggcgcccatgccacacaccgtctctcgaggaaacgcggttcagcgattctttgactgcggaccctgtgggaaaccccgtcaataaatgttaaagacacactccgaaaaaaaaaa

SEQ ID NO: 59481 - DNA, 639 bp, Homo sapiens
ctgagactccagcaggatgtcttatcaacagcagcagtgcaagcagccctgccagccacctcctgtgtgccccacgccaaagtgcccagagccatgtccacccccgaagtgccctgagccctgcccaccaccaaagtgtccacagccctgcccacctcagcagtgccagcagaaatatcctcctgtgacaccttccccaccctgccagtcaaagtatccaccgaagagcaagtaacagcttcagaattcatcaggaccaagaaaggataaggatatttggctcacctcgttccacagctccaccttcatcttctcatcaaagcctaccatggatacacagggagcttctttctccttagccagtaatctgcccatgatgatccctgacagcaaaaagtttcttttctgaggctgccatactgccactgtccaggtggagactgagcaaaggaagtcctgggctgtgccagctcccagagcttcggaagaaagagcagcagctctctccctgggaaccatcagagaattctgttgatgtgttctgtgtctgtctgtcacctggtcacgagcttctaccacctttgcaattgtcacttatctttcactccctgaataaagtatctatgcataaaaaaaaaa

SEQ ID NO: 59482 - DNA, 3147 bp, Homo sapiens
ttttttttttttcacagacagatgtggggccttttattatttggggttcctctatatggaacacgggacctccccaccccaagcctagtgcctctggcacccccataaccagtacacaagtccctgaagagtcccctttaaaatcactaatataaaaaaaggagcgaaggagggaaggccgcaacgcccacaggctgggcagctcctggtcggcagcagggccagggaaggacagagggggcgttggcttcggcgcaggaaggcacaggcgttcccagccccggggcctccccgagccgggaggcggctccacacgcctggactgcagactgtgtcgagctagtggttatagtttatagtctgcaggcaaggccaggccggtggtgctgagtgggtggcctctgaagtggggagaggggacacatcaggatgctggggaaacccggggctgtcccgaggcaggaacaagcgaaagctgccttcctggcttggcaatgggtggggcccagggagtccatcccgagcccatggctggcacaggcaggggccacacagttctgcccggagcagatgaacgatggtggctgggaggagaggggacaggaggacgaggctgcctctctgctccaaggaaggcacttgcagctggggtggcctggtgtggtgtggtaggaggcgaggcttggcagacgaggagggaggggagcacggcaagggggaccgagtccctgcctcatgcaaacatggtcagctgcaaccacttaaacaagtcaaaggtcacaactccatccagatctgtgtccagagttttgaaaaatcggaacatggtctctagccgcaccaggcagcaaacgaaattgtcaaagtcgaccgccaggtcgggctccgagtagcgggtgatgatgagctcgtacagcttcttgttgagcttgaagcctgccgactcaatggccatccgcatctcgtaggcactcatgctgcccgacttgtccaggtcaaacttccggaagatggacaggtaattccggatgcggttccacaggatgttgaactccaccaggcccagcttcccattgccatcacgatccatgaggttcaccatgctgcggcacgactctaggctgaagcccttggtccgcaggtctttgtgtttgctgatgatcctattgaggattgtccgcaactccttcacgctgatctccatgtcctcccctgccagctgcctgaagagggccttgaagttctcgtcaatctcctcttctgagagcacttgctcatcggggagattggcctggatctggtcatccagctccacagtcccagcactcttctctgagaagaagcgcagcacgaagtcgccctccttgttgggctcgaaggtggagggcaccaccacatactccccgggtggcaggcggaagcgggtgctgacctctcgcaggttgatgaactgctctgagcgcgcccgagacgcattggccaggaagaagtcacgcttcaagtgtacggccggctggcccaccagctccggagggacctcgtagaccgcgaagccaatagtctccatgtcgcggccgaagcggcgctcgcggcgacggtgcttctgcataagggcgagcacgaagctgcagcctgactcgcggtccccgtagtcgtccgggtcatccgtctcatccagccggatcttgaactgagggttcacccagaaggtggctgggtagtttcggcagccccccgcggtgctcccccgccgccaggtgccttcgtagagtgtggtgttccatttgcggatggtccggctcttgagggcgtcgggtgtgaggttgcagatctccaggcgggtgaactcccgcatgaagtctcggaatgacatccagaactccccgtcctccatcttgacccggagctggtcccgttcatatgggtccacgttgttccactctgaggagctgtcgctccaggctcccgtccactccacctcgccccaggggttccgcatccggatcaggctcaccacctggcctcggtagttcacctgcttggccccggtcacagagtaggcatggcccttcaccaacttcttgaaagtgatggcctccatgtctagaacgctggagatgtctatggagcagcccagcagggagccccgctccagcgccttgaggatgatctggtagaggtcactgggagccttgcgcaactcgtaccactcggtaaccccgcctgtgaagtcctcaaagccctctgaggtgctgccccctgacagggcctcgtagctgccatttaccttggcataggccttctcaagcagggcgctccagaactcgttgccttcggcagagtgcacgaacactagcttcccgtccttgatgggcagcaggtcatccacgaccacgtccacccactccccaaattgccacagctggaaatggaagatgccggcatagccattctggaagctctggccgtgcggaaccactcggtgcaggagggtgtcgttgagagtgagggaggcaatggccgccaagagccagcagtcccccagtgctccctggcagatgtctgtgcgggtagctccatccacaatgaactgggggtttgacagcagttccgtgggacgcttccacttgatgccataggtcttggaggaattgggacccaggtccttgtaacccaggctctggggtaccggggggaaggcctcatcacggaagagggtcccactctgcaggcatcgcacccgcagctgctcataatcctggcccaggtacttgatggcattctcatggcggcccaggcccagctccctggcccgctgcttctgcacttgggctgacaccccagtgcagtacaccggcgtgatgatctcctccgacatcctgccggacagatgggcctgctcagaacccaggccttcccaagactagaacctgggctcctgcctgcaagctctgctctcctgcccctgcttatccatccccaaacctagggtttccctgcctcactgctcccctcacagaagtagggttctcagccacctcccggtgctcccagtgaatccaggaaagggatttcccagttcccaggcgtgccggccacctctcctttcccggatcccattgtcaggggcttgcagctctgacgaaa

SEQ ID NO: 59483 - DNA, 2644 bp, Homo sapiens
ggcacgagggcagcggccgcgtggagagggaggtggcagcggcccgggaggccggagccaagccagcgacccaccatggagacccgctacaacctgaagagtccggctgttaaacgtttaatgaaagaagcggcagaattgaaagatccaacagatcattaccatgcgcagcctttagaggataacctttttgaatggcacttcacggttagagggcccccagactccgattttgatggaggagtttatcacgggcggatagtactgccaccagagtatcccatgaaaccaccaagcattattctcctaacggctaatggtcgatttgaagtgggcaagaaaatctgtttgagcatctcaggccatcatcctgaaacttggcagccttcgtggagtataaggacagcattattagccatcattgggtttatgccaacaaaaggagagggagccataggttctctagattacactcctgaggaaagaagagcacttgccaaaaaatcacaagatttctgttgtgaaggatgtggctctgccatgaaggatgtcctgttgcctttaaaatctggaagcgattcaagccaagctgaccaagaagccaaagaactggctaggcaaataagctttaaggcagaagtcaattcatctggaaagactatctctgagtcagacttaaaccactctttttcactaactgatttacaagatgatatacctacaacattccagggtgctacggccagtacatcgtacggagtccagaattcctcagcagcatcctttcatcaacctacccaacctgtagctaagaatacctccatgagccctcgacagcgccgggcccagcagcagagtcagagaaggttgtctacttcaccagatgtaatccagggccaccagccaagagacaaccacactgatcatggtgggtcagctgtactgattgtcatcctgactttggcattggcagctcttatattccgacgaatatatctggcaaacgaatacatatttgactttgagttataatatggttttgtgacttatgagctgtgactcaactgcttcattaaacattctgcattgggtataatctaagaattgtttacaaaaagattattttgtatttacccttcattcctttttttgatccttgtaagtttagtataaatatatctagacattcagactgtgtctagcagttacgtcctgcttaaagggactagaagtcaaagttccttgtctcactatttgatctgctttgcagggaaataacttgttttttctcatgtttcatcttctttttatgtaaatttgtaatactttcctatattgccctttgaaatttttggataaaagatgatgttttaagttccaatgagtattactagttactcaataccacttattgagtactctgtttctacgtatgtagaatgtatagggatagaagagttgaaaagggaaagcaaaactcctcaagtagcttccttaaaatgtcattcataggagatgtactggaattgctcattctgtgactttatttgtgtcctaaacattcttcagtgaaaataattttatttcagtcaaacatttatgaggaaatgagatcacatctttgtcactggatgctacttgaagagggagtactttgtaaccactttgatatgctgttatcaccaccccctgccctctgctgccataatcacacaaatttaaaaagaaagaaaacagtcttccatagatttttaaggaagaaagggcccaagccaggagatcgcttggttttcttccagaagttaaatggggggatctgaagatttgaatgtttggtctgctttgaaatgtatgtcttttgggatgtattatatgcctagctttataatcagtataaattttaattattccaggaatatgcataatattgaaatatttcatgtcctattttaatagaaaacctcagggcccaagtaacagtgatagaagttagaaaaacctttacttagaattgtccacctagtcagagcccaagaaagaattttcagtggaaaaatcaatatataacttagtgctagctagcgccacagactctagtagataatattatcatcataatggctggtgaaaccatataatcacagaaaaacattgccttcagcatgttcagttcgcagcactgagggcactcttgagggtgttgttaatgaagatttaatttttaaatacaggtggttccaagctttcaaataggttatgctccaaaagtgttatttgtaagttaatttttttacaagtcaaacaatgttggaagtggtatttaggttctagatcggtccacgaaagttagcccatatgtatatcttgaatagtataggggagggtattcataaagtccttatgtggttttaactaagtgaaattatggacaagagaaataattgtaaaatcgtcttaaaggaaaatttaatttttactcctgtttatgggacattcgttctattaactgtcagacacaatttctgttttcatctgagagccagttttcctttatttctacatctaaaataagaacatattgtacactattatataatacagaattgtcttaaactttaataaattcgcattttaaaggtgaaaa

SEQ ID NO: 59484 - DNA, 661 bp, Homo sapiens
cgttgctgtcggcgaggcgggagggcggccctgttgccctggagacgctttccctgctgccggccgcgaccgcaacccgctaggccttcatcgcgagctacgcccggaccgagaagccccggcatggccacgtccatcggagtgtccttctcggtgggcgacggggtgcctgaggctgagaagaacgcaggggagcccgagaacacctatattctgcggcctgttttccagcagaggttcaggccctctgtggttaaagactgtatccatgctgtgctcaaggaggaactggcaaatgctgaatattctccagaagaaatgcctcagcttacaaaacatttatcagaaaacattaaagataaattaaaagaaatgggatttgaccgatacaaaatggtggtgcaagtagtgattggagaacaaagaggtgaaggagtattcatggcttctcgctgtttctgggatgctgacactgacaactatactcatgatgttttcatgaatgacagtttattctgcgttgtagcagcatttggctgtttctactactgaatgaatctttgaaaagctggtaaaagacatgaccatgaagaaatctgaactttttaatattgttaaatatcttgacaaaataaagatgttagtagtttgaaaaaaaaaa

SEQ ID NO: 59485 - DNA, 2595 bp, Homo sapiens
tttcgtccgccaatggcagagctcccatcgcagagcctgcgggttaggttgtgaggcccgggccgggggcggggaggagccaagggggcgagcaagctcggtggctgggtgggttggggcgttccgcgcgcccttcattgaagcggcggtggccgggctgggcgccggtagtggaaagcgacggcgcggctggaaaatgccagtccattcccgaggggataagaaggagaccaaccatcacgatgagatggaggtggactacgccgaaaatgaggggagcagctccgaggacgaggacactgagagctcgtcggtctccgaggatggagatagctcagaaatggatgatgaagactgtgaaagaagaagaatggaatgtttggatgaaatgtccaatcttgaaaaacagtttaccgatctcaaagatcaactttataaagaacgattaagtcaggtggatgcaaaactacaagaagtcatagctggaaaagcaccagaatacttggaaccgctggcaactttacaggaaaatatgcaaattcgtacaaaggtagcaggaatctatagagagctctgcttagaatctgtaaagaacaaatatgaatgtgaaattcaagcttctcgccagcattgtgagagcgaaaagctgttgctatatgatacagtccagagtgaactagaggagaagataagaaggcttgaagaggataggcacagcattgatattacctcagagctgtggaatgatgagcttcagtcaagaaaaaagaggaaggatcctttctggcctgacaaaaagaagccaggtgttgtttcaggtccatatatagtttatatgctacaagatcttgatattcttgaagactggacaacaattaggaaggcaatggctacattggggccacacagagtgaaaacggaaccacctgtgaaactggaaaaacatctgcacagtgctagatctgaagagggaagactatattatgatggtgaatggtatatacgtggacaaacaatatgtattgataaaaaagatgaatgtcctacaagtgctgtaattacaacaattaaccatgatgaagtttggtttaagaggcctgatggaagcaaatctaagctttacatttcacagctacagaaaggaaaatattcaattaaacattcataatcatgatttaagtgttatctaaatttaccttattagtgttaccaaatgtaagtgccatgagagtaaaaaaatgtattcaataacttaatattctcactgaatcatgagagaatgtgtatttgtaggtagtactctaaatagatctcattgatatgttattaaaagaaacagtaataaaaattttatcacgatccttacgttgatttgcctcttaggtccgatgaccaataggtattctgtatatggtaggggtttctttctaaacatttttctttggttttaaaaaaagttatgcaaatttgtcttatctttagtaaactatgactacatttatctgcaatttttaaaattttccatatctttgtcattcattgtgtgtttgtaaataaggccgataggaatgtttcctataaatggtttgtactagtacattagtgttaaaccagaactgaaatttaaacatatatatatatgaggatgtatatatggcatcatcagcttatttagaactgatggccataccttacaatcttgttttacccaaaattaagctattggggttgaaagctaaaaggagcacttttgtagaatagcaacttttcttttcctctttcttgattgtatggtggggtggtgacctatttttacaaattatacctaatgagtaaaattagtgtaaagtgataacatgcttctacctgtatttctagtgaccctttagcggcaggtatttatacctggtatttatgatgcagtatataagtggtgaacaataactgacagtattgtgcttgctgtacatgtctggtcttttgaaacagattttagtaagcattttccagaggtaaaactgtgtccttattctaattttattcctagggcaaagtagacagggattatttccttgaatctatttccaaattaatatttttttctttggtatttctacactttaaggccatttggtgcaatttagaaagtgttggcctcccttccgctagccacattcaaaattaacttccaaaacctcaggaacagtacaaagaattgaaaccctcaatatggcagcacagccggctgtagtgtatatttagggtacaccaaatcaggtattcctggtggtcttgtgcactttaatttctgttacaatgagttaagaggatgaggaagaaatctacttattaacacttactgcagaaatgtctgcattattccgtttgttttcttattattttacctctccaaacatcttcctgtgcagatcactacttcatagttgccaaattttaaaacacttaactgctgaaattcagtgtcagcaaagtgatattacgttgttctgtttctaattaaccttagcaaatgtacataatgtcaaaacccaatagtatttgacagtacttatgtatacaatgtttgataagcat

SEQ ID NO: 59486 - DNA, 1106 bp, Homo sapiens
acggaagtgcaggaacatttcacaaatctacaatctgtgagtatcacatcctgtatagctgtaaacactggaataaggaagggctgatgactttcagaagatgaaggtaagtagaaaccgttgatgggactgagaaaccagagttaaaacctctttggagcttctgaggactcagctggaaccaacgggcacagttggcaacaccatcatgacatcacaacctgttcccaatgagaccatcatagtgctcccatcaaatgtcatcaacttctcccaagcagagaaacccgaacccaccaaccaggggcaggatagcctgaagaaacatctacacgcagaaatcaaagttattgggactatccagatcttgtgtggcatgatggtattgagcttggggatcattttggcatctgcttccttctctccaaattttacccaagtgacttctacactgttgaactctgcttacccattcataggaccctttttttttatcatctctggctctctatcaatcgccacagagaaaaggttaaccaagcttttggtgcatagcagcctggttggaagcattctgagtgctctgtctgccctggtgggtttcattatcctgtctgtcaaacaggccaccttaaatcctgcctcactgcagtgtgagttggacaaaaataatataccaacaagaagttatgtttcttacttttatcatgattcactttataccacggactgctatacagccaaagccagtctggctggaactctctctctgatgctgatttgcactctgctggaattctgcctagctgtgctcactgctgtgctgcggtggaaacaggcttactctgacttccctgggagtgtacttttcctgcctcacagttacattggtaattctggcatgtcctcaaaaatgactcatgactgtggatatgaagaactattgacttcttaagaaaaaagggagaaatattaatcagaaagttgattcttatgataatatggaaaagttaaccattatagaaaagcaaagcttgagtttcctaaatgtaagcttttaaagtaatgaacattaaaaaaaacccattatttcactgtcatttaaa

SEQ ID NO: 59487 - DNA, 1911 bp, Homo sapiens
gttcgacgcccgttgtaccgaaccggaattcccggtgcagaccccgcgtccggtttgaggctgagccgctgagaggctgagtggagttcactcacatggattgaggcccagttcctgggagaagagatgctgggcaggaaggtgtctgcatgtgggactctgtacagcccggtcctctcccacatctgggaggggccagagtcagacaactgctgggttcgtccctaagagaggtcatctgactggctgttcagcctaggctgcacacacccccactttcctctaccaggccacaccggaggcagtgctcacacaggcaagctaccaggccacaacaacgacacccacctcacctctggcacctctgagcatccacgtacttgcaagaactcttgctcacatcagctaagagattgcacctgctgacctagagattccggcctgtgctcctgtgctgctgagcagggcaaccagtagcaccatgtctgtgactggcgggaagatggcaccgtccctcacccaggagatcctcagccacctgggcctggccagcaagactgcagcgtgggggaccctgggcaccctcaggaccttcttgaacttcagcgtggacaaggatgcgcagaggctactgagggccattactggccaaggcgtggaccgcagtgccattgtggacgtgctgaccaaccggagcagagagcaaaggcagctcatctcacgaaacttccaggagcgcacccaacaggacctgatgaagtctctacaggcagcactttccggcaacctggagaggattgtgatggctctgctgcagcccacagcccagtttgacgcccaggaattgaggacagctctgaaggcctcagattctgctgtggacgtggccattgaaattcttgccactcgaaccccaccccagctgcaggagtgcctggcagtctacaaacacaatttccaggtggaggctgtggatggcatcacatctgagaccagtggcatcttgcaggacctgctgttggccctggccaaggggggccgtgacagctactctggaatcattgactataatctggcagaacaagatgtccaggccctgcagcgggcagaaggacctagcagagaggaaacatgggtcccagtcttcacccagcgaaatcctgaacacctcatccgagtgtttgatcagtaccagcggagcactgggcaagagctggaggaggctgtccagaaccgtttccatggagatgctcaggtggctctgctcggcctagcttcggtgatcaagaacacaccgctgtactttgctgacaaacttcatcaagccctccaggaaactgagcccaattaccaagtcctgattcgcatccttatctctcgatgtgagactgaccttctgagtatcagagctgagttcaggaagaaatttgggaagtccctctactcttctctccaggatgcagtgaaaggggattgccagtcagccctcctggccttgtgcagggctgaagacatgtgagacttccctgccccaccccacatgacatccgaggatctgagatttccgtgtttggctgaacctgggagaccagctgggcctccaagtaggataacccctcactgagcaccacattctctagcttcttgttgaggctggaactgtttctttaaaatcccttaattttcccatctcaaaattatatctgtacctgggtcatccagctccttcttgggtgtggggaaatgagttttctttgatagtttctgcctcactcatccctcctgtaccctggccagaacatctcactgatactcgaattcttttggcaaacttcgctgttgtttgtgttccctgattgaaggttgggtggagcaggacatggaccggacgaattcgtctacccgggaatt

SEQ ID NO: 59488 - DNA, 2009 bp, Homo sapiens
gtggggaattctggcggttcatgtttgcaggccggaagagaaatgttcttttttgatttttaaaaaggaagcctccggccctatggttttctggggttggagtggatgtgtgtgctgggggaggcggagacgtcccgctccaggcagggccttgggtcttaataggtggggaaatctctgccaaataggaggcctctcggagcctcagtttccccatctgcagactgggctctgacttcttctggcatgagagggtgtgtgagagtaaaaggaggcagctagccccgtgccgggagacacgtcagccatgtcatctgagcctcccccaccaccacagccccccacccatcaagcttcagtcgggctgctggacacccctcggagccgtgagcgctcaccatcccctctgcggggcaacgtggtcccaagcccactgcccactcgccggacgaggaccttctcggcgacggtgcgggcttcacagggccccgtctacaaaggagtctgcaaatgcttctgccggtccaagggccatggcttcattaccccagctgatggcggccccgacatcttcctgcacatctctgatgtggaaggggagtatgtcccagtggaaggcgacgaggtcacctataaaatgtgctccatcccacccaagaatgagaagctgcaggccgtggaggtcgtcatcactcacctggcaccaggcaccaagcatgagacctggtctggacatgtcatcagctcctaggagatggtggaagcaccccttgtcctgtgcttgtgggagactttgcggggaggaggcagcagacactggagatgacattcttccacacgagacggggcttcagccgggcatggtccctctcaagtatctcctggaggaaggggtatggggggcaggtgtggggtgtggggtgttcccggccatcagcacagcctatgaccattgcaacaacctctcaccatctgaagagcattaaaagcatttaaaaaggagaggtgcccactggtggctgagtggaggttccaaccccatcccagggagtggatcaagggtggtatttctccagctgctcagacacatgggctcaacccacagaatccctcttcctcctggagctggaggccccagattcccagatctggccccctggcagcctgacagggaccttgcgtgacttctccaaggcaaatttccacctaagtgccccttgcgcctctcctggggcctgggcaaagcagttttctaattcttggcttggttggttctaggggagctggcttgaagtggggggggaaaggcgggggtggcggtctttggattggacggatgttgccttttggtgcctttgcagtgggaggcggcatagctgcctgtctggggaagacagttctcccagcactcccacccctgggcacagcaggctggtactgggaggctgaacccctcttagagcctgaccttttcatctgccttctggttgtgtgaccatcactcaacagccatttcacagcccctgtaattatggcggcggggggctggggtggtggtggtgggaagggcttgtggagaggacacagtctttgtttaaaaactttgtcccgatccatccagaaaagagtaggtagcttgcatcctgacagcctggcaaagtcaagaaagttgaaggagaaacatacctttggagagggggttttctttaaaactagtgttaagaaatgcttagggattttttttttcttatttttcataactaaagctttcacccagagccggctctgtttgcactttgctgccgacattgcaaactttttggcagggggggagactgagtctcattctgtcacccaggctggagtgcagtggcccgatctcagctttactgcaacctcttgccctccagggttctgggcaattccgcctcagtctcctggagtaggctggggattacagggcatgcgccaccacacccggttaatttttgtatttttagtaggagaca

SEQ ID NO: 59489 - DNA, 2795 bp, Homo sapiens
ggtagggaggccgactgagcaggagtcgtccgcttatagtggaggctgctaggagccggtcagagggtgagtggggagcaggcgagcgagccacagcaggcaggagggagcgtcgcgcggcgcagaggagcgccggggcagggccgcggcggaaccacagccggagaggggcagcccgagccgggcgccgcagggtccccacccccaccccgccggacagtgcccggtgttcccccgtgcgggggggcggcggcggcggctgacgggaccgtcgggaccgcgggggtgttgccacctccaccgaggagccggcgcggccgcgggctcctcagagccggggccccgggcccgtgagtcagacgggccgaggaagggagagaggcggtggcgacaccatgtcatctcccagtccgggcaagaggcggatggacacggacgtggtcaagctcatcgagagtaaacatgaggttacgatcctgggaggacttaatgaatttgtagtgaagttttatggaccacaaggaacaccatatgaaggcggagtatggaaagttagagtggacctacctgataaataccctttcaaatctccatctataggattcatgaataaaattttccatcccaacattgatgaagcgtcaggaactgtgtgtctagatgtaattaatcaaacttggacagctctctatgatcttaccaatatatttgagtccttcctgcctcagttattggcctatcctaaccccatagatcctctcaatggtgacgctgcagccatgtacctccaccgaccagaagaatacaagcagaaaattaaagagtacatccagaaatacgccacggaggaggcgctgaaagaacaggaagagggtaccggggacagctcatcggagagctctatgtctgacttttccgaagatgaggcccaggatatggagttgtagtagaaaaagcacctgcttttcagaaagactattatttcctaaccatgagaagcagactataatattcatatttaaacaaagcaattttttttattactaaacaaggtttttatgaataatagcattgatatatatatattatatatcaccctttagatcttgatttcttggtcatttctcaacctgaggtgcatagcatattcccacattccatttggtagcaatatgcggtctgaatgcatgcattcatgagtccatgtggccaagtcagcctgtgtgctactgaactgtcgaaggaaatagccgctctgataggtagatgtgagtaaaaagaacaggaaaaaattgcttcttttattggtttccaaagaaacaaaccaaaccaaccagctcttggatgtgaagataaaatagtgcttttttgaaatggagaggaaaaacttggggaggaagaggcctgctgtgggggcatcggagccagccatgtaagaatcagagctgctccttcctgtgaatcctaggtggccctatgtcttctgtggagttacagtataaagcagggagctaattaagagtattaaaacttaaaaccattttttgactctgattttaagtacatttttatatgtcagttgctgcccttcacactaccaggccctgcagccacagtgttctgttggagaaacttggggaagtgttttctgaaccagttctttttcttggggtagagcgtgaaatccagacctgtttttgaaaggacagcacaggaggagaaaagtgactgggacgatgcttcctctcatccaaaacacatgcagagtcacatcctcatcctagtgtttggcagtttgagaccgctaccctgaacttaagagctttaaatatgagggttgtgttttctggggggggttatttttttgggtgtgtgtgtgtgtgtattgtgccttagaaaaggtttgcagaattcatcttcacctaccaagagcagacggccgcctccttggcccaagccgctcatgggaccattagacttgagaagacgacccacgtggtgactgcaaagccctgggtacttgccttcatgttctggtttggttttccctttttctgctgctcttggcagcagcctggtcatcatctgcttgtgggagtgggaaatgggtattttagacccaacacaggttctaaatttaaaacaaataataattggaacaaataaaggttcttgtacccagagtgattctacatgggaaaaacaaaccagcttttttcagagagtgaccgaataggaagaagggattcagaaatatgatgtagtagaacatgccctgcaggaagaaaatgttttctctcctgcgtatgttaagaggaaatcagtttaaaatgcctgctaatcaaatgtcgactcagctaaccatatgtccaggttgctgcagagtttctttcaaatctgagtgttgcctgctgaactcggaggggagtttggagaaattttagacagcagctctgtgttctttttttgccgcagccaataagataatagcagaattagccaatcctaaaaccttctaaagacgatttttgagcatcccactgggattatttaatttttctttttgacgtgtgtttttagtttagaagtgctgtattccacaaggtttaagtcagtgaggttggaagataccctatcttttttattcaaaaagcacaatcaatcttttgtttgaaaatctatataaagtacaacttgcttttagcatgattattttcctaaataaaaagacaaagaatttacttactttatgttaattacgggcatgaagcaaaaggttttctttaaaaaaaaaa

SEQ ID NO: 59490 - DNA, 3566 bp, Homo sapiens
ttttttttttttagcactgatggcttttattgcagattcgtgtcattacaaggataatctgggaatatatttttaaaaaaaccctgccttttatatacacaaaacatgctacatggtacactttgtgagaaatgctgaggtaataggcacacacccagacatggacagtaccaaacatccaacatctcacacagcctggcccacgtgcccaccgggaagggtctcaccttcttgactcatcccttgccccttcttggcaatagtcccgggagtgctgaggctgacacttggtggccaacaggactcagaaagccaccatgctgcagtgcatcaaccaaggggtccggtgacccctgattattcaactcctgagaagtggcctgttttcatttttgtggcacttgttctccagggaagtgtagtttggagatgagatgcggactctagtcagcctgagagcgtggaatctctggtctgtagccatctgggggctctgatgatctgatgacttctgttctgagataattctcctggccagataggttattatttgtgtgaagactcaaatgacctgtaggttaaagtatgaatggaagatacaaaactgcgagtacattatctatacggccggtggagcttttggcctggccttcccttcccaaccagaaacctggagcccggagtgtttcctactcagaagctgaggaatctcgcctggaaagaaggggctgtgcgacagaaaaggcaaggagtaggtaggcgaggagtacagcagagcggaaagggggccttgaactgcagtgagtggccagggactgacacacagaaggcacttaatgaatggtgtcaaatgaagggataagtgggtgatggatggtgaaaagtcctgagaatggggaaaagtatgaaaatgtggggggagggattttgaaatttgattaggtgccaaaaggggttcttaagaagctgggaacctctatgtgagagattagcattgtagacattctggaagaatccaggcacacagatgccaagggtgatcctttcagttgagaccacacagtctgtgatctacccttagactcaagtaatacaacactaatgaaatgcttttctcctaagagcaaagctgctggtgacagcttcaacatctgagaactgaatatatgtgtatttaggtatctaaggcaaacctatatatggatctagatatatcacatgtgatgtatatctaaatgcatatatatgtggtatacacatacgtgcacaagggaggctcatacacatgtatattatgaaggtactttgcagttgtgtttttattgtagagacttaatttatttaaagaaagagttgtctgtagtcctgtcctgtcctggagacatgaggggctgtctggtgtgaaggaaagtaggaggtacagaaaacaccgtatcgattcagttccatcatccgctgcagtgacttcggaaaacagaatccagcattcccggtcctcccagcctcaggatgaactgagtgaggagttgttctttgtgctgtggccagcgtgaccagggtgggctcctggcaatggccacgagaggtcaggagggggagctggcttagtggaaggtgttggggttcggtcggatcatcatcaccactttcttgagtgagtaagagcctcctcggaactcagcccagtagactccgtcctggtagcggctccggtaatggcccccgcggtaccagaccccgttgaggttggagtgggcacaggcgttataccaccagcctcccttctggtagtgggcacagtttcctgtgtagacatcatgatctctgtccagggtggtgaactgcttgccgttgtgccatgtaaaggagtcacccgcattgccatggtagcgccccagccgcagcttataatactcgctctcaggttccaggcggaaactggcgtattctgcaaagactttgcggccggaccagtcctccatggtcaccaggagtttgtagttgccttggttcgtcagccagtaaatgttctccaggcccagccagtattcgccatcaatgttcccaaacccttgcttgtacgtctcccagttcctgaagaagttaacagagccatccaggcgtctctggatgacggtccagcccccggggtcgtgtctctggtcgcaccacacctgcatgaggcggttggtgttttccggcttcaccaggtagatggagctggtgtcgtggccatcctccagggcctgcaggcagtctctccatgggcccgacggcttgtcggtggaagatgggaggctggtgagagtgggcatagtgggcagagggggtggcagcaccttcaggttctggtcactctggatctcgttggtagagatctggttgatgatgcggttgtaggtgggtggttggtagacccggggcggggcagcggggggtggctgggggacgggcctggccgagggcaccctctggcagtgctcctcaagctgcgcgatgatctctgattggttgtgggccagtgtggccaggtgctggtacttgtgctccaggtccttgtacttgctggccagctgcagcatgtcggctgtctggttcaggatcctgttctccagctgggagagctccaacgcgttgtcccgcttgcggatgatctcgtgcaggagctgcatgtagagctgcgtgacccgcgagttcatgttgcggctctccttgcgcagcagcttcacctcgctcacaatgccgccgtccacctccaccagctgctgcagcgtctcgatctgccgcttctgcttgagcagctcattgttgagcagctctagctcctgcttatgcactcggttctccagaagcacctcaggctccttggagttgacgcagatggcacccgtgacccgctgctggggcacaatgaaggtgtaggtgcacttgtcctgggactcgcccgcccgcttgtacctgtttaggtaaatgaactctcttggcgagccctcctcagtgccctcaaaaccgtcctcctggcctgcaacagctcccatggcagccagcagtccgagccaccagcatgtcacgcacagtggcctcatggtccttgcaaaatggtggttattctttgtgaatagaatctatgaaagcctcttccctcctgcttggctccggggcggctcctcacatgcttcaccctggccgtcagcggggcagcctgtccatggcctctggaggggttcctgagttgcaggccggtggctgccaagcagccctgcctcactgggctccactggctctgcctccacagagggctccggcagaggctggggccagggctggccaggggtcctgcggggctgctcacaaccttctttccctcacagtagcgtcagccgctgcctcagtgccacgctcggcaggtccagggcttggggtccatcctcaggccgtccgcagcagcctcatttgaactcccaactcctttgtggagcctttacatgccgccagaggaaactgtgagcacagcctgaccctggttggctgcaggcgcttctctccccgaaatcgtcgacccggga

SEQ ID NO: 59491 - DNA, 1556 bp, Homo sapiens
gattcgtagaccctagtccagagcggtggaattcctgcactctggcctgggcaacagagcgagactctgtctcaaaaaaagaagtcctggcgcggtggctcatgcctgtaatcaaaacactttgggaggccgaggcgggcagatcacctgaggttgggagttcgacaccagcctgaccaacatggagaaagcctgtctgtactaaaaacacaaaaaattagccaggcatggtggcacatgcctgtgatcccagctatttgggaggctgaggcaggagaattgcttgaacccaggaggcggaggttgaggtgagctgagatcacgccattgcgttccagcctgggcaacaagactgaaactctgcctaaagaaaaaaaaagaaaggcagctaggaatagtaaaaagaatattggttttagaactcatactgccacatcttgattcctgcacaatctcttattagttgtgatttttaacatctttgtggttgttttcacatttttaaagtgaagagatagcacgttcattgtagagatttggggattagcaataacacagtcaggtctctagcacatactatgtattcaatgattggtggctaatatttttccttcacaaaatttgggcctactccactggactcctcagggaagaaggagaaagggccaacccctgaagaagcaatacagaaactgaaggagacagagaagatactgatcaagaaacaggaatttttggagcagaagattcaacaggagctacaaacagccaagaagtatgggaccaagaataagagagctgccctacaggctttgcggaggaagaaaagattcgaacagcagctggcacaaactgacgggacattatccaccctggagtttcagcgtgaggccattgagaatgccactaccaatgcagaagtccttcgtaccatggagcttgctgcccaaagcatgaagaaggcctaccaggacatggacattgacaaggtagatgaactgatgactgacatcacggaacaacaggaggtggcccagcagatctcagatgccatttctcggcctatgggctttggagatgatgtggatgaggatgaactgctggaggagctagaggagctggagcaggaggaattggcccaggagttgttaaatgtgggcgacaaggaagaagaaccctcagtcaaattgcctagtgtaccttctactcatctgccggcagggccagctcccaaagtggatgaagatgaagaagcactaaagcagttggctgagtgggtatcctgataaatctgggcttgtcttcctaatgctacctttgttggtcctttcttccttaagtgccaagtgctgagctaaaggaggataactttttggggaagtcatgctgagggtggtagtgtgaccctgcctgaaaaaagggtctcttaccctcccagccctggctcaactctgaagaaggatcttgctacagaaggagcccttgggctcccttctctttgatagcagttataatgcccttgttcccaatagaactgggcagatggaaaaaaaaaa

SEQ ID NO: 59492 - DNA, 2833 bp, Homo sapiens
  misc_feature (1)...(2833): n = a,t,c or g
tttttttttgaggaattatctacagaacactgtttatttcaagtccaaaacacaaattactcatttttcttaacagaccgcataatttttactgcatgaatatttagggtttctctattcacaagtacagtttattactagactttaggcttgaatgattcatatatatagatatcagtttactacagaggacatgtacttttaacattttttgtttagaaaatattttacataaaaacacaaagcatttaccaacactccacaaccagtcttcagcaaagatttggctgaagataactttctacaaaacactccaagactgaatagaatgtagtattttacatactttagcttattgttgcagttaaaagctcccccttgtttgatggcttctgcatgtatctacaaagcagaagtcttaactggtgacctgttaaataacattgcctttttaagtgaacttgtccccagcccggaacctaagtagtcataatgaaataaagtaattgatatatgaggggcttttagtaagggctttttcaacctaataaaataataatttagtatctatcagtgcaatattcttttactgttttgtgttcaataaccacctggagtgctaattgtctagtataatcagttggcatcaaaatagaaagtaaaaagatgtacatttaatataccaattcttacctgaataatcttggatttctggagaatgttccacaaagtggaatttcttcctaaagttatgctgaatgtggtacaatgtgtacaacttggttaaccagtgcctgcttttcatttccaagatttttccttatcttgaatcaaatgcacaatcttacaactgtatcataatgcactggcttacagttctgtatataaagtccaactcaagcttattttggtttattgtacatgctttattaaaatggtacttgtatttacagtatctgcagaaagagtcccttccaaggcctcacacattcagacacatccatactgacacccactccacagccccatgcacccacaccagtgagatgtggagggtcagactcctaaaattaggcagctgttggggataagagttgatttgtttttcaatttttttgaaaacagaaaagcatgggggaatgcatttggccattacaatgctaattgagtttgtgtatattacatatatggcagttaacactgtaatattccttttacattctatatacacagaatgatatcaaggttttatggtcaacagaatattccaacttcagtcttaatgctgcttgtagtgatttctgaattcattataggggctttccctaaaaataattcaagtctatgttaagtgaaataaggcacaattaatattgatttgatttagggaaagggaaggaaagagaagggataaaaactggtttcaaatgatctttctgttggggaactagctctgacttaaacccacctgaaattccttctcctaatttccaaagatttctttataaagatatttttcttttccctgacaaagccaaaaagaaaagtttgggaattcacattttaatgtttcagtagcctgaacaactcaaattgatgtgtacccccacctcccctgatcaggtcgcctccctcacccatgttaaaataaaaacacagtatgtgacacaggagtcccttgatgtttcttgaggagatctgtacacttgagtagcaaatacatatctggttgtcttcaatatattttaaaaagaaagaaagagaaagaagaaaggaaagaaggaaaaaaggaaggaaagaagtaatattgtgactttcttgctctttaaaaaaatccctgtctccttcttttcaggatgatgaagccccactagacattacaaacaactgcaacaaatgagtttggcagcataaataatgtctagttattcaaatcttcatagtgagattaatttatcttgtacacaatttgttgaatgtttttcgcagcaggtgaatcaaacccaaagactccggacagtctgtgaaagggagtaagaattgcagttctgaaggcccctgactttggttgtttacaaagttcaatcctgtttattgtgatccttggtatcttcttcatctgtatattctgatggttcttctcctggttttaggagtctgcctacataatcatatttttctttaaactgcatttcccattctcgaacactctccatttgtactgcattcaaatctgagagatcatcatattcatctctaagtgcatctttatctaggcaaaatgtggccagtcctctggaggcatccctaccagcaaatattccatatggacccgccgggccgtagaacttgctgcctttggtcacgtcgaagactttcccattgaccgcgagcaggatgcgcgggttgcgggagccgtcgtactggcgcagctgctccaagctgaagtcccgcttcttcatgcgaggcagagaggtggcggggctctcctcgcccgccccggccccggcccccagaccccgccgcccccagcgcacccacagccggtaggcccccagcagcaccagagccaccagcgccacgttcagcagcatttccccgccccccgtcagaagcgccaacgccgccgccgcccagcctcccccttccgctgccgctcccgcgtcgcctggactctcgctgccgccgtcgttgctgctctcgctgccactccccagggtgcctagcttcacgtccccatcaccagccgccatcacacgaaatcgtcgacccgggattccggtccggtagtctgtgcgctagctntcagtatcaatntttcntgcgggggggg

SEQ ID NO: 59493 - DNA, 2039 bp, Homo sapiens
cgcggggagagtagggtgctgtggtctgagctagagggtgaagctggcggagcaggaggatgggcgagcagtctgaatgccagaatggataaccgttttgctacagcatttgtaattgcttgtgtgcttagcctcatttccaccatctacatggcagcctccattggcacagacttctggtatgaatatcgaagtccagttcaagaaaattccagtgatttgaataaaagcatctgggatgaattcattagtgatgaggcagatgaaaagacttataatgatgcactttttcgatacaatggcacagtgggattgtggagacggtgtatcaccatacccaaaaacatgcattggtatagcccaccagaaaggacagagtcatttgatgtggtcacaaaatgtgtgagtttcacactaactgagcagttcatggagaaatttgttgatcccggaaaccacaatagcgggattgatctccttaggacctatctttggcgttgccagttccttttaccttttgtgagtttaggtttgatgtgctttggggctttgatcggactttgtgcttgcatttgccgaagcttatatcccaccattgccacgggcattctccatctccttgcaggtctgtgtacactgggctcagtaagttgttatgttgctggaattgaactactccaccagaaactagagctccctgacaatgtatccggtgaatttggatggtccttctgcctggcttgtgtctctgctcccttacagttcatggcttctgctctcttcatctgggctgctcacaccaaccggaaagagtacaccttaatgaaggcatatcgtgtggcatgagcaagaaactgcctgctttacaattgccatttttatttttttaaaataatactgatattttccccacctctcaattgtttttaatttttatttgtggatataccattttattatgaaaatctattttatttatacacattcaccactaaatacacacttaataccactaaaatttatgtggtttactttaagcgatgccatctttcaaataaactaatctaggtctagacagaaagaaatggatagagacttgacacaaatttatgaaagaaaattgggagtaggaatgtgaccgaaaacaagttgtgctaatgtctgttagacttttcagtaaaactaaagtaactgtatctgttcaactaaaaactctatattagtttctttgggaaacctctcatcgtcaaaactttatgttcactttgctgttgtagatagccagtcaaccagcagtattagtgctgttttcaaagatttaagctctataaaattgggaaattatctaagatcattttccctaagcattgacacatagcttcatctgaggtgagatatggcagctgtttgtatctgcactgtgtctgtctacaaaaagtgaaaaatacagtgtttacttgaaattttaactttgtaactgcaagaattccagttcagccgggcgaggattagtattatttttaactctccgtaagattttcagtaccaccaaattgttttggattttttttctttcctcttcacataccagggttattaaaagtgtgctttctttttacattatattacagttacaaggtaaaattcctcaactgctatttatttattccagcccagtactataaagaacgtttcaccataatgaccctccagagctgggaaacctaccacaagatctaaagttctggctgtccattaacctccaactatggtctttatttcttgtggtaatatgatgtgcctttccttgcctaaatcccttcctggtgtgtatcaacattatttaatgtcttctaattcagtcatttttttataagtatgtctataaacattgaactttaaaaaacttatttatttattccactactgtagcaattgacagattaaaaaaatgtaacttcataatttcttaccataacctcaatgtcttttttaaaaaataaaattaaaaatgaaaagagactcaattgtaaaaaaaa

SEQ ID NO: 59494 - DNA, 1829 bp, Homo sapiens
aactgagacccttgtaagtgcgctggaattcggcgctgcaggtgtcggggcctcaaccttgcggagccgacagccatcgatcctcgggtggcctcgaggtggtggcagggccgccccctgcagtccggagacgaacgcacggaccgggcctccggaggcaggttcggctggaaggaaccgctctcgcttcgtcctacacttgcgcaaatgtctccgagcttactcacatagcatattggtatatcaaaatgaaatgcaaggaaccaaaaataacataattgaaggcagtaaaagtgaaattaaataggaagatcatcagtcaaggaagacccactggagaggacagaaaatgaagcagtgttttatcatgtgtatttcagcaggtcttcttgaaatttaactaaaaatatgactgctctctcttcagagaactgctcttttcagtaccagttacgtcaaacaaaccagcccctagatgttaactatctgctattcttgatcatacttgggaaaatattattaaatatccttacactaggaatgagaagaaaaaacacctgtcaaaattttatggaatatttttgcatttcactagcattcgttgatcttttacttttggtaaacatttccattatattgtatttcagggattttgtacttttaagcattaggttcactaaataccacatctgcctatttactcaaattatttcctttacttatggctttttgcattatccagttttcctgacagcttgtatagattattgcctgaatttctctaaaacaaccaagctttcatttaagtgtcaaaaattattttatttctttacagtaattttaatttggatttcagtccttgcttatgttttgggagacccagccatctaccaaagcctgaaggcacagaatgcttattctcgtcactgtcctttctatgtcagcattcagagttactggctgtcatttttcatggtgatgattttatttgtagctttcataacctgttgggaagaagttactactttggtacaggctatcaggataacttcctatatgaatgaaactatcttatattttcctttttcatcccactccagttatactgtgagatctaaaaaaatattcttatccaagctcattgtctgttttctcagtacctggttaccatttgtactacttcaggtaatcattgttttacttaaagttcagattccagcatatattgagatgaatattccctggttatactttgtcaatagttttctcattgctacagtgtattggtttaattgtcacaagcttaatttaaaagacattggattacctttggatccatttgtcaactggaagtgctgcttcattccacttacaattcctaatcttgagcaaattgaaaagcctatatcaataatgatttgttaatattattaattaaaagttacagctgtcataagatcataattttatgaacagaaagaactcaggacatattaaaaaataaactgaactaaaacaacttttgccccctgactgatagcatttcagaatgtgtcttttgaagggctatgataccagttattaaatagtgttttattttaaaaacaaaataattccaagaagtttttatagttattcagggacactatattacaaatattactttgttattaacacaaaaagtgataagagttaacatttggctatactgatgtttgtgttactcaaaaaaactactggatgcaaactgttatgtaaatctgagatttcactgacaactttaagatatcaacctaaacatttttattaaatgttcaaatgtaagcaag

SEQ ID NO: 59495 - DNA, 2783 bp, Homo sapiens
cgacccacgcgtccgcccacgcgtccgggcccagctgctgagaggagttgcctgagagtgacctttgcatctgcctgtccagccagcatggaaccaaagcggatcagagagggctaccttgtgaagaaggggagcgtgttcaatacgtggaaacccatgtgggttgtattgttagaagatggaattgaattctataagaagaaaagtgacaacagccccaaaggaatgatcccgctgaaagggagcactctgactagcccttgtcaagactttggcaaaaggatgtttgtgtttaagatcactacgaccaaacagcaggaccacttcttccaggcagccttcctggaggagagagatgcctgggttcgggatatcaagaaggccattaaatgcattgaaggaggccagaaatttgccaggaaatctaccaggaggtccattcgactgccagaaaccattgacttaggtgccttatatttgtccatgaaagacactgaaaaaggaataaaagaactgaatctagagaaggacaagaagatttttaatcactgcttcacaggtaactgcgtcattgattggctggtatccaaccagtctgttaggaatcgccaggaaggcctcatgattgcttcatcgctgctcaatgaggggtatctgcagcctgctggagacatgtccaagagtgcagtggatggaactgctgaaaaccctttcctggacaaccctgatgccttctactactttccagacagtgggttcttctgtgaagagaattccagtgatgatgatgtgattctgaaagaagaattcagaggggtcattatcaagcagggatgtttactgaagcaggggcatagaaggaaaaactggaaagtgaggaagttcatcttgagagaagaccctgcctacctgcactactatgaccctgctggggcagaagatcccctgggagcaattcacttgagaggctgtgtggtgacttcagtggagagcaactcaaatggcaggaagagtgaggaagagaacctttttgagatcatcacagcagatgaagtgcactatttcttgcaagcagccacccccaaggagcgcacagagtggatcaaagccatccagatggcctcccgaactgggaagtaaagagactcctgcattcctcctcccctcctgagggaagcccatggacaagctcagtccaggacctgtccacttctgtgacaaatcaacgggaaacagcccaggggtgggaagttttcatttgcaggggggtctgaatgtaactcaccatgtggtgtgcaaggttcccctgcattgtattgctcactgcagcccctctgcccctatccatgacccccaagcagatataacaagctgtgcagcctcagtaggctgcttgccctctccaggcctcagggcctcttctggaaaatgaagaaattcaactagtagattcctgaggtctccccagcttaaaaaaaaaaaatctgccccgtgattctaacactcgcagtagtgatagtgtatctagttgttctgctggtgtccttccttggctaagtcttggccttcagttatcttcaaatgtaccagaacctgagccaacgcctccctgtgaaactgttgctgatctgtagtacagtaccaggaagaaacctcttttgttctctttagacatcttctacttgctcttggccttgagatcgtgtaacaaaatgaaggagggctctcttctttcttcctcatcctactcaaaaacttcccgagagcagtggtggttttgagggttttgacttctattacttttggcagcctggaaagttgtgtcttctgggaaagagacccggggaggccaggagtagctgagggtcctttctgtgcccttaaaccgcccagaggagccctattccactctggttttaggctgatctgagagggtctccctttgttcctttctggagcatttctctaacgtttattacaattaggagggggaccccacatctgtgagattctgtttcatttgaggtttacagaaaaaaaaagtggccagatgtgttccccccatgggtgagaggcctgggcaactgcctggtgaatgtgtctcgcggcagctgcagcaagtggaggggctgaactactggccagctcactggatgatgggttaatacaacaactgcactgtaaggactcagagccacacagaacttctgagaggggctgttagcattgcgcagcatcttcagttctccagtaaatgatattgcgttcgtgcctcagctttaagcacaagtagcagcagctcctgcttgagttctgagggcatcatggccctatgattaaccagagtgatctaacctagactaaaattgggaacttatttgcaatttttgaccctgaccactaactagtgattcttctccaaaattgagaaagacagcacccattgaaacagatatgtgtgtgaaagtatatttttcaattccagatttttaattttaaggctccaggaaagaaaggagagtagaacatttttcctcattttatcaaatcctctcttgccctccctcaattcccctgtaacattcctgaagctgttcccactcccagatggttttatcaatagcctagaggtaaagaactgtctttttctctgattctttaataaattatctttatagaatatgcacaagtttttctacactcagtgttaaagtatttattaatgggaagtcaacttaatgttttgaaataaatatatgactctgtttaatgcaaaaaaaaaa

SEQ ID NO: 59496 - DNA, 1756 bp, Homo sapiens
cacccgcacccgtccccgccgccctccgggactgggtgcggcggtagggaaggccggggccaggagtacttccaccccggcgggggccagcccggccgctgcctaccaggccgacccccctcctcctgcgcatactccggctccgccgccacctcccccctgcggcgggattgcctgtcacggggagcccgcgaagttttacggatacgataacttacagagacagccgatttttacgacccagcaagaggccgagctggtacaatatcctgactgtaaatcgtccagtggtaatattggcgaggacccagaccacttaaatcagagctcgtctccttctcaaatgtttccgtggatgagaccacaagcagctcctggtagacgaagaggaagacaaacctacagtcgcttccaaactctagagttggaaaaggaatttctttttaacccctatctgaccaggaaaagaagaatcgaggtttcccacgccctagccctcaccgagagacaggtaaaaatctggttccagaacaggagaatgaaatggaaaaaggaaaacaacaaggacaaatttcccgtttcccggcaggaggtgaaggacggggaaacgaaaaaggaagcccaagagctggaggaagacagagccgaaggcctgacaaattaacttctacctttaaaatttaccacagactattaaaactaataatcaccatatgctgtggacaccacctattttctttgttggaaaggaccttacctgtgtttcaagctaccttcatgtcactgctcttgaggttttctgtgctttgagagggatttgggtgtttaaaaaagtttctagtatcacatagaagctgtccttgagctgtcctatggaagggtaatttgatactgaccttgtagctatatttttataatggtttttaatgtctgagctagtgatttgcctcaacaacgtaaacttcctaatgattagcacttaataattgcatataaaatgctttattaattaaacaagtgcacttgaacattttaatatttgtggtgagtaaattaaaaggagtttattaattaaaaaaaattatgtctgcagaatactttatattatttgattacaatgtattatttatggattttttattctttcctttataatgaatagttcgggtgcgttttgtttactcctaaaaggtttctttgcgtattttctaaatgtaatatctcggggaaaatattagaaaagcacgtattagctgaagaatgtaacttgtagtccagctctgcagcttccttaaacttaagaaaaagattgggccagtgacaagaatttaaagacaatgtccaagttgacaattatttttctatagtccatacaaattaaataatctggcaactctggcaaatcgccttgtaaaatgcgtctcattttttaacttgctttcgttttgaaccgcccttgtaatcgcctgaaatcgctagttctttatgcggtggctgccgctgtgttccgttattttcagtaggtgtcatatttatttgtattgcctttgttctgttcgccgctggttttaaaccagcttgctgtgtgcatctcagacgtcggttggtacgtcctccgctgttcttcaggaaagcgatagcctcacctatttgaaacaagccctgagaggaaacgcagaaaaacctgagtgtaaacaactccggaatgtcgctagctccttagtaaataaatgaatctctttctggaaaaaaaaaa

SEQ ID NO: 59497 - DNA, 2632 bp, Homo sapiens
ttttttttttttcatgaaaatatagtcatcaaatttattttcattgggatgccattttttgaagaattcctaagactaatgtttcttgacatgcaagagttagcattaatagcttacgttactataaatactgctgcttggaagcagtacaactgttttagagttttaagactacagactttcattactcaaatcttattcagtaaatgtaaaaatcagaaggttctgaacagctggttaggaaggtagccaagatgcaggaaagatgtctgcgcctccttttcaagggcagccaactcttgaacagtaggtgccaaaatatccacatggcctttatagcttccaccaccagcagcccttttctgaccgtaggtaactttcccatcaaattcatccactggtacctttatatccggctcaacctgagaaatggtacagttcaggtgttcttctatctcagatagtaactgcatctcgttgtaccatatggtacagcctccatcttccttgagtcttgtgttataacacccttttccacggctgctacatacatggtaccaaaccttttctttttctgttgccaccagggaaattgccagacccatcctttcagctcttcctactctgccaattcgatgtacgtagttttgcttttcatcgggcagagtgacatttataacataaggaacaccgtggatatcaattcctctagcagctacatctgtgcaaatcaagaatcttacatctcctttcttaaatctttccaagttttgctttctctcatgaggctttctgtcaccatgaagacaaacacatgagaactggtgtccttttttatcaggtcctcctccttgttgtataaagtactgctccaagttatcacagtcaattttggttctacagaagataattgcttgatccatcttatgttccttgattgcccggacagcatactcccctttcaggattttaatagcttcagaccacatctctggactattagcaccaggtcttgtgttatcttttgcatgtacatcatcagttctaatgtggctctttccaagcctttcccagagtctgtcagttttgggatttactgggacaacaacatggtgtacagtatctggaacagagtcttctccttttaagtcaacccatgtaggaaaatgcattatcttctcggacagtttctttacatcgaaagaatgcaaagtggcagagcaaacaatcacctgaagtctttttccatcagaggtaacctgaggaatctgattgtgcatcctatttataaaatcagaataaccttgagaaagaagcccatcagcttcatccaggaccaggaatctaacttgagataagttcagctttccagttgacaccaagtcatctagtcttcccggagtacctacaactatatctactccattttccaaaacagagagctgatcccgggctgcaacacctccaattatcagaagctcccttaatttaggattatcaatgtatttcttaaactgcttgatgttgttcaaagtttgttcagctaactcccgggaaggttcaacaatgagagctttcggagcattggggagaaactttgtttgtgtcacctgtgcattacctgagtgctgtgatttgacaatgtaaccatccggtgccttggaaagagcaacaaagccatcttttggtggaaacttaaattcctcttcaccgaagttaaatttcagttcagcattcttcaaaacacaggcaggaaagagggcttggtttttcatatgtggtggtatttcaaatgccagaccaagatcttttccatttttggagaacttgacatgtcccttatctatatccaggtaacatccaatggtatcatgcatagtgaattcctctccataattatcaaattgtttgttatgggatttctttcctgttccaccaaagccaaatccaaacttgtcagtacctaggtccaaagaggcctgcatggtagaccacccgaccctgcataacccttggtcatgacaggatacttcatagtagtgtttccctttcattaatcctttagtagctctacacccatgccattcctttacttctctgctttgacaacaaagaccatctgacccaattgcaaaagcagatcctctgtcatatgggttcatctgccatttgttcagcactgaagcaccagttttaattgttgtttttccttttttgccttcctgttggtctttcagagtttcataaactatctggataactggaatactaaaagcaccagttttgccacttcctgtttctgcagccataagtacatcacctcctcctaagatcaatgggatagattcagcctggatatcagttgggaggagccaatccatctcttccacagcttgtgcaatctcaggcattacacccatctcggagaaggccgccatcttcaccccgtcctccgcggcttcgcctgctcgctccctccctcccgactgacacggcgtggcagtggcggcgcgcgcttccggcccctggtcttcggcgttcggagtccgggcagggactcagccccgggagaacggttccgatggaaggaaaggcccgcgccggccccgccttatgcgcctgccgcacgaaa

SEQ ID NO: 59498 - DNA, 1103 bp, Homo sapiens
gcggtggaattcggttcaacttcaacatggccgaagcaagtagcgccaatctaggcagcggctgtgaggaaaaaaggcatgaggggtcgtcttcggaatctgtgccacccggcactaccatttcgagggtgaagctcctcgacaccatggtggacacttttcttcagaagctggtcgccgccggcagctaccagagattcactgactgctataagtgcttctaccagttgcagcctgcgatgacacagcaaatctatgacaagtttatagctcagttgcagacatctatccgggaggaaatctctgacatcaaagaggaggggaacctagaagctgtcttgaatgccttggataaaattgtggaagaaggcaaagtccgcaaagagccagcctggcgccccagcgggatcccagagaaggatctgcacagtgttatggcaccctacttcctgcagcaacgggacaccctgcggcgccatgtgcagaaacaggaggccgagaaccagcagctggcagatgccgtcctggcagggcggaggcaggtggaggagctgcagctacaggtccaggcccagcagcaggcctggcaggctctacacagagaacagagggagctggttgctgtgctgagggagcctgagtgaggagaccggccagccccagaagcagagggcagtcaaggtcaagagcctgtggtccagcatgcctggcctgggcgggctaccctctgagaacggcttgaaatggtgcccagtccatcagcagtgatggaatttgctggaggacttaggccagagcaagcctcactgccacttgtgcctttggggcacccttggggtttgggaaatacaccccctttaagattcctctgtttcttctacctggataattcttggccatgttctctcttctctaggttcaggtcagctctgcccctccgcccacaccgcgtgtggttccccagcccttttccctggccctggcttggagaatctgttttcaatctccactgattgcccccttgctggacacacccaggggcctttaccatgttctctccacatccgtaaataaacttccttcactacactgtaaaaaaaaaa

SEQ ID NO: 59499 - DNA, 1768 bp, Homo sapiens
ctcctaaggaactcattgtctatagcccttagccttgtggtttaggcaagaggccaggtcaggtgccctagagtgaggcaggggcttcagccaaagttgtgatcgcagcttctgaggcagttcctcagtggagtcagagtccgctgccacctgagctttccaccagatcttctttcctttccttgtgctttcctcaagctgcaggcttgatcccagcccacaaatatgagagaattctggaaagtgccctgagaaatgggttctgggtttttttttcatttttatttttttaaatgtcccaggctgccttcctgtcctcccatcctgcatcctgctttctgttccctggataccgtaggatggttttatttcagttcatgcacaaattagtctggacactgtggagtcataacaagagtgggatggaggttccagggccaatcagtttctttggagggaagcttgagaagtaggttagagcaatgcccacaaaagccactgcttctccttcccatccccagcaatgagctaagagccaacctcagccagagagagggtctttgatcacagagggtcagtcagtgggatgtgattagtggggtttgggggatgggagtcccagggttaaaccagagggcaaagggatcctctgagtcctggcttaagggaatggggtttcaagttgagggttggggacttagggcaggggagcagcaaggtgaggaaaacagaaaggctggcatggcgagcatccttggcaattcaacctgcatgctgttacactagcccccatttctgcctttgctcaatccaatggccaaagtcagtctatcctcagcagcaccttctgacacgatccagtggtagtgtccctcacctgtggccctcggggtgctgtccactgtttttcacagacccagccaccccccagctctggcccctggttcttcacacataccctgtcaggctgtaggaattgaactcactcttgactttgggaggttgaccaggccttggagagctccttgtggcaagaggttgggcttggtaggcatcgtagtagttggagcgatttctctggcatgagcaggaaaagcagaggatgattccagctatcagggagaacagggaagaaataatgcccaagtaaagagcctctccaatctcaaatttcatgctgtcaggcaccagtggtgagtagaagtcccgtaggatcccatgaagattccaggcaacaggaatgaatcccaggaggcctccaaggatgaaaaagactccacctgctaccgccactctgtctttggctcgggattcctggcagaagactgtgcatctcatgcccaccacagagataatgcaggccagggaggagattgcactggatgtcaccatcatggcctgggcagcctggatgtcagcgggcaggcccagaagggtgctatagatgtcacactgggtgatgcctgtgctgtgtgtggcacattccatccagaggcccttggagaagccaactgctgtcacaatgctggcaccgacataagaacttgttttccagctggggagcagcatggcaaccagtgtgcccaaaagccccagaaggcctaggatgtagcccacaagttggaggccaagagaggccatggcagacctctcagtagaagcgtcttcagggactgctcccttgtcttcaggctgaagctcttgctccttgaacacctctaatccctcatttcagagtctctctgccaggctgacttctcctggtgcc

SEQ ID NO: 59500 - DNA, 1833 bp, Homo sapiens
cccgccctctccccgtctctccccgcccctccccgtccctcccgccgaagctccgtcccgcccgcgggccggctccgccctcacctcccggccgcggctgccctctgcccgggttgtccaagatggagggcgctccaccggggtcgctcgccctccggctcctgctgttcgtggcgctacccgcctccggctggctgacgacgggcgcccccgagccgccgccgctgtccggagccccacaggacggcatcagaattaatgtaactacactgaaagatgatggggacatatctaaacagcaggttgttcttaacataacctatgagagtggacaggtgtatgtaaatgacttacctgtaaatagtggtgtaacccgaataagctgtcagactttgatagtgaagaatgaaaatcttgaaaatttggaggaaaaagaatattttggaattgtcagtgtaaggattttagttcatgagtggcctatgacatctggttccagtttgcaactaattgtcattcaagaagaggtagtagagattgatggaaaacaagttcagcaaaaggatgtcactgaaattgatattttagttaagaaccggggagtactcagacattcaaactataccctccctttggaagaaagcatgctctactctatttctcgagacagtgacattttatttacccttcctaacctctccaaaaaagaaagtgttagttcactgcaaaccactagccagtatcttatcaggaatgtggaaaccactgtagatgaagatgttttacctggcaagttacctgaaactcctctcagagcagagccgccatcttcatataaggtaatgtgtcagtggatggaaaagtttagaaaagatctgtgtaggttctggagcaacgttttcccagtattctttcagtttttgaacatcatggtggttggaattacaggagcagctgtggtaataaccatcttaaaggtgtttttcccagtttctgaatacaaaggaattcttcagttggataaagtggacgtcatacctgtgacagctatcaacttatatccagatggtccagagaaaagagctgaaaaccttgaagataaaacatgtatttaaaacgccatctcatatcatggactccgaagtagcctgttgcctccaaatttgccacttgaatataattttctttaaatcgttaagaatcagtttatacactagagaaattgctaaactctaagactgcctgaaaattgacctttacagtgccaagttaaagtttaccttattctcggccgggtgcagtggctcatgcctgtaatcccaggactttgggaggccaatgcgggcggatcacgaggtcagatcaagaccatcctgccaacatggtgaaaccctgtctctactaaaaaaaataaaaaaattagctgggtgtggcggtgcacgcctgtggtcccagctacttgggaggctgaggcaggagaattgcttgaacccgggaggcggaggctgcagtgagccaagatcacgccactgcactccagcctgggtgacagagcgagactctgtttcaaaaaaaaaaaagttgaccttattctctaaaagggctggctattcatatgatgaattgttaaggaaaacttaaagtggaagagaacacatgtgaagagactttgaaattatcaaaagaaaaaaaaaagaccagacaaaatctcatgtgccaataacttttcaaggtgcctttgttaaggaaattatatccacttaattactataatatataagactttatgaaaagcactttataaaattctaatttaaaaggtcaaaaaaaaaa

SEQ ID NO: 59501 - DNA, 1963 bp, Homo sapiens
gggctgcctcacttctgcctgatttgggaagcgctgcaaggacaaccggctggggtccttgcgcgccgcggctcagggaggagcaccgactgcgccgcaccctgagagatggttggtgccatgtggaaggtgattgtttcgctggtcctgttgatgcctggcccctgtgatgggctgtttcgctccctatacagaagtgtttccatgccacctaagggagactcaggacagccattatttctcaccccttacattgaagctgggaagatccaaaaaggaagagaattgagtttggtcggccctttcccaggactgaacatgaagagttatgccggcttcctcaccgtgaataagacttacaacagcaacctcttcttctggttcttcccagctcagatacagccagaagatgccccagtagttctctggctacagggtgggccgggaggttcatccatgtttggactctttgtggaacatgggccttatgttgtcacaagtaacatgaccttgcgtgacagagacttcccctggaccacaacgctctccatgctttacattgacaatccagtgggcacaggcttcagttttactgatgatacccacggatatgcagtcaatgaggacgatgtagcacgggatttatacagtgcactaattcagtttttccagatatttcctgaatataaaaataatgacttttatgtcactggggagtcttatgcagggaaatatgtgccagccattgcacacctcatccattccctcaaccctgtgagagaggtgaagatcaacctgaacggaattgctattggagatggatattctgatcccgaatcaattatagggggctatgcagaattcctgtaccaaattggcttgttggatgagaagcaaaaaaagtacttccagaagcagtgccatgaatgcatagaacacatcaggaagcagaactggtttgaggcctttgaaatactggataaactactagatggcgacttaacaagtgatccttcttacttccagaatgttacaggatgtagtaattactataactttttgcggtgcacggaacctgaggatcagctttactatgtgaaatttttgtcactcccagaggtgagacaagccatccacgtggggaatcagacttttaatgatggaactatagttgaaaagtacttgcgagaagatacagtacagtcagttaagccatggttaactgaaatcatgaataattataaggttctgatctacaatggccaactggacatcatcgtggcagctgccctgacagagcgctccttgatgggcatggactggaaaggatcccaggaatacaagaaggcagaaaaaaaagtttggaagatctttaaatctgacagtgaagtggctggttacatccggcaagcgggtgacttccatcaggtaattattcgaggtggaggacatattttaccctatgaccagcctctgagagcttttgacatgattaatcgattcatttatggaaaaggatgggatccttatgttggataaactaccttcccaaaagagaacatcagaggttttcattgctgaaaagaaaatcgtaaaaacagaaaatgtcataggaataaaaaaattatcttttcatatctgcaagatttttttcatcaataaaaattatccttgaaacaagtgagcttttgtttttggggggagatgtttactacaaaattaacatgagtacatgagtaagaattacattatttaacttaaaggatgaaaggtatggatgatgtgacactgagacaagatgtataaatgaaattttagggtcttgaataggaagttttaatttcttctaagagtaagtgaaaagtgcagttgtaacaaacaaagctgtaacatctttttctgccaataacagaagtttggcatgccgcgaaggtgtttggaaatattattggataagaatagt

SEQ ID NO: 59502 - DNA, 4702 bp, Homo sapiens
tttcgtgcttaaggaagtaaaatggcggacctggcgaacgaagaaaagcctgccattgctccgcccgtctttgtgtttcagaaggataaaggacaaaagtcccctgcagagcaaaaaaacttgtcggattcgggagaggagcctcggggggaggctgaggccccccaccatggcacgggtcaccccgagtcagctggcgagcatgccctagaacctcctgcccctgctggcgcctcagccagcactcctccgcctcccgctcctgaagcccagcttcctccttttccgcgagaactggcagggaggtcagctggcggctccagtcctgaaggcggagaagattctgacagagaagatggaaattactgccctcctgtcaagcgagaaagaacatcctctttaacccagttcccaccctcacagtcagaggaaaggagcagtggcttccggttgaagccaccaacgctgatccacggccaagcccccagcgcaggtctgccaagccagaagcccaaggagcagcagcggagcgtgcttcgcccggcagtgttacaagctccgcagccaaaggcgctgtcccagactgtccccagcagtggcaccaacggggtcagcctcccagcagactgcacgggggcagtgcccgcagcatcccctgacactgctgcatggagaagtccttccgaagctgccgatgaggtgtgtgcacttgaggagaaagagccccagaaaaatgagtccagcaatgcctctgaagaggaagcctgtgagaaaaaagaccccgccacacagcaagcctttgtatttgggcagaacttgagggacagagttaagctgataaatgagagcgtggacgaagccgacatggagaatgctggacaccccagcgcagacacgccaaccgcaacgaactatttcctccagtatatcagttccagtttagagaactcaaccaatagtgccgacgcctccagcaacaaatttgtatttggccagaacatgagcgagcgagttttgagccccccaaaattaaacgaggtcagttcagatgccaacagggaaaatgcagctgccgagtcagggtctgagtcctcgtcccaggaggccacccctgagaaagagtccctggctgagtcggcagccgcctacaccaaggcaacagcgcggaagtgtttgttggaaaaagtggaagtcatcaccggggaggaggcggagagcaatgtgttacagatgcagtgcaagctgtttgtctttgacaagacctcacagtcctgggtggagagaggccgggggctgctcagactcaatgacatggcgtccaccgatgacggcacactacagtcccgacttagtgatgccggacccagggggagcctgcgactgatcctcaacaccaagctgtgggcccagatgcagatcgacaaggccagcgagaagagcattcgcatcacagccatggacaccgaggaccagggcgtgaaggtcttcctgatctcggccagctccaaggacacaggtcaggtgtatgcagccctgcaccaccgcatcctggccctgcgcagccgcgtggagcaggagcaggaggccaagatgcccgcgcctgagcctggggcagccccatccaacgaggaggacgacagcgacgatgacgatgtcctggctccttcaggggccaccgcagctggtgctggtgacgaaggggacgggcagacgaccgggagcacatagcggccgggagcccggctgcacaccaggctgctgctttgtccgtctatccaccgcgcccacccgcccccaccccaccggcagcgtccaggtgcggggccgggaaccacacaccccactgggccggccacagtctggacccgcacgtcctgttcaaaagcagactcgggaactgcctgaatgtggtttgggacacgagacctcatcatattgatgagcgaacaaacaagaacatttcctccctcccctcctttgaattgaaatggcacattaagacttgtcacggcttctcactgggactggagacctcgttccttcaccccgcgtgtcgccagcctctgggtccagccagagcccctggcttctccgccacccacacccttcccaccctgctgtggggccctgcctttgtggggagcagccagccctctgcccctgcccagggctccccaactataggcctgggacccccgcccagcttggggggctgctcgtacgagtgtagacactgggcccattggacgtgctgttaactactatcttcatttcccacttcccctctctgattgggggtgtatattttacatctttttttctttttattttcgaaggctttgttttggtttcttaggttaagatgctctcgagcgttgagcaggcacagctctgtcgaggtccctgtcccccacctgtggttctggcctctgaggttgggggactacttgtttcccaccccaggttcctccaggccaagtcatggggtgatgaggagttggggccctgtctgtcctaggcctggagagtgcctgtctgggaaaaggtcactggacctggaagggtccccagggtcccctgactcccgtctccatctgtcacgtggttcaccatcatcaggcaccaggcgcaaactgcttcccgctgttggccatcccttccccagccacaggtgtccctgcccccaggacagtccagggccaggggcttctgtgagaggcagagggggaccctcaccaaatcttggtggaagagcccaggggctggtcccagaacaggcagtctcacaagcacgcagcacactggagtggacgcctgtgcccacccgagcctggagcatggccaagagccagcttgcaccacccacctgggaggccgaggaggaggtcccctgggcacagggcctctttgggacttcagaggaaatctcccagtcccactctcggagggttaagagaaggcctcctgcagctgtgccgtccacacctctaggtcgccagagccctggcccccagcccccagcaagcctgagcccgggaagaaccagaggccctcccgagagacccagtcacacgtctctgctttaagccttagccagctagtgacgagtacaacgagataacgcccatgtgttttggaacatttatgtaagattgtcatatgaaatgtatttgggaactacattaaacttttaactaaaaccctggcctctgcatgccccaggggcctcaggaagcccctgaccaggaacggcctccacctccccgggcgaggacctccagcagcctggggcctcatgctcccacccagcgtgtcaccagtgctggggtccagccacagccctgttctctccaccaccaccccgactttaacccccaaccctgctggaaggccccgccggtctgcccccgcccagagctgccagcctcgggccgctcaccagaatgtagatactgggcccgctggacgtgttacctgctatttttattccccatttgccatcttctgattgggggttgatgttttacagatttttttttcaaaggctttatttcagtttctgaggttaggatgcccctgtgcccctcgctccacacctgggcaggtctaaacttccttccaggatggcctccacacacagcctcccacctggggtcacctggcttcctgggggacccgcaagggaggggcagggagcagcagtccgggtgcggggatcgggggacctcggcgggggcatccacaggggctgcaagacctctggtcagcatggcgtgggtggggagagcgtttctccctggggtcctgagccagtgactcctgttaggacctttgtcccacctccgcctggtggaccggcagggacctggtctagccagtcctgcagcctccattcccccacctgcccctccccgctctgtggtgtggctgcccaggagagaaggggcccagggaagggaggtctccggcaggggtggggagtgacaggccagggcagcagggctgagccggagctgctcacagctgccaggcactggtcatcatggccacgaactcctcatccgtgttcatggaggcactcacgccgctgtagtagtcctggaattccgccagtgtgacctgcccgtccttctcagaggagtcgaagttgtccaggaagcggcgcagcacctcgtcctcggtccactccccactgcgcaccttggggtgggcacggccactgtacaccccgcggaggtcgtccaccgtcacgacgccgtccccactgcggtccagcttggcaaatgcagctgcgatgacagcctcccgggcctgggacatggggggccgcagcgcccgaaggaactcctccagatccagcgtcccgctgccattgcggtcccacttcctgcacacaccctctgcctccgcctggtccagcaccagcccgagtttggccagaccctgccggaactcatcagcgtccagggatctgctcccgtcccggtctagttggcggaaaaacctggccaggccctggatgcccgaggccccgcgggacaggcactgtgcccggagtttctccatggtggcatccacggcgtccatgcttggtctgggctctgggcagctggcctgcgtctgtcccagagtcctgcctgcggggccttgtgttagctgtgttgtgcctggggagactgttgctagtggacggacgcgtggg

SEQ ID NO: 59503 - DNA, 2426 bp, Homo sapiens
gtccccacttcccgtgtcgacccacgcgcccgcatagatgggggttgaaacagtaaacgcgaggagttgtttttgtttcgactcggctcacaagcgcgaccaagggggatgtgagctccttcgcgcgaaccaattagcgcagggcctgcgacagcacgggccaatggggcgccgactcggcgcaggaacaaggcgggggttcggggccggctgcagactctcaccgcagcggccaggaacgccagccgttcacgcgttcggtcctccttggctgactcaccgccctcgccgccgcaccatggacgcccccaggcaggtggtcaactttgggcctggtcccgccaagctgccgcactcagtgttgttagagatacaaaaggaattattagactacaaaggagttggcattagtgttcttgaaatgagtcacaggtcatcagattttgccaagattattaacaatacagagaatcttgtgcgggaattgctagctgttccagacaactataaggtgatttttctgcaaggaggtgggtgcggccagttcagtgctgtccccttaaacctcattggcttgaaagcaggaaggtgtgcggactatgtggtgacaggagcttggtcagctaaggccgcagaagaagccaagaagtttgggactataaatatcgttcaccctaaacttgggagttatacaaaaattccagatccaagcacctggaacctcaacccagatgcctcctacgtgtattattgcgcaaatgagacggtgcatggtgtggagtttgactttatacccgatgtcaagggagcagtactggtttgtgacatgtcctcaaacttcctgtccaagccagtggatgtttccaagtttggtgtgatttttgctggtgcccagaagaatgttggctctgctggggtcaccgtggtgattgtccgtgatgacctgctggggtttgccctccgagagtgcccctcggtcctggaatacaaggtgcaggctggaaacagctccttgtacaacacgcctccatgtttcagcatctacgtcatgggcttggttctggagtggattaaaaacaatggaggtgccgcggccatggagaagcttagctccatcaaatctcaaacaatttatgagattattgataattctcaaggattctacgtttgtccagtggagccccaaaatagaagcaagatgaatattccattccgcattggcaatgccaaaggagatgatgctttagaaaaaagatttcttgataaagctcttgaactcaatatgttgtccttgaaagggcataggtctgtgggaggcatccgggcctctctgtataatgctgtcacaattgaagacgttcagaagctggccgccttcatgaaaaaatttttggagatgcatcagctatgaacacatcctaaccaggatatactctgttcttgaacaacatacaaagtttaaagtaacttggggatggctacaaaaagttaacacagtatttttctcaaatgaacatgtttattgcagattcttcttttttgaaagaacaacagcaaaacatccacaactctgtaaagctggtgggacctaatgtcaccttaattctgacttgaactggaagcattttaagaaatcttgttgcttttctaacaaattcccgcgtattttgcctttgctgctactttttctagttagatttcaaacttgcctgtggacttaataatgcaagttgcgattaattatttctggagtcatgggaacacacagcacagagggtaggggggccctctaggtgctgaatctacacatctgtggggtctcctgggttcagcggctgttgattcaaggtcaacattgaccattggaggagtggtttaagagtgccaggcgaagggcaaactgtagatcgatctttatgctgttattacaggagaagtgacatactttatatatgtttatattagcaaggtctgtttttaataccatatactttatatttctatacatttatatttctaataatacagttatcactgatatatgtagacacttttagaatttattaaatccttgaccttgtgcattatagcattccattagcaagagttgtaccccctccccagtcttcgccttcctctttttaagctgttttatgaaaaagacctagaagttcttgattcatttttaccattctttccataggtagaagagaaagttgattggttggttgtttttcaattatgccattaaactaaacatttctgttaaattaccctatcctttgttctctactgttttctttgtaatgtatgactacgagagtgatactttgctgaaaagtctttcccctattgtttatctattgtcagtattttatgttgaatatgtaaagaacattaaagtcctaaaacatctaaaaaaaaaa

SEQ ID NO: 59504 - DNA, 1612 bp, Homo sapiens
cccacgcgtccgcccacgcgtccgggccacacgcctcagccagccccggcaagggcctatcaggggtgggtcggggcatccgagcgggtttgacggaaggagcggcggcgacggaggaggaggatggaggcggtggtgttcgtcttctctctcctcgattgttgcgcgctcatcttcctctcggtctacttcataattacattgtctgatttagaatgtgattacattaatgctagatcatgttgctcaaaattaaacaagtgggtaattccagaattgattggccataccattgtcactgtattactgctcatgtcattgcactggttcatcttccttctcaacttacctgttgccacttggaatatatatcgatacattatggtgccgagtggtaacatgggagtgtttgatccaacagaaatacacaatcgagggcagctgaagtcacacatgaaagaagccatgatcaagcttggtttccacttgctctgcttcttcatgtatctttatagtatgatcttagctttgataaatgactgaagctggagaagccgtggttgaagtcagcctacactacagtgcacagttgaggagccagagacttcttaaatcatccttagaaccgtgaccatagcagtatatattttcctcttggaacaaaaaactatttttgctgtatttttaccatataaagtatttaaaaaacatgaattgagtttctgtagatttctagttctcaactttagcctgaacgccaacacttgaaggtgtttttcatcctctgtatgttgaaggtggttatttgtatgtaggaacaggactgccatcccagctttgcatgccaaagaaataaagaacacactttaaagggcaaactgaagagatgagcgagcaaaggtgcccttcaggtctactgaaaagttagagtacaaaacaacactgttgatctggacaaaagaagaaaaattaccctttttgcttgtgttgtgacaacttcatttaatatggtttaaagatttatgagactgtcagctaaaagtcttttcacaagaatgtcaacagagaatggcatctcaaaatatatatatttctttgcacaatttgtgaaaccttataagccattttccccaggtacaatgtagttcctgctgatagaaaggaaatattttgtcaagagctttcatttaaaagctactacctccacaatcacccccaaacccagaaaatccccactggctcttgccagtctggttttcgtattgcagttattccaattgtatttgatctccctgataacgtattttcatgggtttgggtagaagatgctaatcagattagaagcaggaatagttatttgctgtctgtgaaattgagccttttggtgcgccacgtggtgccagatcaacacttctatccctctgcactgaccacgttgtgaactgggagacccaaatgcaagccatttcatggacatagcaatatacaaccaaactctgttccttggagttatattgtaaactcttgcaggtgggagagcagttcacctccttagctctgtttgccagctcttacagggtaaaataaacctgggcaatttatcctcaaaaaa

SEQ ID NO: 59505 - DNA, 1758 bp, Homo sapiens
  misc_feature (1)...(1758): n = a,t,c or g
ttttttttttttagattcatctttttaatgacatcctaaaattcagaggaggggccagcgggacctctgggctcagcggctgtgaaggagggacccgcaacacccgctaaggcaggtaattgcaagaaggcactcgcgagggggacttcaagcccctcttctatttcttcatataaaatcagggggatggggaaagctccaagggcgagggaagcagagagagtttctctcccagcctatggaataaggaagaggtgaggaaggggtgggtgctgggagcaagaaactgccaagtccaggacctgccctcacacagacacacacagcccgcacctgccctccctctaaaatctgcatccggggctgtaaggaagccccgtgttcaagcccccatctcttctcccttctagctggtacgaagttggtaatcgccactctgggtgatgtagcgaacccagggcagggcctggtaaccacttttctcaatgatcttcatgtatcggacctggatcccagagacggtgaagtaggggatctcaaacttgaccccgatggggggccggccctccacctcttccttttccacactggggaggccaaagtgggctcgcatcaagtactccttgccccccgggaaagacttaatactccaaatcacgacgtttctctccggcacatacttggcgctgcccacactggtcttgaatctgggggagtcggcatcgctgggtacaggcacagatatctccacaccgttggccactgactgtttcttaaactgccccttggccttgaccatgatctccacgcggctgtgggagaacttctcaatgacagactcaatccagatcagtggcttgacctgggtgctgaggcggtatgacatgagctcaaagtcaccatcaggcgggatgaaggagatggtgcggtcgttgtcaaagcgagagagccgcacgcactggtggaattttacatcctccagctctactgatttgttcttgctgcggccagtgagctcgaagagcacgcggtcattgaggcccagccgcagctctggcattcctgacagaaacaccttgagcttgatggtaccgacgatttcgctcagaaggacgctgccgttggcattgaccagcaggttgacagactctatgacatcaatgaagacctcgttcttcttatacttgataccctcggagcgccaggacacagcgttggtgacagtgggtggcacccgtgacttgcccgtctccagcttgttgctctgctgagtgatgtactcctgcaggatcttgctgtcggtggtctgcgggaagccaaagtccatgagctcgtccagcaactcgtagacgatgacaaagttgtcccggatgctctcctcctccagctccttgaagtattcgcagaatacctctattgtcttatacaggaaggagtacaccagggaggcattggcattcttcgatgtggtggccaccaagtagaggttgctgtgtttgatccataggaagtggacctggccgtggctcagcagcggggccagggcgccttcctcctcccgctgtaccagcaaaggcatgaagtgctcaatcttgctcatggccacatcgcccttgtagttgcggctgatcaatggcttgcccttaacgtccagaatgaagacagccgaggcggacatggtggcggccgaaggacttaggagtcggggagggagcgccgggaggcgatggcggtgccgcttccnncttcagattggta

SEQ ID NO: 59506 - DNA, 1666 bp, Homo sapiens
gcacgaggtgaaaatgggtgtccctgctgcctcttagcaacaagaggggtcaagtgacacaaccagctgactcccgtagaggaagacactgtggaggccagttctggagctattgcagcctcggttgcccggccggggacccgagccgaaaagttatcgtcagaatgtcgggcaaagaccgaattgaaatctttccctcgcgaatggcacagaccatcatgaaggctcgtttaaagggagcacagacaggtcgaaacctcctgaagaaaaaatctgatgccttaactcttcgatttcgacagatcctaaagaagataatagagactaaaatgttgatgggcgaagtgatgagagaagctgccttttcactagctgaagccaagttcacagcaggtgacttcagcactacagttatccaaaatgtcaataaagcgcaagtgaagattcgagcgaagaaagataatgtagcaggtgttactttgccagtatttgaacattaccatgaaggaactgacagttatgaactgactggtttagccagaggtggggaacagttggctaaattaaagaggaattatgccaaagcagtggaactactggtggaactagcttctctgcagacttcttttgttactttggatgaagctattaagataaccaacaggcgtgtaaatgccattgaacatgtcatcattccccggattgaacgtactcttgcttatatcatcacagagctggatgagagagagcgagaagagttctataggttaaagaaaatacaagagaagaaaaagattctaaaggaaaaatctgagaaggacttggagcaaaggagagcagctggagaggtgttggagcctgctaatcttctggctgaagagaaggacgaggatcttctatttgaataatctttcctgttctggttctttgagaaaccctaacactggcttcattttaattcacagtgtgtaggtttgatttgtgtggctattgattttttggcctaagaatttcactggttgtaaaatttacctagatgtctatttatgggattacttttgcagaatcataatttagcaaccatttatcatggatgaaagagatctgtaaaacctgcccaggaacttacagaatttactttgcagaagcgttatcatactccatttacatctgtgttacacgtgatctgcttaccaagcatattaggaaatacctcttaggaagcattagcggtctcaggccaattactgtggagcagctttcattcctacccacttgcaaaccttggcgctgttgtctgagattgctgcagccattcttgttaccatggtacttctcaaactttgtgaaaacctgcacttttccttgcatgacaggttcctgtcttgtctgtcatgggagccattctgccaatttaaatgcgactgtggtataaacagtaaaatgatttaaaagtaagtcattccgtttttattaatttactgttaagtcatgttctcatgctcagatcagtagtgtcagccagagctttctctgcagacatgtaggaagtgggtagctatttttcccactccatgtattagagttttacaaaaaggcttacttttgagacaactgttgcattttggggtactaataaatgattgccgatgagttaaaaaaaaaa

SEQ ID NO: 59507 - DNA, 1504 bp, Homo sapiens
cccggtcgaccacgcgtccggaattttgatctaaatagcaaatctattctgcaggaatttttttgcacccgaagtattcagatccctgctaatagatcaaaaacagctatgtctaaatgtccaatatttccaatggccaggagtattagtacttctggccccttggataaggaagatactggaagacagaagctcatttctacaggcagcctgccagctactttacaaggagctacagattctttaggtttagaatggcaccttccaagtcccgatcctgtcactgttccgtatcttagtcctttagtggtatggaaagaacttgaaagcttattggaaaatgaaggtgatcatgcaataacagtagcagactttgtggaccatcatccaattgttttttggaacctggtatggtatttcagacgtcttgacttgcccagtaacttacctggattgattctttcttctgagcactgtaacaagtattcaaagattccccgccactgtatgtctgaagatagcaaatatgttttaatacaaatgttatgggacaatatgaagttacatcaggatccgggacagcccttgtacattctctggaatgcacacacccaaaaatatccaatggtccatttattgcaaaaaagtgataactcatttaaccaggaactgttgaaaagtatggtaaaaagcattaaaatgaatgatgtctatggaccaatgagtcagattttagagacactgaataagtgtccacattttaaaagacagaggagtttatacagagaaatactatttctctcacttgtggcactgggaagagaaaacattgatatagatgcttttgataaagagtacaagatggcatacgatcgtctcacacctagtcaagtcaagagtacacacaactgtgatagaccaccaagtacaggggtgatggaatgtcgaaaaacctttggagaaccttatctttaagatgtatttgtatgtgtaaacattcaatgtatattgtatagtcagtgtataaaataacacttttagactctaaatattttttcttcaatttttgaaaatacaatttgtaaatggtccaaaggactccagaccagcttatgtaccagaatgtttgaagaagagaatagtgaccaagtggggagaaaagcccacttggtttctcatttctttttccttcttctttaactcccctgtaataggaaataaagtatttttgtgatgaggaaatccctaaacaaaattagttgccataaaatatgacaactgctttatggtttcttttggaagagacagattgaaaaatcatgaatggaatcctaaacagaaatgtcagatgaacgtatttcctgttttcatagactattcaaatgttttgaccatgaagttgtattatacatattttaaattgtttatagtaagttgatatttttttaatttttaaatttaatatagcaaacttaaaatgaatttaaacttaagcaaaaaaaaa

SEQ ID NO: 59508 - DNA, 1398 bp, Homo sapiens
tttttcactttacaagaagttcactcttattcatggaggcatcatgctgacaggactggatccaaggaaaatgctagtgactttcccaacttcattccccaatcaaagaggacagtttctggtttgccactggtgagtttattacacgactaaagttcaaataaaaaaataaaaaccaaaatcttggcagggaagctagagccagaatcaggaaaatctgcttccttgtccccagactccctggccaagcccagctccactaactcatcttgactcgatcaagttcctcatcaagacttgcatctgtaccctggacatctctgctgctcccactggagagtgagtctggagtccctggcactggggctttggtgagggctccatatacacccatggcctgagccaccatgctggtgacatcgccagggttggagggcagtaggatagtgttggagtccttggccagtttggagaacgcgctgacatactgctcggccacagtcagtgaagctgctgcatctccattatgttgtgtcagagctgcagccaggattcgaatagcttcagctttagccttggccttcgccagaactgcactggcctctcctgctgcctgatttatctgttcagccttttctgcttcggaggccaggatctgggcctgtttcttcccttctgccacattgatggccgactctcgggtcccctcagactctagaactgtggcccgtttccgccgctctgcctccacctgcatctgcatagactctttcacccggggtggcacatggatatccttgatctcataacggaggcagcggataccccagcagtcagcagcttggttgatggcatccacaatgctggcattcagggactcccgttcccggaagactttgtccagagagagtttgccgagctctgatctcatggttgtttgagctagctgggtgacggcatactcagggtcctccacaccgtagcttgccttgtaagggtccatgatgcgcaggtaaaggactccatcgatttgcagagttacattgtcgagagtcacagccgactgctcaggcacgttgatgacaatttccttgagactctgcacatatcggatccggtctaacacagggatgaggatgttcaaaccaggctccaggatccggtggaatcggcccattcgctccaccacccaggcctcctgctgcggcacgaacagtaccacggtgtttcggggcaatccagaggaggcgcggcgcggagcgcggccagaagccagtagagagcccctcagcaaaagggccccagtgccccgcgccgcgcgcgccagcatttcccaccgccgcagcgacctccggaaccaacgagacgagcggagcggtcgctcccagaagcctaccc

SEQ ID NO: 59509 - DNA, 1437 bp, Homo sapiens
aaccggtgactttcagaggccgataaggcgggacccaacttgtatataaggggcagctcatgctgctgctctgcaccttcctcccgtcttgccttctccctcgagttgggacccgggaagaaccatgaagtggctgctgctgctgggtctggtggcgctctctgagtgcatcatgtacaaggtccccctcatcagaaagaagtccttgaggcgcaccctgtccgagcgtggcctgctgaaggacttcctgaagaagcacaacctcaacccagccagaaagtacttcccccagtgggaggctcccaccctggtagatgaacagcccctggagaactacctggatatggagtacttcggcactatcggcatcggaactcctgcccaggatttcactgtcgtctttgacaccggctcctccaacctgtgggtgccctcagtctactgctccagtcttgcctgcaccaaccacaaccgcttcaaccctgaggattcttccacctaccagtccaccagcgagacagtctccatcacctacggcaccggcagcatgacaggcatcctcggatacgacactgtccaggttggaggcatctctgacaccaatcagatcttcggcctgagcgagacggaacctggctccttcctgtattatgctcccttcgatggcatcctggggctggcctaccccagcatttcctcctccggggccacacccgtctttgacaacatctggaaccagggcctggtttctcaggacctcttctctgtctacctcagcgccgatgaccagagtggcagcgtggtgatctttggtggcattgactcttcttactacactggaagtctgaactgggtgcctgttaccgtcgagggttactggcagatcaccgtggacagcatcaccatgaacggagaggccatcgcctgcgctgagggctgccaggccattgttgacaccggcacctctctgctgaccggcccaaccagccccattgccaacatccagagcgacatcggagccagcgagaactcagatggcgacatggtggtcagctgctcagccatcagcagcctgcccgacatcgtcttcaccatcaatggagtccagtaccccgtgccacccagtgcctacatcctgcagagcgaggggagctgcatcagtggcttccagggcatgaacctccccaccgaatctggagagctttggatcctgggtgatgtcttcatccgccagtactttaccgtcttcgagagggcaaacaaccaggtcggcctggcccccgtggcttaagcctaagtctcttcagccacctcccaggaagatctggcctctgtcctgtgcccactttagatgtatctaattctcctgactgttcttcccaggggagtgtggaggtcttggccctgttccctgtcctaccaataacgtagaataaa

SEQ ID NO: 59510 - DNA, 2022 bp, Homo sapiens
cgttgctgtcgggcttctttcacacgggttgcttcggaggaatccgccgtgcaaatctgtccgcccccttggccactgatcccccgaagagcttctgtcgccgctctaggaatacagacattgaagtttgggacaagatatttatctaacttctgtgtcaaaattagcgacctgctatggcaatgaagaaagaaactgaatttgtcattttcacctgaagaaaaatgatagacaaaaatcaaacctgtggtgtaggacaggattctgtgccctatatgatttgtctgattcacatactcgaagaatggtttggtgtggagcagttggaggactatttgaattttgcaaactatctcttgtgggtttttacaccactaatacttttaatacttccttactttactatctttcttctctaccttactattattttcttacacatttataagagaaagaatgtattgaaagaagcctactctcataatttatgggatggtgcaaggaaaacagtggcaactctgtgggatggacatgcagccgtttggcatggttatgaagttcatggaatggaaaaaataccagaagatggaccagcacttataattttttatcatggagctattcctatagatttttactatttcatggctaaaatatttatacacaaaggcagaacttgccgagtagtagctgatcactttgtctttaaaattccagggtttagtttattactggatgtgttttgtgctctacatggaccaagagaaaaatgtgttgaaattctgaggagtggccacttgttagctatctcaccaggtggagttcgagaagccctaattagtgatgaaacttataacatcgtatggggtcatcgcagaggctttgctcaggttgcaattgatgcaaaagtgcccattattcctatgtttacacaaaatattcgagaaggatttagatcacttggaggaacaaggttatttaggtggctttatgaaaaattccgctatccatttgctccaatgtatggaggttttccagtgaagttacggacctatttaggcgaccccattccgtatgacccacagataacagcggaagaattagctgaaaagacgaagaatgctgttcaagctttgattgataagcaccaaagaataccaggaaacattatgagtgctttgttagaacgttttcattgataacaaagggtcaactagaagatgatttagtacatttatattaaatgtttgtatctaaggtactgtcttctgaattttgtaggtcctataattagtattttttaaaaaaatcatgttaataagcatctttcacagaattcgtttctttaaaatagtcaattttgtttttgcaattgggtcaaatactaacaaattacacacctagtaattcaaaaaaagatgtcttatttgtaaattcctaacaatttatgctaaacatatagattcttaagtttattaataacagcagtttaggttaaacaaacattcctggataatgcgttaaatttctgtatctgtcgccctgagctgattttgaaagatggtataagctaggggttagtatagttgtttaagttagaaaaaacatgctgttgtctgcccctcattcccttcatgaccttgggcaagtcacgtaatgtttttgtgcctcaacaattcactttttaaaaacatgatcgtatgatgaatgatattattttgttatttatatttactgtgattgataactgttgaaccaaaataataaaataattaatttaaacaatgtcaaaatcctttagcagttatgtatatattttctccattgtgtgtttaaattgtcatgtccagttgccaagcacaatgaaaaagatgtattattttttaaattgaataaaaaattaggaaaaataaaatttctaattattatttttagtatgatatttttaacaagagtctataggcaaacaatatagggtgtgctgtgcattggtcagccctatactgtggtcttaataatgcc

SEQ ID NO: 59511 - DNA, 3215 bp, Homo sapiens
tttcgtcgcggagggaggggcggggcgggctccggtgtcagcgaccaagccgcaggtggcggcgagcgcggggctcggcccgagctcaggagatggggaaactgaggcacggagctggacagtgactcagacaccaggagctgcctggagtggagctgagagctcaggtctgggctcagccagtccagagtgcaaatctactgtcccttcctggctgtgtgatcttgacaggcactggacggggcctgcaggggtctccacagagaccatcaggatgtcgtattttggggagcatttttggggcgagaaaaatcatggctttgaggtcctgtaccacagcgtgaagcaggggcccatctccaccaaggagctggcggacttcatccgggagagggccaccatcgaggagacctactcgaaggcgatggcgaaactctccaagctggccagcaacgggacccccatggggaccttcgccccgctctgggaggtcttccgcgtctcctcggacaagctggcgctgtgccacctggaactgacacggaagttacaggatctcatcaaggacgttctccgctacggcgaggaacagctcaagacccacaagaagtgcaaggaggaagtggtgagcaccttggatgctgtgcaggtactctcgggcgtcagccagctcctgcccaagtcccgcgagaactacctgaaccgttgcatggaccaggagcggctgcggagggagagtaccagccagaaggagatggacaaggcggagactaaaaccaagaaggcggcagagagcctgcggcgctcagtggaaaaatacaactcagcccgagctgactttgagcagaagatgctggactcagccctgcgcttccaagccatggaggagacacacctgaggcacatgaaggcactgctgggctcatatgctcactcggtggaggacacgcacgtgcagattgggcaggtgcatgaggaatttaagcagaacatcgagaacgtcagcgtggagatgctactcaggaagtttgcagagagtaagggcacaggccgggagaagcctggacctctggacttcgaggcatacagtgcggctgccctgcaggaagcgatgaaacgtttgcggggagccaaggcctttcgccttccaggactaagccggcgggagcgggagccagagccacctgcagctgtagatttcctggagcccgattcagggacatgtccagaggtggatgaagaaggtttcactgtccggcctgatgtgacccagaacagcacggccgagccctcccgtttctcgtccagcgactccgacttcgacgatgaagagccccgcaagttctatgtgcacatcaagcctgccccggcccgggctccagcctgcagccccgaggcagcagcggcacagctcagggccaccgcgggcagcctcatccttcctcctggcccagggggcaccatgaaacgccattcttcacgggacgctgctgggaaaccccagagacctcggtctgcccccagaaccagcagctgtgcagagagattgcagtcagaggagcaggtgtccaagaacctctttgggccgcccctggagtcagcctttgaccacgaagattttacaggctctagcagcctgggcttcacctccagcccctcccctttctcctcctcgtcgcccgaaaacgtggaggattccggcctggactctccgtcccacgcggcacctggcccctccccagattcctgggtcccccgcccaggcaccccgcagagcccgcccagctgtagggcgccacccccagaggccaggggtatccgggcaccgcctctgccagactcgccgcagcccctcgcctcgtctccaggcccctgggggctggaggccttggccggaggagacctgatgcctgcacctgctgaccccacagccagggagggcctggcagccccacccaggagacttcgctctaggaaggtgtcctgccctctcacacgtagcaatggggacctgtctcgttccctgagcccctccccactgggctcttcagccgccagcactgccttggaacggcccagcttcttatcccagacaggacacggagtctcccggggtccgagccctgtggtcctgggctcccaggatgccctgcccatagccacagccttcacagagtatgtccacgcctacttccgtggccacagccccagctgcctggctcgagtaactggggagctgaccatgaccttccctgctggcatcgtgcgtgtgttcagcgggaccccaccaccacctgtcctcagcttccggcttgtacacacaaccgctattgagcacttccagcccaacgccgatctgctgttcagtgacccctcccagagtgaccctgagaccaaagacttctggctcaacatggcagctctgaccgaagccctgcagcgccaggcagagcagaaccccactgcctcctactacaacgtggtgctgctgcgataccagttctcccgcccgggtccccagtctgtgcctctgcagctcagtgcccactggcagtgtggagccaccctcacccaggtctcagtggagtacggctaccggcccggtgccacggctgtgcccacaccactcacgaacgtccagatcctgctgcctgtgggggagcctgtgaccaacgtccgcttgcagccggctgccacctggaacctggaggagaagcggctcacttggaggcttccagatgtgtccgaggcaggcggttctggccgcctctctgccagctgggagccgctctcagggcccagcacacccagccccgtggctgcacagttcaccagcgaggggaccactctgtcgggcgtggacttggaactggtgggcagcggttaccgcatgtcgctggtgaagaggaggtttgccacagggatgtacctggtgagctgctgaacccgcaaatgctgctgccccagctctacactgcgccctggtgctggctgaccaccccctgccctcctgccggaccctggggcctcccaccccagcctccctgaggcccatactccacggagaggagccccatgcccagcctggctgagcccgagattcgctcctccccctcatgccaaccccacacaggtcccggccttttaatgttctttgaataaacactttattttctaataaaataaaaaaggaaaccttaaaaaaaaaaaaaagg

SEQ ID NO: 59512 - DNA, 2156 bp, Homo sapiens
ttcgtggcttcccgcgccggacccagtacctcggctccccggggccggaccgaggccgcaagcagcgccgcggggtgtggggcggacccaggagatgaaatgacaacgtcaaccctccagaaagccattgatctggtgacgaaagccacagaggaggacaaagccaagaactacgaggaggcgctgcggctgtaccagcatgcggtggagtacttcctccacgctatcaagtatgaggcccacagcgacaaggccaaggagagcattcgagccaagtgcgtgcagtacctagaccgggccgagaagctgaaggattatttacgaagcaaagagaaacacggcaagaagccagtcaaagagaaccagagtgagggcaagggcagtgacagtgacagtgaaggggataatccggagaaaaagaaactgcaagaacagctgatgggtgccgtcgtgatggagaagcccaacatacggtggaacgacgtggccgggctggagggggccaaggaggccctcaaagaagctgtcattttgccaatcaaattcccacacttgttcacaggcaagcgcaccccctggcgggggattctgctgttcggaccccctggcacagggaaatcctacctggccaaagccgtggcaacagaggccaacaactccaccttcttctctgtgtcctcctcagatctgatgtccaagtggctgggggagagtgaaaagctggtcaagaacctgtttgagctggccaggcagcacaagccctccatcatcttcatcgatgaggtggattccctctgcgggtcccgaaatgaaaatgagagtgaggccgcccggaggatcaaaacggagttcttggtccagatgcagggggtggggaataacaatgatgggactctggttcttggagccacaaacatcccatgggtgttggattcggccatcaggaggaggtttgaaaaacgaatttatatccccttgccggaggaagctgcccgcgcccagatgttccggttgcatctcgggagcactccccacaacctcacggatgcaaacatccacgagctggcccggaagacggaaggctactcgggcgcggacatcagcatcatcgtgcgggactctctcatgcagcccgtgaggaaggtgcagtcggccacacacttcaaaaaggtctgtggcccctctcgcaccaaccccagcatgatgattgatgacctcctgactccatgctcaccaggggacccaggagccatggagatgacttggatggatgtccctggggacaaactcttagagcctgtggtttgcatgtcggacatgctgcggtctctggccaccacccggcccacggtgaatgcagacgacctcctgaaagtgaagaaattctcagaggactttgggcaagagagttaaaagctgcttcacttgggcaatggtgaaggtgggaggttgattggggcaaatccaggcactccccatgtcaacagccagacagggctccagggcttgtcccagtcaatacagagttccctctgctgtctggccgtctgccagggagccagaaggaagggccttgcagccacagagacactccactgccctggggcacacagtggacactgctcttcctacttcctcctctcctggatgctcatcagctccttctgcctcccccccttttttttccatcttttgttcccctaaattaatgctgcttggattttcatcttatttataaagataaaatcacctggaagtgtcaaggagtggggcggggtggcgggggagaagcagccgtgctgccaggtcacccagacctccagacagccggctagccccactgcccgttccttttacgcccaagttttgctccttgagagcagattggctgatgcccctgcaaccccagcccaagctctgcctcaaagaccgagtgacataagccattcccaccctcctaggttcacatccagggctgtgtcttccttgggggaggagatggtgtcgtttaaatcagggtaaggcagtcaggcgggtgttcaccactgccttttcttcctctgagcgtgagaacactgaacccagccactgcccctgggtccctgtcctggaaatggtctaataaatccttttcccttcttgagctaaaaaaaaaa

SEQ ID NO: 59513 - DNA, 2137 bp, Homo sapiens
tcgcttatactcattcagcaaataattattgaactccatttacgtaccagacactgttaattgatgttactcacttttcctttcagaactaaagccttatcagttgtgtgttgagataggaagaggagactttttccacttcttgtgtttcctacagttactcccttcccaaactgataaagtatacagtttataaaaatcttaaaaactcattcttactggtaaattcattttaataatgaggggaaaaaactttagttattaaaaacaaaagaatgaatacacatacacacactaaatgtggcagatgtttccaggagagattagcaacagagaggccacatgatcaaataaaatttacacttttgatgggattgtcccctcgcggccacccaagtgtttgtggaagaaagtctggagttgtttccaagcatccacctgagccatggcatgagccctgggctcccctccccagataataggactgcccaccaaggcatgcagggaagcccgacacagggggaagtaaggaggctcaatatagtgccctgtctctgggtaacagatgatctggggctttctcctcccatgggcctgcaagcgtttacaggcctcattagcatagaactcactcttccagttgtggtcatcctgacctaccaggaacaggaaggtgctctctgccctttccacaggaatgaagctcttctggtcaggtccttccaaagggctgttcaggacatccacaatgtctgcatagccatctttggtcaccttgatgcgatttctgttgacgcccacagggggcagggtctcgcccttgtagcgtaaggttcccccaacattggccacagagccgttgatgacgacagcagccgtgatgcccttcaggaaagaggccatggaaaggcagagctcaccccctttggaaattccaagcagcccaactcctggaccttttacctcgggatgactgagcaagtagttcatggcttcttcaaagtactccagatggagcgtctccatggtcttggggaggtcttcatagttataataagccagagccatcacagcaaaacccttcccagccagcagactagcccgatactccagcaggccacctccagttccgaacatgtccacaatcccaggaaagggcccaggttctggcggcaggaagagcgtgcctcgcacccggcccacgcgcaccggctcgcgccgcaccccgggcgggaggaagtagcgctcgtgccgcgtctggcacagcagccgcccggggtcggggtcgtggccatccagcacctccagctccacggccaagggcgttcgcacgtcgcgcttcaccagccgcaccaaaggtttctcgggctccaaggcccagagcagccccatgggctcaagccccgcgaagctgccgcccagcgcgggcgcgcgctccaggtccagctcgccaagagtgtcggcgcggtagcgcgcgtgggcctggaaaagcgcgcccttctcgtcgcgcagggacgcgcgcagcgtgaccggctgctccggggctaggccgcgcacggcgattcgcaccggttcgtcccagcagcagcggcccgcaggctccaggatcagcgtcgccgccatccgagcaggaaccctaatgatctgaccaacctgcctcagctgtggagaccccaggaactgcgccgaactcttcaggctccattggtacagccgggacgctcgaaggacagcaggagatgaggccattttgaattcagacctgagaacaactgaatgggggtggggagaaagaagcttgttagacatcctctcgggctgccgtcgcaggctaagcgcccactagggcagagctgtctgctaacgtgagcggggaaggccagagtccagccgatcagccagaccaaatatagacacactggaacttgcttaaagtctcctgtgttgaaacctccactttatgttggaaagctacttcctaggtttgcttttcagaagcttgctggcctgcggaatgggctggaccagggctggttcttaaagaaccaggcagctagcagtctccaggctccaaactcctgacggcgaagaggaatgcagagctggagttagttttgatcactttgttgaataattt

SEQ ID NO: 59514 - DNA, 1135 bp, Homo sapiens
ggggcagagggaataagaggctgcctctgcccaccagtcctgccgcccaggacccgcagcagagacgacgcctgcagcaaggagaccaggaaggggtgagacaaggaagaggatgtctgagctggagaaggccatggtggccctcatcgacgttttccaccaatattctggaagggagggagacaagcacaagctgaagaaatccgaactcaaggagctcatcaacaatgagctttcccatttcttagaggaaatcaaagagcaggaggttgtggacaaagtcatggaaacactggacaatgatggagacggcgaatgtgacttccaggaattcatggcctttgttgccatggttactactgcctgccacgagttctttgaacatgagtgagattagaaagcagccaaacctttcctgtaacagagacggtcatgcaagaaagcagacagcaagggcttgcagcctagtaggagctgagctttccagccgtgttgtagctaattaggaagcttgatttgctttgtgattgaaaaattgaaaacctctttccaaaggctgttttaacggcctgcatcattctttctgctatattaggcctgtgtgtaagctgactggccccagggactcttgttaacagtaacttaggagtcaggtctcagtgataaagcgtgcaccgtgcagcccgccatggccgtgtagaccctaacccggagggaaccctgactacagaaattaccccggggcacccttaaaacttccactacctttaaaaaacaaagccttatccagcattatttgaaaacactgctgttctttaaatgcgttcctcatccatgcagataacagctggttggccggtgtggccctgcaagggcgtggtggcttcggcctgcttcccgggatgcgcctgatcaccaggtgaacgctcagcgctggcagcgtcctggaaaaagcaactccatcagaactcgcaatccgagccagctctgggggctccagcgtggcctccgtgacccatgcgattcaagtcgcggctgcaggatccttgcctccaacgtgcctccagcacatgcggcttccgagggcactaccgggggctctgagccaccgcgagggcctgcgttcaataaaaag

SEQ ID NO: 59515 - DNA, 2844 bp, Homo sapiens
cggcacgaggagcggcccgcttcaggcctcagaatcactcttggagttagatatttaagaatccttcctgccttgacagccagtctgtgaaatgatggtgaggtgggcacttctttgtggtgagtgcagatctggatggagatttgtgaaggcaaggagattgaagacatgtcctcataagagggagaaaatctgagctggttccaggaattctggggagacattgccaaggaattttactggaagactccatgccctggcccattccttcggtacaactttgatgtgactaaagggaaaatctttattgagtggatgaaaggagcaactaccaacatttgctacaatgtactggatcgaaatgtccatgagaaaaagcttggagataaagttgctttttactgggagggcaatgagccaggggagaccactcagatcacataccatcagcttctggtccaagtgtgtcagttcagcaatgttcttcgaaaacagggcattcacaagggggaccgagtggccatctacatgcctatgatcccagagcttgtggtggccatgctggcatgtgcccgcattggggctttgcactccattgtgtttgcaggcttctcttcagagtctctatgtgaacggatcttggattccagctgcagtcttctcatcactacagatgccttctacaggggggaaaagcttgtgaacctgaaggagctggctgacgaggccctgcagaagtgtcaggagaagggtttcccagtaagatgctgcattgtggtcaagcacctggggcgggcagagctcggcatgggtgactccaccagccagtcccccccaattaagaggtcatgcccagatgtgcagatctcatggaaccaagggattgacttgtggtggcatgagctcatgcaagaggcaggggatgagtgtgagcccgagtggtgtgatgccgaggacccactcttcatcctgtacaccagtggctccacaggcaaacccaagggtgtggttcacacagttgggggctacatgctctatgtagccacaaccttcaagtatgtgtttgacttccatgcagaggatgtgttctggtgcacggcagacattggttggatcactggtcattcctacgtcacctatgggccactggccaatggtgccaccagtgttttgtttgaggggattcccacatatccggacgtgaaccgcctgtggagcattgtggacaaatacaaggtgaccaagttctacacagcacccacagccatccgtctgctcatgaagtttggagatgagcctgtcaccaagcatagccgggcatccttgcaggtgttaggcacagtgggtgaacccatcaaccctgaggcctggctatggtaccaccgggtggtaggtgcccagcgctgccccatcgtggacaccttctggcaaacagagacaggtggccacatgttgactccccttcctggtgccacacccatgaaacccggttctgctactttcccattctttggtgtagctcctgcaatcctgaatgagtccggggaagagttggaaggtgaagctgaaggttatctggtgttcaagcagccctggccagggatcatgcgcacagtctatgggaaccacgaacgctttgagacaacctactttaagaagtttcctggatactatgttacaggagatggctgccagcgggaccaggatggctattactggatcactggcaggattgatgacatgctcaatgtatctggacacctgctgagtacagcagaggtggagtcagcacttgtggaacatgaggctgttgcagaggcagctgtggtgggccaccctcatcctgtgaagggtgaatgcctctactgctttgtcaccttgtgtgatggccacaccttcagccccaagctcaccgaggagctcaagaagcagattagagaaaagattggccccattgccacaccagactacatccagaatgcacctggcttgcctaaaacccgctcagggaaaatcatgaggcgagtgcttcggaagattgctcagaatgaccatgacctcggggacatgtctactgtggctgacccatctgtcatcagtcacctcttcagccaccgctgcctgaccatccagtgaacatgatcctgacctttacctaggattcctcctgctccaaactttgcccatcctctttgccccctcaggagtgctgagggccagtgttgacccacactaccctcccttgaccagctgtctgggaccggaaaccagctttgtctccaggtagagacaacatcctgtgactgccaggcagaaaggacagggcccaggtcagcctcagtctgctgtgcctccagactgcagagctctcagaacccagaacagagacgaaaaggctacctctcctacccaagttaagtgttcaaaggggatgtgagggcctccactgaagcagggaggcagctgtgtaatcctatgtcagctctcttaggaagccccagtacttatattgggcatgcacttgcccttaaaaacaatgatttgtgagtccaggaacaatttactatttttaaaatattttgctgcttctgttctgggtctgaattcccttttgtgccagattcagtctccagagggtattcagatcatctgcttctttgaaggagtaaatgtgttttgttcctagggccagaggagcttgtcttccttgtcctctgttcccaccctcccctgaacagaacccagcccataagagacattctcagatgaaactctgttttcttgccccagtcaggctcaagccctgtggttgtaggaataaagcctgtgatctcaaaaaaaaaa

SEQ ID NO: 59516 - DNA, 759 bp, Homo sapiens
ttttttttttttacaaagagaaacatcagggactttaatcacatcccgcagctctgcggacctgcccaggcgctgatgctgcgcacagcccacccccattccctccctcccgccctcctggccctggccagctcagctctgtccggggtcggagagggggtcctgaggcagcagcagcccagctccagagtgacaggcaggggctgtccagctgagtctccgcccccacgttgccctggggcaggcccagctgctgtcagtgctgcttgagacactcagcagcatcttccaaggtcaggttggccaagtgtgggggctccagacaccttaaggctggcgataccaggctgcggggagacgaggctgcctcagctctccatgtcccccaccccctgcctccctccctgggggccccaggcctctcctcccagctgggacgtgtggtcctatgtgtggccacatccacgacaccctcgtgcctgggatgtcagcagggtgtgcaggccgcggcacgctggtgttggcttacgagcaccccttctcccgaggcctcccttctctgggtcactcacaaggccggggtggctctgtgtgtcccaggccaggagaaggcagaggagcgtggtctgttcatgaaaccaccacatgggtgtggttgcagaggtgacatccagcaggtgtcccaggtatagggagagccccacctgcagtgcccccactgatctagaggaccccctagcccccctcgaattcctgcac

SEQ ID NO: 59517 - DNA, 1560 bp, Homo sapiens
  misc_feature (1)...(1560): n = a,t,c or g
tttcgtgaggcactggctgggctctgactgtcacgttaattccctgctgctttttctagtccccagccgcctcgcccctcctccctcattcccagcctgggtttggaggcgatttccctctattgactgagccgactgcatctctgggcaagcggcgctttgcctctctcctgtctttgtctgctcttcctgcagccctggcagcgggcacacccctaagcatacgcacccaacgcctcctccctgagccacgaggatggagcagccaccccggcccgggactggcgcaaggtgcccaagcaaggaaagaaataatgaagagacacatgtgttagctgcagccttttgaaacacgcaagaaggaaatcaatagtgtggacagggctggaacctttaccacgcttgttggagtagatgaggaatgggctcgtgattatgctgacattccagcatgaatctggtagacctgtggttaacccgttccctctccatgtgtctcctcctacaaagttttgttcttatgatactgtgctttcattctgccagtatgtgtcccaaggggctgtctttgttctttcctctggggggttttaaatgttcacctgtaggcantgcaaatctcaaggaaatacctagagatcttcctcctgaaacagtcttactgtatctggactccaatcagatcacatctattcccaatgaaatttttaaggacctccatcaactgagagttctcaacctgtccaaaaatggcattgagtttatcgatgagcatgccttcaaaggagtagctgaaaccttgcagactctggacttgtccgacaatcggattcaaagtgtgcacaaaaatgccttcaataacctgaaggccagggccagaattgccaacaacccctggcactgcgactgtactctacagcaagttctgaggagcatggcgtccaatcatgagacagcccacaacgtgatctgtaaaacgtccgtgttggatgaacatgctggcagaccattcctcaatgctgccaacgacgctgacctttgtaacctccctaaaaaaactaccgattatgccatgctggtcaccatgtttggctggttcactatggtgatctcatatgtggtatattatgtgaggcaaaatcaggaggatgcccggagacacctcgaatacttgaaatccctgccaagcaggcagaagaaagcagatgaacctgatgatattagcactgtggtatagtgtccaaactgactgtcattgagaaagaaagaaagtagtttgcgattgcagtagaaataagtggtttacttctcccatccattgtaaacatttgaaactttgtatttcagtttcttttgaattatgccactgctgaacttttaacaaacactacaacataaataatttgagtttaggtgatccaccccttaattgtacccccgatggtatatttctgagtaagctactatctgaacattagttagatccatctcactatttaataatgaaatttatttttttaatttaaaagcaaataaaagcttaactttgaaccatgaaaa

SEQ ID NO: 59518 - DNA, 2859 bp, Homo sapiens
tttcgtggcgcgggcggaggcggggcgcggagaagtggcggaggtggaagcggaggcgtacccgcccctggggacgtcattggtggcggaggcaatggccggcaaccagctgtaagcgaggcacggaagacatatgcttgtgagacaaaggtgtctctgaaactatggatggtacaagaacttcacttgacattgaagagtactcggatactgaggtacagaaaaaccaagtactaactctggaagaatggcaagacaagtgggtgaacggcaagactgcttttcatcaggaacaaggacatcagctattaaagaagcatttagatactttccttaaaggcaagagtggactgagggtattttttcctctttgcggaaaagcggttgagatgaaatggtttgcagaccggggacacagtgtagttggtgtggaaatcagtgaacttgggatacaagaattttttacagagcagaatctttcttactcagaagaaccaatcaccgaaattcctggaaccaaagtatttaagagttcttcggggaacatttcattgtactgttgcagtatttttgatcttcccaggacaaatattggcaaatttgacatgatttgggatagaggagcattagttgccattaatccaggtgatcgcaaatgctatgcagatacaatgttttccctcctgggaaagaagtttcagtatctcctgtgtgttctttcttatgatccaactaaacatccaggtccaccattttatgttccacatgctgaaattgaaaggttgtttggtaaaatatgcaatatacgttgtcttgagaaggttgatgcttttgaagaacgacataaaagttggggaattgactgtctttttgaaaagttatatctacttacagaaaagtaaatgagacatagataaaataaaatcacactgacatgtttttgaggaattgaaaattatgctaaagcctgaaaatgtaatggatgaatttttaaaattgtttataaatcatatgatagatctttactaaaaatggctttttagtaaagccatttactttttctaaaaaagttttagaagaaaaagatgtaactaaacttttaaagtagctcctttggagaggagattatgatgtgaaagattatgcctatgtgtcttgcagattgcaagatattttaccaatcagcatgtgttacctgtacaattaaaaaaatatttcaaaatgcaatgcatattaaatataatacacacagaaaaactggcatttattttgttttatttttttgagatggagtttcgttcttgttgcccaacctggagtgcaatggtgcaatctcagctcactgcaacctctgcctcccaggttcaggtgattctcctgcctcagcctcctgagtagctgggattacaggtgtgcgccaccacgcccagctaattttttgtatttttagtagagacagggtttcaccatgttggtcaggctgatctcgagctcctgacctcaggtgatctacccacctcggcctcccaaagtgctgggattacaggcgtgagccactgcacctggcctgacattctttatgaaatttagaattgttgaagaactataacatttcagtagggttcaaggtggtcccaaaagttatataaaagattagtttttactataaacccttgtcttttactcagatcctagcatcccttttcacatggtttctccatgtatataacagaatcaagaaacaaattttaattaaacaatctgtaacagaatcaagaaacaaatacattttaattaaacaatctatatggaacaaacattcccaaattctaagaataaatttttctttaagttttctctgagtttggcaattgttgttttttataatttaatctgtttaaatcatcaggtcttataaaatataatgtacttagagctggattcatggctgtttattatgaaaggttagatttctcagttcttctttaaccacattttgttatatcagacagtcctctataactctgtactacccaacaactaaatggtttagattgtttagctcatgttaataggatggttgtgtattataaaaaacgagttacgtgtgtgtgtgcacgcatgcacgcacatgtgctggcttaaaggttgttaatgcaaggtttggggtcccctttaacactggtgaaagctacggtactctccccagagatatgtcttgtcagcctctctagttccccttggcctgcatgtacaaacttctaccctagaagctctctgccatcgatgtattctaatagatttgtaaggctattaatttgaagcaactccttgctcacagtgattcttgcttctctgagacctgctcccagtcgatactgtgggcttcagaagccatgactccccaactctgcctgtatcaccggttgaatggacaactaacccgagctggaccaacacaattctctccagagacttttgattttacttttatgtagagacagggtctcactttgttgcccacgctgatgttgaacttgacgtgaggcctcaagcagtcctcctgtcttggccacccaaagtgctaggattacaggtatgagccattgcgctggccctcttcataggcttttggacttgggaatagaaaagcaaccccgtctctactaaaaatacaaaaaaattggccaggcgtggtggcacgtgcctgtaatcccagctacttgggaggctgaggcaggagaatcacttgaacctgggaggcggaggttgcagtgagctgagatcatgccactgcacgccagcctgggcaacagagcaagactctgtctcaaaagaaagaaaaagaaaagaaaaaaa

SEQ ID NO: 59519 - DNA, 1221 bp, Homo sapiens
aagaaggtttcctggcctgttgcagccatggtgcattgcagttgcgtgttgttcagaaagtatggaaatttcatcgataagctaagactcttcaccaggggaggatccggtggaatgggttatcctcgtttaggtggagaaggtggaaaaggtggtgatgtctgggttgtagcccacaacagaatgactttaaaacaacttaaagacaggtatcctcggaaacggtttgtggctggagtaggagcaaacagcaaaattagtgcactgaaaggctccaaaggaaaagactgggaaatccctgtgcctgtgggtatttcagtaactgatgaaaatggtaaaattataggagaactcaataaagaaaatgacagaattttggtagctcaaggaggtcttggtggtaaattacttacaaatttcttaccattgaaaggccagaaacgaataattcaccttgatctaaaacttatagctgatgtaggcctagtaggattcccaaatgctggaaaatcctctttgctaagttgtgtttctcatgcaaaacctgcaattgcagattacgcatttacaacattaaagcctgaacttggaaagataatgtacagtgatttcaaacagatatcagtagctgatcttccgggtttaatagaaggagcacatatgaacaaaggaatgggccacaaattcctcaagcatatagaaagaactagacaactactttttgttgttgatatttctggatttcagctttcttctcacactcaatacaggacagcttttgaaaccataatactgcttacaaaagagttggaattgtacaaagaggaacttcagacaaaacctgcactcttggcagttaataaaatggacttgccagatgcccaagataagttccatgaattgatgagccagctccagaatcctaaagattttctgcatttatttgaaaaaaacatgattccagagaggactgtagagttccaacatatcatccccatatctgcagttactggagaaggaatcgaagaattaaagaattgtataagaaagtcactggatgaacaggccaaccaggaaaatgatgcacttcataagaaacagttgcttaatttgtggatttctgatacaatgtcttctactgagccaccatcaaagcatgctgttactacttccaaaatggatataatttaaatatattaaaaatggtattgatggaacagt

SEQ ID NO: 59520 - DNA, 1324 bp, Homo sapiens
gcgagcgtgacccaactgcggacggtcagccatggagactggagcgctgcggcgcccgcaacttctcccgttgctgctgctgctctgcggtgggtgtcccagagcaggcggctgcaacgagacaggcatgttggagaggctgcccctgtgtgggaaggctttcgcagacatgatgggcaaggtggacgtctggaagtggtgcaacctgtccgagttcatcgtgtactatgagagtttcaccaactgcaccgagatggaggccaatgtcgtgggctgctactggcccaaccccctggcccagggcttcatcaccggcatccacaggcagttcttctccaactgcaccgtggacagggtccacttggaggaccccccagacgaggttctcatcccgctgatcgttatacccgtcgttctgactgtcgccatggctggcctggtggtgtggcgcagcaaacgcaccgacacgctgctgtgagggtcccggtgagatggagtgggtcacacctggcaagctggaagaaagttccctggggatgggagagcgggtgggtgctgccaatctccagctactgtggccacaccccacctggtcatgggcagacccctcccttcctgggctgacctgctccctcgaggccagcctgctccctggctgaggctcaggctatccgcccaagctctttgctcattctagggccagtggaggaaaatgtgataaggccggagcttgtgtgctgggcacagaaatcacctgctgcatcctgtgctccgcaggctgggccggagcctctgcctgcaggtttctatgctgtttcttagcacagaatccagcctagccttagccgcagtctaggccctgcttggactaggactccttgcttgaccccatctctggttcctgccctggctcctgcaccagccccagctcctgcctacatccaggcagaaatataggcaggggctcttggaagacgttccgtgctgtgacctccgagccctcctggtgggaagacagctggaaaggctgggaggagaagggaggggctgggggttcccaggagccatgcgtggcctgcagagtccattccatcatgatgctgtgcccgctatgggctgtgtccatgaccagaggctggagtgggggtgtgttagagcccctcaccgggacttgctgtgcggatggggcctgggcctccttcctacaggggctcctctgtgggtgaggggccctctggaatggcatcccatgagcttgtggcctctatctgctaccatctgtgttttatctgagtaaagttaccttacttctggaaaaaaaaaa

SEQ ID NO: 59521 - DNA, 1850 bp, Homo sapiens
ttttttttttttaactgaccaatttttataagtttagttaaagatgatgaccatcttacttcattacatctccattaagacagtttggtatttcagttacaggtgtatgactgggagttcaattcttttctgtgataagtacgaatgactcaagctaccattcaatattcactttacagatatatgaagcttgtctacttcacgttcaaaggttttccttaatttcgtcttttatctaaatcaggtcaagtctcttctcataaatgaggaaatattaaatgagtgggcaggctctcaaggaaataaaaaagtgactaggcaggaaataatctggcaacttctgtggaataggatttttctcagtggtctaaaaataacaaacaccatttatggaccaaagactaggtgccatgagttttagaaattggtccccactccactgttatgtgtaccattatcccagtggcagagatacacagaaagccaaggctcagaggcagtaagtcatgggtccgaggcctcttgctgatgacaaaactggaatctgaacccacgtcaggcttacatttacacatacatgtatacaaatgtacacatatacagcttagattccataaaatacagtaatctagtggtggaacaaattatttctaataaatgttataaaatataaacgcctctctgaatcctttagaaaattaattttgccatgaagtacaaaaaggaaagagatacaacttaagtatgaacaaagttataggatactacaaacagttggtaatatatactgtctttaaaaatcatttctccttatcgaggcattaagccatattgtttataatgtgaagagctattggcatcttattttcctacccataaccatgaccatcacttattcatcttttcatgcatccaggtgcatggaaaggcagtaagtacaatttttaagaaaatagcatcaaaagcagattttaaatctacctgtttttccttcgtttgttttctccaacagttaaggaaagtaatagtaatttctcattccaaaccaaagacaattatgctcctttgctaaggacacagctgtaagtctctacaagatcagggaagactacaatatttcagaaaaacactcccagtaaagtttatgcttgaatgggcagctggaaatgcatcgatgtacagggcctcttttcacggcctctaaaagtgcttgcatcatatgcccacactgtgtctatcccctcccccgtgacgtggtctggagtccaatgtgggaaagggaaccggcaagcaataactcgtgcatcatcctcaagttcacgttcaagtttcttctccaactgcagcatcatctgaggcacaccgaaaataacaacgttcgagtactgcgaaaaagtaaccttccacaaatctgaaatataaaatttggcagatccatgcacaccttctcgccaagcgcggtatctggaataccaaactagccatgggtttaattcataaccaactgctgtgaaccctttcttcgcagccgctatgacaatgcgtccgtccccactaccgatgtccacaagggatcctcttcggcatcgcaacattttcacaacattttcaatctgcttcatagttgcaggtacaaatggcaaacagacttttcgaagggctggcgttacaaacggcgtggctacagcgtacacagccaccagggtgccacccacaagcccagtaagtaagaacccccagttgcttttctgcaaactgttgacttcaaaacttgcaggtagaacatgtcttgactgactttcttctttaagtgtttctaggggtatacctcctcctccctccatcgcgag

SEQ ID NO: 59522 - DNA, 1109 bp, Homo sapiens
ttcgagcgtggctcgtgggttttccgtgaagtcgcggtgcagcggtgggcggcatgtctgtggccggtggggagattcgtggggacacggggggagaggacactgctgctcccggccggttcagcttcagcccggagcccacgctcgaggacatccgccgcctccatgctgagtttgctgcggaacgagactgggaacagttccatcagcctcggaatctcctcctggccttggttggggaagtgggggagctggcagaactctttcagtggaaaaccgatggggaacctggcccccaaggctggtcccccagggaacgggcagcccttcaagaggagcttagtgacgtcctcatctacctggtggcattagcagcccgctgccgtgtggatctgccgctagcagtgctctccaaaatggacatcaaccggcgacgctacccagcccatctggcccgcagctcttcccgcaagtatacagaattgccccatggggccatctctgaagaccaggctgtggggcctgcggacattccctgtgactccacaggccagacctcaacctagaaagatggccacaggacttgcaactcagggtggtgtctgaagagcagagagtggcctggccctggagcctttttctagtcttttcagaatagatcatgggcctgaggcctccacttcttgaggtctgaggcccagcagcctctagaaggtagcctcctggtgtttgttctcccagtaaaatggttttgggcgataacttctagattattcctggatggccagggaggctctctgtctcagcaggtgatgacgggggtaccaggggtgcctctgagacccattctcgtgtttccctgttgtaccttttgcctgcagggcagagagatctggtttctagcaaattcccagtaggatgtcatgtaagttccttccccctcttagagattgaaggctgtaagagtccagatggtggagccaggctgtctgggttcaaatgccatctttgacacttgcaagctaaatgacattactcaaattaatcgttctgcacttcagcttccttgtctatcaaataaaaagaatagtacctgcccaaaaaaaaaa

SEQ ID NO: 59523 - DNA, 1181 bp, Homo sapiens
cccacgcgtccggcgggggccatattagcagcggttattcggtgagcggtggtggtttattcttccgtggagttaagggctccgtggacatctcaggtcttcagggtcttccatctggaactatataaagttcagaaaacatgtctcgaagatatgactccaggaccactatattttctccagaaggtcgcttataccaagttgaatatgccatggaagctattggacatgcaggcacctgtttgggaattttagcaaatgatggtgttttgcttgcagcagagagacgcaacatccacaagcttcttgatgaagtctttttttctgaaaaaatttataaactcaatgaggacatggcttgcagtgtggcaggcataacttctgatgctaatgttctgactaatgaactaaggctcattgctcaaaggtatttattacagtatcaggagccaataccttgtgagcagttggttacagcgctgtgtgatatcaaacaagcttatacacaatttggaggaaaacgtccctttggtgtttcattgctgtacattggctgggataagcactatggctttcagctctatcagagtgaccctagtggaaattacgggggatggaaggccacatgcattggaaataatagcgctgcagctgtgtcaatgttgaaacaagactataaagaaggagaaatgaccttgaagtcagcacttgctttagctatcaaagtactaaataagaccatggatgttagtaaactctctgctgaaaaagtggaaattgcaacactaacaagagagaatggaaagacagtaatcagagttctcaaacaaaaagaagtggagcagttgatcaaaaaacacgaggaagaagaagccaaagctgagcgtgagaagaaagaaaaagaacagaaagaaaaggataaatagaatcagagattttattactcatttggggcaccatttcagtgtaaaagcagtcctactcttccacactaggaaggctttactttttttaactggtgcagtgggaaaataggacattacatactgaattgggtccttgtcatttctgtccaattgaatactttattgtaacgatgatggttacccttcatggacgtcttaatcttccacacacatcccctttttttggaataaaatttggaaaatggaaaaaaaaaa

SEQ ID NO: 59524 - DNA, 1513 bp, Homo sapiens
tttcgtcttcgctgtcacgatttcgtgctaggcgtggacccaactggcgaggctgctggggttgcagcgggacagttggggcggccccgcaggcccaggtttttgaaaataaagttaattcagagaaggtaaaactttctcttcggaatttcccacataatgattatgaggatgtttttgaagagccttcagaaagtggcagtgatcccagcatgtggacagccagaggccccttcagaagagacaggtggagcagtgaggatgaggaggctgcagggccatcacaggctctctcccctctactttctgatacgcgcaaaattgtttctgaaggagaactagatcagttggctcagattcggccattaatattcaattttcatgagcagacagccatcaaggattgtttgaaaatccttgaggaaaaaacagcagcgtatgatatcatgcaggaatttatggctttagaacttaagaatctgcctggtgagttctactctgggaatcaaccaagcaacagagaaaaaaacagataccgagatattcttccatatgattcaacacgcgttcctcttggaaaaagcaaggactacatcaatgctagttatattagaatagtcaattgtggagaagagtatttttatatcgctactcaaggaccactgctgagcaccatagatgacttttggcaaatggtgttggaaaataattcaaatgttattgccatgataaccagagagatggaaggtggaattatcaaatgctaccattactggcccatttctctgaagaagccattggaattgaaacacttccgtgtattcctggagaactaccagatacttcaatatttcatcattcgaatgtttcaagttgtggagaagtccacgggaactagtcactctgtaaaacagttgcagttcaccaagtggccagaccatggcactcctgcctcagcagatagcttcataaaatatattcgttatgcaaggaagagccaccttacaggacccatggttgttcactgcagtgccggcataggccggacaggggtgttcctatgtgtggatgtcgtgttctgtgccatcgtaaaggactgttcattcaacatcatggatatagtggcccaaatgagagaacaacgttctggcatggttcaaacgaaggagcagtatcacttttgttacgatattgtgcttgaagttcttcggaaacttctgactttggattaagaaagacttctgttgcctctcacttgaaattaccaagtgggtttgcacctcctcataaagaacatgtttgcactgtgctgaagggctttgctatgcatacaatctgctttcttggtttatcagtttattttctttctaaaagctccctgaagggcaatatcatttggcttggggtgatcagtgtttacttattgatcttgctagacaatatcaaaataacttcccacattttccagtgaaacagatgttacataaaacgattgcagcttggctatttggtg

SEQ ID NO: 59525 - DNA, 1489 bp, Homo sapiens
aatttatagtaaatccatttaatactatgtacatattaatgttgaaatatttgacacagaaagatattcaccatttaaattcaaaaaatggacttaagtggagggtaaaaacagtataatccaggatgagccaagtaaaataaaacgtgtcactgagagtggactgagaaagtctacgaagacatacagcaaagcatgatcaaccttctcctttttgcttacctacaattctacaatgtgcatatattacctgtttgtttttaataggagttctttgacttaatttatacagttcaatgatcttattatcagttccttgatttgacctgagtcctggagttcttagctgtttttagtatcctttatcttaaagctctgtctccactcatttcctggcaattcagtaataactacattaaggtaataaccttctgaatcaattttataagcaaatagataaaatttctatctttagggtaattccaatagataattcctgcatttctacaatgtgcatatattacctgtacattgtttgttttcaataggagttcatggaatttgaaatcagaagaaaaatcctcattacaaaacaacagcattttaattgaattttctaagtgatcatttccggttgtttaaatgcacctgttcaaatcaaagttcatcattttgtttggaacaacttttgtttgagaatcaaatggtcacgtaaatgacaaaacaaataagcatataatgacagaaaagtaagtggcaaaataactacaaactttgttccactggctactgcagtagaataaacaaaatgacagttaaccaaaaacacctttattttcatctgcaaagaagaagctcttttcttctttttccaggataatcatgattaacttacaaaaatgggtacacatcttcaaagcacttccctttaacgggaaacttagctttatgggatttaaacattagaaagtgggaaaaaaaattccattttcttgtcattataagccaaaacaaaatctagtgtaagtcaaggaaactcattcacacttcaggtccttctcctccaggaaccagcattgttatattatttccatttagcaaaatctgatctaatttagtaatccttcttccttctggtgtgatttcaaactcagtgacatcttccagtaccatattgacaaagtcatcaaatcctagaagagtaccaacaatttccttatcactcttcatcacgatgtgaattcttgatcctatacatttgtccacaagctctaacggcagcagctgcgacgggttggtagtagcgttagccgccatggctacgccccccttctgtcgtcttctcgcagccgtacccttctgtcgtcttctcgcagccgtacccttctgtcgtcttctcgcagccgtacccttctgtcgtcttctcgcagccgtacccttctgtcgtcttctcgcagccgtacccttctgtcgtcttctcgcagccgta

SEQ ID NO: 59526 - DNA, 1124 bp, Homo sapiens
tttttatatttttaaatattttattttcctgttctttgtgaaaacatcaataaatatcgaaacctctctgctctaacacagagggaaacactgcataattaacattaaacaaggcagtatgccttacaagaaagacataaaatgtccaagggatatttagaacattttagttcttaaagcttcaacatgagaaatgttgaccacacactgtgaaatcatttcaataaataacaactgacattcatctttacagttacaaaatagacacacatacatttccctgccgtcacattgatcttactggccattttcttggattcctcagcctctatcacagtggctgacatgtgatatgtcatcacgaagaaatattaacaaatgactagagaatatctgcaaaccttctatcttcaaattaaatatgaatcaggattgaactaacttgggtttgacctaaaataaacaataaatataatgggagagtgtgcaagtagattcaatcataaccttattttacacataaaatattaacatagaatcttctaaaacaaacaaataaataaataaataaataaataaatagaagacttctcctaagtgatgctcaaacacattaggcgcaatccaggtggcctctgcagctgtgtctctctttcctcttctgttcctgtaagggcagggcctccttcaggaacagccaccaataagcttcctccttccttctggtcagttggatttgccatttttcagcatcttttcgatgattttcttaaccatgggcgatgcggggttgagacaagctttctgcccattcttgagtgtggctatgacttcggtttgggcgcagtggggtccgggggacttcaccttcacactttggatgttcttgaggtgaattccctgcagggtctgcaagcactggcagcgcagttcagtggccaggggcgctcctgctgcgcgccggctggcggccaccaggagcaggagcagcagcgccactcgcaggagccggggattgctgggggcggcggagagcgtggcgcgggccatggggctcagcaggcggttcgagcggctgtgcgaggaggagagctggcaaggagctccgtggcccgggctctgtc

SEQ ID NO: 59527 - DNA, 1916 bp, Homo sapiens
ttttttttttttacaacaagtccaacacatatgctttatggttctgtttcaaaaacatgaaaacccaggcccctaggattcaagtgatgttgagaggcagaaaggatggagaagttgttggcgccagcatgtggggcaagcagccagacctcaggccctcactctaggcttcaaggtggctgggcttgacttctggccaagggctgctttttcccgcctgcggcccacctgaggccagaccttgcctgaggaaagggcctgtggtgggggggggaaagctcaggcagaaggaagacgtggccaacggcatgcccatgaggaggtaattgagcagctcctggttccggcaagggcggtgggtaaggagccaggcccgaggaagtcttaagggtcccctctccacaagctctggtggggccccctgctcccctagccaactgggttgctcaactgccttctatgctccctcctgaagccagcccctgggagagaacatctgaaggcaagaaggaaagagagccctgcctaagcttcttcctccctgcttggccaagtgggagaagcagctgaggtcctttgtgtaactgaggaagcacggaggagctggaatgcctaccagctcggagagggcacttgagagggtctatgaacaaatctgtctaaaagccacgtttgagctaaaagcatcagtccatccctcagccccagctctgtgcgggccaagaatccagaaggcagcaagcaaggcctatctcccaagcctggaggtggttgtggagctgctctgcctgagtcttcagatgctggaattcctcttgaatgaagtccgtcagggctttccgcatctccacagccgacttgttctccgcccggagccgctcgagtacaggcagggcactgaagggcttcccgatcagcacagtgattttctgtccaaagcgggggaagtagggcggactgttaggaaggacgtcattcattccgacatgccacaggggcaggatgatggggttgagatgacactcagcaatcaggcgcccgattccccacttgaaacgcaggaattcggaactcatgttcactttcccttctgggaagatatgcacccagtccccatggttgagcttctccaaaatgaagtccatccccttctggtagacgccatctcctttctctcttctttttccagcacctggcatgtgcctgcctgtgtctagaacacctttcccctcattctctgcttggaaaaattctgctcctcggcacacaggcacacacttgcccaagctgaagaagtgggagtgtagctccttggtgaagcagatgtctgcagctgcaggggtccaacgcatcaacttcaggttccagatgtggcggagtttcaggatcccccagagatgagggtcgtccatgcaggactggtgattggacacggtgatgaggggcgtggccgggcctcgcttctcgatgagctcgtacagcacctccctgttgtgcacggtcaggtggttcatgtacttggtccagaagcagctgtaggtgcccaccaagcccatgacgacgctgctggccagggtccaggtgagcggcggcaccgcggggaacggccacttcacgtgcagaggcatccccacccggcccgcggccggcgctcccagcgccccgggccggcctgtggggcgcctctaggtctgcgacctcgaccgctcgagacactggcccctgactggcccgcgcacggacggacgggggcgcggcgcaacaggggactggaccgaggtcccttcgcaggtcaggccggagcagcgcccggccccgctctctcgtcactggggagcggtcgccggggtcacaggccgtgggcgcgctgcggaacgggaggaaacgggaaggcgggcgctggcaccccggcccgg

SEQ ID NO: 59528 - DNA, 2855 bp, Homo sapiens
  misc_feature (1)...(2855): n = a,t,c or g
ttcaaaattctgaaaacagtattaaggaaaaacaggaactgtttcacttaggtcttacctagtatagtagtgaatcaacttcacaattagtaagattatcaacatgaatacaaaagcaagactacaaactgattattttcttttggagatgttttatgatcaattccaaacatacagtacagggaaggtgaaatgagtaagaaaaaaaaatcatatttaagtccccgttaacactaagccatattattcaaaatgtgtttcaaaatactcagccagatcaccaaatctcagtcactaccttagtataaatattcactaagaaaatagtcaagcaacagaaatccattgtgagacaccatctagagagaacagctacactgctatatataatttattaacttagtagtttagtttctcaatatttagcaagtttaaaaattaccattaccattggtttatagtgccattaatataaatccataatttcaaagtcatcattcctttcactgtgaactaagacttcttaaaagatagttgtgggttggggaacagtaatgactgtagctgatgggcagtgttcaaagccaaaaagactggcaagcttggaaaggcatacactatacatacacacactctcagtatactactgttccccttatttttgctgtacattcttgtctgaaaagatggtataaattattcccttaaatttgaaaaaacaattaagatgaatacattttcatcttcatttcaaaattatccttctaaataaaaaagttcctcatgtttgttaaatctgttcaaaagttggatttaaatactttcttcacaacatgtacaatgttttcacccttactgcctcattacaatcagtttggcaataagacctccagtgctttatcaaaaatggcattcaatagattataagattgttaaatctgcatttcaatcattcttaccacaatgaattataacaaagtccaaaaaaatgtatgactattcatcaacacccttggaacctatgaattattgcaaataatctcacacgtgcatgtaatccaaacataaacttcgtgggagagggggtgtaaaataaatactatggtatttcttcaattctatttaatgctgcctagctggttaaatgaaagattaatatattactaacaggaagagtcaaactattttaaggactgttttctaagtagaacaattttgcaaaacaaagataagcaagagcctatgcaaatacattttcttgtagtgtaatgtaattgctaatatgaggtataatctgtaagcaattaatacaaatataaataggtataagccaccactaactcagtctggtgaaaagcttctcagctaaagtagtttgaagataaggttaagggaaatgagaaggggtggacagggcaggtttccagtgggaaaataatttatgtgccttaccattgtgatcatcctgtatgtaccagtccgttgttgcagaacggtaaatcctttccaagtatgttatactttatgtagcacagtaaaattatttaagtattactaatgcttcatttgcatttgtatttagatatacacataattatatatgcatatcaaaaactataaacagaattttaaaacacttttatctcaattggggaaagttaacaggtaagacaaaactacgtactacagaattttttaggatatctaaactcaaggtaaaaccaatagaaaacatttctacctctttagtaaatggcttgtgtgaaacctcaagctctccctcattttttttacagatgggtttgtctgatgaggattgtgatccaatgattgtttagcagcaattttaccaaaactgtaaattcttttattaacaggcattataaacagataatactaatcttatttaaaaaccatgagtgccacactggtgaatatacagcttatgaataacttaaaaagtatttcccattttaaaaggcaaacccagcatacaaaaacctatactaaacaaagaagctataatatggatacatgattgatgtgtctaaaatgatatatacagtacataatgttaattatatgatcagtacatttttcctatgattcccttcatgcttcactttccccagaaactgaattctgtacttcctcttctaaaattggtacaatcaggttatccttggacatcaaattgtatttcatcacaaacttagtaaaccgatgacacaaaaatgtttcattttcatattcatcaaatatctgccgatgatgaaaataagcatgtgaaaatattctgtaaatcctacggcatactgatcctagtttcgctacagatgattcctttatgctaaccctgctgggaaaatatttattgctattcagaagacatgcagcaccatcaagtgtgtgtctagtatagtctatagcaggacactcttttggagttttatgagctgcacaaagaaaaatccattgttcagttgctgtcatttgagtgcaagtatctggatggcattcactctgaagtttgacagcaagtccatttagctcaaggcagaactgccttaaatgttcatacttccacacaccttcatcttggccttcaggtggttcaagaattttgtcaatattggagcaatctgctcttatgttctgttgaatatactgttgaacagctagtgtactgtccatttcatcaaaggattcatcaggccaattatagaaatcctgcgccttggtgcccggcctgttccgcctcagcactgccgtcccctccgccatgaccatagtgccagcgtctaggcggctggagtcggaattccncgcnnctggctagtgtcatcgattttcaa

SEQ ID NO: 59529 - DNA, 869 bp, Homo sapiens
ttttttttttttctggttgtcaatgaggatatttattggggtttcatgagtgcagggagaagggctggatgacttgggatggggagagagacccctcccctgggatcctgcagctccaggctcccgtgggtggggttagagttgggaacctatgaacattctgtaggggccactgtcttctccacggtgctcccttcatgcgtgacctggcagctgtagcttctgtgggacttccactgctcgggcgtcaggctcaggtagctgctggccgcgtacttgttgttgctctgtttggagggtttggtggtctccactcccgccttgacggggctgccatctgccttccaggccactgtcacagctcccgggtagaagtcactgatcagacacactagtgtggccttgttggcttggagctcctcagaggagggcgggaacagagtgacagtggggttggccttgggctgacctaggacggtgaccttggtcccagttccgaagacataagaggcagtgctgctgtcccacgcctgacagtaatagtcagcctcatccatagcctgggtcccgctgatggtcagggaggccgtgttgccagagttggacccagagaatcgctcagggatccctgagggccgcttgtcaccttgatagatgaccagcacaggggactggcctggcttctgctgataccagcaagtagataaatcccccaatttatctccagagcaggtgatgctggctgtctgtcctggggacacggacactgagggtggctgagtcagctcataggaggccacggatcctgtgcagtaagcaaggacgccgaggaagagagggatccatgccatggctgaggcacctccgat

SEQ ID NO: 59530 - DNA, 3807 bp, Homo sapiens
ggctcggctcctagagctgccacggccatggccagagcccgcccgccgccgccgccgtcgccgccgccggggcttctgccgctgctccctccgctgctgctgctgccgctgctgctgctgcccgccggctgccgggcgctggaagagaccctcatggacacaaaatgggtaacatctgagttggcgtggacatctcatccagaaagtgggtgggaagaggtgagtggctacgatgaggccatgaatcccatccgcacataccaggtgtgtaatgtgcgcgagtcaagccagaacaactggcttcgcacggggttcatctggcggcgggatgtgcagcgggtctacgtggagctcaagttcactgtgcgtgactgcaacagcatccccaacatccccggctcctgcaaggagaccttcaacctcttctactacgaggctgacagcgatgtggcctcagcctcctcccccttctggatggagaacccctacgtgaaagtggacaccattgcacccgatgagagcttctcgcggctggatgccggccgtgtcaacaccaaggtgcgcagctttgggccactttccaaggctggcttctacctggccttccaggaccagggcgcctgcatgtcgctcatctccgtgcgcgccttctacaagaagtgtgcatccaccaccgcaggcttcgcactcttccccgagaccctcactggggcggagcccacctcgctggtcattgctcctggcacctgcatccctaacgccgtggaggtgtcggtgccactcaagctctactgcaacggcgatggggagtggatggtgcctgtgggtgcctgcacctgtgccaccggccatgagccagctgccaaggagtcccagtgccgcccctgtccccctgggagctacaaggcgaagcagggagaggggccctgcctcccatgtccccccaacagccgtaccacctccccagccgccagcatctgcacctgccacaataacttctaccgtgcagactcggactctgcggacagtgcctgtaccaccgtgccatctccaccccgaggtgtgatctccaatgtgaatgaaacctcactgatcctcgagtggagtgagccccgggacctgggtgtccgggatgacctcctgtacaatgtcatctgcaagaagtgccatggggctggaggggcctcagcctgctcacgctgtgatgacaacgtggagtttgtgcctcggcagctgggcctgtcggagccccgggtccacaccagccatctgctggcccacacgcgctacacctttgaggtgcaggcggtcaacggtgtctcgggcaagagccctctgccgcctcgttatgcggccgtgaatatcaccacaaaccaggctgccccgtctgaagtgcccacactacgcctgcacagcagctcaggcagcagcctcaccctatcctgggcacccccagagcggcccaacggagtcatcctggactacgagatgaagtactttgagaagagcgagggcatcgcctccacagtgaccagccagatgaactccgtgcagctggacgggcttcggcctgacgcccgctatgtggtccaggtccgtgcccgcacagtagctggctatgggcagtacagccgccctgccgagtttgagaccacaagtgagagaggctctggggcccagcagctccaggagcagcttcccctcatcgtgggctccgctacagctgggcttgtcttcgtggtggctgtcgtggtcatcgctatcgtctgcctcaggaagcagcgacacggctctgattcggagtacacggagaagctgcagcagtacattgctcctggaatgaaggtttatattgacccttttacctacgaggaccctaatgaggctgttcgggagtttgccaaggagatcgacgtgtcctgcgtcaagatcgaggaggtgatcggagctggggaatttggggaagtgtgccgtggtcgactgaaacagcctggccgccgagaggtgtttgtggccatcaagacgctgaaggtgggctacaccgagaggcagcggcgggacttcctaagcgaggcctccatcatgggtcagtttgatcaccccaatataatccggctcgagggcgtggtcaccaaaagtcggccagttatgatcctcactgagttcatggaaaactgcgccctggactccttcctccggctcaacgatgggcagttcacggtcatccagctggtgggcatgttgcggggcattgctgccggcatgaagtacctgtccgagatgaactatgtgcaccgcgacctggctgctcgcaacatccttgtcaacagcaacctggtctgcaaagtctcagactttggcctctcccgcttcctggaggatgacccctccgatcctacctacaccagttccctgggcgggaagatccccatccgctggactgccccagaggccatagcctatcggaagttcacttctgctagtgatgtctggagctacggaattgtcatgtgggaggtcatgagctatggagagcgaccctactgggacatgagcaaccaggatgtcatcaatgccgtggagcaggattaccggctgccaccacccatggactgtcccacagcactgcaccagctcatgctggactgctgggtgcgggaccggaacctcaggcccaaattctcccagattgtcaataccctggacaagctcatccgcaatgctgccagcctcaaggtcattgccagcgctcagtctggcatgtcacagcccctcctggaccgcacggtcccagattacacaaccttcacgacagttggtgattggctggatgccatcaagatggggcggtacaaggagagcttcgtcagtgcggggtttgcatcttttgacctggtggcccagatgacggcagaagacctgctccgtattggggtcaccctggccggccaccagaagaagatcctgagcagtatccaggacatgcggctgcagatgaaccagacgctgcctgtgcaggtctgacaccggctcccacggggaccctgaggaccgtgcagggatgccaagcagccggctggactttcggactcttggacttttggatgcctggccttaggctgtggcccagaagctggaagtttgggaaaggcccaagctgggacttctccaggcctgtgttccctccccaggaagtgcgccccaaacctcttcatattgaagatggattaggagagggggtgatgacccctccccaagcccctcagggcccagaccttcctgctctccagcaggggatccccacaacctcacacttgtctgttcttcagtgctggaggtcctggcagggtcaggctggggtaagccggggttccacagggcccagccctggcaggggtctggccccccaggtaggcggagagcagtccctccctcaggaactggaggaggggactccaggaatggggaaatgtgacaccaccatcctgaagccagcttgcacctccagtttgcacagggatttgttctgggggctgagggccctgtccccacccccgcccttggtgctgtcataaaagggcaggcaggggcaggctgaggagttgccctttgccccccagagactgactctcagagccagagatgggatgtgtgagtgtgtgtgtgtgtgtgcgcgcgcgcgtgtgtgtgtgcacgcactggcctgcacagagagcatgggtgagcgtgtaaaagcttggccctgtgccctacaatggggccagctgggccgacagcagaataaaggcaataagatgaaaaaaaaaa

SEQ ID NO: 59531 - DNA, 971 bp, Homo sapiens
cctggagacccctcgagatcactggcagtgtggtggaattcgtcagagcaagaactggacagcgtggccatgaagctccttcaccaagtaagcaagctgtgtgggaagtgcagccccactgacgtggacatcctgcagccctccttcaacttcctgtattggagccttcatcagaccacacccagcagtcagaaaagaggtgcaggggcccgggctgggacagtgaagagtgctgggcagtctgtggtcctctgtatctcaactttttcatcttaaaaaaacaaatagggttgtgtgtgtggctggtggtcataaggtcctttctggctctaataacctgagcttctgttatgaagctgggacccttagagcctcaggatgatcctctgtttgtttgtgaagccccaatcaggtgctaagcaccatagtggcacttagctgaagctcctctgtaactcctgtgggccctgccttgcccacccccgacagctgctgcagtgctcctgagcagcacaggcctgatggagcttctggagaagatgctggccctcaccttggcaaaggcagattctcccaggactgcactcctctgctctgcctggctgctcactgcctccttctctgcccagcagcacaagggcagtttgcagaaggaccctctattgtcccaggcctgtgttggctgcctggaggccttgcttgactacctggatgcccggagcccagacattggtagaaactctccacattatctgatgttcccatgagagagattagagggagcaacacccttccaccctcctgctccagccttccattcccttgtgtgactcatacttgttttgtttaattcttttagcagcactgcaagggcagtcatgcccattatacagatgggatcaataaggttcagataggtcaaatgatgtgcccaaccaaggtcacaatgctcttaagtggcagagcccttc

SEQ ID NO: 59532 - DNA, 1611 bp, Homo sapiens
atgcatgatttacaaagttttggagaccccctggtctgaggcccaccctccagcacctctgtctttcccaagttgagaacttacaagttctcggacagaggcaccactctggtttcatgtcgtgtcctaattctggcatgccatcctctcacatcgcatccaacccagaggacgcaaaatgaatgctcagcatgtttactaaaacagtgtctctacaataaacacagcaggccaacatgtatagcttttatttacctacccaagttccttttacatgtgagttatctgcattccaccttgccccctctcccaggatgaatcctcttggcacagaggaaggggtgccccttcaactagggccagagcctagatgacctggtggatcccccaccatgaaaaaagcaggaagggaatggagaagaaaagtgttgatcacacctagccctcaccacaggagggggaatgaagaggtctgggggactgcccccatgctatgccccagtccttaaatacaaagcaaggagaatgaaaaggaccctccctctgaaatacagcaccgacctcagcatggaggcaaaaggacagtgggcaagaccacgtccctccgaagggagagggctgaaggagagcacataccgttagtggctgcggcacccctccctaccagggtctgatgcagcctcagcaccgggagtggggagaggggaggagaagggatgacagcactgtgccatccactcctccctgaacccctggccccagcacaggcattcctctgcccactagcccaagtcaggggatgtggaagaaactgtgttggaatccaaggcccttatctatttcttcttccgttcttgggagcagcgtgggcaaaaccatttcccccgaggcttggttgtcagccccacacaggcaaaatggaaccactcaatggaacaatcagggttgtcacagccaatcatctctccataggagacctggtgacaaaggcaataggtgggttcgttgggatccacaggcatatccaacacatcagaggggtggacactgccaaaggtcactgagggcatcccatactcaggacttgtgcgcacgagctttaacttcttctgggcagtcttgggggcttcttcatccgagtttttccctttggaacgagcacgagcagctttcttctccttttgagtccggcctttctttttgcctttgctggaagagctgtcatagtcacttgactcaatctgtttctccttgagatcagcctcaaaacgggccaggtctgtgtccagccgccgaatgtgtttgtccaccatctcataggtctgcatggcaagctgcaccttgtcgtcaccaaattccttgcacttgccataggcttcctggatctgtttgagaagggccaatttttcctcggagctcaggctgcgggcactactcatatactcagtggccaacttgtcaatttcagccttcaggtcctctgttctttggtctaggtccctcatgagctgaaagtttctctgtaattcaaagggaaggttttcaatactgtccagataatgttccaaatacatccccgcagccatctcgaagcaaaacaaagcaacttcc

SEQ ID NO: 59533 - DNA, 2759 bp, Homo sapiens
tcgcgatctagaactagtcgcggcgcggctgcggctttgcctcggcgcgacagggaaaataaaagaagcaaaaacaggccctgctgtgagggaccacgaggcagtgccaggatgaaagagttggagtaacctaggtgattctgagtgaatcagtcaggaggccttcctggagggggctgaggccccagcttgtggccaccacaacgtatcaagctatctccagggttgggctcaggactcagagctgacgcagctggggtgccccttggttctggaggatgaggctcctccgcagacgccacatgcccctgcgcctggccatggtgggctgcgcctttgtgctcttcctcttcctcctgcatagggatgtgagcagcagagaggaggccacagagaagccgtggctgaagtccctggtgagccggaaggatcacgtcctggacctcatgctggaggccatgaacaaccttagagattcaatgcccaagctccaaatcagggctccagaagcccagcagactctgttctccataaatcagtcctgcctccctgggttctataccccagctgaactgaagcccttctgggaacggccaccacaggaccccaatgcccctggggcagatggaaaagcatttcagaagagcaagtggacccccctggagacccaggaaaaggaagaaggctataagaagcactgtttcaatgcctttgccagcgaccggatctccctgcagaggtccctggggccagacacccgaccacctgagtgtgtggaccagaagttccggcgctgccccccactggccaccaccagcgtgatcattgtgttccacaacgaagcctggtccacactgctgcgaacagtgtacagcgtcctacacaccacccctgccatcttgctcaaggagatcatactggtggatgatgccagcacagaggagcacctaaaggagaagctggagcagtacgtgaagcagctgcaggtggtgagggtggtgcggcaggaggagcggaaggggctgatcaccgcccggctgctgggggccagcgtggcacaggcggaggtgctcacgttcctggatgcccactgtgagtgcttccacggctggctggagcccctcctggctcgaatcgctgaggacaagacagtggtggtgagcccagacatcgtcaccatcgaccttaatacttttgagttcgccaagcccgtccagaggggcagagtccatagccgaggcaactttgactggagcctgaccttcggctgggaaacacttcctccacatgagaagcagaggcgcaaggatgaaacctaccccatcaaatccccgacgtttgctggtggcctcttctccatctccaagtcctactttgagcacatcggtacctatgataatcagatggagatctggggaggggagaacgtggaaatgtccttccgggtgtggcagtgtgggggccagctggagatcatcccctgctctgtcgtaggccatgtgttccggaccaagagcccccacaccttccccaagggcactagtgtcattgctcgcaatcaagtgcgcctggcagaggtctggatggacagctacaagaagattttctataggagaaatctgcaggcagcaaagatggcccaagagaaatccttcggtgacatttcggaacgactgcagctgagggaacaactgcactgtcacaacttttcctggtacctgcacaatgtctacccagagatgtttgttcctgacctgacgcccaccttctatggtgccatcaagaacctcggcaccaaccaatgcctggatgtgggtgagaacaaccgcggggggaagcccctcatcatgtactcctgccacggccttggcggcaaccagtactttgagtacacaactcagagggaccttcgccacaacatcgcaaagcagctgtgtctacatgtcagcaagggtgctctgggccttgggagctgtcacttcactggcaagaatagccaggtccccaaggacgaggaatgggaattggcccaggatcagctcatcaggaactcaggatctggtacctgcctgacatcccaggacaaaaagccagccatggccccctgcaatcccagtgacccccatcagttgtggctctttgtctaggacccagatcatccccagagagagcccccacaagctcctcaggaaacaggattgctgatgtctgggaacctgatcaccagcttctctggaggccgtaaagatggatttctaaacccactgggtggcaaggcaggaccttcctaatccttgcaacaacattgggcccattttctttccttcacaccgatggaagagaccattaggacatatatttagcctagcgttttcctgttctagaaatagaggctcccaaagtagggaaggcagctgggggagggttcagggcagcaatgctgagttcaagaaaagtacttcaggctgggcacagtggctcatgcctgaaatcctagcactttgggaagacaatgtgggagaatggcttgagcccaggagttcaagaccggcctgagcaacatagtgaggatcccatctctacgcccaccctccccccggcaaaaaaaaaagctgggtatgggggcttatgcctgtagtcgcagctactcaaaaggctgaggtgggaggattgcttgttccccggaggttgaagctacagtgagccttgattgtgtcactgcactccagcctgggcaacaggtaagactctgtctcaaa

SEQ ID NO: 59534 - DNA, 2050 bp, Homo sapiens
acaacgcagctccgccctcgcaaaggcacagcgcgggcgcaggcgcccagaggcgcacgggagacctcaggcccagactccactccccagctgtgaaaggactgctggccagacccccaagctagcccgccaggcctccatagagctgcccagcatggctgcatccagtaccaagagttggtgggagacgggtgaggtacaggctcagtctgcggccaagactccgtcctgcaaggtaaggtcccctccaggggcaaggctgggctgcagagccagcactggggagtttagtagcaggccaggtttccttgttaagacaagcgtgggactgtccaggatgaatgtgggcagacagaaccctgaggtattgcagtagggttgggttcacccttgctggtgtagaaggctgtgttgtccgagtggaggtggatggcacctttattccgttccctgcttcttccactgggatcgcacagaaaaagttttggtaggcagatcccaggccccctggccaggtaaggcaaggcaggagagaagggcccagggcttctactccccaagatccaggggtctgcccttgtgacatacccttctgctgcccccaggatattgtggctggagacatgagcaagaaaagcctctgggagcagaagggaggctccaagacctcatcaacaattaagctgcaaaccacccaaggtgaagtcatcttagcctcttggagtcagcctgactggggtgaacccattgatatgtattgcataaatgaacatatgacagtagtgatgaaggatctccagctatccgtgtactctctatgcttcccagactctttggcagttgcactgggtactggctgagttctggaaaacaggaatgtgagcagagtgctgcagatctccttgtcaggagcacctaagaactggcatgactctacaccctctctccttctgcaatgacctcgtgtcaagatggcagacccgcagagatgaatgtgcctggatacctgagtcaccaggtggaggaaactcccattgacatgcatcacactccacatatgaaacccttctttttctgcactgtcactggggttagggattattactcactgcaacttagcctagcattaagttgcttgactaatacaagtttcaataaatgtcgcttcatttcccatggcttttgactgaatgctgtgcaatatccacaaaccatccagattgtggtttataaataccacccttcactaaaaggactcagagctccttgtagaaatggctgatgctaaggctggggtagggaagtacaaggtgagcccagagtgctgtgtggtgccagaaagcaaggaagcatttaaaaaatgacagggacatgtcaaaggacacatcaatcaacttcaaggggcttccactggccaaatctgggatgatgtgagcatccaaattaataatgataatggtagattatagtctattgaataaaatgagaacctataactatagaaagaaagaaaagggaaggaagaaaagaaagaagaagagagggagggagggagagagggagggagggacggagggagggaagaaggaagaagactttcttacggtagaatgccaatgaataaatacagagggaataatagaaaactccatttgcaaacatgatcataatagtttattcaaggaagaatcatcactgagtgaaaatttaagaaggtaaagtatgttttcattgtctcatagcacttccactcatatggtttattaattgcaaagagaaaaagtggtaacttaacagtagagaaacccagcaggtcctcccttaatgagctgaacaaagttaacaacaccaggaataggacaaatgggtgccaagtgtctcttgatgtgatacactgagaacacagcattgcttctgtagcattccggtccctggaggaaacatcagacaaacacagatggagggaccttcaaggactgacctgaactgttcttcggtgtcaaccccatgatagacaaaaagaggcagaggaactgttccagattaaggg

SEQ ID NO: 59535 - DNA, 1876 bp, Homo sapiens
ggcggaattcggactgcagctgtggggagatttcagtgcattgcctcccctgggtgctcttcatcttggatttgaaagttgagagcagcatgttttgcccactgaaactcatcctgctgccagtgttactggattattccttgggcctgaatgacttgaatgtttccccgcctgagctaacagtccatgtgggtgattcagctctgatgggatgtgttttccagagcacagaagacaaatgtatattcaagatagactggactctgtcaccaggagagcacgccaaggacgaatatgtgctatactattactccaatctcagtgtgcctattgggcgcttccagaaccgcgtacacttgatgggggacatcttatgcaatgatggctctctcctgctccaagatgtgcaagaggctgaccagggaacctatatctgtgaaatccgcctcaaaggggagagccaggtgttcaagaaggcggtggtactgcatgtgcttccagaggagcccaaagagctcatggtccatgtgggtggattgattcagatgggatgtgttttccagagcacagaagtgaaacacgtgaccaaggtagaatggatattttcaggacggcgcgcaaaggaggagattgtatttcgttactaccacaaactcaggatgtctgtggagtactcccagagctggggccacttccagaatcgtgtgaacctggtgggggacattttccgcaatgacggttccatcatgcttcaaggagtgagggagtcagatggaggaaactacacctgcagtatccacctagggaacctggtgttcaagaaaaccattgtgctgcatgtcagcccggaagagcctcgaacactggtgaccccggcagccctgaggcctctggtcttgggtggtaatcagttggtgatcattgtgggaattgtctgtgccacaatcctgctgctccctgttctgatattgatcgtgaagaagacctgtggaaataagagttcagtgaattctacagtcttggtgaagaacacgaagaagactaatccagagataaaagaaaaaccctgccattttgaaagatgtgaaggggagaaacacatttactccccaataattgtacgggaggtgatcgaggaagaagaaccaagtgaaaaatcagaggccacctacatgaccatgcacccagtttggccttctctgaggtcagatcggaacaactcacttgaaaaaaagtcaggtgggggaatgccaaaaacacagcaagccttttgagaagaatggagagtcccttcatctcagcagcgggggagactctctcctgtgtgtgtcctgggccactctaccagtgatttcagactcccgctctcccagctgtcctcctgtctcattgtttggtcaatacactgaagatggagaatttggagcctggcagagagactggacagctctggaggaacaggcctgctgaggggaggggagcatggacttggcctctggagtgggacactggccctgggaaccaggctgagctgagtggcctcaaaccccccgttggatcagaccctcctgtgggcagggttcttagtggatgagttactgggaagaatcagagataaaaaccaacccaaatcattcctctggcacattatttctaaataagtgttgtttgtggaaatcgtcctatttttatgcctcggttgagggggcaagtaaagtcctggtgaggaatatacagttagaaacttttggaaaaactgaagttcctggaggaaagccaaaccgtgctaacacactagaggctggttttggtcctgggaaaggtttggggtgaatgggttggaagtagggtatgaatacagttttgggatttaaaa

SEQ ID NO: 59536 - DNA, 1417 bp, Homo sapiens
ttgaactgactgccctcgaaacagcgtggtggaattctgggcggcgggctctgcctccgccgagggacagccggatcgcccctctgcttcccgcaactgccctgatcaccccccgtcccagcccttgagtgaacgtccttctgagcggcttcctggggtcctccccacgtcccaaaggccggcaagatggtgtcctggatgatctgtcgcctggtggtgctggtgtttgggatgctgtgtccagcttatgcttcctataaggctgtgaagaccaagaacattcgtgaatatgtgcggtggatgatgtactggattgtttttgcactcttcatggcagcagagatcgttacagacatttttatctcctggttccctttctactatgagatcaagatggccttcgtgctgtggctgctctcaccctacaccaagggcgccagcctgctttaccgcaagtttgtccacccgtccctgtcccgccatgagaaggagatcgacgcgtacatcgtgcaggccaaggagcgcagctacgagaccgtgctcagcttcgggaagcggggcctcaacattgccgcctccgctgctgtgcaggctgccaccaagagtcagggggcgctggccggcaggctgcggagcttctccatgcaggacctgcgctccatctctgacgcacctgcccctgcctaccatgaccccctctacctggaggaccaggtgtcccaccggaggccacccattgggtaccgggccgggggcctgcaggacagcgacaccgaggatgagtgttggtcagatactgaggcagtcccccgggcgccagcccggccccgagagaagcccctaatccgcagccagagcctgcgtgtggtcaagaggaagccaccggtgcgggagggcacctcgcgctccctgaaggttcggacgaggaaaaagactgtgccctcagacgtggacagctagggtctgctgcatctgcccccttcttacctcgtgccctgcagggctccagggctatttggagggaccttgggctgcacatctggcctgcctgcaccagctgcctgggccccaccctcctgactcctgctgatggttaagggccgggagcagatgctgccaaggccacatgtaccaaagcaggctgggcccagggttctatttattgccttgctctgccctctcccttccccggttgtgggacaagagccctccctgaacccctgcaaccctccctgaacccctgcaaatgaaaccaaacgtccacctgggtgtgttcattccttcctgtccttcaaagtacttgatagcctttcataaggcctggcacatgtgtcctggttgtgtgtgtgtgtgttggtgagtgaggtcaggtttgcgagtgttttgataaataaatacataaaggggaaaaaaaaaa

SEQ ID NO: 59537 - DNA, 1146 bp, Homo sapiens
ggaattcgagagtcgcacgcgcagcggggaaggtgtgagtcgtgaacggcccgggtctccgccatggcctctctactcgccaaggacgcctacctgcagagcctggccaagaagatctgctcccattcggccccggaacagcaggcgcgcacgcgggctggcaaaactcaaggctcagaaactgcagggcccccaaaaaagaaaaggaagaaaacacaaaagaaattccggaagcgagaagagaaggctgctgagcacaaggccaagtccttgggggagaaatctccagcagcctctggggccaggaggcctgaggcagccaaagaggaagcagcttgggcttccagctcagcagggaaccctgcagatggcctggccactgagcctgagtctgtctttgctctggatgttctgcgacagcgactgcatgagaagatccaggaggcccggggccagggcagtgccaaggagctgtcccctgccgccttggagaaaaggcggcggagaaagcaggaacgggaccggaagaagaggaagcgaaaggagctgcgggcgaaagagaaggccaggaaggctgaggaggccatggaggcccaggaggtggtggaggcaaccccagagggggcctgcacggagccgcgggagccgcccgggctgatcttcaataaggtggaggtgagcgaagacgagccggccagcaaggcgcagcgcagaaaagagaagaggcagagggtgaaggggaacctcacgccgctgaccgggaggaactaccggcagctgctggagcgcctgcaggcacggcagagccggctggacgagctgcgcggccaggatgaggggaaggcgcaggagctggaggcgaagatgaagtggaccaacctcctctacaaggcggagggcgtgaagatccgtgacgacgaacgcctgctgcaggaggccctgaagcgcaaggagaagcgcagggcgcagcggcagcgccggtgggagaagcgcacggccggcgtggtggagaagatgcagcagcgccaggaccggcggcggcagaacctgcgcaggaagaaggcggcccgcgccgagcgccgcctgctcagagcccgcaagaagggccgcatcctgccgcaggacctggagcgcgcaggcctggtc

SEQ ID NO: 59538 - DNA, 1054 bp, Homo sapiens
ttttttttttttcaggtcgttttttactagtgtctggaagacatttaggagaattccaactgattaccatttacagtgatcacaatgaaactgctcagagttatcactgaacttcagtaagaaaatacaacagagtgccatcaggacaggggagagggcaggagactgctccatcgctctgctcatgtccacactgccaaggtccccaccacgggggtccccagtgcaccccagctccggggcagaagaggcagcctgcagatctctgctgccgggaaagagctcctgaagttgtggggtctggactctgctggggacggggccttccgcgagtctcccacctctcgggggactgcagggagaggcgtctccagtgggcagccttgggtcacttccatagctcccccagcggcttctctgtggcagtgcggatggcgtcctcagagagcacgcggatgtcctcatggacagcttcgatgcttttggaagcatccaccatcttccagttcaaagtcgtgtctttcatgagctggtggaaacaccggagcgcccgctcctggaaagccccgttctcatagcgctcatggccaaacgctccccgcttggcagcatccgccagctgtaactggaggaacaggaccaggtcgggtttgggaaggcccacgtctggctgtttacaccaatctagggaaaaattctccttggcaccggtgaaggccacaccagaaaatgcgtatctgtccacgacgagggtcacgccctggctcaacttttccttaattaacggcacttgttcccagcgatttgcagaaaaaagcaggtgcaccgagtgatcctccacgtcacttttcttttgcaagtaggaactcagaagtttgccgatttcagttgatctttccgggaaccggagcagttcggcgcggtggcccgcggcgcacagcgcttccaccagcttgcggctctgcgtgctcttcccggcgcggtccacgccctccagcactatgagagccccgcgccgggccgccatgactgtccaccgcgccgctggcgaatt

SEQ ID NO: 59539 - DNA, 1439 bp, Homo sapiens
ggatccgcgcgcaatggcggcgctgggcggggatgggctgcgactgctgtcggtgtcgcggccggagcggccgcccgagtcggcggcgctgggcggcctgggccccgggctgtgctgctgggtgtcagtgttctcctgcctcagcctcgcctgctcctacgtgggcagcctctacgtctggaagagcgaactgcccagggaccatcccgcggtcatcaagcgacgcttcaccagcgtcctggtggtgtccagtctctcacccctgtgcgtgctgctctggagggaactcacaggcatccagccaggcacatccctgctcaccctgatgggcttcaggctggagggcattttcccagcggcgctgctgcccctgttgctgaccatgattcttttcctgggcccactgatgcagctctctatggattgcccttgtgacctggcagatgggctgaaggttgtcctggccccccgctcctgggcccgctgcctcacagacatgcgttggctgcggaaccaagtgatcgccccgctgacagaggagctggtgttccgggcctgtatgctgcccatgttagcaccgtgcatgggtctgggccctgctgtgttcacctgcccgctcttttttggagttgcccattttcaccatattattgagcagctgcgtttccgccagagcagcgtggggaacatcttcttgtctgctgcgttccagttctcctacacagctgtcttcggtgcctacactgctttcctcttcatccgcacaggacacctgattgggccggttctctgccattccttctgcaattacatgggtttcccagctgtttgcgcggccttggagcacccacagaggcggcccctgctggcaggctatgccctgggtgtgggactcttcctgcttctgctccagcccctcacggaccccaagctctacggcagccttcccctttgtgtgcttttggagcgggcaggggactcagaggctcccctgtgctcctgacctatgctcctggatacgctatgaactctcaccggctccccagccctccccaccaaggggtactgcaggggaagggctggctggggtccccgagatctcaggaatttttgtaggggattgaagccagagctagttgcgtcccagggaccaagagaaagaagcagatatccaaagggtgcagccccttttgaaaggggtgtttacgagcagctgtgagtgaggggacaaggggcaggtcccaggagccacacactcccttcctcactttggactgctgcttctcttagctcctctgcctctgaaaagctgctcggggttttttatttataaaacctctccccaccccccaccccccaacttcctgggttttctcattgtctttttgcatcagtactttgtattgggatattaaagagatttaacttgggtaaaaaaa

SEQ ID NO: 59540 - DNA, 2558 bp, Homo sapiens
ttttttttttttaaacgtttattacttcaagagtgaattatttttcaaagatgataaaactcatttctattccagtagaaaagggtcacaggtttgccccagggtccaggagcgcccggaaggcagggcccccaggcctcttcacctcagcctgggcacctataatctgagggaccctgtgagggggtgggggcagctcgggggcacagcctgcggccacttcggccagagagtggccggctcagtccataggatgatgtcagtttaggctggaggaaaagggcgccagacaacccgatgcagtgcctgtgaagacttcggggggatcaaagtccggccggggtgggcggagaccctcgggcagctgcacagggcatcttgtgctcactccattgttttccgaggcctgtgtaaaggcgctttgcctggcctggcaggtagaccaaggccaaagctcgtggccagggcctgggcactgagtccccactgaatttggcacaggaaggcggcactcccagcctggcccgtcctgcatggggagccaccacaccgggactgcagtgtttcaccttggaggggaggaagcctgggcccaacggctgaacgggacaggccaggctcacccgaggaaggggacgcaggacccacagcccctgtggtcaggcctgtgggccacgtggagagaaggttccagaacagtgcttgttgacgagcctctccctacaagtcccttcagcagcagctccatccctgagtgtctgcacaagcctgcacgcatgtgtgtatgtgtgccagggcgtgtgtgcaggtgtgcaacaggcacatggcagctgggaggctcaggctgtggggctggggggctgtccgctgggagagtccgggagaagcggggtgtaggggctggggggccggtcaggcccagcggccaggcctggctggctcacggtgtcctcaggaccctacagttttgcttcctgcagcacagagcccttgggagctgatgtcatcagggattcagaataggcctgaatggcctccttatcctttgagccctttttactactactccaaaataaatagcatttctcttggctccggatttggcagatgacagggaccagcagcaggacgcagcccagcgccaggaggacgtactgggcatagtgcatcaccttgggcatcaacaccagctgagtgtagaatgtgtgaagagtctccccctccatggccccgctctctgcaaaccagagcagcggcaggaccacaggctcaatcttcccagtttgtccaatgcctgcgacagatttcatgtagaggctcagctgcagtttcacagagcagttcatggggattcccgtgaccgggtggatgtccaggaacaaggagtgtgcctcctggttagggtgcaggccagtcaccgcttctgccagaaccgggtcggcgttgaggaagtgaggatgggagagaaacaagggggcactgaacctgcaggtgctgacgttctgaattccagactccaggcacgggcagaagccttcgttgggtgggtagatggacccgttggcaaacagggttttgggagccacgaagcgataggtggggatgccttcaaacacccctgactccttgtacattagcttcatggatcggcaggcctccgggctgtagaactccagcgaggactcaggagtcatgaagggcggccacatttgcccagaagttccattgatcatgttgcactgatcggaatgccagaagtcaaccttgctcagcccgttccacttgtccacgaggtggatcctgctgatgttctggacccccgtgaaccccgtgaagagcccagagtcggagttgttgagctcagcaaataatccgaacttgtccttgaaggggaacatgcctggaaagtacttgttgatgagattcacaagggggtccttgtagccccacatgatctcacccacagtgcggttcatgaaggcacgttcgccgagggtggtgaatgccaaggtcatgatgagcttcagggtcatgggcttattctccatcatcaccgccgcacccaagaccaggatgttgggcatgacgatgtagtcgctctccgagccgtgggacttggagggctggaactggaaggtgcggtactcgaggaaggacacggtgtcgttgttgttgaaggtgatgttgcttttgtgcctgaactccctgtacacgtagggcccgcgctcccgcacctgcggcttctcgcccttcaggatctcgctggggttcatgacgtcaaagaagtagacggagagatagaaggggatagggatctccttccacatgttgaaggacaggctactggggtcgatgcgcacgttcttaaggacctgctgcttgatgagcgacggcaccatcacgatcatgacagcgcccagcacagcgcacagtagccccgcgacgcccagcgccccggcagcccagcgcgctttggcggagcagcccatgtctgcgcgcctggggcccacccgcggctcgcagggctccgcgcctggcaggagacggggacggcgacg

SEQ ID NO: 59541 - DNA, 970 bp, Homo sapiens
cggcggttgagagcatggcctctccaggggcaggtagggcgcctccggagttaccggagcggaactgcgggtaccgcgaagtcgagtactgggatcagcgctaccaaggcgcagccgattctgccccctacgattggttcggggacttctcctccttccgtgccctcctagagccggagctgcggcccgaggaccgtatccttgtgctaggttgcgggaacagtgccctgagctacgagctgttcctcggaggcttccctaatgtgaccagtgtggactactcatcagtcgtggtggctgccatgcaggctcgctatgcccatgtgccgcagctgcgctgggagaccatggatgtgcggaagctggacttccccagtgcttcttttgatgtggtgctcgagaagggcacgctggatgccctgctggctggggaacgagatccctggaccgtgtcctctgaaggtgtccacactgtggaccaggtgttgagtgaggtgagccgcgtgcttgtccctggaggccggtttatctcaatgacttctgctgccccccactttcggaccagacactatgcccaagcctattatggctggtccctgaggcatgctacctatggcagcggtttccacttccatctctacctcatgcacaagggcgggaagctcagtgtggcccagctggctctgggggcccaaatcctctcaccccccagacctcccacctcaccttgcttccttcaggactcagatcatgaggacttccttagtgccattcagctctgaggccagagcatggtcctccacccttcctgccattctgccctgggctcctcaggtagttggaattcctgacttaggacttggggttgggtccaaggtgcttacatcccaggggcctcatgcctaagatagagggtgggagcgaacccacatgaaccaatacagcccagctccaactagaaaaaaaaaaa

SEQ ID NO: 59542 - DNA, 746 bp, Homo sapiens
cagtggtgtgttacctgcccacagcataatgcgaggcaaggtccagccgttccgcccggcatacaagcttatggagcagccccctttgaagatctccaggtggacttcacagagatgtcaaagtgtagaggtgatcgagtgtggatcaagaactggaacgtagcctctttgtgtccactgtggaaaggaccccagactgtcgttctgagccctcccaccgctgtgaaggtagaaggaatcccagcctggatccaccacagccatgtaaaacctgcagcgcgtgaaacctgggaggcaagaccaagcccagacaaccctttcagagtgaccctgaagaagacgacaagccctgctccagtcacacccggaagctgactggtccacgcacggccgaagcctgaggaagctcatcatgagattcatttttcttaaattttggacttatacagtaagggcttcaactgatcttactcaaactggggactgttcccagtgtactcatcaggtcaccgaagttaggacagcaaattaaaacaatctttctgttctatagttattatgaatgtatggaaacaataaaagaaacttgtttgtataatgccactcagtacaaggtatgtagcccgagaaatgaccgacctgatgtgtgttataacccatctgagccccctgcaccaccgtttttgaaataagaataagaactggccttttcctaggtgatacaagtaaaataataactagaacag

SEQ ID NO: 59543 - DNA, 2399 bp, Homo sapiens
ggcggaattccgggcttgctcgaggcgcaagcgcgctggcccggcacggcggtggtcttgcgggaggcgtgggctgggattgcggtgcctgtgcttcccggtgccagggtgtcatggaagggctgctgacaagatgcagagcattgcccgccctggccacctgcagccgccagctctctgggtatgttccttgcaggtttcaccactgtgccccaagaagagggcggcgcctgctgctgtctcgtgtgttccagccacagaaccttcgggaagaccgggtgctctccctgcaggacaaatctgatgacctgacctgtaagagccagcggctgatgctgcaggtgggcctgatctacccagcaagccccggctgttaccacctcctgccatataccgtccgtgccatggagaagctcgtgcgagtgatagaccaggagatgcaggccatcgggggccagaaagtcaacatgcccagcctcagcccggcagagctctggcaagccaccaaccggtgggacttgatgggcaaagagctgctaagacttagagacaggcatggcaaggaatactgcttaggaccaactcacgaggaagccattacggccttaattgcctcccagaagaaactgtcctacaagcagcttcccttcctgctgtaccaagtgacaaggaagtttcgggatgagcccaggccccgctttggtcttctccgtggccgagagttttacatgaaggatatgtacacctttgactcctccccagaggctgcccagcagacctacagcctggtgtgtgatgcctactgcagcctgttcaacaagctagggctgccatttgtcaaggtccaggccgatgtgggcaccatcgggggcacagtgtctcatgagttccagctcccagtggatattggagaggaccggcttgccatctgtccccgctgcagcttctcagccaacatggagacactagacttgtcacaaatgaactgccctgcttgccagggcccattgactaaaaccaaaggcattgaggtggggcacacattttacctgggtaccaagtactcatccattttcaatgcccagtttaccaatgtctgtggcaaaccaaccctggctgaaatggggtgctatggcttgggtgtgacacggatcttggctgctgccattgaagtcctctctacagaagactgtgtccgctggcccagcctactggccccttaccaagcctgcctcatcccccctaagaagggcagtaaggagcaggcggcctccgagctcatagggcagctgtacgaccacatcacagaggcagtgcctcagcttcacggggaggtgctcctggacgacaggacccatctgaccatcggaaacagactgaaagatgccaacaagtttggctacccctttgtgataatcgctggcaagagggccctggaggaccctgcacattttgaggtttggtgtcagaacactggtgaggtggccttcctcaccaaagatggagtcatggatttactgaccccagtgcagactgtctaaatgcccccagcccacccctgcccccatttgcagccttggtgttcgttctaacactgcattttcctacacccctttcctggactgctctctccagaaacagcacagctcatggagggtgagatcatgttagggaaatcaatttttatctagtcatttgttcagattatttgtatttaaagtcattaacttgatccctttctccagactggccatgccgccatatacctttccttttgtattccattgtggaagcttctaggaggctgagaagcaggagatccaagctccagtcctgggtgttaccctgaggggggaagtcacttcccttctctcagctgagtttttcacgtgtaagatgagaatggctgatggctgagagcccaccaaccttccccaccccgtatcagtttgaccacgggccttttgctacattctatccagagagcaggcctgccagcccctctcccactgagaaagttgggcctgaagaagtatggggaaaaaagaatcaaagagaccctgactgcccgcccaaactcacctagtgaccttagatacatcccccttccccctgctggggccgtcagtttccccccatctgtaacttgagaaaatagaactagatctgtaaagtctggaactagatctgtaacgtccttataggtgtcactagggggttcccatgagaggtgtgtgacaggcagtctgattcctctcattctccatagtctgtttcctggaaagtcgatgtaattaactgatggcccaaaaactacctcaagagacctggccctgttaagacggcttaaccactgagatcccgttctattgatttaataaagtcgaaactattggaaa

SEQ ID NO: 59544 - DNA, 1839 bp, Homo sapiens
ttttttttttttccataataacaaaagtcagtttattaaatgctcaattctcaaaattatatatatatttttttaattatttaaaaaaacttccatgcccttccattcccctccctccaaactaggtattgtccaagttgtatcaaatgccacaaagtctaccatgcacccagaagcagagaagacaggaggtccagaggacaaggtatgctggggtcactactcgcactgcagagtccacgcgagttaactcatgctgggggcaaagaatggaaagagctaatacacagacaaagcaaaagaacgaaatgcgcagcctgaccagagacgtttacaatttataccaacttacaaatatttagggtgcccaccaactccgagagaacagaccaaactaaccacatgaaggaagacctctgccggggcctcctctccctacaacctcctctcaagaatcattaggaagcccaaacagcttcacagttccggcttcccggctgctgtcatatttgccgtctttgtcatcacaggcaaatgccagcagaggccttttggggtgccacgccactgtgaaggtcggagactcacactgtacctcccatagtttgtcccctgtctccacttcagcaatgtcaataaaatgatcttccgatgctgacgccagcattttcccatcatggctgaaactgagggttcttacaggccaatccagcctggaaaagcaccgaacacacactaactcatccacatcccagaggctgaccaaagcatctgcacttcctgtggcaaagtacttccccatggggtcaaacttgatacagatgcagttggaaggatgggcgttgatggactgcacaggcttcagttctgggtagctgaggatgttgatacaaccattgccatttgtcaggaagaacatattattgtcattgttccaggagatttcgttgacctcgaacttgaactgctcttctgctttggaacggtgtgtcttggcatcaataaaggtcaccacatcatccttgttgcctacagcaatggtctgcccatcaggactccagcagatattaatgttctcccctttagtgttcacagtggcaatgcattttgtagtcctcacatcccagatgcgaatggttttatctccggacgccgtaacaaataggtcaggattacttggatgccaacaaagctggtccacactatccccatgtccccgataattgttttctttgaccaaccggtccttctccagcaagaagacgctggccgtcttgtcgaaggaccccgaggctaggcgacgcccgtcgcaactccaggccaccgagtgcaccttggcgctgtgcgccaggaactcgcgcgtcttgctgtggccccggaacagctcctgcatcccaagcacgtagcgcgacgggccgctgctcactgagcaccacggggccatcgagccggggccgctctggcccaacgccgagggccccatggctgcagcggggaccgccatgccgagctccccagcttccaactcacaacactgcagcagcctccacggcgcagtcagtcctggcgccgctgccgcacgcatgcgcccggaagagcgacggcccctctgcgcaggcgcgctgtaccccgccccggaagggactacaaatcccggtatgcagcgcgtgcccgcgtctgcttacttagtaatatttggttcttttaactccaaatatgcttcacacttaacgattccgagtttttttagtgttcttatttctcccttacctattctttggtagacatatgtgtattcctgtttaatcgaataaaagaaccaacactaaccttctaaaa

SEQ ID NO: 59545 - DNA, 2082 bp, Homo sapiens
ctcccccccccgggtattaaattggggaacccccggggttttcccccccccccgtgtttaaaacccggccccggaatttaattttggggcccccaaaaaaaaaaaataactttcccccccccgggactaaaaatttgttcccttaaaagggccccccccttttttttttttgagttttttcctcttttattaagtccgctatactaactagaaggagaatctgtggttttcgcctgatagaccacagggccaatcaccacagcttcttgtagagaacatggagagtgccaagatcaccatcaggtgccgcttccttcctgtggctttccatcttccagtcagcctggtcttttgccttgaagggccccaaaacaacagccctggctatcatcttcatcccaaaagcggagaagatgggcaggcaagaacacggagggtgtcacagagaggttcccatcaggttcacagggcgcccgctgtacctcttggagatgtcagcttcaatcagcttctgcagctccttggtcttctccagtagcaggtccagcttaggctccagagccgcctgctcctcaagtgcctcctgctgcttctgcaccatcagctctttcttcaaagccagcagctgggactgcttcagcttttgctggaggaattcagtcactcggtccacataccttggtgaggccaggatcataaacaggtgttgcagctgaagactggtaagcttgccaatcagatcctccagcactgacaccatggtaaccatcttctctttggtctggccctgcaggatggctggagccagctggaactggctcacagacaggacatctgcctcctcactcaactccactgctctctgggctaagaagatctcaagctccatgagctcatcaaggaactgattccgggtctcagtgtattcaagcagtgtcagggcatctgggcccctggcaacaccttctggagcctgggttcctgcttccagcactgtgatctgcaaagcaacagcatcgtctccccagtctatcccatcacctccaggatcctttgaatctgattccgggaagatgccccagtcgattccagcagcctcggcagagatgccagagtcagtcccctcagacactgcctctaccccaaagtcgccccagtcaatcgcatcttctgccacctgctcaggaagctcctcgaggtggggtcgttccaccacagagggctctgtccctgtcctccactcgtacaccgttgagtttccccgcttctgcacgaaccgcagcattggcaacacctgctctgtggggctctcacacacaaaccccacagacgcctggtacacgtcaatggcttcccccagggactgctgagccgctgccccaatctcagccagctgactcggcaggtccttcaccagggccagcagttctcctcggacattttcgcccgtgatgccatactgcttgcaggagtggtagaactgctcccgcatctcggcagcccctgcctggcactcctcctccttgcggctgtattcttgctgcagctgctggcacttggcaatctgcttcttcagtgaggggatctcatagttgacattccgaaccaggaggctagagagttccactaagtaggtgttgtccttctcatacagagctataatctcctgccaatccttcatccgctgtgaagagtatcggccaaaaatattcttcgtggaggcctctgtgcctttgagaaggtccaggattcttaggcagtgaaagtagtgaatgtaggacccagacagcagctgggcgatctcttcgctctctggcatgtcctggatggcagcattgatcttctcgcggatcgtcagcaccagactctgccatttcaggctgcagtgccttctgtccaccagccaatcgagcagcttgctggtctggatgtcgatgggcacgtgctgatggtcctccatctttcctccacttccgcttcaggctggagactgtggcccgccccgccctaccaccaatccagtggcgttgtggccgagcctccgtttagacacaaacgggcatccttcggccacctcgtgcc

SEQ ID NO: 59546 - DNA, 3551 bp, Homo sapiens
gagcactgcttctcagtccccacactgtcttgctgcatactgaaattgtcactacatgcaagtgacactcaaaccctgcctgccaaatctgtcatcagaagcattgcctttgactcagtttccttgcctgttaaaaatgtgtagagaagctaatcattgagagaaagtgaatgaaagcagttttttcaactgctctgatggaaacccagattcatgagaccctcttttgtccttgaaaatagcattgtcatcactgcccggtttttgggagaatattattttattatcaaatgtacagtatattgaccttaaaaatacagtaaagcagtcatggaaataacaggtcgtgtattattcatgggcacaaactgactcatggctggggaagaagcagccaccttagaccagatggacaagccagatactgcagagaagtttctgggcttttcggggaagactctagattcaattctgtaaagttatgatgcagttttctccttcctctcctctcacctcctctgagcacagctttcaacaaaaactttgcatacaaggaaatctaatatcgcagccttccccactggagggttcctggagaaggtaatataacagtggtgactgaatttgaaggaggttggagagaaattttttaaaattatatttccatgtctgctgtaatgtatccaagtcttgtaaagaccaataatttattaattttaataagacagaaagtatttctccttctagtctcatcgtctgatttgaaaggaaaaaatatatatataaaacattatataaaaagtgagttccaggaagaaatgtttttcttttttcatataaaatggtagctgtatgtatgtaactctgaattaaaatatatatatatatcagtcactctggttctaaatccttattgggcaagctggagttttgaagtgacagaggaaataactgaaagatgacttgtcaatctggaacaaagtctatcatgtaaaaactgcagcaggttaactaggtgatgcgtcttcaatggggtagtgaggtgttgttcatgtctatggcttatttttgatgaatgttcctcagatatcctatggacgcttatgaaggcagtcgagtggcatttgcaaaaaaagaaaaattgcagtcagagcacagacaccctgaatgaagcccctggcatgatgtaaacacaaaagaaagtgtctcagcaaggctgagccctccttctcgtgtctgcattgcttccttttcccaacaattgtagatcaagatcaacctcaacttgaaacccaccagaggccaccatgcactgtgacacattatttaagagctcctattccccaacctggcttcccttacaaaccccgctttgttgtcagttcctaagcaatcattctggaatccacatttcagaagacgtggatgtaagttgttttggagtcactgccgagaatgttttttgccatgcacttgtagaagccggcatctctctgtgtggcatgctggatggtcagtgatccctgggggtgaagaaatctgtttccatacagacgagcctgaacccctgccttcagatgcgacttatccggtaactcccacgtgatgtcagctttgggaatccccatagccatgcagttcagtttcacggtgttcccgggccgggtgtagatgaccggggtgggctcgctggtgatccggggaggataggcgatcacaatcacggggatgctggtgaccgaagggccgtactccgtctccatcctgcatacataggtacccctgtcaaacaccgaggcctcacgaaccgtgagggtgccattgtccagaagagaaacgcgtcccagggtttgggggccctccagatgcatgccattggggagcgtccaggagaaacgtccctgcccagccccgggaggggtgcaggggagcttcagggtctcaccattgatgatgctgaccaggttatgatactgcttgtttgcttctggcttcagtcccaccttcagggagaccagcctctccgtgtggccagcggcattgcgggccacgcagcggtaggccccagcgtccaccgaggagagaccgctaatgtgtagcatgccgtcagccttgtggtagaagcgctgcagctgctgtccactctgcagatcggtgccattgggaaggacccacaccaggctgggtgtcggggtccccgcggcagagcagttgaggctgatggtgtggcccgccatggccgtgatcttctcgctgatcgggtcgtggaagatgggtttctccatgggctccaggacagtgagctgcacgatcaacctggcctcccctccctcgttgcgtgccatgcataccagctggacggagtcgctcttcctcaaactcctgatgtccagggaaccgttgccatggacagtgatccggtttccatagtatggagctggcagaaccacaccctcgggaaaagcccataacaccctcggggtggggatgccttcagctttgcagtcaatcagtttccgactgcccccggctgctatctcccgcacagtggtgatggggttggggttaccgttgatcttgggtggctggacgttgacgtgaatccacaccgtcttcctatcctctcccgcgctgttcctgaccaagcaggtgtagttgccgctgtcagaacgctgggctttctgaataaggagagtgccatcttggtatatctgatacttctcagaggaggtggggatcaccttgttggttggggacaaccaagtcaccttgggcatgggttctcctttggcctcacaggctacagtgaccacgtctccatagggcacctgaaccgccaagcaagtcttgttccggatggtggcgggcgctgtcaccaccttgactctgactctcatctcgtccttcccgacctgattttcagcaaagcaggtgtagtctccttcctccctcatccccacttcgttaaagtagagtgtcccattgttgaagacgacatagcgcttggtgcgtccaccgctgtcatccgactgcatgaaggagttcaccagactcccgtctgggaggctccaggagatctcgggattgggaagcccggtggccacacagtccactttcaggtcacccccgtagaagactttgtggtcgttctcctccttgtgttcaatcttggccggtttcatcaccacatccactttgagcaccacgtagtcatcaccaaccttatttcgagctacgcacaggtaatctccggcatctttgtccgtcactgatttcaccaccagggtcccattggcaaacaccttgattctgctatcaaaactaagagcgcgtcgatcatcctcttggacggcagcctccagaggatgcgcggccaggggtccccgaggcgctgcagtccagcttgagggttcctaagcaatcattctggaatccacatttcagaagacgtggatgtaagttgttttggagtcactgccgagaatgttttttgccatgcacttgtagaagccggcatctctctgtgtggcctcgtgccgaatgcctgcagg

SEQ ID NO: 59547 - DNA, 1451 bp, Homo sapiens
  misc_feature (1)...(1451): n = a,t,c or g
gattctcctgcctcagcctcctgagtagctgggactacaggtgcgcaccaccgtgcggatttttgtatttttagtagagagggagttttgccacattggccaggctggtcttgaactcctgacctcaggtaatccacccacctcagcctcccaaagcactgggattacaggcgtgagctattgtgcccagctgggatcttgacaaaaacactatttctctcctttcacctgtgctgtgtatttttccctcgcctagttcccagacctcactgctatatgtcttctccctggcaggcaggatgacgcaaaacacggtgattgtgaatggagttgctatggcctctaggccatcccagcccacccacgtcaacgtccacatccaccaggagtcagctttgacacaactgctgaaagctggaggttctctgaagaagtttctttttcaccctggggacactgtgccttccacagccaggattggttatgagcagctggctctaggggtgactcagatattgctgggggttgtgagttgtgttcttggagtgtgtctcagcttggggccctggactgtgctgagtgcctcaggctgtgccttctgggcggggtctgtggtgatcgcagcaggagctggggccattgtccatgagaagcacccgggcaaacttgctggctatatatccagcctgctcaccctggcaggctttgctacagctatggctgctgttgtcctctgcgtgaatagcttcatctggcaaactgaaccctttttatacatcgacactgtgtgtgatcgctcagaccctgtcttccctaccactgggtacagatggatgcggcgaagtcaagagaaccaatggcagaaggaggagtgtagagcttacatgcagatgctgaggaagttgttcacagcaatccgtgccctgttcctggctgtctgtgtcttgaaggtcattgtgtccttggtttccttgggagtaggtcttcgaaacttgtgtggccagagctcccagcccctgaatgaggaaggatcagagaagaggctactgggggagaattcagtgcccccttcgccctctagggagcagacctccactgccattgtcctgtgagctgccaaagaccccacggggtgcccgcatgtccctgtctagggcagcccagggcccccactcctggctcctcacacttgcctcccctatggccgctctccagaccctcctcctttcttctccccacatccgcacctgctgttcccactctggggttctcaagtccatgaacagatattgttgcattttccacaatgctgattaaacataataaacaatccagaaaagcagttttgcccagaaagatatggttttccttttgtttattacaccttgtggcggccatggaaagggcttttntttgtgttcggtatgtatggaggttaaanggggagctga

SEQ ID NO: 59548 - DNA, 1309 bp, Homo sapiens
gcggccgcccgcgagcggggcggtgccacgtacggctccggaagaagcgacggaatctgctagggcacaagagagacgggcgctcgcgctctcgcagtcctcttccgtcagtgtcttttgcttcgactcccggcggagcgcgcaacgtggagtgacgtgcaggggccaagtgcaacccaggcagccacggctgtttcggagctcaggactctaaaatggcagagcagctttctccaggaaaggcggtggatcaggtgtgcaccttccttttcaaaaagcctgggcggaaaggggctgctggacgcagaaagcgcccggcctgcgacccagagcccggagaaagcggcagcagtagcgacgaaggctgcactgtggttcgaccggaaaagaagcgggtgacccacaatccaatgatacagaagacccgtgacagtggtaaacagaaggcggcttacggcgacttgagcagcgaagaggaagaggaaaatgagcccgagagtctcggcgtggtttataaatccacccgttcggcgaaacccgtgggaccagaggatatgggagcgacagctgtctatgagctggacacagagaaagagcgcgatgcacaagccatctttgagcgcagccagaagatccaggaggagctgaggggcaaggaggatgacaagatctatcggggaatcaacaattatcagaaatacatgaagcccaaggatacgtctatgggcaatgcctcttccgggatggtgaggaagggccccatccgagcgcccgagcatctacgtgccaccgtgcgctgggattaccagcccgacatctgtaaggactacaaagagactggcttctgcggcttcggagacagctgcaaattcctccatgaccgttcagattacaagcatgggtggcagatcgaacgtgagcttgatgagggtcgctatggtgtctatgaggatgaaaactatgaagtgggaagcgatgatgaggaaataccattcaagtgtttcatctgtcgccagagcttccaaaacccagttgtcaccaagtgcaggcattatttctgcgagagctgtgcactgcagcatttccgcaccaccccgcgctgctatgtctgtgaccagcagaccaatggcgtcttcaatccagcgaaagaattgattgctaaactagagaagcatcgagctacaggagagggtggtgcttccgacttgccagaagaccccgatgaggatgcaattcccattacttaggtttcccataattcttaaatttaaaaaataaacgttttgttcttttggaagtaaaaaaaaaa

SEQ ID NO: 59549 - DNA, 2450 bp, Homo sapiens
gactgagatcctggagataagtcccggcgcttgcgcggcggcggctatggcggcggaggaggaggaggtggactctgccgacaccggagagaggtcaggatggctaactggttggctccccacatggtgccctacgtctatatcacaccttaaagaagctgaagagaagatgttaaaatgtgtgccttgcacatacaaaaaagaacctgttcgtatatctaatggaaataaaatatggacactgaagttctctcataatatttcaaataagactccacttgtccttctccatggttttggaggaggtcttgggctctgggcactgaattttggagatctttgcaccaacagacctgtctatgcttttgacctattgggttttggacgaagtagtagacccaggtttgacagtgatgcagaagaagtggagaatcagtttgtggaatccattgaagagtggagatgtgccctaggattggacaaaatgatcttgcttgggcacaacctaggtggattcttggctgctgcttactcgctgaagtacccatcaagggttaatcatctcattttagtggagccttggggtttccctgaacgaccagaccttgctgatcaagacagaccaattccagtttggatcagagccttgggagcagcattgactccctttaaccctttagctggcctaaggattgcaggaccctttggtttaagtctagtgcagcgtttaaggcctgatttcaaacgaaagtattcttcaatgttcgaagacgatactgtgacagaatacatctaccactgtaatgtgcagactccaagtggtgagacagctttcaagaatatgactattccttatggatgggcaaaaaggccaatgctccagcgaattggtaaaatgcaccctgacattccagtttcagtgatctttggcgcccgatcctgcatagatggcaattctggcaccagcatccagtccttacgaccacattcatatgtgaagacaatagctattcttggggcaggacattatgtatatgcagatcaaccagaagaattcaaccagaaagtaaaggagatctgcgacactgtggactgaacacactgaagctctgatgggaaaacctggtgactgatatagttgttcagcaataattcatagtctgtgatgaagagtagtgaatacaacacacaaccaggcagccttcttgactatactttgcacatgttttctttaggaattcactcacacatttaaaccagttagtgccttctagaagaatggctttcctttctcctacacaaaattgaaatatacaagtctctaaatataatacctttaaataaaaggttatttgtccctctgatgtactgaaaaactgtaatttttcagctgaaaattttttaatctaactttgctagttatttttatattgcaatctatattaccaatttaggaagtgatttctgagtctcttacactgtaaaggtgcactttattttctttgtcttccccatcatgtatttattgtgtcttgataactgatattaatctaaattcaatgtgtttttatgtaaaaatttgtcagttgtttagaatatttcactttgtttttgaaacggagtgacaaggcagatttttggttagaggacgggagttgatcactatcattactttttctagtttacctgttttttatatttaaggctgctaagccatgttcagcattttaaatgtggtctatcctgacatacagtgtataacaacataactccttggaacctcctatgtgtggtataattctactcttccaaggaacatgacttcaatactttcagtgattcaggtactgaaaagccttaccctaaaagggctgttctttgtttccccctttccatactattcttttcccatgacccaggatgcagcaaatgaaacagatttcttctcttaaggggatattaagactgttacttcctagtaaggccaagtaataccatatttttattaacatcctaacttttgtaggaggggtgctaaaattgcatacattttaaccactgaaaatagaaaaacaagtggtgcctattatgtctcatgggcaccagaaatgaggctaggcacttggggtttgttgttggctgttgtttattaaggagtattgtgttaattaaatcattacatacttgaagttatattccaacaattctaagaagttggattgacctatttttttaggaactaccatcaagtgtagcattttcttgcagttttaaaatgaggaaaacttctttgaaactgtgaaatgctccatgtggtaactggctgctgagaaaacccttcaccaaaaaaataaataaaaattgaataggattgtcatcaagaaggcatctttcgctaacgttgcttgtctaggagaaaggtagctatgtaaataaaaacagtgaactag

SEQ ID NO: 59550 - DNA, 1470 bp, Homo sapiens
ggtgatgcagtgctgaagacctgggcccctgctcagtgcctttgctctagaatgggtccagcttggctttggctactgggaacagggatcctggcctctgtccactgtcagccccttcttgcccatggagataaaagtctgcaggggcctcaaccccccaggcatcagctctcagagccagcccccgcctaccacagaatcacacccaccattaccaattttgctttgcgtttgtataaagagctggcagcagacgcccccggaaacatcttcttctcgccagtgagcatctccaccaccctggccctgctctctcttggggcccaagctaacacctcagctctgatcctggagggcctgggattcaacctcacagaaacccctgaagccgacatccaccagggcttccggagcctcctccacacccttgccctgcccagccccaaactcgaactaaaagtaggaaactccctgttcctagacaagcgactaaagcctcggcagcactatttggacagcatcaaggagctttacggagcttttgctttttctgccaacttcacagattctgttacaactgggaggcagattaatgactatttgagaaggcaaacatacgggcaagtcgtggactgcctcccggagttcagccaggacacgttcatggttcttgccaattacatcttcttcaaagccaagtggaagcaccctttcagtcgctaccagacccagaagcaggaaagtttctttgtggatgagaggacttctctccaggtccccatgatgcaccaaaaggaaatgcacagattcctctatgaccaggatttggcttgcaccgtcctccagatagaatacagaggaaatgccttggcgctgctggtcctccctgacccggggaaaatgaagcaggtggaggctgctctgcagccacagaccctgagaaaatggggccaattgctcctgcccagtctgttggatttgcacttgccaaggttttcaatttctggaacatataacctggaagacatacttccccaaattggtctcaccaacatactcaacttagaagctgacttctcaggagtcactgggcagctcaacaaaaccatctccaaggtgtcacacaaggcgatggtggacatgagtgagaaggggaccgaggccggggctgcttcaggcctcctctcccagcccccatctctgaacaccatgtcagacccacatgcccacttcaacaggcctttcctcttgctcctttgggaggtcaccacccagagcttactcttcctgggaaaagttgtcaacccagttgcagggtaaccatggtgggaggccaggagttatcttatctcatcctggaccaaacagataggccagaaccagcctgcatcctggggctgctatgtggttcagttaatcagtgtgccaagattctaataaagttgaccttgggttctgtgaaaaaaaaaa

SEQ ID NO: 59551 - DNA, 1408 bp, Homo sapiens
tgaacatatttacatttgatttaacagtgaaccttaattctttctggcttcacagtgaaacaagtttatgcaatcgatcaaatattttcatccctgaggttaacaattaccatcaaaatgttttgtggagactatgtgcaaggaaccatcttcccagctcccaatttcaatcccataatggatgcccaaatgctaggaggagcactccaaggatttgactgtgacaaagacatgctgatcaacattctgactcagcgctgcaatgcacaaaggatgatgattgcagaggcataccagagcatgtatggccgggacctgattggggatatgagggagcagctttcggatcacttcaaagatgtgatggctggcctcatgtacccaccaccactgtatgatgctcatgagctctggcatgccatgaagggagtaggcactgatgagaattgcctcattgaaatactagcttcaagaacaaatggagaaattttccagatgcgagaagcctactgcttgcaatacagcaataacctccaagaggacatttattcagagacctcaggacacttcagagatactctcatgaacttggtccaggggaccagagaggaaggatatacagaccctgcgatggctgctcaggatgcaatggtcctatgggaagcctgtcagcagaagacgggggagcacaaaaccatgctgcaaatgatcctgtgcaacaagagctaccagcagctgcggctggttttccaggaatttcaaaatatttctgggcaagatatggtagatgccattaatgaatgttatgatggatactttcaggagctgctggttgcaattgttctctgtgttcgagacaaaccagcctattttgcttatagattatatagtgcaattcatgactttggtttccataataaaactgtaatcaggattctcattgccagaagtgaaatagacctgctgaccataaggaaacgatacaaagagcgatatggaaaatccctatttcatgatatcagaaattttgcttcagggcattataagaaagcactgcttgccatctgtgctggtgatgctgaggactactaaaatgaagaggacttggagtactgtgcactcctctttctagacacttccaaatagagattttctcacaaatttgtactgttcatggcactattaacaaaactatacaatcatattttctcttctatctttgaaattattctaagccaaagaaaactatgaatgaaagtatatgatactgaatttgcctactatcctgaatttgcctactatctaatcagcaattaaataaattgtgcatgatggaataataggaaaaattggcattgggaataggattttattttaaatgtggaaccatccaacaacctaccaacca

SEQ ID NO: 59552 - DNA, 6960 bp, Homo sapiens
tttcgtcgggctcctcggcggctactgcagaggattcagagccgagtcgctgaggaggaggctccggtccccgcgcgccatccgccaccctactggacacgggcgagagcgtcgccgccgtagcctccggagaagacaagggcatcgccgcctcagccgccgccgccgccgttttcgcctgcagctgctcaccggatcctcagtcttccacaatgaaccctgtttacagccccgtgcagcctggggctccttatggcaaccctaagaacatggcctacacgggttaccccacagcctatccagcagctgcccctgcctacaatcccagcctgtaccccaccaatagtcccagttatgctccagagtttcagttcctgcattcagcttatgcaactctgctgatgaaacaggcctggccacagaactcgtcttcctgtggcactgaaggcaccttccacctcccagtggacaccgggaccgagaaccgaacttaccaagcatcctctgcggctttcagatatactgcggggacaccatacaaggtcccaccgacccagagtaacactgctccacccccctactccccatcacccaacccctatcagacggccatgtatccaatcagaagtgcctacccccagcagaatctgtatgcccagggagcctactacacacagccggtgtatgctgcccagcctcatgtcatccaccacaccacggtcgtccagcccaacagcattccctctgctatctacccagcacctgttgccgccccgaggaccaacggtgtggccatgggcatggtggcaggcaccaccatggcaatgtcagcaggtaccctgctgactacaccccagcacacggcgattggggcacaccctgtctccatgccaacatatagggcccaaggaacccctgcgtacagctacgtgcccccacactggtaaagcctgcagcccatccaaatctggagtcacacattgtatgcaactactcaagtcttacaccggtgctggagcagttccctagcagcaccacctctatttgcaagaagagacaacggaagtgcaagggtcactttatgcatctttaatggttttgatttttatttttggtttttgtaaaagctgctttttctaatctcctgcctctccccaactgtccccctcttagcccctgcccttccagctctatccccttcctcctacctgaccaggccatgtcctctctgctcttccctaagtgtcctgtccctggggatcccagtctagaggcaagcagagagtagggtttattgcagtggttcatctgaaggctggattccatttgaagagcataaacagatgtggtccagggtaggaactcagagctgttgagcaggctacatctctaggggagtgttctggttgttttttcttaagcaagattagttcaggacattcccatgtcccagacacaaatgaaatgtctcctgagaaccattgcaacagaccaagaacaaaaccacctgagtatgtaggcgtgttattagcagcttaataccccaggctgagaacctggggaaaaaagtctttagaatttgggggagggtggggggagggagggcattgtggggaaggagagggaagaagggaggagcggtgcttgcctcatggctttggtttgaaaggtctctggccaaagcatctggccctggaccttctgatttgcacagtgatgttaactgacctggcacttcctcaaaaggtgattttgtccttagacctgccaagcggctgcagggtggtaggatcccagcatcccgaggccttggaaggccggatgccctgtgtcatccagacttcagcctctgagctgtcatggacccactctgatgaggagcttcctcctgattggagtgggaacctagggcatttctctcccttttcttttgcccttcccagtgccaggactcacctgtctgaccatagagcttgcaggcaggccaagctcttggttacctgtgccattcatggcccaagtgaaggaaccacattccaggtgggtgctggcagctctgaaggtgaggatagtgaaggaaaagcaatagcaataaacatttcatagactcatggaactgaagggaccttagcaatcatctcatccatttccctatttggcagatgaggaaactgaggcccagagaagcggaaaggacttccctagaccttacagtaaattagcattaaatgcagccttcctacctagtgggcaccttgcttacaaaaatttacctagggacggattggcttggttttgtaaaaattaagtcggcagcgcccatacctggtgagtctggaatggtctctgggctcctgtttctgctcttttcctccacggactccaaaggcgggggttgaagactgggcagaggctacatgggggcggatggcaggaacagaaattgcaaatgaagaaatagcatttggaaattctgtgaagacatctggaacttccgtcctgtacctgactccacctccaggagaaggagcaggtggactggccgaaaaggagaggccatgcttttaggacagtagcccctcatcccgagaggagaggaagaggaggaagacagtgggagtcatcaggagaggagaatgaggatgaggcccaggagacaggctcatctgggagaagagggacccctgggacgaggaggtccctgctagtctcagccaggagcctggattgcccagcagcagcctccggcacccagcgcttggctgggccagcagcccctctgggggtggggcacgaacattttattgtgaaaaatgggatcattgacaacatttgggactttaaaaaactgctttcatttaaaattcatgcaaacttggacatatccttaccccaacctcccatgtctccctaagggagggaaaaatcaggaaacccttgggttggaaggagctcagaagctgtctagccattcccaggagggtaaagcccatcagcctccttggcctagagccaggagtttgggggcccaccttcctgggcttccaaggaactttaggaccagtaagaaaaaattcagctgttctaaattatctgttctgggtgctgatgaggtttcactttaaaacaatagaaagttttccagtgttaattcactttttgcaaatacctccttccaccctctttggttttgtaaaggtgggtgaaggttgttctagattatgtcatacgtgtttgaaaaatgccaaaataataataatgataataataatagaaacctttggatttgtcaggtgcatcacagaggtcaaagcacttcacggcctttcatgtactcgccctgagagggacagggttagagttattacagtcaattgacaaatgaggaaacaggttatggaagggaacaggcccacagtgagcagcatgctggtatccgctaggcttcccagaaccctgctgcctccatgtgggctggggtggaaccacagagaggagaaaggaagaagaggagacctaggaatgaccttgtaacttttgttctttcaacaccagtaagtaaaactaacagctggacctcacagttcacagaacagttgaacataaattatctggtttaacccgatgaaatagaggttatttctcctatttgatccataaggaaatcaaggcttggaaaagtcaagtgacttgctaataagtgacagagccactcgaatcccaggctgtctgctgtctcgttcccctccatctgatccccacacaggctcacgtactgaagcatctgtgctctgtgccctatcttagcacctactatgtaattcaagagcaaaggggggccccaaggtgaaaataaggcactgaaaggctgtggtctggaagagcccaggtccagcacccctttttcagtatgagccccagttcagccggcctcagcctcttgctgtgatggagatccacaagcctagccaagcttggggagtcactgcaaaaggactgagcccaggagagcggggacagtcatgtgcctctggtaggatgggcacagttactggtaaggtcacagagatctagtgggaggtaccataggtagatacctccaaagattctagatggcacggtggtcaagctagacaaaaagtcagagctggaagggccgtctcattgaaggcaggcaagcaagagaggacaagggatgtagccgcctgacagtgagctacagcatctggcccccaggatgcaaacccctctctcctcctcatgccactgcctctccccaagtgcaacacctatggccaggatcaggggtacagatggctcgttaccagccaacccttttgaattcttctacttctacctgaccccctctcctcactggcctgggggtcaagaagtttgagtctgggagctggattgcctgcaaatagtgaaagcctgaaacataatggtttcccatgttttgaaaaaaaatgcatatttaatttcttcctcatgagataggacagttgctgttctttcttacctgggcaatgaccctaaaatgtatatcctctttcctgaatatttaggcagagacacacacacctgttccagaggcgtttttgggtatggcaaagtactttggacattggttgccaaagtcctccattttatagatgaaaaaactaaggctcaggaggcttgagacttgctaaaaggtcacacagcttggaagtgattcttcaaatcctctgctctttctgctgccacctgctgggtctcttggcaagcatggagggaggggctaactgtactttatagagctgggaagcccagtctctgagctgagcagatttgtatgaactgctttggggccagggacctgtaaatgagccctggggagggacccaggaggcacatcttaactgggcagcacaagggagggatgaggattttggcaacttaaaggcctcacttgggacaaaacactttgggggttcacaatgcccaggaccgaagacatgtttcaagggacagcacgaggcatcttttctattgggagacccatgttccttggtaagcctgcacacctggcttcctaatcccttgagagcctgcccactgtccagatccagtgagttggtacaaaacgtacagattgaagtccctggggtttgtttttccctgggtgagggaccagaaccagactctgagcatccttacccctggccacccgaattgttccaagtttgaggtaccccgttcccagagatctgggggtccttctttggagggcttgctttgttctgatggccttcagaaaggaatcacatgaagtataaaaggacaggccccttggtcaccaagttttggctcctcatacagataggactcatccaggttcccagcgaggcactgactaagcgaggctcagagcttccatatcaaattcctcagctttgttctgtgcccagagggggtgggccccattctgggccctgtgaactttgtcttatatatcaccatctgtatcagaattcctcctcaattgcagttaagtgaaaatacgtggaagtctgcttttccatcctgtattctcccacatcactactggctgtgcggcccccgctgcttgccaagcttgggaatccagagaggggcagtagtagagtgggccagttgggacccacccgcagagctgaagaaacacgccagactaactgatgggattccacaccggagcctctgagcgcacaggcaggcatgccaagggggctgcagggtttgtcctttacttatctgcccctttcctagaaaactcctcgtttctgaaattaggcattatatggttccaggacccagccttcaaaattcctggcaggccagcttcaacattccatggccagccctgcctaagccagacttgggtcccagtccctcagtctctccagtggatatcttctgtggtgcatgctgttgagtccaacccaaaggccaaccgaggcacacaggagttgggactggctgccacaaagctagaaagggacaaaacagcacttgcttccctatggccacatggatagtccctggatatccttgctgtggtagaggtcctctacccattccagccactgatagcagggggattttccttcctaaggagaacagatgtaacagctttgcaaagtaccggcccataggaatcaaatgggtgagatcagctttgggcctgaccccagcaagaccagcatctccagaccccagcctttctcctcaggcctaagagagtcagggaaagagaggagactgtcccagagaccttctcctcgggtcagccagatagtctggatctatggtgtgactcaagctcctccttacccagggggggtaaggccaggcctctagctacttggagttgtctgtaataatcttgaaaggcccaagggcctgtccccatcctgacttaaaggcatctgcttccctgtttcatatcacatgacagagaaacctgttctcatggcatgtaacatccctgtgaagagagcgttgtatatgattttgtattttttaattcattttaatctacaggttggaatctaatttttaaattttattggaactcacattttaaaaagaaataaaatttaaaataataataataataataataataataataaacctttgaccagtgtcttccaagtagtttgatcaaagaatttataggtgttttcaaaacacagtccggagtgtaaagattggaaagccccatggccttgcctggtgtgtatgaagtgtaaatctggttttgttttgttgttttggattcttttggggtttttggttttgttttgaagatcagacagtgatcactcctgaaagattgaagccaagaatttgtaacccatggtatttaccggtaagcctggtagaacactccataactattaaaaaaaaaaattcccccccaaaaaaaaaaaa

SEQ ID NO: 59553 - DNA, 1508 bp, Homo sapiens
  misc_feature (1)...(1508): n = a,t,c or g
ggcacgaggagccgcgggacgccggcagggttgtggcgcagcagtctccttcctgcgcgcgcgcctgaagtcggcgtgggcgtttgaggaagctgggatacagcatttaatgaaaaatttatgcttaagaagtaaaaatggcaggcttcctagataattttcgttggccagaatgtgaatgtattgactggagtgagagaagaaatgctgtggcatctgttgtcgcaggtatattgttttttacaggctggtggataatgattgatgcagctgtggtgtatcctaagccagaacagttgaaccatgcctttcacacatgtggtgtattttccacattggctttcttcatgataaatgctgtatccaatgctcaggtgagaggtgatagctatgaaagcggctgtttaggaagaacaggtgctcgagtttggcttttcattggtttcatgttgatgtttgggtcacttattgcttccatgtggattctttttggtgcatatgttacccaaaatactgatgtttatccgggactagctgtgttttttcaaaatgcacttatattttttagcactctgatctacaaatttggaagaaccgaagagctatggacctgagatcacttcttaagtcacattttccttttgttatattctgtttgtagataggttttttatctctcagtacacattgccaaatggagtagattgtacattaaatgttttgtttctttacatttttatgttctgagttttgaaatagttttatgaaatttctttatttttcattgcatagactgttaatatgtatataatacaagactatatgaattggataatgagtatcagttttttattcctgagatttagaacttgatctactccctgagccagggttacatcatcttgtcattttagaagtaaccactcttgtctctctggctgggcacggtggctcatgcctgtaatcccagcactttgggaggccgaggcgggccgattgcttgaggtcaagtgtttgagaccagcctggccaacatggcgaaaccccatctactaaaaatacaaaaattagccaggcatggtggtgggtgcctgtaatcccagctacctgggaggctgaggcaggagaatcgcttgaacccggggggcagaggttgcagtgagctgagtttgcgccactgcactctagcctgggggagaaagtgaaactccctctcaaaaaaaagaccactctcagtatctctgatttctgaagatgtacaaaaaaatatagcttcatatatctggaatgagcactgagccataaaaggttttcagcaagttgtaacttattttggcctaaaaatgaggtttttttggtaaagaaaaaatatttgttcttatgtattgaagaagtgtacttttatataatgattttttaaatgcccaaaggactagtttgaaagcttcttttaaaaagaattcctccaatatgctttatgtgagaagggatatnctgctcaanacccg

SEQ ID NO: 59554 - DNA, 2248 bp, Homo sapiens
aaattcccgggtcgacgatttcgtctgtcctcggagcaggcggagtgaagggacttgagcgagccagttgccggattattctatttcccctccctctctcccgccccgtatctcttttcacccttctcccaccctcgctcgcgtagccatggcggagccgtcggaggccactcagtcccattccatctcctcgtcgtccttcggagccgagccgtccgcgcccggcggcggcgggagcccaggagcctgccccgccctggggacgaagagctgcagctcctcctgtgcggtgcacgatctgattttctggagagatgtgaagaagactgggtttgtctttggcaccacgctgatcatgctgctttccctggcagctttcagtgtcatcagtgtggtttcttacctcatcctggctcttctctctgtcaccatcagcttcaggatctacaagtccgtcatccaagctgtacagaagtcagaagaaggccatccattcaaagcctacctggacgtagacattactctgtcctcagaagctttccataattacatgaatgctgccatggtgcacatcaacagggccctgaaactcattattcgtctctttctggtagaagatctggttgactccttgaagctggctgtcttcatgtggctgatgacctatgttggtgctgtttttaacggaatcacccttctaattcttgctgaactgctcattttcagtgtcccgattgtctatgagaagtacaagacccagattgatcactatgttggcatcgcccgagatcagaccaagtcaattgttgaaaagatccaagcaaaactccctggaatcgccaaaaaaaaggcagaataagtacatggaaaccagaaatgcaacagttactaaaacaccatttaatagttataacgtcgttacttgtactatgaaggaaaatactcagtgtcagcttgagcctgcattccaagctttttttttaatttggtgttttctcccatcctttccctttaaccctcagtatcaagcacaaaaattgatggactgataaaagaactatcttagaactcagaagaagaaagaatcaaattcataggataagtcaataccttaatggtggtagagcctttacctgtagcttgaaaggggaaagattggaggtaagagagaaaatgaaagaacacctctgggtccttctgtccagttttcagcactagtcttactcagctatccattatagttttgcccttaagaagtcatgattaacttatgaaaaaattatttggggacaggagtgtgataccttccttggtttttttttgcagccctcaaatcctatcttcctgccccacaatgtgagcagctacccctgatactccttttctttaatgatttaactatcaacttgataaataacttataggtgatagtgataattcctgattccaagaatgccatctgataaaaaagaatagaaatggaaagtgggactgagagggagtcagcaggcatgctgcggtggcggtcactccctctgccactatccccagggaaggaaaggctccgccatttgggaaagtggtttctacgtcactggacaccggttctgagcattagtttgagaactcgttcccgaatgtgctttcctccctctcccctgcccacctcaagtttaataaataaggttgtacttttcttactataaaataaatgtctgtaactgctgtgcactgctgtaaacttgttagagaaaaaaataacctgcatgtgggctcctcagttattgagtttttgtgatcctatctcagtctgggggggaacattctcaagaggtgaaatacagaaagcctttttttcttgatcttttcccgagattcaaatctccgattcccatttgggggcaagtttttttcttcaccttcaatatgagaattcagcgaacttgaaagaaaaatcatctgtgagttccttcaggttctcactcatagtcatgatccttcagagggaatatgcactggcgagtttaaagtaagggctatgatatttgatggtcccaaagtacggcagctgcaaaaagtagtggaaggaaattgtctacgtgtcttggaaaaattagttaggaatttggatgggtaaaaggtacccttgccttactccatcttattttcttagccccctttgagtgttctaactggtttcatgtcctagtaggaagtgcattctccatcctcatcctctgccctccca

SEQ ID NO: 59555 - DNA, 1907 bp, Homo sapiens
tttcgtggccggactgaggctcttacagtggtccctgctggcccttggtgacgggtcgcgtcagttccgacccggacccgtacgctgctgcgctgacgtggctcctggaagcagggctggcgtagggccgccatgttgcagcaggatagtaatgatgacactgaagatgtttcactgtttgatgcggaagaggagacgactaatagaccaagaaaagccaaaatcagacatccagtagcatcgtttttccacttattctttcgagtcagtgcaatcatcgtctgtcttctctgtgagttgctcagcagcagctttattacctgtatggttacaattatcttgttgttgtcgtgtgacttttgggcagtgaagaatgtcacaggtagactaatggttggcctacgttggtggaatcacattgatgaagatggaaagagccattgggtgtttgaatctagaaaggagtcctctcaagagaataaaactgtgtcagaggctgaatcaagaatcttttggttgggacttattgcctgtccagtactgtgggtgatatttgcctttagtgcactcttctccttcagagtaaagtggttggcggtggttatcatgggtgtggtgctacaaggtgccaacctgtatggttacatcaggtgtaaggtgcgcagcagaaagcatttaaccagcatggctacttcatattttggaaagcagtttttaagacaaaacactggagatgatcagacttcctgaatagagaaagcttatgtgctttgttacattggggaacaactgaagagattcttgactcaaccttttagagcttagtccatgttgcaacgaggagtgttggctttgtttttccacttaaaaactttatttataaaaaggaaaagtagttttcatattaagtttttatttcctttccagcagttggggctagaaagtatgtgttggcactagaaacattgtcaagatttgttctgtggtgtaggtatgcacattccataggtatgcacacggccatgtaatatcagtatatcccaagttaatgaaagtgttcatttacataggtaatggagacctttgcattttgatccatagaacataggaggatgttcttagtctgtctcaaagctctatatgtttacatattatttctgtagattgttttcaggagaaagttttgcttctatggtaagagtgagcactttggcttatgtataagttagaaataattgttagtttttaatatgcacttcgtggggaaatttcttagacgtatgcaagcaagtgaaaacaattagggccagtggtattaactactttataaaattttatttttgtttgtaagaagtcatctacttaaggcccagttaatataagtggaatcatcatagtttaaggaatacccagagattgctgctgttctatttattttacagaaaggatagctagattgaaagctcttcagtggaccttgagctaatagatcttttaccactaaaagagcattattctcatgtcataatgagaataataatttacatacttggcataataaatgcctaaaagacattttattttctgaatctatttttttcttgctataatggggatattgtaaattatgcatttgtattaatggtatttcttaaagcaatctatgtaactgtaaattaaaccaatctacaaactattgtaggcatctgtaaattctgttgtaggtattataaactttgttgaagtcttaatcagcagattatgttgtgaatatatttgtacattgttaaaatagtttttaagattatttgttttaattgaataagtgtcttattggagtgatagctttgaaggtgcaaaactttatatttgtataaaattctactatttccaaggcaaaaaaaaaa

SEQ ID NO: 59556 - DNA, 1992 bp, Homo sapiens
ttttttttttttgagcccactctgctttatttacaacacgcaggctgtctgtacaaacagcggccgatattattaaaaacaaaagaggtgagtgagaatcgtcacctttctgctttccttcctcacttggccaggctctagtactccacctttgagctgccatgcccaataggggaagtccaaaattaaaaatacaaccggtgtagaagaaaataaatggggagtgaaatagaagaaaagatgagggaggggagtgctaatatttacactagagttttatagacaactgtcccattccatcccaattccaatcctgacccagaaagtgatggtggcaggtccaagagacagagattatgtgtcgggacacagacagcctcccatccccaaccgtaatggattcaatttcaagtccacagagtggggaggaaggatagggtgggaaagtgagacactcattttcaaacaagtctcccttgagaattcctgccttgaagtgcagacagtatccaagctccaggggataggctgaggaccctgaggctcagttcccaaatcatgttgtcatttggaagttccaggctaaagttggtgccatcagggctctccagatttgggaggcccccctaaccgccgggcctctggcctcagttccttgcatttctggcaataaaagaagtcggggacgttggtcttcttaatcttagcacaggagaggtggatccacgtcccacacaggctgcactcaatcatgggccgccctgcaaagggctttcgacagtaacatgtgatcagatcccatgagtcatcacctgattctaccatgatgtcctcgtccatgacccgcatctcgccttcactggagctggcatctccatcttggcttgtttcagtgctgcccacctccttgctttcactgtcagcaggagggactccttcagggtgcactgtggcagggggcctaggagcctcagggggtgttggcagcacagggactggggcttcaccccctaccactgttgccatctcttcttcttcttcctcttcctcctcttcctcctcctcttcagagtctgtatcactggggggtgcctggggaggcccaggaggtgggagtctatccccccgttctgccttttttaacttccgcttcttgctcttcttgattcgagatctcttttccccatccccaggagttggccgaggcctccgaagcaccccaaagccagccccagctcctggccccaactttcggttctttcggtccttctttcgaggaggatgggagaggtccccctgggaaaggggcacgggggtaagagcagcagggggccgggaggtatgtgtcagggatgtgggggacaaaggagatgccactttgggcccatccagatcaaagagagagtccttgagcttcatcttctcaagcaaggtagcactgtcgggggcctgcagacgagagaaagtggaccttgggggtcctggctgggtgggacctgcttgagctgcccttctcttggatgactttgctttcttaacaaaagtctggatggttcgaagatctgagggggccgagtcccagccatcactgtcggccgcactctctcctcgcaatggagagctggagccagaggctggccagtcactttcctctttgctagggggaatgtaaccagcatatgccaaaacaaaactgcagaatttgttgaaatcctcaattgttctccgccgtttctctggtggctgagtctctggcttaagggtcggaggtggatcttcgggactgggctccgccatggcttccagcatcgccccctcccctcctcccggtccggcgcccccctccccggagccggggatcccggtgtcgcctctagtgctcgatgctcccactgcttcgctccacagaagtgtccgcctcagcccggttgagactcgagtccgctagccgctgccgccacctccctctaccactgcctcccgcactcccgg

SEQ ID NO: 59557 - DNA, 2740 bp, Homo sapiens
tttcatgccgcggcgggcgagggtgtagtggggtcttgctgggccggttttggaggcctggagtcaaggggcgagctcgccagggagggcgagggtcacagcaagtctcaggatcctcctctgccagtttctgggtggtccttcctcctccagggactcactgattccggctggcgcccttcgtctgtagccgcgtcccctcagacgggttcagtccggggtcttctgacttggaagctcgtgctgatttcctaagtcagcccctcctgtcctcttggcaagaaataatggcggcagctacgggggatcctggactctctaaactgcagtttgccccttttagtagtgccttggatgttgggttttggcatgagttgacccagaagaagctgaacgagtatcggctggatgaagctcccaaggacattaagggttattactacaatggtgactctgctgggctgccagctcgcttaacattggagttcagtgcttttgacatgagtgctcccaccccagcccgttgctgcccagctattggaacactgtataacaccaacacactcgagtctttcaagactgcagataagaagctccttttggaacaagcagcaaatgagatatgggaatccataaaatcaggcactgctcttgaaaaccctgtactcctcaacaagttcctcctcttgacatttgcagatctaaagaagtaccacttctactattggttttgctatcctgccctctgtcttccagagagtttacctctcattcaggggccagtgggtttggatcaaaggttttcactaaaacagattgaagcactagagtgtgcatatgataatctttgtcaaacagaaggagtcacagctcttccttacttcttaatcaagtatgatgagaacatggtgctggtttccttgcttaaacactacagtgatttcttccaaggtcaaaggacgaagataacaattggtgtatatgatccctgtaacttagcccagtaccctggatggcctttgaggaattttttggtcctagcagcccacagatggagtagcagtttccagtctgttgaagttgtttgcttccgtgaccgtaccatgcagggggcgagagacgttgcccacagcatcatcttcgaagtgaagcttccagaaatggcatttagcccagattgtcctaaagcagttggatgggaaaagaaccagaaaggaggcatgggaccaaggatggtgaacctcagtgaatgtatggaccctaaaaggttagctgagtcatcagtggatctaaatctcaaactgatgtgttggagattggttcctactttagacttggacaaggttgtgtctgtcaaatgtctgctgcttggagccggcaccttgggttgcaatgtagctaggacgttgatgggttggggcgtgagacacatcacatttgtggacaatgccaagatctcctactccaatcctgtgaggcagcctctctatgagtttgaagattgcctagggggtggtaagcccaaggctctggcagcagcggaccggctccagaaaatattccccggtgtgaatgccagaggattcaacatgagcatacctatgcctgggcatccagtgaacttctccagtgtcactctggagcaagcccgcagagatgtggagcaactggagcagctcatcgaaagccatgatgtcgtcttcctattgatggacaccagggagagccggtggcttcctgccgtcattgctgcaagcaagagaaagctggtcatcaatgctgctttgggatttgacacatttgttgtcatgagacatggtctgaagaaaccaaagcagcaaggagctggggacttgtgtccaaaccaccctgtggcatctgctgacctcctgggctcatcgctttttgccaacatccctggttacaagcttggctgctacttctgcaatgatgtggtggccccaggagattcaaccagagaccggaccttggaccagcagtgcactgtgagtcgtccaggactggccgtgattgcaggagccctggccgtggaattgatggtatctgttttgcagcatccagaagggggctatgccattgccagcagcagtgacgatcggatgaatgagcctccaacctctcttgggcttgtgcctcaccagatccggggatttctttcacggtttgataatgtccttcccgtcagcctggcatttgacaaatgtacagcttgttcttccaaagttcttgatcaatatgaacgagaaggatttaacttcctagccaaggtgtttaattcttcacattccttcttagaagacttgactggtcttacattgctgcatcaagaaacccaagctgctgagatctgggacatgagcgatgatgagaccatctgagatggccccgctgtggggctgacttctccccggccgcctgctgaggagctctccatcgccagagcaggactgctgaccccaggcctggtgattctgggcccctcctccataccccgaggtctgggattcccccctctgctgcccaggagtggccagtgttcggcgttgctcgggattcaagataccaccagttcagagctaaataataaccttggccttggccttgctattgacctgggacttggtcctccatgcagtttttatttcttgtcacagtgactgatagccatcccccaggatcctttccccttggccctgagggggtgacccaacacagacca

SEQ ID NO: 59558 - DNA, 1008 bp, Homo sapiens
agtggtggaattcgagctacaacctgccagcctatgctccatacctgccctgcgaggcctgcgcgatgcaagacgggagaaaaggaggggcgtacgcgggcaagatggaggcgactacggctggtgtgggccggctagaggaagaggcgttgcggcgaaaggaacggctgaaggccctacgggagaaaaccgggcgcaaggacaaggaagatggggagccaaagaccaagcatctcagagaagaggaggaagaaggcgagaagcacagggaacttaggctgcggaactatgtcccggaggatgaggacctgaagaagaggagggtgccccaggccaaaccggttgcagtggaggagaaggtgaaggagcagctggaggccgccaagcccgagcccgtcatcgaggaggtggacctggccaacctcgctcctcggaagcctgactgggacctcaagagagatgtggccaagaagctggagaaactaaaaaagcggactcagagggccattgccgagctgatccgtgaaaggctgaaaggccaggaagacagcctagcctctgcagtggatgctgccaccgaacaaaagacctgtgactccgactgaggcatgccctgccccaccactcgcccatcaggcctgtcctgcaggggatggtcttgggcagggatgggggctaggcttgccatcacctccagtttggcttctgagcagagactccctgcccatcaagtctgaaacccccatggatgaggtcagctccttgtctgctgggtggcccctgccattctgaatggaggcagaaccagcaacaactctgggcgtgcctgtgtctgcacatgtggatgtacatatgtctgtatatatgtatatattttgaactttctaaaaaaaaatctggaaatagaaacaagtaaaaaaaaaaaaaaggggcgccctgtttaagggatcaaagtttacttccgcggggatggagagggaaaagtttttttatgggggccccataacc

SEQ ID NO: 59559 - DNA, 2315 bp, Homo sapiens
tttcgtcgcgggcgggcgggcagcgcagcgccgagcggggcccgcgggcccatgaggaggcctggggaccatgggctccaggatcaagcagaatccagagaccacatttgaagtatatgttgaagtggcctatcccaggacaggtggcactctttcagatcctgaggtgcagaggcaattcccggaggactacagtgaccaggaagttctacagactttgaccaagttttgtttccccttctatgtggacagcctcacagttagccaagttggccagaacttcacattcgtgctcactgacattgacagcaaacagagattcgggttctgccgcttatcttcaggagcgaagagctgcttctgtatcttaagctatctcccctggttcgaggtattttataagctgcttaacatcctggcagattacacgacaaaaagacaggaaaatcagtggaatgagcttcttgaaactctgcacaaacttcccatccctgacccaggagtgtctgtccatctcagcgtgcattcttattttactgtgcctgataccagagaacttcccagcatacctgagaatagaaatctgacagaatattttgtggctgtggatgttaacaacatgttgcatctgtacgccagtatgctgtacgaacgccggatactcatcatttgcagcaaactcagcactctgactgcctgcatccacgggtctgcggcgatgctctaccccatgtactggcagcacgtgtacatccccgtgctgccgccgcatctgctggactactgctgtgctcccatgccctacctcataggaatccatttaagtttaatggagaaagtcagaaacatggccctggatgatgtcgtgatcctgaatgtggacaccaacaccctggaaacccccttcgatgacctccagagcctcccaaacgacgtgatctcttccctgaagaacaggctgaaaaaggtctccacaaccactggggatggtgtggccagagcgttcctcaaggcccaggctgctttcttcggtagctaccgaaacgctctgaaaatcgagccggaggagccgatcactttctgtgaggaagccttcgtgtcccactaccgctccggagccatgaggcagttcctgcagaacgccacacagctgcagctcttcaagcagtttattgatggtcgattagatcttctcaattccggcgaaggtttcagtgatgtttttgaagaggaaatcaacatgggcgagtacgctggcagtgacaaactgtaccatcagtggctctccactgtccggaaaggaagtggagcaattctgaatactgtaaagaccaaagcaaatccggccatgaagactgtctacaagttcgcaaaagatcatgcaaaaatgggaataaaagaggtgaaaaaccgcttgaagcaaaaggacattgccgagaatggctgcgcccccaccccagaagagcagctgccaaagactgcaccgtccccactggtggaggccaaggaccccaagctccgagaagaccggcggccaatcacagtccactttggacaggtgcgcccacctcgtccacatgttgttaagagaccaaagagcaacatcgcagtggaaggccggaggacgtctgtgccgagccctgagcaaaacaccattgcaacaccagctacactccacattctacagaaaagcattacccattttgcggccaagttcccgacgagaggctggacctcttcatcacattgacttacgccgttgcttttccagactgggcaaaggggctgacttcgcagtgtgtgccaaaaagccggtgtttgataatcccattttcctgcttatcacctgaactgtgtcagtatcacttttagttttgttggttggttggtttgttgtttgtttaatatgccctgttttctacttctgttggaaaatatttggggttgaaataaaccagtgggagcatgggagccagtttggtggttggcaaactaccagtgatagaaaacaaatgacaggttttctgtgagcgtacgtcacagtggctcgggcccacaaggagacagaggggtacgtttcaggacatcattccaagggtttctgttcacgtttgtttaacgaggaaggggaagttgttctcccataataccagtggtatttctagtgcaacccgggtgtttttctacgcctcttcccatgctgcttccccacccccccactgtgctccgccccttccaaatgccatgtcacaacagcacttggatgtgtttttctcaactgtcatcagctccagctggcaggaccaacttcttga

SEQ ID NO: 59560 - DNA, 1803 bp, Homo sapiens
  misc_feature (1)...(1803): n = a,t,c or g
ttttttttttttgccacaggttggacaggtttttattggagagtcaggagttgctttccttccctcgtccctgcctcccccactcaaagaaccccactccagtggggcttgtccttcatctgcccctaggaatccccatccccagctacacaggcactcagggagagcgcacatgctgtgtgggcagacagccccaggccaggtaggcagtgagctccctcaaatcctcccacccccaggactcaggagggaggggcaggagaggtgtgggcccggtgtgcagtcctcaggcggccccctgagctcgcagccagccaggccttgtgcctccaggatggatggtgtgatgaggcacatgccccgtagcctttcccttccggagggccttaaccaagaagtatcttgtttaggggctggggacagggtggggaagatgacaggaggacagctgacctcttcaccctttgagtggtatccccttcagaagattccagccaacaccagaggaggcaggagcagtagtcccaggagagggccccacacatgaccagggcccgagttcagccctgacacgacgctaggcttgtcagggccctctgcacccattttcctagagtctgatgcttcagtcgcccggaaggatggggcctcagttaccaggtaaggcaaatcctgagcatcttccgggcttccgatgggttcacagagggagttcttgcagtggtagccagagggacattgggagcacggagtcccctcctggtagggccgtttccccttcacgttccccggaggctcatagttgcacaccagtaattcgatgttggtctcctcaacaccctggagcttctcacagaagtgggaaccacagccgatcctctctgtcttggcccataccacctgcgtgtagtggccgcacatctggcctgggctgcaggtggcggcgctgaggttgtagtgctcacgctcgtggtgccactcctccatggccagcggcacgtccatgccctcgtctgtgatggcgaacagattctcgccgcggcgcccgcgctccttgttgtggccccacacgcactgccgtgcgtaggccttggcgaaggcggccagctcctcgtcccatctcatgtgcagcatgtctgaggccgtcggggatacctgggcccggtagaggttgtgcagctccaccatcaaacgtttctcctcatctgtgagggctccaacggggcctgtggtggccaccagcagtagcagtagcggcagcagaagcatcaggaaactgcaggagccgtgcatggtggccagccgtctctccttctcccgtccaggggtctggcagctggatttaaagtccttcccacacaagcaccaccctggctggggtggggtagtgggggccgtgtttgaggcccagcccgactcacacaatgtctcagggagggctgggcgctttgggtcccgaccagcatcaagtgcactccccttggagtccttggcaaaaacctcctttctcttggtaacgggggctcaggccaaaagctgtgtgagttcctaagttgtggacagatccattagggaaatacagtgaaataccacttcacactcattaggatggctggcctgggaagtgctggactcaggaatgcaaggacacagttctcagatgccccccgggtggaaccaggcactggcactacagaatgccctggtgtggtcatctctgtggcctctgccaccagtcctgcccctncnnnggnnnnttcnagtatcnattaganaccctggagnnngaagcctggcaactct

SEQ ID NO: 59561 - DNA, 980 bp, Homo sapiens
ttttagtactgttttaggtattggggatataccaaggaataaaacaagattcctggagggagaggggaacggacagcaaacaatagacacaatacgatcgtgaggtatatagttaatgttggtgatgagtgctcctcaaaggaaacaactaaaaccagacaagggaagtcggggtgtcagggagaatggtttgtagtattgatgacaatggttaaggaaggcctgagttctgcaaagacctcaaggatatgagggactagagtgccctctgctgtggaagagcctgcgcaaagatcctgaggtgggaggggtcagggagccaactcattttacggtaagtggaggtgggatccaggggaggattctgagcagaggagggacgtggcccaatttgggctttgaaaggatcctgcttgtctgtgtgccagcatcctggtggtggttgggggagtctgcatcaatcctgggtgctgttacctgaaaaaatagcaggtgttagacgaaagaacagatgtctggcccattgtctccagtctgttcctgtccacagcttccctttatgctgagcccctgccacatgcatcatcatcctggccatgtggcattgtcacagaccgtctctcctgctagcctcctaactcagggcctgggtcttccccagcattaagtaaatcagtctcaggcagacagccctttataggtgtttgggccaggtgcggtggctcacgcctgtaatcccagctctttgtggggccgaggtctttgagctcaggagttcaagaccagcctgggcagcatgacaaaaccctgtctctaccaaaaatacaaaaattagccacgcatggtggcacacacctgtggtcccagctactcgggaggctgaggtgggaggatcgctggagcctgggaagttgaggctgcagtgagccgtgatcatgccactgcattccagcctgtgtgatggagagagaccctgtctc

SEQ ID NO: 59562 - DNA, 479 bp, Homo sapiens
ccggaattcccgggcggacgcgtgggggctgacatgagagaatcgcttgagcccaggagttcgtggctgcagtgagctatgattgtgccactgcactccagtctgggggacagaatgaaactgtctcaaaaagagtaaatgagaccccgagagttggagcagtgccccctagtacacagaaaagacagggctttgacaccccctatctctggtgttcttggccctcaacacaggaaaagaaaaaagccatccaggaggaggaggagagagaccaggccttgcaggccaaggcgagcctgaccatcccgctggtgcccgagacggaagatgaccgcaagctggcggctctgctgaagttccacaccctggactcctacgaggacaagcagaaacttaagcggaccgagatcatcagcccgttctgggttcccttttgccccggaatccgcctccaacagcaaggtcagcggcggcctgag

SEQ ID NO: 59563 - DNA, 1866 bp, Homo sapiens
agagacttgccaagccccacgaaagcaaatactgaataaatgcctcagcttaactttggaatggctgatcctactcaaatgggaggcctgagtatgctgctgttagctggagaacatgctcttggcacaccagaggtattctctggcacatgcaggcctgatgtttcagaatctcctgaattacgtcagaagtcaccattgtttcagtttgccgagatatcttcaagtacgtcccactctgatgcttctacaaagcagtgtcaaacatctgccttgtttcagtttgcagagatttcttcaaacacttcgcagttgggtggtgctgagcctgtaaaacgctgtggaaagtctgcactctttcaactggcagagatgtgcctggcatcagaagggatgaaaatggaagaatcaaagctaataaaagcaaaagaatccgatggtggaagaattaaagaattagagaagggaaaggaagaaaaagaaattaaaatggagaaaacagatgaaactaggttacagaaggaagcagaatttgaaaaatcggctaaggaaaatttaagagattctaaggaattgagaaattttgaggcattgcaaatagatgacataatggctataaaaatggaagatcccaaagaaattagaaaggaagagttagaagaagatcacaaatgtagtcattttcctgatttttcttattctgccagtagcaagataataattagtgatgttcccagtagaaaggatcatatgtgccatcctcatggaattatgatcattgaggatcccgcagcattaaacaagccagaaaagctaaaaaagaaaaagaagaaaagcaaaatggatcgacatggaaatgataaatccacacccaagaagacttgcaaaaagaggcagtcttcggaatctgacattgagagcgtcatatataccattgaagccgtcgcaaaaggagactggggcatagagaaacttggagatacccctcgcaagaaggtccgcacatcctcaagtggcaagggaagcattttggatgccaagccaccaaagaaaaaagtgaaatcaagagagaagaaaatgtcaaaggagaaatcctcagacaccaccaaagagtcaagacctccagatttcattagtatttctgctagcaagaacatttctggtgagacaccagagggtataaaagcagaaccattgacccctatggaagatgcactaccacccagcctatcaggacaggccaagcctgaggacagtgactgtcacagaaaaatagaaacttgtggttccaggaaatccgagaggtcttgcaaaggtgctctttataaaaccctggtgtctgagggcatgctcacctctctgcgagctaatgttgacagaggaaaacgaagctcaggaaaaggaaactcctctgatcatgaagggtgttggaatgaagaaagctggacatttagtcagagtgggaccagtgggagcaagaagttcaagaagacaaagccaaaagaagactgtctccttggctccgcaaagctggatgaagaatttgaaaaaaaattcaacagcctccctcaatatagtcctgttacatttgaccggaaatgtgtacctgtcccaagaaaaaagaagaagactggaaatgtgtcctcagaaccgactaaaaccagcaaaggaagtggggataaatggtcaaacaagcaactcttcttggatgccattcaccctacagaagccatattttcagaagacagaaacaccatggagcctgttcataaggttaaaaatatcccatccattttcaacactccagagccaacaacaacggcaagaacctttggtgggcagccaaaagagaaaagcaaggaaaac

SEQ ID NO: 59564 - DNA, 2327 bp, Homo sapiens
ttttttccaaacggataaaattgggaccccccgggtttttccccccccccccttttaaaaccccggccccggaatttaattttggggccccataaaaaaagtttttccttgccagcccccggtagttaaacttggttcttttaaacgggccccccctttttttttttttgattttaaatttcttctttattaaaaaaaaaaggcgtttttctgggttttttaaaacttctccaatacattaaaactttttttctcgccacatagcacttctttcttgcctctttcatttctgctcctggtgttgcctgcctcctgcaagacccagatgaagaaaccttttcaatggtcgagatctgagacttggagctggaggggctgaaggcttgaaggaaggtggttactggtcaaaaggagaagttcatttgcacaaaaatataaactggggaggatgagaccagcacatacacgtatggattgatctacaatccatataaaaaaatagacccaaattgtcattttacatttgcaatattatacaaaataatatatatttttaaacaacacatacccacctacacacacgtgcgcgcacacacatacacacaaggtgctagtgacccctctgtgcttctgcttgtggggacaagggtgtcagtaggcaaagatgacatggtaagtgacctggtggccattgtcccaggcatagagcaggcggtccttggggttgtagtctatctgggtcgtataaaaatactcattctcgaacagcagcctggggacgatctgtgtgttggtgtgggtgtcgaaagcgtaggagatgttggcattccgctggttgtagctatccacggcatacagcaccccacagatgacgaagcagttgccgtagaaattcctccggagccccgtgcgccatgtggtctccttctgtgtgctcaggtccgcggcattgagcttgctcaggacaatgacctcctggctgaagccctcatcgtccagggccgggtagatgagccataggccattctcgtccacagcaaagtccacgtctgagtggccctgccatcgccagggggtggcctcctcgtaggccacgtcatgcagcatggcccaggcagccacgtagcgctgcttcaggtcgtacttgatgatgttgcgggtgaaggcgcgattgtagtagaaggcgccattgtataccacgtggcctgtgccgatccagctgtacgggagcttgtaggaattgctccagcgaccttgtttgaagttctccaggttccggaactctaccagggtgttgccgtagtaatagttggttacgtaaatccgctcatccttggccagggggtccttcatccaggccccttcattccgcccatatgtgttctgggtggtcggccccgtgattgtggagagagtgtccttgcaccttcctatgacattccggatgtcatcttcttcttcggggctcagcgtggggctggcaggggttgttccccgcccagcaggagcatctttccccagcgagtctgttctgactgtggtgggaggcactgggactgtgtgcatagcttccatcaatgcctccctgggagacactgccggaggagctggggctgctggttgctgggtggctgtgtgggccacagtggtggctggtacctgaggagaaggctgcaggactgactcccttgtgggatctggagacaccgaggttgtttggagtgttggtcccactgaggcatggttggcgatgctgggatctgaggtcgagggctgtggcagtgctgaggaccagggtgcggtccgagcgttcaggtcgcttgtcacagcagtgctgtgtccctgacgggtggctgcaggcctccgggtgacactggtcatcaggccgttgtgtctcaggagctgatcttcaatcagcaaatccactccattgtcaccgctgaaaaactcatcttgctgctcttcaatgtcattctcttcttcagagaccttggctttatagtaggtgatgccccggatgacagtgggctgggaggccggccggcctctcaggtggacctgcctctgcaggggccgctgtgacttcaccacctcaggcagagccaggggtcgcgtctgcagaagttcgatggagttgatctgctgggacacggtttcttcctgcagaaaccgctcttcatactctgggtgggcgtaggctgctgctgcatccctctgcagggctcagcggatgtctggcatgctatctaggatgttttcagagcaattttctttgcctcgcttattcatctcggttcgaatttcgtcccggtcgcgtgaatcgaccc

SEQ ID NO: 59565 - DNA, 1309 bp, Homo sapiens
ttttttttttttaatttaaaggctttttattaggaaccaggggaatgagctgcttatccctctataacagtctagagcaggtcatcaggcccaggatggagagaggttatcaaaggtgctgtggtgtgctttgctgcacgtgcttagggcctggaaggaaaggtggtggcaacagaggttggcaggaactggtgttagtcaaaacaccaaaatcctgggggagagcccctctaccttccttctaactccacttgaggtgggagcattccaggagacagagaatgtgaccaggatgcagcagtgtcatctgaacccctggcttcgttcagtgctacttcacttgccagccctccactcttcttgccttttagtgattaggtatttgaagaactcatacacagaccatgcgatggctgtggaggggatctggtaaattactctggcctgcacccctcggaaataggcggtcaccccacctacttgatataccgtcctgaaggcactagccatgcctgtgatatgtcctgtaatgtgtgagttcaaagccaaggactcctgggtgttgagcagtgttttgcaaacgtccagtggggttgtggctgcggcagctacagctcctgcgcaagctccagagaggacgtgggagcttgggttgtaccgtctctgggggttaaagtgctcctgcaggaattcataggtcatgaagtgaatggcttggaaaggaacgttcatggtcagctgggtggtgtagctgcggtaaaaggccccggccccttcattttgccacactgcccgtacacagtctgtcacccggtggtatggtgagttgtacatctgcatcctctgcttgaccacttccgcagggttcatggctgcatcatgaagtaatgttgccacacacccggccgcaccattggcaatatggctattgcccccagggtggattacatcactcaatgtcttttttaacttttcgtagcaggcaaaataaagggcgtgggcaggccctgcgcctgttgctgtgacgttcagccccctcatgggcctccataggccctccgttcttataatcctccagagggcctccaacacattgcgatagcgggcagctgggtcaggctgtagactatgcatccgggtcatcacgcagtcgatggggtacatcaagcagtgctccagcatccatggctcggcgcatgccccacatgtgcgtggtgacagtggctccagccgacagcgcctcgtagtccgggccggagtccggatctgatcgtaccgggggcctgcaggcctcgtgccgaattcctca

SEQ ID NO: 59566 - DNA, 1775 bp, Homo sapiens
aagagttcatgtcactagtacagcgcggaggaattcgttttccatctgagcaatgggtattggaccaggccaatggttcctgacctgctgagcccctttgctctcatccttgtacccaaacagcctctcctgagtggtgccctcatcagatagagttctggtgtcacctggggagaagcacatcttttttgcttggatggtctggccagtgggcatgtgtggggaagagttgtgatgccagcctgacttggggcagagcagaagcactgtttggatggctttggaagccaggaggtgggacctgagggtatggggtctgcaggctgactatgtgttcgttttccaggtgactttgacactgaggctggagctgtgtcctcctcagagcccactgtggccagagatgagccagagagcctagccctggctcagaagtcaccggcccccaaggtcaggaagccaggcaggaagccaccaacccctggcccggagaaagcagaggcagctgctggggaagagtcctgtggtgcctcccctacccctgctaccagtgccagcccacctggccccacactgaaggcccgcttccgcagtctgctggagaccgcctggctcaatggcctggctctgcccacctggggccacaagtcctcaagaccagaccagccctcaccctgcccacagctgctggacagccagagccatcacctgtagcactggttgccagtgctgtgtgtatagcagtcactctccacccttcccttctgcctgcccagctgccccggggccacgagtggatgctggggctgtggctgctcccctggaggggttccatctctgaccctgtggcccattcagggtgggctgaagagcccctgagcttttaacgtgagggtctttattggataggactactccctatttcttgcctagagaacacacatgggctttggagcccgacagacctgggcttgaattccggctcgtgttcttgctgcaggacctgggcaagaaacttcacctctgctgagccctcattccccatgtgtaaaatgggacaacgcaacctacctcacagggttgttgtggggatgctgcctgatacataccctgtcaccatttggtctctgcttcctctctgggacagggcctagaattggaggcagagaaccttcctatagaaagtcttcgtgtgtcctaggacttggctatcgtagagtggtaccttaggcagtggatgtgactcacactttcaggagtcaccccccagcatttggggttgggttggccctactccagcctggagctccctgagggagcctgcactccctgctcccaatccccgctactggtgcagggatgcagcctggagctggcgtccttgttctgggcctgctgctgccgccaccccaggaggccccaggcctgtcctgaattgacatcagtgcttccctgaactgcctcccccacccctggcattatcccaggaaacttatgttttctagaagctaagcagctgctgggactcagggactggtgcaggtaggctgagtggcagctcagtcctagaaggtctctgaagatctggactgaggaccctgctactccccaagccagagcccatcagccaggcctgctgtgagccacctgcctgtggagtgctgagctcaaccaaaggctggcaagctctgggcctcatttaagggattctgatgagccgatgggccctggaggcagcccattaaagcatctggctcgtttttggaaaaaaaaaa

SEQ ID NO: 59567 - DNA, 5773 bp, Homo sapiens
ttttttttttttttcaaagtgcacaagtttattttctagaacaaaggctaagggaagcaagtttctttcattttattttaagaaggacaaaaattgttattaaaacatctacattattatcaagatactagcaccttatgaatatttaatattaaagtgtggtattcttaaatttttaatacacagacattttaaaggaccattaaattgattactgcccagctgagaaatgcagcatccctccccacccaccccgcccccatgcttgccatgccatctttgtccctgcctgccggggggaacacaggtcccagattcagtcctctgagcctcccagcctggggccctagaaggctcacaactgaaatagttaccctcatcattaaaagggtcttcctgtccctcctccccaatcacactcctgcctcccactctctcttcattaccctgtgggggctccagctctggccaggccaggaagccccagatcccaagggtccctggacagatcacaggctgaagatgaaaactctggacttgaatcctgttcttttcagcggggagacaaatacaaatcaccttctttccctgagcactcccactctctccgcactcgatgggggtggtctgggaagctagcagagttgggcctggggagggtggctcctgtccctggctgcccgaatcacctctgagccatggctccagtccctgtcaccttgcaaatagtccagtggcccctgaaaccctcctaatcacacaaggatggctgcattttctggccaaattctttatctttagccctcataaaagtgattccttggataccacacacatatataatattatatagagcgatatatttaatacctgtgtatatatgcatcacgggggcgacatatatacacactagaaacaaggctggtgacaacggactgcaacaccacggatcagggaaaacgagtatcatcgacatcacggccacacatggccacagcccccaccttgggtgtggtctcccctcccctacagccacaccaccagcacccaaactctgcagtgctggcctgctgcggccagggggtggggcagggaagaggaaagggcgcatgccacgattatcaggaaaggttgggcagtggcggcgggaggaacagcgtcccctccagccctgggcagcccatcactgtgtcagcgcgcgctggcaatccttgcttgagaagaatggggtggtcccttctctccttctcacccccctacagcctaatccctggttccttccggggctgccccactcctgtgccaatgatgtggggcattctggaatgtctggggaaccagggcacggtggatctgccctggttgatggaaggtagggtggagaggaggggggtgcacacagacatgtcagacgagagggacgagcgaggccttggtgagtgggggcaggggctgggggtccactgaagtcccagacagctgggagggccagggattagggaggggctaggacagacggttataactgtatgtctgggtctagaggagaggacatactgggtccccaagaaagaggggccgtgtcccatcctggagtggcccatggtgcccggggtcaagcctcccttttctccgcattcccccagaccctcacccttcccacctcccacacctcacacagatcctgagctcatggtgtcctgccctctgccacctttcccagagcgcatgtcaggaggtgacctctgctgctgcacccaaagggaccatccttgggagggggcggtcccttcatggggtgctcacatggccagccctcctctgggcctcccctccccagcccccaggcagcgctgcctgggaccccagctgcacactgattcagagaccatcgcatccctgctgaggggaccgtgggctcagccaataattggccctgagtcttttcagccctgttttcatcccagctctgccttgtgctgggaccgtgggtggaccactcctcccttctaggcctcagttttcctctctgcaaaatggggtttgggctggatcatctctgaaggctctgaggacctacagtctattttcactggcccacgagggagcagggttcaggtggtggcatcagagaaagggctgggactccttaagctccaaagatcatctagcccacctcctcccagccttccggagggaaagctgaggccccagagggtaagtggccagtacagtgttcccagctccaacctggggctacattttaaagctaatggggcctctgccctctgttgtgtcctgatttgcccccagggggagggggtgggaggaggacgggccagggagagaaggaccctcctgctggagattcaagtggggaccccaggctccccagccctgagctttgggcccccattaggagcagacagaagttaaagctggaggctgaagctggaggggtcagccaggcccctccctcctcaaccaggagagccgtgggggtgggggaagggcagcccaggtttcagcggggcctccgggggctgcagcacgtgcgcctgggtatgcacaccggggcggtggtggggagaagatggacggggcctcagggggctgggggctgcctgatgagggcggccccccacccccctggcctgccctgacccttctatcaggccttctggccccaccccaccccctgaccccaggacttcacccacggccaacacctggccctactccccagtggtggcggtggcagcagcagcaggggcttctggggtggcaccggcaaggtccccgtcctcttgcagcaggaagttgtatttgccaaagtcgtcgtcccgtgggcacagcagcatgtccttgcgagccttggccaacttctgcttcagcacctcgcgccggtccagccactcgttgagctcctcctgtccatgggcgcagcggcacttgtccccatctgggcaggctttgcccttctggagcctgtcgcagagccggaactcgcccatggggaagcggaaggcccagccgctggcgtcactgtcggacgtgaagaccttctccttgtgcttctcggactggatgtgctgctgccactgcttcttgctgttgctgttcttgccgcagagccagcagtggtagcccatcatgatgtccgcgtagtccgtgggcatctggatctgcttctccccttcccgagaactgatgggggtcccttctccaggctttcctgggttgtgttttttcagccacatgtcataggtctgctgcatgtccaggatcttgttctccttcatgaaggtccacatgtccctctcctccgggctgtgtgcgaaggagcagttccccacatattggcacttgcggccgttctgtgcatggatgcagagatcgtattgctgtgggaagttacgaatggatggcagtggcctcactgacacccatttcctcttggccttggacatcaccagaaggacccgccgctccttggtccagcagtgccgggccttggcactacagtacttgaggtccttgtcaggctccaccacctgcccgtttctccagcactggccacatacaaacttcatctgcaggtcaaaggtgctgggcccatgtgtcctcggagcacccatgctgctgctggccttccccgcatgcgcctccatctgctgccagtacttcttagactcctgaacgatgtcttcgtgggtcatgcctgagtactgctgcagcagccagaccttgagctcgatgaagctgtgggcgaagtggcagctgtcctcccgcaggcagccgtagcgcacctcatggcggcacacgtcgaactggaagtgctcctggaactggcggatcttggagtacttgagggaggtggagcggacgatgtgcaccaggcacttgttgttgtagaagctgtgcttggcagccaggttggagcagacagacggagagtccttggtgcctttgctgatgatccggggtttactgtcaaagcagatctcgcagaggaaggtgaagatgccctggtgctccttcaggagcttggcgatggtgaggctgccgcgcttaacaccccccagcgggtcgaagagcaggtcgcggttgagggtgcccttccgctcctcggtccacacgtcgatctcctcctgatggtaggcgaaggtgcagttatccccgtacttacagtcctgcttgttaatcatgtctttgcacaggtagtaggagcccacgaagctggtcttagtgggccggggccggatccgcttccaggtctggtcctccgagctccggagccggccgagcaggatgtcccgcttgcacttgtgctcaaggccctcacggtaggtgtagtcgccagcccgggggcctgtcttggggtagcagagctggcaggcctgcttgaactcgtgggtggcagccaaggggttcttgatgagcaaggcagtgttgggcatgcagggctctggcgagggggctggtttctgagcaccgctagggggacggtggtcctgtgagttggtctcctccatgaaggagtcaggtttgtccagggagcctcgtgtcgacccaaagctgtcgagtgcatccagccgggtctccgagtacggcagcaggtccagggggtccagcgtggggcccgggggatcgagggcatccagcacagaggcggccagcttcttggaggggtccatgaccaagccgaaggaggcggggggcagtgggctggagacagggatggagccacccaccacaggtggtagcagtggggtcccgccggggaacacgggtatcagctggggcaactcactaggcacgccgctgccagacaggccaccctggaccagagacagcgagtccaggagggtgtccagctctgggccaaagacatccccgtctgagaagtcatccaggctgtcggtgctggggagggtcctgctgctgtccaggggggccagcaggtccagaacgtgagggaacaggggcatcgtgggcgtggaggggagaagggctggggagcctcgagggtccacgtagcagtctgtttcgatgtcatctatggaccccaatccattagaagttccctgatctgccacgccagccgcagtgccgttactgagcagagaaaaggtttccaattcctggggcctcttatacgccttgcgaactcgcagccccagtttctgggccagctcctgaccaagctgagtcacgctttcatcgtggggcagggcgagggaacaccggctgctgcactcgtaggcctccttgtggcgtcccagttcattgagagcgcgtgccttgcggaacaacgcccggatactctcactgtccaggcccagcgccttctcgctgtcctccagcgccttctcatacaggcccatggtgaagtagcaggcggccctattgacatgcagcttgcacagcagctcccggggcagggccacctggtcagaggcagcgtagtcggccacgttcagcccttccatgtactgcaccagagcctgcttatagtccttctcccggaacagatcattgccctcagcaaacagattctgcaccagcttgagcagaaaggcctcatattcttcttgctttaggggtagtgtcgactgaatgaactgcagccctttctcgatgtccgccttccgtttctgcctctccatcagtctctccgccgggctgcgctccccgcgggcctgcgccgagcccgataaatggtatgctatgactagaggtatgattacgttattattattagtaataataa

SEQ ID NO: 59568 - DNA, 3579 bp, Homo sapiens
cgccggcactcgcccggctcgcccgctttcgcacccagttcacgcgccacagctatatgtccccgagccgcgcgggcgcccgcgacgctactcctcgccctgggcgcggtgctgtggcctgcggctggcgcctgggagcttacgattttgcacaccaacgacgtgcacagccggctggagcagaccagcgaggactccagcaagtgcgtcaacgccagccgctgcatgggtggcgtggctcggctcttcaccaaggttcagcagatccgccgcgccgaacccaacgtgctgctgctggacgccggcgaccagtaccagggcactatctggttcaccgtgtacaagggcgccgaggtggcgcacttcatgaacgccctgcgctacgatgccatggcactgggaaatcatgaatttgataatggtgtggaaggactgatcgagccactcctcaaagaggccaaatttccaattctgagtgcaaacattaaagcaaaggggccactagcatctcaaatatcaggactttatttgccatataaagttcttcctgttggtgatgaagttgtgggaatcgttggatacacttccaaagaaaccccttttctctcaaatccagggacaaatttagtgtttgaagatgaaatcactgcattacaacctgaagtagataagttaaaaactctaaatgtgaacaaaattattgcactgggacattcgggttttgaaatggataaactcatcgctcagaaagtgaggggtgtggacgtcgtggtgggaggacactccaacacatttctttacacaggcaatccaccttccaaagaggtgcctgctgggaagtacccattcatagtcacttctgatgatgggcggaaggttcctgtagtccaggcctatgcttttggcaaatacctaggctatctgaagatcgagtttgatgaaagaggaaacgtcatctcttcccatggaaatcccattcttctaaacagcagcattcctgaagatccaagcataaaagcagacattaacaaatggaggataaaattggataattattctacccaggaattagggaaaacaattgtctatctggatggctcctctcaatcatgccgctttagagaatgcaacatgggcaacctgatttgtgatgcaatgattaacaacaacctgagacacacggatgaaatgttctggaaccacgtatccatgtgcattttaaatggaggtggtatccggtcgcccattgatgaacgcaacaatggcacaattacctgggagaacctggctgctgtattgccctttggaggcacatttgacctagtccagttaaaaggttccaccctgaagaaggcctttgagcatagcgtgcaccgctacggccagtccactggagagttcctgcaggtgggcggaatccatgtggtgtatgatctttcccgaaaacctggagacagagtagtcaaattagatgttctttgcaccaagtgtcgagtgcccagttatgaccctctcaaaatggacgaggtatataaggtgatcctcccaaacttcctggccaatggtggagatgggttccagatgataaaagatgaattattaagacatgactctggtgaccaagatatcaacgtggtttctacatatatctccaaaatgaaagtaatttatccagcagttgaaggtcggatcaagttttccacaggaagtcactgccatggaagcttttctttaatatttctttcactttgggcagtgatctttgttttataccaatagccaaaaattctccttgcctttaatgtgtgaaactgcattttttcaagtgagattcaaatctgccttttaggacctggctttgtgacagcaaaaacccatctttacaggctcctagaagctgaaggttagagcattataaaatgaagagacagacatgattactcagggtcagcaacctagtgagttaggaaaaaaaattaacataggggccctattaagggggaaagccaactatgtttaagtttacgtgtccaaattttaatggaaattttttactaacaattttaaaccatatttttcttccttcatatccatttctaatccatcaaacagcttatgtttacataaaattttatcattcacaaggaagttttaagcacactgtctcatttgatatccacaacttatttttggtaggaaagagagatgtttttcccacctgtcagatgaaaaaactgaagctcaaaaagggttgacttgaccatacagctaatgctgacagatccaagacctagacctaggtcttttgaactcaagtccagcattctcaactatatcaagttactgttcagaatacttaatatctcctctcttcataattatcaatagccccaagctcatggatgacaaatctctgctttatttcttgtctctattttttcactttatagctcctgttataatagcaagtttaatggtataaacacaggataccatcctctcttgcaacacccatgtgcctttgatgagtcaggtagcaagctgtagtagataatgagaaaggccagaggctgcaaaagacagtcaaaggacacgagagaaaggaaggggaagaacaggactccaggactgttttatattatagaaaagcaagagctaaagagcatttacacatgttaaacagatacttgttaagcatagtgcctgacacacggcattagctgttattttatgagattccatcagctctgcctctgtcctctttcttctaacatgaaggtatcatgagaagagaaccttctaacataagctgtaattctaaacctgcacttgtccctctccagcaagaggctagcactgaattcattctactcatactacacacccagttatggaatgtccagagttctcgaagaaaataaatgactttaggaagaggtatacattttttaagtcgctctgcctccaaatctgaacagtcactgtaaatcattcttaagcccagatatgagaacttctgctggaaagtgggaccctctgagtgggtggtcagaaaatacccatgctgatgaaatgacctatgcccaaagaacaaatacttaacgtgggagtggaaccacatgagcctgctcagctctgcataagtaattcaagaaatgggaggcttcaccttaaaaacagtgtgcaaatggcagctagaggttttgataggaagtatgtttgtttcttagtgtttacaaatattaagtactcttgatacaaaatatacttttaaacttcataacctttttataaaagttgttgcagcaaaataatagcctcggttctatgcatatatggattagctataaaaaatgtcaataagattgtacaaggaaaattagagaaaggcacatttagggtttattttttacacttggccagtaaaatagggtaaatcctattagaattttttaaagaactttttttaagtttcctaaatctgtgtgtgtattgtgaagtggtataagaaatgactttgaaccactttgcaattgtagattcccaacaataaaattgaagataagctcaaaaaaaaaa

SEQ ID NO: 59569 - DNA, 1826 bp, Homo sapiens
ttttttttttttgcaatttaaaggataactttatttctatatagctgaagattcttttcactagtacaaaaaaggcttttatagtaagtccatgtgttttttaaagaatgaaaattgacaatttttataggtaactaaatttaagaagtttaccctttttccctgttttgcttttaataatgtctgattagtatttaccctataaatcattcaaatgaggatcactggaaaatataaataatacaatatcaacaattttacttttgggggtgtctccagccatctattgatggcccattttcagagtcctatttgggtgtaaggtaccgctggaagggaaggaacaaggatttgtcatgggggacttgtacggtttctttttgctggatcccaattttccattgcttccttttcatatgaatagccatctgatgcgatgaccggatctttcataagttctctagttattggacatataaattcatcaggaattcctgaagaaagggatttaaccttggtcctgagctcttcaattttcctcagcactttactacgcagtcctagagattcaattttcaaatcatcagccagactttcttttgtaagattcaacagttcttttccatcaatgttattcatcttgaaaataccaacaagatcttttaaatcttgtgcacaaagccatgttgagacatcctcctctgaccaatcttcggtaaattgcttcagctgatgttctgtgctccttgcttggcaaagtgtttccaggtcaaattgccagatgttcactgttttgtccattgaaccagtagcaagtaaaagggtattaggtgcaaaagcacaagttgtgacatacctggtgtgctgagtcaatgtgtgaagtatattctcagtattagtatcatatactatgacagacttatccactgaccctgagactagcatctgcccatcatgggaaaaagcacaagccagaacaggagcacagtgcccactcagtgtacttttatattttaattcaaaacctaagatatgggtaaaagaaacaatccaaattttgacttggcaatcctgaccacatgatgccagtcgaaaaaactgaagaccttgttctccatcagaaactggctgtgaagaaaaatcgcagcaggtaattccaagatcatgtgctttttcactatgcagacacctcattttatcatcccacactgttaaatcaccacatgaggagccagtgacaaagaagcttccattaggagaaaatgcacatgccgccaaggagccatctttaacactaccacatctatataatttgtatgactgtgcattccacaaaaccacagttccatcagctgcccctgatgccaaacacgtggagtctggggaaaactggcaaaccctcacagggctgccactaggctgttccatcactgccagcatctgtccattttcagtattccataggacagtggtaccatctgttgaacacgatgccaaaatatgtcctgaaggggagaaacagcagcagtggacagcataggtatgaaacttcaatggagaatgtggcagttcagtaaagtcacgtaacgagtacaggcgaattgttttgtccaaggagcaagtagccaagagggaaaaggagaaggcacagcagttgacatcgtcaccatgatcagctaatgtgtgaatcagtttcaccatgttctttatttgaagaaaaacagcctgcaggagcgggggcgcgcgggatccgccttcaaggtgcccacgggcggtgcgggtcacgtgccgcgcaggtgaggctggcggggcgggcgccggcggag

SEQ ID NO: 59570 - DNA, 1394 bp, Homo sapiens
cccacgcgtccggagaaacagaatcctaactatttctgaggaaactgcaggtccaaaatgtggctgcttttaacaatggcaagtttgatatctgtactggggactacacatggtttgtttggaaaattacatcctggaagccctgaagtgactatgaacattagtcagatgattacttattggggatacccaaatgaagaatatgaagttgtgactgaagatggttatattcttgaagtcaatagaattccttatgggaagaaaaattcagggaatacaggccagagacctgttgtgtttttgcagcatggtttgcttgcatcagccacaaactggatttccaacctgccgaacaacagccttgccttcattctggcagatgctggttatgatgtgtggctgggcaacagcagaggaaacacctgggccagaagaaacttgtactattcaccagattcagttgaattctgggctttcagctttgatgaaatggctaaatatgaccttccagccacaatcgacttcattgtaaagaaaactggacagaagcagctacactatgttggccattcccagggcaccaccattggttttattgccttttccaccaatcccagcctggctaaaagaatcaaaaccttctatgctctagctcctgttgccactgtgaagtatacaaaaagccttataaacaaacttagatttgttcctcaatccctcttcaagtttatatttggtgacaaaatattctacccacacaacttctttgatcaatttcttgctactgaagtgtgctcccgtgagatgctgaatctcctttgcagcaatgccttatttataatttgtggatttgacagtaagaactttaacacgagtcgcttggatgtgtatctatcacataatccagcaggaacttctgttcaaaacatgttccattggacccaggctgttaagtctgggaaattccaagcttatgactggggaagcccagttcagaataggatgcactatgatcagtcccaacctccctactacaatgtgacagccatgaatgtaccaattgcagtgtggaacggtggcaaggacctgttggctgacccccaagatgttggccttttgcttccaaaactccccaatcttatttaccacaaggagattcctttttacaatcacttggactttatctgggcaatggatgcccctcaagaagtttacaatgacattgtttctatgatatcagaagataaaaagtagttctggatttaaagaattatccgtttgtttttccaaaatactttattctctcatacatagtattttcataatgtttgacatgcagtgcttctttctgtaattttgactttagaaatatattggcatcaacaaaaaaaaaa

SEQ ID NO: 59571 - DNA, 4518 bp, Homo sapiens
tttcgtcccagacaggggctggcggcccggccggccccggctcaccgactcgggcagcatccacctgccccagccaacacccttctctcgccccaggtcctttctcagcctccagctgggctgtccccaagctgagctgaggctcttctcctccgatccccacctctgcccggacatccaccatggggacagccaccaggaggaagccacacctgctgctggtagctgctgtggcccttgtctcctcttcagcttggagttcagccctgggatcccaaaccaccttcgggcctgtctttgaagaccagcccctcagtgtgctattcccagaggagtccacggaggagcaggtgttgctggcatgccgcgcccgggccagccctccagccacctatcggtggaagatgaatggtaccgagatgaagctggagccaggttcccgtcaccagctggtggggggcaacctggtcatcatgaatcccaccaaggcacaggatgccggggtctaccagtgcctggcctccaacccagtgggcaccgttgtcagcagggaggccatcctccgcttcggctttctgcaggaattctccaaggaggagcgagacccagtgaaaactcatgaaggctggggggtgatgttgccctgtaacccacctgcccactacccaggcttgtcctaccgctggctcctcaacgagttccccaacttcatcccgacggacgggcgtcacttcgtgtcccagaccacagggaacctgtacattgcccgaaccaatgcctcagacctgggcaactactcctgtttggccaccagccacatggacttctccaccaagagcgtcttcagcaagtttgctcagctcaacctggctgctgaagatacccggctctttgcacccagcatcaaggcccggttcccagcagagacctatgcactggtggggcagcaggtcaccctggagtgcttcgcctttgggaaccctgtcccccggatcaagtggcgcaaagtggacggctccctgtccccgcagtggaccacagctgagcccaccctgcagatccccagcgtcagctttgaggatgagggcacctacgagtgtgaggcggagaactccaagggccgagacaccgtgcagggccgcatcatcgtgcaggctcagcctgagtggctaaaagtgatctcggacacagaggctgacattggctccaacctgcgttggggctgtgcagccgccggcaagccccggcctacagtgcgctggctgcggaacggggagcctctggcctcccagaaccgggtggaggtgttggctggggacctgcggttctccaagctgagcctggaagactcgggcatgtaccagtgtgtggcagagaataagcacggtaccatctacgccagcgccgagctagccgtgcaagcactcgcccctgacttcaggctgaatcccgtgaggcgtctgatccccgcggcccgcgggggagagatccttatcccctgccagccccgggcagctccaaaggccgtggtgctctggagcaaaggcacggagattttggtcaacagcagcagagtgactgtaactccagatggcaccttgatcataagaaacatcagccggtcagatgaaggcaaatacacctgctttgctgagaacttcatgggcaaagccaacagcactggaatcctatctgtgcgagatgcaaccaaaatcactctagccccctcaagtgccgacatcaacttgggtgacaacctgaccctacagtgccatgcctcccacgaccccaccatggacctcaccttcacctggaccctggacgacttccccatcgactttgataagcctggagggcactaccggagaactaatgtgaaggagaccattggggatctgaccatcctgaacgcccagctgcgccatggggggaagtacacgtgcatggcccagacggtggtggacagcgcgtccaaggaggccacagtcctggtccgaggtccgccaggtcccccaggaggtgtggtggtgagggacattggcgacaccaccatccagctcagctggagccgtggcttcgacaaccacagccccatcgctaagtacaccctgcaagctcgcactccacctgcagggaagtggaagcaggttcggaccaatcctgcaaacatcgagggcaatgccgagactgcacaggtgctgggcctcaccccctggatggactatgagttccgggtcatagccagcaacattctgggcactggggagcctagtgggccctccagcaaaatccggaccagggaagcagccccctcggtggcaccctcaggactcagcggaggaggtggagcccccggagagctcatcgtcaactggacgcccatgtcacgggagtaccagaacggagacggcttcggctacctgctgtccttccgcaggcagggcagcactctctggcagaccgcccgggtgcctggcgccgatgcccagttctttgtctacagcaacgagagcgtccggccctacacgccctttgaggtcaagatccgcagctacaaccgccgcggggatgggcccgagagcctcactgcactcgtgtactcagctaaggaagagcccagggtggcccctaccaaggtgtgggccaaaggggtctcatcctcagagatgaacgtgacctgggaacccgtgcagcaggacatgaatggtatcctcctggggtatgagatccgctactggaaagctggggacaaagaagcagctgcggaccgagtgaggacagcagggctggacaccagtgcccgagggagtggcctgcatcccaacaccaagtaccatgtgaccgtgagggcctacaaccgggctggcactgggcctgccagcccttctgccaacgccacgaccatgaagccccctccgcggcgacctcctggcaacatctcctggactttctcaagctctagtcttagcattaagtgggaccctgtggtccctttccgaaatgagtctgcagtcaccggctataagatgctgtaccagaatgacttacacctgactcccacgctccacctcaccggcaagaactggatagaaatcccagtgcctgaagacattggccatgccctggtacaaattcggaccacagggcccggaggggatgggatccctgcagaagtccacatcgtgaggaatggaggcacaagcatgatggtggagaacatggcagtccgcccagcaccacaccctggcaccgtcatttcccactccgtggcgatgctgatcctcataggctccctggagctctgatcctggaacccctccctctgcgccgcagctggacgccacctccgacggacacagccagccccttcctgctgccaaggtggcctgacactgtgccagagagtggctggttttaaatacctactttaaacagtgccctttttgtaggaggtaggatattttatattctgccgcaggatagaacccacgcaaggattttctttaaattgagaggcaccaggcagtaacttccatgatgacactgacgcctatacctgagctctaggctgcctggagggaaggaacaggcccatgggaagaagggggttttaaaaacatgtcttcaactcagcagagatggccctctgggaccctatacgcactccgccacttgagagcagtcctaggcccggcaggaacaccagacatgaacaggttgaagaactggagcgaagtgcacacctcaccatccttcagtctaaggaagaagggcaagccctgggaccaagagctctcccgccttctccctcgagcagcagcaaggaccctgacgctgtccccgataactccctaggggctcctgcctgcccaagcggctgagaaccagcgccccgatgcctgaggctgggagcctgagccccttcagctttgaggggggtgatactccaggctgtttggggtgggagccaaaaagagttgagaggccagggcccttggtggaaaggggcaccagccttggtctgagatagtcacaacccaggtgacgatgccctctcagccaacactgccaacctgaccctgtcatcccgattgacagcgccacttcaggtggctgggtgactaaagggcttgtcttggtggggtctcccacccctccaagacccattctgcacagtccctccagggtttgggcaggagatggccaatcatgcgcccacctctccagtgctgcctgcagtcagctcggcctccccgacctgcagccccagactctgctctcccagcactgactcactcctgcctgggaggggaatgcagcattcatgctgtgtgtcctggtattgggaggtttctgggaagggcagaggataaatgtggccctgcctgctcccaggtatacctaggaccacctggccagatccgctcccagacggccttggactgcttgcatttccccggagaaaaaggggttaataaatgggccatcctttcctgaaaaaaaaaacccccccccccc

SEQ ID NO: 59572 - DNA, 1509 bp, Homo sapiens
ttttttttttttggtctcaacagagacaggtttattttgggaataaacctgagaggggcttctggccgatttcggtcagggacattctcttacagactaagggcatttaagggtttaggaagggggagcctaccgcaggctgcgaatgtttctgtgtgaaggagagttttattgcagagttggaatatctctggctggaggggaggttattctcaggattggcatgtttctggtcagatgggggtttatctcatggttgaaatgtttctgctcatactgacatgagccattaggctgatgttttgggctggtttttaatcacggagaacttaaaatggccatgtttgtccaagatggcaatgctcctgctgtcacacccacccacccacagggtactggggtcgctgcagaacctggccgccttcgcagacacgttccactgtgcccggggcacccccatgcaccccaaggagcgatgccgcgtgtggtagccaaggccctgccgcgctgtgcggcccacgcccacccgctgctcggaggcatctgtgcgaaggtgcagctagcggcgacccagtgtacgtcccgccccggccaaccatgccaagcctgcctgccaggcctctgcgcctggccctagggtgcagccacctgcctgacacccagggatgagcagtgtccagtgcagtacctggaccggagccccctccacagacacccgcggggctcagtgcccccgtcacagctctgtagagacaatcaactgtgtcctgcccaccctccaaggtgcattgtcttccagtatctacagcttcagacttgagctaagtaaatgcttcaaagaaatcagaggccttgcttgtctgggagggaccagggtgggtaaacaggtagcagtggtcttgggcaaaacagctgcccgggggtgggagagagtgacagctgggagctgatggggagggagccagttccagtcaggtctcctagggtccaatgctagggccagcagtgaccaggatgcccccaagtgcccacccccagggaccacacattcagatgcggggagccccactggggcaccgggggacccagagagctgcagctgggaacctgaaattttagcttggtgtaactgaaagccagaggaggggctgaacgcaaagggacgcagtgggtcacctgctatgcatttttaaatggccactgcaagggtggcattgggggcaggaagggagccgggagacccacaggaacccacagtggtccccaggtctggactagggagtgcagagagggctgcagttgtcatcggcctgcatgggaggggagggcctgagcaggtagtctgacctgggaggtaaggggctctgctctgggcctgttagggtccccagggaaaggtggccaagaagctggacacacctaattagactaagaccctcccgggccggccgccccaaaggccatacccagcaggtgcaaacaatgattctgacatcagtaaagagcctt

SEQ ID NO: 59573 - DNA, 1084 bp, Homo sapiens
catagaacgcctgtacgctttgagaagcgtgtacgcctagacgcaccggcgacccattcgtacgcccacgcgtccggaggagaccaggacagctgctgagacctctaagaagtccagatactaagagcaaagatgtttcaaactgggggcctcattgtcttctacgggctgttagcccagaccatggcccagtttggaggcctgcccgtgcccctggaccagaccctgcccttgaatgtgaatccagccctgcccttgagtcccacaggtcttgcaggaagcttgacaaatgccctcagcaatggcctgctgtctgggggcctgttgggcattctggaaaaccttccgctcctggacatcctgaagcctggaggaggtacttctggtggcctccttgggggactgcttggaaaagtgacgtcagtgattcctggcctgaacaacatcattgacataaaggtcactgacccccagctgctggaacttggccttgtgcagagccctgatggccaccgtctctatgtcaccatccctctcggcataaagctccaagtgaatacgcccctggtcggtgcaagtctgttgaggctggctgtgaagctggacatcactgcagaaatcttagctgtgagagataagcaggagaggatccacctggtccttggtgactgcacccattcccctggaagcctgcaaatttctctgcttgatggacttggccccctccccattcaaggtcttctggacagcctcacagggatcttgaataaagtcctgcctgagttggttcagggcaacgtgtgccctctggtcaatgaggttctcagaggcttggacatcaccctggtgcatgacattgttaacatgctgatccacggactacagtttgtcatcaaggtctaagccttccaggaaggggctggcctctgctgagctgcttcccagtgctcacagatggctggcccatgtgctggaagatgacacagttgccttctctccgaggaacctgccccctctcctttcccaccaggcgtgtgtaacatcccatgtgcctcacctaataaaatggctcttcttctgcaaa

SEQ ID NO: 59574 - DNA, 3710 bp, Homo sapiens
ttttttttttttttttttttttttttttttttttttttttttaggtcaaggtgagtttattgtccaaatagcataacctaattgcattcaaaaccattttcaaatccatctttaaactagtcagaaaacaggttattatttttttaaatcacttaacactgaacagataagacctcttaaaaggcagctgactatatcatgtcaccatcatagccaatacaacatttttgccatacttcctaaaaaccttttcgcatacactgatcatgctacttatcagcactttctaacatcctgaccaaacagacacccacacctcttatagagtacacttgtgagagaataacatgggacttggatatgggcatcacacttgttttaaagcaaaaaaaaaaagaaaaaggaaaagaaaaaaaaaagtccaaggcaagaaactatataacctgagagagaggagagagagagagatctgaggtacatgatataagggtgatgaacataatggaaaaaatccaatggcccgatgatttgctggggatgtaagagttggccagcagttaagaactaaaccaattaaaaataaaaatagaaactttgtttttcaaggacaggcacctgtcaaaagacattggatactgtaatggctacagtcagtaaggcactttatttccccaaagtaggctgcaggcgaagggatgcaggctgcagctacagcatgcacgtacacatttgctgatggcttctcaaaacctgagccgagaatagggtctgatagcccagccaagtttaaaagcagacacacacgaatgtagtatcgttgtgcctgaaatgaccattctgggttgtttagaatccagaatcatcaaaagccatgtggtatgaggaagtaataaatatcctcttgaatcttcttaccctattttgcacaaatggatggctgcatgaacagctcttgtaaattgctctgagtccacaccaatagaaacctgcactcattctatagctacagagggtttgttggcttaaggggactttatcatctcagcattaatttcccttttaaagctattctcaaggttggactgtctcagagataaacaaagaggaatccttttggcttagaagccaactggcttactcagacttcctccccttcctacctccaattcccacactaccaatattatcttcttgaactagaaaatcaattatttacatgacataaggtgcaagtctatttcttctcccagccctgtcccctgtggcccatggagagaaaattcccctgccctcttggagagagtcatctgatcctgccttatgttcttaacctttcagtcccagagctcccagggcacagtctggagaggccctagaggtgctagactgcagggaagcgcagctccgtctgaagagttgccaatcctgctagcaatgggatgcagcgtgatgctgtcagggttgtcttctcctctggctttgtcacttaagccatgtgtgcccctgacctggctgataagaggcagaacagagcctccagtacagagcacatagaccaaggatgacccagtagtaaggcatgctgtgctctccagtggggtcctgaggcagttcaaaataaggcctcctggaagaacagccccttcttcaaggagctcgcctctcagcacgcatggggtgttctgcggagggaactgcccttggctttctcctgcaggcttcttggctgttatggacccgcatggagtttaattatgcttagcatatatttttggcatactaggatttcttccccctaggatttggccaaaagaggggaaggatcaaaatttggcaggctgggggaacaactcggcccccactgatggagaaaaaaacaaacagatggaagtaaagacgagatagaaacacaacaaggtagaaaaagaccaggataatttggaacccctttagtgggaggtaagaaaaagaagagaaagaacaacaacaacaaaaagagcaagttcaaatccaagggggagagctcctctggaacaaaactcctaccaaagagactaagagctaaggagagggcaaaatccaggattccttcttgtgtttaagcaggagcaggcagaaaagcctaacaacccccgactttcccatcggcagccccacacccatcatcacacaaggccccaaggatgggaaagagaaaagctagaaggacccaggggcctcgggactacaggaagagtggaaagttacagactgtaaatagagtcgggtaggcttgtgcccttccttatttgtccggttctttcatttgctgcttctgtttaagctcaagggtcagtcaccatgaaatgaatttgcacctcggtttctctttaggctccaagattcccaagaactccagggttcccgctttccccattccgtgggactccttggggcccaggagagtgtgctgagcaaagctggctcttgagaaaactctggctagcttacttgctggctgctccacttccctctccaaaacttcagaattcaccacccattgtcccaccagaaatcccctagaattttagggtcatgctaactcacaaagtcctgaacccttctaaacacacttcccaagagactgactcatctggaatttcacctctgtagagaagcagcctcttcacctcccttcaactatcatcccatacttatctgacctatttttcttatcctgccaattcagtgtgattgaaaacccgaccgtttagtaccgctcagcagagggcctgggcttgcatagtgcttgcctgcgcagtttgagacagaggagggagaaggaagcaccataaacgctgcttgctgcaggttcatctactcgcagattcagacctaggaaacctgcagagatgatcctaaacacaaggtgtccatgccaggggaagggaaagacggaggggaaaaacttcaagatgaaagggccctttgcagatgaagccccgcttttgaaaaagctccaagatgaggatctccaaacagcctggtggaattctttttagtctgtttcctgacacctggtacctaagtgcaaattacgacatctgagcctaccgcataaatgtttgtactgaacgtctgccttgaaggggagggaggatcccttggttcaatgtatttttttccatcatgatgaggataccagggtctaactgggagcccgatggcctccatgaccaaaaaggtccctgggagtgagaccgccctgccttccacctgagagggagtcagccctgctcacactgcttctgtattcctcatgcgaatgggctcccaagcagaaactgtacggttgtgaggtattatgaaaacaaaagcgtgaatcattgccttttgtagttattgattttgtccagtaaacctgaggtaaagaatactccgtctttgaagaatgtgatcagaggaaaaaaaaaaaaccaaaaaaccaaaaaagaaaaaaaaaaacaaccatgaatatgctaccagaagaaaacaaactacggaagggcttttccagtacgaagaactcatatctcaaccatctacttcaggacttggaatttaagcagtaaaataatatattataaaaatgtttataaaatagcagcacactctgtgaaacattacagctaggtactgtcaacgtgaataaggatggatgactttagcttcttagcagcgcaaaaaaaaaa

SEQ ID NO: 59575 - DNA, 1959 bp, Homo sapiens
tttcgtcagggtgccggcaggggcgtccggggcgctctgaccggcctcgcccgcccccccgcagacacaagatggtgaaggagacccggtactatgacatcctgggcgtgaagcccagcgcgtccccggaggagatcaagaaggcctatcggaagctggcgctcaagtaccacccggacaagaacccggatgagggcgagaagtttaaactcatatcccaggcatatgaagtgctttcagatccaaagaaaagggatgtttatgaccaaggcggagagcaggcaattaaagaaggaggctcaggcagccccagcttctcttcacccatggacatctttgacatgttctttggtggtggtggacggatggctagagagagaagaggcaagaatgttgtacaccagttatctgtaactcttgaagatctatataatggagtcacgaagaaattggccctccagaaaaatgtaatttgtgagaaatgtgaaggtgttggtgggaagaagggatcggtggagaagtgcccgctgtgcaaggggcgggggatgcagatccacatccagcagatcgggccgggcatggtacagcagatccagaccgtgtgcatcgagtgcaagggccagggtgagcgcatcaaccccaaggaccgctgcgagagctgcagcggggccaaggtgatccgtgagaagaagattatcgaggtacatgttgaaaaaggtatgaaagatgggcaaaagatactatttcatggagaaggagatcaggagcctgagctggagcctggtgatgtcataattgtgcttgatcagaaggatcatagtgtctttcagagacgaggccatgacttgatcatgaaaatgaaaattcagctttctgaagctctttgtggcttcaagaagacgataaaaacattggacaatcgaattcttgttattacatccaaagcaggtgaggtgataaagcacggggacctgagatgcgtgcgcgatgaaggaatgcccatctacaaagcacccctggaaaaagggattctgatcatacagtttttagtaatctttcctgaaaaacactggctttctctggaaaagcttcctcagctggaagctttactccctcctcgacagaaagtgaggattacagatgacatggatcaggtggagctgaaggagttttgtcccaatgagcagaactggcgtcagcacagggaggcctacgaggaggacgaagacgggccccaggctggagtgcagtgccagacggcatgacgtggtgcggggcagcgtggccccaccggactagcacatgatgaatgtaaagttggcacaatgaaaatgacatcgctttaatggccttgtgtttgggatgtcctgtgtatgtgttcagcattcttaattgctgagtgtctttttggcttttcttttggttgtaacttaagttatagcttaatttatatttaaatgttttaagtataaatcacctctagtctgcatatggaatctgttcatttctattttcaggatatacttttgagatgtcagtgattgcaccaacactttgtgcttctagtggctttgccataattcagtgtcaccaataaggcacagcccagttagcagcttagcccccctagcaaaccccaaggcacaaagtgggcatcctgactcatctctaggtctgtggtttctcccctcttcccttggcagagttattgagggcatgatctcagggctgctaagataacatttctgaggattctagatgatcctcttaaagaataaaagcacatccgtggatcggacatggctgcatgtgcctgcttaacagggccaacttagttcctactgttctgtgcccttcagtggatggaacgtgagtgtctgatcatctctcttggaagttttctgaaccttccaagctctgtggtgaggacaaaccagtgtttgaatcatttgctgataa

SEQ ID NO: 59576 - DNA, 4423 bp, Homo sapiens
gtctcccaaaccactacctggctgcccccgtaccagctgctgggaaagactacttcctccgagttgtgccggcctccgcgttctcctcacctcccctctcctccggacctccgccccctcgcggagaggccttgccgctttaagagccgggctagcgattgacaagcaataaacgctgagcgcccggctgcgctggagccgcccggagctaggggcttcccggggcgcaggagagacgtttcagagcccttgcctccttcaccatgccggttgccgccaccaactctgaaactgccatgcagcaagtcctggacaacttgggatccctccccagtgccacgggggctgcagagctggacctgatcttccttcgaggcattatggaaagtcccatagtaagatccctggccaaggtgataatggtattgtggtttatgcagcagaatgtctttgttcctatgaaatacatgctgaaatactttggggcccatgagaggctggaggagacgaagctggaggccgtgagagacaacaacctggagctggtgcaggagatcctgcgggacctggcgcagctggctgagcagagcagcacagccgccgagctggcccacatcctccaggagccccacttccagtccctcctggagacgcacgactctgtggcctcaaagacctatgagacaccaccccccagccctggcctggaccctacgttcagcaaccagcctgtacctcccgatgctgtgcgcatggtgggcatccgcaagacagccggagaacatctgggtgtaacgttccgcgtggagggcggcgagctggtgatcgcgcgcattctgcatgggggcatggtggctcagcaaggcctgctgcatgtgggtgacatcatcaaggaggtgaacgggcagccagtgggcagtgacccccgcgcactgcaggagctcctgcgcaatgccagtggcagtgtcatcctcaagatcctgcccaactaccaggagccccatctgccccgccaggtatttgtgaaatgtcactttgactatgacccggcccgagacagcctcatcccctgcaaggaagcaggcctgcgcttcaacgccggggacttgctccagatcgtaaaccaggatgatgccaactggtggcaggcatgccatgtcgaagggggcagtgctgggctcattcccagccagctgctggaggagaagcggaaagcatttgtcaagagggacctggagctgacaccaaactcagggaccctatgcggcagcctttcaggaaagaaaaagaagcgaatgatgtatttgaccaccaagaatgcagagtttgaccgtcatgagctgctcatttatgaggaggtggcccgcatgcccccgttccgccggaaaaccctggtactgattggggctcagggcgtgggacggcgcagcctgaagaacaagctcatcatgtgggatccagatcgctatggcaccacggtgccctacacctcccggcggccgaaagactcagagcgggaaggtcagggttacagctttgtgtcccgtggggagatggaggctgacgtccgtgctgggcgctacctggagcatggcgaatacgagggcaacctgtatggcacacgtattgactccatccggggcgtggtcgctgctgggaaggtgtgcgtgctggatgtcaacccccaggcggtgaaggtgctacgaacggccgagtttgtcccttacgtggtgttcatcgaggccccagacttcgagaccctgcgggccatgaacagggctgcgctggagaggggaatatccaccaagcagctcacggaggcggacctgagacggacagtggaggagagcagccgcatccagcggggctacgggcactactttgacctctgcctggtcaatagcaacctggagaggaccttccgcgagctccagacagccatggagaagctacggacagagccccagtgggtgcctgtcagctgggtgtactgagcctgttcacctggtccttggctcactctgtgttgaaacccagaacctgaaatccatcccccttccttgaacctgttgaccccctgccacaatccttagcccccatatctggctgtccttgggtaacagctcccagcaggccctaagtctggcttcagcacagaggcgtgcactgccagggaggtgggcattcatggggtaccttgtgcccaggtgctgcccactcctgatgcccattggtcaccagatatctctgagggccaagctatgcccaggaatgtgtcagagtcacctccataatggtcagtacagagaagagaaaagctgctttgggaccacatggtcagtaggcacactgccccctgccacccctccccagtcaccagttctcctctggactggccacacccaccccattcctggactcctcccacctctcacccctgtgtcggaggaacaggccttgggctgtttccgtgtgaccaggggaatgtgtggcccgctggcagccaggcaggcccgggtggtggtgccagcctggtgccatcttgaaggctggaggagtcagagtgagagccagtggccacagctgcagagcactgcagctcccagctcctttggaaagggacagggtcgcagggcagatgctgctcggtccttccctcatccacagcttctcactgccgaagtttctccagatttctccaatgtgtcctgacaggtcagccctgctccccacagggccaggctggcaggggccagtgggctcagcccaggtaggggcaggatggagggctgagccctgtgacaacctgctgttaccaactgaagagccccaagctctccatggcccacagcaggcacaggtctgagctctatgtccttgaccttggtccatttggttttctgtctagccaggtccaggtagcccacttgcatcagggctgctgggttggaggggctaaggaggagtgcagaggggaccttgggagcctgggcttgaaggacagttgccctccaggaggttcctcacacacaactccagaggcgccatttacactgtagtctgtacaacctgtggttccacgtgcatgttcggcacctgtctgtgcctctggcaccaggttgtgtgtgtgtgcgtgtgcacgtgcgtgtgtgtgtgtgtgtgtcaggtttagtttggggaggaagcaaagggttttgttttggaggtcactctttggggcccctttctgggggttccccatcagccctcatttcttataataccctgatcccagactccaaagccctggtcctttcctgatgtctcctcccttgtcttattgtccccctaccctaaatgcccccctgccataacttggggagggcagttttgtaaaataggagactccctttaagaaagaatgctgtcctagatgtacttgggcatctcatccttcattattctctgcattccttccggggggagcctgtcctcagaggggacaacctgtgacaccctgagtccaaacccttgtgcctcccagttcttccaagtgtctaactagtcttcgctgcagcgtcagccaaagctggcccctgaaccactgtgtgcccatttcctagggaaggggaaggagaataaacagaatatttattacaaatgttagaatatatttcttatactaggaatctcatttgcatttgcatagactatacacatggggtggaaaggccaggcctgcccccatctcgttggtgtggctctgcgtatactacacactcattctcctgctcctcttttcccttagtcagtgtcctttcatcctgattcagctctgccttgcatcaccctcagcctaagggagtgggaaggaaatggggtgttttcttgctgacctgaggctatagggtcacttgccatttcctaccttctctgggggatttgagggtagaggcaggggaagatctgttgttgcagttgcttctgcccccttgatccaaatgaccatcatctctgatggagatgggttgggtacctggccttcatggcaccttcactgctagggatgctcaaggggcaggcctggggcccttccctcctgtctcttctcggtctttcctctctgagcagcctcctacctcccctgcctgagccctcactccacagccctcccaggtacctagcagaggctgtcagtccttggctcacctggaacagggctggggctgggttggaacaggtgtgtgcccccaccacagctctatgactctgttctccctccctgccattgtggactcttgtatttgagggacctcaagagagtgaggaccctaccatccactgtccatattcagtcccagccccagtgcgcttcctctgttccctccctcagccatccaattcttgagttttctcactgattggttttctttctttttccttg

SEQ ID NO: 59577 - DNA, 798 bp, Homo sapiens
tttcggagcctctggactttgaagcattcaaacagcatcggccataacaacagaaatggccagtcagtcccaaggtatccagcagcttctgcaagctgagaagcgggcagctgagaaggtggcagatgccagaaagaggaaggcccggcgactgaagcaggcaaaggaggaggcacagatggaggtggagcaataccgcagagagcgagagcacgaattccagagcaagcagcaggcggccatgggctcccaggggaacctgtctgctgaggtggagcaggctacaaggcgccaggtgcagggcatgcagagctcccagcagagaaaccgagagcgtgtcctggcccagcttcttggcatggtctgcgacgtcaggccccaggtccaccccaactaccggatttctgcctagggccaccgtagggcctgactccttctgccagttccctccctcaaagaaatcctccaatcaaaatcacctcccaccataatccctgtcttctttccatcccctagaaatcctgggaggcaggatccaataattttcctgtgacacttataaatatcctgctcacatctgaatctccttgttgttctttaaccctcactgggactttgtaaacttccaagtcattctcacctaaaccctctgtgaaatttgtaatatggggaagtaggaatgtggaaaacatcctgacttcagtgtctggccgatgtgggtccctctcttgaccctgtcacttgctggctgtgaaaccaggacaagctacttaacttggtagcctcggatgtcctcct

SEQ ID NO: 59578 - DNA, 2387 bp, Homo sapiens
tttcgtcaagaggaggattagcttccactccgatttcaatgatccagtttacccactctacagcccagatataggcacttatttcccctttccagccagagacttccgttccctgctggaacttccgatcccattcttctctcggtgggaatgcttgtggggggaaaaagaaacgcaatagataaagcggggcgcatgcgctcccggcacaggcttcgattgtgaggaaggccggctagtctccgagctcatcccgccttgcgcatgcggagaaggtaaaccagcgccccgagttgaggcgcgggtttggtggcgcgtttcagcgaagtcgcacgtgaaggatagcagtggcctgagaaagacccagtcatggcagcctccagcatcagttcaccatggggaaagcatgtgttcaaagccattctgatggtcctagtggcccttatcctcctccactcagcattggcccagtcccgtcgagactttgcaccaccaggccaacagaagagagaagccccagttgatgtcttgacccagataggtcgatctgtgcgagggacactggatgcctggattgggccagagaccatgcacctggtgtcagagtcttcgtcccaagtgttgtgggccatctcatcagccatttctgtggccttctttgctctgtctgggatcgccgcacagctgctgaatgccttgggactagctggtgattacctcgcccagggcctgaagctcagccctggccaggtccagaccttcctgctgtggggagcaggggccctggtcgtctactggctgctgtctctgctcctcggcttggtcttggccttgctggggcggatcctgtggggcctgaagcttgtcatcttcctggccggcttcgtggccctgatgaggtcggtgcccgacccttccacccgggccctgctactcctggccttgctgatcctctacgccctgctgagccggctcactggctcccgagcctctggggcccaactcgaggccaaggtgcgagggctggaacgccaggtggaggagctgcgctggcgccagaggcgagcggccaagggggcccgcagtgtggaggaggagtgagccggatgccccacacaccgccagtgtcataccaaagagctgagctgcttcggggccatgcagccctcctgccagccccctgcccttttcttgccctgtctctgaaccttcagaacattgatccttgccgcagccccactagccaagagaaacagagaaagaccattccccctgcctgtccttgcggccctgtcttctgaggttctctgtctggggttggctctcttaaccctttctctgctcccagcctgcctcaccagggaaggttggaggggcctccctctggcttctgcatctgcgccagcaaacatcactgccgttggtctctcatgacttaactggcttccctctgctgctgccttggcttcctcctaatgctcgtgctctcctgtccttctgaagttgctccttggccaaatctccagctcccttcttgttttcctcatcctcctaccctgtactcccaccaaaccatggtcctttaaggcacgctcctgtcctcctcattgcccagcagtagggaggggcaggggtaaggggacctgaggataaagggtggggaaacagggtcccctgaggcctgtgggggctgcaggggaggaggatgtaccttgtgtctctttcaagtgccttaatccgagccagcagggccttctgcttgcctgctgccatactgtatgtaggaaagtgttctgtggctgctttgtgtcaagaaaagagcagtcactctcagaatcttgattccccatcagccaaagcaaaagatggctgctgctttgtaggcatgtgcctgcaagtgggaccttgctgggcattatatgccctgtgggggtttcagagaccctgaaagaggagggaggacccgcctccttgtctgcacaactgcatgcacttctctccccatcgctccacaacctgaaaccgagaaggagttgctgaccagtgcccaccccggcagcccgggaggaacacaggcagctcctttcccttcacgtggtctgcagagagcagggtgagctgccagctgcccctctccaccagggtaccctgtcttggtggttaggggccacttttcctttgaggctctagtggaggtggatgtccttctctgccaggcttggcacatgatgtgaagaataaatgcccaattcttactgttcaggtttgatgtggaatcacagctgcagtgatatatattttttatcagtgcttggttggttttaaataaagtgcacgctattttattatcttgttctgaataaaatgtatttactccaaaaaaaaaa

SEQ ID NO: 59579 - DNA, 3015 bp, Homo sapiens
tgcacgccggtcgcgcgcagcatggccaccaccgccacctgcacccgtttcaccgacgactaccagctcttcgaggagcttggcaagggtgctttctctgtggtccgcaggtgtgtgaagaaaacctccacgcaggagtacgcagcaaaaatcatcaataccaagaagttgtctgcccgggatcaccagaaactagaacgtgaggctcggatatgtcgacttctgaaacatccaaacatcgtgcgcctccatgacagtatttctgaagaagggtttcactacctcgtgtttgaccttgttaccggcggggagctgtttgaagacattgtggccagagagtactacagtgaagcagatgccagccactgtatacatcagattctggagagtgttaaccacatccaccagcatgacatcgtccacagggacctgaagcctgagaacctgctgctggcgagtaaatgcaagggtgccgccgtcaagctggctgattttggcctagccatcgaagtacagggagagcagcaggcttggtttggttttgctggcaccccaggttacttgtcccctgaggtcttgaggaaagatccctatggaaaacctgtggatatctgggcctgcggggtcatcctgtatatcctcctggtgggctatcctcccttctgggatgaggatcagcacaagctgtatcagcagatcaaggctggagcctatgatttcccatcaccagaatgggacacggtaactcctgaagccaagaacttgatcaaccagatgctgaccataaacccagcaaagcgcatcacggctgaccaggctctcaagcacccgtgggtctgtcaacgatccacggtggcatccatgatgcatcgtcaggagactgtggagtgtttgcgcaagttcaatgcccggagaaaactgaagggtgccatcctcacgaccatgcttgtctccaggaacttctcagctgccaaaagcctattgaacaagaagtcggatggcggtgtcaagccacagagcaacaacaaaaacagtctcgtaagcccagcccaagagcccgcgcccttgcagacggccatggagccacaaaccactgtggtacacaacgctacagatgggatcaagggctccacagagagctgcaacaccaccacagaagatgaggacctcaaagtgcgaaaacaggagatcattaagattacagaacagctgattgaagccatcaacaatggggactttgaggcctacacgaagatttgtgatccaggcctcacttcctttgagcctgaggcccttggtaacctcgtggaggggatggatttccataagttttactttgagaatctcctgtccaagaacagcaagcctatccataccaccatcctaaacccacacgtccacgtgattggggaggacgcagcgtgcatcgcctacatccgcctcacccagtacatcgacgggcagggtcggcctcgcaccagccagtcagaagagacccgggtctggcaccgtcgggatggcaagtggctcaatgtccactatcactgctcaggggcccctgccgcaccgctgcagtgagctcagccacaggggctttaggagattccagccggaggtccaaccttcgcagccagtggctctggagggcctgagtgacagcggcagtcctgtttgtttgaggtttaaaacaattcaattacaaaagcggcagcagccaatgcacgcccctgcatgcagccctcccgcccgcccttcgtgtctgtctctgctgtaccgaggtgttttttacatttaagaaaaaaaaaaaagaaaaaaagattgtttaaaaaaaaaaggaatccataccatgatgcgttttaaaaccaccgacagcccttgggttggcaagaaggcaggagtatgtatgaggtccatcctggcatgagcagtggctcacccaccggccttgaagaggtgagcttggcctctctggtccccatggacttagggggaccaggcaagaactctgacagagctttgggggccgtgatgtgattgcagctcctgaggtggcctgcttaccccaggtctaggaatgaacttctttggaacttgcataggcgcctagaatggggctgatgagaacatcgtgaccatcagacctacttgggagagaacgcagagctcccagcctgctgtggaggcagctgagaagtggtggcctcaggactgagagcccggacgttgctgtactgtcttgtttagtgtagaagggaagagaattggtgctgcagaagtgtacccgccatgaagccgatgagaaacctcgtgttagtctgacatgcactcactcatccatttctataggatgcacaatgcatgtgggccctaatattgaggccttatccctgcagctaggagggggaggggttgttgctgctttgcttcgtgttttcttctaacctggcaaggagagagccaggccctggtcagggctcccgtgccgcctttggcggttctgtttctgtgctgatctggaccatctttgtcttgccttttcacggtagtggtccccatgctgaccctcatctgggcctgggccctctgccaagtgcccctgtgggatgggaggagtgaggcagtgggagaagaggtggtggtcgtttctatgcattcaggctgcctttggggctgcctcccttcttattcttccttgctgcacgtccatctcttttcctgtctttgagattgacctgactgctctggcaagaagaagaggtgtccttacagaggcctctttactgaccaactgaagtatagacttactgctggacaatctgcatgggcatcacccctccccgcatgtaacccaaaagaggtgtccagagccaaggcttctaccttcattgtccctctctgtgctcaaggagttccattccaggaggaagagatctataccctaaggcagataggcaaagaagataatggaggagcaattggtcatggccttggtttccctcaaaacaacgctgcaga

SEQ ID NO: 59580 - DNA, 1379 bp, Homo sapiens
agagagcgcggtggaattcagacatgggggacctgccgggcctcgtgcgcctctccatcgcgctgcgcatccagcctaatgacggcccggtcttttacaaggtggacgggcagcgcttcggccagaaccgcaccatcaagctgctcaccggctcctcctacaaggttgaggtgaagattaaacccagcacgctgcaggtcgagaatatttccattggtggtgtgcttgtcccactggaactgaagtctaaagagcctgatggggacagagttgtttatacgggtacatatgacacagaaggtgtgaccccaacgaagagtggagaacggcaacccatccagatcaccatgccgttcacagacattgggaccttcgagacagtgtggcaagtcaagttctacaattaccacaagcgggatcactgccagtggggaagccccttctctgtcattgagtatgaatgcaagcccaacgagacacgcagtctgatgtgggtgaacaaggagtccttcctctgaaagtggctctttctgatgctactggacaatcttttcagaaatctacttttagataaaccagcgcaggccttaaacaaggcatgccacaccattgctgttccccatctggtactaatgacctactagccctggttattttgaaagtgtaattcccctctgacacaatatccctcacatacaagatggtgatgtaccactcccgagaatattcccatctgtattttgtgctgatgttcctgcatccagttgttctcggtcatacttttgaccacttgtgactggagttcagtggccctggcaggcttgtcctgctcttgaccattccactgactaactttggtgttttgtttccaagttaagtgattcctccttttttttgttcaatgttaaatttaaaaataacaatgtgtatgggtcctcccatgtgtaatatggtaacatgtaacttgcagtgtttgccagctttcaaagcaggctttgtgaaaatgtaatacaaacagcagtgaatgggactcaaatgttgtgcttcctataaacagctccgctctttcagggaaggatggtaacaaactagaaggacaaatatgtacgtatttataacgtattaaaactcttttaagtagcttaaggtattgtgcaatggcctagcctagtagaaatgggggaaaagcattgctgtggaccattgttaaagtgacaggagttgtagggttacccctttgacaagcttccatagtcttcagacacgcacattgatggcatccctacagtcttcttcacttgaactttgtaaaactgcatatggacctgtaatcaacttttgatatttcttaataaaggcgttgaaaatcaaaaaaaaaa

SEQ ID NO: 59581 - DNA, 2262 bp, Homo sapiens
tttcgtgcgagaggagcccctgctctgttaacgctcttaatgtgctgcggctgccggcagaagctagcaggctcctctgctgaggagctggtgcctgtccagacgcagaagaaaactgacacctcccacgtgggggacagaaaggtcctctcattggtgccacctgcagagatagacaaggagcgcctggccatcagaggacgctcctgacagtgacacagtgaccactataaaagtcaggcgggctgaggaggagacaaaggccaggacgctccgcagctgttggggaagaggagctgcctcctgggatggagaaatttaaggctgcgatgttgctggggagcgtcggcgatgctcttggctacagaaatgtctgcaaggagaacagcactgtaggcatgaagatccaggaggagctgcaacgttccgggggcctggaccacctcgtactctcgccaggagaatggcccgtgagtgacaacaccatcatgcacatcgcaaccgccgaggccctcaccacagactactggtgcctggatgatctgtaccgggagatggtgagatgctatgtggaaatcgttgagaagcttccagaacgccggccagacccagctaccattgaaggctgtgctcagctaaagcccaataactaccttctcgcctggcacacaccgttcaatgaaaaaggctcagggtttggagcggccaccaaggccatgtgcatcggcctgcggtactggaagcctgagcggctggagaccctcatcgaggtcagcgtggagtgcggccggatgacccacaaccatcccacaggcttcctgggctccctgtgcacggccctgtttgtgtcgttcgccgcacaaggaaagcccctggtccagtgggggagagacatgctgcgggcggtgcctctggcagaagagtactgcaggaagaccatccggcacacggcagaataccaggagcactggttttactttgaagctaaatggcaattttatttggaggagaggaaaatcagtaaagactcagaaaataaagccatcttccccgacaattatgatgcagaagagagggaaaagacctacaggaagtggagctcggaaggtcgagggggaagacgaggccacgatgcccccatgatagcctatgacgccctccttgcagcaggaaacagctggactgagctgtgtcaccgggccatgtttcatggaggggagagcgcggccacgggcaccattgcaggctgcctgttcgggttgctgtacggcctggacctcgttcccaaaggcttgtaccaggacctggaggacaaggagaagctggaggacctgggcgcggctctctaccgcctgtccacagaggagaagtaaagccatttctgccactttccccctagagagccgattccaccccggggcccgtagggccctctcgcagcccctgggtgagggtgtctctgtgaggctccactgcggtctgtgcctgactggccacatctaactctctgtttccaatttcagaatcctaacgtgttgcataaaatacattgtttgtcctgcgagaatattttccgtcctccaccatcagcattgacactgcgtagatttgccgcacttggacctccatgcgtggcactcacccgcagtctcctggacaggcgctgtattttattctgtcgcagagctaatgctgtttactcactcacttcaacaacactaactgcggtggtggcctccagcaggcccccccgctgcagaccctctgtcctgcctctgcctccaggcatgcgtttccccgtgagggccaatgcacctccccccaccccccaccctcccatgtccacagtgggtcgtgtgttcctggacagagaaacagtccacactggggcctgcgggacacatatagcagcatattttgctcttaaccccacccacctttttaatcacactagattttaagatcaatccctttttgaaacaactcacggagaaaaccagaacataaatggcctcctgccagctccggcgtctctctgtggtctgccttagtgggccaagtccaaatgcagagaaggcctttcccttccgcgcctgccccatcgggctcgctgacgaggaagcgctgtccctgtgatgaggttctctctcaaagagtcttggaaaagaggccccttgctcttgtttaaaataaatttggacgtgatttttccatgcagcatctggtgtgaataaaacagcagttgactgatgtttaaaaaaa

SEQ ID NO: 59582 - DNA, 2629 bp, Homo sapiens
tttcgtggcggcagcggcggtggcggtggctgagcagaggacccggcgggcggcctcgcgggtcaggacacaatgtttgcacgaggactgaagaggaaatgtgttggccacgaggaagacgtggagggagccctggccggcttgaagacagtgtcctcatacagcctgcagcggcagtcgctcctggacatgtctctggtgaagttgcagctttgccacatgcttgtggagcccaacctgtgccgctcagtcctcattgccaacacggtccggcagatccaagaggagatgacgcaggatgggacgtggcgcacagtggcaccccaggctgcagagcgggcgccgctcgaccgcttggtctccacggagatcctgtgccgtgcagcgtgggggcaagagggggcacatcctgcttctggcttgggggacggccacacacagggtccagtttctgacctttgcccagtcacctcagcacaggcaccaaggcacctgcagagcagcgcctgggagatggatggccctcgagaaaacagaggaagctttcacaagtcacttgatcagatatttgaaacgctggagactaaaaaccccagctgcatggaagagctgttctcagacgtggacagcccctactacgacctggacacagtactgacaggcatgatggggggtgccaggccgggcccctgcgaagggctcgagggcttggctccggccaccccaggccctagctccagctgcaagtccgacctgggcgagctggaccacgtggtggagatcctggtggagacctgagcaggagccctgagtgctcacagccgcctctgacgcattgacacgtgagcactggctcccacggagggtgcgcctgccgccagcggcccagccttgctgccctgtctgctgattctgagaaatcccagaacagcccattaccagtggggctgcagccctaggcccgtcccactcacctcccccctgtggagcgccaggcagaggctgttctggaaggcttcttgtcttctgacgtccccacagccctgggcccctcgtgtctctttgtgtcccccactgtagaggacggtgagccgcagctgcatcaacctccttttacctttagataggtgaatttttacaattcagttttacatgttttgggcagtattttgtcttaagatatattttttaaactttttataccttatctctttagattttttcagctattttcttaaaagtatattttttctataaacatcctttgctgctacattagaacttttatagcctaaacaattgcagttggtgtgtttcatttttttaaggtttaaataagggttttttgttttgttttgttttttgcagtgagcatcactacagtctcagtcaacagtgtgaatgtatcatgttttactttaaatgtgtgtgtgatacttcttcattatgtcctgcgctgcagtgagacctgggtgaaaatcaggagccgcacacagccacatcttcctagacctaagagtaaattatggaggattttatttatgtctatttatatgtaaatgtcattgaagacaaaggtcaaatatttgtctgtttgtagatcacaggcaccagttggtcttcagggacctcatagcccctcggtggtgccttctcaaggcagtgttcctggaggctcccatcagggtcagcccatgcacctgccctgggtgaggaagtagcattgctgctggatgagaaacgcctgcgctgctctgttagactggtgctgaaacaaaaggttaaggctaggttgaagtctagaatgaaagaaatctgaatccatgtcattcataaccccttgatctgtagtgtcatgggtgctgccgcaggcagggagtgagctgggggtgcctgcagccttccactcctgccccgcctcaccccacatgctccctgtttctcatgctttctctaacttcctcaccccttaaccaaaaaggtgtgttttcttttgtgcatatagccattcttaaatatcagtgatgtaaacctcactttattaaaaaattatccagcaaacaaaatgggaatgtggtgttagttacgaccacggcctgaccctccagcaacctttctgcaggatcagttctgctgtattatctggtggtgctttctaaggtggggaaaggaattgcacttggctgcattaaatggacgctgggttacttttatttcccccccccacagggttgcagagcaaattctttttacattgttcagcgcccggctggagttgggggtgtccacgacctctgacagcccccgatgtcgaaagttaatcctcatggaccctagtttaaagggtgtgtgttttataggaataaatctaaagcactattttgtttctgtatagcatttttatcttttagaaacatcatttgttcagcattagtagtagttgtagtgcctgttttggtagccttcaaaattataaactgctcagagaatgtgacttttgagcgctttaggggtgcttggtcggaaaacagactgggtctgtggaaggaccacagacaggagagaacagctgctgtgacttagaagtgtagccggagtctcattccctggactcgccgtgttcacctgt

SEQ ID NO: 59583 - DNA, 2526 bp, Homo sapiens
aggaattcccgggtcgacgatttcgtgaccggctcaccgggtcgcttggtggctccgtctgtctgtccgtccgcccgcgggtgccatcatggcggacgcggccagtcaggtgctcctgggctccggtctcaccatcctgtcccagccgctcatgtacgtgaaagtgctcatccaggtgggatatgagcctcttcctccaacaataggacgaaatatttttgggcggcaagtgtgtcagcttcctggtctctttagttatgctcagcacattgccagtatcgatgggaggcgcgggttgttcacaggcttaactccaagactgtgttcgggagtccttggaactgtggtccatggtaaagttttacagcattaccaggagagtgacaagggtgaggagttaggacctggaaatgtacagaaagaagtctcatcttcctttgaccacgttatcaaggagacaactcgagagatgatcgctcgttctgctgctaccctcatcacacatcccttccatgtgatcactctgagatctatggtacagttcattggcagagaatccaagtactgtggactttgtgattccataataaccatctatcgggaagagggcattctaggatttttcgcgggtcttgttcctcgccttctaggtgacatcctttctttgtggctgtgtaactcactggcctacctcgtcaatacctatgcactggacagtggggtttctaccatgaatgaaatgaagagttattctcaagctgtcacaggattttttgcgagtatgttgacctatccctttgtgcttgtctccaatcttatggctgtcaacaactgtggtcttgctggtggatgccctccttactccccaatatatacgtcttggatagactgttggtgcatgctacaaaaagaggggaatatgagccgaggaaatagcttatttttccggaaggtcccctttgggaagacttattgttgtgacctgaaaatgttaatttgaagatgtggggcagggacagtgacatttctgtagtcccagatgcacagaattatgggagagaatgttgatttctatacagtgtggcgcgcttttttaataatcatttaatcttgggaaaattcaggtgtttggtgtctgccttttttgttcttttttccagcacaacataacttaccactgatactccccctttagttattctgaattaggatatttttgctccaaattcttattttacttaaccagaagggaaaaaaagttgtattttcctgaagctacaggcactttgtcatgtgatttttgagtctcaatttaaggctttgtaaaatgaagagtagaattccaagaaaaatgagaaataattttgtaaaacttaacaaaatcactaaattaaactatatgggaggttatgaattactttttcttgggtagaccctaaaatgtcagtagcatgcaccagaatctgactcccattatgcttctaagcacatttcattgaccttgtctctcatacttcaagaaaaggacagtacattgctacattaccctagaaagtctgtgtgaggatctgccccttcagtctgttattgcaaagtaataaaatgtcacctacagggagcctctgagcctactctagttcaagaggctacctgaaaaaaaataaataagataaagggtcagcaacaacaaagaaaaagacaattacagaaaataagcaagatttggaaaggaagtataatggcacttttttcctcaaaggaagttcttgttttcacataaaatatgaaaagcagatcctgcaggagtaacccccttctttaagagccaagtatttgccagtgcttaaattacaccataccggtctaattatatataatcttttgttcttcagttttttgttttgtttcctttttgttattggtgccgaaggtgagtagttttgcatttctgatgacagccttggaaagtatatttgtaactccatgtctggtaatgccaacccaagtcgacatgggtcttaggacactgaccacctcacatgccataccctcagttaagcatgttaacatttataggaggaaaaaaatcactttgggagaaaataaaattcaactcaagcataaagcttctgtttactcaggccttctaaaaagcaggttaaaatgctctaaaatgagaaagcctgtggtttcacttatttatataactcactgggacattgccaaatgagtaagcacttaattcgctgcttctgagacttctctgtcaaaacagccccactgataatattagacagaacgagaatgcaggggtctcttccctcccctggggtttaggaagctcatgaggagctcggcttaaaatgtctttgatgtctcttcctttgtctcaaaaagtaatgtcaattttatatactatttcaatattactatctgcatttgttttaatataaaaatgtttgctgcctacctttttctcccaaaaaatctttaagtaaagatgatctgggaaaatgaaaaaaaaaa

SEQ ID NO: 59584 - DNA, 762 bp, Homo sapiens
tttcgtggaggtttgtgcaggtcctcagccctgtggcgctcacctcccagggctgtggcctgggtccctacccagcggggacctgcagaattgtgtcgggaagttgcatttcctgggctagggccccccagcaatcaggaatgagagaaatgcagaaagtatgacccacacgcagaactggttctgaatagaacatttattgacgaagttttgcaggaggcggcgggcgctttaattcccgaggctgttggtggcagctcgctgctcaccccaagcctgttaactgctaggttgccggtgctggggacaatgcggatgcccggcccctcgccaccctcgtggtgcccggatgggagctctcctgaggaaagcgaatctccctggggtgccctccccaggcagcaatgccaggatgcctgtgtccacctccctccaccaggatggcagccaggagcggccggtgagcctgacctctaccacctcctcgtcgggctcctcctgtgacagtcgcagtgccatggaggagcccagcagctccgaggctcccgccaagaatggggcaggctccctgagaagccggcatctgcccaacagcaacaacaactccagcagctggttgaacgtgaaggggcccctctccccgttcaacagccgggcagcggcagggcctgcacaccacaagctcagctacctgggccgagtggtgcgggagatcgtggagacagagcgcatgtacgtacaggacctgcgcagcatcgtgga

SEQ ID NO: 59585 - DNA, 2120 bp, Homo sapiens
catggctagcccagccgcctcctcggtgcgaccaccgaggcccaagaaagagccgcagacgctcgtcatccccaagaatgcggcggaggagcagaagctcaagctggagcggctcatgaagaacccggacaaagcagttccaattccagagaaaatgagtgaatgggcacctcgacctcccccagaatttgtccgagatgtcatgggttcaagtgctggggccggcagtggagagttccacgtgtacagacatctgcgccggagagaatatcagcgacaggactacatggatgccatggctgagaagcaaaaattggatgcagagtttcagaaaagactggaaaagaataaaattgctgcagaggagcagaccgcaaagcgccggaagaagcgccagaagttaaaagagaagaaattactggcaaagaagatgaaacttgaacagaagaaacaagaaggacccggtcagcccaaggagcaggggtccagcagctctgcggaggcatctggaacagaggaggaggaggaagtgcccagtttcaccatggggcgatgacaatgtttgccacagcctctgcctggaacctggctcgtgctgtgaccagaagggaaaggcggctgtttggctctttctcccccgcaaggacccgctgacccgctggatggagagcaaaggagacccctcccgagccgctcacagtcctgtatttggcaggtttgggagcctgaggggccatctccctgacactcagaggcactgccttgcagacaccatccgtgctcctggtaaagggggacagagagcctcaccttgccacatatttgaacagtgatgagtttggggctggtttctgggaagggaacgtttatttagtaaagagcagaacacccttgcgttttgttgggacatgtggaccgtgagtcgcaaacactctggagaaggctgagatgccaccattcccacggggactgaagacacattacgtggacctggtcccaggctcagtgaggagatggcctcagctgtggggctggtccatgttgcccactcactccagtgggaagtggggaccacgccatagagggtctgctcccactgcagctcccggtgctctcgtgttctgggaaggcctgggtgtgtgcacaaggaggcccgggccagggacttcaccaggggctgggtcacaagggcacagggtgtgtggaaagcgctgtgggggaagagccggtcaccggagagtgagcaggcggagactccaagctgggctgagccagagcagaaggcgagggattcccagccggacgggggttctctcaccaacagctgtgatttcatcccgaagtggaagggggtctaaacagaacaggctgagagaggcgggactgggtcaagtgggtggagctcctccttgcatgactgcaactgtcggggctttccgccggctcacagcagttggggccagcggggagaagagaggcggaactgctgtgtcctcatgtggcgcagcctcaaactggcatccaggcactgggcccgtgcagagaaggcacctgcagagagcagggcagcccggcgcaggggcatgcgcctagaatcccagctactcggaaggccaaggcaggaggaccgcttgagtccagggattcaaggccaacctgggcaatagagcgagaccctgtctcttaaaaaacgatgatgatgaacacagaggacggggcactgtgctgggagccagggggcctgggaggagccgagaccagccttttacctcggggttttgaggccaacagggacgacagagacagtttctagttagagccttggctccatttttggatgatttagccccgagttcctgagtctattttatgccccttacgtactttgatagaactaaggaaatagtggttttgagtgaagggaaaggaaacccagaaacattttacgttgcttttacttctgtagtgtagattgccccggcccctctctgagccctgtagcatctgtgatagcttctgtcccttcatcggttcatgtcacagggattttctttcccaggaagcggacacggagagtcagccctaataaatgagcacatgccctggctgtaaaaaaaaaa

SEQ ID NO: 59586 - DNA, 2041 bp, Homo sapiens
cgctggggcagccggggcagccggggcagcccggtcaccccgcccccaggcccacactaagggtgtccgcggcctgccctccaggcggaggagcccggactgcggaaggatggagctggccgccggaagcttctcggaggagcagttctgggaggcctgcgccgagctccagcagcccgctctggccggggccgactggcagctcctagtggagacctcgggcatcagcatctaccggctgctggacaagaagactggactttatgagtataaagtctttggtgttctggaggactgctcaccaactctactggcagacatctatatggactcagattacagaaaacaatgggaccagtatgttaaagaactctatgaacaagaatgcaacggagagactgtggtctactgggaagtgaagtacccttttcccatgtccaacagagactatgtctaccttcggcagcggcgagacctggacatggaagggaggaagatccatgtgatcctggcccggagcacctccatgcctcagcttggcgagaggtctggggtgatccgggtgaagcaatacaagcagagcctggcgattgagagtgacggcaagaaggggagcaaagttttcatgtattacttcgataacccgggtggccaaattccgtcctggctcattaactgggccgccaagaatggagttcctaacttcttgaaagacatggcaagagcctgtcagaactacctcaagaaaacctaagaaagagaactgggaacattgcatccatgggttgatgtctctggaagtgcaaccacccaatgtctctggaagtgccacctgaaagtgccacctggaagtgtctctggaagagcacccaccactgttcagccttcccctgctgtttctgtcttcagaggcctacacactaccacatcctttctaagcatgtttgcctgacatccagctcactcgtctgcttcctttctcgctccccccatcctgggctgggctgccttcttctacagttcaatatggggcagactagggaaacctttgcttgcttactattaggaggggaagtcttcagtagggaacacgatcattccattgtgcaattttacggggatggtcgggtggagggacacaacaaaatttaagaatgactatttgggcgggctggctcttttgcagcttgtgatttcttccagcttgggaggggctgctggaagtggcatttcgttcagagctgactttcagtgcacccaaactggatgacgtgccaatgtccatttgccttatgctttgtggagctgattaggctgggatttgaggtgataatccagtaagtctttcctcgttcctacttgtggaggatcagtagctgttatgatgccagaccatttggagaagtatcagaggcctgaccggacacataatatgacaaccacatttttcctcatcatccatgaggaaatggatgatttctcttttccatatgtcactgggggaaaggctgcctgtacctctcaagctttgcattttactggaaactgaggcgtcaagatggctgtggcagctagcaaaagcaaagatgctttgtgcatagccttgtgaaaaagtatctttctatgcaataagatgaattttcctcccagaatatttagaaatgtagaagggataacagttcacagccaggtaaaatttaactggtggcttaatgactctgcacctttttctcaggaattctgcctaagttgtctgccttttctaccaccaaaaagacttttagttttctatgctttctcctgaattttggtagggtaaggtatttctatgtcaaaggcacagccttgatgatctcagggaaaaattttaatcactgtgtataatgatactgaaccttgattaataacagaaattcaggatgtaaagccacagaatgggatttattaatgtgggatacctcagactgtttgttttctttctgggaagaaaagtgtgttctataatgaataaatatagagtggtttttaaaaaaaaaaaaaa

SEQ ID NO: 59587 - DNA, 1907 bp, Homo sapiens
tgtaggataaaagcaaccttactctttttgtaaattgtatagactcccaaatactagaaatgatcatttaagttactatatataccaatatatatactatatataccaataagaagatgagaattaactttatgttcctaaatttgacacttaatagctatagcctccctgagatcatagagaagtgattgcctaagataagttgtatttgtttttctagttaccctaaatcctgtcaggtaataaaagaatgatcattgcaggctttgtaaactcgggtcactcactccacttggctctccatgtttttcatggtttctagggtgtgttatgaacgaacctccttcagtccaactatccagacgttcattctctctgccatttggcacggggtatacccaggatattatctaacgtttctaacaggggtgttaatgacattagcagcaagagctatgagaaataactttagacattatttcattgaaccttcccaactgaaattattttatgatgttataacatggatagtaactcaagtagcaataagttacacagttgtgccatttgtgcttctttctataaaaccatcactcacgttttacagctcctggtattattgcctgcacattcttggtatcttagtattattgttgttgccagtgaaaaaaactcaaagaagaaagaatacacatgaaaacattcagctctcacaatccaaaaagtttgatgaaggagaaaattctttgggacagaacagtttttctacaacaaacaatgtttgcaatcagaatcaagaaatagcctcgagacattcatcactaaagcagtgatcgggaaggctctgagggctgtttttttttttttggaggtaaacaaaaaccaatcttaggcaccttttcaagggggttgagtttgttgggaaaaggcagtttaactggggggaaatggacagttatagataaggaatttcctgttacaccagattggaaatggagtgaaacaagccctcccatgccatgtccccgtgggccacgccttatgtaagaatatttccatatttcagtgggcactcccaacctcagcacttgtccgtagggtcacacgcgtgccctgttgctgaatgtatgttgcgtatcccaaggcactgaagaggtggaaaaataatcgtgtcaatctggatgatagagagaaattaacttttccaaatgaatgtcttgccttaaaccctctatttcctaaaatattgttcctaaatggtattttcaagtgtaatattgtgagaacgctactgcagtagttgatgttgtgtgctgtaaaggattttaggaggaatttgaaacaggatatttaagagtgtggatatttttaaaatgcaataaacatctcagtatttgaagggttttcttaaagtatgtcaaatgactacaatccatagtgaaactgtaaacagtaatggacgccaaattataggtagctgattttgctggagagtttaattaccttgtgcagtcaaagagcgcttccagaaggaatctcttaaaacataatgagaggtttggtaatgtgatattttaagcttattctttttcttaaaagagagaggtgacgaaggaaggcaggaatgaagaagcactgcgtggcctccggtggaatgcacggggcacagccgcgactctgcaggcagcttcccccccatgccagggctctgcgccgtcatgtgagacttaaaaaaaaagttgaatgacttcgtgatactttggacttctaaattaaatttatcaggcataaattatgtagaattagaggctttgaaaataatactggtaggttgctcaaaggttttgaaagagaaatcgctaggtaggttactatctggctaatccatttcttatccttgacaatta

SEQ ID NO: 59588 - DNA, 2535 bp, Homo sapiens
cgttgcccaacccggtccccgcccccagacacgccgggctctcggggcaccacagccatgtgctcgttagcgtcaggcgctaccggcggccggggcgctgtggagaatgaggaggacctgccagaactgtcggacagcggggacgaggccgcctgggaggatgaggacgatgcagatctcccccacggcaagcagcagaccccctgcctgttctgtaacaggttattcacatctgctgaagaaacattttcacactgtaagtctgagcatcagtttaatattgacagcatggttcataaacatggacttgaattttatggatacattaagctaataaattttattagacttaagaatcctacagttgagtacatgaattccatatacaacccagtgccttgggagaaagaagagtatttgaagccagtattagaagatgaccttttacttcaatttgatgtagaagatctttatgaaccggtgtcagtacccttctcataccccaatggactcagtgaaaatacatctgttgttgaaaaattgaaacatatggaagccagggcactgtctgctgaagccgcattggccagagcacgtgaggatctgcaaaaaatgaaacaatttgctcaggattttgtgatgcacacagatgtcagaacctgctcgtcatctactagtgtcattgcggacctccaggaggatgaggatggtgtttatttcagctcatacgggcattatgggatacatgaagaaatgctaaaggacaaaatacgaacagaaagctaccgagatttcatataccaaaatccacatatcttcaaagacaaggtagttttggatgttgggtgtggaactggaattctctctatgtttgctgctaaagctggggcgaagaaggttcttggagttgatcaatctgaaatactttaccaggcaatggatattataagactaaataaacttgaagatactattacactaattaaaggaaagattgaagaagttcatcttcctgtagaaaaagtagatgttatcatatctgagtggatgggctattttcttctgtttgagtctatgttagattctgtcctttatgcaaagaacaaatacttggcaaaaggaggctcggtctaccctgacatttgcactatcagccttgtagcagtgagtgatgtgaataaacatgctgatagaattgctttttgggatgatgtctatggcttcaagatgtcctgcatgaagaaagcagttattccagaagctgttgtggaagttttagatccgaagactcttatttcagaaccttgtggtattaagcatatagattgccatacgacgtctatctcagatttggaattttcatcagattttaccctgaaaatcacaaggacatccatgtgcacggcaattgctggctactttgatatatattttgagaagaattgccacaacagggtcgtgttctctacgggccctcagagcaccaaaacacactggaaacaaacagtatttctactggaaaaaccattttcagttaaagcaggtgaagccttgaaaggaaaggtcacagttcacaagaataagaaagatccacgttctctcaccgtgaccctcacgttgaataattcaactcaaacttatggtctccagtgaaacagccataaaagcacactaccttgtagtttttaatgtgggggtagagtgggtcagcaggagggagctggttttatgtgagcagatggatggatgatggaccctttcctaatgagcctcctcaataagagagaagttctcattgtgggaatctgacatagttcagctgaggaagagaatcagctgatcctcatggtctgccacgtaatcattttcttagacgtttgctccaccagatttaaccaaatgtaactcccacattgagtttatctatattgaaaatcatttacattggcctatatttggaagagagatagtcttttgtttttaataagtttcttactataaattttaaacaaattggttagttatttggatattttattaaactagtaacacaggtactacacattttattatggactcctctgaggaggagtttttaattgtatttgctagaaaatcaggatgtaataaagatttgtataaaaaaactaaaatatggaaaagagcttcagccttcatatacaaatcatatatgcagacagcctagttgattatctagcatacttagggttctcattttgtagtttcttccctctttgtgactattccttagccttatagatttctagtactgcccaggaaatctaatttcaatacatttatcctaggtttcatgaaagtttttaaagattgggataaatatgtacttatttactaacgtattatctttttcaaaccagatttatgtgcaaaggttaaacatgttaactgttactaagcagtctataaagttgtcatttacaattactgattcaatttgaaatgtagaataaaattttaataaaatgtatccttataaaatattttaaaaatatt

SEQ ID NO: 59589 - DNA, 776 bp, Homo sapiens
gtcgacgatttcgtcagaaataggagcgcgcaggcgcgacgtgcggctcgcagaacggcgagtagcggagcgggacccgctggaatcatcatccagggacgtgccagaaaccacaagaaaacatggggagggttttcctcacgggagaaaaagccaattccatattaaaacgctacccaagagctaatgggttttttgaagaaataagacagggcaacattgagcgtgagtgcaaagaagaattctgtacatttgaagaagcaagagaagcttttgaaaataatgaaaaaactaaggagttttggagcacctacacaaaagcgcaacaaggggagagtaaccgaggaagtgactggtttcagttttaccttacctttccgttaatctttggcctcttcattatcctccttgtcattttcctaatctggagatgcttcctaagaaacaaaactcgtagacagacagtgactgaaggccacattcctttccctcagcaccttaatattatcaccccaccccccccaccagatgaagtgtttgacagcagtggattgtctccaggctttctgggatatgtagttgggcgctcagattccgtctctactcgcctgtccaattgtgatcccccgccaacctatgaggaagccactggccaagtgaacctgcagaggagtgaaacagaacctcatttagacccacccccagagtatgaggacatagtcaactccaactcagccagtgccattcctatggtgcctgtggtcaccaccatcaaa

SEQ ID NO: 59590 - DNA, 866 bp, Homo sapiens
tttcgtgggagaggccccctactcacggagcgcgcggcccgtgcgcccacgctccgaccgcattcctcagtacgtggcacccttggaaagtgcctgtctggtcaatcgaagagtcctcgtttcgaccaaaaaaattcccctcagaaatatgcatggcacggcaatgaaggcatttcactatgaagtggaatgatgattgtccgaccaggtcaggacgaacatatgaggggttagatctaagcaggcactattaaagacagtcgcatccgggccctcctgccgcaagctgccctcccagccaagggtccttcaggtaggaggtcctgggtgactttggaagtccgtagtgtctcattgcagataatttttagcttagggcctggtggctaggtcggttctctcctttccagtcggagacctctgccgcaaacatgctccgccagatcatcggtcaggccaagaagcatccgagcttgatccccctctttgtatttattggaactggagctactggagcaacactgtatctcttgcgtctggcattgttcaatccagatgtttgttgggacagaaataacccagagccctggaacaaactgggtcccaatgatcaatacaagttctactcagtgaatgtggattacagcaagctgaagaaggaacgtccagatttctaaatgaaatgtttcactataacgctgctttagaatgaaggtcttccagaagccacatccgcacaattttccacttaaccaggaaatatttctcctctaaatgcatgaaatcatgttggagatctctattgtaatctctattggagattacaatgattaaatcaataaataactgaaacttgaaaaaaaaaa

SEQ ID NO: 59591 - DNA, 1554 bp, Homo sapiens
gtccataaacctcagagttagggaaagttgagtgtgacccacaatgccagctacctagaaactaaggtagatctaggtactgggattaaagatatcataaaatcattaaaatgttttctgaaatgtttgaagttaactcattttatttctaggatttggatttcaacattttaatttctttggaatataagtcactttttgcaagctaaaaaatagaatcaaactaaggtgatctagtcctctaggcatccaggctgatccttggaatcatgagcagaatgatgacatactacaaggtgctagcaatacggctataaactctaaataataaccactacatgtttcattaggaaacagccaaaagtccggccgttaaaggaataatctgcagaacatcttgatttacaagggacaaaatgatgcaaattatatgctgtccaacctactggtgaactggatcagaatggtccaaggactgttaaacagaggaagtatttacattttgaaaacttgctctgcaggataaaaaaattcctggttgctgtcagtaagaaagcaagtaaaaaaaatattacagatgaactcactgatctttgattttactaaggtcttccactggaacatgaaggtagggataagtgtacaggataatatactcagatatttttaaaataaactacttaataataagaaattagccataccacattgttccatttgctacaagaacaaattggcaatgaagactatttaaaagaaatgctcagctctacagagggtggtggcaggcaacacttttccattacagaataacctctattcttccatgatacatattcctgtggaaaaacttgtcagggcccagggatgaaaaatagagcttgtcctaattagctaactgtaggttcacttaacatctttgggaaggacccaaaaaatctggccattattttcttaaacatctgcaagctgcagaattccttagtcctcagctatagtttctgctagatatcttaaagctgggacagttccactgtgactcctcctcagctatggggtgggtgctagtcatcaaagtctggaatgtcatcataggagtaaccacggtagcctttggatgcatagtaagcgatgcgcaggtggtaaaatccgggtaggaacaccagaatgccaatgatcagcactggaacggcccggtctgccccccctttgctgatgtagcctgacagcaggagggagcctataataatgagaaaggcgccaatcaaaaacagcacagtggcaagtgcgatggccttataagggatcttaggaggggttttcttaaactgaaggtcaatgtagccatcgtctgtgctggagagccttgaatatttcactttactactggggattccagtagccaggttggtacgggacggcatcataacacgctgacacagcggagcgccgcgccaggccgcccgcacacccagagctcgcccacggttggcagcgcccaaggttgcatggcatggcccgcttaagtgccactcagccggccccaggcgggat

SEQ ID NO: 59592 - DNA, 1180 bp, Homo sapiens
ccggaattcccgggtccacgatttcgtccgccgggcagctcacggcgccccgtatggcctgttgatcctaagaggccctgtgaaccccctcgcctgggctccctctcacccctggagggttgccgcagctccggggcccccgggcaggaagggcgcactggtcgtcccgggagaggggtctgagcagagggcggggtgcaggcgtaatggccctcgtgccctatgaggagaccacggaatttgggttgcagaaattccacaagcctcttgcaactttttcctttgcaaaccacacgatccagatccggcaggactggagacacctgggagtcgcagcggtggtttgggatgcggccatcgttctttccacatacctggagatgggagctgtggagctcaggggccgctctgccgtggagctgggtgctggcacggggctggtgggcatagtggctgccctgctggcatgccgaattcgctatgaacgggataacaacttcttagcaatgctggagaggcaatttattgtgagaaaggttcactacgatcctgaaaaagatgtacatatttacgaagcacagaagagaaaccagaaggaggacttataattggctataatttataagaatgttgtcattgagtgtgtcacttaaggtcttagactgcaaatctaaccatatttaatgaaatgtcttactgtacaaaaagtctaagccaaaggttctcaggggagaaagcacatgtgcagttttaaaacaaagcagtgctttgtcccattgctgtgatttttagtcagactttactcagtctgaaatgcaattaacattaaaggattaagtgtgagatttcgatttatgctatttgtgtatcccatactcctcccttttaataaacagtttccactgatgatatgaagggccggtataaagaagtctttaaatgagtaagctttcttggtaagattaaatcttacaaattatttttaaaaccttgtgatatatacaatgtttagctgagttttctaattttctggatgtaaaacaaaaggtttaacctatacattccttgagctgttagtgctatttaaatcttttgccctgtttaggtcctaaacacttttagttgagtaggatatgagcttttttgggtctcatatcatgctttttgccttaatttcagg

SEQ ID NO: 59593 - DNA, 3307 bp, Homo sapiens
aaaggaagggagggagggagaaaggagaagttggtttagaggccagccggacgagctttgggcaccgcccttaggagggccaccctcagagtctgacagcaggtgaaggtcctaaatctccccaaactaactggtgtcttttctcctcttccaagatgctcttcccgagggagatgctagccctttgggtccttacctcctgccctcaggagccccggagagaggcagtcctggcaaagagcaccctgaagagagagtggtaacagcgccccccagttcctcacagtcggcggaagtgctgggcgagctggtgctggatgggaccgcaccctctgcacatcacgacatcccagccctgtcaccgctgcttccagaggaggcccgccccaagcacgccttgccccccaagaagaaactgccttcgctcaagcaggtgaactctgccaggaagcagctgaggcccaaggccacctccgcagccactgtccaaagggcagggtcccagccagcgtcccagggcctagatctcctctcctcctccacggagaagcctggcccaccgggggacccggaccccatcgtggcctccgaggaggcatcagaagtgcccctttggctggaccgaaaggagagtgcggtccctacaacacccgcacccctgcaaatctcccccttcacttcgcagccctatgtggcccacacactcccccagaggccagaacccggggagcctgggcctgacatggcccaggaggccccccaggaggacaccagccccatggccctgatggacaaaggtgagaatgagctgactgggtcagcctcagaggagagccaggagaccactacctccaccattatcaccaccacggtcatcaccaccgagcaggcaccagctctctgcagtgtgagcttctccaatcctgaggggtacattgactccagcgactacccactgctgcccctcaacaactttctggagtgcacatacaacgtgacagtctacactggctatggggtggagctccaggtgaagagtgtgaacctgtccgatggggaactgctctccatccgcggggtggacggccctaccctgaccgtcctggccaaccagacactcctggtggaggggcaggtaatccgaagccccaccaacaccatctccgtctacttccggaccttccaggacgacggccttgggaccttccagcttcactaccaggccttcatgctgagctgcaactttccccgccggcctgactctggggatgtcacggtgatggacctgcactcaggtggggtggcccactttcactgccacctgggctatgagctccagggcgctaagatgctgacatgcatcaatgcctccaagccgcactggagcagccaggagcccatctgctcagctccttgtggaggggcagtgcacaatgccaccatcggccgcgtcctctccccaagttaccctgaaaacaccaatgggagccaattctgcatctggacgattgaagctccagagggccagaagctgcacctgcactttgagaggctgttgctgcatgacaaggacaggatgacggttcacagcgggcagaccaacaagtcagctcttctctacgactcccttcaaaccgagagtgtcccttttgagggcctgctgagcgaaggcaacaccatccgcatcgagttcacgtccgaccaggcccgggcggcctccaccttcaacatccgatttgaagcgtttgagaaaggccactgctatgagccctacatccagaatgggaacttcactacatccgacccgacctataacattgggactatagtggagttcacctgcgaccccggccactccctggagcagggcccggccatcatcgaatgcatcaatgtgcgggacccatactggaatgacacagagcccctgtgcagagccatgtgtggtggggagctctctgctgtggctggggtggtattgtccccaaactggcccgagccctacgtggaaggtgaagattgtatctggaagatccacgtgggagaagagaaacggatcttcttagatatccagttcctgaatctgagcaacagtgacatcttgaccatctacgatggcgacgaggtcatgccccacatcttggggcagtaccttgggaacagtggcccccagaaactgtactcctccacgccagacttaaccatccagttccattcggaccctgctggcctcatctttggaaagggccagggatttatcatgaactacatagaggtatcaaggaatgactcctgctcggatttacccgagatccagaatggctggaaaaccacttctcacacggagttggtgcggggagccagaatcacctaccagtgtgaccccggctatgacatcgtggggagtgacaccctcacctgccagtgggacctcagctggagcagcgaccccccattttgtgagaaaattatgtactgcaccgaccccggagaggtggatcactcgacccgcttaatttcggatcctgtgctgctggtggggaccaccatccaatacacctgcaaccccggttttgtgcttgaagggagttctcttctgacctgctacagccgtgaaacagggactcccatctggacgtctcgcctgccccactgcgtttcggaggagtccctggcatgtgacaacccagggctgcctgaaaatggataccaaatcctgtacaagcgactctacctgccaggagagtccctcaccttcatgtgctacgaaggctttgagctcatgggtgaagtgaccatccgctgcatcctgggacagccatcccactggaacgggcccctgcccgtgtgtaaagttaatcaagacagttttgaacatgctttagaagcagaagcggcagcagagacgtcgctggaaggggggaacatggccctggctatcttcatcccggtcctcatcatctccttactgctgggaggagcctacatttacatcacaagatgtcgctactattccaacctccgcctgcctctgatgtactcccacccctacagccagatcaccgtggaaaccgagtttgacaaccccatttacgagacagggggaacccaaaaggtttagggtttcatttaaaaagaggtaccctttaaaaaggggcttgtgaactcaaccccaatttccccgagacatttatccaaaggccctgggggccttgatttaaacccccaaaaggcggctgttttttggttaaactttttaacaaagggttacgggttttttccccggattttataaattttaaaagtg

SEQ ID NO: 59594 - DNA, 2637 bp, Homo sapiens
tttcgtctctcgtccataaaaggggggaagaggcaccagaactgccatttgaaggggctttggtggtgttcacagctgcctctttggcacctcctcccaagccggagtcaaggaggcccctgagccttggaccagccactgccacctccgacctgctcggccagaagctgcccagggacaaagcagagtgcaggtcatttatcttcaggctttgagatctgcgtggggggagctgttgcagcagcccaagccgcaggaattgctgagacaggatggcctggcaggggctggtcctggctgcctgcctcctcatgttcccctccaccacagcggactgcctgtcgcggtgctccttgtgtgctgtaaagacccaggatggtcccaaacctatcaatcccctgatttgctccctgcaatgccaggctgccctgctgccctctgaggaatgggagagatgccagagctttctgtcttttttcaccccctccacccttgggctcaatgacaaggaggacttggggagcaagtcggttggggaagggccctacagtgagctggccaagctctctgggtcattcctgaaggagctggagaaaagcaagtttctcccaagtatctcaacaaaggagaacactctgagcaagagcctggaggagaagctcaggggtctctctgacgggtttagggagggagcagagtctgagctgatgagggatgcccagctgaacgatggtgccatggagactggcacactctatctcgctgaggaggaccccaaggagcaggtcaaacgctatgggggctttttgcgcaaataccccaagaggagctcagaggtggctggggagggggacggggatagcatgggccatgaggacctgtacaaacgctatgggggcttcttgcggcgcattcgtcccaagctcaagtgggacaaccagaagcgctatggcggttttctccggcgccagttcaaggtggtgactcggtctcaggaagatccgaatgcttactctggagagctttttgatgcataagcacctcttttcatggagtagagtcaggagaaacccctgacaccttttcaggttggagtgcattcattcatcctcttatatgtgccccttccccatgctcagctcagcattgtgtacaaaatatccaagcccagcctatctctcttctgcgtgggagtatgttatttctctggggtctgtgatggggaagggtggatgtcccttccccacaataggcttagtgcttggctcagacacctagactctaaaactatcagcagcggcagcagcagcagcagcagcagtttgtgatctgtccttccaacctgttcacgtgactcctcaattccagggaaccagagcgatgtgttctttgtacctgtaggtctatgatgtccaaacttaacagatcacatgcccctcttagaagaaatatgagcatgctccctcatgcagatagtatacacatcataaacaaagagtagaactttaaaagaaggtaaataatcatacacagaaatcctaacattatattcccaaatctcaaaagatctcctgtgcacctgactttggagacgatgctttaggtaaaaagcttaaacattgccttatattggatcaggaacccttacagtagagggtccagtcttctagtgggtttaatgtttagtcagtgtactctgagtcctcattgttcagaaaagcacctcttgaagaactgacttcctgaactcccagtcatgttggtaccctggacagtggcctaaacttcctttacaggaggggagttgaaaaaccttttttcgggaaatgatttgaggagcaggcctcttgaatggcttaaatgatcaaggagggagaaaggcaaaccaatttgttctgtgcaacaaactcaaaatgtggaccagttccctcagccctcattaaactaattaaactgatgggtatcatgcttctactccatggtgaactgaagcagagtcaagctgatgaagttaagcacaaccatgttcttgagcagctgaattggctgccaagagtccaagccatctggcccaacatacgcactgggcattgggtaagggactccagaagcagcagctagaaagagaaaaagccctcttcaatccccataatgcttctttcctcttaatgtctcaaaataaaacccagaaaaggggaataaaaggattaaagtgccttgaggcccaaatgagttccccttgaaatcaaaataacccctgaaatccagaggcagagacctccctgatgtccttggtttcccatcaaagtccctccctgtctgtctgtctctcttttgctctctcattccccaggcactctcttttgggtttgtgggtcccaggagatgaggctggataggagaggaaaaggcttgagtcctggataatttgtataagatgcctgctgagcacatctcttcatgcgcagtccccaggtatctgatgatgttctgaaatggatagattgttttagagttattttgtgtcctttaaaaaaatcccatttatgcaatttacttggaatttgcttagcctttaataggcttgtgtaatttcctgctcctccagtacaataaataaaagaaagatgctgatga

SEQ ID NO: 59595 - DNA, 1874 bp, Homo sapiens
tttcgtggctgtggagtgcagtggcgcggtcttggctcactgcagcctccgtctcccgggttcaagtgattctcccgcatcagcctccaagtagctgggactacagatgcgtgccaccgtgcccggctaatttttgtatttttagtagagacgggggtttcactatgttggccaggatgctctggaactcctgaccttgtgattcacccgcctcggcctcccaaagtgttgggattacaggcgcgagcccccacgctggctggtagggtgcagttcctcaagtgggattgtggatttgtaggactgcatgttgatgaaacctttgcagcctgggggcgggctctttgagtttgcaccccaaggaggtctgcatgaaaagaaccctttctccaagtcctcccggacagaggtcgtcataaattatttttgttgcttaatgggcgaggcccctgatttggagtcagctgacttgggcccccagcccaggctcgtgtttatctgctgtgagatcctggacaagctgcttcaccttcccaagtcctgttgggagcatgagtgggaagtgctgctcccggaggtgcttggagggagaatgagagtatggtgtttgcgaaaacttgcggaagctggagatcacaggcgtgtcttgtcgggacgtctatgcgaagctgcttcaccgatatagacacattttgggattgtggcagccagatatcgggccatacggaggactgctgaacgtggtggtggacggcctgttcatcatcgggtggatgtacctgcctccccatgacccccacgtcgatgaccctatgagattcaagcctctgttcaggatccacctgatggagaggaaggctgccacagtggagtgcatgtacggccacaaagggccccaccacggccacatccagattgtgaagaaggatgagttctccaccaagtgcaaccagacggaccaccacaggatgtccggcgggaggcaggaggagtttcggacgtggctgagggaggaatgggggcgcacgctggaggacatcttccacgagcacatgcaggagctcatcctgatgaagttcatctacaccagtcagtacgacaactgcctgacctaccgccgcatctacctgccgcccagccgccccgacgacctcatcaagcctggcctcttcaaaggtacctatggcagccacggcctggagattgtgatgctcagcttccacggccggcgtgccaggggcaccaagatcacgggcgaccccaacatccccgctgggcagcagacagtggagatcgacctgaggcatcggatccagctgcccgacctcgagaaccagcgcaacttcaatgagctctcccgcatcgtcctggaggtgcgcgagagggtgcgccaggagcagcaggaaggcgggcacgaggcgggcgagggtcgtggccggcagggcccccgggagtcccagccaagccctgcccagcccagggcagaggcgcccagcaagggcccagatgggacacctggtgaggatggtggcgagcctggggatgccgtagctgcggccgagcagcctgcccagtgtgggcaggggcagccgttcgtgctgcccgtgggcgtgagctccaggaatgaggactacccccgaacctgcaggatgtgtttttatggcacaggcctcatcgcgggccacggcttcaccagccctgaacgcacccccggggtcttcatcctcttcgatgaggaccgcttcgggttcgtctggctggagctgaaatccttcagcctgtacagccgggtccaggccaccttccggaacgcagatgcgccgtccccacaggccttcgatgagatgctcaagaacattcagtccctcacctcc

SEQ ID NO: 59596 - DNA, 2093 bp, Homo sapiens
agtccgtcgcgtgctgagggagactcaggaggtggagccggccgggtgctcgagggaaggagactggaagctggttccggcgtgaggagagtctgaaaaaggggagcgcggagaggaggctggaagaggaagatgcctagcacagaccttctgatgttgaaggcctttgagccctacttagagattttggaagtatactccacaaaagccaagaattatgtaaatggacattgcaccaagtatgagccctggcagctaattgcatggagtgtcgtgtggaccctgctgatagtctggggatatgagtttgtcttccagccagagagtttatggtcaaggtttaaaaagaaatgttttaagctcaccaggaagatgcccattattggtcgtaagattcaagacaagttgaacaagaccaaggatgatattagcaagaacatgtcattcctgaaagtggacaaagagtatgtgaaagctttaccctcccagggtctgagctcatctgctgttttggagaaacttaaggagtacagctctatggacgccttctggcaagaggggagagcctctggaacagtgtacagtggggaggagaagctcactgagctccttgtgaaggcttatggagattttgcatggagtaaccccctgcatccagatatcttcccaggactacgcaagatagaggcagaaattgtgaggatagcttgttccctgttcaatgggggaccagattcgtgtggatgtgtgacttctgggggaacagaaagcatactgatggcctgcaaagcatatcgggatctggcctttgagaaggggatcaaaactccagaaattgtggctccccaaagtgcccatgctgcatttaacaaagcagccagttactttgggatgaagattgtgcgggtcccattgacgaagatgatggaggtggatgtgcgggcaatgagaagagctatctccaggaacactgccatgctcgtctgttctaccccacagtttcctcatggtgtaatagatcctgtccctgaagtggccaagctggctgtcaaatacaaaataccccttcatgtcgacgcttgtctgggaggcttcctcatcgtctttatggagaaagcaggatacccactggagcacccatttgatttccgggtgaaaggtgtaaccagcatttcagctgacacccataagtatggctatgccccaaaaggctcatcattggtgttgtatagtgacaagaagtacaggaactatcagttcttcgtcgatacagattggcagggtggcatctatgcttccccaaccatcgcaggctcacggcctggtggcattagcgcagcctgttgggctgccttgatgcacttcggtgagaacggctatgttgaagctaccaaacagatcatcaaaactgctcgcttcctcaagtcagaactggaaaatatcaaaggcatctttgtttttgggaatccccaattgtcagtcattgctctgggatcccgtgattttgacatctaccgactatcaaacctgatgactgctaaggggtggaacttgaaccagttgcagttcccacccagtattcatttctgcatcacattactacacgcccggaaacgagtagctatacaattcctaaaggacattcgagaatctgtcactcaaatcatgaagaatcctaaagcgaagaccacaggaatgggtgccatctatggcatggcccagacaactgttgacaggaatatgggtgcagaattgtcctcagtcttcttggacagcttgtacagcaccgacactgtcacccagggcagccagatgaatggttctccaaaaccccactgaacttggaccctttctagtctcaaggggattccagccttcagaaggttcttgggatatggaacaggccgtgcacaactttgacatctggtcttgctccatagagcacaactcaagatagaccatgagacagcttgagcctcaggattcttgttcttcctcttatcttccttttgtggtttttaatttgaagaccccagagaattccattacataatgattttgcccttgttataaatgttaccctaggaaaaaaa

SEQ ID NO: 59597 - DNA, 1708 bp, Homo sapiens
aattcccgggtcgacgatttcgtcgcgcacctgcagcgcccgctgctcggccctgcatcctgcctgggcatcctgcgcccggccatgacggcgcactcattcgccctcccgggcatcatcttcaccacgttctggggcctcgtcggcatcgccgggccctggttcgtgccgaagggacccaaccgcggagtgatcatcaccatgctggtcgccaccgccgtctgctgttacctcttctggctcatcgccatcctggcgcagctgaaccccctgttcgggccccagctgaagaatgagaccatctggtacgtgcgcttcctgtgggagtgacccgccgcccccgacccaggtgcccagctctcggaatgactgtggctccactgtccctgacaaccccttcgtccggaccctcccccacacaactatgtctggtcaccagctccctcctgctggcacccagagacccggacccgcagggcctgcctggttcctggaagtcttcccagtcttcccagccagcccgggccctggggagccctgggcacagcagcggccgaggggatgtcctgctccaatacccgcactgctctggagtttgccctctttcccaaggagatgctgctggggagctggtatgggtggggtctttccctttacagacggggcagatgccaggactcagcccatcctgaggaggacacgtgtcctcatggagagggtgctccggcccaggcgggggagtcggtgcccagtcagcagctctgccaccatcctgctgggaactgggggggcctctattgggttataggcaaggccttttctctggcatggaattgttaattttctgacacgtctagatgtgaaatttctgaaaatgttgaagcagagaaacattcacacacaaaaagcaacatagtcatgtgggtccagatggcctcagtcctagatgttggcaccctttgctgtgtctcctcagagtatcctgttccgcctcctgccacctggacctccctcagtggatgtcttccctcccccgaccccagcctgtcagtccgagcacagtgcaggtttggctctgacttgggcctttggctgcagtgggggtggatttcagagcctctcatggcagcatctaagtgaccagagctgggatgagagaggggaaggggcaatgtgagtggcgctatgggacgggccagccctgctcctgagccagccccgccctctgccccctggccctgggctctgtgctagggatggtgaagaatgggggcgtgccagcctggcaggagtgggaagcaacacgcaggggtcccggacctctccagccttgccctcacgcttacccgagctcccagtgtggttagcacagagctcacccaccttgcctggctcccagctggggcctgtcctcactggtgctccaggggaagaaacgacagcctcacttctgtatggactgctgatgtggcctgccatcctgttcagcgggcattgtctttggagcagcaggagaataggatgcctctcactcacatgccagttcctggctggccagctgctcagggctcaggctggggcctcccattgacatcctccccctacactccctctctgagcctccgtcgcccctcctgttgggtaagggtgttgagtgtgacttgtgctgaaaacctggttcatatataataaataatggtgatgaaaa

SEQ ID NO: 59598 - DNA, 2244 bp, Homo sapiens
ccgactcggcttgaggtaccgggtccacgatttcgtggatgcagagagctcagtttttttttctaccatttaaactttaaatctctgtggttcggctcataaagcaggctttcaagagggtgtcaaccgccgagagaacccagaggcagggagtccgagatggggggaggtcgtgtcgcggcgtctgaaaggggccactggcactcaaaaagagtgaatgaaatgtgcagctcagagtgtcatttctgaagggaggagtctttctcttggagaagagtcctcaatgagcctggccgaggcccgggatctgtgtgaagtggactaaggattaagtaggatgtcaactgagacagaacttcaagtagctgtgaaaaccagcgccaagaaagactccagaaagaaaggtcaggatcgcagtgaagccactttgataaagaggtttaaaggtgaaggggtccggtacaaagccaaattgatcgggattgatgaagtttccgcagctcggggagacaagttatgtcaagattccatgatgaaactcaagggcgttgttgctggcgctcgttccaaaggagaacacaaacagaaaatctttttaaccatctcctttggaggaatcaaaatctttgatgagaagacaggggcccttcagcatcatcatgctgttcatgaaatatcctacattgcaaaggacattacagatcaccgggcctttggatatgtttgtgggaaggaagggaatcacagatttgtggccataaaaacagcccaggcggctgaacctgttattctggacttgagagatctctttcaactcatttatgaattgaagcaaagagaagaattagaaaaaaaggcacaaaaggataagcagtgtgaacaagctgtgtaccagacaatattggaagaggatgttgaagatcctgtgtaccagtacattgtgtttgaggctggacacgagccaatccgtgatcccgaaacggaagaaaacatttatcaggttcccaccagccaaaagaaggaaggtgtttatgatgtgccaaaaagtcaacctgtaagtgctgtgacccaattagaactttttggggacatgtccacaccccctgatataacctctccccccactcctgcaactccaggtgatgcctttatcccatcttcatctcagacccttccagcgagtgcagatgtgtttagttctgtacctttcggcactgctgctgtaccctcaggttacgttgcaatgggcgctgtcctcccgtccttctggggtcagcagcccctcgtccaacagcagatggtcatgggtgcccagccaccagtcgctcaggtgatgccgggggctcagcccatcgcatggggccagccgggtctctttcctgccactcagcagccctggccaactgtggccgggcagtttccgccagccgccttcatgcccacacaaactgttatgcctttgccagctgccatgttccaaggtcccctcaccccccttgccaccgtcccaggcacgagtgactccaccaggtcaagtccacagaccgacaagcccaggcagaaaatgggcaaagaaacgtttaaggatttccagatggcccagcctccgcccgtgccctcccgcaaacccgaccagccctccctcacctgtacctcagaggccttctccagttacttcaacaaagtcggggtggcacaggatacagacgactgtgatgactttgacatctcccagttgaatttgacccctgtgacttctaccacaccatcgaccaactcacctccaaccccagcccctagacagagctctccatccaaatcatcagcatcccatgccagtgatcctaccacagatgacatctttgaagagggctttgaaagtcccagcaaaagcgaagagcaagaagctcctgatggatcacaggcctcatccaacagtgatccatttggtgagcccagtggggagcccagtggtgataatataagtccgcagggccggtagctaagattagcgcaggtctgggagccagagcctctgtacgcgcagatcaacagacctaagaaatagcatcgatgcgagctcgtggtgggtgctcaagactggcatggacatcagcatcacgacaggctctcttgtattctttcacctcttcccacaagaaattcatgattgcccaatggaactcgctcagaagagggaactaagcatttttggcaaccaatggcagaaataaatggcagcac

SEQ ID NO: 59599 - DNA, 847 bp, Homo sapiens
tttttttttctgggcttggtgcatttattcaggtttgagagctgaggagggcagagctcgcacagctgtgaggcagggctgggccggacaggagctgcttcatccttcaacagacgctggcctggggtgaccagcctcgccctcccacaagaagagtcaggccttgggggccgcggctgtctgagtggtcaggctggggctgccacccagggcaggctgctgaggtccagggcacctccagtcacatctgggaagacaatgttgtcatccgagaggccctgagctctgcccaggcagatgaactggtccagcgtcccgggaggcagcaaccagctcctgcccagcaggctgatcctgaggacggccagcctgctcgtgtgtccacacccggtggtccacagtgaactgcccaggctgggctgccggtatcagcacataagaccatgtgtcacagtgctggcctcgagtcatcgcattccacacctcaaagcggccatcatcacttagctcaaaagttgcggtgaaagcgttcagcagcgccctgtgctccggcctgaagctgttgcccgccaggcccaggacgaaccattccccctggaactggtttccttggaagctctgcatcgggggcgggagtggcaggggggttggggtctgggcctgcaggactttcagcaaggagagccacagccacaggccacacagcagcctcatcctggcagcctccactgctcttcctccgttcccggaaaactcccggcctgtcctctgctcaccctcccctctctcttcccactctccgggcaaagaccttttcccagacacggtcctgggcgctgggacgaaa

SEQ ID NO: 59600 - DNA, 1296 bp, Homo sapiens
tgaggggtacggagactctgggggagggagacggcagcggcatggcggccgggtgtaagacgcccgaccctcctcttccctgtcttcgccgccgccgctgctggagtcactgggaccctctagtctgcgtgtgttagttgtaatcccgccgccctcctgtcagccctccgctccgccggccctccttccttccgccgccgcagccagcccgagggtcggccggctgtgtaacactctcccaccccacccaccagcccgcgggccagcaccatggaggacgtgaagctggagttcccttcccttccacagtgcaaggaagacgccgaggagtggacctaccctatgagacgagagatgcaggaaattttacctggattgttcttaggcccatattcatctgctatgaaaagcaagctacctgtactacagaaacatggaataacccatataatatgcatacgacaaaatattgaagcaaactttattaaaccaaactttcagcagttatttagatatttagtcctggatattgcagataatccagttgaaaatataatacgttttttccctatgactaaggaatttattgatgggagcttacaaatgggaggaaaagttcttgtgcatggaaatgcagggatctccagaagtgcagcctttgttattgcatacattatggaaacatttggaatgaagtacagagatgcttttgcttatgttcaagaaagaagattttgtattaatcctaatgctggatttgtccatcaacttcaggaatatgaagccatctacctagcaaaattaacaatacagatgatgtcaccactccagatagaaaggtcattatctgttcattctggtaccacaggcagtttgaagagaacacatgaagaagaggatgattttggaaccatgcaagtggcgactgcacagaatggctgacttgaagagcaacatcatagagtgtgaatttctatttgggaaggagaaaatacaagagaaaattataatgtaaaatggtaaaaacataagtagtttttttttcaattacatgttgcttccagacatacttctctgcaacttgttgagcaacattttaagatgttggacttctgcaatagatgacactgatggttttactcctttttttaaaaacacatgcgcgcgcacacacacatgctttacaagttttattataaaccaagaattttggacttgcaaagaggtattattgcaataatgcacttttcatacttgaaatttatttgtatgatataaagttattactttaaacaa

SEQ ID NO: 59601 - DNA, 3307 bp, Homo sapiens
aggaggacaaacagtttaatccagaccaagaaacaagcaaactttaatttccgagtacacaattatgaaactatgccagtagcgacctgcatgtttgtctcatctctttagccacttaagttctcaaaacactgccaaagctttccttctctattaaactcccttaagcattactcatactattattcaagtttaagatgtggcaaatctccccaagtgtatatggctggttctcttcttataaatgaatccataagacagtgtcccctaattcatctctattttctctaacctgcttgattttctaaaattggaaaaaagtaattccggtatactaaaaccagagcccaggtttctcaacatcttcagttaaatgacttttaattccccaatcaaggtataacacacaaatgttatctgcgctttacagtatagaactctgagtggctggtgtcttttggttagtgtaaccattacacagcagtatctgcttgtcaccccggtcttctttagcctcaaaaaatattcagaatttgttatgcacatgggagatttcttacagcagcacactcacttacaaaaagaccaaaaaaattttattgctttacaacaagccagcaacaaacacaactgaatagttataaacatgacacttctaaatcctcaaatggaattccaagaccagagtgtgcttctccactttaatagcatttgttaaaactgaaatccacaacttctggcaagtacttcaatattctcaagcagaatcaatacttaaagaggttaaaagaaaaaactattatcaaacgtattgtctgtgggatgatctaatttaaaagcctttcatgcttgatcctggcagtgctattactgcacattttaagtgaccatcatgggcacttttaagaacctaacttcacaaaaagagctgtcacaagaaaattgttctaaaatcccaatgcacagtaactcatgcctcatttcaactgctttcctcatgatgaaaaaatgtagtcagcctttaacttggcctgataaaagctgtgaaaggtatgccaaatggccccttgtacaaacaggaagcccaaattgttgatcaggcaagaaaaggtgacacttttagatacttcatattattctggaaagcactttcctttcagtgggtgcaaaataactacggattaagtcaccattttaatcatctcaattcaatagcaagagtttcctggcacatactcttagtactacctgaaaattggggcgtgtggggaagaccaccaacagtatttacatgacttgccccaaactgtacatttaaaacatgactgttgggatagtcaccaacaacctgaaatttcttactctaaaacacattaccaaatcccactgatttattttgtgtgtgctttcgtggtttttgtttttatatagagatggagtctcactttgttgcccaggctggtctcgaactcctgagctcaagcagtccccctgcctcggcctcccagtgtgctgggattacaggtgtgagccaccacgcccggcctgacttatttataattcactattttatctttcttccagacaaagcaaagcatttttctctaacaacataatagtcaggattttgcttattaacttacgtgggtggctttatactcccagaacaaatgatctagctgactactaggaaaaaggtttcatagtttaggaatatatcacatcacgtgttagttccaaatgtacatgaagacaatttttaattgctgcaatagcagaatattaaggcaacatcagaaagcagaggtgttttaaaacactaagccctactccctgcctggtggaaaacaaaatgatgttactaaatcccttaatacaaaaactttccaaaataatctgttgagcttgacttcgcagtttaatcttttacagtttgatggcagtgagagagaacctgcggctataattcccttggcaaaagaattcaacatctgatttactcacaatgccttaaaataaggaagggaaaatataaaataaagttttccttgcttggcaaccatctttttaattatctatttttatactgtatccaggctatgccctgggtgtggatggctaactcgcatatagaaaatatcaagcatcacatctggaagaatcacaaccgagacaatgaacttctcaatcagtacatcaacagtcaaggtaagcaagaaaaggactttaccaagaaactaacatttacactttctgacggaactgaaatacactgaattacaggcatattcactgaaacaacaaaaaaaattctgtccatgtaaaggctatattttttacccccaaaaaagtgtttcaattctgatactcacaccacaactggttaagaaaataaagcgcagtgtttagcaactgagcatcctaactaccgtaagaggcactctgtgctcaccccttcctggcaaccgctgaggtcagcaaggccaggagcaaggagagcctcctatttttcaacacaagctgctgccgtctccttattaaagccccggatggagagatcatagaccacttcctctactttcttcacgtcatatttcaatccgtcgtagcgcttcctcagggagtcatttttcaggttgagaaggcgaaaaccggaatccagctcattgatgaaggtggagatgtggaggggtcgggagtagtctccagcagtcacgctgttgacagacagcctcgacagttcactggcaagaattagaactcctgagagataatcttctacatccagatgaaatcctttctcccgatctggctcaatgccaagaatttctgtaactgcttctcgagtcactagtgtttctgtttccaaatacacaacaaatgctgccaagaagaccaagcgctgcaacacaaacctccagtgctcatgaaatctgtaatactgttcagcaggaaatttggtcttcaaagatgttagatgtgtttttactgtaccaaaatgttctcgagctttcaaacacctctttggaatgtcctgaaacccagcaccctgatggaccccttgcagtagagttaaaatctctcgagctgtttgttctaaactctgtacaacttttctgatttcctctcggatgtcctgctcggcagccaaaaagccctgcagctccacgaagatctcgctcacagacatggcgccggctgcacaacaatcagccagtgtagcaagggcggccaaggaagtggacgccgcaggcaaccagcgcaatcaatcgcaacggccgccgctaccgccgcgtcccccccccca

SEQ ID NO: 59602 - DNA, 769 bp, Homo sapiens
ggcacgaggtggcgagcctgacgcgaacaatggcggagctgggcgaagccgatgaagcggagttgcagcgcctggtggccgccgagcagcagaaggcgcagtttactgcacaggtgcatcacttcatggagttatgttgggataaatgtgtggagaagccagggaatcgcctagactctcgcactgaaaattgtctctccagctgtgtagaccgcttcattgacaccactcttgccatcaccagtcggtttgcccagattgtacagaaaggagggcagtaggccatcccccaggagaatgacagaagcaaaggacttgttactaagcagatttaagggtcagtgggggaaggctatcaacccattgtcagatcagcatcaggctgttatcaagtctgttggtgctaaaaagtaaaagatgaaatgttcaaagagtgaaatttatttatttggaattcagaaattccaggttgtatgacatcagttactcaataagtgtgaattctccaactcttcttttaatcccattttagaatttaatatagagatctctgattggcaggaacactagaaataaatgttccatggccagtagtgcaaatgggggattgtaggttttgaaaaaccaccctaagccatattaagggggttggaagaaccatcgaagcctaaggcatagaagaaaatttggggttaagaaagatgaagaacaaaaaacagctttattgcttatacatgaccaagaaaaggaaaacatggcaaaaaaaaaa

SEQ ID NO: 59603 - DNA, 2426 bp, Homo sapiens
ctgcggacgtcggcacgagagaacgaggaagtagggagcggggtggcaggggggggacccgccgcggctgctgccaccgccgccaccaccgcctctgctcgtggcgtgggaaaggaggtgtgagtcccgggcgcgagccggcggcggcgccgctgcgggagggtcggcggtgggaaggcgatggcggatttagataaactcaacatcgacagcattatccaacggctgctggaagtgagagggtccaagcctggtaagaatgtccagcttcaggagaatgaaatcagaggactgtgcttaaagtctcgtgaaatctttctcagtcagcctatcctactagaacttgaagcaccactcaaaatatgtggtgacatccatggacaatactatgatttgctgcgactttttgagtacggtggtttcccaccagaaagcaactacctgtttcttggggactatgtggacaggggaaagcagtcattggagacgatctgcctcttactggcctacaaaataaaatatcctgagaatttttttcttctcagagggaaccatgaatgtgccagcatcaacagaatttatggattttatgatgaatgtaaaagaagatacaacattaaactatggaaaactttcacagactgttttaactgtttaccgatagcagccatcgtggatgagaagatattctgctgtcatggaggtttatcaccagatcttcaatctatggagcagattcggcgaattatgcgaccaactgatgtaccagatcaaggtcttctttgtgatcttttgtggtctgaccccgataaagatgtcttaggctggggtgaaaatgacagaggagtgtccttcacatttggtgcagaagtggttgcaaaatttctccataagcatgatttggatcttatatgtagagcccatcaggtggttgaagatggatatgaattttttgcaaagaggcagttggtcactctgttttctgcgcccaattattgcggagagtttgacaatgcaggtgccatgatgagtgtggatgaaacactaatgtgttcttttcagattttaaagcctgcagagaaaaagaagccaaatgccacgagacctgtaacgcctccaaggggtatgatcacaaagcaagcaaagaaatagatgtcgttttgacactgcctagtcgggacttgtaacatagagtatataaccttcatttttaagactgtaatgtgtactggtcagcttgctcagatagatctgtgtttgtgggggcccttccttccatttttgatttagtgaatggcatttgctggttataacagcaaatgaaagactcttcactccaaaaagaaaagtgttttgttttttaattctctgttccttttgcaaacaattttaatgatggtgttaaagctgtacaccccaggacagtttatcctgtctgaggagtaagtgtgcaattgatcttttttaattcagtacaacccataatcatgtaaatgctcattttctttaggacataaagagagccctagggtgctctgaatctgtacatgttcttgtcataaaatgcatactgttgatacaaaccactgtgaacattttttatttgagaattttgtttcaaagggattgctttttcctctcattgtcttgttatgtacaaactagtttttatagctatcaacattaggagtaactttcaaccttgccagcatcactggtatgatgtatatttaattaaagcacacttttccccgaccgtatacttaaaatgacaaagccattcttttaaatatttgtgactctttcctaaagccaaagtttctgttgaattatgttttgacacacccctaagtacaaggtggtatggttgtatacacatgctgccttcttggggattcaaaaacaggtttttgattttgaatagcaattagtgatatagtgctgtttaagctactaacgataaaaggtaataacattttatacaatttccatatagtctattcattaagtaatctttttacagttgcatcaggcctgaacccgtccattcagaaagcttcaaattatagaaacaatactgttctatacgagtgaccgattatgctttctttggcctacattctttattctgcggtgaagttgaggcttataagttaaaacaaaggaactaacttactgtccaccagtttatacagaactcacagtacctatgacttttttaaactaagatctgttaaaaaagaaatctgtttcaacagatgaccgtgtacaataccgtgtggtgaaaatgaattcagacttattaaatgatgaacttgttaaatcttctcagtgtctatttatcagcacaatacacacaggagaactgttgatggcatattgaatagattttcctgaataaattgctctggaaaccaaaaaaaaaa

SEQ ID NO: 59604 - DNA, 3983 bp, Homo sapiens
ccggaattcccgagtcgacgatttcgtgctgggcgggcggcgggagctgctctcgcgggccgcggccctcgccctggctgcaacggctgagatggatcttgaggcggcaaagaacggaacagcctggcgccccacgagcgcggagggcgactttgaactgggcatcagcagcaaacaaaaaaggaaaaaaacgaagacagtgaaaatgattggagtattaacattgtttcgatactccgattggcaggataaattgtttatgtcgctgggtaccatcatggccatagctcacggatcaggtctccccctcatgatgatagtatttggagagatgactgacaaatttgttgatactgcaggaaacttctcctttccagtgaacttttccttgtcgctgctaaatccaggcaaaattctggaagaagaaatgactagatatgcatattactactcaggattgggtgctggagttcttgttgctgcctatatacaagtttcattttggactttggcagctggtcgacagatcaggaaaattaggcagaagttttttcatgctattctacgacaggaaataggatggtttgacatcaatgacaccactgaactcaatacgcggctaacagatgacatctccaaaatcagtgaaggaattggtgacaaggttggaatgttctttcaagcagtagccacgttttttgcaggattcatagtgggattcatcagaggatggaagctcacccttgtgataatggccatcagccctattctaggactctctgcagccgtttgggcaaagatactctcggcatttagtgacaaagaactagctgcttatgcaaaagcaggcgccgtggcagaagaggctctgggggccatcaggactgtgatagctttcgggggccagaacaaagagctggaaaggtatcagaaacatttagaaaatgccaaagagattggaattaaaaaagctatttcagcaaacatttccatgggtattgccttcctgttaatatatgcatcatatgcactggccttctggtatggatccactctagtcatatcaaaagaatatactattggaaatgcaatgacagtttttttttcaatcctaattggagctttcagtgttggccaggctgccccatgtattgatgcttttgccaatgcaagaggagcagcatatgtgatctttgatattattgataataatcctaaaattgacagtttttcagagagaggacacaaaccagacagcatcaaagggaatttggagttcaatgatgttcacttttcttacccttctcgagctaacgtcaagatcttgaagggcctcaacctgaaggtgcagagtgggcagacggtggccctggttggaagtagtggctgtgggaagagcacaacggtccagctgatacagaggctctatgaccctgatgagggcacaattaacattgatgggcaggatattaggaactttaatgtaaactatctgagggaaatcattggtgtggtgagtcaggagccggtgctgttttccaccacaattgctgaaaatatttgttatggccgtggaaatgtaaccatggatgagataaagaaagctgtcaaagaggccaacgcctatgagtttatcatgaaattaccacagaaatttgacaccctggttggagagagaggggcccagctgagtggtgggcagaagcagaggatcgccattgcacgtgccctggttcgcaaccccaagatccttctgctggatgaggccacgtcagcattggacacagaaagtgaagctgaggtacaggcagctctggataaggccagagaaggccggaccaccattgtgatagcacaccgactgtctacggtccgaaatgcagatgtcatcgctgggtttgaggatggagtaattgtggagcaaggaagccacagcgaactgatgaagaaggaaggggtgtacttcaaacttgtcaacatgcagacatcaggaagccagatccagtcagaagaatttgaactaaatgatgaaaaggctgccactagaatggccccaaatggctggaaatctcgcctatttaggcattctactcagaaaaaccttaaaaattcacaaatgtgtcagaagagccttgatgtggaaaccgatggacttgaagcaaatgtgccaccagtgtcctttctgaaggtcctgaaactgaataaaacagaatggccctactttgtcgtgggaacagtatgtgccattgccaatggggggcttcagccggcattttcagtcatattctcagagatcatagcgatttttggaccaggcgatgatgcagtgaagcagcagaagtgcaacatattctctttgattttcttatttctgggaattatttctttttttactttcttccttcagggtttcacgtttgggaaagctggcgagatcctcaccagaagactgcggtcaatggcttttaaagcaatgctaagacaggacatgagctggtttgatgaccataaaaacagtactggtgcactttctacaagacttgccacagatgctgcccaagtccaaggagccacaggaaccaggttggctttaattgcacagaatatagctaaccttggaactggtattatcatatcatttatctacggttggcagttaaccctattgctattagcagttgttccaattattgctgtgtcaggaattgttgaaatgaaattgttggctggaaatgccaaaagagataaaaaagaactggaagctgctggaaagattgcaacagaggcaatagaaaatattaggacagttgtgtctttgacccaggaaagaaaatttgaatcaatgtatgttgaaaaattgtatggaccttacaggaattctgtgcagaaggcacacatctatggaattacttttagtatctcacaagcatttatgtatttttcctatgccggttgttttcgatttggtgcatatctcattgtgaatggacatatgcgcttcagagatgttattctggtgttttctgcaattgtattgggggcagtggctctaggacatgccagttcatttgctccagactatgctaaagctaagctgtctgcagcccacttattcatgctgtttgaaagacaacctctgattgacagctacagtgaagaggggctgaagcctgataaatttgaaggaaatataacatttaatgaagtcgtgttcaactatcccacccgagcaaacgtgccagtgcttcaggggctgagcctggaggtgaagaaaggccagacactagccctggtgggcagcagtggctgtgggaagagcacggtggtccagctcctggagcggttctacgaccccttggcggggacagtgcttctcgatggtcaagaagcaaagaaactcaatgtccagtggctcagagctcaactcggaatcgtgtctcaggagcctatcctatttgactgcagcattgccgagaatattgcctatggagacaacagccgggttgtatcacaggatgaaattgtgagtgcagccaaagctgccaacatacatcctttcatcgagacgttaccccacaaatatgaaacaagagtgggagataaggggactcagctctcaggaggtcaaaaacagaggattgctattgcccgagccctcatcagacaccttcaaatcttcttgttggatgaagctacatcagctctggatcctgaaagtgaaaaggttgtccaagaagccctggacaaagccagagaaggccgcacctgcattgtgattgctcaccgcctgtccaccatccagaatgcagacttaatagtggtgtttcagaatgggagagtcaaggagcatggcacgcatcagcagctgctggcacagaaaggcatctatttttcaatggtcagtgtccaggctgggacacagaacttatgaacttttgctacagtatattttaaaaataaattcaaattattctacccatttt

SEQ ID NO: 59605 - DNA, 1381 bp, Homo sapiens
actcgagatcctctgtcagcgtggtggaattccagcaacatagtgtggggaattttctactctgggccatttgctgagagggctcctgggcctaagctgctaccacctcctttatctctccctgtcgggtgactctataaaaagacaggagaagctgaggctcattcactcactttgtccacttcattcccaagagaagtgtcggggggacctgccaggcttaggggaagctctgagctgagccccttgtgcaaagaggcgagccacccagaggcagctgttcccttctaggcctggaagtgcacatgctcatctacagctttcttggaagaagaaagaaacaaaaactgagatttagaacaccaggtctgtttccactggcggccactcttgggcactggagaccagcaagagctttgtttttaaaaggctcttccatggcagatattcgcagaggcatcagggctacacttaaatgaagggctccggctggcacctgaggagcggcatggtgggcacgttgatcaccaccatcctgccgcactggcggaggacagcgcacgtgggcaccaacatcctcacggccgtgtcctacctgaaagggctctggatggagtgtgtgtggcacagcacaggcatctaccagtgccagatctaccgatccctgctggcgctgccccaagacctccaggctgcccgcgccctcatgggcatctcctgcctgctctcgggcatagcctgcgcctgcgccgtcatcgggatgaagtgcacgcgctgcgccaagggcacacccgccaagaccacctttgccatcctcggcggcaccctcttcatcctggccggcctcctgtgcatgggggccgtctcctggaccaccaacgacgtggtgcagaacttctacaacccgctgctgcccagcggcatgaagtttgagattggccaggccctgtacctgggcttcatctcctcgtccctctcgctcattggtggcaccctgctttgcctgtcctgccaggacgaggcaccctacaggccctaccaggccccgcccagggccaccacgaccactgcaaacaccgcacctgcctaccagccaccagctgcctacaaagacaatcgggccccctcagtgacctcggccacgcacagcgggtacaggctgaacgactacgtgtgagtccccacagcctgcttctcccctgggctgctgtgggctggttcccggcgggactgtcaatggaggcaggggttccagcacaaagtttacttctgggcaatttttgtatccaaggaaataatgtgaatgcgaggaaatgtctttagagcacagggacagagggggaaataagaggaggagaaagctctctataccaaagactga

SEQ ID NO: 59606 - DNA, 1609 bp, Homo sapiens
tccgtagtgggctaagggggagggtttcaaagggagcgcacttccgctgccctttctttcgccagccttacgggcccgaaccctcgtgtgaagggtgcagtacctaagccggagcggggtagaggcgggccggcacccccttctgacctccagtgccgccggcctcaagatcagacatggcccagaacttgaaggacttggcgggacggctgcccgccgggccccggggcatgggcacggccctgaagctgttgctgggggccggcgccgtggcctacggtgtgcgcgaatctgtgttcaccgtggaaggcgggcacagagccatcttcttcaatcggatcggtggagtgcagcaggacactatcctggccgagggccttcacttcaggatcccttggttccagtaccccattatctatgacattcgggccagacctcgaaaaatctcctcccctacaggctccaaagacctacagatggtgaatatctccctgcgagtgttgtctcgacccaatgctcaggagcttcctagcatgtaccagcgcctagggctggactacgaggaacgagtgttgccgtccattgtcaacgaggtgctcaagagtgtggtggccaagttcaatgcctcacagctgatcacccagcgggcccaggtatccctgttgatccgccgggagctgacagagagggccaaggacttcagcctcatcctggatgatgtggccatcacagagctgagctttagccgagagtacacagctgctgtagaagccaaacaagtggcccagcaggaggcccagcgggcccaattcttggtagaaaaagcaaagcaggaacagcggcagaaaattgtgcaggccgagggtgaggccgaggctgccaagatgcttggagaagcactgagcaagaaccctggctacatcaaacttcgcaagattcgagcagcccagaatatctccaagacgatcgccacatcacagaatcgtatctatctcacagctgacaaccttgtgctgaacctacaggatgaaagtttcaccaggggaagtgacagcctcatcaagggtaagaaatgagcctagtcaccaagaactccacccccagaggaagtggatctgcttctccagtttttgaggagccagccaggggtccagcacagccctaccccgccccagtatcatgcgatggtcccccacaccggttccctgaacccctcttggattaaggaagactgaagactagccccttttctggggaattactttcctcctccctgtgttaactggggctgttggggacagtgcgtgatttctcagtgatttcctacagtgttgttccctccctcaaggctgggaggagataaacaccaacccaggaattctcaataaatttttattacttaacctgaaaaaaaaaaaaaagggggggccgttttaaaggatccaagtttacgtccccgggcttgcaaggtattattttttttttggggcccccaaaattaaattcccgggccggggtttaacaacggggggaggggaaaaaccctggggttacccaatttaatcgctttgaaaaaaatccccttttcgccagggggggaaaaaaaaaa

SEQ ID NO: 59607 - DNA, 2036 bp, Homo sapiens
  misc_feature (1)...(2036): n = a,t,c or g
ttttttttttttaagagatttacttcatctttattaacagtaccatagtattccactgtctagtatactataagtgatctatataccaataatgaatacttaagggtgtttcaaatcttttattattagaaaagtgctgccagaaacatccttgccatgcttctgtatgtactggtgctagtgtttctatcagataaatttttagacatgaagtgaattactaggcataggaaatataatttacacttttgatagatactgagtttttgctcatttgctacatgaagcagaggcagagtattctgtgtggggtttgggacaggaacactgacccctgaagtcgagcctgggggtctaacatagtggtcatttgtccagcctgttttatggaaggaactggactctgagctttggggaatttcctgcaagataaatgtatatcccacctatactggtaacaggtaagttatgcgcaaagatgaaaagacaaagccctagctagatcagctcttgctctcagcactacaatggccagcggtaattctttcagttaaaatgacaattaatacagtttcattgaagcttcaaacagagcagccagatcctcttctgactggggacagggtgcaagcttggtgaccctttcctggggcagcgttcctttcactagtgcggggatatcagctttggagtaaccaacagctgctaggccatcatcaacatccagatcgaataagaatttccggagcgtgtctgccaacaccagccctgcatcttggatcctggcagtgcgggtgtcggctcccagtatttctgccatctccaggtgtcgctctggaaacatctgggccgtgaaagtgaacaccgctggggacgtgagcaccacagaaaggccatggggcaccagtgggtgatccacattgtaatcctttgctttatacatcttcactaaacctgaaattgggtaagacattccatggcacagatgaacaccagcatttccaaagccgatgccagcaaaagcacttgccaagtgcatatgagaccttgcttcaagatcatcgggatttctgacagccctcttcagatacttagccacgatccgcagcgcgtggatagcccaaatgtcactgattgggttgctgccctggtacgcaggccgtgtgatgggatttgaagggcaggggctccgcaggtggtagggcagggtggtgtatgactccagggcatggcaaagcacatcaaagccactgttggcgaccactcgggcaggcatgtggagggtgtgcagaggatcaatcagtcccagtgtgggtttgatggctctcgaagtgatgccaatttttactttcaagtgttcatagtcaaaaatggcaaccccagtagtttcactcccggttcctgaggtagttggcactgcaatcagaggcttaagaggcacagacacaggctttcccttgccaatgggggcactgacataatctaggaaatcagaatgagggctggatgcatacagattagcagccttacaggtgtccatggtagagccaccaccgacagcaacataggcatcaaaagctcccttttgggcaaactcaatagcttccatgaagcttgaatccgttggttccactctcacattatcataaaccgtaaaggggatgccattcttcactagggaatccatagctacttgcacaggagggagcttggagaggttcttgtctgtcatcaagcacacatttttagcacccatgttttttaggtccattcctacttcctttgtaactgctgctccatatctaatatttgaaacagccatatactttcttgacggaagggcaatcctgtccctttaaactcaataaaggcagcggccaggtccttctgagtcccggtataattgcctagaacttaacatttagaattcccactccttggtttacagccgggtccgaaaaatagaaactcttccttcctcgtcgcattnnnnnatcgtcgncccggcggttccgttcctcaaacgncagtagtat

SEQ ID NO: 59608 - DNA, 1314 bp, Homo sapiens
ttttttttttttttgctgctttgacctgacgaatttattgaagagagctctgtccttctcccttctaccgagaagaggcggcttgcagggctggcacctgtccacacctgtcactgggcctttccctgggctaggctgagtgggagcagatgccctcatcctatgtgcagggcctgtgcaggagccatcacaccaccttgttgatgatgacacctagttcttcaatctcacactggacttcatcccccttcttgagaaagacaggaggtttcctgaatacaccgacacctggggggggtcccaagttaggaatgacatcccctgggtaaaaggtaacaaactgggagacccaggctatcaggtcctctgtcttgaataccatctggttggtgttgccgctctggaccacttccccattcactcggcagcagatctttaagttgtgtggatctgctacactgtccttggtcaccaaggcagggcccagagggcagaaggtgtcgaaggtttttcccagcagccattgtttcccattacgtctcatttgccagtcacgagcactcacgtcatgagccacagtgaagccggccacgtgggccatagcatctgtggccttgatgtgcttgcctttctttccaatgaccacggccagctccacttcccaatctacctcctggctctgtggtgggaggaccacctcatcatagggccccacgatggagctggcaaacttgctgaagatgatgggctccttgggcacgggcacgttctgttctttgcagtggtccacataattcatgcccacacacaccaccttatctggtcgtgtgactggagccaggaaggttacctccgaccgtggtaggactggcaactgggcagccagggctcttcttgccactgagagggtggcctctccctgctctaggaactgcgtcatcgtcttcgggagtgtggggtcaaaggcattgaggttgataacccctccaccattccctgtctccaggcccaagtgaggccccaccaggtggggtgcccggaactgcactagtctcatgtctctggagggttgaaagggccacttctgagcctgcagcagaactgtgagtaaccttcttctaccagacaccagcatcagagcctggccgcggcggccgatcttcctgcgctgtagggttagagctcgcggggccgaaggtcaagggcggcgggcgcctgagcactgccaccagtgaccgcagccagccggggaaatgcagcagctgctaacccagggccactcggccggatcacccgagagaaaagcgggcgcga

SEQ ID NO: 59609 - DNA, 1610 bp, Homo sapiens
attgaaaccctatcgagaccatagtcagtgtggtggaattcgcagctcagcatggctagggtactgggagcacccgttgcactggggttgtggagcctatgctggtctctggccattgccacccctcttcctccgactagtgcccatgggaatgttgctgaaggcgagaccaagccagacccagacgtgactgaacgctgctcagatggctggagctttgatgctaccaccctggatgacaatggaaccatgctgttttttaaaggggagtttgtgtggaagagtcacaaatgggaccgggagttaatctcagagagatggaagaatttccccagccctgtggatgctgcattccgtcaaggtcacaacagtgtctttctgatcaagggggacaaagtctgggtataccctcctgaaaagaaggagaaaggatacccaaagttgctccaagatgaatttcctggaatcccatccccactggatgcagctgtggaatgtcaccgtggagaatgtcaagctgaaggcgtcctcttcttccaaggtgaccgcgagtggttctgggacttggctacgggaaccatgaaggagcgttcctggccagctgttgggaactgctcctctgccctgagatggctgggccgctactactgcttccagggtaaccaattcctgcgcttcgaccctgtcaggggagaggtgcctcccaggtacccgcgggatgtccgagactacttcatgccctgccctggcagaggccatggacacaggaatgggactggccatgggaacagtacccaccatggccctgagtatatgcgctgtagcccacatctagtcttgtctgcactgacgtctgacaaccatggtgccacctatgccttcagtgggacccactactggcgtctggacaccagccgggatggctggcatagctggcccattgctcatcagtggccccagggtccttcagcagtggatgctgccttttcctgggaagaaaaactctatctggtccagggcacccaggtatatgtcttcctgacaaagggaggctataccctagtaagcggttatccgaagcggctggagaaggaagtcgggacccctcatgggattatcctggactctgtggatgcggcctttatctgccctgggtcttctcggctccatatcatggcaggacggcggctgtggtggctggacctgaagtcaggagcccaagccacgtggacagagcttccttggccccatgagaaggtagacggagccttgtgtatggaaaagtcccttggccctaactcatgttccgccaatggtcccggcttgtacctcatccatggtcccaatttgtactgctacagtgatgtggagaaactgaatgcagccaaggcccttccgcaaccccagaatgtgaccagtctcctgggctgcactcactgaggggccttctgacatgagtctggcctggccccacctcctagttcctcataataaagacagattgcttcttcgcttctcactgaggggccttctgacatgagtctggcctggccccacctccccagtttctcataataaagacagattgcttcttcacttgaaaaaaaaaa

SEQ ID NO: 59610 - DNA, 1470 bp, Homo sapiens
tacggctgcgagaagacgacagaagggggagcggcaacatggcgtccaggtctaagcggcgtgccgtggaaagtggggttccgcagccgccggatcccccagtccagcgcgacgaggaagaggaaaaagaagtcgaaaatgaggatgaagacgatgatgacagtgacaaggaaaaggatgaagaggacgaggtcattgacgaggaagtgaatattgaatttgaagcttattccctatcagataatgattatgacggaattaagaaattactgcagcagctttttctaaaggctcctgtgaacactgcagaactaacagatctcttaattcaacagaaccatattgggagtgtgattaagcaaacggatgtttcagaagacagcaatgatgatatggatgaagatgaggtttttggtttcataagccttttaaatttaactgaaagaaagggtacccagtgtgttgaacaaattcaagagttggttctacgcttctgtgagaagaactgtgaaaagagcatggttgaacagctggacaagtttttaaatgacaccaccaagcctgtgggccttctcctaagtgaaagattcattaatgtccctccacagatcgctctgcccatgtaccagcagcttcagaaagaactggcgggggcacacagaaccaataagccatgtgggaagtgctacttttaccttctgattagtaagacatttgtggaagcaggaaaaaacaattccaaaaagaaacctagcaacaaaaagaaagctgcgttaatgtttgcaaatgcagaggaagaatttttctatgaggagcagggaaaacctgaggtgcttggaggtccagacacaagaagaggattggaaccagttccgatacagcacaatggtggttcacgggggcaagtgacagccctggtttctctgaaggctggactaattcaatcaagatcaactctaagtgatttccagggaaccttcatgactgttggaattgctctgtcataataagtcagggatatttaggaggctcatagtctcctggagggataaaacatctcggcacctagtaatggtaaattagtcaatatttgttagtttcgtttgagatctcaaatgttaggattttctgaagtctcagtgtctttcagagtttgagataccttgttttcatttttttctaatttttaatttaaaagtaataaagaatattttgtaatgattaggatgaaaatttttatcgtcaattataagccaaaatttgctaaaattaaagtcagtatacttgaaacaagtttctagtaagttctctggggtaagatactaattactctgataaaggggctatcaaaaaaatccagtaaattgttcataagaagagatcagtttaagagtcaaacaatttgctttgctagtaccttagctaaagaaaaaatactattaaagatgactatcacctttaaaaaaaaaa

SEQ ID NO: 59611 - DNA, 3305 bp, Homo sapiens
gtttaaccgcggcccgggaattttattttgggggccccataaaaaaaattttaccttgccagcccccggacgtaaaattggatcctttaaaacggcccccccttttttttttttttctgggaaaagtttctttaataaaaaagttctagtacatatacacgattgtcctcacccttcatctatagcaacgcaacagggaaaataaaaaataaggggcaacctaggcacactcagtataaaaacgcagagatccatccgaatgggaggcattggggtctggaaaccagaaatgcaggacggccagtgggcccagcagctctgggctgcacttttgaagaacttttctctaacgttttgaagatagcattaaaaaaaaaaaaattaagttgcaccaggaggcctaagaaggttcccattccagagagaaagtccactcgtaaggtcagtcacagcaggcccaggcccaggacaccggggttgagcaattttacggcaggtaagaggcttctggaaacttggcctctgaggcaaccctggcccaggtggagaggttttcagtgctgaagtcaaactgcccacattcctccatcctgaaaggctaaggaagcaaccactctaacgtcagactcatagcctgtctccgccaagttgctacggccacttcctgacaagctccgaagtcctcagctgaagggggaactgagaccccttggagatgctctgtggcctgacgtttggtccccagccctgcaggcaggccgcctagtcgtcctccccgccaccgtacatgtctgccagcttcttgaagcggctgccccactcgttcagataatcgtaatcttggtcttggtcggaggcggaggaggtgagggagctcagggacgcggcgtcggagccgctgccctcatagtcgaacaccaagagggtgtcgtagggcggggctgtggggtctgtgttagccgccttcaggttctcaattataaagttgccgatttcatctgggttggctggcctaggacggtacatgggtgtcgggatgatggttggtgccacgtcattgcggagaaccacctccggcctggcctccagacctcggtggagctgggtgatgtcatagtcctggtcctcttcgccacccccctcttcgccatagtagaagacgttgtcacgggtgtcatcttctgggagtaggaggggctccttgatcttccgcttctttctcaccaacaaaagcagcaccagcaggaggaacagcagagccaggacagcccccagcacagggaggatgaaacctcctttccagggtccagggcaggtttcgacatggccatggcagtcgcacacagtggccctgatcaccgtcagctgctctttgttgccatggtcagacagagaaaggtgcacgtcatatgtatcctgcttcaggaacttcttcagggacaagaccactgtgtcaccttcctcgttgacctctgccgtccagtagatgtctgagtcatctgtgagctgggcctggaaaggggaggtgtggggagacaggtccttgtccgtgatgttcagcacctggcgcacagggctttggttgcagatggtgatctgacggggctcagggactgggccatggtcattgacatcaatcagtgttagcagaagggttcccgtgccagtggtgggagggcttccattgtccatggccaagaccatgacttcatagatgttgttcctcacaaactgctcatcctcacggtcgagggtgcccacagctgtgacctgcccactgtctgggtccatggctagccaccctgctgggtctctcaggatgcggtagctgatcttttgattctccttgtcagggtcttctgcagtgtagacacacacaggctccccagtggggatgccctcctggacctcaacgactttggagggtgggacaaacacaggtgcctcattcacatcctccacgtggaccactatggtggctgtgtaggttgggagcttcagcacaaaaggggcctcgttggtcacttcaacgtacagggtgtgctggtttttggcctcaaaatccaaacccttcctggttgtcaggatgccctggttgctctcagggtgggtggtgatggtaaaatggtccccgtcgtcaccgcccatgataaggtaggtggcacgccacgctggtgagttgggggcgtccagatcagtgaccgtcagcctctgcacctcatggcccactgcattctcaggcacatgggcctcgtacttctgggggtcaaacatgggagcattgtcattggcatcaaggatctccactactgccactgccgtggtggtggagccgtccccatccatgtctgtggcctggatggtcagtgtgtactcagggactttttcccggtccaggccactggagatgacgctgatggtgcctgtgctccggtgaattgtgaacatgaggtcgtgtgggtcctttggttcttggctatggatggagtaagcaaccaccccattgtaggtgtagatggcatcatcctcatctgtggctgtcacctgcatcacagaagtacctggtaggactccctctaagacactccctcggaaggtgtcctgggtaaacttgggcttgtggtcattctggtcggtcactatgatggagatgttcatggggtcctccactgaggcaccattctctgacacagcgtggccaaagagctcatacttggcaatctcctcccggtccagtggcttattcaacaacaaccagcctgtctccttctctacagcgaagacaccctcaggggggctgtctgcccccggccccgtgatgctgtagaaaatcttggtgtctctatctttattagacttgagctgattcagtctctgggggaagggacccttgccattttcagggacagatattggagcaaccacccaatctctcttgtgtcttcgtaagatacgtttggatgggaagatcttcaatggattcctttccttcagtgaccttctttcctggactgtctcgccattccgcacagtgaagtcatcattatcagtgctaaacagagctggctcttgcccagggcagcccatgaatactttccccagcgcctggccgggctcctgctccgcgcctcccgcctccaaggtcacttcagcctccctgaagaccgcccggcacggctcggaggccgcgcactgcagccagcaaacctggagaaggaggagagacgcgagaggtccacgagggagccccatggctgcagagagaggggtgaagcagctgccgcgacggcgggccggtgttccgc

SEQ ID NO: 59612 - DNA, 3817 bp, Homo sapiens
cacagacgtttgaacagagcaggctcctgaggtctccaggatgcctgtcccagcctcctggccccaccctccttgtcctttcctgctgatgacgctactgctggggagactcacaggagtggcaggtgaggacgagctacaggtgattcagcctgaaaagtccgtatcagttgcagctggagagtcggccactctgcgctgtgctatgacgtccctgatccctgtggggcccatcatgtggtttagaggagctggagcaggccgggaattaatctacaatcagaaagaaggccacttcccacgggtaacaactgtttcagaactcacaaagagaaacaacctgaacttttccatcagcatcagtaacatcaccccagcagacgccggcacctactactgtgtgaagttccggaaagggagccctgacgacgtggagtttaagtctggagcaggcactgagctgtctgtgcgcgccaaaccctctgcccccgtggtatcgggccctgcggtgagggccacacctgagcacacagtgagcttcacctgcgagtcccatggcttctctcccagagacatcaccctgaaatggttcaaaaatgggaatgagctctcagacttccagaccaacgtggaccccgcaggagacagtgtgtcctacagcatccacagcacagccagggtggtgctgacccgtggggacgttcactctcaagtcatctgcgagatggcccacatcaccttgcagggggaccctcttcgtgggactgccaacttgtctgaggccatccgagttccacccaccttggaggttactcaacagcccatgagggcagagaaccaggcaaacgtcacctgccaggtgagcaatttctacccccggggactacagctgacctggttggagaatggaaatgtgtcccggacagaaacagcttcgaccctcatagagaacaaggatggcacctacaactggatgagctggctcctggtgaacacctgtgcccacagggacgatgtggtgctcacctgtcaggtggagcatgatgggcagcaagcagtcagcaaaagctatgccctggagatctcagcacaccagaaggagcacggctcagatatcacccatgaaccagcgctggctcctactgctccactcctcgtagctctcctcctgggccccaagctgctactggtggttggtgtctctgccatctacatctgctggaaacagaaggcctgactgaccctcagtctctgctgcctcctcctttcttgagaagctcagcctgagagaaggagctggcgagaaccttccccacactcagctccaaacgcctcctctcccaggtcatctgcctgcccacacgctcctgttccaccttcacaagaccatgatgccccaaagcagtgtctctattcacggtcctgagcaggggccatgggattgggctctgggcactgactcatggcacctccctagaaggtgagaaacactccaaatctaaacacaccaggacttctcccatccgtcgccttgggactggccataaaccacagactctctccaggctctcaagagttatcctgtcttctggattcctgcctaccccaactcccccagccttgttgaggttctctactgcctcctgaatacacatgaacccctataccaattttaagaaaaaaatgattctctttcctctttgtccaagcatcctatccctcaaacccaaaaagaaagaagctctcccttctctctctgtgatggggacagtatttcttctagtatcctgcagccttcccagtcctgctgcttgtggtagaaatgctgccacagcccaacattgaggagccctcgatgactgccctttacaactcatattcagttctgcctccaaaatgcatgtgtccacttacgtgagatggtaaatgtttaacaatggactttctgaaagggaaaaaccaaaagctgttttgcagtgcttgccaatttctctagtgtaataactcccaacctgaccaatttcacactgccaacagttaaacaaccagattgcaagattcctgaaatttaacaattggttttcagggcccagtccaagcctgctgctggaaacctcagagttaaatccctattctccacacctctcacctccaccacccctccctgtcccagccagcatcatctctttggggaccactcctctggctttcatttttcagccacagtgattctttggaaaagtcaaatcatatcacttctctgcttcttccccaacacagctgcatggctcccgctctccctccttcaagtctctgctcaatgtcacttcattaaaggcggccttctataaactaccttgtataaaatattatttattttctctatcccggcattctaatttctcttatcctaattaatttttctttagcccttattttgatgagtattatgccgaatacaggcagccctcacttttcatggcagtgcaagattgcaaaaatgactgtgcaacctgaaacccaggaaagcagtctccatagtcaatcagaaaaacaatgatcattctgtgacctttaccattttttgtcaaaatattagaaactctcacactctcagttacaaatgtagaggacaatgaaaatataatgaaataaatatttatttgtgcactacaattcaaagcattagaaacattgagagttcaagtgctgtttctttgtaaaaatgtatccagagtagttgggaagagtgcttgcctttttttgtatatttctaatatggagtgatatagtttggctctgtgtctccatccaaatctcatcttaaattgtaatctgcatgtgttgtgggatgggcctggtaggaggtgactgaatcatgggggcggacttcccccttgctgttcttgtgatagtgagttctcataagatctcagtgagttctcatgagatctggttttttgaaagtgtgtggcaagtcccccttcgctctctctctctctctccctcctgccaccatgtgaagaaggtgcctgcttccttttctccttccaccatggttgtaagtttcctgaggcctcccagtcatgcttcctgttaagcctgtggaactgtgagtccaattaaacctcttttattcataaaatatccagtttctggtagttctttatagcagtgtgagaatgggctaatacacggagcaagcattgtttcttttcatttgtttattttatttttatttttttgagatggagtttcacccttattgcccaggctggagtgcaatgtcgtgatcttggctcactgcaacccccgcctccagggttcaagtgattctcctgcctcagcctcctgagtagctgggattacaggcatgtaccaccacacccagctaattttgtatttttagtagagatggggtttctccatgttgatcagactagtcttgaactcccgacctcaggtgatccacctgtcttggcctcccaaagtgctgggattacaggcatgagccaccatgcctagccagcaagcatcatttctattataccttggtgttttgccatctttctaagtttggactagcttccaacatcttatcccttgaattttcaatattgtggaatcactccagaagatcctttcatgtgaagttttttgctggcatttcaacctttgggacatcttcagcccttttattaccactcctctcccatttgtggcagtttgcgtttactacctccctctggctgcctatctgaagttcctgcatcagggtctacattgccacagtcaactatttgtacttctagaattc

SEQ ID NO: 59613 - DNA, 1345 bp, Homo sapiens
cggacgcgtggggaatcctccaacatggagcctcttgcagcttacccgctaaaatgttccgggcccagagcaaaggtatttgcagttttgctgtctatagttctatgcacagtaacgctatttcttctacaactaaaattcctcaaacctaaaatcaacagcttttatgcctttgaagtgaaggatgcaaaaggaagaactgtttctctggaaaagtataaaggcaaagtttcactagttgtaaacgtggccagtgactgccaactcacagacagaaattacttagggctgaaggaactgcacaaagagtttggaccatcccacttcagcgtgttggcttttccctgcaatcagtttggagaatcggagccccgcccaagcaaggaagtagaatcttttgcaagaaaaaactacggagtaactttccccatcttccacaagattaagattctaggatctgaaggagaacctgcatttagatttcttgttgattcttcaaagaaggaaccaaggtggaatttttggaagtatcttgtcaaccctgagggtcaagttgtgaagttctggaggccagaggagcccattgaagtcatcaggcctgacatagcagctctggttagacaagtgatcataaaaaagaaagaggatctatgagaatgccattgcgtttctaatagaacagagaaatgtctccatgagggtttggtctcattttaaacattttttttttggagacagtgtctcactctgtcacccaggctggagtgcagtagtgcgttctcagctcattgcaacctctgcctttttaaacatgctattaaatgtggcaatgaaggatttttttttaatgttatcttgctattaagtggtaatgaatgttcccaggatgaggatgttacccaaagcaaaaatcaagagtagccaaagaatcaacatgaaatatattaactacttcctctgaccatactaaagaattcagaatacacagtgaccaatgtgcctcaatatcttattgttcaacttgacattttctaggactgtacttgatgaaaatgccaacacactagaccactctttggattcaagagcactgtgtatgactgaaatttctggaataactgtaaatggttatgttaatggaataaaacacaaatgttgaaaaatgtaaaatatatatacatagattcaaatccttatatatgtatgcttgttttgtgtacaggattttgttttttctttttaagtacaggttcctagtgttttactataactgtcactatgtatgtaactgacatatataaatagtcatttataaatgaccgtattataacaaaaaaaaaaaaaa

SEQ ID NO: 59614 - DNA, 1159 bp, Homo sapiens
gacgcccgccctactccgcgtggattggttgaccgcccttcgagcccggtgctgactggcttgcgtctctgccactttctttcagcttagtggcgcgcggcgcggcgacgaccgccgggagcgtgtgcagcggcggcggcggaagtggccggcgagcccggtccccgccggcaccatgcttcccttgtcactgctgaagacggctcagaatcaccccatgttggtggagctgaaaaatggggagacgtacaatggacacctggtgagctgcgacaactggatgaacattaacctgcgagaagtcatctgcacgtccagggacggggacaagttctggcggatgcccgagtgctacatccgcggcagcaccatcaagtacctgcgcatccccgacgagatcatcgacatggtcaaggaggaggtggtggccaagggccgcggccgcggaggcctgcagcagcagaagcagcagaaaggccgcggcatgggcggcgctggccgaggtgtgtttggtggccggggccgaggtgggatcccgggcacaggcagaggccagccagagaagaagcctggcagacaggcgggcaaacagtgagcgcccacccagaccggctgctgcgccccctcctgccagggtggcgattccgctccacagtctcggacggatctgctcagaaaggaagaggcaggcgccagggggaacccccttcgtgttttgtgaccctcccttttaggtgaagcccctttttcttgctaaaaccggcaattctccggttagaaatgttacttggtgttttttggttttgtgaaacggccgtcccaaagctggctggattcctagaagagtctgtgttgaaggcatctttcaagccctcgctctggttctcagggcagcattttccaggcgggtttgttttgcatttcttggagcctctccgagcagcaaccagacgggagatttttattttaagctgttcatgctgggactgacagcctgcagggtttccttgggcgcggccccaaaattgccttcaaaacaaacccgggacggttgaaagccttcgaaccgtgcaggggatgcctcgggccctggcccttcgcttcctctcttgtgttatggaaataaaaacaaataaaactacacactgcaaaaaaaaaa

SEQ ID NO: 59615 - DNA, 2224 bp, Homo sapiens
gctttcgcccgctgctgccgccgccgccgccggccgcggctgcactcccaagatggcggctcctccgggcgagtacttcagcgttgggagccaggtgtcgtgccggacgtgccaggagcagcggctgcagggcgaggtggtagcctttgactaccaatccaaaatgctggctttaaaatgtccctcttccagtggaaagcccaaccatgcagacatcttgctcataaacttacagtatgtttcagaagtggaaataattaatgaccgaacagaaacccctcctcccctagcttcactcaatgttagtaagcttgccagcaaagcacggacagagaaggaggagaagctgagccaggcctatgcaatcagtgctggtgtctctctagagggccagcagctcttccagaccattcacaagaccattaaagactgtaaatggcaagaaaaaaacatcgtagtcatggaagaagttgttattacacccccatatcaagtggaaaactgtaaaggcaaagaggggagtgcactgagccatgtacgcaaaatagttgaaaaacattttagagacgtggaaagccaaaagatactgcaacgttcacaagcccagcaaccacagaaggaggctgccctgtcatcctgagtccgtacacatggaggactcttccagcatccagccaaggaggcgctggtggtggcttcagcggaggcaggccgggggagggaagggatcctatatgtcctgttggctcttaacaaagggtcagcatttccaaatcttagacttgaacaaacaaaacacccaacaaaaaagaacaagagaataatttaaaagttgaatcattacttgactaacagacttcggtccaccatgtccttttcacagccctcttctggaacagtcaccttgttaattttatttttgaaaattattttcccactctgccctttacttctgactttcctttcctagtttgttcctgccattctgtttttataagtggctacacttgccttctgaatgattgaaagaaacttttacatcttttcttccaaaataaaagtaacaagctgactgtgattcttaaattgagaccagagcaagcaaacgtctcactttaaatttttgttttcttttcctttttttttcttttttcttttttttttttttttttgcacagggcatggcttgaattagttttatttttcttaactttaaatatataaatgaaaatatatattaaaatgttctctaaatattttctgcttcttgcaggtctctttttactagatcatggctattcttcccacctcatccctctgaaaataaaaatgtattgccctccccaccatccatcatagccaggccactaacttgacttggtgcaagagattcttgctgcgaactttgtagagccagtgtgcagatagaatttggctttgagggttcctgatggctttttagtctttaactgtgtgtgtaccagtctcacatttggcccaaacctcaggattctccctctgcctgtcttacttcatggtactagaagaccttcctcgccactctctccacatgagagagtcagctgccctttctcctgtgcctctgcaggaagaactctcttgcatggcacatctcagctcctcattgagggatagttttctttgataagaaacctggagtccatttactctgacctctctttaaatctatatccagagccactagcccaggaaaaacttgggtgacccgtaatttctcttctcctgctgtccttttgctcttacgccccaccccaactccccttaaattttacaggcttatgacagtttgtatgtgctcagccaatgagcagaaaacctggaaagaatttctggactttagcccaccagtttgtctggttgactaacctgctgagagctaaaattggcacccattgccccgtgccttcaggcagtctcctggggcagagtatgccaccatccgaatatcaggcactgagtgggatgtgggtgatgctcacatgactggctagagctttgggggtggggtgggggttaactactatttttttggccatgatctctttccccttccttttttttttaattaaataaatggatcaaattaaataattcaagccctgccttcaaaatgaaattttttttttagtattatttagcaaaaacaataaaacccaaatttttttaaccatcaaaaaaaaaa

SEQ ID NO: 59616 - DNA, 1399 bp, Homo sapiens
  misc_feature (1)...(1399): n = a,t,c or g
gagctgggaggctgcgagatccctaccgcagtagccgcctctgccgccgcggagcttcccgaacctcttcagccgcccggagccgctcccggagcccggccgtagaggctgcaatcgcagccgggagcccgcagcccgcgccccgagcccgccgccgccctttgagggcgccccaggccgcgccatggtgaaggtgacgttcaactccgctctggcccagaaggaggccaagaaggacgagcccaagagcggcgaggaggcgctcatcatcccccccgacgccgtcgcggtggactgcaaggacccagatgatgtggtaccagttggccaaagaagagcctggtgttggtgcatgtgctttggactagcatttatgcttgcaggtgttattctaggaggagcatacttgtacaaatattttgcacttcaaccagatgacgtgtactactgtggaataaagtacatcaaagatgatgtcatcttaaatgagccctctgcagatgccccagctgctctctaccagacaattgaagaaaatattaaaatctttgaagaagaagaagttgaatttatcagtgtgcctgtcccagagtttgcagatagtgatcctgccaacattgttcatgactttaacaagaaacttacagcctatttagatcttaacctggataagtgctatgtgatccctctgaacacttccattgttatgccacccagaaacctactggagttacttattaacatcaaggctggaacctatttgcctcagtcctatctgattcatgagcacatggttattactgatcgcattgaaaacattgatcacctgggtttctttatttatcgactgtgtcatgacaaggaaacttacaaactgcaacgcagagaaactattaaaggtattcagaaacgtgaagccagcaattgtttcgcaattcggcattttgaaaacaaatttgccgtggaaactttaatttgttcttgaacagtcaagaaaaacattattgaggaaaattaatatcacagcataaccccaccctttacattttgtgcagtgattattttttaaagtcttctttcatgtaagtagcaaacagggctttactatcttttcatctcattaattctattaaaaccattaccttaaaatttttttctttcgaagtgtggtgtcttttatatttgaattagtaactgtatgaagtcatagataatagtacatgtcaccttaggtagtaggaagaattacaatttctttaaatcatttatctggatttttatgttttattagcattttcaagaagacggattatctagagaataatcatatatatgcatacgtaaaaatggaccacagtgacttatttggangttgtaagttgcctcctacctaagttgg

SEQ ID NO: 59617 - DNA, 1163 bp, Homo sapiens
ttttttttttttgcatttcaatagaactagctttatttacttatttatttatttaaacaaaagaaatggtttaaaagcaaatgcatacatgtaccaagggatggacatgacctggtacttacaaaggagctgctgtgtcataatggaaacagcatattaggagaaaaatagtatttcgtgtgctgtctgcttgagtaatcaatctggagatgcaagttaaccgaaggtgctctgccaagccatcagcgtgagaaaaaaaaaccaccagaagttgcctccagataacgatgtagtggcagcatgataactggcatcaactcacggtcttctcattttccccattttctataattttcctcttcttttcatctatttttttcttgaagatgttatttcggtaaaactgaagctctttgatgctttcactaatgtcatcaagtgccctatgagaagcagccttctttggtgcaaattcatattcttctggataccagcgtctgcacagttctttaacagtgctcacatcaattattctataatgaagatgtttcatgaactggggcatgtatttgtcaagaaacttcttatcttcatgaactgaatttcctgcaagtggacagagccctggaggagtctgctgtcgtacaaaggacagaaattcatactctgcctgctgcaatgtaattgtactctccttcactgccttggtaaggccagacttcccgtgatgctccttacaccaatctgacatgctgtccagcaactcatctggttgttttataatcaggttaggaccttcagccaaaatgttgagatcagagtcagttatcagacaggccatctcaataatctggtccttctcaatgtccaatcctgtcatctccaggtccacccagaccatccgctgagccatgctctcccctgccgccatggctgcgccaccttcgcggacacctcgggccccgaaccgtccgtgactcccacctacaccccgcaacagcctggagcccagggagccgcctagcatcacccgggaccagcagccacggccccagtctcgcagccggcgctggcgcaggcgcaatagtcgctaaacgtcgcaaacccacggggaggcgcacgagcgaattccaccgcactgactagtgtctcgagttttcaat

SEQ ID NO: 59618 - DNA, 2935 bp, Homo sapiens
  misc_feature (1)...(2935): n = a,t,c or g
tttttttttttcaagaataacagttttaacaaaaatgctgtcagtaagcaaatgtaccttggagtgaagtacagaagatttttatgtttcataaattattcccaggggtttcagtttggcatacagcaaagatacagactggattctgagaacctcctcctgccccccaaatttcctggctttggcatagaaagggctacacagctcttccatcaagccctggcattttctactggtagagattgatttttctacagaagagctcagattttatctcactaaaaagacgtgcttgatttttaaattggaaatttacaaaaggagtgaaatgaagtgtgagtagtaaggtagtgggtgtctgtgtacatcctcatgcccaaccccagaagacattgaagcctgaggtatagcctctacccaggcattcctcaggtcctctgaaggaacttccgtcacacaagctgagaacttgctgaatttgaaaagcaatttgccctttggcatcatcatataaagagatttacctccagatgataataggtgaagacaaagacttacaggtggttgattgttgttggtttttaaagccaactgtgatcccatcaatgtatttctaaggaaaatgtaaactgttcatacattctcttaaacatcacagtgaaaagcaagtacccgtatgtgtgatagggcaggcagagggctccacctgctctgcccttggcaaaggcccttggctacactggtgaaaatgccagctcggcttctgcacggatacactatgttgtgccatccaactggagtgccggtggaccccaaaggcagggcagggcagggggagggggtattttgaaatgttttcaggagctctgtccagctgtctctgtcttccagcccggaactgctgcacaaagctacaaggacactgatgagaccatggatctgctgctgttctctagggaagacttggcttggagtgtggctgcctggattcgaaagtgtgtccttgactccatggagtaattcttgtagttttgcttggcagattccaaaagtttgatggcctcttcgtttctgtcttgctccataagcagcagggccagctccagcagggcgtttgggatcaagtagtggtcatatttaatcttcttttcattggcagagatgctcctaaaattctcctcggcctcctggacacggcccaggtatttcagacacaggcctttcaacaatttcaccaagcactcgtcatccactgagtactcgttctctgggcctttctccagcatctcttcagccttagtgataatctcaagtatcccatccgtgagtttcggctgcttcccaatcacggcgtagccgttccagatgtacatcatttccagagcaggcactggcagcgagatagggttggaggagaagtagcgccgggacttccggatggcaaacttctctgtgggtagagacttcccagcaatcttgagcttcaggcctggcacagctcgaaataattccacttcgtcgtccccgaacggcttgtggtcctccttcccaaacatgctgaggtaggcggccttcatgtaaatgtaggtggccttggaccagcagttctccttgctgagcaggtcggcgtagaagtaggacatcttccactggcccttgtaggtgaagcaccacatcagctcccagtagcacatgtggtggaactgcttccagtgctgctgggcctcacagcactcctcgaaacgccggatggctgcatcaatgttgcctttaatgacttcaatcctccctgcaaggaacaggaagatggcacccttagggtaccggttcaggtagggcttcaagagcttctcggcctcctcgatgttgacgttcccagtaccgagcacgaaggtgaggaaggtgtggtagcacagcaggagcatgacacagagcacagagcggaagctgtgccctgacgctccctcctccagctgcagcagcccatagtccttgtttcctgaaaaccccacaaactccaacagcctcaggatcctagtaggaagcatggacagtgtcaggttgaaggcccctacaccaagcttcactcctccttcaaagtgcgggtggttctcacccttgcagtattgtgaggactgaacaaggctgtccagctccttgtaggtctggtagctgtttcgaactttgatgccgcctttgatgaagctcaccatgttctcgtcctgcaggaaggtcagggctgctcgctgcagcaggcactttgcatagcagacctcagcgtggatttcctcttcagtgaattggcccagcgtggggcggttcaccaggctgctgaaggaatctgttacagaagacttcctccggtgcctctgacacagcatctgtgcctccttcatcatgttgccggcaagcaggatgtcctgagggtcaaaggtcatcatggcctgcatctccaggatggtggcatatgtcagtgagtggtacatgctttccttggttctgggcttgaggtagctgagtgcttctgagaactggttggtgaggaagaggtccagggcggtcatgcactggtccagggcctcatggaggctgctctcaggagtccccgcgggcagggntccctgggggtgccatcttcctgttctttgcagggaggattgaagtcattaaaggcacattgatgcagccatccggngtttcgaggagtgcttgtgaggccagcagnactggaagcagtccaccacatgttgctactgggagctgatgtggtgcttcacctacaagggccaagtggaagattgtctacttcttacggccgacctgctcaagaaaggagacttgttggtccaanggccacctacaatttacaatgaggccnncctacctcaagaatgtttggggaagggggggaccacaaggccngtnccggggagga

SEQ ID NO: 59619 - DNA, 1407 bp, Homo sapiens
  misc_feature (1)...(1407): n = a,t,c or g
tcggaaaaggcccactttgggggataatgctgagggacactatgaaatcttggaatgatagccagtcagatctgtgtagcactgaccaagaagaggaagaagagatgatttttggtgaaaatgaagatgatttggatgagatgatggatttaagtgatctgcctacctcactttttgcttgcagcgtccatgaagcagtgtttgaggcacgagagcagaaggaaagatttgaagcactcttcaccatctatgatgaccaggttacttttcagctgtttaaaagctttagaagagtcagaataaatttcagcaaacctgaagcggcagcaagagcgcgaatagaactccacgaaacagacttcaatgggcagaagctaaagctatattttgcacaggtgcagatgtccggcgaagtgcgggacaagtcctatctcctgccgccccagcctgtcaagcagttcctcatctcccctccagcctctcccccggtggggtggaagcagagcgaagatgcgatgcctgttataaattatgatttactctgtgctgtttccaaattgggaccaggagagaaatatgaacttcacgcgggaacagagtcgacacccagcgtggtggttcatgtctgtgaaagtgaaactgaagaggaagaagagacaaaaaaccccaaacagaaaattgcccagacaaggcgccccgaccctccgaccgcagcgttgaatgagccccagacctttgattgcgcgctgtgaggcccttggttgtggtgcgaggcggctgccctggtgggctctggccatggcgctctgtgcctgcggccgatgcgttgctgcgaacagcataggtgagactctgccgagtgaggtataggtcttctcaccacgcctgtactgcagacacggtcgtgtagagtagcagctgatttgacctgtcccagattttaagtgatattccaaaagggactttacattaaaggagaagcccccaagatgtggccacccttaaccatttttaaatagtaacaaattaggaaaacagctcccctcccctccagccatgtaagtcctcctgattctgtatcacatgagacaccaaaaactggaaatgtagtcacacccagtacagtaccatttttatgaatttaaaaatagtcttataattttaattgtttgtgggtatttttctactggtataaatagcttctaattaataaatcgatcaaaggttgttactcagtatacatgaaatttttttgcaggaaaagaaaccaggaaatacagaataattcatagaaatcatgggttctcaagtatttggttcaattaggctttggggggaaggaaatgcccaaatcccactttgtggggtgaggtctttacgggccacaggatcccaccccacnggttg

SEQ ID NO: 59620 - DNA, 857 bp, Homo sapiens
agctgtctccatttgctaaagctataaacagttcttgatctagtcaattgcaaaatacatggatggccagggcttctgtttaagcaaaagaagaaaaaatatcaatagcacaaaactgcccttatagtttttgaaaaaatatatctattaagataacaattttgatttttttaataagctgtgcattaaagtacactttgtttccatcactctccattactctagagctccgctttgtctgcctgggccgggctggcgaccccactgcctccctcggcggtgccactgctatccgcaggtgtaaaagacaaggcagccgaatttatgcagtatcttttcccagttggacgaggcccatcatcaaaaatgtgcccaaggtgagcaccacactgagagcagcttgtttccaccctgtgcatcccataggaaaagtcatctgtgaatgtgattgcctcagaattgatcacatcgtggaatgaaggccaacctgaaccggagtcaaatttggtttctgacttaaacaatggagttccacaaacaacacatttatatattccaggatctttgtgatgtgtgtattctccttcaaaggcactttcggtccctttctcctgagtgacatggtactgcaggggtgttagccgcttcctcagttcctgctgggaaaagaccaccttacagttctttttatccctacacgacccggactgcgcacttcccagagccgcggccaggcagaggcagaggcagagggagaggcagagcgagagggggcgcgggagggtccgccgcgggctcatggaaaggccaggcagccaccgccggtgtcagaacctcgctccctccctccccggctc

SEQ ID NO: 59621 - DNA, 5580 bp, Homo sapiens
gcggccgcgccgggggccgccgcgcccgccgcccgctgcctgcgccgccggccgggcatgagttagtcgcagacatggacaccaaacatttcctgccgctcgatttctccacccaggtgaactcctccctcacctccccgacggggcgaggctccatggctgccccctcgctgcacccgtccctggggcctggcatcggctccccgggacagctgcattctcccatcagcaccctgagctcccccatcaacggcatgggcccgcctttctcggtcatcagctcccccatgggcccccactccatgtcggtgcccaccacacccaccctgggcttcagcactggcagcccccagctcagctcacctatgaaccccgtcagcagcagcgaggacatcaagccccccctgggcctcaatggcgtcctcaaggtccccgcccacccctcaggaaacatggcttccttcaccaagcacatctgcgccatctgcggggaccgctcctcaggcaagcactatggagtgtacagctgcgaggggtgcaagggcttcttcaagcggacggtgcgcaaggacctgacctacacctgccgcgacaacaaggactgcctgattgacaagcggcagcggaaccggtgccagtactgccgctaccagaagtgcctggccatgggcatgaagcgggaagccgtgcaggaggagcggcagcgtggcaaggaccggaacgagaatgaggtggagtcgaccagcagcgccaacgaggacatgccggtggagaggatcctggaggctgagctggccgtggagcccaagaccgagacctacgtggaggcaaacatggggctgaaccccagctcgccgaacgaccctgtcaccaacatttgccaagcagccgacaaacagcttttcaccctggtggagtgggccaagcggatcccacacttctcagagctgcccctggacgaccaggtcatcctgctgcgggcaggctggaatgagctgctcatcgcctccttctcccaccgctccatcgccgtgaaggacgggatcctcctggccaccgggctgcacgtccaccggaacagcgcccacagcgcaggggtgggcgccatctttgacagggtgctgacggagcttgtgtccaagatgcgggacatgcagatggacaagacggagctgggctgcctgcgcgccatcgtcctctttaaccctgactccaaggggctctcgaacccggccgaggtggaggcgctgagggagaaggtctatgcgtccttggaggcctactgcaagcacaagtacccagagcagccgggaaggttcgctaagctcttgctccgcctgccggctctgcgctccatcgggctcaaatgcctggaacatctcttcttcttcaagctcatcggggacacacccattgacaccttccttatggagatgctggaggcgccgcaccaaatgacttaggcctgcgggcccatcctttgtgcccacccgttctggccaccctgcctggacgccagctgttcttctcagcctgagccctgtccctgcccttctctgcctggcctgtttggactttggggcacagcctgtcactgctctgcctaagagatgtgttgtcaccctccttatttctgttactacttgtctgtggcccagggcagtggctttcctgaggcagcagccttcgtggcaagaactagcgtgagcccagccaggcgcctccccaccgggctctcaggacaccctgccacaccccacggggcttgggcgactacagggtcttcgggccccagccctggagctgcaggagttgggaacggggcttttgtttccgttgctgtttatcgatgctggttttcagaattcctgtgtggccctcctgtctggagtgacatcttcatctgctctgaatactggtgcccagccagcccgtgacagcttccccctaatcaggaggggacagctgggggcgcaagctggtgtgtcatcagcaaagacctcagccgcctcggggatgagaggggactcgtggggcaagcaagctgccctgtgctctgagtgagggggaaggtagcccctttttccaaagataactcacagttttgccctcgagccaatgagaacatgagctgccctctgtgcaaggtttcggggccacctccaggctgcaggggcgggtcactcacccccctgttttctctctgccttggtgttctggtttcagactcccgactccccgttcagaccagagtgccccggcccctccccagcctgagtcttctccttgctctgcggggtgggctgagacttgtccttgtttcctgcagggctggccctggctcgggcagggtggggcatcaccacctcactggccttgctggaggcacagggctctgcggacctgcagccatctgtgaggcccgcggggatgggaggggaggagggtggcctgttggtttccctcagagggggcaggtggcctggagagagaggggctcaggaactgggagcctcgtgggtggggcagatgctccgcggcctggagtggctctgccggggcattggtgggacccctgctcaggccttctctctggctgccagttgtgtctaaaagactcttggaatctgagaacccggagtcgcagcgccctcgggcctgggccacacgcaggccctggatgggaccacccagcctggtattgtccacggacagcgttgttcacccagagccttacttgggagcctcactgaacgcctgctctggttgaaggtggggtgggggcggggcttggggcctccctggctcagcccagtgcggcctggcgctcctcccgcaggctctgcccccgggctccggtggtgcggggccctctcaggttgaactcgcctcttttgcactggaaggccctccctttggcctgagtacttttcccgttcacgcctcagtcccgtggacccagcctttgtcagtggcaggtgcctgaacagagggtggatgggggggataccggagggggtcttgtcttcccagccgcagtctaggaatgatgcgggggggtggacgccttctccatagtctttccccacctggagcaggggcttcctcagtggtgaggggagctgcctacaggttggaccgggaggcagtggcttggagaggcagctttccagccttggtggggaagaaagtgtccattctttgccttcctggagctcccagccagagctgagcttaggcacccgagtggagcctgcagctgagtctgtgcccgagacaggctgtcagagattccagaagcctctcctccccgccgccctccacccctgcctttcagcgttgtggatccctagaggtggccccctgcccgatccaccgtcctgaggcagagtgttgagcctcatacctgtaccaggtccccggccagctgggcccctcccaggcactgccaggaagccccagctgcccctggcgggtgtggtggaaatggcaggagggtgcaggtactcttggggccccagcggtgggagtgcaaaagacccaacgccaacacctggtgccttttgcagccagcgcccacccatccgtgcccggacccttgggaatgcccgcggctccagaggaaaaagcccagggacggggcctccgttgcggggggtcggctgcttcttgggaactttgtcgtttccggcgctggctggctggctggctgtaaagcactgaagccccccggccgccaacccctgaaagcagaacctggcctccctggccacagcagccttacccaccgctctacgtgtcccgggcacttcccgcagccttcccgtccctttctcatcggccttgtagttgtacagtgctgttggtttgaaaaggtgatgtgtggggagtgcggctcatcactgagtagagaggtagaatttctatttaaccagacctgtagtagtattaccaatccagttcaattaaggtgattttttgtaattattattattttggtgggacaatctttaattttctaaagatagcactaacatcagctcattagccacctgtgcctgtccccgccttggcccggctggatgaagcggcttccccgcagggcccccacttcccagtggctgcttcctggggacccagggcaccccggcaccttcaggcacgctcctcagctggtcacctcccggctttgccgttcagatggggctcctgaggctcaggagtgaagatgccacagagccgggctcccctaggctgcgtcgggcatgcttggaagctggcctgccaggaccttccaccctggggcctgtgtcagccgccggccctccgcaccctggaagcacacggcctctgggaaggacagccctgaccttcggttttccgagcacggtgtttcccaagaattctgggctggcggcctggtggcagtgctggagatgaccccgagcccctccccgtggggcacccaggagggccctgccggaatgtgcagcctgtgggtagtcggctggtgtccctgtcgtggagctggggtgcgtgatctggtgctcgtccacgcaggtgtgtggtgtaaacatgtatgtgctgtacagagagacgcgtgtggagagagccgcacaccagcgccacccaggaaaggcggagcggttaccagtgttttgtgtttatttttaatcaagacgtttcccctgttttcctataaatttgcttcgtgtaagcaagtacataaggaccctcctttggtgaaatccgggttcgaatgaatatctcaaggcaggagatgcatctattttaagatgctttggagcagacagctttagccgttcccaatccttagcaatgccttagctgggacgcatagctaatactttagagaggatgacagatccataaagagagtaaagataagagaaaatgtctaaagcatctggaaaggtaaaaaaaaaactgccttttttgtacaaatgtaattttatccctcatgtatacttggatatggcggggggagggctgggactgtttcgtttctgcttctagagattgaggtgaaagcttcgtccgagaaacgccaggacagacgatggcagaggagagggctcctgtgacggtggcgaggcttgggaggaaaccgccgcaatgggggtgtcttccctcggggcaggagggtgggcctgaggctttcaagggttttcttccctttcgagtaatttttaaagccttgctctgttgtgtcctgttgccggctctggccttcctgtgactgactgtgaagtggcttctccgtacgattgtctctgaaacatcgtggccgcaggtgccagggtttgatggacagtagcattagaattgtggaaaaggaacacgcaaagggagaagtgtgagaggagaaacaaaatatgagcgtttaaaatacatcgccattcagttcgtttgttccgtgtggggacttttttgtttggagcgggagggcccgcgatcagcccccaccagcccaccctcctgtccaccctacctgccggtcctgtgcggcgaggctggcatcctctgtgggccatactcttgagagttctctccctgtcc

SEQ ID NO: 59622 - DNA, 1041 bp, Homo sapiens
ttttttttttttcaacttcccaggatggtttattccaaagctgtggacggtgaacattaagacgaaagaggtgactcgcgtggaacctgaaacacggacgcctttcttccaagaagggctgtggcgatcaggccactcaaggcagccagcccctcagcagggcacgatggctaatgctgcctggaccgcagggactttttgttcgatttcaagacaccagactccctctccttctcagggtcgaagacttttgggatctcgtggggccagtagtcgttgcagtgggggcagcgcggttcagcattcgactggaagtacttggccacgcagggtaagtgcatcctgatcccacaggtttcgcagctttgaccctggatgaggaggctgtgacagatattgcagatcttcaccgcgtcggggtacgtctcccggatgtattgctccatctccaggatggcccggccgtgcagggtgaactccccttccttctcaatcagccacttgttttgaacaaacttctgcagcacctgctccgcttccttcttcctcatcttcttgcctttaagttgatcaaccaggttcaatatgtttgtggaagacgcaaagccggtttctgagtcaataatcagttccagagcctttctaaacaaatccagttcattctctgcaaaatccgtagccattttggaaattgaagttgtagcaagattcaccaacgcataaatgggtctcccatcatcttccgtgactcctctctttatctcaatatacaaggactccaagacactgttaatgttgttgatgaagtcctccaacttatctacggtggcattgcggtcatggaccttgtagcagtgcgtctgcaagcgcttcacgtcccattcctctagcacgccatgggtcatcagcaactggaggaagcgccggtggacatcagtcatgacgcccattctccttgtgctgccctgcatgtgggaacgaacagggagcccaagcgcatcccaggccgcgctagcggatacggtcgcaaggtggactctt

SEQ ID NO: 59623 - DNA, 1101 bp, Homo sapiens
tttgatgacattcgtccgtgcggtggaattcgtggcggatggagcccgcgatggagccggagactctggaggcgcgaatcaatagagccacgaaccccctgaacaaggagctcgactgggccagcatcaacggcttctgcgagcagctcaacgaggactttgaggggcctccactcgccacccggctgctggcccacaagatccagtccccacaggagtgggaggcgatccaggccttgacggtgagaaggggagaggccaccatccgtcccccgccatgtgacgacaccaagggaggccaagactgaggttcttggggtccataaggctcttcagagcccaagagagttgtgctaagatggcccaggatggaggtccgggcctgccccaagggtcccaccacagccagcgggctggcctcccaccccagcatccatacacgtaggcctgttgctgagggaaggccctctagggtcatctggtccaggggttctttgcttcagctgcacatcggctgcctctccaggaagcgtgttcaacacatggaatcagggctccacccagacctgccgaggccacactcctggagtatctgcatccagagatctgcacgtttgtaaagctaaggggtggtgcttgggctcaggcctgaggttttgcatctgttcaatagcagaggagagaggggtgtactgtctgtggcccccagcatgggccacataccaacccaccatggagcaaagctgattttaagtggtggtagagatacagtttctcttttaatacttacgtgtttagttgggtgcagtggcttatacctgtaatttcagcacttggggaggccaaggcaggaggcttgcttgaggcaaggagttcaaggctacagtgagctatgattgtgccactgtactccagactggacaacagagtgagaccccatctctaaataataatcattattgttacatatttgttttaacatttttttctcaagtataactagtcctatgatttcatagatgtagcttaggataaggccaaggtagatgttgcctatataaggtttttttaaaaaaggaaaaataggccgggctggtggct

SEQ ID NO: 59624 - DNA, 2051 bp, Homo sapiens
cctccaaggcatttatgagctcctgagtgtcacggggccaggggaaggctggagccaaaaccaagtttttgggggcgggggtcctttttggatccccactcctgagtgtcacggggccaggggaaggctggagccaaaaccaagtctctgggggcgggggtcctctctggatccccactactcagctccccgggctccccatgcagccctagagacgggagaagtccagtgtgccgttccacctccctccaagtcccaagaaagtgggaggcagtgttccactccagtgtcgtccagacgaacaagtccaaccagtctggaaccctaggccggcgtggtcaggtcgggggcgggagggccgggcctggctctgtctctgtctgtgtccaggtcacacataaactgcccgccgtgagatgagggagccgtccagctgggactccatgtcatcctcgagtgctgggggtggaggcaacatgaggcctttctctgccttctcttcctcctcctcctcctcctcatccttgccatctggttccatgggaccagggactactggtgtccagaagacggggtccccatttcccaacacctgagctttcggatcgtagaatcccccgtcgccactggctcctcctcctgctcctccagggctcttcctcctcctcctcaccctcagcaggatgaaggccaaggaccccccagccagaagcagcagcaccagcagtgtcccccccacggccccccacaccagcgggcccacatctcggggcgaggccctgggggtttctcggacaaagatgacctgctcagcgcggcccatgcccacggcattggtgactgtgcagacgaaggtggtattgaacagactgtccactgcgtggatgaccagctgggagccctgggccactgcggaggtcgggaaggtgcctgaggtcgtgctccagtcatagcccgtgggctctgggttgctgcggacgtcacagctcagggtggcatcagtacggccgaggtaccagttgtcatcatagccggagatggacacttcaggagggtagcgtacagagagggtcacaggtatcagggctggttcctcgaagctctcatgctccactttgcaggtgaccgtgacaccatctgctcggcccgagggcaccaaggtgaagcggctggtgacagtgacagttccggccagggtccctgacacctgagtctctttggcttcccagtccagggatgagagccaggagatccgggcaggtgggcggccctctttggagatgcagagggccactgtcgtagggtcctggctgaacgtgaccttctgggcctcagcttggttcttgggcttggctatgactctgagccaggtcatccctcggacggaccccttggggaaggtggcaaactcgcaagtgtagttgccctcgtcctccaccgtgagcccgtggagggccagcgtggcgtcctggagctctgcctctgtgtcttgcccagtgctctgcttggcagagacgaaggacagccgctcgctgccaggcttcgggctggggaagctgggacccatcttagggtggaaggcggccacattctggtggttcgcaggtgcatctgggcgctgccaggtcaccagggagatgtacagtccaggaacaggtggcagcaggtggcacggcagctccacggtgcccccgagctggcctcgcacctcgggtagcacttgaactcgcacatcctgggctccggtttccaggagcagcagcagcagcagcggccacagcagcggcgtcggcggcgatctcgacggcaggagggcagcggcccgggccatggagggcccgggaggggactgggcccggccggaggcccgcgggccactctgtgggggccgatcggctgggcggtttagtaggtgcctgtggggctccggctccggctccgggccggttcccgctgcgctctagcctccctgttctgctctcccggcccagctctccccgcccggctcggcacccccggcctctcgctcagctccggcggttcgctcgtgc

SEQ ID NO: 59625 - DNA, 992 bp, Homo sapiens
  misc_feature (1)...(992): n = a,t,c or g
gcggccccaatcgagatcgatatccatgtggaggaattccctcctgcaggtgtcctcgggtctcaggtggctgcgtgtctgcgccatggttgacattctgggcgagcggcacctggtgacctgtaagggcgcgacggtggaggccgaggcggcgctgcagaacaaggtggtggcactgtacttcgcggcggcccggtgcgcgccgagccgcgacttcacgccgctgctctgcgacttctatacggcgctggtggccgaggcgcggcggcccgcgcccttcgaagtggtcttcgtgtcagccgacggcagctcccaggagatgctggacttcatgcgcgagctgcatggcgcctggctggcgctgcccttccacgacccctaccggcatgagctgaggaagaggtacaacgtcacagccatccccaagcttgtgattgtgaaacaaaatggggaggtcatcaccaacaaagggcggaagcagatccgggaacgggggttggcctgcttccaggactgggtggaggcggccgatatcttccagaatttctccgtttgaagtgggagggacctcagagggccaggacaggtgctgcttctccagcaccgacgctggggcaaagaggagcatgttgggttccttcctctgttggtgtgatttcattgtatttcagagcagaagcactaagctgtggtcaaaaagcaactattgctcaggaaataatacactccatattttgatcatgcaggctgtttgtattatagttatttttgttattctttgcatacctttatccacctgtgcttaaggaaggatcctcatatgttcatactgagctgttggaaatctatgcaagacatttatttgtacaagtctcttcaggtaaaataatatatttattgataacattttctggcgatctgtttattttaatggtatgctttcacaactatcttaataaagtttgcaagctgtgtactttanaaaaaaaaaa

SEQ ID NO: 59626 - DNA, 1437 bp, Homo sapiens
ttggtcaacaaggcggttgtgacccactacgggtttccccgtcaccaattttccctggaattggccagatggcaagccacccataatgatactatatgtgtccaagctaaacaaaatcattcacttccctgattttgataagaaaattcctgtaaagctgtttcctctgcctctcctctacgttggaaaccacataagtggattatcaagcacaagtaaattaagcctaccgatgttcaccgtgctcaggaaattcaccattccacttaccttacttctggaaaccatcatacttgggaagcagtattcactcaacatcatcctcagtgtctttgccattattctcggggctttcatagcagctgggtctgaccttgcttttaacttagaaggctatatttttgtattcctgaatgatatcttcacagcagcaaatggagtttataccaaacagaaaatggacccaaaggagctagggaaatacggagtacttttctacaatgcctgcttcatgattatcccaactcttattattagtgtctccactggagacctgcaacaggctactgaattcaaccaatggaagaatgttgtgtttatcctacagtttcttctttcctgttttttggggtttctgctgatgtactccacggttctgtgcagctattacaattcagccctgacgacagcagtggttggagccatcaagaatgtatccgttgcctacattgggatattaatcggtggagactacattttctctttgttaaactttgtagggttaaatatttgcatggcagggggcttgagatattcctttttaacactgagcagccagttaaaacctaaacctgtgggtgaagaaaacatctgtttggatttgaagagctaaagagtctgcagcaggattggagactgacttgtgactgcgggctgggggggcattcccagtaggaatgtgaagccagaggtttcggattcgtgacatccaccccctgggcaagtgagagcatctgcaaaatgcaaagagaactacctcatatgcaggatgagccaatggcagtctcaagaaatgtactcgggcgacaccttacctgtggaaagcaaatcttttcaaaataagccactgggactcggtaggtggagccccagctgctcttctagggacctatggggccttcgtggcatctctgtgctgtgtgctggggaggaggttgatgtaatggtgactcttttctgatcagcaccttggccgtgattcccaaggtcccagccaaagcaaagggccagttgtttcagtttaaacagacatgtctttagtctaataaaattagttaactgccagtaaagttatttgttagctttgatgaaagctatgttggtatctttccctaatcatcaaagtaaataaaaaatcatttctaaaaaaaaaaaaaa

SEQ ID NO: 59627 - DNA, 2048 bp, Homo sapiens
gggagctggacgagtccgagcgcgtcacctcctcacgctgcggctgtcgccgtgtcccgccggcccgttccgtgtcgccccgcagtgctgcggccgccgcggcaccatggctgtgtttgtcgtgctcctggcgttggtggcgggtgttttggggaacgagtttagtatattaaaatcaccagggtctgttgttttccgaaatggaaattggcctataccaggagagcggatcccagacgtggctgcattgtccatgggcttctctgtgaaagaagacctttcttggccaggactcgcagtgggtaacctgtttcatcgtcctcgggctaccgtcatggtgatggtgaagggagtgaacaaactggctctacccccaggcagtgtcatttcgtaccctttggagaatgcagttccttttagtcttgacagtgttgcaaattccattcactccttattttctgaggaaactcctgttgttttgcagttggctcccagtgaggaaagagtgtatatggtagggaaggcaaactcagtgtttgaagacctttcagtcaccttgcgccagctccgtaatcgcctgtttcaagaaaactctgttctcagttcactccccctcaattctctgagtaggaacaatgaagttgacctgctctttctttctgaactgcaagtgctacatgatatttcaagcttgctgtctcgtcataagcatctagccaaggatcattctcctgatttatattcactggagctggcaggtttggatgaaattgggaagcgttatggggaagactctgaacaattcagagatgcttctaagatccttgttgacgctctgcaaaagtttgcagatgacatgtacagtctttatggtgggaatgcagtggtagagttagtcactgtcaagtcatttgacacctccctcattaggaagacaaggactatccttgaggcaaaacaagcgaagaacccagcaagtccctataaccttgcatataagtataattttgaatattccgtggttttcaacatggtactttggataatgatcgccttggccttggctgtgattatcacctcttacaatatttggaacatggatcctggatatgatagcatcatttataggatgacaaaccagaagattcgaatggattgaatgttacctgtgccagaattagaaaagggggttggaaattggctgttttgttaaaatatatcttttagtgtgctttaaagtagatagtatactttacatttataaaaaaaaatcaaattttgttctttattttgtgtgtgcctgtgatgtttttctagagtgaattatagtattgacgtgaatcccactgtggtatagattccataatatgcttgaatattatgatatagccatttaataacattgatttcattctgtttaatgaatttggaaatatgcactgaaagaaatgtaaaacatttagaatagctcgtgttatggaaaaaagtgcactgaatttattagacaaacttacgaatgcttaacttctttacacagcataggtgaaaatcatatttgggctattgtatactatgaacaatttgtaaatgtcttaatttgatgtaaataactctgaaacaagagaaaaggtttttaacttagagtagccctaaaatatggatgtgcttatataatcgcttagttttggaactgtatctgagtaacagaggacagctgttttttaaccctcttctgcaagtttgttgacctacatgggctaatatggatactaaaaatactacattgatctaagaagaaactagccttgtggagtatatagatgcttttcattatacacacaaaaatccctgagggacattttgaggcatgaatataaaacatttttatttcagtaacttttccccctgtgtaagttactatggtttgtggtacaacttcattctatagaatattaagtggaagtgggtgaattctactttttatgttggagtggaccaatgtctatcaagagtgacaaataaagttaatgatgattccaaaaaaaaaa

SEQ ID NO: 59628 - DNA, 1870 bp, Homo sapiens
tcgatacgacttttttttttttttttttttttccggtaggtcgccagctgaggcggtttgtaagttttgggtcgcagtatgctagaattttgaggctcccttctgatgaaaattgagctgtccatgcagccatggaacccgggttacagcagtgagggggccacggctcaaggctggagtgcagtggcatgatcttggctcactacaacctccaccttctgggctcaagcagtcctcccacctgagcctctcaagtagctgggacttcaggcacgcaccaacacacccagaaacttacacatgtccaaaaatgattgagatggagcaggcggaggcccagcttgctgagttagacctgctagccagtatgttccctggtgagaatgagctcatagtgaatgaccagctggctgtagcagaactgaaagattgtattgaaaagaagacaatggaggggcgatcttcaaaagtctactttactatcaatatgaacctggatgtatctgacgaaaaaatggcgatgttttctctggcctgtattcttccctttaaatacccggcagttctgcctgaaattactgtcagatcagtattattgagtagatcccagcagactcagctgaacacagatctgactgcattcctgcaaaaacattgtcatggagatgtttgtatactgaatgccacagagtgggttagagaacacgcctctggctatgtcagcagagatacttcatcttcacccaccacaggaagcacagtccagtcagttgacctcatcttcacgagactctggatctacagccatcatatctataacaaatgcaaaagaaagaatattctagagtgggcaaaggagctttccctgtctgggtttagcatgcctggaaaacctggtgttgtttgtgtggaaggcccacaaagtgcctgtgaagaattctggtcaagactcagaaaattaaactggaagagaattttaattcgccatcgagaagacattccttttgatggtacaaatgatgaaacggaaagacaaaggaaattttccatttttgaagaaaaagtgttcagtgttaatggagccaggggaaaccacatggactttggtcagctctatcagttcttaaacaccaaaggatgtggggatgttttccagatgttcctttgggtgtagaaggacaatgacatcaagagtagttgaaaagtatcttgccactgttggccttttgatttttttttcccactttttcttgaaagattaagtaattttattttagttccattctagaatgttggggagtggggcacaagaaaaaatagtaaaaatgaaatgcatctgttaaaaatgtcatggattgaaagcagaactggagtttcaaattacaaccttaaaattgttgttagatatttccttcacattaccagctgccccattttgaaaaagaaattatcccataaaggtaatgttggtgctccaaatttgcccagcccattccccaaccccccttctccccttacctgcccttcacctaaagaaccccagaaaagctaattgctccccctttcagcctctgttgcaactaacaactctcagtggcctcaggacacagctttggccttggggaattctgggaaaacttttacttcctgattaaagatacatatgcagttaggccacctcctcccccccttactgccataaacaccaaagtgatgactggagctggaggagttatttgaaccacgacggaagggccaagagaaccacgaagatgccagttgccacattgttgagctgctgacccaacaccagccattgcctgtctctaaacatcttatgaaataaaaccagttttgtttaaaaaaaaaa

SEQ ID NO: 59629 - DNA, 5449 bp, Homo sapiens
  misc_feature (1)...(5449): n = a,t,c or g
aggaaccaagcccccaacatggccggcccggcggaggagcggatggctgaggaaggaggcggcggccaaggcgacggcggttcctctttggcctccggctctacccagcgacagcctccaccgcccgcgccacagcacccgcagccggggtcccaggcgctcccagcccccgcgctggctccggaccagctgcctcaaaacaacacgcttgtggcgctgcccatcgtagccatcgagaacatcctcagctttatgtcctacgacgaaattagccagctccgcctggtttgtaaaagaatggacttggtctgccagagaatgttgaatcagggatttctgaaagtggagaggtaccataatctatgtcagaaacaagttaaagcacaactcccaaggagagagtcagaaaggagaaaccattcattagctcgtcatgcagacattcttgctgctgttgaaacaaggctgtcactattaaatatgactttcatgaaatatgtggattccaatctctgttgcttcatcccaggaaaggtgattgatgagatttatcgtgtgttgagatatgtcaattctaccagagcccctcaacgagctcatgaagtacttcaagaattaagggatatatcctctatggcaatggagtactttgatgaaaagattgttccaattttaaagaggaaattaccaggatcagatgtttctggaagactcatgggctctcctccagttccaggaccgtctgcagccctaacaacaatgcagctcttctccaagcaaaatccttcaagacaagaggttaccaaactccagcagcaggttaaaacaaatggtgctggcgtgactgttctcaggcgtgaaatttctgagcttcgcaccaaagtgcaagaacagcaaaaacagcttcaagaccaggaccagaaactgctagagcagacccagatcataggtgaacaaaatgcacggttggcagagctagaacgcaaactacgagaagtaatggaaagtgctgtaggaaattcctcagggtccgggcagaatgaggagtctcctcggaaacgaaaaaaggccacggaagccatagactctcttaggaaatctaaacgtcttcggaatagaaagtaaattggaatgtggttctagttccagaggaagacacagcttagtagcttaagcagttatgcatatcaggatactgtgagcaacatggtgtcccttaagcttctaggctttcagaacacaacttaaacttgaactcttatggttgggacattcttttcctgcttctcctgattgaactgatgcacagaatctttttactttgcaatagatttgtactaaccagacctgttctatcatgttttgaggagttaacttttttctgtgcagataatggttggaaagtaaagttaatttgtttctgcatatatgcacatacatacgtaaggatcttaaacccagtcttgacagactagaagttaagtttaatacagaaaatgtcctgttcacttgaaagaaaagacctactttttaaatggacactatcttggttcttttttttttaagtcatctttttgttataagtgacctttgtctggaatgtctgaaaagtagttaatgctttttggtattgaagtaatgggtaactaaaatggacttccatagtattgactgtagaaggagcctctacaatattgactatatatttttataaactactggcaaggaacttacccagctgttatacatgttttcagttctctttgggggccatgtcctacatttgcatggatggatgcatgcattgcctagtcaactcacttaaaaagctcttgcactggtattgatcttgaacctctatacttctccactttttagagcggcgtcttagtttatttaaacgcttaacatcttccaccgcaacagcttgcctctagagggggaattgttcatccatttgtcctccagttttataggaacaagagactattaaagcccattgctttatctgctctctgtagggttcaggtacactggctaaggcagaaccccaaatttcaaggctctttctatcaatattggacctctgggagctaatactcctctttgctcaccaccatgtgatcattgatcagatgtggtgagtgagtaggggactcgacttgcgggatgcagttttgccattgcagcaaagttcattgaggaaaattgtaccatgaaaaagcattttgattatttcatttctggaggatgaccttgagggaagctttttaatattagtttcaagctttccttaccctacaactttaaacaaaagctttaattttgtttgcactcctattttgagcttgtaactggaaaagcatgtcttgcactgttcaacctcctgagtggtcgctttaacaacctccaaattgtgtacagtggttattttccccagttgtatagttttgagacattcaattatcactgtcttagttgtattttaatttactaaattatgtagctatttgactgttaagttcttttaaacaactgtttccttgggcttcagttatttaaagtaaatttaggtgtaatatagaaaactgtccctttccaggtgggagcttaacacctgtataaaacctaaggttttggtaagtaccttagttgaataaaagcacaaggttatcaccttttttatccgtccaccgtgacatggttatgcatcctttagattaacctcaccaaatgaagctttttctatccatttttaatattggccttacataatattgtccttagattttgatcaattctatgtctgactttgaaattccatttacaatgtagtatgttttcaatgaaaaaccataaagtaacatccaagtgtttcatggtttgttgggaaggtaattttaaaataaaacaatttccaaaaaacatttgtcagccaagatcatccataaaagtccccgtctggaactcattttctcagcacttctcatttttataatcatagtatttagccatattagcatatctttagaggaggcctggtggaatacccggggcctctactagtctgtttttccggtcataggaagacttttttttttacgtatcaaagtatgtgtttacagatttacagagtgtgatccgtatgcatcaaagggatacagccccagactgtttctttaatggtcattcatgaactattaaaaatttcctgaatttctttttaaactacatctagatagcctaaacatctatgtagtcttccattagttaacatgtgtatagggctttcataataagtagtcacactgttacaaggtaaattttctattacaaaatccaaatttctattgcatacacttataatcatctattcataaagctaattcattgtacttgttaatgcatgaatgttccatgcagtaggagaataaagcactacagttcggttgttcaaatcttaaatcttaggctatttagctaaaacatgttaggatattgccttcaccacttgttaggacagttatttgatagccattatgcttacctatggatagcataatggtatttaaggttcaacaaaccgcagattattatcatcagctagaactgacatatgttacaagaaaactgtaaattaacctcctgagagaaccattctgccctgcattttaagtcaggtatttaaatactgcgtgttgttaatattgcgttgtcttagtgcaacatttcttaaagtattcccgttatcttccttggctgtttttcagaggagacgtctccatgttaatgggtccttcccacatagaaatgtattctggtacagcgctgcacacatggatagcaatgtgaaaaggcatgcctaagagacagaaacggctgaccttaccccaccccagccggatcctctgcttatctcccacatgcacttggcttaactggttttcacagattctgaggttatagaacctgttgtttttcaaactcctgtacagagcctggaaataatggagcaaacgcaaatgtattgagagtcattatactttaaaatagttttaaagactattggggtaccatcaggtcaaaagccactgatttgggaagcaatttttttgcaaaacactttttttggagtactgaactttacaggggcttgccttaatctctatttagtagtttcaagatgtatgcgcaattattctacgtgttaaaaatgttaaaatattctatgtagccccaaaggtgggtaaaacagtataagtaatgcctaaattaataagctaaaaggtgtcactacagctggatttttgagagaaaatggacataaaactaggctatgtgtaataaaaataatggcaccttaagattgcactattttacgcattattttatatgccatttcatagcctgcactttaatctccaaagaaacgatgtatgatgtcccacttgttccttattcttaataaactttttcctgagacagggcacttaattctattttactgtactgaattagtttcttggaggtagattcatttcttgagttctctgtttccttagccataatattttctaggatccgggaactccctgtattgtctatttccaacattatataattttaatttaatgtaatgtaaatctcatacttggtgatcagcacattcttatatcctgctctagcaatgagtacccatttgttacacttaccaaactctctaaaaacatatactgtgagtaagatttgaagccaggaataaaaggcagtctgaaagaaaacgtcctatacgatgcagttgtttggaaatggctgatttctgatatgaaacccaacttgatacactgtttggttctttgacttgggatctatctgaattgctttcactagtacacaaaaggttaagttaaaactactttaaacttgtatagcctgccatctgaggtgaattattttcaaaaaatactaaatctatgaactgagactagcaattagttggctgctccctaccatgattttacttttaatagcaatacagttatattggtgataaatatggaccnggcttaagtactgcctgtccttttgcatcttcctaaagcatcttggttaaatttcctgaagtttaaaaatttagatccagatttccttcctgttgtgtcctgaagagaacccatgacatttagaagtatattggtaatctattaggtccattggcaaagtatattggtccatattcaaacctattccaaaaggttagaagtgtttaagattcctttattgtggtaccatgtctgtttacctatgcttatgagcaacaataaattactagtttaccttctggaattttaattgttataaccgaatcaattattggaaagtgaaaaacacctcccggtcacacaacagggtacgtaaataaatgtgttgttaccagtgaaaaaaaaaa

SEQ ID NO: 59630 - DNA, 1265 bp, Homo sapiens
ccttttttttttttttacctaataaaaatctttatttttttattaaaaaagaagtactttggtagctatttaaataagaggggggtgggaatgaatgtcgagatacgagcacctgcatcttttagtcaattgtcagtggagtcagtggggtgctaagtgttctgaactgaagtaggtgcactaaggttccaagctccctgcaaggatctggacgggaggaaagcagaggccttgaagggaaaaaagcctgcttcccaatacttattttttattactgtacaaaaagcacactctccctctttttgtctctcccaccaacggcacccccccacccccaacccaagaggactatacatggagtgcagggacagagtgaccaggaggcctttgtccggcaccctgcccacaggctgagctcagccccaggccctttcaggcatctagacactcccatagcctgtcaggctggggcaaggagatcccaggtcacacatactccttggaagagttggacttagggtaagagcggggtacacggtacccagccttgctctcattcccaggacaggaacaggagagcagtgcacctcccaggatgactagggcagaccctgcccagccaataaagatggcagggccaaactcatacttaatgttggtagggatcaaagggttataaaagtctgtgacaatctgatggccataccaggagcaagctaccaaggcggcaagacctgccacgatgaaaattatgcctccacccatggctatacgggccttcttcactttgtcgtctcccccacagcgcgtgcacttcatgcccatcgtggccacaaacatggccaggaagcccagcaccagggagaccaccattagggctcgagtggcctgcaaggccgctgcgggcgaggggaaagggcgccgtcattgctggaaatgcaggcggctccagccttcgtgccgccggccgcgcccactaaccgctggacctcttctgtccggcgccgtgttctgccgagggccaggggcgcccaggtgtccaagacctgggccaagcgggcaggtccccgcccctcccgacagcgcggccttcctgctcccgccccgccctctccgctcaaggatccgcccggggcgccggggtttcggtgaaactgtcctggatagggggaagggtgaaagggtgcagcgaagagaagccgagccggtggtccgaagccccgcgcggcgcacatgccagccggcgtccctgctctgagcccgct

SEQ ID NO: 59631 - DNA, 1470 bp, Homo sapiens
cgcccgggcaggtgagaaattggagaagataaaactggacactggggagaccacaacttcatgctgcgtgggatctcccagctacctgcagtggccaccatgtcttgggtcctgctgcctgtactttggctcattgttcaaactcaagcaatagccataaagcaaacacctgaattaacgctccatgaaatagtttgtcctaaaaaacttcacattttacacaaaagagagatcaagaacaaccagacagaaaagcatggcaaagaggaaaggtatgaacctgaagttcaatatcagatgatcttaaatggagaagaaatcattctctccctacaaaaaaccaagcacctcctggggccagactacactgaaacattgtactcacccagaggagaggaaattaccacgaaacctgagaacatggaacactgttactataaaggaaacatcctaaatgaaaagaattctgttgccagcatcagtacttgtgacgggttgagaggatacttcacacatcatcaccaaagataccagataaaacctctgaaaagcacagacgagaaagaacatgccgtctttacatctaaccaggaggaacaagacccagctaaccacacatgtggtgtgaagagcactgacgggaaacaaggcccaattcgaatctctagatcactcaaaagcccagagaaagaagactttcttcgggcacagaaatacattgatctctatttggtgctggataatgccttttataagaactataatgagaatctaactctgataagaagctttgtgtttgatgtgatgaacctactcaatgtgatatataacaccatagatgttcaagtggccttggtaggtatggaaatctggtctgatggggataagataaaggtggtgcccagcgcaagcaccacgtttgacaacttcctgagatggcacagttctaacctggggaaaaagatccacgaccatgctcagcttctcagcgggattagcttcaacaatcgacgtgtgggactggcagcttcaaattccttgtgttccccatcttcggttgctgttattgaggctaaaaaaaagaataatgtggctcttgtaggagtgatgtcacatgagctgggccatgtccttggtatgcctgatgttccattcaacaccaagtgtccctctggcagttgtgtgatgaatcagtatctgagttcaaaattcccaaaggatttcagtacatcttgccgtgcacattttgaaagataccttttatctcagaaaccaaagtgcctgctgcaagcacctattcctacaaatataatgacaacaccagtgtgtgggaaccaccttctagaagtgggagaagactgtgattgtggctctcctaaggagtgtaccaatctctgctgtgaagccctaacgtgtaaactgaagcctggaactgattgcggaggagatgctccaaaccataccacagag

SEQ ID NO: 59632 - DNA, 572 bp, Homo sapiens
tcagccggacaccagaagacaagcagagagactcctccagacccactcagaccacgtgcacgccctccaagatggtatcccgtaaggctgtggctgctctgctggtggtgcatgtagctgccatgctggcctcccagacggaagccttcgtccccatcttcacctatggcgaactccagaggatgcaggaaaaggaacggaataaagggcaaaagaaatccctgagtgtatggcagaggtctggggaggaaggtcctgtagaccctgcggagcccatcagggaagaagaaaacgaaatgatcaagctgactgctcctctggaaattggaatgaggatgaactccagacagctggaaaagtacccggccaccctggaagggctgctgagtgagatgcttccccagcatgcagccaagtgatggccacgctggggagaaggtggacagatttgggaggcccctcctgcccaagtgaggccctgggaatttacagagcctgccagctgggcttggaaggaaaacaccctttccaaagcaaattcccctccagcaaataaagcatgaaatatacag

SEQ ID NO: 59633 - DNA, 5271 bp, Homo sapiens
agatcttggaacgagacgacctgctctctctcccagaacgtgtctctgctgcaaggcaccgggccctttcgctctgcagaactgcacttgcaagaccattatcaactcctaatcccagctcagaaagggagcctctgcgactcattcatcgccctccaggactgactgcattgcacagatgatggatatttacgtatgtttgaaacgaccatcctggatggtggacaataaaagaatgaggactgcttcaaatttccagtggctgttatcaacatttattcttctatatctaatgaatcaagtaaatagccagaaaaagggggctcctcatgatttgaagtgtgtaactaacaatttgcaagtgtggaactgttcttggaaagcaccctctggaacaggccgtggtactgattatgaagtttgcattgaaaacaggtcccgttcttgttatcagttggagaaaaccagtattaaaattccagctctttcacatggtgattatgaaataacaataaattctctacatgattttggaagttctacaagtaaattcacactaaatgaacaaaacgtttccttaattccagatactccagagatcttgaatttgtctgctgatttctcaacctctacattatacctaaagtggaacgacaggggttcagtttttccacaccgctcaaatgttatctgggaaattaaagttctacgtaaagagagtatggagctcgtaaaattagtgacccacaacacaactctgaatggcaaagatacacttcatcactggagttgggcctcagatatgcccttggaatgtgccattcattttgtggaaattagatgctacattgacaatcttcatttttctggtctcgaagagtggagtgactggagccctgtgaagaacatttcttggatacctgattctcagactaaggtttttcctcaagataaagtgatacttgtaggctcagacataacattttgttgtgtgagtcaagaaaaagtgttatcagcactgattggccatacaaactgccccttgatccatcttgatggggaaaatgttgcaatcaagattcgtaatatttctgtttctgcaagtagtggaacaaatgtagtttttacaaccgaagataacatatttggaaccgttatttttgctggatatccaccagatactcctcaacaactgaattgtgagacacatgatttaaaagaaattatatgtagttggaatccaggaagggtgacagcgttggtgggcccacgtgctacaagctacactttagttgaaagtttttcaggaaaatatgttagacttaaaagagctgaagcacctacaaacgaaagctatcaattattatttcaaatgcttccaaatcaagaaatatataattttactttgaatgctcacaatccgctgggtcgatcacaatcaacaattttagttaatataactgaaaaagtttatccccatactcctacttcattcaaagtgaaggatattaattcaacagctgttaaactttcttggcatttaccaggcaactttgcaaagattaattttttatgtgaaattgaaattaagaaatctaattcagtacaagagcagcggaatgtcacaatcaaaggagtagaaaattcaagttatcttgttgctctggacaagttaaatccatacactctatatacttttcggattcgttgttctactgaaactttctggaaatggagcaaatggagcaataaaaaacaacatttaacaacagaagccagtccttcaaaggggcctgatacttggagagagtggagttctgatggaaaaaatttaataatctattggaagcctttacccattaatgaagctaatggaaaaatactttcctacaatgtatcgtgttcatcagatgaggaaacacagtccctttctgaaatccctgatcctcagcacaaagcagagatacgacttgataagaatgactacatcatcagcgtagtggctaaaaattctgtgggctcatcaccaccttccaaaatagcgagtatggaaattccaaatgatgatctcaaaatagaacaagttgttgggatgggaaaggggattctcctcacctggcattacgaccccaacatgacttgcgactacgtcattaagtggtgtaactcgtctcggtcggaaccatgccttatggactggagaaaagttccctcaaacagcactgaaactgtaatagaatctgatgagtttcgaccaggtataagatataattttttcctgtatggatgcagaaatcaaggatatcaattattacgctccatgattggatatatagaagaattggctcccattgttgcaccaaattttactgttgaggatacttctgcagattcgatattagtaaaatgggaagacattcctgtggaagaacttagaggctttttaagaggatatttgttttactttggaaaaggagaaagagacacatctaagatgagggttttagaatcaggtcgttctgacataaaagttaagaatattactgacatatcccagaagacactgagaattgctgatcttcaaggtaaaacaagttaccacctggtcttgcgagcctatacagatggtggagtgggcccggagaagagtatgtatgtggtgacaaaggaaaattctgtgggattaattattgccattctcatcccagtggcagtggctgtcattgttggagtggtgacaagtatcctttgctatcggaaacgagaatggattaaagaaaccttctaccctgatattccaaatccagaaaactgtaaagcattacagtttcaaaagagtgtctgtgagggaagcagtgctcttaaaacattggaaatgaatccttgtaccccaaataatgttgaggttctggaaactcgatcagcatttcctaaaatagaagatacagaaatagtttccccagtagctgagcgtcctgaaaatcgctctgatgcaaagcctgaaaaccatgtggttgagtcctattgtccacccatcattgaggaagaaataccaaacccagccgcagatgaaactggagggactgcacaggttatttacattgatgttcagtcgatgtatcagcctcaagcaaaaccagaagaagaacaagaaaatgaccctgtaggaggggcaggctataagccacagatgcacctccccattaattctactgtggaagatatagctgcagaagaggacttagataaaactgcgggttacagacctcaggccaatgtaaatacatggaatttagtgtctccagactctcctagatccatagacagcaacagtgagattgtctcatttggaagtccatgctccattaattcccgacaatttttgattcctcctaaagatgaagactctcctaaatctaatggaggagggtggtcctttacaaacttttttcagaacaaaccaaacgattaacagtgtcaccgtgtcacttcagtcagccatctcaataagctcttactgctagtgttgctacatcagcactgggcattcttggagggatcctgtgaagtattgttaggaggtgaacttcactacatgttaagttacactgaaagtgttcatgtgcttttaatgtagtctaaaagccaaagtatagtgactcagaatcctcaatccacaaaactcaagattgggagctctttgtgatcaagccaaagaattctcatgtactctaccttcaagaagcatttcaaggctaatacctacttgtacgtacatgtaaaacaaatcccgccacaactgttttctgttctgttgtttgtggttttctcatatgtatacttggtggaattgtaagtggatttgcaggccagggagaaaatgtccaagtaacaggtgaagtttatttgcctgacgtttactcctttctagatgaaaaccaagcacagattttaaaacttctaagattattctcctctatccacagcattcacaaaaattaatataatttttaatgtagtgacagcgatttagtgttttgtttgataaagtatgcttatttctgtgcctactgtataatggttatcaaacagttgtctcaggggtacaaactttgaaaacaagtgtgacactgaccagcccaaatcataatcatgttttcttgctgtgataggttttgcttgccttttcattattttttagcttttatgcttgcttccattatttcagttggttgccctaatatttaaaatttacacttctaagactagagacccacattttttaaaaatcattttattttgtgatacagtgacagctttatatgagcaaattcaatattattcataagcatgtaattccagtgacttactatgtgagatgactactaagcaatatctagcagcgttagctgtccatatagttctgattggatttcgttcctcctgaggagaccatgccattgagcttggctacccgggcagtggtgatctttgacaccttctggtggatgttcctcccactcatgagtcttttcatcatgccacattatctgatccagtcctcacatttttaaatataaaactaaagagagaatgcttcttacaggaacagttacccaaggggctgtttcttagtaactgtcataaactgatctgaatccatgggcatacctgtgttgcaggtgcagcaattgcttggtgagctgtgcagaattgattgccttcagcacagcatcctctgcccacccttgtttctcataagcgatgtctggagtgattgtggttcttggaaaagcagaaggaaaaactaaaaagtgtatcttgtattttccctgccctcaggttgcctatgtattttaccttttcatatttaaggcaaaagtacttgaaaattttaagtgtccgaataagatatgtcttttttgtttgttttttttggttggttgtttgttttttatcatctgagattctgtaatgtatttgcaaataatggatcaattaattttttttgaagctcatattgtaccctttttaaaaaccatgttgtggaaaaaagcccagagtgaccaagtgacaaaatcctatttaggttctctgtgtatgaatcctgattttaactgctaggattcagctaaatttctgagctttatgatctgtggaaatttggaatgaaatgcaattcattttgtacatacatagtatattaaaactatataatagttcatagaaatgttcagtaatgaaaaaatatatccaatcagagccatcccg

SEQ ID NO: 59634 - DNA, 3244 bp, Homo sapiens
ccatctcagggacgtggcggtgaaggcacagtctcagctatggtcccaggaaacagacagtggggcctccacccttccttccccgtttggattaaggggctcctggctggaacacctcacaggactggccccatctggggcccccctctgggacccacctcacacgcgtggtgcgtttgtttgtggctgctcccattcctataacctccgagaccttcactcctaggaatgtcccaaggccaattcccttggcagcaatgagaagaaatgcccttttccaaatagcgacttctgcaaaacccgctgttgtttgtgggttccagcttcctggggcctggaactttccctgagtccttcccacccaccacgcccagcaccccaacccttgctgagttcaccccgggaccaccccccatctcctaccagtctgacattcccagcagcctcctgacttcagagaagtctaccgcctgcctcccaagccagatggcaccagcaggtcacctggaccccactcacaatcctgggaccccaggactacacacctccaaccttggggcccctccaggtccccagctgcaccattcaaaccctcccccagcgtcccggcagtccttgggccaagcgagcttaggacctacgggtgaactggccttcagtcctgccacaggcgtgatggggccccccagcatgtctggagccggggaggccccagaaccagctctggacctgctcccggaactgaccaaccctgatgagctactgtcctacttgggcccacccgacctccctacgaacaacaatgacgacctgctttctctgtttgagaacaactgatcctgtgtttaccccaagcccggcggggacacgctcacagatgtcaccacagccctgcccttcatgcccagccccatgggacacccggtggtctttcccaaacctcccccaaaacacacctggagccagagccttctgccgccagccctgcccctgaattggaagcagccctgtgctcgatgggaggggctcccaggccggcagcccttgccacctccctctgccaagcctgctgctgcagaacggtttttgctgaggtgcccctgcccagccctgtccagccttgtccacacacacatctcacgcccctggtctcacagcctcacaccttgtccttccacccctgcctgcccccacccagcctgcttcttgtccagcattgatccttctgtttcaacaactcctccactgggcagagctgggcatctggcagggctggctctgtcccctgggcctttggctccagtggcccctgtgcccagcagtccagctcttggaacctcgctgaatggcagcctcttgggggcctggagctctggcagcccagccgtgtgtggtgtcaggttcctctccccaccccagcttcaagcagaggcctcggggtgggggagctacaaagcacaacaatgtacatagtgtagaaacactaacagctgggagaggggagccagctgtccagccagcatgttcctgttgtacagcccggtctccctgcgcgctctgctccttcccatgtgcagacagatcagggaggaacctccaatgggtgggggacagtgagcttcggcctggccgaggtgggtgggtgggctctcagattcagctctgtgtaaagattctctagcgggctgcgctcccaagttccccttctctgtgaaagtgaagaattagtacagctgtgttttttaaagccacctctctgtctccaccccatgggcccacacccaggtgggggaggaggaagccactgcatctgttggctcagggccccagcctgtgcgagcagggcgcctgggctgttgtgtctcctgtctgtgccgatctctattaaaggactccctcttggtgggcctggccgagtccctcctttgtgctcccagggactattttctcctcgtaagccagcgacctgcctaaagcttgggctgtgcctgcaaagcttgtgcaggacctgggggccaggtcgaccttcaagtggcttttggggccccaggttgagctctggatgtttcaagccaaggctcggctattcccgccccatagtaaatttccttttccctggaattttccaagttggcttcagctgaagagctgttttgtgaagcatcccaggcttgcccaggagagacatttgccactatgtcaccttatctgggcttgccctggggcactgagacagttgtttggcagccccagcccagccaggggctcatccttctcagctcttgtccctgggaggcctctgcttgtcacttcccagagattgcagaggtgtgtcctgcctaccatctgcctgtccagcttggtgggggtccgggtcaccatttcctccagtcctgggccccatccttgagggccttcccagccagccagcaggagaggcaagaactgggggaacacaggaacctaggggaggaggggagcgctgggcatcctcaggctggcggccaaggcctgcccctggaggcactagaggagggcatctgtctgtgggagcccagaggctgcagggaggaggaggagggaggtatctggtgtgagcgttgcccctgcgacatttgggaccacacaggtgggcttccttattccctgacaaagcctctgtttccagctcttccgccctctctggatgagggaacagaagtggaggaaacaaaagaagcagcagcacgcacagtcctgtcgctgggtgcggagacagcctggcaaagtcccactcagccatggcctgatgcaggccccaggccctcctttcttgggtgtcaaatgactgtgtcctggacatctgatgcaccacctgccctgcctgttgcaaacgtgatgctcccgggtgcagtggagaaactaggagactgggacaagcaaaaggctgcaaacaacccagaagcccatcctcagaagactggagaaatgattgaggaatgcatgggcaccgtggccctgtgctccatcacaaacacctctcagaaacaacgtgggatgaaaaagcaagacagttcatacagtatgatgccatttttataaagctcaaaaccaaatatgtgtggaattcatacccaggtgctaaagtcatcagggagggcagggagtcagtacaacacagtgctcaccgtggggaggggacggagctgtgcttagggaagagcagagatgctggaggttttgaacctcagggtcagtggtggct

SEQ ID NO: 59635 - DNA, 1746 bp, Homo sapiens
attgggacgcaggcgcggagcccattacttttctcgctgcacagacatgagaccataggggacctgggtgtgtggcctcagggataggcgctccccaaggtgtgaatgaggcaggatgaactggacaggtttgtacaccttgctcagtggcgtgaaccggcattctactgccattggccgagtatggctctcggtcatcttcatcttcagaatcatggtgctggtggtggctgcagagagtgtgtggggtgatgagaaatcttccttcatctgcaacacactccagcctggctgcaacagcgtttgctatgaccaattcttccccatctcccatgtgcggctgtggtccctgcagctcatcctagtttccaccccagctctcctcgtggccatgcacgtggctcaccagcaacacatagagaagaaaatgctacggcttgagggccatggggaccccctacacctggaggaggtgaagaggcacaaggtccacatctcaaggacactgtggtggacctatgtcatcagcgtggtgttccggctgttgtttgaggccgtcttcatgtatgtcttttatctgctctaccctggctatgccatggtgcggctggtcaagtgcgacgtctacccctgccccaacacagtggactgcttcgtgtcccgccccaccgagaaaaccgtcttcaccgtcttcatgctagctgcctctggcatctgcatcatcctcaatgtggccgaggtggtgtacctcatcatccgggcctgtgcccgccgagcccagcgccgctccaatccaccttcccgcaagggctcgggcttcggccaccgcctctcacctgaatacaagcagaatgagatcaacaagctgctgagtgagcaggatggctccctgaaagacatactgcgccgcagccctggcaccggggctgggctggctgaaaagagcgaccgctgctcggcctgctgatgccacataccaggcaacctcccatcccacccccgaccctgccctgggcgagcccctccttctcccctgccggtgcacaggcctctgcctgctggggattactcgatcaaaaccttccttccctggctacttcccttcctcccggggccttccttttgaggagctggaggggtggggagctagaggccacctatgccagtgctcaaggttactgggagtgtgggctgcccttgttgcctgcacccttccctcttccctctccctctctctgggaccactgggtacaagagatgggatgctccgacagcgtctccaattatgaaactaatcttaaccctgtgctgtcagataccctgtttctggagtcacatcagtgaggagggatgtgggtaagaggagcagagggcaggggtgctgtggacatgtgggtggagaagggagggtggccagcactagtaaaggaggaatagtgcttgctggccacaaggaaaaggaggaggtgtctggggtgagggagttagggagagagaagcaggcagataagttggagcaggggttggtcaaggccacctctgcctctagtccccaaggcctctctctgcctgaaatgttacacattaaacagcacccctgccctctgctcctcttacccacatccctcctcactgatgtgactccagaaacagggtatctgacagcacagggttaagattagtttcataattggagacgctgtcggagcatcccatctcttgtacccagtggtcccagagtcgacg

SEQ ID NO: 59636 - DNA, 1849 bp, Homo sapiens
ttttttttttttactgatatattgtagtttaataaaacatagtttatacagttcattgaaaaagtattttaatacaaacaccacttatacacaaaaccaaatgttgatattcttgtttttaaaaattcttgatttctctaaaacactaagatgctatctcaatagagattgcttcacattttccagtttcttgatctgtgcatgtcacatgtaaagatccatcccttttcatagtaagaacagctaatatatcacgtaatccattttcttttttatctaaatcctggagtacaacctgtgcaaacttggtttcctctttggcagagttcttcccatcagactcatagagttcaaggcacactgaagatatgcttccaggggcttgcaatgtgtgttgtcttcgagctggcaaaggagtccctgatggaaacagcactgtgaatctactggctcctgattcgtccacacccttaactaaaatatctctggctgaacactctatcataagagagtcttccaccaacaggttttctttcccaataagaattcctgcttctatagctgcaccaatagggatcacttcatcaggagggatagaattgagaagctcaacagctgggaaaagatctttaatcagttgctgtagctttgggattcgagaagaccctccacaaaggacaaccttgttgatatcatctgctgtaaatccattttgatctaagagtcctctgattgcttctatacacttattaaaaagtggagaacaaagaagttcaaatcttgctctggacacattgcaatcaaaatcttgaccttcatataatgagtcaagaaaacagttggcacttcccaaggttgacaaagaatgtttcgctacttcagcactgttcgttaatttcatcatggctcgcgcatttcctctcacatcatgtttgaaggatctttggaactcagaagctagatactgtgctaaggtttctgtgaaatgtgcaccaccgatgttatcatcagtgtttgttgaaagaacccgatatattccactgttaacttccatgacgctgagagataaggatgttcctccaagcttaaacaccaaaatattgctttttccagtaggggagtcttgtccaattccataagcaagaagagctgcagacggttcgtgaattaatcgcaaaacattaaatccagcagctctagctgcttctccaagagcatttttttgcttttctccaaaatcaaacgggacagtaataactacatcatttgcatctgagcccaatacagaatgtgccgtttctttcattttactaaatatcagtctggcaacatcttctgggttaacaaattttgtttcttctccagtatctatttcatatcgtaatttcccatttttttcaatgactaaacatttactttccgcgatgtatttctgagcttgtggatcactggagcttctgcccaggatctgctttactttcattactgtatttgaaatatttcttattctactttgttttgctgccaatccaacaatctcttcattttctgagtaagcaacaacagctggagtaactcggtcaccggcatcatttgcaaccacaccagcccggccatccttatagacggccacacaggctgaggtgcagcccaggtgaactccgatggccgccatgaggcagcagggacggcagcggcaggaatgagggggtcccccaacagcaacagctaccggccgcccaacggccccatcaggcaccgcggagcttcacgttcccgccagccccctgcgtccggtcggccgatacagcctcccgcgtcgccgccaatcagcgtgaaggttccgccc

SEQ ID NO: 59637 - DNA, 2095 bp, Homo sapiens
ctgataggcggcctcgtccttcagcctcagtatcgctgcctcactggaagagccccacctgggcatgcccagcagcccctcccagctgtaagtccacacagcccccatcaatgtgccatctggggcaggccgaggaccggccctggctgccctcactgatggctggagccccgatgctagctacaatggctggcttgagtggacttctgtcacagaggcaaatgcccacagggcacctcttggggcaggcagggagcttgtatgtgccatctggggccaaagctccacgattgagtcataagttaagggtagatggagattttccgccttgagcagaaacgtggaggaaacacgcctggtgtgtgactcacgcctgtaatcccagcacttcgggaagccgaggtgggcggatcacctgaggtcaggaggtcaaaaccaacttggtcaacatggtgaaactctgtctctactaaaaacacaaaattagatggctgggtggtgcacgcctgtaatcccagctgacggctggagccccgatgctagctacaatggctggcttgagtggacttctgtcaggagaattgcttgaactcgggaggtggaagttgcagtgagccaagatcgtaccattgcgctctagtctgggcgacaagagtgaaactcctcctcaaaaaaagaaaataagagaaaagagaagagaagaggaaaaagaaaagaagaaaagaaacaacccttgcagttccccggccactccccagagccagttaggccaccaggtgggctggggctagacccggctgcgggcgggccacagagggactaatggccaccacttctctccatcctgcaggcagctgccagacccggccatcgaggaccagggtggggagtacgtgcagcccatgctgagcaagtacgcggctgtgtgcgtgcgctgccctggctacggcaccagaaccaacactatcatcctggtagatgcggacggccacgtgaccttcactgagcgtagcatgatggacaaggacctctcccactgggagaccagaacctatgagttcacactgcagagctaaccccacctctgggcctggccagtgggctcctggggggccctgccttgaggggcactgtggacaggaaaccttcctttgccatactgcattgcactgcccgtggcttggccagcatcccccggatcagggccctgtggtttgcgtgttacccatctgtgtccccatgcccagttcagggtctgcctttatgccagtgaggagcagcagagtctgatactaggtctaggaccggccgaggtataccatgaacatgtggatacacctgagcccactcttgcacatgtacacaggcactcacatggcacacacatacactcctgcgtgtgcacaagcacacacatgcaaggcatatacatggacaccgacacaggcacatgtacatgcacaggtgtgctacacatgtgcacacatgcacagttgcacagacacacacacacaggtgcacacacacgatgccgaacaaggcagaagggcgactctcacctctcatgtgcttctggccagtaggtctttgttctggtccaacgacaggagtaggcttgtatttaaaagcggcccctcctctcctgtggccacagaacacaggcgtgcttggactcttgacaagcagacctgctcctgcagaggagacagccacatttggaattgggcaccgagaagacctgagaaaaacccactctctcttttttttttttttgagacggagtttggctcggccccccgggcgggagggcaggggcccaatttgggttaacggaacccccggcccccaaggttaaagaaattctccggccccaccccccggataattgggattaacgggggggggccccctgccccagctatttttggggttttaagaaaaacgggggttccccctggggggccgggcgggcttgaacccccggaggggggaaccccccggcctgggccccccaaagggcggggtttacaggggggagcccccaccccgggccaaaaaacccctttctataacaaaagggccaacttttgggtaa

SEQ ID NO: 59638 - DNA, 2095 bp, Homo sapiens
ttttttttttttgacacaataacaaacacctatttattatattaaataccaggcctggaaatattaaggtaccaaattaccagattcccaagaaattacatttcacatcccaaaatgtcctgttggtgctttgacaactaaaacaatgttttagaaagattttgtttcagatccgtaaaaaatagcaacaatttgggggataaaaataagtaaaatccaaaaacttcaaaagtttattccaaattcttttgaatccttatggtgggctgtaaaaccagtttttaaatgctcatagcttcagggatgggggagtatcacagtttatatgaatttctgcctagggaagcccagcaatgttacacagtagtttcgtgtttccataatccagtcctaacattgccagtgctatcggtaccgagcaagggtccctcctgcccattgcttttaattggtccattctgaatggccaagttgaggccataagatttttgctgattttcaagttcaaccacagctggcttccttaacgcatcttttttactagtggttgaaactggcttttcaaaatttctgctacttttgggaagtgtgctacaagcatcgctgctgtcttgctggggtgggttgtactgtctctctctgtaggctaaataagctcttcggctcctcgagtgtccttcgttattgcccagccggcttttaggtaagccgttctgcacgcttccttccacgctcgttgggacatcgtaggcatattctctcaggactgtgagtcggcttgcccggtgtcctttacttctgtttttatggtggcggcttgagtgcacatttgttcgaaactgaacttctaaaggcgccacgtgcattttaatatcattgtccattgaatgttctgtcagactattatcaagctgaggggtggagttcaaaggtaaagaattggcatggcactgagctgcagccgcctgcaagtttgttaatttgcagccctgggaggaatttttgaagcttgaagcacttttgtttgtgcatgaagactccgcactgctattggggcatttgggtgcctctccattcgtcccattagagttggggggctggacgttgacttgcactgaatacgagctccgtcctgggcagcaagtcatgatccacgcaagtctaacatcctccctattaacacaatggtggaccacgaagaacgcactgaagcttaaacttgtggctccaaaaacgaagctaaaaaccaagtccaaagggtaatacaaagaaacagccaaagccccaaacatccacagtgcaacatataagagcaaagtaaggctggcccccaagagctgagaatgaaaagtgtgctcattttccaaggctgatgtagaaatcagagacaaagacattgaatcctgatgatttatttcgccattttcattggctgccaatctctgttgctcctccgtgggctccttaagctcatatttgcgctcagggtgtcttttcaactgaataaatatgctcagaaagtacatgcagtttacaaaagtgatgaagctggctggcccatagaaggctcccaaggagggttcccatgccatccaggcaatagggtgcgtttggccgactgccgtaattcttaatgttcgctgctgcagttatgcccgcaaacaatgatggggatacccacccaccaatcaggtaaaatctgagcattggtcttggtggaggtggtggttcatcaggatcctggcatcttttagcttttttagtgacttgtttgtagatatttcgagctgtcactcctacccatagtactgtggcaagggtggaatagtgaagaattatcccaactgcttggcagatgctggcattcctagtctgggttattcctcccacaaagaccacacaggttaggaaaatatgaaagcacaagttcacaagcatgtgccagctcttgaggctgattctaatcaaactgtgatggtatatgtaactgacaatgacggctaagagacataagaggagaatgatagcggtagtataaaccacaggatgcaggaggctggccgcctgggtgtatagttcagatcccgtcctgttc

SEQ ID NO: 59639 - DNA, 5534 bp, Homo sapiens
ccacccacgcgttcgcggacgcgtgggtttggctcagttttggggttatccaaggctatgtcatgcaaaaagaggaatatgacctatcacacagttcgtgctgcatttagtttcatattttgggactcagatctgtgaaagatacagataagaggtgtttgttttatttcttttttccttaaagcgctttacttcttttctagattggccaggagaaacaggagctgttcagaaaggacacagaactactcgccctgcagacaaagctagaaacactcacaaaccagttctcagatagtaaacagcacattgaagtgttgaaggagtccttgactgctaaggagcagagggctgccatcctgcagactgaggtggatgctctccgattgcgtttggaagagaaggaaaccatgttgaataaaaagacaaaacaaattcaggatatggctgaagagaaggggacacaagctggagagatacatgacctcaaggacatgttggatgtgaaggagcggaaggttaatgttcttcagaagaagattgaaaatcttcaagagcagcttagagacaaggaaaagcagatgagcagcttgaaagaacgggtcaaatccttgcaggctgacaccaccaacactgacactgccttgacaactttggaggaggcccttgcagagaaagagcggacaattgaacgcttaaaggagcagagggacagagatgagcgagagaagcaagaggaaattgataactacaaaaaagatcttaaagacttgaaggaaaaagtcagcctgttgcaaggcgacctttcagagaaagaggcttcacttttggatctgaaagagcatgcttcttctctggcatcctcaggactgaaaaaggactcacggcttaagacactagagattgctttggagcagaagaaggaggagtgtctgaaaatggaatcacaattgaaaaaggcacatgaggcagcattggaagccagagccagtccagagatgagtgaccgaatacagcacttggagagagagatcaccaggtacaaagatgaatctagcaaggcccaggcagaagttgatcgactcttagaaatcttgaaggaggtggaaaatgagaagaatgacaaagataagaagatagctgagttggaaagtctcacctcaaggcaagtgaaagaccagaataagaaggtagcaaatctgaagcacaaggaacaggtggaaaaaaagaagagtgcacaaatgttagaggaggcgcgacgacgggaggacaatctcaacgacagctctcagcagctacaggacagtctccgtaagaaggatgacaggattgaagagctggaagaagcactaagagaaagtgtacagataactgcagagcgggaaatggtgctagcacaagaggaatcagccaggaccaatgctgaaaaacaggtggaggagttactgatggccatggagaaggtaaagcaggaactagaatccatgaaagcaaagctgtcctccacccagcagtctctggcagaaaaggaaactcacttgactaatcttcgggcagagagaaggaaacacttagaggaagttctggagatgaagcaagaagctcttctggctgccattagtgaaaaagacgccaatatagctctcttggagctttcgtcctctaagaagaagacccaagaggaagtggctgccctgaagcgggagaaggatcgtctggtacagcagcttaagcagcagacgcaaaatcgaatgaagctaatggccgacaactacgaggatgaccacttcaaatcctcccattccaatcaaacaaatcacaagccctccccagaccaggatgaggaggagggtatatgggcatagccaatcagaggcttagttcagccattttgttcagaacgatcatccagcccctcttagaacttgaccaaaatagaagtaaattaaagttgtacattggacacctgacaaccctctgccatgaccgagaccccctgatcctccgtggactcactccaccagcttcctataacttggacgatgaccaggcggcttgggagaatgagctgcagaagatgacccgggggcagcttcaggatgagttagagaaaggtgaacgggacaatgcagaactgcaggagtttgccaacgccattcttcagcagatagcagaccattgtcccgacatcctagagcaagtggtcaacgccctggaagagtcctcttgaccctgctttatggggaagcctgaggtagtcaacccaggagccaagaaaagagaactacgaggaacaggtgcccggaaccttcttggcaccaaacactacaaacttcatcccaacttgctcacttgaagaagtgtgattccagcaccgtttctacatctgccatcttactctgcctttctgctttggatgtggtctctacactaaccttcttgatgtccagggtagataaagggtcgaatctctctgaagaactgccacctggtcatcagcagtggagaactgtgggagctggtggctctgccctgacagagagccatggagcagaggagcctctcacctcctgtcctctgacatgagaatgaaaccaggaatggacttggagttcaacaggctgagaggatgcctccaatggaccagagagctgagtgttctaatatcacaataggtgctttctcctaaaagggcaaaaaacaatctcaaaaagattagaaaaagagaaggggggaagggaagagaaaatcgactcttctttttactgtctcttctgcttactttccacatgagatgctttgtaccggggagctgtgagcaggcctcacgatggcttgggagcactcgttctcccaaggtctgagtcttcatccagccctgcctgtctgtcgcagccttcctcactctgttcctcggccagttaacaagaagatggtgtgaggtgttctctaccagtctctcctgtttgagactgttgacgttatcatactgaggtgttagatcaaatatctctaattgaagaacatgtgaggttgaaagagcaccagccagggcaacatagcgtgaccctgtctctacaaaaaattaaaaagagaacatacaaagttgacatatgagaccctgttgtccccgcctgcagctttgccccagtaacaaatgcccgttgctcttgggctggtttcccctgaacacctccaagaggctgcctgccttgccagcacccgtgtcctgagctcctgcagcccagtggctgctgaagttgtgatccctcactcaccctgctagctttgcccttgactcgtcttctctgaacctcagcctcgtgcattgcctggaaccttcttctagcataaatgaaggtttttcctcctacacacattccttcctcggttatttcattcagagaatatttatgaaatgcctactgtgtgcaagtcatccatccttgaaaaggccacttctcagtgagggagagatgtagtggattctgtgagacatacctgctggagttgaagcagtaaatagcatgtccttcccctccccgatcttaaggtgtgttttctagaaaagttccctaatggaattcatgagtttgggggtctcagtcacccgcttgcctgtaggattccatttgatgattctggatttttgctgtttgttattgcccttagaggggctctgagtatctacttgtgggtggccatttcctgacatctgcatgtacctcgtggaattcagccagcttcatgttgcaaatcagaaagctgaccccaagactgcaaatcaatgaaggtattggcattgttaaggtcgtagcgtagacaacagcagtcataaataattaggcaggaacttaacccaaatctagttctttgaccacctctaccaccagaacccagcagacactcacatctcctgataagagttgctggactcgatgtttttgttttgcattttctcctctccttccccacttactcagagaatttaaagtctgtagagtcagcacagccccatcagtccaggaacttcccaccaccagcccttgactgtcccattaactgacatggtcagatttccagctccccctactccctgctgtgaaacaatccctctccctgtgagaggaaactgtggagcgtttcttatcgaaggttaaatggactctgctcataaacctcttactgagatgcttcctgatagccaggctggccagagaggggtgcaggggttagatagtaagtggtggtcgtttgtggtcagttacctcaattctgttcattgcagtgcccgtaaaccatgtagaaagctcccagcactgaaaggcaggagtgttagcatctcgctttatccaccataacgtaaagaactgcggtgtgataacaagccttcacggggccacggtggaaccaagacagcaggcgaggccatgcctaaaacaagttggtctggcacgggcactggccagctgctctctccaagcaggtggcccagatcccacccacgtggactttctcatcaggtgcagcgcctgccactctcagccactgggtgtgtcactctcctcttcatctcagcattctccatcacttcccctccagaaaaacggatggaaggaagccctctgtgacactgcttctgagaagaagcatttccgggaccgatatcatctgtctggtctctgtgaacagcaaggaatcttcttgaccgttcttgggcactggaggctggttaggagttcagtaataaacgtggccttcgtgctgtagggcagagtggatgcagtttgtagctttcagagtgtctcattgagtctagatcattgaaccaacacttaaccaaatgtcccactcccatcacactaggacttgtcattccatgcccctctcctagtggtcatggtttcatatgggcatacaactgctactgaagttatatagccttgaaaactcagtgcaggttgcccttaattttccccaaacccctccatcggcaagtctagttgccctttagcacctaaagatctgcaccccaaaccaatgtcaccataaagagggcacgaagaagagtgggtgtgatcccaacggggttttgtaactgaagaagcccagtgtgagcttctcatcttttcatatacctctaacccccggtactcattgaatcattgatgaggtatctcaattgagatttgcaaggactttgataccatttgaaatggaaaaattttgaacgggctttaacatgtttaagaaatatggatggggccggccacagtggctcacgcctgtaatcccagaactctggaaggctgaggcaggcggatcacctgagatcaggagttcgaggccagcctggccaagatggcaaaaaccccgactctactaaaaatacaaaattagccaggcgtggtggcgtacgcctgtaatcccagctactcaggaggcaggagaatcgcttgagcctgggaggcagaggctgcggtgagccgagatcgtgtcactgcactccagcctgggtgacagagactccattt

SEQ ID NO: 59640 - DNA, 2632 bp, Homo sapiens
ttttttttttttcaggtagtaaaccattttattggaaactggttaaaaattaaggcactccaagctttatggtttccttgaggttacagttttgtggctgctcttagtgtatttcagaaaaaaagcagatggacgaagaccgaccttacagacgtgggtttctacactgagcgcaagggctgactacgctgtatttcacaaccgagccctagcgccagctcagcaccctacgctcaggaagcggattttgcacgcacactactgcattcatacagagttcactgaagtctattaccaagtgtcttttatgaataaacaatacaaagtccaattttgatggctgctataaaatacttaggaatctctgcaatactttactacaaatacaaatgcccaagaggtcagggaaatcagcctgaagaactgggtacaggttctattctttgtggaaatttcagcctaggaatgttattcccggtacagatgtacacagtcaaaaaggcttatcgagctgtttgacgagttcttgaagtgttctggatcagtgatctgcctgtgaactttagttcacgctgaagacagtcttctcagttttcatgactgtgaagtgtgaaaatggaacgcatccttgatcttaggtgctgctgacctactttcccaaagcaaaatgttttaaaattcaaggcaatctggaacagggactatttccaaacttccttaggcagcacttttcagtgacttccccgcacgctgctttccctgccacgaagcgcttggtctgcttactaaagccacgtatcctgattttacagaaacgtgggcaggtccagcagtgccactggagagctcccagagaagcccactcagaaggaagtgctcagaccaccctcgagccagagcggctggaagctggactggtcccatgaggcagaaggagcaccagcgcctgctgggtggtgtggggagagccctcagctgactctggacacacctgcttccggggcacgtggcccagagccgggcctgtggacgggcctttctttcttcttggggtggaccccgtccccacgatccctaaatggccaccccccagacagcccaacaggcagcgagaggcctgcaggcactgaggatgccaacagggctggagagagctgcagcgtcctgccccgtcctccccacaccgctggcacacgagcagtcaactggtgctgctgaggcaggccaaacaccacatttataattcaagcttccaagggaaaaagattctcatgttctagtaaagatacaaattttaaaaattgtccaaaaagggcctgaatttttatatgaaggttttctggtgaaatcttttaagcagggaggaaaatccaataaatttttttaaaaaggtttagctattccccaatgctatttaatacaattgaggttaggacgttaagtccttatcagactgtgtactggagccccgtgtcatcagcaaaagccgtgtgagtcaacaggtgtgaagactcaagatgcgcacacagacgctgtccgtggttttatggggaatgatgagggctggtcagttctcctcatgacaaaagtcaaaccgacttccctgtgttgcgtgtgaagcttgttagtggacagagagaaacgcagggttctgccctgggagaatgacagccacagcgctgggtgccgtcaggcggcttcgtgtgcagttagcgtttcacaaactgagaagagtataaaaaagcccaaaccccaaagatttcttatttcaagtgactaaatctagaaacagagatgaacagggaatagaaggtcaccagtctgcaagacgagaggactgtccttcaggggcagctctccggccgcctgtcctggaaggctggcaggttcactggccaaggtcaggagaccgcaatggccacgtggtctcccggctgggctgggctgcggagcgtgcacctcacaggaagcgtcgggactgatgtgctggagcgctttagttgttttcaaatctagcatacgggttttcttctttaaacaggccatatttttttctgatttcatcatgtcttgtcttcatctctgctctccgttcctcctgccgtatccgcctctcctcccgctcacgcatggccttctcctcactcctgtccggcttccggctcctcttcctcctgcagcagcagcagcagcagatggcaatgcccaggaggagggttcccccgactaccgacatggtgatgatcagcgcctcaaagttcacccaacaaactccccagcgtgcagagctcaatttacaaagggaagccggtggcaagacgcttgtaactgggtagtccagacaagccttgttagtgttgcaccaaagacaggagacgttcttcaggcactcttcacaggttttgtttgtgttctgagaacaagcagctccgggaggctcctgcgcggcggccaccgggatgagcagcaggagcagcgcggcgccaccgaggcgcaacctccagtacggcgtcggcccgcgggccactccgggcgccatggtcggccggtcgctctatcagtcagtggagcgttacaactccgactccagcacaagcggtctccggacgcgtacgtaagcttggatcctcta

SEQ ID NO: 59641 - DNA, 1663 bp, Homo sapiens
gcctcgaattcccgggtcgacgatttcgtctcccttggtcctggtgctggtggtggctgtgacagtgcgggcggccttgttccgctccagtctggccgagttcatttccgagcgggtggaggtggtgtccccactgagctcttggaagagagtggttgaaggcctttcactgttggacttgggagtatctccgtattctggagcagtatttcatgaaactccattaataatatacctctttcatttcctaattgactatgctgaattggtgtttatgataactgatgcactcactgctattgccctgtattttgcaatccaggacttcaataaagttgtgtttaaaaagcagaaactcctcctagaactggaccagtatgccccagatgtggccgaactcatccggacccctatggaaatgcgttacatccctttgaaagtggccctgttctatctcttaaatccttacacgattttgtcttgtgttgccaagtctacctgtgccatcaacaacaccctcattgctttcttcattttgactacgataaaaggcagtgctttcctcagtgctatttttcttgccttagcgacataccagtctctgtacccactcaccttgtttgtcccaggactcctctatctcctccagcggcagtacatacctgtgaaaatgaagagcaaagccttctggatcttttcttgggagtatgccatgatgtatgtgggaagcctagtggtaatcatttgcctctccttcttccttctcagctcttgggatttcatccccgcagtctatggctttatactttctgttccagatctcactccaaacattggtcttttctggtacttctttgcagagatgtttgagcacttcagcctcttctttgtatgtgtgtttcagatcaacgtcttcttctacaccatccccttagccataaagctaaaggagcaccccatcttcttcatgtttatccagatcgctgtcatcgccatctttaagtcctacccgacagtgggggacgtggcgctctacatggccttcttccccgtgtggaaccatctctacagattcctgagaaacatctttgtcctcacctgcatcatcatcgtctgttccctgctcttccctgtcctgtggcacctctggatttatgcaggaagtgccaactctaatttcttttatgccatcacactgaccttcaacgttgggcagatcctgctcatctctgattacttctatgccttcctgcggcgggagtactacctcacacatggcctctacttgaccgccaaggatggcacagaggccatgctcgtgctcaagtaggcctggctggcacagggctgcatggacctcagggggctgtggggccagaagctgggccaagccctccagccagagttgccagcaggcgagtgcttgggcagaagaggttcgagtccagggtcacaagtctctggtaccaaaagggacccatggctgactgacagcaaggcctatggggaagaactgggagctccccaacttggacccccaccttgtggctctgcacaccaaggagccccctcccagacaggaaggagaagaggcaggtgagcagggcttgttagattgtggctacttaataaatgttttttgttatgaagtctaaaaaaaaaa

SEQ ID NO: 59642 - DNA, 1502 bp, Homo sapiens
gggtgaacccttcatcctgggtcttttaatttctcaggcggaacgagtggcggcggacagaggcttttggctgcgctgtctgtgggttgtctgggcttggggaactgggcacggagaccgtggcgccggccgccggtcatacagctctgcttccagtcgtcgggcaaaaagctgaggcgcttctcctttaattgcggtgggcggggcgtgccgacgcggcccgcgttgctattggtggccgttgggggcgcggaaactgaacgggccgcaacggccaccgcagctgccatcggcgccgccagccccgccatggctgcgccctgcgcggaggacccctcgctggaaaggcattttaagggccaccgagatgcagttacctgtgtggacttcagtatcaacacaaagcagctggccagtggtccatggactcatgcctcatggtctggcacatgaagctgcagtcacgcgcctaccgcttcactggccacaaggatgccgtcacctgtgtgaacttctctccttcgggacacctgcttgcttccggctcccgagacaagactgtccgcatctgggtacccaatgtcaaaggtgagtccactgtgtttcgtgcacacacagccacagtgaggagtgtccacttctgcagtgatggccagtccttcgtgacagcctctgacgacaagacagtcaaagtgtgggcaactcatcgccagaaattcctgttctccctgagccagcatatcaactgggtccgctgtgccaagttctcccccgacgggcggctcatcgtgtctgccagtgatgacaagactgttaagctgtgggacaagagcagccgggaatgtgtccactcgtattgtgagcatggcggctttgtcacctatgtggacttccaccccagtgggacgtgcattgccgctgccggcatggacaacacagtgaaggtgtgggacgtgcggactcaccggctgctgcagcattatcagttgcacagtgcagcagtgaacgggctctctttccacccgtcgggaaactacctgatcacagcctccagtgactcaaccctgaagatcctggacctgatggagggccggctgctctacacactccacgggcatcagggaccagccaccactgttgccttttcaagaacgggggagtattttgcttctggaggctctgatgaacaagtgatggtttggaagagtaactttgatattggtgatcatggagaagtcacgaaagtgccgaggcccccagccacactggccagctccatggggaatctgacagtctccattctggagcagcggttgacactggaagaagacaagctgaagcagtgtctggagaaccagcagctaatcatgcagagagcaacaccatgatcaggggagcaggaatcaggagctcggtggatttgcaggtggcaggccagggatttgtaccatgggacttgggtaaataaaggggactgaactctgtgggaatcacatccataa

SEQ ID NO: 59643 - DNA, 1052 bp, Homo sapiens
ttttttttttttaagaagcaacatgtgtattattaaattatttgtcagaatttccagaatcagagtctctactgggcaagtagaaaaatagaaaagtttactactttgaaaaggaaactatgacaaacaagtatatattcaggaaagggactcctagaacttgagcaacaaaaaagagttcaacctcggcacagtggagtctgcagtgtctccgcaacaacagaaatgaacttgtgttcctcacatccttgagagtcgaggtttgcatttctctacagagctagggctgaatgaagcaaagagacctctgccacccccactagctggcccagtcctggaagcggaagcagtcacttgcgatcttccacactgtgttgctgggtgaggcctgggcggtcaggatgaagttctggttgaagtcccgttgtttgttcccctcaaacttcactgatccacagatgacaacaaggaccgtggtctggcttggtgtggcttcatcatgaacaggctggcagtctaccacgctgatttggaactcgctggaaggcaacatttcaaaaaactcactcaaggattcttgtcctgaaacagcattgccattccagaccagggtggctgtgcccatgtacaggcgggacagcaaacgccgccgcttatccatggtggtgtagtagacattgacaaactcctcagcagctctgcaggcctgatccacataggtcttgaaatccacagatgccatctctggttctatggaaggagggctccaccagggtatttcctctgccttggggaaccaggggctgcgcggcgacgtccagggtcagcgcgggccgcggcccccacggtcgggacgccccccgcgtgggacgcagttccactgaggggccggccgcggaggtcacaaggtgggcccaccgaagcctctggtaggggcacgggaagagccgcctttctctcctcctcctccttcttggaggcttactctgggtcaccggggccccagagccgggggactttccggcgcagttccgcggcttcccgcgcgcggc

SEQ ID NO: 59644 - DNA, 4558 bp, Homo sapiens
  misc_feature (1)...(4558): n = a,t,c or g
gggttcagtagtttgggaagggagctgggggaggcagtggcggctggagtaggtaggcgagtaaaaggaggaggaagggctggggagaagagcgaggctgtagcggctgcctgttgagggaggaagaggtggggggtgtggaggagggggaggagagagagatgacatggggagaggaggaggggggttggacgtgggaggaggaggagagggctcgagggaccgtctgtcgcgggacgggctggccagctggggcgcggagcctggaggaggaggcagcggcagcggcagcagcagccctccgagcagcagcagctgcagcagcagaaacaagtaccagccacaaagcggctcctctggcccaagcagccacagtccccccgccgcgatggcgctgcaaagccaggcgagcgaggaagcaaaggggccctggcaggaggcagaccaggaacagcaggagccggtgggtagcccagagccggagtctgagccggagcctgagcccgagcccgagcccgtgccagtgcccccgcccgagccccagccggagccccagcccctaccggaccccgcacccctgccggagctggagttcgagtccgagcgggtgcacgaacccgagcccacgcctacggtagagacccgcggcaccgcgcgcggcttccagcctcccgaaggtggcttcggctgggtggtggtgttcgctgccacctggtgcaacggctccatcttcggcatccataactctgtcgggatcctctactccatgctgctagaggaggaaaaggaaaaaaatcgccaagtggagttccaagcagcatgggtcggagccctcgcgatgggtatgatcttcttctgttctcccattgtgagtatattcactgaccgtttgggctgccgaatcacagcaaccgcgggggctgccgttgctttcattggcctccataccagctccttcaccagctccctaagcctgcgctacttcacctacgggattctctttggttgtggctgttccttcgcctttcagccatccctcgtcatcctgggccactactttcaacgccgcctgggtctggccaatggtgtggtgtctgctgggagtagcattttctccatgtccttccccttcctcatcagaatgctgggggataagatcaagctggcccaaaccttccaggtgctgagtaccttcatgtttgttcttatgctgctttcactcacctaccggcccctcctgcccagctcccaggacaccccaagcaagagaggtgtccgcaccctgcaccagcgctttctggctcagctcaggaagtacttcaacatgcgagtgttccgccaacgcacttaccgcatctgggccttcggaattgctgctgctgcccttggctactttgttccctatgtacacctgatgaagtatgtggaggaggagttctcagaaatcaaggagacctgggtgctcttggtgtgtattggggctacctcaggccttgggcgtcttgtgtcaggccacatcagtgactccatccctggacttaagaagatctacttgcaggtcctttccttcctgctcctgggcctgatgtccatgatgattcccctgtgccgggacttcgggggccttatcgtcgtctgtcttttcctgggcctttgcgatggcttcttcatcaccatcatggcccccattgcatttgagctggtgggcccaatgcaggcctcacaggccattggctacctcctgggcatgatggccctgccaatgattgctgggccccccattgcaggcctactccgcaactgttttggggactaccatgtggccttctactttgccggtgtgccccccatcatcggggctgtaatcctcttcttcgtccctctgatgcatcaaaggatgttcaagaaagagcagagagattccagcaaggataagatgttggcccctgacccagaccccaatggggagctactgccgggctcccccaaccctgaggaaccaatctaatgcctttcttgccattgtgtgccctttcccagctcttccccttcatcccaccctgctcagcatttacatttttgccaccagcacacttgttcccagacctgcgcacacagcatttcagccacctgacaatctccttggagtcaaagctccaggtgttccaaactcattaactaaattctccccagaatgcttttaaattttccagggcctttctcctcccaggatctgggaaagcttgggaaccacccctggcctttggaacctctccatatactttctaagctctgggggaggaggaggatgggacctcctggacccagcttgttagtcacccactataatcaactgccaaaggtgctactgtgtccccaggagcctaatagggtaggcccaaatctctgtttgctgaggaggtcattgccatccatatttgggagccactgggtagatggggcagggaggcaaaatgagacaagtagccttggttagtcttagagttgctgatgactgtggcttcccaagaactgggtacaagcagtgcccttattgtatggttggttaacagtctgctcccctcttcccttccttctttttttcctctactgacttctctccatactctttcccctctatttctttgtatgactgtcatagacacatgggtgcttgaagaaaggagggacccggaacttgggccaatcagcctcaccttgtcccagtccactcctaacactagcatcagtcccactcatctcaggctgagccacatctcactttttcgctcaagctatataatcctagactggaagagtagaatatcatatagggaagaaaccttaaacaccacagtgttccatgttccagtcactgatttttacaaatcttacagtccaaggcattaacctcaaggccctcccagcaccccattcttgtatacacatggcaaaatgtgaagaaactcctttcatctcagcaggtagaggaggactgatgacacgagctgccatggcgggaggaggggcagtagttattgatatggtgagccccatctctcagttttcatgacaggtctatatttctacctgggccaggccaggaaagagactatttaagaaaaaaaaaatcaattcctagcctggatcccaaaaaggtacaggcagcagttgcacatagggttggaaaatttcttttgggaaggggaagccatcccagcctttaccacccaatgtgtctcccatgctgggcatcctaggccactttgcttagagggcattaaaggtgccatgaaaggtagactctgaaccactttgatccctctgaagtaggtgactgatgcctccttatgcccaggctctggcaacagtcttactgaagaacattcccagtgcccctggctaggggcagagggcactgccaggctgtgttcagttagcacagctcacctcattaggagctcagcctctctcctcactctgcctctttgtgtctctttttctcctctctgagcctttgtctattgtgttcctgtcacccaccctttcatcatctttttgccaggcattcctggctgtcacttggagccaacagtaacttgccaccttaaggcagggtcatccccgggccaggaggatgaggttgtcctgaggggctccaaagaagacaatagttcccactcatgattttccgttacaaacaggcagctggggcatggttggcctccaatgatttcattcaaggccaaagtcctgagccccctccgctggtcccagtccagctcttatcaactccccaaaggaaaacccactggttcttagctctgtgggtaggaaggggccctagaaagggcctagttactatcctgtcagttctaacagtagtggaacaggagaatctgggccctaggagccctgtaactcccaggagagaccactgaaaatactggagcaacaatgcccctgcttccatttctccccacctcactctcaccaagtcaccagagggtggttctgtaggacctcttttgttgcttaagatgcagatggctcttaagaatcaggcagtcgcccacttctctccagatgaagggaagacattcataggtcccaaatctgcccattcagatgtcacataatatggtgggatatcaatttacttcttccacacatgtggttgtgcacatgtgagcttgtgtgcttttggagagaatgttgattggcaaaagcagcacagtattaatatttagagtaggatgcagcctcttatgcaccacagttaaatctagaacgaacaaaatttcagagctcaagacatgggacatttaaatcctcaaggagtttggaacaaaataaacagatctaaaaatttggtttgggtatgtatgttgcctacaaggaagaaatagtcttaacctgattaatagcagaaagtttgacttcagagctgaagtctcctttcaaatcaaatttctgccaggttctatgctctctgtgagagcagacattanaaaaagagctatataggggtttggagttggttgactatttgagattg

SEQ ID NO: 59645 - DNA, 1376 bp, Homo sapiens
cggacgcgtgggaagcaagttctccttgaaaacagcctgcattgagcccccaaaagtaagcctgtcctagagcccctgacacccccacttgggtctcctcgacctcgagatgctagaagttttacccctgggcgaaggaacacagctccatctcctgggccctctgtgattcgccgaggccgcaggcagtctgagccggtgaaggacccttatgtcatgttcccacagaacgctaagcctggattcaagcacgctggcagcgaaggggaactctaccctccagaatctcagccaccagtttcaggctctgcaccccctgaggacctggaggatgctggacccccaacactggacccctctgggacctcaatcactgaagaaatcctggaactgctgaatcagcgaggccttcgagatccagggccgtccacccatgacattcccaagttccccggagactcccaggtgcctggcgacagcgaaaccctcacattccaagccctgcccagccgggactcttcagaagaggaggaggaggaagaggaagggctggagatggatgaacgggggccttccccactccacgtcctggaagggctcgaaagttccattgcagctgaaatgcccagcattccctgccttaccaaaattcctgacgtgcccaaccttcctgaaattcccagccgctgtgaaattcccgaaggttctcgccttcctagtctctctgacatttccgatgtttttgagatgccctgccttccagccatacctagtgtccccaacacccccagtctgtctagcactcccaccctctcctgtgactcctggctccaagggcctctgcaggaaccagctgaggctccagccaccaggagagaactgttttctgggagcaatcctgggaaactgggagagccgccttcaggaggcaaggcagggccagaggaggatgaagaaggggtatcattcacagacttccagccccaggatgtcacccaacatcagggattcccagatgagctggcattccgctcttgctcagaaatccggagcgcctggcaggcattggaacagggacagctggcccggccaggcttcccagagccactgctgatcctggaggattcggatctgggtggagacagcgggagcgggaaggcaggagccccgagttcagaaaggacggcgtcccgagtgcgagagctggcccggctttacagcgagcggatccagcagatgcagcgggcggagactcgggcatcagccaatgccccgcgccgccggcctcgggttctggcccaaccccagccatccccctgtctgccccaggagcaggcagagccagggcttctgcctgccttggacacgtgctggtt

SEQ ID NO: 59646 - DNA, 2586 bp, Homo sapiens
tttcgtcccttctactctgggcggttagaaagtcgttagtcgttcacctctcagccttcctgagtgggaactggtatgtcttccaaagggtgaggtggctttgaccccgggttgcccggccagcacgaccgaggaggtggctggacagctggaggatgaacggagaagccgactgccccacagacctggaaatggccgcccccaaaggccaagaccgttggtcccaggaagacatgctgactttgctggaatgcatgaagaacaaccttccatccaatgacagctccaagttcaaaaccaccgaatcacacatggactgggaaaaagtagcatttaaagacttttctggagacatgtgcaagctcaaatgggtggagatttctaatgaggtgaggaagttccgtacattgacagaattgatcctcgatgctcaggaacatgttaaaaatccttacaaaggcaaaaaactcaagaaacacccagacttcccaaagaagcccctgaccccttatttccgcttcttcatggagaagcgggccaagtatgcgaaactccaccctgagatgagcaacctggacctaaccaagattctgtccaagaaatacaaggagcttccggagaagaagaagatgaaatatattcaggacttccagagagagaaacaggagttcgagcgaaacctggcccgattcagggaggatcaccccgacctaatccagaatgccaagaaatcggacatcccagagaagcccaaaaccccccagcagctgtggtacacccacgagaagaaggtgtatctcaaagtgcggccagatgccactacgaaggaggtgaaggactccctggggaagcagtggtctcagctctcggacaaaaagaggctgaaatggattcataaggccctggagcagcggaaggagtacgaggagatcatgagagactatatccagaagcacccagagctgaacatcagtgaggagggtatcaccaagtccaccctcaccaaggccgaacgccagctcaaggacaagtttgacgggcgacccaccaagccacctccgaacagctactcgctgtactgcgcagagctcatggccaacatgaaggacgtgcccagcacagagcgcatggtgctgtgcagccagcagtggaagctgctgtcccagaaggagaaggacgcctatcacaagaagtgtgatcagaaaaagaaagattacgaggtggagctgctccgtttcctcgagagcctgcctgaggaggagcagcagcgggtcttgggggaagagaagatgctgaacatcaacaagaagcaggccaccagccccgcctccaagaagccagcccaggaagggggcaagggcggctccgagaagcccaagcggcccgtgtcggccatgttcatcttctcggaggagaaacggcggcagctgcaggaggagcggcctgagctctccgagagcgagctgacccgcctgctggcccgaatgtggaacgacctgtctgagaagaagaaggccaagtacaaggcccgagaggcggcgctcaaggctcagtcggagaggaagcccggcggggagcgcgaggaacggggcaagctgcccgagtcccccaaaagagctgaggagatctggcaacagagcgttatcggcgactacctggcccgcttcaagaatgaccgggtgaaggccttgaaagccatggaaatgacctggaataacatggaaaagaaggagaaactgatgtggattaagaaggcagccgaagaccaaaagcgatatgagagagagctgagtgagatgcgggcacctccagctgctacaaattcttccaagaagatgaaattccagggagaacccaagaagcctcccatgaacggttaccagaagttctcccaggagctgctgtccaatggggagctgaaccacctgccgctgaaggagcgcatggtggagatcggcagtcgctggcagcgcatctcccagagccagaaggagcactacaaaaagctggccgaggagcagcaaaagcagtacaaggtgcacctggacctctgggttaagagcctgtctccccaggaccgtgcagcatataaagagtacatctccaataaacgtaagagcatgaccaagctgcgaggcccaaaccccaaatccagccggactactctgcagtccaagtcggagtccgaggaggatgatgaagaggatgaggatgacgaggacgaggatgaagaagaggaagatgatgagaatggggactcctctgaagatggcggcgactcctctgagtccagcagcgaggacgagagcgaggatggggatgagaatgaagaggatgacgaggacgaagacgacgacgaggatgacgatgaggatgaagataatgagtccgagggcagcagctccagctcctcctcctcaggggactcctcagactctgactccaactgaggctcagccccaccccagggcagccagggagagcccaggagctcccctccccaactgaccacctttgtttctcccccatgttctgtcccttgcccccctggcctcccccactttctttctttctttaaaaaaaaaa

SEQ ID NO: 59647 - DNA, 4239 bp, Homo sapiens
ctcagggagggcaggagagcctgaggagtggcggggccgccagataatagattctaaggagacatggattcctttcaactctgaggattcacagcagctggaagaggcatatagctctggaaaaggttgtaatgggagagttgttcctactgatgggggcagatatgatgttcatttgggggagaggatgcggtatgctgtatactgggatgaactggcatcggaagtgagacgatgtacgtggttttacaagggggacaaagacaataagtatgttccctactcggagagcttcagccaagttttagaggaaacttacatgcttgctgtaactttggatgaatggaaaaagaaactggaatctcccaacagagaaattattattttacacaatccaaagcttatggtgcattaccagccagttgcagggtctgatgattggggttcaacacccatggagcagggtcgaccaagaactgtgaagagaggagttgagaacatctctgttgacattcattgtggagaacctttacaaatagatcacttggtttttgtagtccatgggattggaccagcttgtgatctccgctttcgaagcattgtacagtgtgttaatgattttcgcagtgtttccttgaacttgctacagacacattttaagaaagcccaagaaaatcagcagattgggagggtagaatttcttccagtcaactggcacagtcctttgcattctactggtgtggatgtagatctgcagcgaataaccctgcccagcattaaccgcctcaggcacttcaccaatgacacaattctggatgtcttcttctacaatagtcccacctactgtcagactattgtggacacagttgcttctgaaatgaaccgaatatacacactttttctacagaggaaccctgatttcaaagggggtgtatccattgctggtcatagtttaggttcgcttatattgtttgatatcctaacaaatcagaaagattctttgggggatattgacagtgaaaaggattcgctaaatattgtaatggatcaaggagatacacctacactagaggaagatttgaagaaacttcagctctctgaattctttgatatctttgagaaggagaaagtagataaggaagctctggctttatgtacagaccgagatcttcaggaaataggaattcctttaggaccaagaaagaagatattaaactatttcagcaccagaaaaaactcaatgggtattaagagaccagccccgcagcctgcttcaggggcaaacatccccaaagaatctgagttctgcagtagcagtaatactagaaatggtgactatctggatgttggcattgggcaggtgtctgtgaaatacccccggctcatctataaaccagagatattctttgcctttggatctcccattggaatgttccttactgtccgaggactaaaaagaattgatcccaactacagatttccaacgtgcaaaggtttcttcaatatttatcacccttttgatcctgtggcctataggattgaaccaatggtggtcccaggagtggaatttgagccaatgctgatcccacatcataaaggcaggaagcggatgcacttagaactgagagagggcttgaccaggatgagtatggaccttaagaacaacttgctaggttcgctgcggatggcctggaagtcttttaccagagctccataccctgccttacaagcttcagaaacaccagaagaaactgaagcagaacctgaatcaacttcagagaagcctagtgatgttaacacagaagagacctctgtggcagttaaagaagaagtcctgcctatcaatgtggggatgctgaatggaggccaacgcattgactatgtgctacaggagaagcctattgaaagttttaatgagtatttatttgctttacaaagccatctatgctactgggagtctgaagatacagtattgctcgtcctcaaagagatctaccaaacccagggtatcttccttgatcagcctttacagtaaaaatgacccatctatggctgcttaatacggacattgagggatccttccccagaaaatccacctgtttgttgctgcaattttcctctcctcagctgcgtcatttcctgcatgttgcctgccacttactcaccactggggtctttggaagataatcttcctctttggaaatgaatggaaaagcaaaaggccctattacttttaaccactggcttcatataaacacttgccatttttttctgcatagctgggggtggtttgtgtctttaattctttgatgatagtttatagttgccacactttattgattagtacttgacagggtgtaaagcctattttgggtttgatttgttttgggtggggtagacatgtttttaaggaacttattgcttatctttagaaaatgttctagtttggaaacagattcttgagattcagaaggcattttggagtacacttatctcttgtttgtgttgaactgaaggctaagtctcagtggacatggaaaagacttttgggtgatttatttttgaacctgcatttctttcttatgtgtagggtatgaagaaagactagaatgtagctttaaaaaagtgttgtttactctcttagaactgacagacttattgccagaaatcactgatgttcattgtttttgcaactgtttgagctgctgtaagagtctaaagttgacaagttagttcatgttaggtgcatctttataaagcaaagatgttgtatatcctaggcctcccttttatatttgatagaagttatttgctaatagcttctattcttacgttgaaaatagttgtaaaagctgatgaacctgaaattgtgtagcctctacaggctgctgaggttctaaataaaaccttttagtggtgcctttatggtgaaacagaatttgtcacctgccatttctacttgagctaaggtagtattgtgtatcctctttccttcttaggtatccataatccacaaagcatatttaaaaggctcttggcacgggcagcattggttgagcaggtaggtttggctagggggaaatgtttaacttgttctgaaagaaaaacttatgtctgtagggtccaagaaacagctattccagagtcagtgtcagctgagtctggaacatatgaagtgaggtttacttctaagaacacaagtgactgcacactaattttgtcaaggcatcttttcactactttgctgtagatttttcttcttcattggtcagtttgtcattgtctttgtagttctctttatgataatcctttatacttgctctcagattccacaggcctctgtttatagagtggcaaaggcaggcgagctgtggtttattgtttataaatttttttataaatgttatggtattcaaagccactgacatttaatatttactgaagccattccttagacagcagtggtctttatccctttctggaaagaaaaggaaaatgaagggtaattactgtcaccatggagattgtagaggtaaggttggggtataggtcaggcctggcctttctttgtcatctgcttatagtctagtgctaagtatgccactaagtttcagatatatggaatactttatttttttaaaggtatataaactctgagttattgagaattaagtattcactgtatattaaggggaagcttttgccaagttgtggtcttcaaatttatgtttactcttcctattggcagaataggtgctatttaagagtaaaccaaaggataagcagagggagtccctataaccaaagatggacagcatagccctggatagccagataaaccactctttgtattaagaaatgtttctttcctagtggtgaggggtgggtaactgtgaaagagctttatatcttgtctattcatggtattatagctgtatattcccaggatgataagcttgattgaaatcctgtatttagtcatatattatttgcgctgcttcatttgtatcatgtgcaatctctagaccaaccctatttttaaactctggtacagcatcattttgtacatattcccagctgcagaactagtatcacttatctcagcaaaagagattgtttgcatggaaagattaatagcactgattagatttctaatattttgcatttttgaaatgtttgttttctacgtgattatatttaaaactttagtaaatactaacatgaaaccataaaaaaaaa

SEQ ID NO: 59648 - DNA, 2285 bp, Homo sapiens
agcaacgctcccaacttatcgactcgccctcctcctccccagagcgagagaggggcgggctgagcccggatccggggtgcactcgagcgttcccagcgctcggcattcaccccgcctcagagccgactttcgaagggggattgagcctcggaggaccaggcgtcttactccaaagctcagggcggcccccgtcttttctttccacacccctgtgcccgtcggatgctggccgggtgagcggccgggccgaggattccggagcccggggccgcgtcgccccgtcgggtactgagctgaacgcaccatggccggctgctgctgcctgtccgcggaggagaaggagtcgcagcgcatcagcgcggagatcgagcgacagcttcgtcgggacaagaaggacgcgcgccgtgagcttaagctgctgctgctgggaactggtgaaagtgggaaaagcacctttatcaagcagatgagaattatccatgggtctggttacagcgacgaagacagaaaggggttcacgaagctggtttaccaaaacatattcaccgccatgcaagccatgatcagagcgatggacacgctaaggatacagtatgtgtgtgaacagaataaggaaaatgcccagataatcagagaagtggaagtggacaaggtctccatgctctccagggagcaggtggaggccatcaagcagctctggcaagatccaggcatccaggagtgttacgacaggaggagggagtaccagctgtcggactctgccaaatattacctgactgacattgaccgcatcgccacaccatcattcgtgcctacccaacaagatgtgcttcgcgtccgagtgcccaccaccggcatcattgagtatccatttgacttggaaaacatcatctttcggatggtggatgttggtggccaacgatcggaaagacggaagtggattcactgctttgagagtgtcacctccattattttcttggttgctctgagtgaatatgaccaggtcctggctgagtgtgacaacgagaatcgcatggaagagagcaaagccttatttaaaaccatcatcacctacccctggtttctgaattcgtctgtgattttattcttgaacaagaaggatcttttggaagagaaaatcatgtactctcatctaattagctatttcccagaatacacaggaccgaaacaggatgtcagagctgccagagactttatcctgaagctttaccaagatcagaatcctgacaaagagaaagtcatctactctcacttcacatgtgctacagatacagacaatattcgctttgtgtttgctgctgtcaaagacacaattctacagctaaacctaagggaattcaaccttgtctaaaagctgctgcccactcctcccctataacagaagatgtgatttgcaaactccttgttttatttgcaagtgcttctgacatcaccagagccagccccatgccaggaactaaggatgtcatgtagatcgtggggacagagatgggtgatggaacttggaagatatttgagtttaccaacatactttaaaagtccttacatcccaaattgtgtttataattattttcttgacttttggctataagattttgtgtaatttttgaatttggtgttttctagaatttttaaaagccactttgatttagttttaaatatgtttaaaaatagcgattaaaattatgtaagcaaggagcctgttagtttatagatcatgccttcaaacctctagagttaatttgggtgacttttttaaaaataagaatgttaatgggtttgaagctttttattaaaccttgtaatttagagacatttttaattgtgtttctcacctcatgctgaagggtgactcctttaacatgccaccaaagattttttttaaacacttggttctttttgtgtgttaactttctaagccaaattaatggatatataagtatatctaatttagctttgccacagtttgatcaccaagaagccaaagctgacatagagtaaatgggctctagatagcatatatgttttattggtgaaaaatgtgtgtgtgtgcgcgtgtgtgtgtgtgtacatttttacccccaatgtatatgaccagatcttaaaaatgtatgaaatggctagaagtccacattgtttgacaaatgttacgtaaccctgccaaagttctgatggccaccacagatttgctgtttgaattatgtatgctgtgcctttctgaggaggctaagaatataccattcagatattaaaaaaaaaaaaaa

SEQ ID NO: 59649 - DNA, 924 bp, Homo sapiens
agtcagaagaacttgatagagagaagaaattaaaagaggatagtccgaggaaaactcctaataaagagagtggtgtgcccagccttcctgtatcgttaacaagcattaaagaggagcccaaagaggccaagcatcctgattctcaatcaatggaggagagcaagctgaaaaatgatgatcgaaagactcctgtgaactggaaggactctaggggaacaagagtggctgtctcctcacccatgagtcagcatcagtcatacatacagtacttgcatgcttatccttacccacagatgtacgaccccagccatcctgcataccgggctgtttctcccgtcctaatgcacagttatcctggggcatatctctctccaggatttcattatcctgtttatgggaagatgtcagggagagaagagacagagaaagtcaataccagccctagcgtcaacacgaaaacaaccactgaatctaaagcactggatttgctccagcagcatgctaaccaataccgcagcaagtctcctgctcctgtggaaaaggctacagctgagcgggaacgggaggcagaaagggaaagggatcgccactcccccttcggccagcggcacctgcacacgcaccaccacacccacgttggcatgggttacccgctaatcccgggtcaatatgacccttttcaaggcttgacctctgctgcccttgttgcctctcagcaggtggctgcccaggcatctgcatctggaatgtttcctggacaaagaagagaataacaagattggacatgtacattgtcatgtgactggatcacatggggaagcgctttatacagacatcagttccatggtgttaatttgaaatgccttaatggcaggcaaaaaccagtcatttcatttttgtaaattacagattttatcacaggag

SEQ ID NO: 59650 - DNA, 808 bp, Homo sapiens
  misc_feature (1)...(808): n = a,t,c or g
agtcattctctgcattttgggtgggtggatctttaaaaatgccgacagaagcatggagaaaaagaagggggagcctagaaccagggccgaagctcgcccctgggtggatgaagacttaaaagacagcagtgacctgcaccaagcagaagaagatgctgatgaatggcaagaatcagaagaaaatgttgaacacatccccttctctcataaccactatcctgagaaggaaatggttaagaggtctcaggaattttatgaacttctcaataagagacggtcagtcaggttcataagtaatgagcaagtcccaatggaagtcattgataatgtcatcagaacggcaggtttgtaattgcagatggggtctttggaaatgttagtcaccttactggtgtgactccaacaatggaaaaatgtcaaagtttaaacatagcgaataaagcctagagtgatatgtttatctataaagtcttacccaaatgctgagtgagtgccagaaacacaatgacttctactttccacattttgactattacaagcttcttggaagaagatgtgacaatagttcaaaacttctgaaattattcagttcatgatcttttaattaaaaaccaagatttctgatcacatcattatattaatatattggaggagatacaccttctttctttccctctccttaaaacacaccagacatacacacactcgcatactcacagntatatttgttttttttggaagcaaattttttatattacacaccctgatgctgtagtacagtattctcattaactaagcaaagttactt

SEQ ID NO: 59651 - DNA, 1968 bp, Homo sapiens
tttcgtattaaggtattttaagacagaaagagagagaggagagaaaccgcattcataaaaaagaaatcctctttttagaacatctcttggtggtaccatcagaaatgtcttccttaagtggaaaagtccaaaccgttttgggccttgtagagccaagcaaactgggccgtaccctgacccatgaacacctggccatgacctttgactgctgttactgtccacctcccccgtgccaggaagctatttccaaagaacctatcgtgatgaaaaatttatattggattcagaaaaacgcctattcccataaagaaaaccttcaattaaatcaggagacagaagccataaaggaagaactgttgtattttaaagctaatggtggaggggctttggtggaaaacacaaccactgggattagccgagacacacagacgttgaagaggcttgcagaagagactggcgtccatatcatatctggagccgggttttatgtggatgcaactcactcctcagagaccagggccatgtcagtggagcagcttaccgatgtccttatgaatgaaattctccatggagctgatggaaccagtatcaagtgtggcattattggagaaattggttgctcctggcctttgactgagagtgaaagaaaggttctccaggccacagctcatgcccaggctcagcttggttgtcctgttattatccatcctggacggagctccagggcaccatttcagattatccgaatattgcaagaagcaggcgcagacatctccaaaacagtcatgtcacacctggataggactattcttgataagaaagagctcttggagtttgctcaacttggctgctacttggaatatgatctctttggtactgaactacttcattaccaactcggcccagatattgacatgcctgatgataacaaaagaattagaagggtgcgtctcctggtggaagagggctgtgaagatcgaattctggtagcacatgacatacatacgaaaacccggctgatgaaatatggaggtcacggctattctcatatactcaccaatgttgttcctaaaatgttgctgagaggcataactgagaatgtgcttgataagattctaatagagaaccctaagcaatggctaactttcaaataggatggttgcttatgaattcacaccttgagtataaaacttgcagagaacattcagcgatttccagtccactgtgagatattaatcagttacctaggactaatgacagatcatttccttctgatgagaactaggagggtttgccttctctgagaccagctattacaactgtgcctctagggagttactcagcctaattgagccctattattttaacttaacaaaataaatacagaagtacctatttctaaacaatgatttaaagtctatatcccctaagcggagttgttgtttttctccctaatctatcagctgcactacttgagaaaatttaaagtgtttctagttaaattatttccttcttgagcgatctaatgtttcttgtaatattgatgatcctactaattatcctgctgttctttaattaatgcttaatgaataatatggcagtgtaaaatagcttctgcaacaagggaagttaaattttgagacttttttccccaaaggatactgactgtaatacaattaccaattcacaatgataaaaatattttgaaaggttaattttatactgtccacctatctatatattcttctactgaaatgattttgatatctttggctttccggtatctatttttgccatacattttgctgttttgcaaagtttgtataagaacacataacactactgaattataaaaactcaatcataaaagtcaaaatatattacataatatagtttaatgaatcattacatttataataacaaaggccacaatttaattaattggtaagatataatgcaaaaaaaaaa

SEQ ID NO: 59652 - DNA, 2480 bp, Homo sapiens
tgggaaaaaaaggagtgagagaggataaaagaatggaagacagagtaatagggacattacatgaagaccatggataaattatatttttttctctttccgcctctactaacctagcaaatctctagaagatgacggtgttctttaaaacgcttcgaaatcactggaagaaaactacagctgggctctgcctgctgacctggggaggccattggctctatggaaaacactgtgataacctcctaaggagagcagcctgtcaagaagctcaggtgtttggcaatcaactcattcctcccaatgcacaagtgaagaaggccactgtttttctcaatcctgcagcttgcaaaggaaaagccaggactctatttgaaaaaaatgctgccccgattttacatttatctggcatggatgtgactattgttaagacagattatgagggacaagccaagaaactcctggaactgatggaaaacacggatgtgatcattgttgcaggaggagatgggacactgcaggaggttgttactggtgttcttcgacgaacagatgaggctaccttcagtaagattcccattggatttatcccactgggagagaccagtagtttgagtcataccctctttgccgaaagtggaaacaaagtccaacatattactgatgccacacttgccattgtgaaaggagagacagttccacttgatgtcttgcagatcaagggtgaaaaggaacagcctgtatttgcaatgaccggccttcgatggggatctttcagagatgctggcgtcaaagttagcaagtactggtatcttgggcctctaaaaatcaaagcagcccactttttcagcactcttaaggagtggcctcagactcatcaagcctctatctcatacacgggacctacagagagacctcccaatgaaccagaggagacccctgtacaaaggccttctttgtacaggagaatattacgaaggcttgcgtcctactgggcacaaccacaggatgccctttcccaagaggtgagcccggaggtctggaaagatgtgcagctgtccaccattgaactgtccatcacaacacggaataatcagcttgacccgacaagcaaagaagattttctgaatatctgcattgaacctgacaccatcagcaaaggagactttataactataggaagtcgaaaggtgagaaaccccaagctgcacgtggagggcacggagtgtctccaagccagccagtgcactttgcttatcccggagggagcagggggctcttttagcattgacagtgaggagtatgaagcgatgcctgtggaggtgaaactgctccccaggaagctgcagttcttctgtgatcctaggaagagagaacagatgctcacaagccccacccagtgagcagcagaagacaagcactctgagaccacactttaggccaccggtgggaccaaaagggaacaggtgcctcagccatcccaacagtgtcgtcagagggtccccagggcattttcatggcaagtacccctctgcccccactccagcagtgcttcccaaagtgtgctctgtcacctgctttgcaatcggcttccattagcgcatgttttattttggtgtgacggttggccctcctaaacacggactttcctcaggctggttcaagacggaaaaggactttcttctgttttcttccaaagtgcaaccacagtggagagcccacggtgggcttagcctgcctaggcccttccatttctcttctttgaccgtgctaggaattccaggaaagtgcattcctgccctggtgaccttttcctatgtctaggctcctccacaggtgctgctattttgtgagctccggctcctgtttagcttttatttcagttctaacctcagtccagaaacatatgtgaggttgtttccctcttcagccacggctacaataccggaaaatgctagtttttatttatttttttaagtagtgcttcctaaatggtttgcatgagagccacctggggtacatgttgaaaacttatttggggtctaccccaaacctaataacccaaatttggggatggggcccaggaatatgcatttttaaaaagtcatctgcccttcccaggtgattctgtaagttgtccctcaactgtacttggagaaatcgtgttttaaagcagtagtccacaaagtattctgctcatgtgcccccaaaagtattttgaaaaatcatgtataccctcacccatctaagttgatatctaaaattttatctaagttggtatctaaaatttttcatgggaagttaaatagttgacaaagtatgtatttgctggtgtcgtgtaaatattggtattttaaaataaaacctgttacatcactattttaaacatatccagtacaatttaaatatcacaacaatttgacacccttcattcatttataaaaataaatgagctagttctttagtagttaaacatttcaaattgg

SEQ ID NO: 59653 - DNA, 1099 bp, Homo sapiens
ccgcggagcagcgcagggagccaggcgggctgccggcgggtgtgaagaaaaaaatgacactccaatgggctgcagtggcaacctttctttatgccgaaataggactcattttaatcttctgcctaccttttattcctcctcagagatggcagaagattttttcatttaatgtctggggtaaaattgcaactttttggaacaaggctttccttaccattatcatcctattgattgttctatttctagatgctgtgagagaagtaaggaaatattcctcagttcataccattgagaagagctccaccagcagacctgatgcctatgaacacacacagatgaaactttttaggtctcaaagaaatctttacatttctggattttccctatttttttggctagttttgagacgtctggttacgcttattactcaactggcaaaagaactgtcaaacaaaggtgtacttaaaactcaagcagaaaatactaacaaggctgccaaaaaatttatggaagaaaacgaaaaactaaaaaggattttgaaaagccatggtaaagatgaagaatgtgttttggaagcagaaaataaaaaactagtagaagaccaggagaaactgaaaactgaattaaggaagacttcagatgccctttctaaggcacaaaatgatgtgatggaaatgaagatgcagtcagagagactttcgaaagaatatgatcaactcctgaaagaacactctgaacttcaggatcgtttagaaagaggcaacaagaaaagactgtgaactttataaaagacacttgcaatatactgtgtcaaaatgataattttgttatgttagcctctagaaaatttaagttcagaaaaatgcactatgaccggttcgtaatttttttaatgccacacataggttgtattgtaatggcattatcaaaatatttgatgatgtttcagatatattgcaaagtctgtattccagctcttaagaaaaatataagcatgttaaataccatatttacatattgataatgtcattggtatatggtggctgtttaccaataaaaggaaaaaattcattaaccggttgcttccaaaattagatgt

SEQ ID NO: 59654 - DNA, 1135 bp, Homo sapiens
ctttccccccccgcggttttaaaaccccgcccccggaatttaattttggggccccataaaaaaaattttaccttccccccccccgggccttaaacttgggcccctaaaaagggccccccttttttttttttttgtgcgctggctgctttatttaagggcttgtgattgacagctgtccccatcccagcccttgcttcctctacaaaagcaactgaacatgaaacgggcttcctggttaccatggggaggggggcggctccctgtcagggcccagcccagggacctggggaacggcggctttgaatccccggccacgggcactagaaggtggagaaggagggcgggaagtccagttgagatgggcacggtgctggtgaggaggctggagaggtcctgttccagcctctagtgggcttcccttgtccaggatgtcaggaaacagtcccccaattccgccggggggagccagagccccaaggctggggggccaggggctgcagggaacacagcaaaggctttcggagccaagtgagatcagttcaggcccctcaggcccaggaacccgacaccaccgcgtacctgtgagcacacactcacggccaccccagtgacacgtgcagccacacacacccacactcactcacacccacacccacacgcacacccactacacacacacacacacacacacacacacacacacacacacacggctgtgacagcccaggacccacaccctggacccctggaatgtctctggaccagaaccgaacagctggatccacagtacgcggggctgctcagggggcgggtcctctgtgtcgctactgattggccgcctcgcaggcgtctatccaatcactgtacacatccacgggttctgacagatacgttatgggcgtctggaattcctctaggcacacggtacaagagatgactccggtgttgcgggcacggtccattttcacatcacaggatttctcgtggttgcagaaggggcaggtgaactgggtctcgagggtgcctgtcatcttcttcttgggaggcggctttcgttttgactttctgcgccccatgtctgcaggtggatgagccttctccagctgcgaaagctccgttcctcgtgccacctagt

SEQ ID NO: 59655 - DNA, 5421 bp, Homo sapiens
ctgctctgccggggaaggaggaggagagcagatgagtgagctgccctctctggagaggggacagggcagggcctcggcaagctccactggtgatctcgcgtaggtctccttcatccagacgcacagctggaggatcgtgggagcaggaaggggacaggtggcccatctggtgacactgctcctctcagcctgaatgggctcctggccccttggaccctcgcagagctcttgcccagaacgttgcccactccttcctcctcctgtcagctccggggcttgcagagggggcagcctggctgaggagagctgcgggtgctggccctggcccacggcgagctggcatgccatgccgtcctgaccgcctccctcctctccctcaggtcccgtttaatggattctgacatggattatgaaaggccaaacgtagagaccatcaagtgcgttgtggtgggggacaacgccgtgggtaagaccaggctcatctgtgcccgcgcttgcaatgccaccctcacccagtaccagctgctggccacgcatgtgcccacagtatgggccatcgaccaatatcgtgtgtgccaggaggtgctggaacgctcccgagacgtggtagatgatgtcagcgtctctctgcgcctctgggacacctttggagaccaccacaaagaccgtcgctttgcttatgggagatctgatgtggtggttctgtgcttctccattgccaaccccaattccctccaccatgtcaagaccatgtggtacccagaaatcaagcacttctgcccccgagcacctgtcatcttggtgggctgccagttggacctgcgctacgctgacctggaggctgtcaacagggctaggcgacccttggctaggcccatcaaacctaatgaaatcctgcccccagagaagggtcgggaggtggccaaggagctgggcatcccctactatgagaccagcgtggtggcccagttcggcatcaaggacgtctttgacaacgccatccgagctgcactcatctcccgccgccacctgcagttctggaagtcccacctccgcaatgtgcagcggcctctgctgcaggcacccttcctaccccccaagccaccgcccccgatcatcgtggtgcccgaccctccctccagcagcgaggagtgccccgcccacctcctggaggacccgctctgcgcggacgtcatcctggtgctgcaggagcgggtgcgcatctttgcccacaagatctacctctccacctcctcctccaagttctatgacctgttcctcatggacctgagtgagggggagctggggggcccctcggagccagggggcacccacccagaggaccaccagggccactctgatcaacaccaccaccatcaccaccaccaccatgggcgagacttcctgctccgagcagccagctttgacgtgtgcgagagcgtggatgaggctgggggctccggtcctgctggcctccgtgcttccaccagcgacgggatcttacggggcaacggaacagggtacctaccgggcaggggtcgtgtgctgtcttcctggagccgagcttttgtgagcatccaggaagagatggcagaagatcctctcacctacaaatcccggctgatggtggtggtgaagatggacagttccatccagccggggcccttccgggctgtcctcaagtacctgtacacgggggagctagatgagaacgagcgtgacctcatgcacattgcccacattgctgagctgctcgaggtctttgatctgcgcatgatggtggccaacattctcaacaatgaggccttcatgaaccaggagatcaccaaggccttccacgtccgccggaccaaccgggttaaggagtgcttggcaaaaggcaccttctcagatgtgaccttcatcctggatgatggcaccatcagcgcccacaagcccctgttgatttccagctgtgactggatggctgccatgtttggggggccatttgtggagagctccacccgggaggtggtgtttccctacacaagcaagagctgcatgcgggccgtgctggaatacctctacaccggcatgttcacctccagccccgacctggatgacatgaagctcatcattctagccaaccgcctctgcctgccacacctggttgccctcacagagcagtacacagtgaccgggctgatggaagcgacccagatgatggtggacatcgatggggacgtccttgtgttcctggaactggctcagttccactgtgcgtaccagctggccgactggtgtctccaccacatctgcaccaactacaacaacgtgtgccgcaagttcccccgagacatgaaggccatgtccccagaaaaccaggagtatttcgagaagcatcggtggccacctgtgtggtacctgaaggaggaagatcattaccagcgggcacggaaggagcgtgagaaggaggactacctccacctcaagcggcagcccaaacggcgttggctcttctggaacagtccatcctccccgtcttcctcggcagcctcctcctcatccccatcttcctcctcggctgtggtctgagatgctgccaccctcttctgaccctgctgctgttgtccccatccgccttcacccctctgctcttccgcatcaccccatccaccttacagggaccagggggcccacgtaaccaggacccagagggtggagctcttcttaccagccaccgtggctcagccagagaggagctgagccctgtggagcagaacgggaaccacctgcagaggtccccagacccaaagcaggacgggagacaactgcttggaggagcgaagagccctggcattttatctctgggtttgagagccctagagtcaaagggaaagcctcccagcctccagggcttctctgtgtgtcttggttgctgctctggccagggaggcagccccactcccagcaagcagaagtgatcctcgagggtcctgcccctgttggccatatctttccaccgacggacttgagtgttgcatttgttttgtgggcatttccacacgaagcctactcacaccctcactggagaagtcagggtagaaattgagccttcagagcccaactcaaggcttctacatcctggggtgcagctgcaaaaggccagacgtggaaaggcctgtatcctgccagtgtccctccgtcccagggggctgtgctggcacagacctgagaatggggacacaggtcattcagagctccaggcctggaagcagtgcctcttggtgcaacaagaaacttctccctcaccccctcctttaccctcagatttggagatggtaaccaaaggaagcagctgggacaggtggagaaggaagtaggaatgagtgcacggcgaccccgtgctcctcagggccctcccctgcctctgggtggcactgctttttataggggggggcaaaattagcaaaaaacaaaaaccaatgacaaccaaactgaaaccgaaacgaaaaatcaacaaacactctgtcctctatccctccaaagaatgaaaatcagaaaaagcccctgcctagctcacatttctataaacagaggcccccatgatgaggaggggaagatttaagttgctgaatggactccaatgcctttcaggaaaggactcggcacttctctgactgcggaggccctgaccctgccagctggctccgagggcaacacaggggcctggcctctagagggctggtgattgaggggcccgggctggcggcaaagaggggtttggtctcggggcttaaatggcaccagactcttgcttttgcccatctggagactgcaggctcccttccttaccctcagagagtgcttatggtgggtgtttttgcggggctgcaataggggccaaaagtcagggaaaggggcactgacctgtagtgaaaggccacaggacacagccttattactgcctggggtgggataaggggaaggagaagagcgagaatggagcaggaggaaaagcagagttggtctagagaggaggagggcggggctggaggaatgtgggggattgaaactagctcccagcccccatggggcagcagctgggccacaattgcccctttccgttttctaaccccgactcagatttcaccacccacactctttttaggtgtaaaagatggagtcccacggaggaggggcagagccaggaggcagtggggctgtgggctcagagctcaggagtcgccttacctgagagagatgttctagctgagagggcctggccctggggtgggctccaggaaaacgctggttaggcctgggattgagctaacctgaaacaaaggtagtaggcaggacctaatgaccagaggttaaatcctcatcaagagagaccaggcggctggaggacaagcggctctaaccctgggggcggccatgttgtccaggcccaggcccctccaggactgtggctgcctcccctccacggcctccagggcggctggctggaaagccacgcgtatgctgccctctacaggctgctcggcctccctgcagctcagcgcagcccagggctccaagtgaggcccagaagcccatgggcagggctggggggacgaagggggaacccggagcacctccacttctagggaagatggacagcgtgggggcacacctgggcctcccggaagctgtggacgaaagggagagcgggtcctccagggcaaggggaacgggaaataggtctcctaggtgcctgaagcgctgagcaacctgggtaccctggtggggatgcagggaaggccggggcagagaaagcgaaggtcgacccagggctgtaggaagccataggagagtgaccacgggattccctgagaaacagggccggccccccaacttcagggacccaccgcccattccccgagagctgtcggaaccagatgcaacccggcagcccagagaactctcctgggaggctgtgggtgagccaggccaacattggtgtccctgtccccagagggaggagcaggcaggagagagaggggaaggaggtatgaatcccagtccccaggaacctagctctttaaactctggggagtcggattcaggaaacacccccaggaggccaagcctgaaaacagaggggagggaggaaggaaggagtcccagcaggagcacagccctggtttcctgtcactcagagctgattcacaggaggaggggaggttggggggcgggagacaaaaaccacacctctttttatataaggtttcatatttaatttggtcatggattcataaatacataagtattttgtacacaaaaaaaaaaaaaaggggcggccgttttaaaggacccttgggggggcccaagtttacccgggcatgcagaggaatagttctctccttatagggagccgaattaaaacgcaactgggaa

SEQ ID NO: 59656 - DNA, 1205 bp, Homo sapiens
cgacgccgccacctccggaacaagccatggtggcggcgacggtggcagcggcgtggctgctcctgtgggctgcggcctgcgcgcagcaggagcaggacttctacgacttcaaggcggtcaacatccggggcaaactggtgtcgctggagaagtaccgcggatcggtgtccctggtggtgaatgtggccagcgagtgcggcttcacagaccagcactaccgagccctgcagcagctgcagcgagacctgggcccccaccacttcaacgtgctcgccttcccctgcaaccagtttggccaacaggagcctgacagcaacaaggagattgagagctttgcccgccgcacctacagtgtctcattccccatgtttagcaagattgcagtcaccggtactggtgcccatcctgccttcaagtacctggcccagacttctgggaaggagcccacctggaacttctggaagtacctagtagccccagatggaaaggtggtaggggcttgggacccaactgtgtcagtggaggaggtcagaccccagatcacagcgctcgtgaggaagctcatcctactgaagcgagaagacttataaccaccgcgtctcctcctccaccacctcatcccgcccacctgtgtggggctgaccaatgcaaactcaaatggtgcttcaaagggagagacccactgactctccttcctttactcttatgccattggtcccatcattcttgtgggggaaaaattctagtattttgattatttgaatcttacagcaacaaataggaactcctggccaatgagagctcttgaccagtgaatcaccagccgatacgaacgtcttgccaacaaaaatgtgtggcaaatagaagtatatcaagcaataatctcccacccaaggcttctgtaaactgggaccaatgattacctcatagggctgttgtgaggattaggatgaaatacctgtgaaagtgcctaggcagtgccagccaaataggaggcattcaatgaacattttttgcatataaaacaaaaaataacttgttatcaataaaaacttgcatccaacatgaatttccagccgatgataatccaggccaaaggtttagttgttgttatttcctctgtattattttcttcattacaaaagaaatgcaagttcattgtaacaatccaaacaatacctcacgatataaaaaaaaagtcgacg

SEQ ID NO: 59657 - DNA, 2116 bp, Homo sapiens
  misc_feature (1)...(2116): n = a,t,c or g
cggacgcgtgggctggaacaaacatggccgctctggcgcccgtcggctcccccgcctcccgcggtcctaggctggccgcgggcctccggctgctcccaatgctgggtttgctgcagttgctggccgagcctggcctgggccgcgtccatcacctggcactcaaggatgatgtgaggcataaagttcatctgaacacctttggcttcttcaaggatgggtacatggtggtgaatgtcagtagcctctcactgaatgagcctgaagacaaggatgtgactattggatttagcctagaccgtacaaagaatgatggcttttcttcttacctggatgaagatgtgaattactgtattttaaagaaacagtctgtctctgtcacccttttaatcctagacatctccagaagtgaggtaagagtaaagtctccaccagaagctggtacccagttaccaaagatcatcttcagcagggatgagaaagtccttggtcagagccaggagcctaatgttaaccctgcttcagcaggcaaccagacccagaagacacaagatggtggaaagtctaaaagaagtacagtggattcaaaggccatgggagagaaatccttttctgttcataataatggtggggcagtgtcatttcagtttttctttaacatcagcactgatgaccaagaaggcctttacagtctttattttcataaatgccttggaaaagaattgccaagtgacaagtttacattcagccttgatattgagatcacagagaagaatcctgacagctacctctcagcaggagaaattcctctccccaaattatacatctcaatggcctttttcttctttctttctgggaccatctggattcatatccttcgaaaacgacggaatgatgtatttaaaatccactggctgatggcggcccttcctttcaccaagtctctttccttggtgttccatgcaattgactaccactacatctcctcccagggcttccctatcgaaggctgggctgttgtgtactacataactcaccttttgaaaggggcgctactcttcatcaccattgcactcattggcactggctgggctttcattaagcacatcctttctgataaagacaaaaagatcttcatgattgtcattccacgccgagtcctggcaaatgtagcctacatcatcatagagtccaccgaggagggcacgactgaatatggcttgtggaaggactctctatttctggtcgacctgttgtgttgtggtgccatcctcttcccagtggtgtggtcaatcagacatttacaagaagcatcagcaacagatggaaaaggcaagttctctcgtgctcattttgtgttgctcagcttgctctgaacccacgtgctgcggcactgcggaggagtggaggcagcctatggtgtcaagatgctgtcttcctgggaggagagctaggggaggcctggggcccacttcgtgagagcagccaggggtagtttggagaaggaggtgttgagtcagttgtataaggaggaggttgggngtgactgctgcttattaagatgattcatttcatttccactcgtggttgtgattttcaccttctcaaaactgagtcagcaagagaaaatcttgtcttagaagggccagataacacttcgctgtgagaacaggagggataatggattggagatggctatgtgtaaagcagccctgcctgctgatttaacacactttcaaaatagatgtgtcagtattcatttaaagcaagactctgatgacagaaggaaccttgaaaactacctgatattgaaatggttgtgccctttatagcccttttgcatctccttgactttccagtcatgcctcctaaatcagaagaaaagctgcaaagaaaatgttttgtgtggttctgggcttatttgaataatgttcatgaccacaggctgccatagcacaagtgagaatttcagaccacaagggtttaaggagcagtgctctcttctctcaaagctcagaacggtctctggatccatggtatcgtacacccagtgtggatattaacattctttaatgcaggttatgaataataaataaaacaggtttttgctaataaaaaa

SEQ ID NO: 59658 - DNA, 2184 bp, Homo sapiens
atagaaagcgttcgaatgcgctaccggttcggaattcccgctgacgatttcgtggcgcggtgagccaggcctcggggcctcggagcaaccacccgagcagacggagtacacggagcagcggccccggccccgccaacgctgccgccgggatgctccagaccttgtatgattacttctggtgggaacgtctgtggctgcctgtgaacttgacctgggccgatctagaagaccgagatggacgtgtctacgccaaagcctcagatctctatatcacgctgcccctggccttgctcttcctcatcgttcgatacttctttgagctgtacgtggctacaccactggctgccctcttgaacataaaggagaaaactcggctgcgggcacctcccaacgccaccttggaacatttctacctgaccagtggcaagcagcccaagcaggtggaagtagagcttttgtcccggcagagcgggctctctggccgccaggtagcgcgttggttccgtcgccgccgcaaccaggaccggcccagtctcctcaagaagttccgagaagccagctggagattcacattttacctgattgccttcattgccggcatggccgtcattgtggataaaccctggttctatgacatgaagaaagtttgggagggatatcccatacagagcactatcccttcccagtattggtactacatgattgaactttccttctactggtccctgctcttcagcattgcctctgatgtcaagcgaaaggatttcaaggaacagatcatccaccatgtggccaccatcattctcatcagcttttcctggtttgccaattacatccgagctgggactctaatcatggctctgcatgactcttccgattacctgctggagtcagccaagatgtttaactacgcgggatggaagaacacctgcaacaacatcttcatcgtcttcgccattgtttttatcatcacccgactggtcatcctgcccttctggatcctgcattgcaccctggtgtacccactggagctctatcctgccttctttggctattacttcttcaattccatgatgggagttctacagctgctgcatatcttctgggcctacctcattttgcgcatggcccacaagttcataactggaaagctggtagaagatgaacgcagtgaccgggaagaaacagagagctcagagggggaggaggctgcagctgggggaggagcaaagagccggcccctagccaatggccaccccatcctcaataacaaccatcgtaagaatgactgaaccattattccagctgcctcccagattaatgcataaagccaaggaactaccccgctccctgcgctatagggtcactttaagctctggggaaaaaggagaaagtgagaggagagttctctgcatcctccctccttgcttgtcacccagttgcctttaaaccaaattctaaccagcctatccccaggtagggggacgttggttatattctgttagagggggacggtcgtattttcctccctacccgccaagtcatcctttctactgcttttgaggccctccctcagctctctgtgggtaggggttacaattcacattccttattctgagaatttggccccagctgtttgcctttgactccctgacctccagagccagggttgtgccttattgtcccatctgtgggcctcattctgccaaagctggaccaaggctaacctttctaagctccctaacttgggccagaaaccaaagctgagcttttaactttctccctctatgacacaaatgaattgagggtaggaggagggtgcacataacccttaccctacctctgccaaaaagtgggggctgtactggggactgctcggatgatctttcttagtgctacttctttcagctgtccctgtagcgacaggtctaagatctgactgcctcctttctctggcctcttcccccttccctcttctcttcagctaggctagctggtttggagtagaatggcaactaattctaatttttatttattaaatatttggggttttggttttaaagccagaattacggctagcacctagcatttcagcagagggaccattttagaccaaaatgtactgttaatgggtttttttttaaaattaaaagattaaataaaaaatattaaataaaaaaaaaa

SEQ ID NO: 59659 - DNA, 1617 bp, Homo sapiens
atttgaaagatggatgaatcttgggtagaagtgtgcagagggaagcagtgtgagcagagtgggaaagtgtgaggagagccgtgaggagtgtggtgttggtggagaggggaggaagacatcttgtggggaaggtcgggcgggttagagcatagacttcctccagaggccaggagaccatcggaggccaggagatcatcggcgagtgtggcagggaaagggcctgttgaactgactttcccacttgccttttcgttgagaaggagagtaaaggccacgcctgtcccatggctgtttttaagtctcgagtgtggagattgttggtcgtggagggaggggtgttgcctctgcctgaatccctggggtctcactgtattcacttttttctctcctttcagaatattccccaaagcactgagatactaaagaaattgatgacaacaaatgagattcagagtaacatttatacatgatcttaaacattgttttgtagtgtatattacttgtccattcctttaaggggagcagcctgcactcttttgtagattacttttgggggatatattttgagaatgatgaaacggaataaaattgtaaaaaactaaaagtaatctacaaaaaggagtgcaggctgcttcccccttaaagggaatggacaagtaatatacactaccaaaacaatgtttaagatcatgtataaatgttactctgaatctcatttgttgtcatcaatttctttagtatctcagtgctttggggaatattcttaaccaaacccttcaagcttctggtagaaagtataggcttaaaagcttccactgtgattaggtctaatttcatcacatcagtataacacaagtacagaattgctgggattttccatacttgacagtagcttagaactgctgcaggaaggtcgtgtactatattcggttgttctagcaatggacaacacgccgagtctttgaaattctgtgtttttagggctctcaggaaaggagaaggaaggctgccggtggattctgaggttttataatcggtaacatgtcgacatgtgagaatagttatctgcatgttcttccttggacaagagccaaaaaccttttccagccactgatactgttgatcttctgcaacatagcaactgcactgacagagaaaaaccgagggattggattttagatgataaaacacacaaaaagcctctgtggaggacagatgtgtagtgtctgttgttctacaccattcattccagagtttagcacaaccaacttcctcccagactcctgaattcataacaaatgatgacagaaatgctactgcattatttcctatagcaattataaacttggagcacggatatttttctagcaaagaaacttccaaagatgtttttgtttgtcttcgaaggagccgcacttccctcttccgcgccagctgcagacgcacctccctgtcctcgggcgtctccctccgcccctcctcctcctcctcttcgtcctcagtcccagctcggcacggcgccttcaccacctctccgaagaacgtggccgccatagccgccccgtgaccggctggacacaactgcagcgccgcgggaccgcacgccgcttgcgcgag

SEQ ID NO: 59660 - DNA, 1014 bp, Homo sapiens
gcagcctccgccccctcaaccttcgcggggcgcgggccgcagcttttcggttcacagcgggcagggaaagccgcgggaagggtactccaggcgagaggcggacgcgagtcgtcgtggcaggaaaagtgactagctccccttcgttgtcagccagggacgagaacacagccacgctcccacccggctgccaacgatccctcggcggcgatgtcggccgccggtgcccgaggcctgcgggccacctaccaccggctcctcgataaagtggagctgatgctgcccgagaaattgaggccgttgtacaaccatccagcaggtcccagaacagttttcttctgggctccaattatgaaatgggggttggtgtgtgctggattggctgatatggccagacctgcagaaaaacttagcacagctcaatctgctgttttgatggctacagggtttatttggtcaagatactcacttgtaattattccaaaaaattggagtctgtttgctgttaatttctttgtgggggcagcaggagcctctcagctttttcgtatttggagatataaccaagaactaaaagctaaagcacacaaataaaagagttcctgatcacctgaacaatctagatgtggacaaaaccattgggacctagtttattatttggttattgataaagcaaagctaactgtgtgtttagaaggcactgtaactggtagctagttcttgattcaatagaaaaatacagcaaacttttaataacagtctctctacatgacttaaggaacttatctatggatattagtaacatttttctaccatttgtccgtaataaaccatacttgctcgtatataccccctgcctccttctgttccagtcagccaacatatgtacataaaagaacacacaaattcaagaagttggaagattaaattatctgcttatttagtgtaggatggtcaggtagctagctataagtgaaaggaaattttgctgaagagactgagaaatgggtagtggat

SEQ ID NO: 59661 - DNA, 1490 bp, Homo sapiens
cctggagccacacagggatccggagcctgggggaaaagcggcgcgggagccggcacccaccgctggaggggcggcgacggcggccgtagcgacctcgggaggcaagcggagccgccatggccgagttcccgtcgaaagttagcacgcggaccagcagtcctgcgcagggcgccgaagcctcggtgtcggcgctgcgcccggacctgggcttcgtgcgctcccgcctcggggcgctcatgctgctgcagctggtgctggggctgctggtgtgggcgctgattgcggacaccccgtaccacctgtatccggcctatggctgggtgatgttcgtcgctgtcttcctctggctggtgacaatcgtcctcttcaacctctacctgtttcagctgcacatgaagttgtacatggttccctggccactggtgttaatgatctttaacatcagcgccaccgttctctacatcaccgccttcatcgcctgctctgcggcagttgacctgacatccctgaggggcacccggccttataaccagcgcgcggctgcctcgttctttgcgtgtttggtgatgatcgcctatggagtgagtgccttcttcagctaccaggcctggcgaggagtaggcagcaatgcggccaccagtcagatggctggcggctatgcctaaaccacctgtgccacggccccctctggggctgaagccgccgctgggtcacagagcagggtcaccctgcaagcctgaagctggggagccctgcgtggagtcagcccaacagggactgcatttgctcctctctgcccgtcagacataagctctcacagcgctaaggaagcaggcccaggctggcaggcatctcggcttgcaggaggccaactgctgagacctcttctccatcccccttattcagtggaagatgacgggggatctgaggctgtgtctctgccttgtctttagaggacttcagcgtccaagactggggcccacccttctcaccagcactaaatgcactaacaaggactccagacctgcagccccagacccgccgtagtataagcctaacaagcaacacgtagcaccttagtctttgttccaggagagctgagcaagctggtgaaaccactctccttcctttaaacaccgtttcaaccaacctctccctggagccaacctgtaaaaagtgggttgattgctgacagcatggtcttccctccctgcatttcagacataccagttactgaaagcaaatcagttttaagtgatttctcagtgctgaaaagcctgtccaggtttccttccctttcccaagcctctctctgtaatactccctttgggcgaagctaacatcggtgcctccccgaccttgctgactaggcacatgggacgcaaaggagggagggaagcaaggccttgcctggcgagttgtcatgtggttggtggtgactgttttattttttttaataaaaataaagatgagagaaattaaaaaaaaaa

SEQ ID NO: 59662 - DNA, 2357 bp, Homo sapiens
tttcgtggcaggcgaggggccgtagggcctggaaggcgccagccgggccggcgggcggtgtgattgatccgcgtcccctggagctggaggctcgggggaaagggccagcacggagcgggcgctcggttgctgcgcacaaaggctgaggctccaagagctgcagggcgtgtttgggaccccagagtcagaaggagtgagaaccctgacccctaatcccactgcatccagccaataggagcccagccaccatggcggagctgcaggaggtgcagatcacagaggagaagccactgttgccaggacagacgcctgaggcggccaagactcactctgtggagacaccatacggctctgtcactttcactgtctatggcacccccaaacccaaacgcccagcgatccttacctaccacgatgtgggactcaactataaatcttgcttccagccactgtttcagttcgaggacatgcaggaaatcattcagaactttgtgcgggttcatgtggatgcccctggaatggaagagggagcccctgtgttccctttgggatatcagtacccatctctggaccagcttgcagacatgatcccttgcgtcctgcagtacctaaatttctctacaataattggagttggtgttggagctggagcctacatcctggcgagatatgctcttaaccacccggacactgttgaaggtcttgtcctcatcaacattgatcccaatgccaagggttggatggattgggcagcccacaagctaacaggcctcacctcttccattccggagatgatccttggacatcttttcagccaggaagagctctctggaaattctgagttgatacaaaagtacagaaatatcattacacatgcacccaacctggataacattgaattgtactggaacagctacaacaaccgccgagacctgaactttgagcgtggaggtgatatcaccctcaggtgtcctgtgatgctggtggtaggagaccaagcacctcatgaagatgcagtggtggaatgtaactcaaaactggaccccacccagacctcgttcctcaagatggctgactccggaggtcagccccagctgactcagccaggcaagctgaccgaggccttcaagtacttcctgcaaggcatgggctacatggcctcatcctgcatgactcgcctgtcccggtctcgtacagcctctctgaccagtgcagcatccgttgatggcaaccggtcccgctctcgcaccctgtcccagagcagcgagtctggaactctttcttcggggcccccggggcacaccatggaggtctcctgttgaatggcccttgttgccctagagtgggacccagccctcacctcccccagagctaacctgggaggtgctgaaggggcattgggccaccgtaagcaagggaaaaagggcagatcatgcggggagatgaccttgatctttgattgctaccctaaccttgacctttaacccgtgattccccccagctcctggaagagatgtcctaatatctcttagggacccagacccctaaattctcctcctcccccattttgatgttaaggtggagagggcatatgcatcctctgtcctgatctaggtgtctatagctgaggggtaagaggttgttgtagttgtcctggtgcctccatcagactctccctacttgtcccatatttgcaaggggaggggatttggggctggggctccattcaccaaagctgaggtggcttctcattaaccctttaggactctgaagggtatggacctacgtgaatgtgtgtcagggggagacttgctggtgggttagtggtcctcaggatgtgatagaaacatccagtgtaaaaaggaagttggaatgggagttggcgggcagtgaacgagtgtggggaaggattggtgctggggcaacaggaaggggcctggggccgtttggctgcactaactttggtagctcagtgtgcatctagagtgggactggggagggagctaagcttgggctgggctgcttggggcttggcatagggtggaaagggctaccctggggctctgaccacactgtagtatgtgtggagggtgccctcccgtctcccacaacttctgctataacaataaactgtagaggaatctgagtaccgttattattctttgtctaggtgtgcctgcatcatgctcctcttcctatcttctccctgtccacgtctcatattctcttctcaaagtgatataaaccctgggagagggcctttgtggcataggcacttcacaaaatatgaccacatagaaactggctcttttccaatacaacggtgttgccttgatattggagtatttttaagcctg

SEQ ID NO: 59663 - DNA, 2130 bp, Homo sapiens
ttttttttttttgggctagaggtttgggctttaatggcagctggggtaaaaggaaacaaaaacagtaattctgaagagcacagggaacaggcagccaggaccagcctggcccattccaggccagctgagctgaaatgctgattctgtccagggggctgctgtatgtgtagactggtggcagtcttggggactgaggcctcttggagagaagggaagactgtcggctcagaagtccatggagctgtgggccaggtagtccttgcgaccgatgttgctgacctgcttggtctgcatagcctcgagtttggggcagtcagtgatccgatgacccaggcccccgcagaaggcacagccgcgctctcctccaatgtccagcatggactcatccccgcaatgcagcacctgcagcacgggcggcaccttctgcttggcttctagcagcagcgctttgaggtccatcagcactgactcatcacacgctttgttgatgaaggtagtggcgatgcctgtgtttcccgagcgcccggtgcggccaatccggtgtacatagttctcaatctcctctggcatgtcataattgatgacgtgctggatggcagggaagtccaggcccttggaggcaacgtctgtggctactaggacatccttcttgccctcccggaatgcctcgatggccttagtccgttcctcctggtctttgcccccatggatggctacggcctcaacccccttgagcagcaggtactcgtggatggcgtccacgtctgccttcttctctgcaaagatgagtacaggcgggggtgtcttctgcaggcactcgagcaggtacaccatcttggcctcctccttcacatattctacctcctggatgacatccaggctggcagccccagcgcgccccacattgatggtcacaggctttacaagggcactcttagcaaagttctgaatcttcttcggcatggtggcactgaagagcagggtctgtcgctggcccttgaagtaggagaagatggtacggatgtcaccctcgaagcccatgtcgatcatgcggtcagcctcgtccagggccaggtagcgacagatgtctaggctgaccatcttcttctgcagcaaatccatgaggcgccccggggtggccaccatcatgtgtacaccgtgtcggatggtctccatctgctctttcacggacatgcccccaatgcagagggcgcagcgcaggagtggtgagctgtcctcctgcagcaggcggcagtagtactccaggatgccatgggtctgccgggccagctcccgcgaggggcagatgatgagtccatagggcccctcgcgctttgagaagggtaacctcttctcttgttccaggcagaacatgatgacgggcaacgtgaacaccagtgtcttgcctgaacccgtgaaagcgatgcctatcatgtcacggccagatagaatggtggggatgccctggatctgaatgggtgttgggtggtgaatgcctttcttcttcaggcctctcaggatggctgcaggaaacttcatttccttgaagctcttgatgggtggtgggataccgtctccctccaccaggatgtggtatttcttccgcacgcgctcatgtcgctcttcagacatgctcagaacataacggggtggagtccagctggttttgatggggtcatcatacgtaatgcccttagccatctccttcactgacatcaatgctcggccctcggcaacactctccaggatcttctcttcttccttcagctgcttctccttggcagactctttgcgcgcttcagccttctctttaaggtgctggtgctgatccaggaggctgacgttggactgagggcctagcgggatgtcgtcctcatctccccggggttcactaccgctgtcctgctgctcttcctccgcagctcccttgcgtcttcgctgcagcagcttctggagcagtagctgccggcgctgccgtaacggcacatagggcacgtagtcctcgtcgtcctcatcttccgcctcggagcggcttcctccggcaggcacctcgtcggtgcgagcccgcttccgttcgggttccgactcctccattctttgctgcacgcatgcgcgccgtcgacgcggccg

SEQ ID NO: 59664 - DNA, 1926 bp, Homo sapiens
  misc_feature (1)...(1926): n = a,t,c or g
ttttttttttttgtgagcaacagagatagtctttattcaaacgcagagagatccataacatggaaacactgacgcttccgaaaccgccccatttattcacttctcaagtggcccccgcttggatgcgccctcgggagagtgggctcagcacagcctagagcaccaggtctgaggtatctgcaaccacgtgggagccaggcccctggacgatgaaggacaatctcctggagcagcaataacttataaggagacataatttagagtagctggagccttggggatgactttatcctgcaggaggaggaggctgagagcagacgggacacgggggcccctaagaagcaaggttgggaaaggaggaggctgtttcccaatgcccgtgccggccaccagagggcccttcagtgcagagatggtcggcgcggcctcaccgcggtcaggagcagcgcgaaaccccctgtgccctcggccgcctgcagcatgagcctgcacaggagcccccgacaccccatggctccggggggccccaggggctgcggggctctggtcttagacgcagttatcagggacgcactcagcctcttcttcgagctcggggcaggggctcccgttgttggcgggctggacccggacgtagcgagtcctgctcttggtcccgagcctcccacagtggcctccgcacagtccccaggacgaccacagggagacctcgcagtccagcggcgtttctggaactgaggcgctgtctacaatctcattgtccctgctgggcaggactggggcgggagggatgaaggccctggggctctgtcgcagccgcagcagtgtcaccctggcgatgggaggcagggccttcagccgcgggtagtagaaggagttggccgggtggctgggagaggaggacgttatctcggtcaccgtgtcctgcgggatggtggcgaagttgggggaggagaaggtgaagccgctgtccgtcccggcgtcgtaggggtacaggtccagcgccgcctgttcccgccaacggtccccgtcgcacaggtccaggctgtccacgcccacgaaccagtcggggctgggcacgatgcgcaccacaaacgagaccagcgagtgcctgcgctgcacctccagctccgccgacgtctgcccggtgccgctggggacggcgggcgccgaaaacaccgcgtgcacgctctgcagcgcctcccccgccgcctcgatctccttcatcagcgcccaggcctcgccgcgctccgcaaagtcgcgcagcccgttactgacgtactggttcttcctccacatgctgtagtcggagctatgcgcggcccccagcagcgaagaccactgcgcaggggggcggaacagggggtactgcttggggaaggccgtctggctccacttgcccgtgaaggtgatgctgtatttggccggggctctggcggaacagatggattctcccccaagaggctggccggcggcgccgagagtggccaggaggagagcgcagagggccttgcccagggcggcggccgggctggggttttccatcacccggcaggagcagcgggagcgcggccggcagcggtcgggtcccagccagagcccggagctcctatttaagcccgaggccggcgccccgggccggccaatgaggctccagttcctcctgtcttcgatgctgcacggcctggcctccagcgagaggcagataggacgtgggagaaaggaggagaaggggctgcgggggcggcgggggctgccgctttcccaactcgccctgcccagcgaccttccccgggtcggatcaccctcttcccctggcagtgctgccgcacccctttctttgtctgtctgtcctatccctccctcgtgccaagcttggcgtagtcaggtgaagactgtatcgagttcaaannnnnncccctgctc

SEQ ID NO: 59665 - DNA, 1711 bp, Homo sapiens
atttcccccccgattttttttttttttccccccggtttttttcccccccccgtttttttaaacccccccccaaaaaattttttttgggccccaaaaaaaaaaaaattttttccccccccccgcccaaaaaaatttttttttttaaaaggccccccccccttttttttttttttttttttttttttttttttttttttttttttatcagctagaagagatttttttattgaagggcgagtctccggcatctgatggcagctacaactggatctcacggaacgcccgcttctccaccagcttcaccttgtacttgcgtttgaacttggctctctctcgaggctcgatcatattcctcctctggaagctcttgaaccggtctcgaaggatgttgccctcgggcttcagggtcctgagcgagtctgtcagctccgagctcagctgcacgtcgatgtcaggtgcctggtacttgagccgccccagccttcggggcttgtcagcctcagcctcccgccgcgcctgccgccgcctctgccgccgcgccagctccgccagcctcagggccacctgggccttgatcccgcgcagccggaacagctcctggtgccggagccgggcggcccgcaacgcggcctgctgtacccgcagcctgtgcacagccttctcccgccgccgctgctgctccgtcttcttctctgtggtggccaggcgggcgggcgtgggacagacctcggcatccccagcctccggcccctcgccctggcctggctccccctcaccatccgactcctccagcagcccctcgcacagctcctggaatgtggactcctgggtggcggcctgctccgtggcgggcagggccagctgccgctccagcttctccgcctccttctgccgctgcaactccacctcgtgggccgctgagagcagggtctggtggtcttcaaaggatggattgtaggaagctccggcaggcgccacctccacggcgggcgcctgggacggcttggtgtgcaggcgtgctggccgcttcactcctttcttcttggtctgctccaggaaaaactcatcctggccaaccaacggcctgtccagggggttgtctgaggcccagaggtcgtagaagggccgctctacggtgtcctggggcccgggcttggcccttgttgcagaagggttgaggagccgggcctgggccctgcgcacctcccggggcagctcgccctgcttggccagcttctcccatagctgctccttccgcctgagcttcttggcgttggggacctggtgggcgaggacgtctttgggggcagggactttggatgtgttctcgaggatgaggtcaacccgaaggggtttcttgagaagcagtgacttcttctggactttggttctcttctttgtcagccctttttccttggagccagtgtccacgaagaagagtttttcatttggggcctctgacaacaagccaccgctcgtgcgctcctgtagccgcacgtcttccaggaactggtcaacctccagccccagcggctcctgagcaagccgccgccagccccgcttcttatttcttgggcctcgccgccgccgcctcagcgctgggtccaccgaagtgggccgcagccccaggaaaccagaatcggcatcgcttttcgagctgcgcttcccaccaacgccactgcctcctgccgccatcttgtcaaaaaaaaaa

SEQ ID NO: 59666 - DNA, 1638 bp, Homo sapiens
gcggccgccgaggatggggaaatccaacagcaagttgaagcccgaagttgtggaggagctgaccaggaagacctactttaccgagaaggaggtccagcagtggtacaaaggcttcatcaaggactgccccagtgggcagctggatgcggcaggcttccagaagatctacaagcaattcttcccgttcggagaccccaccaagtttgccacatttgttttcaacgtctttgatgaaaacaaggacgggcgaattgagttctccgagttcatccaggcgctgtcggtgacctcacggggaaccctggatgagaagctacggtgggccttcaagctctacgacttggacaatgatggctacatcaccaggaatgagatgctggacattgtggatgccatttaccagatggtggggaataccgtggagctcccagaggaggagaacactcctgagaagagggtggaccggatctttgccatgatggataagaatgccgacgggaagctgaccctgcaggagttccaggagggttccaaggcagacccgtccattgtgcaggcgctgtccctctacgacgggctggtatagtcccaggctggagctggatgcctgggaaccactcacctccttctgtgccatgaggccacctcagccctgacaccaaccccgtgcgtccacccagccttcttccgcatccacacacagccggctgcccttgacccgggaggccccggctctcctctcccctgtcctgcacccatcccccgcctgaagccaccggctccaattgccagcaacctctgcttgtccggaaaacgacaacacgaaatggaaaaggctacagccctctgcataaaccaaggacttggctgcctcgcaggcagcctccgttcctcccgctctcttgcgcgtgtgcttttgttttttattttgaacagacgttttaaaagaaaaaaaaacaactaccttctgtcctagaagacacagactgacagatggggtgaaggcctggggacctcagagaactctgccttgccctcgtccctcgtccttcggcagccggagaggctgtgggtgggccgagggtgtctaggggttctgcctagtcaacgttatttgtcgtcccatcttttggcagcaaaaccacctgcgtggctaggatgattaattatgaggatgatgattttttttgtgataacagtattgtgctttttgtggggaaagtgaggttttttttttatatacatatataattgatatctttaatttattggttgttaactgttgctgctgcctggtgtgtcctcagctcccagggctgcgggcccaccgtttacatgtgcacgccctgacccacctgcccacgccgatttgggaggatgggggcctgcaccggccaaaaagccaaaaaaaattttttttttttcaaaaactgggcttgattttgggaaaggggaaagggggaaattcctaaagggctaaggccctgttccttccagccggaaggcctcttgccaaaccctttttccttgttgcctttgtccccgaatctttgttttccccgtgggccgaaaaattttttccgaggaggaacaggggacatcttaaggtttctaaacttttgttttggggtttgccca

SEQ ID NO: 59667 - DNA, 2254 bp, Homo sapiens
ttgccaagcttggcacgagggcgctgagctgcagtgtctggtcgagagtacccgtgggagcgtcgcgccgcggaggcagccgtcccggcgtaggtggcgtggccgaccggacccccaactggcgcctctccccgcgcggggtcccgagctaggagatgggaggcacagctcgtgggcctgggcggaaggatgcggggccgcctggggccgggctcccgccccagcagcggagtggtggagccacagtgttaaagaacagagaagtgatccttaatcatttagaattttgcctccaccatccaccagaaaatgaagtggaaagagaagttgggggatggtgtctatgacaccttcatgatgatagatgaaaccaaatgtcccccctgttcaaatgtactctgcaatccttctgaaccacctccacccagaagactaaatatgaccactgagcagtttacaggagatcatactcagcactttttggatggaggtgagatgaaggtagaacagctgtttcaagaatttggcaacagaaaatccaatactattcagtcagatggcatcagtgactctgaaaaatgctctcctactgtttctcagggtaaaagttcagattgcttgaatacagtaaaatccaacagttcatccaaggcacccaaagtggtgcctctgactccagaacaagccctgaagcaatataaacaccacctcactgcctatgagaaactggaaataattaattatccagaaatttactttgtaggtccaaatgccaagaaaagacatggagttattggtggtcccaataatggagggtatgatgatgcagatggggcctatattcatgtacctcgagaccatctagcttatcgatatgaggtgctgaaaattattggcaaggggagttttgggcaggtggccagggtctatgatcacaaacttcgacagtacgtggccctaaaaatggtgcgcaatgagaagcgctttcatcgtcaagcagctgaggagatccggattttggagcatcttaagaaacaggataaaactggtagtatgaacgttatccacatgctggaaagtttcacattccggaaccatgtttgcatggcctttgaattgctgagcatagacctttatgagctgattaaaaaaaataagtttcagggttttagcgtccagttggtacgcaagtttgcccagtccatcttgcaatctttggatgccctccacaaaaataagattattcactgcgatctgaagccagaaaacattctcctgaaacaccacgggcgcagttcaaccaaggtcattgactttgggtccagctgtttcgagtaccagaagctctacacatatatccagtctcggttctacagagctccagaaatcatcttaggaagccgctacagcacaccaattgacatatggagttttggctgcatccttgcagaacttttaacaggacagcctctcttccctggagaggatgaaggagaccagttggcctgcatgatggagcttctagggatgccaccaccaaaacttctggagcaatccaaacgtgccaagtactttattaattccaagggcataccccgctactgctctgtgactacccaggcagatgggagggttgtgcttgtggggggtcgctcacgtaggggtaaaaagcggggtcccccaggcagcaaagactgggggacagcactgaaagggtgtgatgactacttgtttatagagttcttgaaaaggtgtcttcactgggacccctctgcccgcttgaccccagctcaagcattaagacacccttggattagcaagtctgtccccagacctctcaccaccatagacaaggtgtcagggaaacgggtagttaatcctgcaagtgctttccagggattgggttctaagctgcctccagttgttggaatagccaataagcttaaagctaacttaatgtcagaaaccaatggtagtatacccctatgcagtgtattgcccaaaactgattagcctagtggacagagatatgcccagagatgcatatgtgtatatttttatgatcttacaaacctgcaaatggaaaaaatgcaagcccattggtggatgtttttgttagagtagactttttttaaacaagacaaaacatttttatatgattataaaagaattcttcaagggctaattacctaaccagcttgtattggccatctggaatatgcattaaatgactttttataggtcaaaaaaaaaa

SEQ ID NO: 59668 - DNA, 981 bp, Homo sapiens
gaccctgcagaggcggcggggctcctcctcccgctcctcctcggcctccccttcgggcgctctcgcgctaactgtgctcctccggggccctccgcctgctcccagccatggtggcctggcgctcggcgttccttgtctgcctcgctttctccttggccaccctggtccagcgaggatctggggactttgatgattttaacctggaggatgcagtgaaagaaacttcctcagtaaagcagccatgggaccacaccaccaccaccacaaccaataggccaggaaccaccagagctccggcaaaacctccaggtagtggattggacttggctgatgctttggatgatcaagatgatggccgcaggaaaccgggtataggaggaagagagagatggaaccatgtaaccaccacgaccaagaggccagtaaccaccagagctccagcaaatactttaggaaatgattttgacttggctgatgccctggatgatcgaaatgatcgagatgatggccgcaggaaaccaattgctggaggaggaggtttttcagacaaggatcttgaagacatagtagggggtggagaatacaaacctgacaagggtaaaggtgatggccggtacggcagcaatgacgaccctggatctggcatggtggcagagcctggcaccattgccggggtggccagcgccctggccatggccctcatcggtgccgtctccagctacatctcctaccagcagaagaagttctgcttcagcattcagcagggtctcaacgcagactacgtgaagggagagaacctggaagccgtggtatgtgaggaaccccaagtgaaatactccacgttgcacacgcagtctgcagagccgccgccgccgcccgaaccagcccggatctgagggccctgtccagctgcaggcatgcacaatggtgccaccgcttgtcacccggctccccccaccccttcatttggacccgcagctg

SEQ ID NO: 59669 - DNA, 1834 bp, Homo sapiens
cattgagaactgtaggacccgcttacgccaagcttggcacgaggcaagcggccacaaggatggcaggcttcgcggagctcgggctgtcatcgtggctcgtggaacaatgtcggcagctgggtttgaagcagcccacgcccgtgcagctcggctgcatccccgccatcctggagggtcgagactgcttgggctgtgctaagacaggcagtgggaagacagcagcgtttgtccttcccatcttgcagaagctgtctgaggatccctatggcatcttctgcctcgtcctgacacccaccagggagctggcctaccagatcgcagagcagttccgggtcctggggaagcctctagggctgaaagactgcatcatcgtcggtggcatggacatggtggcccaggcgctggagctctctcggaaaccacacgtggtcatcgccacgccggggcgcctggcagatcacctgcgcagctccaacacttttagtataaagaagatccgcttcctggtgatggatgaggcagaccggctgctggaacagggctgcactgacttcaccgtggacctggaggccatcctggcggctgtgccggcccgcaggcagacactgctgttcagcgccacgctgaccgacacactccgggagctgcagggtctggccaccaaccagcccttcttctgggaagcacaggccccggtgagcaccgtggagcagctggaccagcgctacctgctggtgcctgagaaggtcaaggacgcctacctggtccacctgatccagcgcttccaggatgagcacgaggactggtccattatcatcttcaccaacacgtgcaagacctgccagattctgtgcatgatgctgcgcaaattcagcttccccaccgtggctctgcactccatgatgaagcagaaagaacgctttgccgccctagccaagttcaagtccagcatctaccggatcctgatcgcaacagacgtggcctcccggggcctggacatccctacggtacaggtggtcatcaaccacaacacccccgggctccccaagatctacatccaccgagtcggccggacggcccgtgcagggcggcagggtcaggccatcacgctggtgacacagtacgacatccacctggtgcacgccatcgaggagcagatcaagaagaagctggaggagttctccgtggaagaggccgaggtgctacagatcctcacacaggtcaacgtggtgcgaagagagtgtgagatcaaactggaggcggcccactttgacgaaaagaaggagatcaacaaacggaagcagctgatcctggaggggaaggaccctgacctggaggccaagcgcaaggctgagctggccaagatcaagcagaagaaccggcgcttcaaggagaaggtggaggagacgctgaagcgacagaaggctggcagggctggccacaaggggcgtccacccaggacaccgtctgggtcccactcaggcccagtcccctcccagggcctggtctgagccccacacggccatctgcccagtccttgactcgtccatggagctgagggtcggaggaaccttccttgggggcagcagcccttcccgggggcctacccagtgccccacagcagaacccgtgggcgctcgtgttgtgcgggccctgctcctctgccccgaaaccactggctggtcccttccctgagccctggccaagattcaggctgcaggggaagaaagaacatgaccgggaggttgtgaccccaacccaaggtcaccccccaggggtgccgcatacaggaggtgcttaataaacgggtcttttgacttcctcaaaaaaaaaa

SEQ ID NO: 59670 - DNA, 1135 bp, Homo sapiens
accttagagttcctggccagagttgactctaggtagtgatgtgattttcttgggatgtttttctaaatattcttttatgctaaagcacatggcttgatacttctgttgattaagctcgtgtctacttacagtcatctagtgagaacctgtggtgtggtgagatgataacttggtctttggtcttcatcatttgaactagttttggttttgtcttgtcccttccttgagcattttgtgtgtgtttaatcctatttggtaaacgaaccactgtgaaagaccaagttggagaaaacagaacacccccaaaacatttatttttttttttagaaaatcatggctcactatggtagtatacaatattgttttcacacatgtacacttgaaaccaaatttctaaaacttgtttttcttaaaaaatagttgttgtaacattaaaccataacctaatcagtgtgttcactatgcttccacactagccagtcttctcacacttcttctggtttcaagtctcaaggcctgacagacagaagggcttggagattttttttctttacaattcagtcttcagcaacttgagagctttcttcatgttgtcaagcaacagagctgtatctgcaggttcgtaagcatagagacggtttgaatatcttccagtgatatcggctctaactgtcagagatgggtcaacaaacataatcctggggacatactggccatcaggagaaaggtgtttgtcagttgtttcataaaccagattgaggaggacaaactgctctgccaatttctggatttctttattttcagcaaacactttctttaaagcttgactgtgtgggcactcatccaagtgatgaataatcatcaagggtttgttgcttgtcttggatttatatagagcttcttcatatgtctgagtccagatgagttggtcaccccaacctctggagagggtctggggcagtttgggtcgagagtcctttgtgtcctttttggctccaggtttgactgtggtatctctggccagagtgtaggagagggccacaaggagcaagaatgctgacactggaattttctccatggcaactctggatttcctcatccacctgccttgtgtgagtcggcggctaggatgcgg

SEQ ID NO: 59671 - DNA, 1052 bp, Homo sapiens
ggaattccagccggggtctaagcaccacggtggctggcggcctgcgggcggcgctgtggcccgtcgggcggctccacagagccgccctaggccttccgccttccccaagccaacgtctccgccgtcggctccgcggcgccgccatggccgacgtggaagacggagaggaaacctgcgccctggcctctcactccgggagctcaggctccaagtcgggaggcgacaagatgttctccctcaagaagtggaacgcggtggccatgtggagctgggacgtggagtgcgatacgtgcgccatctgcagggtccaggtgatggatgcctgtcttagatgtcaagctgaaaacaaacaagaggactgtgttgtggtctggggagaatgtaatcattccttccacaactgctgcatgtccctgtgggtgaaacagaacaatcgctgccctctctgccagcaggactgggtggtccaaagaatcggcaaatgagagtggttagaaggcttcttagcgcagttgttcagagccctggtggatcttgtaatccagtgccctacaaaggctagaacactacaggggatgaattcttcaaataggagccgatggatctgtggtcctttgggactcatcaaagccttggtttagcattttgtcagttttatcttcagaaattctctgcgattaagaagataatttattaaaggtggtccttcctacctctgtggtgtgtgtcgcgcacacagcttagaagtgctataaaaaaggaaagagctccaaattgaatcacctttataatttacccatttctatacaacaggcagtggaagcagtttcagagaactttttgcatgcttatggttgatcagttaaaaaagaatgttacagtaacaaataaagtgcagtttaaaacccaactcttactcttaatttgttcctaatacgtatttttggcagggagagggaacggtccatgaaatctttatgtgatataaggattttaagtttgggccagtgaacagggtaaataaaatttaacttttgagcataaaaaaaaaa

SEQ ID NO: 59672 - DNA, 2234 bp, Homo sapiens
aggggacgcagcgaaaccggggcccgcgccaggccagccgggacggacgccgatgcccggggctgcgacggctgcagagcgagctgccctcggaggccggcgtggggaagatggcccagtccaccgccacctcccctgatgggggcaccacgtttgagcacctctggagctctctggaaccagacagcacctacttcgaccttccccagtcaagccgggggaataatgaggtggtgggcggaacggattccagcatggacgtcttccacctggagggcatgactacatctgtcatggcccagttcaatctgctgagcagcaccatggaccagatgagcagccgcgcggcctcggccagcccctacaccccagagcacgccgccagcgtgcccacccactcgccctacgcacaacccagctccaccttcgacaccatgtcgccggcgcctgtcatcccctccaacaccgactaccccggaccccaccactttgaggtcactttccagcagtccagcacggccaagtcagccacctggacgtactccccgctcttgaagaaactctactgccagatcgccaagacatgccccatccagatcaaggtgtccaccccgccacccccaggcactgccatccgggccatgcctgtttacaagaaagcggagcacgtgaccgacgtcgtgaaacgctgccccaaccacgagctcgggagggacttcaacgaaggacagtctgctccagccagccacctcatccgcgtggaaggcaataatctctcgcagtatgtggatgaccctgtcaccggcaggcagagcgtcgtggtgccctatgagccaccacaggtggggacggaattcaccaccatcctgtacaacttcatgtgtaacagcagctgtgtagggggcatgaaccggcggcccatcctcatcatcatcaccctggagatgcgggatgggcaggtgctgggccgccggtcctttgagggccgcatctgcgcctgtcctggccgcgaccgaaaagctgatgaggaccactaccgggagcagcaggccctgaacgagagctccgccaagaacggggccgccagcaagcgtgccttcaagcagagcccccctgccgtccccgcccttggtgccggtgtgaagaagcggcggcatggagacgaggacacgtactaccttcaggtgcgaggccgggagaactttgagatcctgatgaagctgaaagagagcctggagctgatggagttggtgccgcagccactggtggactcctatcggcagcagcagcagctcctacagaggccgagtcacctacagcccccgtcctacgggccggtcctctcgcccatgaacaaggtgcacgggggcatgaacaagctgccctccgtcaaccagctggtgggccagcctcccccgcacagttcggcagctacacccaacctggggcccgtgggccccgggatgctcaacaaccatggccacgcagtgccagccaacggcgagatgagcagcagccacagcgcccagtccatggtctcggggtcccactgcactccgccacccccctaccacgccgaccccagcctcgtcagttttttaacaggattggggtgtccaaactgcatcgagtatttcacctcccaagggttacagagcatttaccacctgcagaacctgaccattgaggacctgggggccctgaagatccccgagcagtaccgcatgaccatctggcggggcctgcaggacctgaagcagggccacgactacagcaccgcgcagcagctgctccgctctagcaacgcggccaccatctccatcggcggctcaggggaactgcagcgccagcgggtcatggaggccgtgcacttccgcgtgcgccacaccatcaccatccccaaccgcggcggcccaggcggcggccctgacgagtgggcggacttcggcttcgacctgcccgactgcaaggcccgcaagcagcccatcaaggaggagttcacggaggccgagatccactgagggcctcgcctggctgcagcctgcgccaccgcccagagacccaagctgcctcccctctccttcctgtgtgtccaaaactgcctcaggaggcaggaccttcgggctgtgcccggggaaaggcaaggtccggcccatccccaggcacctcacaggccccaggaaaggcccagccaccgaagccgcctgtggacagcctgagtcacctgcagaacc

SEQ ID NO: 59673 - DNA, 895 bp, Homo sapiens
tttcgtgcgggtccgaccgcgcacaatgggccatggagttcccgttcgatgtggacgcgctgttcccggagcggatcacggtgctggaccagcacctgaggcccccagcccgccgacccggaaccacaacgccggcccgtgttgatctacagcagcaaattatgaccattatagatgaactgggcaaggcttctgccaaggcccagaatctttccgctcctatcactagtgcatcaaggatgcagagtaaccgccatgttgtttatattctcaaagacagttcagcccgaccggctggaaaaggagccattattggtttcatcaaagttggatacaagaagctctttgtactggatgatcgtgaggctcataatgaggtagaaccactttgcatcctggacttttacatccatgagtctgtgcaacgccatggccatgggcgagaactcttccagtatatgttgcagaaggagcgagtggaaccgcaccaactggcaattgaccgaccctcacagaagctgctgaaattcctgaataagcactacaatctggagaccacagtcccacaggtgaacaactttgtgatctttgaaggcttctttgcccatcaacatcggccccctgctccctctctgagggcaactcgacactctcgtgctgctgcagtcgatcccacgcccgctgctccagcaaggaagctgccacccaagagagcagagggagacatcaagccatactcctctagtgaccgagaatttctgaaggtagctgtggagcctccttggcccctaaacagggcccctcgccgcgccacacctccagcccacccacccccccgctccagcagcctgggaaactcaccagaacgaggtcccctccgcccctttgtgccaga

SEQ ID NO: 59674 - DNA, 2842 bp, Homo sapiens
ttttttttttttatggtaagcaaaataaattgtatttttccatccttggggaggataaaggaactctttgcactgctataataaacagcccccaaatgccagtggtttaattcagtggagttcagacctcattcctatatcattgcagtgtggatgctcctggatgaaggctcttgtaggtaactctcctccagtcggtgattcagggacccagcctccttctgccttgcggctttgccttttaaaggtcctcagggtgctctccatgtatcttgccaatggggaacgagtgtggaggactcacaagcgggtctcacatcacgtcctccggggctaatacacatcccttctccccacactctgttggtcagaagtcactgcttggcgccctgctacctttccttctcctccaccacaggaggaggaggcacagcagtcccaaaatgacagttttgagcacagcgacagccaatgcaaccctgatggcagtgtccagacttaggtgccatgattctgagtgccctttgctttctgtgaccctgaggccggctatggtggttgtgctgctgggcctccaggtggtggtggttgtgacagcctgggtgatggtgagtttggtccccttgatggactgcaactgctgcctccctgatctccgggtgtccagctcgactcggcagaaatacacagactggtcctccttccgcaggtttgagatcctgaggaagccgctctcctgaccctctgtccagttcagaaagagccggttcacataatccttgtgaatggaaggcggccttgtgctgtagaaggactgcccgtggaagtggccccgtctccaggatattctcacgttgggaactatggctaactcccaggggtaatagaaggagaaggggatttccacagagccacccatggaggctgagaggtgttttggttgagtgaccccataaaggtagcttggaccagatcctgtggagccaccaggctgcagaaatgctggcggctgcagcaggagcagcaggggcagcagcaggggccgacccatggccttgttcttctccaggggacggggagaccagcagagctgtccaggcaggagaggggccctgtggaggggctgcctgagggcctgggtgatggtgaggtgggtccccttgatggactgccacgacagcctccctgatctgtatgtccagctggacttggcagaagtacacagactggtcctccttccgcaggttcgagatcctgaggaagcctcccttgttcttgctttccccttgagatcaggaatgaggcacagatgtctgctctcactgcctcccttcacggtactggagtcctagccagcgcgctatgcctggcttctgcctcccaggggtggagacttcctccccaatctcttcacccccaaagaagcacagccaaggcccatgtcagaggaactgtgttgctgacttagtcacagcaggaaacgactggaatggggtactgttgctcacacactcacacctgtgcccacacacacccacacatgcacacacacagaccacatctgcagcaggtgggcctggccaggcacctgtgggacacttattagaggcccaagaataacgtaagggggtggcacccaggaggcctgggaaggggaaagcccagtggcctcatggtctctctcattgaactcctaagggtccctccatggccctgggccccaagggtcagggaaaagagtgaggccaggaccagtgcagggaggcctctgcccagcctaagcgtagagtccattctcaacagagacaaagctgccatgtgcagggatggatgtggaggcccaggcagcagggccctggggccagtgtgcggtgtgggtggggagtgatgcccaccaggacggccccctgtcgggggtgagctgtgtccaaagtagctgggcagcagctggtgttgatagtggcataagggacgtggagagcagcctgggaggcctggctgggtgcccatgctcgtgctctcagtgcctaggagctggtgtgggatggctggagcctaggggcagggcggtgcttctgtcggcacagcagatgaaggaggtagccacagtcaaagagaaggactcctgagacccccaagatcccggccaggtctgcccgcagaatgggggcaggagtcggcgggacagagagccctgggtttgagctgggcgggaggctcccagaggcctcccaggagccctcagggaaggacgcaaacttgcagcagaaggtggtgttggtgcaggggctgctggccccagagccttccaggatgagagagatgctgctctgggtttcccagcgggcctggcgagcaggggcccattgctggatgccaagttccgggtgcaacacagccagcgtggtccccccagcaccatcggggccccccctgctcacagtcaccagggagatggagccagactccaggaacccacaacggatggtgaaggacgagagctcggtggcctccatccgaacttgtactcacacctccggggtccctgcagtgacacgcagggtcagcagcacccagggcagggccagggtccggcgccccatggccccctccagtccgggttctgggggctgcagggccggcacctgtgcctctgttctcatcgcaggaagtcttcatgttgtcagcagccaaacagccacttccttctctcctctcacaccttccccagaggtggtgagcacaaagtggctgattcccttcttaaagtgacagtgagggcctgctcagtccccaaggctgtgcttccaggtaacaaggcagggcggcacaggtgggtgag

SEQ ID NO: 59675 - DNA, 1568 bp, Homo sapiens
gcggaggaattctgccacgaacaggccaataaggagggagcagtgcggggtttaaatctgaggctaggctggctcttctcggcgtgctgcggcggaacggctgttggtttctgctggttgtaggtccttggctggtcgggcctccggtgttctgcttctccccgctgagctgctgcctggtgaagaggaagccatggcgctccgagtcaccaggaactcgaaaattaatgctgaaaataaggcgaagatcaacatggcaggcgcaaagcgcgttcctacggcccctgctgcaacctccaagcccggactgaggccaagaacagctcttggggacattggtaacaaagtcagtgaacaactgcaggccaaaatgcctatgaagaaggaagcaaaaccttcagctactggaaaagtcattgataaaaaactaccaaaacctcttgaaaaggtacctatgctggtgccagtgccagtgtctgagccagtgccagagccagaacctgagccagaacctgagcctgttaaagaagaaaaactttcgcctgagcctattttggttgatactgcctctccaagcccaatggaaacatctggatgtgcccctgcagaagaagacctgtgtcaggctttctctgatgtaattcttgcagtaaatgatgtggatgcagaagatggagctgatccaaacctttgtagtgaatatgtgaaagatatttatgcttatctgagacaacttgaggaagagcaagcagtcagaccaaaatacctactgggtcgggaagtcactggaaacatgagagccatcctaattgactggctagtacaggttcaaatgaaattcaggttgttgcaggagaccatgtacatgactgtctccattattgatcggttcatgcagaataattgtgtgcccaagaagatgctgcagctggttggtgtcactgccatgtttattgcaagcaaatatgaagaaatgtaccctccagaaattggtgactttgcttttgtgactgacaacacttatactaagcaccaaatcagacagatggaaatgaagattctaagagctttaaactttggtctgggtcggcctctacctttgcacttccttcggagagcatctaagattggagaggttgatgtcgagcaacatactttggccaaatacctgatggaactaactatgttggactatgacatggtgcactttcctccttctcaaattgcagcaggagctttttgcttagcactgaaaattctggataatggtgaatggacaccaactctacaacattacctgtcatatactgaagaatctcttcttccagttatgcagcacctggctaagaatgcagccatggtaaatcaaggacttacaaagcacatgactgtcaagaacaagtatgccacatcgaagcatgctaagatcagcactctaccacagctgaattctgcactagttcaagatttagccaaggctgtggcaaaggtgtaacttgtaaacttgagttggagtactatatttacaaataaaattggcaccatgtgccatctgtacaaaaaaaaaa

SEQ ID NO: 59676 - DNA, 918 bp, Homo sapiens
ctaattcggcacgagtaggcactccggactaagatggcggcgacggccaggcggggctggggagctgcggctgttgccgccgggctgcgcaggcggttctgtcataagttgaagaatccatacaccattaagaaacagcctctgcatcagtttgtacaaagaccacttttcccactacctgcagccttttatcacccagtgagatacatgtttattcaaacacaagataccccaaatccaaacagcttaaagtttataccaggaaaaccagttcttgagacaaggaccatggattttcccaccccagctgcagcatttcgctcccctctggctaggcagttatttaggattgaaggagtaaaaagtgtcttctttggaccagatttcatcactgtcacaaaggaaaatgaagaattagactggaatttactgaaaccagatatttatgcaacaatcatggacttctttgcatctggcttacccctggttactgaggaaacaccttcaggagaagcaggatctgaagaagatgatgaagttgtggcaatgattaaggaattgttagatactagaatacggccaactgtgcaggaagatggaggggatgtaatctacaaaggctttgaagatggcattgtacagctgaaactccagggttcttgtaccagctgccctagttcaatcattactctgaaaaatggaattcagaacatgctgcagttttatattccggaggtagaaggcgtagaacaggttatggatgatgaatcagatgaaaaagaagcaaactcaccttaaaataatctggattttctttgggcataacagtcagacttgttgataatatatatcaagtttttattattaatatgctgaggaacttgaagattaataaaatatgctcttcagagaatgaaa

SEQ ID NO: 59677 - DNA, 912 bp, Homo sapiens
aattgaattcgagttccctagtccagtgcggtggaattcgtctgggaaggagagaaaatggcggcggagccgaacaagaccgaaatccagactctttttaagaggcttcgcgcagttccaaccaacaaggcctgtttcgactgcggcgccaagaatccgagttgggccagcatcacgtacggtgttttcttgtgcattgactgttccggggtgcaccgctccctgggcgtccatctgagcttcatcaggtccacagagttggattccaactggaactggttccagctgaggtgtatgcaggtcggcgggaatgccaatgcgacggctttttttcgccaacatggatgcacagccaatgatgccaacaccaaatataatagccgagctgcccagatgtaccgggagaagatccggcagctggggagtgcggccctggctaggcatggcactgatctttggatagacaacatgagtagtgccgttcctaatcactccccagagaagaaggactctgatttcttcacagaacacactcaaccccctgcctgggatgcgccagccactgagccttcagggacccagcagccagccccgtctacagagagcagtggcctggcacagccggagcatggccccaacacagacctgcttggcacctcacccaaagcctcactggaactgaaaagctccatcattggcaagaagaagccagcagcagctaagaaagggctgggtgccaagaaaggcctaggggcccagaaggtgagcagccagagcttcagtgagattgagcggcaggctcaggtggcagagaagctccgtgagcagcaggcagccgatgccaagaagcaggcggaggagtccatggtcgcctccatgcgtctggcctaccaggagctccagattgatcgt

SEQ ID NO: 59678 - DNA, 1625 bp, Homo sapiens
aatacatggaggcagggactttgggtcaaattactgggggaaatggaaaagttaatatgtatgtagtagggaacaggggttatactaggttaggcagagaagccttggagttttctcagaatctgcactgagggttaagggaggtatctatgaaagggtgtgcaacttccccaaaccgcagcaactccagccagtttcccggtactgccttgccctggttttgcaggtgtggctggacccagtttaaatatctggccacaagctcagccagactctggttccctcggctgttcactcccactgggcttctggtcccagccccatctcagtcactgtggttggtcagaagacagtaaatcccaaacttgattagttgcaaagtccatctggcttggttttctgttgctgatagagagaccaggggagtttctgtgtgagagaacgggggactattctcacttcttccaccgcacaagctgctcaaggtgggctgcatggctggtctggctggaaatactgaaacagctctccttcacctacccctagagtaggccggatgtgaccccaggaatgagaatataccagggcagatacagacacagaaatgttttgcctgatggcattaggtttattttgtgggaaagcagaattggggctctctgaaaggcacttgtgaggcatagaagtaaaggttgccacatggctaatggtggacgtcttcctggcatccttgggggtaggggaaagacagacagctcccagggccacagaaaatacctctatcagatagagaaatccgagtcccagtgccttatggtggagccaagggttaagcagatggcctgctttttttatacgaagagtttgcttcctccgggcaatcttaaagtctggcattcacggctggaggtatagggcccatccacttctctcccagcaggtgcgccagcagctccatccggtcagagccaaataacatgtgggtttggccatccacatgggccacggtgatgggcagcccaaaggctccgtatctgcaggctgcctcagtggtctccttgagctggttcttcacctttggcgttgcgatcttttccagaagtccctgggcttgttctgcagacataccagccttctctgcagccgccaggatgctctgcggctcggtgatgtcttcattccttgaccagacgcgcatccacagctcccgggacgctttctccagcatctctggatgctccaagttcacggcggtgaggaaacgcatggcagacaaacttcctttttcaagcatcacagacaagaaatccttggggaagtggatgggaatctggagatggtgtctcaggagctttaagtcatttgccatgtatagtcctttgcggggaagcagacctggaggcttgtttccactgtctttcatgatccctgttatgaggctgggccgcaactgcaggttgatgttccagatattctgataccggcacaggatctcgaagcccagccaggagtagggggacagcacgtcatagaagagctccacggtgcgcggcaggggccccatgctgcaggctccggaagagcagtggcagcaggagctccttttcccggaacccggcacgaaa

SEQ ID NO: 59679 - DNA, 1619 bp, Homo sapiens
ccttttttttttttttaacatcaaatttggtttatttcaagtttgtaacaaaatatattctaggcaacttttcagacattgttttatagcatcataaaccccataccactgctgtcattccaaaagctgccaggacactggaagttatcaagtggtccagcccaggaatacaggtagaattcacatgataggtgataagaaagcaatgtctgtgggccactctgatccctctttttaccttggtaggtaaggtatgatcttaagactatatgtactgagtcctattagtcagtgaaaaagattaaagtgacaagttatgtgctttgttcctatagctttgaagttcatccacctcaccagcaattggaaggtctcaggtcttgcaggctctacccatgtgtaatcctggggcaggtgtgaatcttgatttttttaagagattactcaagggagagaacaacagaaacggaagccatgagtactgccccaattctagattaggttagaggttagaataaattaactaatggggagtggtagtgggtagcagtcagacccaggagacagatttgtgtggtttcctgatctcagcaaggtctaaggaaaaaagcctccccgcccccccaccttaaatagtggcatcaagtcatgaaggccagtgaaacgtggttagtctcgtaaaatgacttccagttcttccaggtccttctggatagccaaatcctccttcgtgacatctggcagctccagggccaacttcatccaccatctagcttcagagtttttccctagttctctgtagcacttggaaatatatacccttcctgctttggaaaatcctggctgtagttcttcagcctttaggaagctctggagggcatcttccacagtggcactgagagggctttcaagcaaggctgtagcagtttttttttctagccagctcaggtgagagacctgatagcaccacctgccaagaagaaagtgagccatggggttttctggctggagagcaatggctttgtccacatgctccttgaagctaaagccactctggatgcgcctctggatgctctcatgctcagccagctgaccacaaagcaccgcatacctaggggggaagcagcaagctcagggacaagggctgagtaccatcactgcaaggaatggatgccccaaccacagcctagttgcattgtccgctatccctgtaccctcaactagagctgaaaatacctaattttcatctgtacgtaatccccattctttacggacctctggccccaattagtattctttagtagataatggtaggcttacaagtctccaaagtattctaggtataaaaaaagctgggttcaccacagtaaatctctcttacacagtaaatctctcctacactcataaggagtacagccacaggcattaataaaaacttgaaaagcatgaaaacaatcagcataaaagtatgagacctgactatactacttatcttctgggcagacaaaaaagtgggtctcattagcctttaagcatacaggtgtatcactgggacttgggaagcaatttcttaggatagtcacattgggaggggatattctaggaatttctgatgttac

SEQ ID NO: 59680 - DNA, 4253 bp, Homo sapiens
gactccgcttgacgaattcggcacgaggatcgcaagactaggcaacctccagccagtccctgggtcgggcggatcctcccagaggtggcacaatggagcgatctccaggagagggccccagccccagccccatggaccagccctctgctccctccgaccccactgaccagccccccgctgctcacgcaaagccagacccaggttctgggggccaacctgctggccctggcgcggcgggtgaggccctggcggtgctgacttcattcgggaggcggttgctggtgctgatacctgtgtatttggccggggcagtgggactcagcgtgggtttcgtgctcttcggcctcgccctctacctgggctggcgccgggtccgcgacgagaaagaacggagccttcgagcagcgaggcagctactggacgacgaggagcagctcactgcgaaaactctctatatgagtcatcgagagctacctgcctgggtcagcttcccagacgtggaaaaggctgaatggctcaataagattgtggcccaggtctggcccttcctgggccagtatatggagaagcttctggctgaaactgtggctccggctgttaggggatctaacccccatctgcaaacatttacatttacacgagtggaactgggtgaaaagccattgcgcatcattggagtcaaggttcacccaggtcagagaaaagagcagatcctgctggacttgaacatcagctatgtaggtgatgtgcagattgatgtggaagtgaagaaatatttttgcaaagcaggagtcaagggcatgcagctacatggcgttttgcgggtgatactggagccactcattggggaccttcccttcgtgggggctgtgtcaatgttcttcatccgacgcccgaccctagacatcaactggacagggatgaccaacctgctggatatcccaggacttagctcactctctgacaccatgatcatggactccattgctgccttcctcgtgttgcccaaccgattactggtgccccttgtgcctgaccttcaagatgtggctcagttgcgttcccctctgcccaggggcattattcgaattcacctgctggctgctcgagggctgagttccaaggacaaatatgtgaagggcctgattgagggcaagtcagacccatatgcacttgtgcgtttgggtacccagacattctgcagtcgtgtcattgatgaagaactcaacccacagtggggagagacttatgaggtgatggtacacgaggtcccagggcaggagattgaagtggaggtgttcgacaaggatccagataaagatgactttctgggcagaatgaagctggatgtagggaaggtgttacaggctagcgttctggatgattggttccctctacaaggtgggcaaggccaagttcacttgaggctagaatggctgtcacttttgtcagatgcagagaaactggagcaggttctacagtggaattggggagtctcctctcgaccagatcccccgtcagctgccatcttagttgtctacctggatcgggcccaggatcttcctatggtgacctctgaattgtacccaccacagctgaagaaggggaacaaggaacccaaccctatggtacaactgtcaattcaggatgtgactcaggagagcaaggctgtctacagtaccaactgcccagtgtgggaggaagcgttccggttcttcctacaagaccctcaaagccaggagctcgatgtgcaagtgaaggatgattccagggccctgactttaggagcactgacgctgcctctggcccgcctgctgactgccccagaactcatcctggaccagtggttccagctcagcagctctggtccaaactccagactctatatgaaactagtcatgaggatcctgtacttggattcatcagaaatatgcttccccacggtgcctggttgtcctggtgcttgggacgtggacagtgagaatccccagagaggcagcagtgtggatgccccacctcgaccctgtcacacgactcctgatagccagtttgggactgagcatgtgcttcggatccatgtattagaggcccaggacctgattgccaaagaccgtttcttggggggactggtgaagggcaagtcagacccctatgtcaaactaaagttggcaggacgaagcttccggagccatgttgttcgggaagatctcaatccccgctggaatgaggtttttgaggtgatcgtcacatcagttccaggccaagagctagaggttgaagtctttgacaaggacttggacaaggatgattttctgggcaggtgtaaagtgcgtctcaccacagtcttaaacagtggcttccttgatgagtggctgaccctggaggatgtcccatctggccgcctgcacttgcgcctggagcgtctcaccccccgtcccactgctgctgagttagaggaggtgctgcaggtgaatagtttgatccagactcagaagagtgcggagctggctgcggccctgctatccatctatatggagcgggcagaggacctcccgctgcgaaaaggcaccaagcacctcagcccttatgctactctcactgtgggagatagttctcataaaaccaagactatttcgcaaacttcagcccctgtctgggatgagagtgcctcctttctcatcaggaaaccacacactgagagcctagagttgcaggttcggggtgagggcactggcgtgctgggctcattatccctgcccctctcagagctcctcgtggctgaccagctctgcttggaccgctggtttacactcagcagtggtcaggggcaggtgctactgagagcacagctagggatcctggtgtcccagcactcgggagtggaagctcatagccacagctacagccacagctcctcatcgctgagtgaagaaccagagctctcggggggaccccctcacatcacctcctcagccccagagctccggcagcgcctaacacatgttgacagtccccttgaggctccagccgggcctctgggccaggtgaaactgactctgtggtactacagtgaagaacgaaagctggtcagcattgttcatggttgccggtcccttcgacagaatggacgtgatcctcctgatccctatgtgtcactgttgctactgccagacaagaaccgaggcaccaagaggaggacctcacagaagaagaggaccctgagtcctgaatttaatgaacggtttgagtgggaactccccctggatgaggcccagagacgaaagctggatgtctctgtcaagtctaattcctccttcatgtcaagagagcgtgagctgctggggaaggtgcagctggacctagctgagacagacctttcccagggtgtagcccggtggtatgacctgatggacaacaaggacaagggcagctcctaggagctggcgagtcccagcctgactgctctgtcttcctgccttcgtctcgctccatcaccgcctcaatgtgatgagcctaaagctagggtccaagggcagagcctgtgcccttcagccctttcacctaacaggcccatattcgggcctttgcctgaccaaagagaagaaccgtatgttccctttactgcacggcctttatccttctgggcccctggggcggggacctgagctggctgtttcctgctttgcctgcacattgttctcccttcctcccaactcctcagggccttctgtatctgtgcctggccagtggcagcactagcagtggtattagcttatgccaaatacagctttggaaggatctttttttctttaactagatggtcaccttcttccctaccacacatgggtgggaaggtggacaggctaacctctccagctgtgagcctcttagactactgcatgtagcaaatgttcagcagctcaggcccccatgtccagttctgtccccactgtcctcaaccctgtcctgaaaattctactgctttgatggctggggccagtctcttgtcactttggaaactgaggacgcgtggattctactcaagcctccaagtagtggcatatcagtcttggagctcctagctggtgatacggagagggctttggaggacttgggacagcagggccaatttttttgcccaagtgcctaggctgctaactcactgactagaacttaatctggtactttacagttttgcaccaactctgccaagccactggatcttacattaaacatcatactcaaaaaaaaaa

SEQ ID NO: 59681 - DNA, 1648 bp, Homo sapiens
tttcgtcccggggcgagtgggcctctgctcgtgggtggttctcgtggaggtcagctcccgcgtgtctccgctcgacagggtgcttgggcagagcccatcgggtaggcgcgggccatggcgcagtacaagggcaccatgcgcgaggcaggccgtgccatgcacctcctcaagaagcgcgaaaggcagcgggagcagatggaggtgctgaagcagcgcatcgccgaggagaccatcctcaagtcgcaggtggacaagaggttctcggcgcattacgacgccgtggaggccgagctgaagtccagcacggtgggcctggtgaccctgaacgacatgaaggcccggcaggaggccctggtcagggagcgcgagcggcagctggccaagcgccagcacctggaggagcagcggctgcagcaggagcggcagcgggagcaggagcagcggcgcgagcgcaagcgtaagatctcctgcctgtcctttgcactagacgacctcgatgaccaggccgacgcggccgaggccaggcgcgccggaaacctgggcaagaaccccgacgtggacaccagctttctgccagaccgtgaccgcgaggaggaggagaaccggctccgagaggagctgcgccaagagtgggaggcgcagcgcgagaaagtgaaggacgaggagatggaggtcaccttcagctactgggacggctcgggccaccggcgcacggtgcgggtgcgcaagggcaacacggtgcagcagttcctgaagaaggcgctgcaggggctgcgcaaggacttcctggagctgcgctccgccggcgtggagcagctcatgttcatcaaggaggacctcatcctgccgcactaccacaccttctacgacttcatcatcgccagggcgaggggcaagagcgggccgctcttcagcttcgatgtgcacgatgacgtgcgcctgctcagcgacgccaccatggagaaggacgagtcgcacgcgggcaaggtggtgctgcgcagctggtacgagaagaacaagcacatcttccccgccagccgctgggaggcctatgaccccgagaagaagtgggacaagtacaccatccgctaacacccgcctgccagagcggaaaccgggggtggggggagacactcatttctaggccccatcaccagtcacttgatttcgtgaccttgatttcttcccccaaatttaataaagacagagggttctcatgattcacattggttgtgctattgctgatgttatgctttggttgcttggttggtcttttctgagtattttagtgttgccacctggatttgcctgccattgctcctgcctgaagcctgtaattgaaaacccatgactgggccccactgtccagacagaaattagaataggaggccacattttttaccctggtggttatgaagccatggacttgggggcccacagtgaactgagtttgattccccgacacagcctcctccttgctgtgtagttttgggtaagcttattaaacccccatgcctcagtttggtcacctgtaaaaggaaataacaagagcacttactttataagattgatgtgagtattaagtgaattaatatttgtaaaacgcttagctcttaataaatgtttctgttgttattaaaaaaaaaaa

SEQ ID NO: 59682 - DNA, 1292 bp, Homo sapiens
tttcgtgcggcggcggcccgagagctgcgccgggagagctgtgccgcgagcctccgcctcttttttggcaccgcacagtggatccctggaggccgagcgccacgccgcccgggtacccggcagatcgcgaggtggaacgggccgtcgctgcgggggacagcgttccgaggcagttggtcctctccaggatgccgtaggcatcagctgaccggcccagcccacgtgactacaggggcacttgatgggaatcatggcagcatccaggccattgtcccgcttctgggagtggggaaagaacatcgtctgcgtggggaggaactacgcggaccacgtcagggagatgcgcagcgcggtgttgagcgagcccgtgctgttcctgaagccgtccacggcctacgcgcccgagggctcgcccatcctcatgcccgcgtacactcgcaacctgcaccacgagctggagctgggcgtggtgatgggcaagcgctgccgcgcagtccccgaggctgcggccatggactacgtgggcggctatgccctgtgcctggatatgaccgcccgggacgtgcaggacgagtgcaagaagaaggggctgccctggactctggcgaagagcttcacggcgtcctgcccggtcagcgcgttcgtgcccaaggagaagatccctgaccctcacaagctgaagctctggctcaaggtcaacggcgaactcagacaggagggtgagacatcctccatgattttttccatcccctacatcatcagctatgtttctaagatcataaccttggaagaaggagatattatcttgactgggacgccaaagggagttggaccggttaaagaaaacgatgagatcgaggctggcatacacgggctggtcagtatgacatttaaagtggaaaagccagaatattgagttatttcttaacaagtttcgagagagaagtgagcaagacaagagcaagcaacggctattaaatgtcacaatcctttaattagaaaccatttattggccggacgcggtcgtcacgcctgtaatcatagcactttgggaggccgaggcgggcggctcacgaggtcaggagatccagaccatcttggctaacagggtgaaaccccgtctctactaaaaatacaaaaaattagccgggcgtggtggcgggcgcctttagtcccagctactctggaggctgatgcaggagaatcaattgaaccctggaggcggagcttacagtgagttgagattgcgccactgtactcctgggcaacatgcggatccgtctcaaaaaaaa

SEQ ID NO: 59683 - DNA, 1782 bp, Homo sapiens
tttcgtggctgcgtggtacgccatggtgacagggctgttcccggggaggctgtgatgggttgacaggtgcgtgacagtgggagctgctctcggcacaagcatgtacggcaaaggcaagagtaacagcagcgccgtcccgtccgacagccaggcccgggagaagttagcactctacgtatatgaatatctgctccatgtaggagctcagaaatcagctcaaacatttttatcagagataagatgggaaaaaaacatcacattgggggaaccaccaggattcttacattcttggtggtgtgtattttgggatctctactgtgcagctccagagagacgtgaaacatgtgaacactcaagtgaagcaaaagccttccatgattacagtgctgcagcagctcccagtccagtgctaggaaacattcccccaggagatggcatgccagtaggtcctgtaccaccagggttctttcagccttttatgtcacctcggtaccctggaggtccaaggcccccattgaggatacctaatcaggcacttggaggtgtcccaggaagtcagccattactccccagtggaatggatccaactcgacaacaaggacatccaaatatgggtgggccaatgcagagaatgactcctccaagaggaatggtgcccttaggaccacagttcttgaccccttggttatcattacagaactatggaggtgcaatgagacccccactgaatgctttaggtggccctggaatgcctggaatgaacatgggtccaggtggtggtagaccttggccaaacccaacaaatgccaattcaataccatactcctcagcatctcctgggaattatgtaggtcctccaggaggtggagggccaccaggaacacccatcatgcctagtccagcagattcaaccaactctggtgataacatgtatactttaatgaatgcagtacctcctggacctaacagacctaattttccaatgggccctgggtcagatggtcccatgggtggattaggaggaatggagtcacatcacatgaatggctctttaggctcaggagatatggacagtatttccaagaattctcccaataatatgagcctgagtaatcaaccgggcactccaagggatgatggcgaaatggggggaaatttcttaaatccttttcagagtgagagttactcccctagcatgacaatgagcgtgtgatccattaccaagtctcctcatgaaaaccacagtgagtcagcccttcacagaactactacggaagaaaattattcatcacagtgtacagttaaacaaaggaatctcagtcacaccaaaccaacctttttatttcctgctctctcccctcttttgtgaagaaagcgggtccaaatgtgattcaaacaactgtacggagtggcatattagaattgccctaaactgaactgcaaataattatgtgtgtatgtatatgtgtgggaaagagaatgtactgtatatgtgtatgttatacagacatatacacatacatacattgacccacaggacattgtaaaatattatcacatgacatcttaagtagaaataagtagggacttttattccatcctttttttcacgtttacattttaattattacaagttgctcctgccccctccctgaactattttgtgctgtgtatatcactgctttatataagttattttttaaggtgaactcagatgttatggttttgtaaatgtctgcaatcatggataggaataaaatcgcttatttgagagctttcatc

SEQ ID NO: 59684 - DNA, 2240 bp, Homo sapiens
tttcgtgcgcggcagcggcaggaccgccgtggcgcctagagtagcgacccggggggagcgcggggcgacgctggctgcagggacccggtgacagcgtgagaggttcgcagagtactaggttttgacaagcttgcatcatgcgtgagtataagctagtcgttcttggctcaggaggcgttggaaagtctgctttgactgtacaatttgttcaaggaatttttgtagaaaaatacgatcctacgatagaagattcttatagaaagcaagttgaagtagatgcacaacagtgtatgcttgaaatcttggatactgcaggaacggagcaatttacagcaatgagggatttatacatgaaaaatggacaaggatttgcattagtttattccatcacagcacagtccacatttaacgatttacaagacctgagagaacagattcttcgagttaaagacactgatgatgttccaatgattcttgttggtaataagtgtgacttggaagatgaaagagttgtagggaaggaacaaggtcaaaatctagcaagacaatggaacaactgtgcattcttagaatcttctgcaaaatcaaaaataaatgttaatgagatcttttatgacctagtgcggcaaattaacagaaaaactccagtgcctgggaaggctcgcaaaaagtcatcatgtcagctgctttaatatactaaatgcattgtagctctgagccaggtctgaagaactgttgcccaattcaacagtgccagcattccaactttgttaaacctaccaacatcttaaatggactttcctgtggtggtaccctttaagaggcggatgaaagctactatatcagtttgcacattctaatcactttccagtatcacaagagagatttttacttatataatagtcctagagtttgcagctggtaaaaccagaggctacatccagtattactgctaagagacattcttcatccaccaatgttgtacatgtatgaaaatggtgtactgtatactttaacatgccccatactttgtattggagagtacaataatgtaaatcctaaaagcaccactattttagcataataaaagaaagtccaaagagctcctatatagactactccagataacttcgcttctttgatacttgtagcttattgtaattttttttaagaaattcaaggtcattattattgtacaaaataagcgctttgattaacacagctatatagtttttttaatttttaaaaaacctgtggagacggtgatcttgtctttaaaacatgatagtcctttcagtataatgtcttagattaaagacgttgcctttaatatctgttgggaaggaaatgtccagacttttcaaatctcttattatatgtttcctttttttgtttacatagggaacaatgtttatagtcgtgtgtacagtgggggtctacaacaagaagtgtatattttcaaacaattttttaatgatttaacaatttttgtaaatcattttcaggcttctgcagctgtagattctcactgtgaatcccttgcttgctcatgcataagtgtatttgcaataccaaatatacaggtttagtatttttgcctgttagtgattgtttcacatgtgtaacgttttggttgagatgttaaatggtggacgagtactgtggatgtgaatgtgggaagtaattttaatcatatgtaattggtcacaaggcctaatttgcagtaactattgctgttttatttaacaatgccttgttgctttgtatgcattaatgtttggatgtaaagattgtgtgtctatccaacagggagccacagtatttaaattgaccaacctaatgttacaactactttgaggtggccaaatgtaaactaaaagccttaattaaagtggtgcaattttgtataacttagcatcagtagttcaataaatttgcaccactttaattaaggctttagtttacatttggccacctcaaagtagttgtaacattaggttggtcaatttaaatactgtggctccctgttggatagacacacaatctttacatccaaacattaatgcatacaaagcaacaaggcattgttaaataaaacagcaatagttactgcaaattaggccttgtgaccaattacatatgattaaaattacttcccacattcacatccacagtactcgtccaccatttaacatctcaaccaaaacgttacacatgtgaaacaatcactaacaggcaaa

SEQ ID NO: 59685 - DNA, 886 bp, Homo sapiens
ttcttttcctgagtgttgcctactgataacggcatgcattttctcaggcttttctgagagtcatttttgtgactcctgtcccttagttttgtcttcattctgaagtttgcttagataccagctgttctctgaggtttgaatgtcttgccggaccctgcgtttcatatggatgttctggcattgttgtccccgaactcctacatgaaactcccatccaaaaggaatttgctttaggggcttaaacgagaggggacgaggtgggaaacttgtgtggcttggttttaaactaatctttttgtttgttttaaggcctgctgggaacgggacttctaaaaggaactatgtctggaaggctgtggtccaaggccatttttgctggctataagcggggtctccggaaccaaagggagcacacagctcttcttaaaattgaaggtgtttacgcccgagatgaaacagaattctatttgggcaagagatgcgcttatgtatataaagcaaagaacaacacagtcactcctggcggcaaaccaaacaaaaccagagtcatctggggaaaagtaactcgggcccatggaaacagtggcatggttcgtgccaaattccgaagcaatcttcctgctaaggccattggacacagaatccgagtgatgctgtacccctcaaggatttaaactaacgaaaaatcaataaataaatgtggatttgtgctcttgtatttttaagtggattaaaaaacttactaccttaaattgatttgctacatgcttaaaatgatagaggttgctcagcatttttggagtacaagggggtcagagagacatgtgatgaaaattacagggcgagtacagagatttagaagggaacgggttttaatgcgagtatc

SEQ ID NO: 59686 - DNA, 1956 bp, Homo sapiens
  misc_feature (1)...(1956): n = a,t,c or g
tttcgtctcaagcaggattcttcccgagtccctggcatcctcagaagcttcaactctggaggcaatgggtcgaaaggaagaagatgactgcagttcctggaagaaacagaccaccaacatccggaaaaccttcatttttatggaagtgctgggatcaggagctttctcagaagttttcctggtgaagcaaagactgactgggaagctctttgctctgaagtgcatcaagaagtcacctgccttccgggacagcagcctggagaatgagattgctgtgttgaaaaagatcaagcatgaaaacattgtgaccctggaggacatctatgagagcaccacccactactacctggtcatgcagcttgtttctggtggggagctctttgaccggatcctggagcggggtgtctacacagagaaggatgccagtctggtgatccagcaggtcttgtcggcagtgaaatacctacatgagaatggcatcgtccacagagacttaaagcccgaaaacctgctttaccttacccctgaagagaactctaagatcatgatcactgactttggtctgtccaagatggaacagaatggcatcatgtccactgcctgtgggaccccaggctacgtggctccagaagtgctggcccagaaaccctacagcaaggctgtggattgctggtccatcggcgtcatcacctacatattgctctgtggataccccccattctatgaagaaacggagtctaagcttttcgagaagatcaaggagggctactatgagtttgagtctccattctgggatgacatttctgagtcagccaaggactttatttgccacttgcttgagaaggatccgaacgagcggtacacctgtgagaaggccttgagtcatccctggattgacggaaacacagccctccaccgggacatctacccatcagtcagcctccagatccagaagaactttgctaagagcaagtggaggcaagccttcaacgcagcagctgtggtgcaccacatgaggaagctacacatgaacctgcacagcccgggcgtccgcccagaggtggagaacaggccgcctgaaactcaagcctcagaaacctctagacccagctcccctgagatcaccatcaccgaggcacctgtcctggaccacagtgtagcactccctgccctgacccaattaccctgccagcatggccgccggcccactgcccctggtggcaggtccctcaactgcctggtcaatggctccctccacatcagcagcagcctggtgcccatgcatcaggggtccctggccgccgggccctgtggctgctgctccagctgcctgaacattgggagcaaaggaaagtcctcctactgctctgagcccacactcctcaaaaaggccaacaaaaaacagaacttcaagtcggaggtcatggtaccagttaaagccagtggcagctcccactgccgggcagggcagactggagtctgtctcattatgtgattcctggagcctgtgcctatgtcactgcaattttcaggagacatattcaactcctctgctcttccaaacctggtgtctatccggcagagggaggaaggcagagcaagtggagcagggcttagcaggagcagtttctggccagaagcaccagcctgctgccagcggggcagcccctcataggaggcccaggagggagccccaaggcgtagaagccttgttgaagctgtgagcaggagaagcggtgcccaccagcttccaggtctccctgacctgcctgctctatgccccacaccctacgtggccgtggctctgtgcagtgttacgttagatagctctcgcctgggtctgtgctgtttgtcgtgaaaagcttaatgggctggccaggctgtgtcaccttctccaagcaaagccatatggagcatctacccagactcccactctgnacacactcactcccacct

SEQ ID NO: 59687 - DNA, 2243 bp, Homo sapiens
tttcgtgtcggagcgagcgcgagtgaggagacccccgccgggccactggcacttgcttctgcggcgagtcccacccacgaccgcagcccagcaactcgcaaacgcaacctgaagcctgggctgcgcagtgtgggagggcttcgcgatcttgggggacccattccgaacttgcagaggaccgtagctctcctggcctggagagtgtgaacaggattgtggactcttccaagattcacaatgatatggtgaatccaaagactggaaccaaaaagatttactcagtgctttagttttaacaacagtaaattgtctaccaacacccatcatggctaaaagtgcggaggtcaaactggcaatatttgggagagcaggcgtgggcaagtcagctcttgtagtgagatttctgaccaaacggttcatctgggaatatgatcccaccctcgaatcaacctaccgacaccaagcaaccatcgatgatgaagttgtttccatggagatactagacactgctggtcaggaagataccattcagagggaggggcacatgcgatggggggaaggctttgtgctggtctacgacattactgaccgaggaagttttgaggaagtgctgccacttaagaacatcctagatgagatcaaaaagcccaagaatgtgactctcatcttggttggaaacaaagctgacttggaccactccaggcaggttagcacagaagaaggagagaagctggccacagaattggcttgtgctttttacgagtgctctgcctgcactggagaagggaacatcacagagatattctatgaattgtgtcgagaggtgcgtcgccggaggatggtgcagggcaagacgaggcgacgcagctccaccacgcatgtcaagcaagccattaacaagatgctcaccaaaatcagtagttaggcagcccagctgaggtggaccaactaattggaaacactcttccccttctgttcccctttcaaaaataaaacaaaatattgcattctttgtttggattctgagaaatgtctgggcttcccattgtttctggcctctaataggttgggaagttttagcgtgttttatgcaatttcagtgctaacaatttcttcctttcctgcttgaataagatacactctaatggcatttgaacatgtaatcaccagagattctgaaatgactggtttatgttaagctatttttaggcatcttcaccttgctttaagtaggttgaagtttttgcaaaggcatttaaaaattcaatttcttgtcagatactacaaataattttcttaaaagtctaagatagcagaaaatacagtaaaaacacaggagaagaagctgagctattggaacaggaaatagaaggaactctagtttctgtttgaagtgaggattttctgaattatctaatatcatctaggttttctttaaaattttattttgttcttcagttcaagcatcttctcactaatgtttttcactataacagagaattcatttcaatttgagttggttctctcaatgatctattgatcattacaccctaactctccttccttggctcaaacaatattttccctataacaaaggcaataggacacaaaattcacatcctgctgggccttttttcatcaagtcagggtgatataaaaacattggaagtcttttcaccaaaccctgactttattgaatgctagtagaagatgtagaattagagacatctgatttgtttatcaccttagcagaaaaaccacagtccaaaagacaagcaaattaagaatggagcttaaccatgcctccattgggaagtctagactttgagccaggtacagtaagaaaaattagcctctgattcattaagtttgccacatgacttattttgatattttggatacattaactcacttaggagaattcagaaaagaatgggtgattaaagttcattacagctgaataaatgtgtctaaaacagactcttgtattctgaaagtacagtctacaactgataaaaccttatgattcttttctcccccattatgcccctatatatatcaagatttgggtactttattttagtagaaaatatatatcttttacatatgtatgtatttataaatgcatagatatatgtataaaaatttgtaagcgttagcggcattaattcaccaatgcatttggacaacttgatgtaactgactttattttatgtgactataataaaaagcataattttctc

SEQ ID NO: 59688 - DNA, 1683 bp, Homo sapiens
ttttttttttttggagaaaaaaaactttattggtattacagcaaaaaattcacataagatacataaattatgatacctcaaagctagaggcaaataaaatacacctaattatacaaattctatacaattaaatcaagaacattaggaaaatttttttgcaaaaatgtcaaaaaaagatttgatctggtcgggtatagtggctcacacctgtaatcccagcactttgggaggccaaggcgggtggatcacctgaggtcaggagttcaagactagtctagccaacttggtgaaaccccatctctaccaaaaatacaaaaattagccaggtatggtggtgtgtgcctgtaatcccagctactagggaggctgagccacgagaatcgcttgaacctgtgaggtggaggttgcagtgagccgagatcgcaccactgcagtccagcctgggggaacagagtaagactccatctcaagagaaaaaaaaaaagatttgatcaaaccaagatttcagaaaaacaaaaccaaaaacactgtgacttggttaacatttatttaattttgggaacacagtaaaaaacagaaacaaaacatctatttcttcacaattgtgaaaatgtctggcttgaaacacctttgacatttatctcactttcgctctcaagtttcaggctgctgcatccatggcggctagctggcagtgatgctcttttctgctctcaaggtttctttgggcttggaatagttccacggccgtctattttctgtgaatccataaagttttctaagggccactcgagcagcctcttcttctgcaaccaatactgtttccccaggtccttctgcaatcaactttttatcacagtataagccaacaaaatacaaaggcaaagctgtggtgccaccagactgcctagtaagtcttgattcaggagctgaaacattccttttcttcagttcttctaccaatagccccatgggatttattatcttccacatctcaaagagctcttttccagtcatttgagtaattaagaagtccctgatgaaaagtgcagtcctctcaggtccactgctctgtaacagggctccaataactgcaaagaaagtctgctgtaacacagctgggggcactgggaattcttcactcagtgttaactgctccacagccaagtttctagccacgtgacacacgacttcctcaccagtgagaaagtcaacaagattttttatgccttcagtgggcatgtctgggtactcgtcttcaagaaactgtgtaaggcaagtctgtgaaaaagatgtcccttgttcggatagttcttgattacttttaagattcagaagaacagcttctttctctatcccaagttgttggcgtttggcctcctcacttttaatatagcagctattaacaaatgcagttttgagaagatctaaggaaaagttttcctgtaaccgatgtccaaaagcttgtatttctgcatggtaatcccagttcggcttctctgaacggcgcacgggcggcggcgggcaccgcagaaggcgctgccgctctaactccttctggaagcggaaggcggcgcggaatcccttcttcactccccgaaccggagggaccagcttgggggcgactggagccaggaggcagcgatgtccctgctgcagcaatcttaccagcccggacgcccc

SEQ ID NO: 59689 - DNA, 1124 bp, Homo sapiens
tttcgtgttgacaattacgtctgggtccaagcaaacatgaggcagctgccagccggcctgggcagtcttgtctgcctcggctgtgaagtggggaggctggcaacagttttcttcagcgcccaggatgcagccggctaaggaagtgacaaaggcgtcggacggcagcctcctgggggacctcgggcacacaccacttagcaagaaggagggtatcaagtggcagaggccgaggctcagccgccaggctttgatgagatgctgcctggtcaagtggatcctgtccagcacagccccacagggctcagatagcagcgacagtgagctggagctgtccacggtgcgccaccagccagaggggctggaccagctgcaggcccagaccaagttcaccaagaaggagctgcagtctctctacaggggctttaagaatgagtgtcccacgggcctggtggacgaagacaccttcaaactcatttacgcgcagttcttccctcagggagatgccaccacctatgcacacttcctcttcaacgcctttgatgcggacgggaacggggccatccactttgaggactttgtggttggcctctccatcctgctgcggggcacagtccacgagaagctcaagtgggcctttaatctctacgacattaacaaggatggctacatcaccaaagaggagatgctggccatcatgaagtccatctatgacatgatgggccgccacacctaccccatcctgcgggaggacgcgccggcggagcacgtggagaggttcttcgagaaaatggaccggaaccaggatggggtagtgaccattgaagagttcctggaggcctgtcagaaggatgagaacatcatgagctccatgcagctgtttgagaatgtcatctaggacacgtccaaaggagtgcatggccacagccacctccacccccaagaaacctccatcctgccaggagcagcctccaagaaacttttaaaaaatagatttgcaaaaagtgaacagattgctacacacacacacacacacacacacacacacacacacacacagccatttatgtgggctggcagaggggacagagttcagggaggggctgagtctggctagggggccgagt

SEQ ID NO: 59690 - DNA, 1659 bp, Homo sapiens
cgacgatttcgggttgcgtgctgccagcgggaactgtgtaggggtagattttcgctgcagtgttccccgagcctgttagacgcagcgcgccgggagactgagagaggaaaggatagaggaagtgctgccctaggctgcatgagtcgaagcaagcgtgtttccttcccgccaggcaagtgcccttagaaaccgggccccgcccccttcctggcctgcattcccatcccctctcccggggcggaggtgaggacctccttggttcctttggttctgtcagtgagccccttccttggccatgaagctcgtgaggaagaacatcgagaaggacaatgcgggccaggtgaccctggtccccgaggagcctgaggacatgtggcacacttacaacctcgtgcaggtgggcgacagcctgcgcgcctccaccatccgcaaggtacagacagagtcctccacgggcagcgtgggcagcaaccgggtccgcactaccctcactctctgcgtggaggccatcgacttcgactctcaagcctgccagctgcgggttaaggggaccaacatccaagagaatgagtatgtcaagatgggggcttaccacaccatcgagctggagcccaaccgccagttcaccctggccaagaagcagtgggatagtgtggtactggagcgcatcgagcaggcctgtgacccagcctggagcgctgatgtggcggctgtggtcatgcaggaaggcctcgcccatatctgcttagtcactcccagcatgaccctcactcgggccaaggtggaggtgaacatccctaggaaaaggaaaggcaattgctctcagcatgaccgggccttggagcggttctatgaacaggtggtccaggctatccagcgccacatacactttgatgttgtaaagtgcatcctggtggccagcccaggatttgtgagggagcagttctgcgactacatgtttcaacaagcagtgaagaccgacaacaaactgctcctggaaaaccggtccaaatttcttcaggtacatgcctcctccggacacaagtactccctgaaagaggccctttgtgaccctactgtggctagccgcctttcagacactaaagctgctggggaagtcaaagccttggatgacttctataaaatgttacagcatgaaccggatcgagctttctatggactcaagcaggtggagaaggccaatgaagccatggcaattgacacattgctcatcagcgatgagctcttcaggcatcaggatgtagccacacggagccggtatgtgaggctggtggacagtgtgaaagagaatgcaggcaccgttaggatattctctagtcttcacgtttctggggaacagctcagccagttgactggggtagctgccattctccgcttccctgttcccgaactttctgaccaagagggtgattccagttctgaagaggattaatgattgaaacttaaaattgagacaatcttgtgtttcctaaactgttacagtacatttctcagcatccttgtgacagaaagctgcaagaatggcactttttgattcatacagggatttcttatgtctttggctacactagatattttgtgattggcaagacatgtatttaaacaataaactaaaaggaaataaaaaaaaaaaaaagg

SEQ ID NO: 59691 - DNA, 2530 bp, Homo sapiens
ttttttttttttaacaataataaatctttattgagattttttaacaaaataatttttgaaaacaaaagctcccacatgtaaacaagaacgtaaataagttagatggcattattatgtacattcaagaatcaaaacatgttctggtaaacattccataatccggtaaaatgttttcacccatcactgttaagagaaactgtgtattttatactatcaataacaaaacctaatctttgaacattataaaatggtttacggaatataaactatacagtttacgtttttcattcctcctagcagatccgtggtcacatgtatactgagtcctaagatgtattttgtcagtattagcccaaaatgtccaccatcccaaattaaccaggttacacatatctcctccagtttttatggtaggatgtgttagaacccatatattacaacatcatttttcaaaactaacctaatcctaaattctattctaactagtctggcaatccttcattttatctccctgtctacacattcattagataccaaggcaatttcaccttaaaaaatactgctaatacacatttagatagtaatttctggtaaaactgtagtttatttatcaaaaaatgtgaatttttattttagaaatgtaggtcaagcattgtcatagttgtagtacttaattgagaataatggcttcaatttggaagattcaatatacacattaaacaaaattaaacagtttaaattataattcatataattataattctcatttttagatggccaaaatatattgttttcttactataaagtgttatttattcatcgtctatttttactaattatattcaattcacagtagtgacatcaaagggacaagtcatcataggtctgagaccaggaaaacctggtctgttttaacagaggcgtgtctaaaataagagtacatatttcaattaggcccacagagatagaaaagagccaggataatctttgtattgaggccttgatttcagttttaaatgtaattcttttctgccagctgaaataatttaaagatgtgcacaataggtctgtgctatttaaggcaggtgtcaagcacattttgaaatttaccaactagaatgttctcctaatggaaaaagaaaaaagaaaagttatgacagtttttgtttaagacagatgtttaaatagcactcttctttttgaccatttaaaaataatttggcagctgtaaccacctatggtcataacacataatcacttacaaaagacaagcaacagatacagaattaacgatatacttttaatatttttacaaccctctttaagttggtgcctaatggcatttaacaagatttttatattcagtgaaaaagatttagaacataaactgacatgaagtaaggaatataatttctctgtgccatgcaaaagagaagtcaactttttacacatcatcactcctaaacagttctaattaaaatccaaactgttcccatttttgcatcattgtcattctttggcaaaagattctaaaaacccaggggttaggaaacaactgttcactcatggttttccttttttttttttttgcaaaatacatgtgttttgtaaaagaaatctgcactgtgcttggtttatactacataattataagtaagcaaaatagtatgacttcttttgactaatctactcctaaagccttgagttgccgttcaatctcttcatctgagattgtagcctttgaagtagaggcagatggtaagcttcgagcagctgatggagctttggccatctttccagaaatttcaattccaatttcatcaagaacttgattcacaatatcctggctttcttcttcgtcatcagaaccgtcaaagatgtcatcaagtgtatcattgatcatttcttcagtcatttccattttcatgttttccttctggaaattctgcatggtttgtaatgtcttttgtggatccatcttcttgttaactgcctgcattgtttttgctgtggtagacattgctccagccatcttcatttgggaattcatcacttttgtttgtgtagacatagaagtaacttttgaacttacagcaaaagttctcgtcttctgtttccgtagatgcacaagttgtttggctaaaactttgcaagcttccttattaccaatcttggccattttcttaatttctaattccagctgtttttcttgtttctctaaagctgctcgatctctgattatagccctctgtgtacctcgtaactctcgattctgttcctttattacatcatccacagttttcttcttgaagagggacgccatggttaaagactgcgcccgggcggcccggctcggcccggtccggcccaacgctggcaaaggacaggaggaaaaggacaggaccttggcgggttcggggtggcggagcggagagacagcaggaggaggtcggggtcgccaggcaggacccgcggaaggcttgtatccgcagctaccgcagccgcgtcacccggagctcaggtgaccggg

SEQ ID NO: 59692 - DNA, 2543 bp, Homo sapiens
acgatttcgtcgagtccaaaatggcggctctcaggctggcgcgctccgtgctgctggggctttgaggtggtcgccgggggtccgggggaccctttccccgccgcggaagccctagaggatgaatcggggaccctgctaaggtctggcggcggggctggagagcagtggcagcaagggctgcggtggcgtccacgcagcgggatgtgcgagagttactccaggtcgttgttgagggtctcggtggcgcagatctgccaggcgctgggctgggactcggtgcagctcagcgcctgccacctcctcacggacgtgctgcagcgctatctgcagcagctgggccggggctgccatcggtactctgagctctatggccgaacagacccaattttggatgatgttggtgaagctttccagctgatgggggttagtctacatgaactagaagactatattcacaacattgagcctgtcaccttcccacaccaaattccgtcatttcctgttagcaagaacaatgtacttcagtttcctcaacctggaagtaaagatgcagaggaaagaaaagaatacattcctgattacctgccacccattgtgtcttctcaagaagaagaagaagaagagcaggtgcccactgatggaggcacatcagcagaagccatgcaggttcccttggaagaagatgatgaattggaggaggaagaaattattaatgatgagaatttcctgggcaagagaccactggatagtcctgaagctgaagaactgccagccatgaagcggcctcggctattaagcactaaaggggacacgctagatgttgtgttattggaagctcgagagccactcagctcaataaatactcaaaagatcccaccaatgctttctccagtccatgtacaggacagtacagacttggcacctccctcacccgagccgccaatgttggctccagttgcaaaatcacaaatgccaactgcaaaaccattagaaacaaagtcatttacacctaaaacaaagactaaaactagctctccaggacagaagactaaatcacctaaaaccgcccagtcaccagcaatggtcggaagtcctattcgatcaccaaaaactgtatccaaagaaaagaaatcacctggacgttccaagagccccaagagtcccaagagccccaaggtcacgactcacattccccaaacacctgtgagacctgaaacgcccaacaggactccttcagctacactcagtgaaaaaatcagtaaagagactatccaggtaaaacaaatacagacaccccctgatgctgggaaactgaacagtgagaatcagccgaaaaaggctgtggtagcagataaaacgattgaggcctctatcgatgctgtgattgcacgagcctgtgctgagcgagagccagatcctttcgaattttcttctggatcggaatctgaaggagacatttttactagccctaagagaatttcaggcccggagtgtactactcccaaagcttccacttccgcgaacagtttcacaaagtcaggatccactcctctgcctctttccggtggaacctcaagttccgataactcatggacaatggatgcctccattgatgaggttgtacgtaaagcaaaactgggaacaccttcaaatatgccccccaactttccttatatctcttctccgtcagtgtctcctcccactcccgaacctctccacaaggtgtatgaggagaaaaccaagctgccttcctccgtggaggtaaagaagaagttgaaaaaggaactaaagactaaaatgaaaaagaaagaaaagcagagagatagggagagggaaaaagacaagaacaaggacaaaagtaaggagaaggataaagtgaaagagaaagagaaagacaaggaaactggcagggaaacaaagtatccctggaaggaatttcttaaagaggaagaggcagatccctacaagtttaaaatcaaagaatttgaagatgttgatcccaaagtgaaattgaaagatggacttgtgaggaaggagaaagagaagcataaagataagaagaaagatagagagaaaggcaagaaagataaagataagagagagaaagaaaaagtgaaagataaaggcagagaagataagatgaaagccccagcacccccactggtgttgcccccaaaagagttggccctgcccttgttcagccctgccacagcctccagggtcccagccatgctgccatctttgttgccagtgcttccggaaaaactgtttgaggagaaagagaagccgaaggagaaagaaaagaaaaaggacaaaaaggagaagaagaaaaagaaggaaaaagagaaggagaagaaggagaaggaaagagagaaagagaagagagagcgagagaagagagaaaaagagaaggagaaacacaagcatgaaaaaataaaagtggaaccagtcgctctggccccgagtccagttatccccagattaactctccgagtcggtgctggccccgacaagataagaagaagaagagcaggtgcccactg

SEQ ID NO: 59693 - DNA, 1085 bp, Homo sapiens; identical to SEQ ID NO: 58710

SEQ ID NO: 59694 - DNA, 3637 bp, Homo sapiens
agcggccgccgcgcgccagcgggaggcgctccctctgcccacctccgccccctgcggaccgagacccggagatgtcgagttgtggagttcggctcggcccggcgacgggctagctgcccgggaacccccgcgggtggacacatgcatgccggagctccgggaggggccgcgccgccaccgtctgaactaggatgtcccgacatgaaggtgtcagctgtgatgcatgtttaaaaggaaattttcgaggtcgcagatataagtgtttaatttgctacgattacgatctttgtgcatcttgttatgaaagtggtgcaacaacaacaaggcatacaactgaccacccaatgcagtgcatattaacaagggtagattttgatttatactatggtggggaagctttctctgtagagcagccacagtcttttacttgtccctattgtggaaaaatgggctatacggagacatctcttcaagaacatgttacttctgaacatgcagaaacatcaacagaagtgatttgtccaatatgtgcagcgttacctggaggcgatcctaatcatgtcacggatgactttgcagctcatcttacacttgaacacagagcccctagagatttagatgaatcgagtggtgttcgacatgtacgtagaatgtttcaccctggccggggattaggaggtcctcgtgctcgtagatcaaacatgcactttactagcagttctactggtggactttcttcttctcagagttcatattctccaagcaatagggaagccatggatcctatagctgagcttttatctcagttatcaggagtgagacgttctgcaggaggacagcttaattcctctggcccttccgcttctcagttacaacaactgcagatgcagctgcagctagaacggcagcatgcccaggcagcacggcaacaactggagaccgcacgcaacgcaacccggcgtactaacacaagcagtgtcaccactacaatcacacaatccacagcaacaaccaacatagctaatacagaaagcagtcagcagactctacagaattcccagtttcttttaacaaggttgaatgatcctaaaatgtctgaaacggagcgccagtccatggaaagcgagcgtgcagaccgcagcctgtttgtccaagagctccttctgtccactttagtgcgtgaagagagctcatcctcagatgaggatgatcggggggagatggcagattttggtgctatgggctgtgtagatattatgcctttagatgttgctttagaaaacctaaatttaaaagagagtaataaaggaaatgagcctccaccacctcctctttgatgacatcccaattcgcagacaatgtcctctgtgctgtatttgccaatgaaagtggacaacaactatcttgggtttgtttggtgattgtaatttcaggtctgtcactcttgttacattgtgtacattcaaaaggaagagagaaaatatatatgataatcatttccacttaactaatttttacttctagcaggtaaatgtaggtagcagtgcaggggtgatctctgcttcctgtaccttgacatgcaaaaggctctcctaatactccacattcaaactgaagaggaaaattgaaatctctaatgaagctgctgtgtgtatttatgaatattaatgaataaaaactgcttggatggtttaccttaactactgcatgaggttttttgcagcgtgcatgagttttagtgaccttgttatttaagaagttaaatacaaggagtaaaacttaaaaaaaaaatacaaagcccaaagctttcccaaacattattcaatggttacacgacgaagtaggcttttgaataatgtctgcctgaatcacctttctttgtgtgcctcctacgcacaaagccagctctgcagtgggaatctgggggattatagccgggtgtggcactccgccctgtgtgactgtcctgtcgccctgttagtcatcttgcctgtgtggagctcagcctgtctctttaactcatctgtagaagacacaccagtaaagctactgttggaatctgctgcaggggcctttgtgtgccctaaaaacaaatcctgttcatgtttgtttaaagtttttactttttgtggttgtttaaaattttttcaattgttaaatatgttttattcaggtgtagatgaatttcatttattgactgttcaacagagttaacctgaattatgttgtctttgtttttaaaaatctcacattctcaatcatattttgcattatttatgtatttgctttgtagtttgctgagacagatcagtatcaggggagctttgaggatttgccttcccagatttgtcagtatattacaaccaaattcttaatgctaattttagcaccttttatttattgggttttttctggcataaaaagtaaagccttttaattgaatcatgccacctatatgcctatattattaatcctatgtgtaaaaaaaatgtacagctttttttgggtttgttttggggtttggaagggccgggttattttttatttcctgtttcagtttttgtgcatagactttcacaatagctccaaggcagggacagcgggtttgggggttgggagggcagtttttggaatgtaaatttaggacttttaaaaaggtgcgcacagcttctgataaatttataactagacttaacctaatcatgtctcgttccagttctcttttctctgagcccttttcaaagtctcctctctttctcctgtcatccttttcctttcctgtccgtgtatctccgtttcttcaacatgacaagcatacagacttgaacacccctccggtgttcttccgagaactgtgaagtccatgttcatccaaatgtaaccaaaaaagaagtcaccctacatgtctgaaaaactgttgcttctcctctgaaacttcaaactccaacgatttccaaatacaatagctttgttttctttagttctgtaatggataatgtttaaaggaaaactttacaccaggcttctggttacactagaagtcaagcccattagggattttcattttttttcatttggttgttgagaagtttcaaaaatcagttttcaagctgtggtctttcaaacacatctgcacataagtcacacatttcaataaagcattttcaagactgttgaccacttgaatttctttggtgttagtggattaacctaaccattactctgagattttatatctctaatccagtattttttttctttttatgctaaacatgggagatcctggttttgtgtgaatgcattattttggatgtgagaaataaatgccaattatatgtactttcccttttctgcacaaattctgggaaaatgtaaaagccttcattttttaacatggttttagggaacaactgtaagtccattcagagcagtttaatttagatgatcacttttaacactgcagaagacctaaggagtcataagattccatctcatgtagaatactgtatattaattattttttaccagatattttacaaatacctcacctcatcctgtatgtaatcaataatgtattattttagggtagaacgacacagaatatcaatataaaaatatattcaagcccttgaaaaaa

SEQ ID NO: 59695 - DNA, 1592 bp, Homo sapiens
tttcgtgccggggccccgggtggcacccggcaggcgggcaggcgggcgccatggagctgctctcggcgctgagcctgggcgaactggcgctcagcttctcgcgggtgccgctcttccccgtcttcgacctcagttacttcatcgtctccatcctctacctcaagtatgagccaggagcagtcgaactgtcccggcgccaccccatcgcgtcctggctgtgcgccatgctgcattgcttcgggagctacatcctggctgatctgctccttggggagccactgatcgattacttcagcaacaactccagcatcctgctggcctcagctgtctggtacttgattttcttctgccccctggacctcttctacaagtgtgtctgcttcctgcctgtgaaactcatcttcgtggccatgaaggaggtggtgcgagtccgcaagatcgcggtgggcatccatcacgcccatcaccactaccaccacgggtggttcgtcatgattgcaactgggtgggtcaaaggttctggtgtcgccctcatgtccaactttgagcagctgctccgaggggtctggaagccagagaccaacgagatcctgcacatgtctttccccaccaaggccagcctgtatggagccatcctcttcaccctccagcagacccgctggctcccagtgtccaaagccagcctcatcttcatcttcaccttgttcatggtgtcctgtaaggtgtttctgacagccacccactcacacagctccccctttgatgccctggagggctacatctgccccgtgctgtttggttcggcctgcgggggtgaccatcaccacgacaaccatggtgggtcccacagcggtggtgggccaggagctcagcattcggccatgcccgccaagtccaaggaggagttgagcgagggctccaggaagaagaaggccaagaaggcggattagggggtggcccaaggggcaccggggagaggacccggacccaggaccctctgagctgggaggcttcctgcgctcagatctatcctttcctggccttgacttccccatctgcaaatcagggtcattggctcaccctccagggctgatgtgggggttgagatatggggatgaggatgaagaacttttgtagaaatcggggttccctctttctctctgccaggaccccatagagtcacagcttttggaggggttcacagaatcctggcagcagctccagtcaagaatgtcactggttggcatgatattcttagttctatttttccttctttaaaattgcatcttgaccaggcacagtggctcatgcctataatcctagcactttgggaggccgaggcgggcagatcacctgaggtcaggagttcaagaccagcttggccaacatggtgaaaccccatctctaccaaaaatacaaaaattagccagacgtggtggtgcacgcctttaatcccagctactcgggaggctgaggcaggagaatcacatgaatccaggaggtggaggttgcagtgagctgagatcttcccactgcactccagcctggccaataagacctgtctccagcaagaccctgtctcaaaaaaaaaa

SEQ ID NO: 59696 - DNA, 1579 bp, Homo sapiens
ttttttttttttaataaacactttagatttattctgccatttctgaagccacctcatttaatttatacataggatataaatggctatacatttttacacacttttatacaagtttaggttgtactactgagtttgttaaaatgtacccattatttactcaaaatatttattgttacaagaaaaccgtaagaagcttgtgtaacatgaacagcaagtattgaaaacgaatatgtaaagtaaatggttttgccctgactaaatcagcctcagtattttatgcttttagtagaaaagcccattaaacaaaatagaatcctgggggatcaaatcatatgaatgattcatgaaataacacttctgaagcaaccccagaatcatataaatgtaagggttaaaggtcatatgtactaagcatgggtcagaggaatagaatggatttgttaattttaccctaaataaaaggcgcttgtgggcaacagctctgccatcaatacacatgggcagatgtttccgaatccagccattcccagatttcactgacatgcccttttccacaggctccctgctgatgagatttccccagcagcagaagtttgacatcactgctcccggatgggagaatcagagctctcctcatttgggtcaggggtggctggctcacgaggtttggtccaaccagcagaaccagctccttggatcctggaataaaccaaacatcaatggtaccatgcgctctgtgcccagggagtgaaaggcaggtccagggtgggaagaagaggggctgctaccttttggagtgaaaaaaatgaggtttacactgtagtataacaaaatgcctttttgtaaaggtcagaagaaatggctgtgctgtgctgcctgaagcagaaaaaccttcatgtaccaggtgaatgtaaagcctttctccctcccacacacaatggactcacccagtattaccctcccactaccacttttgaccctcataacaggcaccctggcgggggggcagattgatgttatcaccatttaccagatgaggaaactgaggcctgatgggcagtgatttgtgcactgcgacataggactcagtgaagagcctagccagctgacggtcagctgactggtgcactctttccctcaccttctctctcaagggcacagctacactctttctccaccattattaacactcacagggcacaggtagagcgtccccagacctgtgcaatattctacacgaaaacatttggaatgtgagcaatgtctgaacaggggcttgccaggcacatctgatcaccataaatgctcccacccctgcctgtcctcacttgtgctgcactatgcaagcaagcagcaggttctcagaaggccactgtcctgcatgtcacaatgagtggccaactccttcacagaacagcaaatagcagccctggctacaaggtgcagtgtgcaacccccatatgccaaggggcagctgctatcttccagcagagagagaacccccagctctgctccctacctatgccctgcttcctgtgcctcacacagccagccttgctggcctgctggctattgtctc

SEQ ID NO: 59697 - DNA, 2694 bp, Homo sapiens
atgaaggttgagccatggcgggcggggccggggaggcgggcttggagcgagggggcggggcaggcgccacaaaaacgcgctcgcgccggcgccgaaccgcaactcccggcgacccccgcgctcccgggtggcaagatggtggcgcgcaggaggaagtgcgccgcgcgggacccggaggaccgtatccccagcccactgggctacgcagctattccaatcaagttctctgaaaagcaacaggcttctcactacctctatgtgagagcacacggcgttcgacaaggcaccaagtccacctggcctcagaagaggactctttttgtcctcaatgtgcccccatactgcacagaggagagcctgtcccgcctcctgtccacctgtggcctcgtccagtctgtagagttgcaggagaagccggacctggctgagagcccaaaggagtcaaggtcgaagttttttcatcccaagccagttccgggtttccaggtagcctacgtggtgttccagaagccaagtggggtgtcagcggccttggccctgaagggccccctgctggtgtccacagagagccaccctgtgaagagtggcattcacaaatggatcagtgactacgcagactctgtgcccgaccctgaggccctgagggtggaagtggacacgttcatggaggcatatgaccagaagatcgctgaggaagaagctaaggccaaggaggaggagggggtccctgacgaggagggctgggtgaaggtgacccgccggggccggcggcctgtgctcccccggactgaggcagccagcttgcgggtgctggagagggagagacggaagcgcagccgaaaagagctgctcaacttctacgcctggcagcatcgagagagcaagatggagcatctagcgcagctgcgcaagaagttcgaggaggacaagcagaggatcgagctgctgcgggcccagcgcaaattccgaccgtactgagctgtgagagccgcagtgaatggctggaggtgcagggccaggaggaggcgaggcagggcctgcagcggtctctgagaggccgagctctggccaacgggccccaggttgaaggccaccgcgtccaacagccccatcagagtccacacaggccaggagggaaggaccaggccacccctcgggtcttgtgcttcagcagtcctggggacccaggcgtgccgagaggaggacttgtccttcctgcttcttgcctccacaccctcctctccaggaccctggatgaatccgttctgtgcttccttttccctcaatgcaaaagcccttgctggcaacgaaaaagcctcaaaagcagtgagaatacaagaaccttttattttccatccagttgggcagcagggaaaggctaggtgggcccagcccgcccttccttcctccagctggctggagattattagccaggagacagcagccctggaacccagactctgtctcccccttgaggtcacagatgttgaagttggaatctcgctccttcccctgactaccatcctaggctgggcctcaagactagtgaggcctgtccccaccatccctggccttgttgtggggctcaggaactcagagtcccagtgttgagtctgggagcactaggtcttcatagttccaggcccagagctacagctgggctgggagcgtgtgtgtgcactgtaagaaggagctgatgatactggccacgtgctggggttcgctcatgtggacacagtgattgcctgggacttccacaaactggaactgctggagaggggagggggtgggtagtgatatgtggccagaggagcctagggagctccatgggccccggggtcagggccctcccacagcattccagctccctgcaggtcaggagcgcctcccacagtgagtttcccccacactcggctccttggagccccgacagtccatagcaccccaggagatgtctaaccttagggacttggaggcctcccaggggtctaggccagctgagttgtgaagttgcatggcagggacagggcagggccaaggccagggttgctgtgattgtatccgaagtagtcctcgtgagaaaagataatgagatgacgtgagcagcctgcagacttgtgtctgccttcaagaagccagacaggaaggccctgcctgccttggctctgacctggcggccagccagccagccacaggtgggcttcttccttttgtggtgacaacgccaagaaaactgcagaggccccagggtcaggtgtaagtgggtaggtgaccataaaacaccaggtgctcccaggaacccgggcaaaggccatccccacctacagccagcatgcccactggcgtgatgggtgcagagggatgaggcagccaggtgttctgctgtggtttgggagcctataaagtgagactaggctgggcatggtggctcccatctgcaaaaccagcactttgggaggccaaggtgggcggatcgcctgaggtcaggagtttgagaccagcctggccaacatggtgaacccccatctcttaaaaatataaaaattagctgggcatggtggcaggtgcctgtaatcccagctactcaggaggctgaggcacgagagtcgcttgaacccgggaggtggaggttacagtaagctgagatcttcccactgcactccagcctgagcgacagagtgagactccatctca

SEQ ID NO: 59698 - DNA, 1599 bp, Homo sapiens
tttcgtcccgagcagctgcggggccgccaccgccgccgccgccgttgcaggctgagtcatcactagagagtgggaagggcagcagcagcagagaatccaaaccctaaagctgatatcacaaagtaccatttctccaagttgggggctcagaggggagtcatcatgagcgatgttaccattgtgaaagaaggttgggttcagaagaggggagaatatataaaaaactggaggccaagatacttccttttgaagacagatggctcattcataggatataaagagaaacctcaagatgtggatttaccttatcccctcaacaacttttcagtggcaaaatgccagttaatgaaaacagaacgaccaaagccaaacacatttataatcagatgtctccagtggactactgttatagagagaacatttcatgtagatactccagaggaaagggaagaatggacagaagctatccaggctgtagcagacagactgcagaggcaagaagaggagagaatgaattgtagtccaacttcacaaattgataatataggagaggaagagatggatgcctctacaacccatcataaaagaaagacaatgaatgattttgactatttgaaactactaggtaaaggcacttttgggaaagttattttggttcgagagaaggcaagtggaaaatactatgctatgaagattctgaagaaagaagtcattattgcaaaggatgaagtggcacacactctaactgaaagcagagtattaaagaacactagacatccctttttaacatccttgaaatattccttccagacaaaagaccgtttgtgttttgtgatggaatatgttaatgggggcgagctgtttttccatttgtcgagagagcgggtgttctctgaggaccgcacacgtttctatggtgcagaaattgtctctgccttggactatctacattccggaaagattgtgtaccgtgatctcaagttggagaatctaatgctggacaaagatggccacataaaaattacagattttggactttgcaaagaagggatcacagatgcagccaccatgaagacattctgtggcactccagaatatctggcaccagaggtgttagaagataatgactatggccgagcagtagactggtggggcctaggggttgtcatgtatgaaatgatgtgtgggaggttacctttctacaaacaggaccatgagaaactttgtgaattaatattaatggaagacattaaatttcctggaacgctctcttcagatgcaaaatcatggctgtcagggctcttgataaaggatccaaataaacgccttggtggaggtccagatgatgcaaaagaaattatgagacacagtttcttctctggagtaatctggcaagatgtatatgataaaaagctggtacctccttttaagcctcaagtaacatctgagacagatactagatattttgatgaagaatgtacagctcagcctattacaataacgccacctgaaaaatatatagaggatggtatggactgcatggacaatgagaggcggccgcatttccctcaattttcctactctgcaagtggacgagaa

SEQ ID NO: 59699 - DNA, 1052 bp, Homo sapiens
  misc_feature (1)...(1052): n = a,t,c or g
tttcgtgcggcgctggggagggcgaggcggaggcggcaaaacgggcggtcgagcagaacgtgtagccgcgtcccctccagtccgctccgggcagctgctgatgcaaggaatcccctgggctcccgtccactccactgctgaccagcccattcgcctgtgctgagtcttcctgcaggcctttccttgcctctgtgggaccctgtgggggtccatccggctggagaagaaaagcctctcatgctaacgttgcagaccccagagggtcctgtgtgggtgtggagatggccaatgagaatcacggcagcccccgggaggaagcgtccctgctgagtcactccccaggtacctccaatcagagccagccctgttctccaaagccaatccgcctggttcaggacctcccagaggagctggtgcatgcaggctgggagaagtgctggagccggagggagaatcgtccctactacttcaaccgattcaccaaccagtccctgtgggagatgcccgtgctggggcagcacgatgtgatttcggaccctttggggctgaatgcgaccccactgccccaagactcaagcttggtggaaactcccccggctgagaacaagcccagaaagcggcagctctcggaagagcagccaagcggcaatggtgtgaagaagcccaagattgaaatcccagtgacacccacaggccagtcggtgcccagctcccccagtatcccaggaaccccaacgctgaagatgtggggtacgtcccctgaagataaacagcaggcagctctcctacgacccactgaggtctactgggacctggacatccagaccaatgctgtcatcaagcaccgggggccttcagaggtgctgcccccgcatcccgaagtggaactgctccgctctcagctcatcctgaagcttcggcagcactatcgggagctgtgccagcagcgagagggcattgagcctccacgggagtctttcaaccgctggatgctggagcgcanggtggtagacaaaggatctgaccccctgttgcccagcaactgtgaacca

SEQ ID NO: 59700 - DNA, 1793 bp, Homo sapiens
ctcagtggagagcggggagttgtgtccaccttgccgacgtcgctagccgtggggctgtcctgggaaggcggacggcgagcgcccggtgtccgcactcggccgcctgccgtgcccgtctgcgcccgtgtcatcctcactcgggacgcagggaccgtttttaaatcacaggggcgtgtgtcagcctgccctaggacttcatgtctatatatttccccattcactgccccgactatctgagatcggccaagatgactgaggtgatgatgaacacccagcccatggaggagatcggcctcagcccccgcaaggatggcctttcctaccagatcttcccagacccgtcagattttgaccgctgctgcaaactgaaggaccgtctgccctccatagtggtggaacccacagaaggggaggtggagagcggggagctccggtggccccctgaggagttcctggtccaggaggatgagcaagataactgcgaagagacagcgaaagaaaataaagagcagtagagtccctgtggactcccatgggtcataccagccagcatctgttcctgaactgtgtatttaccatcatgacggaagaagagagtgagccgcaattgttctgaaaatgtcaaacgaggcttctgttttgcacctgcagatcaccgagttggttttcttttcttttcttgcctttttttttttttgaaatttgccgagcagtggagccctctgacaatttgcaaggccctctgagaaaggaagctgcttagagccagggggttagtgggtgaggggagcgagtgctgtttttgagatcattatctgaactcaggcagcctagtagaggcagtggtgggattccaatgggtcttggtgggtgggaggtggggcatgtgcaaagcaagcaaggaacatttggggtaagaaaacaaacatgaggcaaaagaaaaaatacatgtttttaagaaaacattgagcagagaactgcagccaggatgcgctcagcagacattcactctggctgctgggacatcagaaaacaaagtcttcatctctctctccagtttcacccaccccaccctttgctttcatttcaggtgtgttggtctatatgacagggaggagagtaaaggagagcaggagcaattggctgcctgcaaagccagctggaggtgaagtgcaggaaaggaaaggtcaccccattctactccatggcctctctgctcccagctgtggtaggctcacatagccagtgtgatcggtttttaagaggcagtgcttttcagcttttctccctgatatatccattttgcttcccagcactttttaggagtagtgagagcacttcctgcccttgttggaagccccagggtggacactcagcacgaaggtctctcccttaactgctgcccttccaagacttgctcccgagatggagtgggcgtggtcttccaggctggcccttccttctcctcaccgccaccttccctgccccagccccagcagccatgggtacatgggtccccagctcacctatggattcccgccagtctgcccagctgcagtactcacgccccatgggggatcttggtctgtttttcttgtgggagcctagtggagagcagacgtggctttttatgtgtcttgttggggaggtgacttgcatggtggggacaaggctgtccgtggcaaccttgggatcgagtttgagactaaaggatgtcatgagatccctgggcttctccccatgttgttcccggacaagggcagaagggaggcatggcaagggacctctgctgt

SEQ ID NO: 59701 - DNA, 2504 bp, Homo sapiens
ggcacgaggcgaaaggcttgaggaccaggtcggggccgggttccgggtcggggagcggctccgggcggcagctatgaggcgggacgtgcgcatcctgttactgggcgaggcccaggtggggaagacgtcgctgatcctgtccctggtgggcgaggagttccccgaggaggtccctccccgcgcggaggagatcaccatccccgcggacgtcaccccggagaaggtgcccacccacatcgtggactactcagaagccgagcagacggacgaggagctgcgggaggagatccacaaggcaaacgtggtgtgtgtggtgtatgacgtctctgaggaggccaccattgagaagattcgaactaagtggatcccactggtgaatggggggaccacgcaagggcccagggtgcccatcatcctagtgggcaacaagtcagacctgcggtcggggagctccatggaggccgtgctccccatcatgagccagtttcccgagattgagacctgcgtggagtgttcggccaagaacctgaggaacatctcagagctgttctactacgcccagaaggccgtcctgcatcccacagcccccctctatgaccctgaggccaagcagttgaggcccgcgtgcgcccaggcgctgacgcgcatcttcaggctctcagatcaggacctggaccaggcgctcagtgacgaagagctcaacgctttccagaaatcctgctttgggcaccccctggccccgcaggccctggaggacgtgaagacggtggtgtgcaggaacgtggcgggcggcgtgcgggaggaccggctgaccctggatggtttcctcttcctgaacacgctcttcatccagcgcggccggcacgagaccacctggaccatcctgcggcgcttcggctacagcgatgccctggagctgactgcggactatctctcccctctgatccacgtgccccccggctgcagcacggagctcaaccaccttggctaccagtttgtgcagagagtgtttgagaagcacgaccaggaccgcgacggcgccctctcgcccgtggagctgcaaagccttttcagtgtgttcccagcagcgccctggggccccgagctcccacgcacagtccgcacagaggccggccggttgcccctgcacggatacctctgccagtggaccctggtgacctacctggacgtccggagctgccttggacacctaggctacctgggctaccccaccctctgtgagcaggaccaggcccatgccatcacagtcactcgtgagaagaggctggaccaggagaagggacagacgcagcggagcgtcctcctgtgcaaggtggtaggggcccgtggagtgggcaagtctgccttcctgcaggcctttctcggccgcggcctggggcaccaggacacgagggagcagcctcccggctacgccatcgacacggtgcaggtcaatgggcaggagaagtacttgatcctctgtgaggtgggcacagatggtctgctggccacatcgctggacgccacctgtgacgttgcctgcttgatgtttgatggcagtgacccaaagtcctttgcacattgtgccagcgtctacaagcaccattacatggacgggcagaccccctgcctctttgtctcctccaaggccgacctgcccgaaggtgtcgcggtgtctggcccatcaccggccgagttttgccgcaagcaccggctacccgctcccgtgccgttctcctgtgctggcccagccgagcccagcaccaccatcttcacccagctcgccaccatggccgccttcccacatttggtccacgcagagctgcatccctcttccttctggctccgggggctgctgggggttgtcggggccgccgtggccgcagtcctcagcttctcactctacagggtcctggtgaagagccagtgaggcccctggtacccaagccccctcccctgacctgggtgtgcctcgctgctggggctctgcaggggcagcacagctggggtgcaggccaggctgccactccgggaacgcctttgcgccgggactttttgtttctgaaggcagtcgatctgcagcggggccttatgctgccatgcactgccctggctcctgccggacccccagggtgggccgtggcaggtggctgagcaggagctcccaagtgccggccaccgctgtcagggattgcccacccctgggcatcatgtgtgtggggccggggagcacaggtgtgggagctggtgaccccagacccagaattctcagggctctacccccctttcctggtcctaggtggccagtgggtatgaggagggctggaaggcagagctttgggccaaaagcaggcgttggggggtcccccctcaagtttggagccgtttccgtggttgtagcagaggaccggaggttgggttcctgattaaacttcactgtgtgttttctatctcggatcccagtctctgaagacaacttgctttgattcaacctaaaaaaaaaa

SEQ ID NO: 59702 - DNA, 3064 bp, Homo sapiens
tttcgtccaaactctaaaagaaggacgcattttaggtaagatctagtggctagatcttcagggtgggcttcgttcttgtggaaatcagtcaagaaagatcggattcgcggttatttatgcaaatcatctgggtggattgtgtacggagttaaactgcgccttctggaccgggtctgaacaatggagactgcgctagcaaaaacgccacagaaaaggcaagttatgtttcttgctatattgttgcttttgtgggaggctggctctgaggcagttaggtattccataccagaagaaacagaaagtggctattctgtggccaacctggcaaaagacctgggtcttggggtgggggaactggccactcggggcgcgcgaatgcattacaaaggaaacaaagagctcttgcagcttgatataaagaccggcaatttgcttctatatgaaaaactagaccgggaggtgatgtgcggggcgacagaaccctgtatattgcatttccagctcttactagaaaatccagtgcagttttttcaaactgatctgcagctcacagatataaatgaccatgccccagagttcccagagaaggaaatgctcctaaaaatcccagagagcacccagccagggactgtgtttcccttaaaaatagcccaggactttgacataggtagcaacactgttcagaactacacaatcagcccaaattcacactttcatgttgctacgcataatcgcggagatggcagaaaatacccagagctggtgctggacaaagcgctggaccgggaggagcggcctgagctcagcttaacactcactgcactggacggtggggctccgcccaggtccgggaccaccacaattcgcattgtcgtcttggataataatgacaacgcccccgaatttttacaatcattctatgaggtacaggtgcccgagaacagcccccttaactccttagttgtcgttgtctccgctcgagatttagatgcaggagcatatgggagtgtagcctatgctctattccaaggcgatgaagttactcaaccatttgtaatagacgagaaaacagcagaaattcgcctgaaaagggcattggatttcgaggcaactccatattataacgtggaaattgtagccacagatggtgggggcctttcaggaaaatgcactgtggctatagaagtggtggatgtgaatgacaacgcccctgaactcaccatgtctacgctctccagccctaccccagaaaatgccccggaaactgtagttgccgttttcagtgtttctgatccagactccggggacaacggtaggatgatttgctccatccagaatgatctcccctttcttttgaagcccacattaaaaaacttttacaccctagtgacacagagaacactggacagagagagccaagccgagtacaacatcaccatcactgtcaccgacatggggacacccaggctgaaaaccgagcacaacataacggtcctggtctccgacgtcaatgacaacgcccccgccttcacccaaacctcctacaccctgttcgtccgagagaacaacagccccgccctgcacatcggcagtgtcagcgccacagacagagactcaggcaccaacgcccaggtcacctactcgctgctgccgccccaggacccgcacctgcccctcgcctccctggtctccatcaacgcggacaacggccacctgttcgctctccagtcgctggactacgaggccctgcaggcgttcgagttccgcgtgggagccacagaccgcggctccccggcgttgagcagcgaggcgctggtgcgcgtgctggtgctggacgccaacgacaactcgcccttcgtgctgtacccgctgcagaacggctccgcgccctgcaccgagctggtgccccgggcggccgagccgggctacctggtgaccaaggtggtggcggtggacggtgactcgggccagaacgcctggctgtcgtaccagctgctcaaggccacggagcccgggctgttcggcgtgtgggcgcacaatggcgaggtgcgcaccgccaggctgctgagcgagcgcgacgcggccaagcacaggctggtggtgctggtcaaggacaatggcgagcctccgcgctcggccaccgccacgctgcacgtgctcctggtggacggcttctcccagccctacctgccgctgccggaggcggccccggcccaggcccaggccgactcgctcactgtctacctggtggtggcattggcctcggtgtcgtcgctcttcctcttttcggtgctcctgttcgtggcagtgcggctgtgcaggaggagcagggcggccccggtcggtcgctgctcggtgcccgagggcccctttccagggcatctggtggacgtgagcggcaccgggaccctatcccagagctaccactacgaggtgtgtttgaccggagactcaggggccggcgagttcaagttcctgaagccgattattcctaaccttttgccccagggcgctggtgaagaaatagggaaaactgctgccttccggaatagctttggattaaattagagatctcgtgatgacgcgttgttttctgccatttatcccaaactttttcagatctagaattcgagagtgtcatggacaaaaatttcaccttgagattgagcttttatttccctttttaatggatttgtttgttgaacttcatgctgtccaagtgttgaaaagtcaattttatttcattgcatttatttacatagtgtcattccaaatccatgcatgctgttgattttcctgagatttttttctcttcttgttggtatttgttgtgataaaccaccttaataaaatcaagtattaattttattttctatatattctgcccattctatttcatcacactcttaagtattatatatttgatgctaaaatgcaaaaattaaaaatgtttcacatcatcatattttaattgtttaaaacaaagacaaatacatacatatgctaacaaatgaaatatgtgaaaaaatatgtaaaaggaaacaatcttctatttactcttttc

SEQ ID NO: 59703 - DNA, 1641 bp, Homo sapiens
tttcgtggcagaggccgggtggtgtggtgtcggtgtcggcagcatccccggcgccctgctgcggtcgccgcgagcctcggcctctgtctcctccccctcccgcccttacctccacgcgggaccgcccgcgccagtcaactcctcgcactttgcccctgcttggcagcggataaaagggggctgaggaaataccggacacggtcacccgttgccagctctagcctttaaattcccggctcggggacctccacgcaccgcggctagcgccgacaaccagctagcgtgcaaggcgccgcggctcagcgcgtaccggcgggcttcgaaaccgcagtcctccggcgaccccgaactccgctccggagcctcagccccctggaaagtgatcccggcatccgagagccaagatgccggcccacttgctgcaggacgatatctctagctcctataccaccaccaccaccattacagcgcctccctccagggtcctgcagaatggaggagataagttggagacgatgcccctctacttggaagacgacattcgccctgatataaaagatgatatatatgaccccacctacaaggataaggaaggcccaagccccaaggttgaatatgtctggagaaacatcatccttatgtctctgctacacttgggagccctgtatgggatcactttgattcctacctgcaagttctacacctggctttggggggtattctactattttgtcagtgccctgggcataacagcaggagctcatcgtctgtggagccaccgctcttacaaagctcggctgcccctacggctctttctgatcattgccaacacaatggcattccagaatgatgtctatgaatgggctcgtgaccaccgtgcccaccacaagttttcagaaacacatgctgatcctcataattcccgacgtggctttttcttctctcacgtgggttggctgcttgtgcgcaaacacccagctgtcaaagagaaggggagtacgctagacttgtctgacctagaagctgagaaactggtgatgttccagaggaggtactacaaacctggcttgctgatgatgtgcttcatcctgcccacgcttgtgccctggtatttctggggtgaaacttttcaaaacagtgtgttcgttgccactttcttgcgatatgctgtggtgcttaatgccacctggctggtgaacagtgctgcccacctcttcggatatcgtccttatgacaagaacattagcccccgggagaatatcctggtttcacttggagctgtgggtgagggcttccacaactaccaccactcctttccctatgactactctgccagtgagtaccgctggcacatcaacttcaacacattcttcattgattggatggccgccctcggtctgacctatgaccggaagaaagtctccaaggccgccatcttggccaggattaaaagaaccggagatggaaactacaagagtggctgagtttggggtccctcaggttcctttttcaaaaaccagccaggcagaggttttaatgtctgtttattaactactgaataatgctaccaggatgctaaagatgatgatgttaacccattccagtacagtattcttttaaaattcaaaagtattgaaagcc

SEQ ID NO: 59704 - DNA, 2176 bp, Homo sapiens
atatatggccctttccctagatatagtgcgggatctctccttaggataaagagttgctgttgaagttgtatatttttgatcaatatatttggaaattaaagtttctgactttaattctggcctatcctttgaggctcttgagggtgggcaagttcctgaatccctcaggtggtaaagatgggcaaaggatggggaaaagaagcatgggtgattaactccttttatcccacccctggaaggaaagataagcttctgggaaaacacttaacccaaagtttcagacatgttaaaccactagcccagatttctgcccttgcaccaaggctatgcttggaaatcagtggttgccaggttaggaaagtggctggatgagagatctgaggacagaaatctcaattaacatgctatcccctcccttaaaagccaagttcccccacaattacaaattcttttttattagtcaaaatcacaatcactttgattaaaaggatgggacactccaccctcagcagaaaatgatacagtttatagaaaacctccccgcccctcccacaccccaattaaaaactacaaaaaaatctcccctccttccctacgatgtcatggtagtctgactcctccagtggcactgcagctctggagtggccagctcaccacagcaccctccacttcaccttggggagaggagggatgctggtggttaaggaggttaaaaccattagttccagtaatgccagttcccaaacatgcacttccttcctttcccccaaggtctgggaccaaggagaaagggaccgaaatgagcccagccatgaggagcaactcgaggagagaaaatatagcccaaggagggttaggaagagttccaatatacctcctccctccccccacctcaaaaaagaaaaaaaggcagtttaagggtatttatcacaccaaaaaatggttccccctcaggcctgaggaaaaagaccaagatgtccagtcttgagggagtactgagaaactcagagctcatctatccttgagcctccattaatttcatctccaggggcattggctaaactaggtccctttttcttggcaacctgcactgtccagaacttggagatgggagaaatacagggcgaggacatcaggagggcaccccaggcccaggggtcccccataggttccctcagtcctcgggtgggatgcgcagggcagaatacaccatcacccgactgtcctcctgccgtcggcacaagaggctgcgctgaatacttcggagggaccctccagctgtgatgaaggcccagagccccatggaaacagtgactgcatagatgggcagcaggctggcctcataccaggggttcaggaatgtcagtcccgatgtcagtaggtgactcccaaccaccaggcccaaagcccagtaccgtctcctctcacaggcatcaaagaacacaactccccaaaaggtatggagcaggataatggctgctgtcagaaaggctgaagtcaggaagtaatagggtgagtctccatggatcccaaccacacctggcccaagtgcatcagccaaaatattgataacagagaagacaccactgatgataccgaaggagagaccagaaacataggccatctggcggatggagatgggtgatcttccgtcctcactcagcgatgctaacccctcatctgccttcttaagcagcttgtagtaggcaaagcggaacacctcctgtagaaggacagagacagcagcaccaaaaatcaggaggccgtactggagccgggcatctgaccggtcggtcacatggaccaagatgaaccagaccacagaggccaggagcagggagaccagccagaaaaatgcccctgcgaccaggatgataacgcgaagcgggtccccagccacagtgatcaagaaaagcgcgaaggccgggccgaacgcgacgaaagtgcagccgaaaaacaccgcagcccccatggctggtcaggtgggaaggtgggtgggggcctgaccaggacaggcaaatgggaggggcgcgccagctggggagtccgcgtggggtggcaacgcgaccccacgaggggcgcggtgcaatgtcacccccagaccccggggaaggggaagggggggaaccgaaaccccaaatgaaggtccgcgccacttcctctacggaagacgaaa

SEQ ID NO: 59705 - DNA, 1499 bp, Homo sapiens
tttcgtgccggcggcaggtcccagcccggggctagagaccgagggccggggtccgggcccggcggcgggacccaggcggttgaggctggtcaggagtcagccagcctgaaagagcaggatggatcttgatgtggttaacatgtttgtgattgcgggcggcacgctggccatcccaatcctggcatttgtggcttcatttcttctgtggccttcagcactgataagaatctattattggtactggcggaggacattgggcatgcaagtccgctatgttcaccatgaagactatcagttctgttattccttccggggcaggcctgggcacaaaccctccatcctcatgctccacggattctctgcccacaaggatatgtggctcagtgtggtcaagttccttccaaagaacctgcacttggtctgcgtggacatgccaggacatgagggcaccacccgctcctccctggatgacctgtccatagatgggcaagttaagaggatacaccagtttgtagaatgcctgaagctgaacaaaaaacctttccacctggtaggcacctccatgggtggccaggtggctggggtgtatgctgcttactacccatcggatgtctccagcctgtgtctcgtgtgtcctgctggcctgcagtactcaactgacaatcaatttgtacaacggctcaaagaactgcagggctctgccgccgtggagaagattcccttgatcccgtctaccccagaagagatgagtgaaatgcttcagctctgctcctatgtccgcttcaaggtgccccagcagatcctgcaaggccttgtcgatgtccgcatccctcataacaacttctaccgaaagttgtttttggaaatcgtcagtgagaagtccagatactctctccatcagaacatggacaagatcaaggttccgacgcagatcatctgggggaaacaagaccaggtgctggatgtgtctggggcagacatgttggccaagtcaattgccaactgccaggtggagcttctggaaaactgtgggcactcagtagtgatggaaagacccaggaagacagccaagctcataatcgactttttagcttctgtgcacaacacagacaacaacaagaagctggactgaggccccgactgcagcctgcattctgcacacagcatctgctcccatcccccaagtctgacgcagccaccactctcagggatcctgccccaaatgcggtcggagcgccagtgaccctgaggaagcccgtcccttatccctggtatccacggttccccagagctttggggaccacgcgaaaacctccaagatatttttcacaaaatagaaactcatatggaacaaaataagaaaccccagccatgaaatctaccatgaagtcttcaagttcatgtcactgacaagcttgtgcaaagcagccaccttggaccataattaaatcaaggacattttctttgagacattccttatagttggagactcaagatat

SEQ ID NO: 59706 - DNA, 2095 bp, Homo sapiens
tggaatggcactcagggcaaaggcagaggtgtgcatggcagtgccctggctgtccctgcaaagggcacaggcactgggcacgagagccgcccgggtccccaggacagtgctgccctttgaagccatgccccggcgtccaggcaacaggtggctgaggctgctgcagatctggagggagcagggttatgaggacctgcacctggaagtacaccagaccttccaggaactggggcccattttcaggtacgatttgggaggagcaggcatggtgtgtgtgatgctgccggaggacgtggagaagctgcaacaggtggacagcctgcatccccacaggatgagcctggagccctgggtggcctacagacaacatcgtgggcacaaatgtggcgtgttcttgctgaatgggcctgaatggcgcttcaaccgattgcggctgaatccagaagtgctgtcgcccaacgctgtgcagaggttcctcccgatggtggatgcagtggccagggacttctcccaggccctgaagaagaaggtgctgcagaacgcccgggggagcctgaccctggacgtccagcccagcatcttccactacaccatagaagccagcaacttggctctttttggagagcggctgggcctggttggccacagccccagttctgccagcctgaacttcctccatgccctggaggtcatgttcaaatccaccgtccagctcatgttcatgcccaggagcctgtctcgctggaccagccccaaggtgtggaaggagcactttgaggcctgggactgcatcttccagtacggcgacaactgtatccagaaaatctatcaggaactggccttcagccgccctcaacagtacaccagcatcgtggcggagctcctgttgaatgcggaactgtcgccagatgccatcaaggccaactctatggaactcactgcagggagcgtggacacgacggtgtttcccttgctgatgacgctctttgagctggctcggaaccccaacgtgcagcaggccctgcgccaggagagcctggccgccgcagccagcatcagtgaacatccccagaaggcaaccaccgagctgcccttgctgcgtgcggccctcaaggagaccttgcggctctaccctgtgggtctgtttctggagcgagtggcgagctcagacttggtgcttcagaactaccacatcccagctgggacattggtgcgcgtgttcctctactctctgggtcgcaaccccgccttgttcccgaggcctgagcgctataacccccagcgctggctagacatcaggggctccggcaggaacttctaccacgtgccctttggctttggcatgcgccagtgccttgggcggcgcctggcagaggcagagatgctgctgctgctgcaccatgtgctgaaacacctccaggtggagacactaacccaagaggacataaagatggtctacagcttcatattgaggcccagcatgttccccctcctcaccttcagagccatcaagtaatcacgtctctgcacccagggtcccagcctggccaccagcctccctttctgcctgaccccaggccacccctcttctctcccacatgcacagcttcctgagtcacccctctgtctaaccagccccagcacaaatggaactcccgagggcctctaggaccagggtttgccaggctaagcagcaatgccagggcacagctggggaagatcttgctgaccttgtccccagccccacctggccctttctccagcaagcactgtcctctgggcagtttgcccccatccctcccagtgctggctccaggctcctcgtgtggccatgcaagggtgctgtggttttgtcccttgccttcctgcctagtctcacatgtccctgttcctcttcccctggccagggcccctgcgcagactgtcagagtcattaagcgggatcccagcatctcagagtccagtcaagttccctcctgcagcctgccccctaggcagctcgagcatgccctgagctctctgaaagttgtcgccctggaatagggtcctgcagggtagaataaaaaggcccctgtggtcacttgtcctgaaaaaa

SEQ ID NO: 59707 - DNA, 951 bp, Homo sapiens
ccccggagcctactctctcttcccagggcccaggcatcctggaccccccaactctctactgggctgaccagccctcctgtcccttgtctcccctcccagggggaggcccccgctgagatgggggcgctgctgctggagaaggaaaccagaggagccaccgagagagttcatggctctttgggggacacccctcgtagtgaagaaaccctgcccaaggccacccccgactccctggagcctgctggcccctcatctccagcctctgtcactgtcactgttggtgatgagggggctgacacccctgtaggggctacaccactcattggggatgaatctgagaatcttgagggagatggggacctccgtgggggccggatcctgctgggccatgccacaaagtcattcccctcttcccccagcaaggggggttcctgtcctagccgggccaagatgtcaatgacaggggcgggaaaatcacctccatctgtccagagtttggctatgaggctactgagtatgccaggagcccagggagctgcagcagcagggtctgaaccccctccagccaccacgagcccagagggacagcccaaggtccaccgagcccgcaaaaccatgtccaaaccaggaaatggacagcataccaagaccccatctctaaaagaagtttaaaagaatgtttcaaaggccaggcccagtgactcacgcctgtaatcccgtactttctggggaggatcacttgacaccaggagttcaagaccagcctgggcaacatggcaagacctcttctctaccaaaaaaaaaattaagaagacattagttaggcattgtgacatgtgcctgtaatcccagcttcccaggaagctgaggcaggagaatggcttgagtccagttcgaggctgaagtgagccatagtcatgccactgcacttcatcctgggtaacagaatga

SEQ ID NO: 59708 - DNA, 1686 bp, Homo sapiens
ttttttttttttggaagggaccactgcctttattgcctctgtgctggggtcccagcctggggttcagaggcctctgggggcaataggtgaccctggacccaaattattgctacttggccaggtcaccttggggcttcccatactgccctgagaatgggtgggatgagggcatgcaaacgatatgcaaatgacatgcaaaccaacccagaggcctctggcacatccatgggtgctggaagagtcagagcctagtggcctgggagggcgacggggcacccagctcaggcccagcctcggaggcaaggtttgagggttggggggtccctgagcatcagccctgcttctgccgctggctgaggaggagcagaagcctggtcccaagacagcaggaagaaagcaggaccctcgctaggcggccagatggcctgaggcccacccagacagggacgggacctgccctgggtcgctcagccaggcagggacagcagggaccagaatccaggtctcctgagccaggcagaagccaaagtagcttggaggctgaagtgacaaacaataaaatacagggataaataaatcaataataaatagaaagcaagcagcccagtccctgatccctgggctgagagcccttccaccaggcccaagtccaggaggagacaagccctggtctttgcgctgggctggccagtccagaaggctccagagggaggcaggcagggtcccggggccctcggcgtgtgcaggtctggctcagttgttattcattatccaccaggaggctgggaagaacacagtggtgagggtgtccggggcccgcaggtggtcgatgaggatgcgctggaaggccttgctgccaggcgactgctggtgccttctccaggaggcctcatcctgccagaactcatacagggtgaaggaggcaccgtccagcatcttctgggcggacacatgcagacaatggctctgggcccctgtgaagtccacatagcagcgcagggctcggtggaagtcctgcaggccttcctctgccacctggacctgcctctgggccatgaggatgtgcaagtcaggccccttggccaggtcctcttcacgcaggggttccagccggggggccttgcactcgagctggtcgatgagctcctggaggcggttcacctggagccgccactgcatctcggcctctgagctgcgccctgtgtcagaagagccgggggaccaggtggatgaccggctgacactcctcagggctcggcgtcctgcccgccggctgccgcagagcctgctctgcgcctccacgctctctgcatctgaccgccagccatgggcctgggcctccagggtatctgacgccccctccagcgagctctgaagggcttgcagctggctcaccgtctcccgcagcaggaagcgcgtcacaaactggtccactttggaggccctctcgtactccagcttggtggcatccatggcagcgagcactgcacggttcagcgattccaatgcagccagcaccggccggtagacacccaggtgctctgagaagtagtcacacagtttttctgtttctaaattgtcggtgagatgcccatcaatgccgctgaacagttcctgcagctcccccaggctgagaaccccatcggcaaagtaattctggaattcctcaaatgagagcttcccatc

SEQ ID NO: 59709 - DNA, 3381 bp, Homo sapiens
ttttttttttttaaaattatgtaatcatttatttataaaataacaaaaatttatgaatagatctgtttattgtactgtgaaaagggtcttggtacatgaaacattatatactttgaggacagcattcagaactgttaagacaaaagacaaactataattttaaactcaatcttgatttaagggaaaggctataaattattggctgaaaagtattcagcatgaactcagattctatataagcatgaaagagtacaaaagatgttggagtccagtaagcccatacctaaattaactgtaaagcttcaaggactttttgtttatttttatatactagttttcttctgtgacaagttgattttatctccaagacttaaggccattccctggctctttgcacgaattcttatatggccggtaacagcagcatctggtccctggtgaattggcttctcaatgctgacatttgcaagtgcatcttcaccaaatatggaacgagcataaaggttggctgccataaagccacagtaaccagaaagggccttttctggagtcaggcatttcatattggttgactttaatatgtgctgtaagtagtcatttaaatcaaccatgttggtgttaactgtcactttgttttcccattcaaattcggcccacatctgacggaattctgcatcagtgcaagttgcaggctggatatagtccatgatgtcgatgtgaatatcactgagaaccacacaatttctgtcacttgctgctccagagacatcataaactatattaccaaaaattattccattttctgttgatgctactttgacgttagctttaatatttgcgaagtcatgaggagcaagagtcaaaggagacggcttttccacaagtttcagatcccctagtgtagctagttctaatgtgcaattctgcaaagtatcactggtttggttcacaacaagtacatccaggacaatatcatattggttgacatgaacgtaagcttctgcatatacaggatctgagaaacctgtcaattgggtgaccttgttaagtttagatgctaggggatctgctgcctctttcctctgtgtgttacccattgctgccagtaaactcagctgaaactgatcttccttgcagttcatttcattcttagcagttagttgcatgaaggaaatggggtcatcaggctgtactgtcacattcctcttttcagattctttcttttgggataatttctcttcttctagtttagcagataacatgtgagaaagggactgtctgcattccttattgaaaatgtcattcattaaaggtgaacattcagacaagaccttgaggcacagggaaattcgatccacatcatcatcagtaattggcttcttaggaagagaggattttcccaaatgcaggatagtagccatgagcaacatagcctcagcaacaaaagaattttgctttttcttctcctgaaccaaagctacatagcgcaatgcaatcttggtcagagttgtggcaagggaggcagcaacaaagaaatctccatccagaaggaatcctctcaagggaggtctgtcttcctctttcttggtgggtctagaactgctaagggcactctgagttgcataggtacccatttcagtaaccaatttctgaactggccctacagttatttcttcttcaggttttaattcaccagcttctttctttatttctgactctacaattgggatctctccaagggacctgcggatctcagtcatcacactctgaatgtcttccttggtactacagtattctcccaggatccataatgctcctcggtaaatcttgacagatttaatagcatgaaagacttcaagcatcttctcaacaataagcattctcaggttatcaaagcgctgaatggcttcacgaacaaactccaagacatcagcagctgctgcttcgttgttgtcactgagaaattccattaacacaggaataacatttgcagccatatctggaaatcggacagaacaggaatgcaatgttcgcactaggagttgtctgtatttgtcagtatcttcatgctcagacacattatttgtttttatcacttccttcttcaggacaataaccagctcttcaacatttctagaagagacaagatccagtgctaactgcagagttttctttcgtacttctaagtctggtgtgctcaatactcttaggatatccataaccagatcctgtagtactcgttcatgagcaggatgctcttttaattctatcaagcgatccaaaactatgagttttacattgttgtcgctctccttaataattaaatcaatgtaacactgagcagcagccttgattgcagttggtgcactagagagtgtcactaatgtcccagcagcttcatattttacagcagggctggatgactgtaataagttatagatgcagcgaataaaacgagctctttctgatggattagcatgacagcccttataaatcagttcaacaataaccagctgcagaatgtctccaaatgtttgaacttgatcaatgcaagtacttaagtaatccaaagctcgatcctgatctgcatgaattagcatcataaatgcattccttttgcaacttgcatccttctcattcaccagaaaatcatgtatcagttcaggagcatcaggtataagatgttcaaaatttctatagatggtatagatggccaaaacagcatttcttctaacatagctgtgtcgatgctccaaacatgcacgaatagctggcattaaaggttctagcaattctgcttctttcaatttgcaaagaaaacgaagagtagatcctcgaataaattcattaggatgttgaagatcctttctgtatgcatcacatacaaggatcatctcatgtaaaagtctcccatctggagttgttttaggaacaatttcccaaaataccagaagtaatttcttgatagtgtgatcctgaagaggtagcacaaaacgaatgatggtcatcagaagtccaggaagtttttcaccattcagaatcataatgattactttcttcaaagcttcagtctttgactttacatctcctttttctagatcattttttaagctaatttcagatggtggttctgaatccattggcacgttaattaacgtgtagcatacgttctcagccgccgtcatggtttctggttatattataaccaatccttgacacaagatttaaggatgccagaaaatcacgcctctgggactgggggcttgtggcccactaccaggctccgaggggcagtggtttggtgcagccgcggatccgtctactgcggctccgtctactccggctatgaaccgcaacagcggcggcggcggctccagagtc

SEQ ID NO: 59710 - DNA, 2517 bp, Homo sapiens
ttattagtgaaataagtcagtttattttatttctaacaaggcctttttctcctataattaagacaaaccattttacactttataataacataaacttagtttttagtattttcaaaagggaaagattttgggtggggggaatgtaggaagtcaaatattttagaaggagtaactatagaagttactttttcaatcttaatatattaacaggcttgttaccaggtacattacccagcattttttcttacaaggaatctatcaagtactagccaacaaatagtctacatttagaaactgagggtagaaatgtctgtattttaataggaaacaagcatctaaaatacaaatcacatgtctttaacaaggcaatttacataattaggtgtaagtttttaattaactttatgttccttaggatcctagcaaacactcagttgactgtatctcaagttcaaactgcactcacctggctataaaggtaaacatcacaatggaattgggcctgtctgactagggaaaaagatcacttcaatattgcacatttcctttctttaaaaacaaggattaagtcagggccatcttggttctgaatctctccatttttgttgggagaagactaaccatctctttactaagttctagctcaacttctatttcctgggcggcctcaggatgcttttcacagtaatcaacaataaatttgtaatgttccaatgatgttgccaaattttccagctctttcttgggatctgcagtaatgattttgccatagagacgggcaactcgaaacttagctaacatggcagggcgaagaacatcttcccctatatgctcagggaatactttatttgggtctctcagggagtctaagaagagctggtagtacttcagtgctgacttattaagattatttattttttttacaatgtgtgaatcaggatcccttagcctgtcagcaatggcaaccttcaaatccatcatatcatagtaagcatgtgcaatttcaaactggatctgtctgttgaccaacagataatactgtggattcaggtctacagttaggggctctagcatggctattctgcgtttatgcatcttgcaccgtctctccatgtcagtttcaaagaatgcaagcaccttaaacagagcactgtggtcttggacaacttcaatatggtcagtgacataaccatcaatctgaaagaactcttttgcctcaaagacatagtgctgacccaataagaaaagttctctggcttcttcaaaatctaaaggtctcaagtagctcactttctcttctactgcagagatggcatcacacagttcaccggttccaaactgcacagcttttttccgaatgctttcctcctcatctagttcttttttccttaaagctctaagttcagactgtttatcaagatcaagctctcctatgttgtcctgcatggagagttgggcattctgcatgagagtcaaacagtatttgatccagcaccttgctatttccccctttctttgatgataaagctctggcacttctccttcagcttcaggagtgtcttctgtggctgagatctttccagtttgaccaaaaatgacattagcagctgataaacagtgcctggcctccataaagcatagcttattgatgtaaaactgtgacaaggtagcagcattgatagcccactctataggatggtaggcattgtgctcaagctggcgttttagtgtactatggcaatagtgagcagccttctcaaacatttccagatgctggtagacttgagctaggtaatataggttatgagtataaaccttttcaaatctttttgatctctcttgttcagtaagtttctcttcttcaggaagaaaacgctcagtaggatcaagaggaggactcccaacctctttcatatactgattatatagtgcttctgatgactctaggtaagcctgtgcagtttcaatttcttctctttcagaccacaagatacccaggttattctgcgcctggatgcagagagagatgcagtcgtgcgagagccggtacctgcgcagcagccgcaggcatttcaccaggtgctcctcccccgccgacagctcctccgtgtcgatgtggttcaccccgaggtggaactcgatgactgccagcctcaccgctcgctgggcgacgggcccctcgggctccaccacctcagccggcagccccagggcgtggtcaccggcacccgggccgtcctcggcctcaggccgctcatcctcgtcctcaggcgcagggccgagcagcgccttgacctcttccagtagcgcccgggcgctgtatttggacttgtatggttccttctccggatttttatgcagttccacccgcgacagagcgagcgccgcctggaatttctcgcagacctctgcccacggaacgttcgccatagcggcctctactgcctggctttcctcaatgtttgcagtcgggactcccgccttccttctgctttgcgacactttacttactggctc

SEQ ID NO: 59711 - DNA, 3380 bp, Homo sapiens
acatttgacctcattacgccaagcttggcacgaggctcagcctcagcactttgacagctttggcctccgtctgcctcgggatatcacagagctgcccgagtggagtgaggggtaccccttctacatggccatgggcttcccagggtatgacctctcggctgatgacatagctgggaagtttcagttcagccggggcatgcgccgcacttacgacgcagggttcaagctgatggtagtggaatatgctgagagtaccaacaactgccaggctgccaagcagtttggagtattggaaaaaaacgttcgagactggcgcaaagtgaagccacagcttcaaaacgcccacgccatgcggcgggcattccgaggccccaagaatgggaggtttgctctggtggaccagcgtgtggccgaatatgtcagatacatgcaggccaaaggggaccccatcacccgggaggcgatgcagctgaaagctctcgaaatcgcccaggaaatgaacattccagagaaagggttcaaggcaagcttgggttggtgtcgaagaatgatgagaaggtatgacctgtctctgaggcataaagtgcccgtgccccagcacctgccggaagacctgactgagaaactcgtcacttaccagcgcagtgtcctggctctgcgcagggcgcatgactatgaggtagctcagatggggaatgcagatgagacgcccatttgtttagaggtgccatcacgggtaactgttgataaccagggcgaaaagcctgtcttggtcaagacaccaggcagggaaaaactgaaaatcacagcactgcttggtgtcttggctgatgggaggaagttaccaccgtacatcattttgaggggaacatatatccccccggggaagtttcccagtgggatggaaattcgctgccaccggtatgggtggatgactgaagacttgatgcaggactggttggaagtggtgtggagacggaggacaggagcagtgcccaagcagcgagggatgctgatcttgaatggcttccggggccatgccacagattccgtgaagaactccatggaaagcatgaacactgacatggtgatcatcccagggggtctgacctcacagcttcaggtgctggatgtcgtggtctacaagccactgaatgacagtgtgcgggcccagtactccaactggcttctggctgggaacctggcgctgagcccaaccgggaatgctaagaagccacccctgggcctctttctggagtgggtcatggtcgcgtggaatagcatctcaagtgagtccatcgtccaagggttcaagaagtgccatatctccagcaacttggaggaggaagacgatgtcctgtgggaaatcgagagtgagttgccaggaggaggagaaccaccaaaagattgtgacaccgaaagcatggctgagagcaactgaagggaaagggaaagcaaatggaactctgatttaaacagctggggatgaaattcctcaagatgattattcctgaaagtgtggatgcgctggatgcgcagggaacatcaggaaaaggccacggggctctgaacagccccggtccagacagcagcctgtacatccatcccaggacacagcccagcccctccccacaccatacaaggtatcagaaaagtctaggacctatcatttcatcagagacatgatcagaaaagaaactgcttctgccccatttcttgttttggagattactccatctgtccatcaaaagaaacctgtaaatatgaaagaacaaaggttatttcctggagaaaagacaatttattcaacaccaacaagggactcatcatatgggcacaactctggtgtccttctatggagaaaacctcaagtaaagttttattctgcctttgaaaatgcttccaaaagtagaccctgtccccacacaggtcaagactacagagaaggctttgtagaaatgtgtcacctatgtacacctgctacttacacatttcctcttttggaaaaatgagatacttagaataacaagaaaattaagacatactggcctggtgccagcagatggcttttctatagacaaactaggttagtgtggaagatataggttaaaataaactatgctgttttatttatcttcccaacctgattggcagctagacttttttagggtctcatttaatggccctgtttttttcattattatatttaatgatagggcaggatttcgtatgcaagctcttgtttctcaggctgcctgcagaagaagtcgctataaattatctgttgtctacatggtacaaggcccattgactcatctgatgcttgttttgttaatttctttaatatttttatcacggggcagtgggagggcttgggcttttagccacagctgttttaagacttctgatctcctgccctgcaggaataggtgggaagtcattgaatttttacactatagtaatttgcattcccacataagtttgagtgttacgaaaacattcctttaaagggatctgtgctacacaaaatatgccaggacctcacagacaaagccattgctagaaaatgtcattccaatgatcagatctggaaacaggctgccataaccacttttccttcttgtagactcagctcacctgtatatttaaactgttcttggcatcttgaaacacctatttctactcaggtactcattgtcctgttactgattcacctttctgatccttttcaaccagttttcccccaaggggggaaattttacttaacctctagtatttgaacaactcaatatttgaattgttgccccatttgcttttacctgtactgtattcttggtcatctcaaatggcgtctaaacccagctactttgcattccagaagtttccattccctccaattccacctaatttttcatctgtcctagttactggctctttcttcatgtcttatttctcttgctttgggagcttaaaagattttacaagacctaattttgggttccttccttggagccatagttaccctgccaagaagagtagaaaatgggttcaactcctgtttcgctccaccaacacctctgtgagtctcatcatcagctgagcgatgatgccttacaggttgcatagcactggaactttcctagagtaacggctctgctgccagggtttctctgggctcattcttccactgacttaattatgatctatgcctaacagagccccagtacaactattttgcagaatggctgttaccctagaattactatagcacatattgagatatagttgtactccctagtagataggaactgaccccaacaataaactttgataataaagacaaaaaaaaaaatagggggggcccttcttataatcccacc

SEQ ID NO: 59712 - DNA, 1684 bp, Homo sapiens
ttttttttttttccacactagaatactttattcaagagaatctggcttggcagtcagatggccctgcagggacagcttgtgggggtgccagggcccttggggaacctgctcccctgccactgccttcagctgggacgcacaggctcctcccctggtgacctcatccccactggttgagctgtttctcatccaggcagctctttctccagcccggggcccactctgtatgtgtctcttagggggggcagggtggtgggcaccttggcccggaaagaccaatgtcccagtacaagcaaatggcaaagtgtgaggggagatcacgggggacaaggagtggcaaaagcccccaggcaaccactgttctccagagctgaatgttctgatcttcagaagaagagggggaagtggctggatcccctccgcccgctgccggccttcccaccagccaggccgtggcggccccagcaggatccgcatccctacttttggacaggagctccgaaagcaagggctgcttgactgtgcagagcctgaggcccaagaacaggtagcagggcccccttctttccttctgcaggcccctggagacctccagggcctctggggcctagcttgcccctcacgaggccacgtgtcttgcttctttcaaagcggaagctcccaggggtctgtggctggcttctctctttctctcacgttgttgaaggcactgaattcctgagggtcctgtccttccctgcccctcgtcttgaagggagcgaggcattcagcagggaaacagttggctaataaatagagggcaggtaccagcaggagtcactgaagagtgtgacggtaataaatacacgagccgggtgcggggtctctctcctccaaggggtgggttacctccggggaacagcatcgccgcacctttccggcttcatcttctcccgcagaggccggcattcgcagcgaacgtgctgagagaacgtcagctccacgtaggagggccggtccccagaacggatctttaggagctgcatggtgacattggccgtctccaccggcacacagtgcagattctcatcgccgcagcagccggtgcagcgcagcagggagacacaggatgggctgaacatgtgctccacctcgctggggtactcggacacgacgtccaccagcctctccagcgcccggcagtagctgcggccccacacttcctggaagggtaccacttccacctctgacgagccgttcccagcagacaaggcccactgctgggggggcacagcaggcagcgccagcccggccaggagctgcaggaagcaagggaacagcctcatgaccggcatcttctcagacgtcccgagccagggggctccgagggaaaaccaccatgctcatcccccggggagcccctggcacaggaggagaagagctgagtggggggctggacgcctccctcactgctgccccgaggccccggccggtggttcgagcatcttctggaagccttgcggagtcaggagcccgtaggtaaggctgtggctggggaacccgacggggagcggcccggcggggcggggcgccgaggggcaggcgggtcccggggatggtccgtcgggcgcccagtgccactccaggtcctcccgtagctgggcggccgtccgtcgatgcagtttcctccgcagacagcagctcc

SEQ ID NO: 59713 - DNA, 1164 bp, Homo sapiens
gcaattcgcatctgctgtgcggcctgcgggcgcgcgctcccttatcggccaacggacgcgaggcgcgcgccatggaacagcggttagctgagtttcgggcggcgcggaaacgggcgggtctggcggcccaaccccctgctgccagtcagggcgcacaaaccccaggagagaaggcggaagcagcagcgactctaaaggcagccccaggctggctaaagcggttcctggtatggaaacctaggcccgcgagtgcccgggcccagcccggcctagttcaggaagcggctcagccccagggcagcacatcagagacaccatggaacacagccattcctctgccgtcgtgctgggaccagtctttcctgaccaatatcaccttcttgaaggttcttctctggttggtcctgctgggactgtttgtggaactggaatttggcctggcatattttgtcctgtccttgttctattggatgtacgtcgggacacgaggccctgaagagaagaaagagggagagaagagcgcctactctgtgttcaatccaggctgtgaagccatccagggcaccctgactgcagagcagttggagcgcgagttacagttgagacccctggcagggagataggacccagctgtgctgtcatgcagctaacctctgatgtggtcttcctcaccattggctatggatttgatttcaggtgtataggactaagggcagcttgcgggttagctctgtgactgcatagtttttctaccttctttccctgatcttttgctgccatttgatctttgatagttttggtgaaactctctaaaatacattcactgtgggtccgacgcaatttataaaaattatgtactcaagaagggagacctgtttgtttcatttctcatctgtttgggagatgattttagagcactagaaaggcactggggagattctcagcttaaaacatccagcagtttgaagtatgattaggtacatcagggctgcattgtcaatgttctctttaagtcttttaacatttatagcaattttttttttcccggagagtttaggttgcaagttttgggtttcttgtttgtttttgttttgcttcctgctttaattctttaattttcagccattactggtattgaaaaataaaatatctttaaaaaaaaaa

SEQ ID NO: 59714 - DNA, 1713 bp, Homo sapiens
ataacgatttcaagagctgcacttaagcatctagaattttctgcgtcacacctcttgagagaagagactggctccaggtctgactcagtccactacaagctagacggtcttcttaaagcaccaacattacttgagtctttggataaaattgagaaaagagtctacaagtattgtggactctacaggaggcaggaggctgacaactggcagtaaagacaaagatgtcaggcctgcggcccggcactcaagtggaccctgagattgagctttttgtaaaggctggaagtgatggagagagtattggaaactgtcccttttgccaacgccttttcatgatcctctggcttaaaggagttaaatttaatgtgacaactgttgacatgaccagaaagcctgaagaactaaaggacttagccccaggtaccaatcctccgttcctggtgtataacaaggagttgaaaacagacttcattaaaattgaggagtttttagaacaaaccctggctcctccaaggtaccctcacctgagtcccaagtacaaggagtcttttgatgtgggctgtaacctctttgccaagttttctgcatacattaagaatacacaaaaggaggcaaataagaattttgaaaaatctctgctcaaagaattcaagcgtctggatgactacttaaacaccccacttctggatgaaattgatccagacagtgctgaggaacccccagtttccagaagactattcttggatggggaccagctaacactggctgattgtagcttgttacccaagctgaacattattaaagttgctgccaagaaatatcgtgactttgacattccagcagaattctcaggagtctggcgttatctccacaatgcctatgcccgtgaagaatttacccacacgtgtcctgaagacaaagaaattgaaaatacttacgcaaatgtggctaaacagaagagttaggagagctcttacaggagaaaaggctatatttgtgatcagattttacttattgacatattagaaaggtttttgcaaataagaatatgaaaaatactgtttcttctatccaactctcttatgaaaaggaactctgtattttctattagccataaataatctgtccactgtattttacaggtcttcatacttttacttaattttctttatctgtatggcaaaccactgcaatcctgaatgacatggaaagcatcacaatcttttgccctttgcttgaattcctggaatgcatacatataagctaaacagatgtctgcagttataaatgtcataagtagaggtacaatctcaccctgctccttagaaacatttccatataaatcgctaaaataatttcacatttttgttagtttaatatatacatgagtttatttctgatataaataataaatacagagagtgagcatatcagagaggcaaattcttaaagaatgatttttaaaatcagctctaggaagagctcaagatcaattggtcatagaacagcatttgacgcctagaactatgaccacctcatggtcagagatgagaatgtagcctttgtgaccagattatattatttttaaatgaagaagcactcattaaataaaacataattttaaaaaacaatataagaaacaaagtcaactgaatcttttattcatagaaatgaaaaggaaaataaaaactgtggctgacgtcgacgcggccg

SEQ ID NO: 59715 - DNA, 1983 bp, Homo sapiens
  misc_feature (1)...(1983): n = a,t,c or g
tttgattcgtagacctagtccgtgcggtggaattccttccttgcccggattcccagaagctggagaaagagtgccagtcttccgaagagtccatggggtctaattccatgcgttctatcctggaggaagacgaggaagacgaggagccaccaagagtccttttataccacgaaccacgttcgtttgaagtaggaatgctagtctggcataaacataaaaaataccccttctggccagcagtggtcaaaagcgtcaggcagagagataagaaagcaagtgtgctatacatcgaaggacacatgaacccgaaaatgaaaggtttcacagtgtctcttaaaagtttaaagcactttgattgtaaagagaaacagacgcttctgaatcaagccagggaggacttcaaccaggacatcggctggtgtgtctccctcatcaccgactacagggtccggttaggctgcgggtcttttgctggctctttcctggaatattacgcggctgatataagctatcctgtccgaaaatccatccagcaggacgtgttggggaccaagcttcctcaactgagcaaggggagccccgaggagcccgtggtggggtgccccctggggcagaggcagccctgccggaaaatgctccccgaccgctcgcgggccgcccgggaccgggccaaccagaagctggtggagtacattgtgaaggccaagggcgcggagagccacctgcgggccatcctaaagagcaggaagccatctcgctggctgcagaccttcctgagctccagccagtacgtgacctgtgtggagacctacctggaggatgaggggcagctggacctggtggtgaagtacctgcagggcgtctaccaggaggtgggggccaaggtgctccagcgcaccaacggcgaccggatccggttcattctggacgtgcttctgcccgaggccatcatctgtgcgatctctgcgggggacgaggtggactacaagacggctgaggagaagtacatcaaggggccttcgctgagctaccgggaaaaagaaatatttgacaaccagctccttgaagagcggaaccggcgccgtcggtgagggagcagccggctgtgctgtcagcggggcctggcggtggaagcgcctccagtgtgcatgagcgtgtctgaagatggggggctcagggggcacgtttgcgtttggacctgtctgtgcgttctcctgccgtggcagttccctgatttccatacttctggagaatccatttcgttaacactgaaagccagttctcttttcctggcagtttttttcattttatttttggcattttttacaagataccgttcgggaaaggcttttgaaaggacggaagcgtattcactgtgcgccagtactcctggctgtgctgtggtttctcccgacgtgcacatcgatctcgtatgtgtggcatctgatattaaacgggaggttttaagaagcgtctgccgtgatcatggagcttcggaagcgggaatggttcttccgggtttgctgttttgtctgtttcccccttgtgtggtttccgcctgcgacagttccagaatttgctctcccactcagtgtgctctgcagctgtgaggaaacagccttcgttagaggcgggagcagagacgagccgctgctctgtgtcgtgtttgctgtggctgcagggagaggagcgggacacgcacctttccaggggcctctgtgtcccgcactgtgtgtgagtggaccgcagcggcagccacatgccctgggttgccatgggccagaccgnctccacctnccccgcccgcctgggncttgttctgagtgcatttccctgcaatgtgtcgtcaatgcacagccagtcaacgcggtcttagtcaatcgggcgcggatgggtaatgttnggggttccaggggtgggccgcaagcanttcaagggtcaattttngggaagcctnggggttggaantgaacaaancgcatt

SEQ ID NO: 59716 - DNA, 1551 bp, Homo sapiens
atgtcgcgccgacctgaattcccggatcgacgatttcgttcccaacccgccagtcgcggtctccggcgccagctacgccgctgccgctgtcactatggcccattacaaagccgccgactcgaagcgtgagcagttccggaggtacttggagaagtcgggggtgctggacacgctgaccaaggtgttggtagccttatatgaagaaccagagaaacctaacagtgctttggattttttaaagcatcacttaggagctgctactccagaaaatccagaaatagagctgcttcgcctagaactggccgaaatgaaagagaagtatgaagctattgtagaagaaaataaaaaactgaaagcaaagcttgctcagtatgaaccacctcaggaggagaagcgtgctgaataggattcttctcagtttgaaagacaatgaaaaatggttttgtatgacttgaatagtttgtatagtatataatcttttctgaacagatgctattggaactcttttaatatgtttaattcacctatcacactctgttaaaaacacatagaatcatcaataaaaactcaatataactttctttgggtcttaaagcaggagaatccaaagtaaatcctgaacaaaacctaaacacagccatctaactcattaccttaaaagacattctgtttattagtctgattaggaatgatggcactggttgtattttagccaagacagtttagcatggagctattccttggtgcagttcaggatatgaacacaggtacagtcattctttgaacggtgacactgttctgtatattccctataggcagctggagagatctgtgtgacacaagatgcttttgtacgggttcccatgaatcttctgctcttgtttgtgtgacatgaaacaaataacttctttgccaccactttgccttagataactgtgtgtgtgtgtgccagtttgaactctgacaccacattttccttctatgcaatcatgcctgtctggataatcctgcattgctttcctctgagctttagtgggtcctagttgcacactggcctttctgtgctgtttttcaatttgcctaataatagcagttaccctgattgtaatttatgtaactttaaacaggatcacactgtaccccctgcctgccttatttgcttactgagcacaggacagaggcaatatacaactctgggttcacacacaagctgagatgagaagaggaatgagccatatattggggaaaatcatagtttgtaggtataattatatagtgcttttctccctcaaagtatttttctagccttgaattcattttatcttcattatccctgtgaagtaggtgggacaagtataaggggaagaggggtgctgaatttttaggccaaagactgatattaatacaaatcactcactaactgtagagccttgggcattatcagtgaactactctgagatttactgtcttcatctgtttaatgagtagaatgtccgtgatgcctacctcacagggttgttgtgagggtcacccgaattcgggcccgaattc

SEQ ID NO: 59717 - DNA, 2929 bp, Homo sapiens
cggctcttctcggctcagtctcagcgaagcgtctgcgaccgtcgtttgagtcgtcgctgccgctgccgctgccactgccactgccacctcgcggatcaggagccagcgttgttcgcccgacgcctcgctgccggtgggaggaagcgagagggaagccgcttgcgggtttgtcgccgctgctcgcccaccgcctggaagagccgagccccggcccagtcggtcgcttgccaccgctcgtagccgttacccgcgggccgccacagccgccggccgggagaggcgcgcgccatggcttctggagccgattcaaaaggtgatgacctatcaacagccattctcaaacagaagaaccgtcccaatcggttaattgttgatgaagccatcaatgaggacaacagtgtggtgtccttgtcccagcccaagatggatgaattgcagttgttccgaggtgacacagtgttgctgaaaggaaagaagagacgagaagctgtttgcatcgtcctttctgatgatacttgttctgatgagaagattcggatgaatagagttgttcggaataaccttcgtgtacgcctaggggatgtcatcagcatccagccatgccctgatgtgaagtacggcaaacgtatccatgtgctgcccattgatgacacagtggaaggcattactggtaatctcttcgaggtataccttaagccgtacttcctggaagcgtatcgacccatccggaaaggagacatttttcttgtccgtggtgggatgcgtgctgtggagttcaaagtggtggaaacagatcctagcccttattgcattgttgctccagacacagtgatccactgcgaaggggagcctatcaaacgagaggatgaggaagagtccttgaatgaagtagggtatgatgacattggtggctgcaggaagcagctagctcagataaaggagatggtggaactgcccctgagacatcctgccctctttaaggcaattggtgtgaagcctcctagaggaatcctgctttacggacctcctggaacaggaaagaccctgattgctcgagctgtagcaaatgagactggagccttcttcttcttgatcaatggtcctgagatcatgagcaaattggctggtgagtctgagagcaaccttcgtaaagcctttgaggaggctgagaagaatgctcctgccatcatcttcattgatgagctagatgccatcgctcccaaaagagagaaaactcatggcgaggtggagcggcgcattgtatcacagttgttgaccctcatggatggcctaaagcagagggcacatgtgattgttatggcagcaaccaacagacccaacagcattgacccagctctacggcgatttggtcgctttgacagggaggtagatattggaattcctgatgctacaggacgcttagagattcttcagatccataccaagaacatgaagctggcagatgatgtggacctggaacaggtagccaatgagactcacgggcatgtgggtgctgacttagcagccctgtgctcagaggctgctctgcaagccatccgcaagaagatggatctcattgacctagaggatgagaccattgatgccgaggtcatgaactctctagcagttactatggatgacttccggtgggccttgagccagagtaacccatcagcactgcgggaaaccgtggtagaggtgccacaggtaacctgggaagacatcgggggcctagaggatgtcaaacgtgagctacaggagctggtccagtatcctgtggagcacccagacaaattcctgaagtttggcatgacaccttccaagggagttctgttctatggacctcctggctgtgggaaaactttgttggccaaagccattgctaatgaatgccaggccaacttcatctccatcaagggtcctgagctgctcaccatgtggtttggggagtctgaggccaatgtcagagaaatctttgacaaggcccgccaagctgccccctgtgtgctattctttgatgagctggattcgattgccaaggctcgtggaggtaacattggagatggtggtggggctgctgaccgagtcatcaaccagatcctgacagaaatggatggcatgtccacaaaaaaaaatgtgttcatcattggcgctaccaaccggcctgacatcattgatcctgccatcctcagacctggccgtcttgatcagctcatctacatcccacttcctgatgagaagtcccgtgttgccatcctcaaggctaacctgcgcaagtccccagttgccaaggatgtggacttggagttcctggctaaaatgactaatggcttctctggagctgacctgacagagatttgccagcgtgcttgcaagctggccatccgtgaatccatcgagagtgagattaggcgagaacgagagaggcagacaaacccatcagccatggaggtagaagaggatgatccagtgcctgagatccgtcgagatcactttgaagaagccatgcgctttgcgcgccgttctgtcagtgacaatgacattcggaagtatgagatgtttgcccagacccttcagcagagtcggggctttggcagcttcagattcccttcagggaaccagggtggagctggccccagtcagggcagtggaggcggcacaggtggcagtgtatacacagaagacaatgatgatgacctgtatggctaagtggtggtggccagcgtgcagtgagctggcctgcctggaccttgttccctgggggtgggggcgcttgcccaggagagggaccaggggtgcgcccacagcctgctccattctccagtctgaacagttcagctacagtctgactctggacagggggtttctgttgcaaaaatacaaaacaaaagcgataaaataaaagcgattttcatttggaaaaaaaaaa

SEQ ID NO: 59718 - DNA, 1868 bp, Homo sapiens
  misc_feature (1)...(1868): n = a,t,c or g
ttttttttttttttaaagcctggattgtaaccagattttcttttttcccccttctcagctgtagatatgatatctcctttcagggccccagcttaagggcaaagtgagttaatgtgtagacaaaggcgagggacaagagagagttaacatctagacagtggaaaaagccatggtgtgtggtttctgggaaccaccaacacttgcaggtttagctttttcccagggttgactacaagaaagaaaaccatgtttttgcaagattaaaatgtggttgagtgtgcctaaattaaccatccccatttttatcatatttccaccatcacttcagggttttaagagtcagtgctcacctgggcggagctggtagtacattttgcttcttagaaagctaagtcctgggttccgtctgattttaggttccaggaacttcctgagaacacccgatcgcagagggtaattttctggagtttgttttgcagggatagctgggagtatggccaccctgctccacgatgcggtaatgaatccagcagaagtggtgaagcagcgcttgcagatgtacaactcgcagcaccggtcagcaatcagctgcatccggacggtgtggaggaccgaggggttgggggccttctaccggagctacaccacgcagctgaccatgaacatccccttccagtccatccacttcatcacctatgagttcctgcaggagcaggtcaacccccaccggacctacaacccgcagtcccacatcatctcaggcgggctggccggggccctcgccgcggccgccacgacccccctggacgtctgtaagacccttctgaacactcaggagaacgtggccctctcgctggccaacatcagcggccggctgtcgggtatggccaatgccttccggacggtgtaccagctcaacggcctggccggctacttcaaaggcatccaggcgcgtgtcatctaccagatgccctccaccgccatttcttggtctgtctatgagttcttcaagtactttctcaccaagcgccagctggaaaatcgagctccatactaaaggaagggatcatagaatcttttcttaaagtcattctctgcctgcatccagccccttgccctctcctcacacgtagatcattttttttttttgcagggtgctgcctatgggccctctgctccccaatgccttagagagaggaggggacggcacggccgctcaccggaaggctgtgtgcggggacatccgaggtggtggtggacaggaaggacttgggaaggggagcgagaaattgctttttctcttcctccctgggcagaatgtagcttttctgcttcactgtggcagcctcctccctggatccttagatcccagaggagggaagaaaatttgcagtgactgaaaacagtaaaaaaaaaaaaatttatgtatataaaagttgcattacacagtacaaaatagatggataatgtttatcctttatttttctatgtagaagtttttgaatttgtgtgtgtgcttgtgcgtgtctacacctagtattacggctgggactctccagctgtttttgttgttgttatgtttttaagagggttgaattcttccatcaggtgaacgaaaaaggcaacaaagtaataaatcagtgaatgtggccggcagctgtgtttagcccctccagatggaagtttcacttgaatgtaaaataataaagtttatattttgaatttctcttttcatgggggaaaaaaggtacgttaaaaaaatcaaaataatgatatgtcacttgcagctaccttttttttttcttttaaattcaatcagccaccttcatgtgcctttttcctntgtctttccccaaaattccagggcc

SEQ ID NO: 59719 - DNA, 903 bp, Homo sapiens
ttggtaatccaatttggagagtggccactgaaatcaattaaaaatgtttattctgaaagatgctactataaagtttatagactcaaatgcttataatgcttaatcaaaactaaatttacaaaaaaacctagaaacaggttgaattgaaacctgtagatcattttataatattcatgagcaacaacttttttaaagacaaaggctactgttttaatataaattaagagctttaacatgatctccctttagtgcttttaattgtcacatggctgtaaaccaaagacccctccaaattttaaatgatcactgatactacttgagcagaaattctcaggtgtcagtacttttaatgttgtgtacatcaaattacagtacaaagatgactataaacaagatgcagccctcggtttccatgaacagcacactattacagtaaaccaagtttatattccaccatcaagtgtggctctcccatgacttcgctttgtgatggatcattaagaatatcctcaaatccaatagtctcatcattacccctcaaaacatccagtgaaagatttgagcttgaaagaaatggaagacgctgaacctgctgcactgccttgaattccatctgtaattttagcggagcaaatagaccctgaatgtttctcagtgtggaaaaattcattttatcttggttgagctggaaatttttttctgataattcaaggggatgactaggcaaaagttcatttttcacacaagaaaaacctttccgaagaagatcatgactttcaaaaggtccacttgctgaaagttcagtaactggaatactgtcctttagctcagatccaagtcctctggcattcatcttccgcagctctgcgaacagcctctctgccccgttaccgtcagtcgacc

SEQ ID NO: 59720 - DNA, 739 bp, Homo sapiens
  misc_feature (1)...(739): n = a,t,c or g
cgcgtgcaatttgtccctttgaggacttctgacgagcggcggcgctcacctttctcctagccgggtgacccaggggatttattatatgtcggctttatctgagatgccaaagccacccgattattcagagctgagcgactctttaacgcttgccgggggaacaggaagattttcgggaccattgcacagagcatggagaatgatgaacttccgtcagcggatgggatggattggagtgggattgtatctgttagccagtgcagcagcattttactatgtttttgaaatcagtgagacttacaacaggctggccttggaacacattcaacagcaccctgaggagccccttgaaggaaccacatggacacactccttgaaagctcaattactctccttgcctttttgggtgtggacagttatttttctggtaccttacttacagatgtttttgttcctatactcttgtacaagagctgatcccaaaacagtgggctactgtatcatccctatatgcttggcagttatttgcaatcgccaccaggcatttgtcaaggcttctaatcagatcagcagactacaactgattgacacgtaaaatcagtcaccgttttttccctacgattacaaaactgccagtcctatatggagtctgatcacaagactgcagtttcttcacagatctcaagaagttgtcgnggggcagaggctttttaaaaacatgtgattagggagctatctt

SEQ ID NO: 59721 - DNA, 775 bp, Homo sapiens
tctcgctcaggctcggttttaccccggagtctattcgaagggggctgctacgtcagcgcgtctcagcgtaagacggcgctattccgctgtaacagcttccggcgggtcctggatgttgatgtcctgcatctaacgcggtgtaacccccgaagccgagcgagctccggaggaatttcagtatctgctacggtaacttcatcagcccgccaagatggcgatgcaagcggccaagagggcgaacattcgacttccacctgaagtaaatcggatattgtatataagaaatttgccatacaaaatcacagctgaagaaatgtatgatatatttgggaaatatggacctattcgtcaaatcagagtggggaacacacctgaaactagaggaacagcttatgtggtctatgaggacatctttgatgccaagaatgcatgtgatcacctatcgggattcaatgtttgtaacagataccttgtggttttgtactataatgccaacagggcatttcagaagatggacacaaagaagaaggaggaacagttgaagcttctcaaggagaaatatggcatcaacacagatccaccaaaataaatgttttctacattttcatttggactaaatcccacgaatgacaactaccaccttttttttcctttttaattaatactaaatattgtgatttcttatttgaggttcaaaatgacctggctggaaactttgatacatattggaatacattatgttaataaacttgtaatctttttgtgaaaaaaaaaa

SEQ ID NO: 59722 - DNA, 2269 bp, Homo sapiens
  misc_feature (1)...(2269): n = a,t,c or g
cgttgctgtcggacagcccatatcctgccaaagggctccctgaatggtgtccacacagcgaggaagccacgcttgaacctctcatccaggacattctccacactctgccggtcctaactcaggcagcagccataactggtgactcggctgaggccatgccagcccccatgcactgtggcaggaccaaggtgttcatgactgactctatgctggagcttctggaatgtgggcgtgcccgggtgctggagcagtgtgcccgctgcatccagggtggctggaggcgacaccggcaccgagagcaggagcggcagtggcgggccgtcatgctcatccaggcagccattcgttcctggttaactcggaaacacatccagaggctgcatgcagctgccacagtcatcaagcgtgcatggcagaagtggagaatcagaatggcctgccttgctgctaaagagctggatggtgtggaagaaaaacacttctctcaagctccctgttccctgagcacctcgccgctgcagaccaggctcctggaggcaataatccgcctctggcccctgggactggtcctggccaatacggctatgggtgtaggcagctttcagaggaaattagtggtctgggcttgcctccagctccccaggggcagccccagtagctacactgtccagacagcacaagaccaggctggtgtcacgtccatccgagcgctgcctcagggatcgataaagtttcactgcagaaagtctccactgcggtatgctgacatctgccctgaaccttcaccctacagcattacaggctttaatcagattctgctggaaagacacaggctgatccacgtgacctcttctgccttcactgggctggggtgatccttggtgcctttgtttccacaaggccttttcctgccccctgccttgccaaagacatttaatcagcacacagctgccagactattcccacagtgctccaaatgcacatgaacaacagtgacggctccagccttcgacccagagccccgtgcccagtgcgtcagtgggcctggggttccaggctacatcaagcactgatggtgtcagggctggtagttaccaaatcagggttaagaaacatcagggccacatttcactaccttcacagatcaaactcagcagcagtcatgactgtctgtcactacactggggatcccaattccacataagcacttttggaagaaaacagccaaagttggcctaaaattggcgctggaatttgggctgggaaaaatcttgtggttatttcctttaaaaaggaacaaaactttagtatttaattagttgatttatttaatgtaatttcaaacaattaaattatgaataatgcaatgtacagtagaatcacgttttgattttattaacactgaccaagtttaactccatatgaagtgtaagcttgatatcgtttatgatgtctatcaactgtaccaaaagtaaaacatttaaaaacaatcatctgaatgtcaagttttctctccataaaggacttgccaccttaaggaccccaagtctgcctgaaacatgagccacatcaatgccggtaaaggcctgcatgacctaatctgcatcctggaaacctcttttgcctgagctccccagccccaaactagctggtctgggagagggagcaggcaggttccaggagtcaagcacacgcttgagcaagcagcacaataatccatcttaagactcctcattctgggatggctccacaattcctaaacagcagtctgcaaactccacaaacaaaggctcttgcatgtaagctctcatgagctttgctttgtcttctccctgatcgaggttgaccatcaactgcctgaggtgtggattgagcaataagcttcttaatgttgcagattcccctaaattctttaaattctgcaaagaaactctgtcttcttcctcatcactattgagaaaatcagctatagagtcatcatcatctttgttttccacaggctttacggttttggtaggaagagctgatcttatttttttctcaacaggacgagtttcagggttgcactgttctttgtgcttccggaagcagactaccgagcagtagggcacgcggcaggctggacagcggtatttgggcttctccaagcagatcacgcagacgacggtgctacatttgagcgacgccatggttttgtggaaggagactgttcactgcgccgccgcgcgcgaattccaccacactgagtatggacatcgatanngacctc

SEQ ID NO: 59723 - DNA, 695 bp, Homo sapiens
ttttttttttttcaggcttccgggtctttaatggggcgggggctgggggcagttcatccagaggtggctccgaagctgaggtcaaccttggcggctggctcgcctactccagggccttcaccagggcctcgttggcctcgattcggatctggatctctgcccgcgtggcctcgtcagctgtccccaccagctccgcctgggccttctccaagtttgccttggctgcccccaggtccaacatgtccagcgtcacggcctcttcggccaacaactgcaccgaagagtcggcgttcactgcgatggaaccgctgctcacaaagtatttggaggtggtgccgtcctctgcatgcaccacgaccagccccggccgcaggacctgcagcgtgggcacgtgggccgccaggatgccgaaggctccggtcagcgtgggcacgtccacctgccggacgttggcaccgttgaagaacacctgcgtgggagaggcgaaggtgaaggacatctggttggggccagaggcggcagccggggcggcggcggcctcggcataggcacgggcgtggcggacgaggcggccaagtcccgggcggcggagcagcgcggcgggcagcatggcagcggctgtccggcaggatgcgggtagcttgctgacagcgggactccggcgcggcgcgggcggcctggagggcgaggaggac

SEQ ID NO: 59724 - DNA, 1773 bp, Homo sapiens
ttttttttttttcaaaatatgaaaatttattttgcataggaaacaataatctctggtaaacatcattactgcatctaacaaaacaatgccttcaattaaagggggaaagtgagtttttaaacattagggttaatttagaagaaaatacagtatataataatctcaacatcatgtttagggtaaaaatgctataatgtgaaaaaagtccctaagaactggacagaacctacctaacaacaccatttaccgtgtatgttttcaatagacaaaacatattttgtaccaaattccaacagtggtaattctatagttgtggccctttaaaaaatggcagcattgtacttgaatcagaaagcttactgggatttcctcatcgaaagtagagattgcagctaatcctagtaccttttgttagtaattacttaaggcacagtgcaaagttgaaggactgttttggtacaaactcaagccagctacatgtatgcttgccttggtatccttgctagagcacatgcgggtataataccgtattatacacaacaaggccaccctgttgtatctgtgttacaattaaacatcagtcccagaaagtgaaccctagtcatttattataggtgcccacctctgacttggaacaaaatgccactccattcatgttcatttttgtcctggagaggatttatttcctaaaagattctgaaagccaacaaatcaatgtagttcttcatagagaacttaagagtaaggctcaaaatggcctcaaaatgggcttcttggatgacttccaacagtgactggccttctcaacactgcagatgtctgagcactaccataacctaacgaagtgaggaaggaggaggcaaattggtatttttaaacaagaatttaagtggctctttctttcaagtctaaaaaaacctttggctttaaagattataaactgatttactaaatttataaaagaccttaatttagcaaagagcttctttttcctttggttcagttactcaaaatccactgtgtgaaggaataatgtatccatcattcagcctttatagcggtcttccggtagcgaagtactgtcactgttacccatatatttaaagccagcatgatcccaaaacgtagaagaattgtaaaatcattggtggtcattaaggttgtgattattcttgttgcacaggtataggaagagaggctccaagtcagcgcactcacagttcctgagtctctcgtcttccacagacactggagctgtgcaaacttactggccgcgctgatgaaagtacatagattcatggccaggtctatgatccacttctgcagggcaaggatgaaccaagaagacaccaatacagcgatgtaaggagtggcctgcttcacgttcccgttaaaatgaaagatacagagcaggaggatgacatcttgcgcgatgaggatggggtactccaggtaggtcagcggcggatacccatagtaacactggtaccgcagaaacaccaggaatcctgccagctccagaagtaaactcggaaggctgaggccccgcgcgctgcgcgccgctagcacagcggagatctgcggcagcttcagcgcggcgcacacgcccagcgtgctccagttacacagccccagcagcgccgcctccatagcgccacgggcgcgggcacctgggcggccgcagcgagaagggaccgctcagcctcggcggcgcagctctgccgaagccttccgccttcccgggatccgcccgggaccacccggccagggccc

SEQ ID NO: 59725 - DNA, 1804 bp, Homo sapiens
tttgaaggaatctcattaaccagtttactgacaaagagatgtcggatcatacagacaaagggaggcctggggaaagctatgggggaaggggtagcatagcttgcaagcccaccccagggcaccaccctgtaggaacctacataaaaaagtctaccaatggtgcaactatttaactgggataaagattattctgttcagcaatacttggacaactctttttattatctttctacagtaaacaaagtataatcccaaagttctgcagatatttaattgggaaaagacacaaccctacagtcagttgggaaagactacctttagaagagaaaaatgaattgtttgggaagaaatacattaacagaactgtatttctaacgcatttactttttaagccatcaaatgttctcatttgagccacgtgttctgtgcacattcagagaaccttttgaaaatgaattaagtctttgccttctttagtctgttgataaactcttgagaatgctgagaaatctccagaaaaccagtatgttttctcttgggaacgaattgcagagcctcttgccaattaccattgtttttcagacataacaaaatacgtatcatttgatctaaggtgagatttttgttaccaatttcccattgtaaatatttatctaatggaaggcattcagttgccaggttcagccgttttgccttggctagggatgtgcctggctgcatactcttatcaacaaaagacccaattacataaactttgtcatgcctgaaagtagtcataacattgggagaatctgcagttaaatagataatactgtcctttggaaataaatctacatgagacttttctgttgatgttaaaagcaatttgtcccatttttcttgataccgtttaactaactctctgtgcaaagcaccatctatttttagattgcagaaataaatatggaaaggatcaacatttcttctgttccatccttcactttctaaaagctgggaaacagtattctgcaattcttttcgtttcatataattttcgtaagccatgtcaaaaaccaaaggttgtccaaactgcatggcctgggcacccttccagcccattgctatgtccatattcctatcccaaagtcgtaaaaatagaaagtttttctgtttatcttcctcagtggtttctagcagcttgatattttttgcttcttcccttgctgctgctttcatttccttttttatttgcctagcttttttcactttttccttcgtatataaatattttaaatattttttttttgctgtgttagaaacacattccataagggttttgagctcttcttcagtgatgtgttctggtacttctctgccaagcaatctccacatctcaatgaactctctggtggcagctagaggatcttcatccttactgcttgagattgttgaaacacattcttcttgcacactagatttcatggtagttttccacttatccaactctagctcttcagaagggggtgtactctcatttttaggataagtaacagctggtattttggaagacatgtatctctgcaaaattgttaagttatttctcttcctatgaagggtaaatggcaccaaaaacctggtgaaaggtctgaagaaattgacactaacactcattttgaggaaagcagccatgtaacaaaaccccaggagtgcagagatagtggttcccgctggcgcaaagaacagggaccctggaggacgaaggactccgacgtacggacgcccagggatccgcgccgaagctagcacgcagcctacccaacagtct

SEQ ID NO: 59726 - DNA, 640 bp, Homo sapiens
ttttttttttttcagccttaataaattagtataatactattagaaggggtgggcattttgttctgtttcttagcagcattgtctacatgcggcctgacggtctccttccctgggaaatttaaaaagccgtcccctggttgttagctctgatgtaaaattataaaatagaaatctggtagggtttgttttgtttaaaaaggaaaagccctggtgaggcagggcggtcccaggcagtcctgttagctctggccgttgggtctgcccacggagctccctcctggaggctggatctgaatggagtccaggaggggccgaagtgcctgtccaaagggcgtggagagaacttcagagggcaggtctgtgatgtaagaaggaatcttccgcccagtcaggaactgtgccacttcgttgctgaaggtgttacaattgtgttcaaagaggttgtaggcctcacctcggaacagggactcccccagggaggagaggtactccagaaagatttcttctgtgacttctgtactccccacatcaaccacagagtctggaggcccaagcaatgtccctccccagcatgatggggctgagccgccggcccaggccttggacaggtccctcgtgccaagcttggcaaaatcattat

SEQ ID NO: 59727 - DNA, 1593 bp, Homo sapiens
  misc_feature (1)...(1593): n = a,t,c or g
ttttttttttttgctttcaggaaaggtttattggggtgagtgccttctgtacagtcgactgcaaatgaaacccaaaggatgggtgcccaaaagcacctgcggcaaaggcccacgggaagcccggggcccaggctcatgcaacacgaccctcaccgcggctcgggtccgtggggccgtcagagaaacctttttaaaaaatggagatgaatgttacagaattggacaacccgaactgcttttcaaaaccagaggaaggagggtttttagccgttactcagatactcagtgctggggagggaggcctgacttcagcaacagctgtgggtgggctggaggccggcgcatcttggggccccccgcgccagctgtctcagccaccacctgtgcggcgcttgctccgaggggtcagcaagagcaactgatggctgccacttccaggccccgagagacaggcctcacgtaactttactgcagccgaggtccaggccgtggagggggtcctagctccgctgcattctgcatcccaagtgggcacgtggaggaagggtctgaaggaaggctccggagcacaggccctggtgttcctgtgaggacgctggacctgcaggagcggggagctgcagtgccactgcaggtagcccacggtgttcttgtctaggttccgagctaggacagtggtcaggccgggtcggattccacgggatgaaaactgcagagcacagtttgttgtcacaaagcatcttggtgtgagattacggaacagcttgagaccgaacaaaggcccctgtaggtctccagctccaaattccaactctccccatccctttgccgaagttactcgtctgagcgcaaagttaatggaacctcctccatttccattctgggttgagaggcttccagagaggatggctgtgtctgtcgctgtcaagggtgcctcaatggactgggatatgtgcattttattaatttcaatctgcggaaagctactgccggacacatcttcatactcctcatcatagcgatcaaaaaggtcggtggcatctactccaacgctgatcgttcccttgggattggttcgctgctgcaatctcctctcttctctctctctctgcagccgctcaaactcctctcgaatttcagcaggggttctcctcctttccacaacctcccatccttccatttccagtcctctcttcccatatatatcatagatggccctggtttgggggtcactaagcacttcataagcctggtgaacaaggttaaacagtcgttccgcctgtgacttgagctctgggtctctgtgcttgtctggatggtagagcatacagagcctccggtaggcagctttcagctcttcagaagaggcctccctgcgcacgttcagcaacgagtaatagtcttcattgtccagctcctcctcgctcaaggccgtcgccatcttcgcaacctttcaccccgccaaaccggcaaggaagtgctcaagaggggccagtgatccgcgtcagggacagcgcgggctcgaaatcgtcgacccgggaattgcggctcggtgaccgctcgtcgaggacatcaaggnttntttacatttcc

SEQ ID NO: 59728 - DNA, 2304 bp, Homo sapiens
gcggccgcagcctgaagccagggccccctccctcgtcaggaccggggcagcaagcaggccgggggcaggtccgggcacccaccatgcgaggcgagctctggctcctggtgctggtgctcagggaggctgcccgggcgctgagcccccagcccggagcaggtcacgatgagggcccaggctctggatgggctgccaaagggaccgtgcggggctggaaccggagagcccgagagagccctgggcatgtgtcagagccggacaggacccagctgagccaggacctgggtgggggcaccctggccatggacacgctgccagataacaggaccagggtggtggaggacaaccacagctattatgtgtcccgtctctatggccccagcgagccccacagccgggaactgtgggtagatgtggccgaggccaaccggagccaagtgaagatccacacaatactctccaacacccaccggcaggcttcgagagtggtcttgtcctttgatttccctttctacgggcatcctctgcggcagatcaccatagcaactggaggcttcatcttcatgggggacgtgatccatcggatgctcacagctactcagtatgtggcgcccctgatggccaacttcaaccctggctactccgacaactccacagttgtttactttgacaatgggacagtctttgtggttcagtgggaccacgtttatctccaaggctgggaagacaagggcagtttcaccttccaggcagctctgcaccatgacggccgcattgtctttgcctataaagagatccctatgtctgtcccggaaatcagctcctcccagcatcctgtcaaaaccggcctatcggatgccttcatgattctcaatccatccccggatgtgccagaatctcggcgaaggagcatctttgaatatcaccgcatagagctggaccccagcaaggtcaccagcatgtcggccgtggagttcaccccattgccgacctgcctgcagcataggagctgtgacgcctgcatgtcctcagacctgaccttcaactgcagctggtgccatgtcctccagagatgctccagtggctttgaccgctatcgccaggagtggatggactatggctgtgcacaggaggcagagggcaggatgtgcgaggacttccaggatgaggaccacgactcagcctcccctgacacttccttcagcccctatgatggagacctcaccactacctcctcctccctcttcatcgacagcctcaccacagaagatgacaccaagttgaatccctatgcaggaggagacggccttcagaacaacctgtcccccaagacaaagggcactcctgtgcacctgggcaccatcgtgggcatcgtgctggcagtcctcctcgtggcggccatcatcctggctggaatttacatcaatggccaccccacatccaatgctgcgctcttcttcatcgagcgtagacctcaccactggccagccatgaagtttcgcagccaccctgaccattccacctatgcggaggtggagccctcgggccatgagaaggagggcttcatggaggctgagcagtgctgagaacaccaagtctcccctttgaagactttgaggccacagaaaagacagttaaagcaaagaagagaagtgacttttcctggcctctcccagcatgccctgggctgagatgagatggtggtttatggctccagagctgctgctcgcttcgtcagcacaccccgaatattgaagagggggccaaaaaacaaccacatggattttttataggaacaacaacctaatctcatcctgttttgatgcaagggttctcttctgtgtcttgtaaccatgaaacagcagaagaactaacataactaactccatttttatttaaggggcctttacctattcctgcacctaggctaggataactttagagcactgagataaaacgcaaaaacaggaatcatgccgtttgcaaaactaactctgggattaaaggggaagcatgtaaacagctaactgtttttgttaaaggtttataggaatgaggaggtttggctattgtcacatgacagactgttagccaaggacaaagaagttctgcaaacctcccctggacccttgctggtgtccagatgtctgcggttgtcagccccttcctttcccccgacctaaacataaaagacaaggcaaagcccgcataattttaagacggttctttaggacattagtccaccatcttcttggtttgctggctctccgaaataaagtccctttccttgctccaaaaaaaaaa

SEQ ID NO: 59729 - DNA, 1714 bp, Homo sapiens
acgcccacgcgtacgcgccgccgccggagccgagccgacccgccccgccgacgaaccccctgaagctgtgccaagatgtgtgacgacgaggagaccaccgccctggtgtgcgacaacggctctgggctggtgaaggccggctttgcgggcgatgacgcgccccgcgctgtcttcccgtccatcgtgggccgcccgcggcaccagggagttatggtgggtatgggtcagaaggactcctacgtaggtgatgaagcccagagcaagagaggcatcctgaccctgaagtatcccatcgagcatggtatcatcaccaactgggacgacatggagaagatctggcaccacaccttctacaatgagctccgtgtggctcccgaggagcaccccaccctgctcacagaggccccgctgaaccccaaggccaaccgggagaagatgactcagatcatgtttgagaccttcaatgtccctgccatgtacgtggccatccaggcagtgctatccctgtatgcttctggccgtaccacaggcattgttctggactctggggatggtgtaactcacaatgtccccatctatgagggctacgctttgccccatgccatcatgcgtctggatctggctggtcgggacctcactgactacctcatgaagatcctcactgagcgtggctactcctttgtcaccactgctgaacgtgaaattgtccgtgacattaaagagaagctgtgctatgtcgccctggattttgagaatgagatggccacagctgcctcttcctcctccctggagaagagctatgaactgcctgatggccaagtcatcactattggcaatgagcgcttccgctgtcctgagacactcttccagccctccttcattggtatggaatctgctggcatccatgaaacaacttacaatagcatcatgaagtgtgacattgatatccgcaaggacctgtatgccaacaatgtcttatctggaggcaccactatgtaccctggtattgctgatcgtatgcagaaggaaatcactgctctggctcctagcaccatgaagattaagattattgctccccctgagcgtaaatactctgtctggattgggggctccatcctggcctctctgtccaccttccagcaaatgtggattagcaagcaagagtacgatgaggcaggcccatccattgtccaccgcaaatgcttctaagatgccttctctctccatctaccttccagtcaggatgacggtattatgcttcttggagtcttccaaaccaccttccctcatctttcatcaatcattgtacagtttgtttacacacgtgcaatttgtttgtgcttctaatatttattgctttataaataaaccagaccaggacttgcaacctataaaagcctctcgtttgtttttggggtaggcgtggggtggggcaggtgtttgctttgacaccctgagcattgtcaaagttcagtaccacaaggttcatccagatgaattaatatgacagttagctgggagttataatgctaacttttgatttcatattttgagacagaatcatgaatatatttcatacctgaaaagcagattaagatttagttccatataagtaagaaatgaaattgaataagatagttctctagaattagttgctgcagatgacactgaagattatttcaacatatgttccagttgtttttgtaaccttgct

SEQ ID NO: 59730 - DNA, 5260 bp, Homo sapiens
gggactgtcggctgcaggcggccatgcccaccaacttcaccgtggtgcccgtggaggctcacgccgacggcggcggggacgagactgccgagcggacggaggctccgggcacccccgagggccccgagcccgagcgccccagcccgggagatggaaatccaagagaaaacagcccattcctcaacaatgtcgaggtggaacaagagagcttctttgaagggaagaacatggcacttttcgaggaggagatggacagtaaccccatggtgtcctcgctgctcaacaagctggccaactacaccaacctgagccagggcgtggtggagcacgaggaggacgaggagagccggcggcgggaggccaaggctccgcgcatgggcaccttcatcggcgtctacctgccgtgcctgcagaacatcctgggcgtcatcctcttcctgcgcctgacgtggatcgtgggggtggctggtgtcctggagtccttcctcatcgtggccatgtgctgcacatgtacaatgctgaccgccatttccatgagtgcgatcgctaccaacggtgtggtcccagctggcgggtcctactacatgatatcgcgctcgctgggacccgagtttggaggcgctgtcggcctctgcttctacctgggcacgacgtttgcaggggccatgtatattttggggaccatcgagatttttctgacgtacatctccccgggtgcggccatcttccaggcggaggctgcaggtggcgaggcggccgccatgctgcacaacatgcgtgtgtacggcacgtgcacgctcgtgctcatggccctggtggtcttcgtgggcgtcaagtatgtcaacaagctggcgctggtcttcctggcctgcgtcgtgctgtccatcctggccatctatgccggcgtcatcaagtctgccttcgaccccccggacatcccggtctgcctcctggggaaccgcacgctgtcacggcgcagcttcgatgcctgcgtcaaggcctacggcatccacaacaactcagccacctccgcgctctggggcctcttctgcaacggctcccagcccagcgccgcctgtgacgagtacttcatccagaacaacgtcaccgaaatccagggcatcccgggcgcggccagtggtgtcttcctggagaacctgtggagtacgtacgcgcacgcgggggcgtttgtggagaagaaaggtgtgccctcggtgcccgtggcagaggagagccgtgccagcacactgccctacgtgctcaccgacatcgcggcctccttcaccctgctggttggcatctacttcccttccgtgaccggtatcatggcgggttcaaaccggtccggggacctcaaggatgcacagaagtccatccccacggggaccatcctggccatagtgacgacgtctttcatctatctctcctgcattgtgctgtttggggcctgcattgaaggcgtggtcttacgagataagttcggggaggccctgcaggggaacctggtcatcggcatgctggcctggccctccccctgggtcatcgtcatcggctccttcttctccacctgcggtgccggcctgcagaccctcacgggggcaccgcgcctactgcaggccattgcccgtgacggcatcgtccccttcctgcaggtgtttggccacgggaaggccaacggggagcccacgtgggcgctgctgctgacagtcctcatctgcgagactggcatcctcatcgcctctctggacagcgtggccccgatcctctccatgttcttcctcatgtgctacctgttcgtgaacctggcctgcgccgtgcagaccctgctacgtacccccaactggcgtccacgcttcaagttctaccactggaccctgtcctttctgggtatgagcctgtgcctggcgctgatgttcatctgctcctggtactacgcgctgtccgccatgctcatcgctggctgcatctacaagtacatcgagtaccgcggggccgagaaggagtggggcgatggcatccgtggcctatccctgaacgccgcccgctacgccctgctgcgcgtggagcacggtcccccccacaccaagaactggaggccccaggtgctggtgatgctgaacctggacgcggagcaggccatgaagcacccccgcctgctgtccttcacgtcgcagctgaaggccggcaagggcctgaccatcgtgggctcggtgctggaggggacgtacctggacaagcacatggaggctcagcgggccgaggagaacatacggtccctaatgagcacagagaagaccaagggcttctgccagctggtggtctcgtccagcctgcgggatggcatgtcccacctgatccagtcggccggcctgggcggcctgaagcacaacacggtgctcatggcctggcccgcatcctggaagcaggaggacaaccccttctcctggaagaactttgtagacaccgtccgcgacaccaccgccgcgcaccaggctctgctggtggccaagaacgtcgactcgtttccgcaaaaccaggagcgcttcggcgggggccacatcgacgtgtggtggatcgtgcacgacggcggcatgctcatgctgctgcccttcctgctgcgccagcacaaggtgtggaggaagtgccggatgcgtatcttcaccgtggcccaggtggacgacaacagcatccagatgaagaaggacctgcagatgttcttgtaccacttgcgcatcagcgccgaggtggaggtggtggagatggttgaaaacgacatatctgctttcacctacgagaggacactaatgatggagcagaggtcgcagatgctgaagcagatgcagctgtccaagaacgagcaggagcgagaggcccagctgatccacgacaggaacaccgcgtcccacaccgcggcggcagccaggacccaagcgccgcctacgccagacaaggtgcagatgacctggaccagggagaagctgatcgctgagaagtacaggagcagagacaccagcctatctggtttcaaagacctcttcagcatgaagccggaccagtccaacgtcaggcggatgcacacggctgtgaagctcaatggcgtcgtcctcaacaagtcccaggatgcgcagctggtcctgctcaacatgccaggtcctcccaaaaaccggcagggagacgagaactacatggagtttcttgaagtcctgaccgaggggctgaacagagtcctcctggtcaggggtggcggccgggaggtgatcaccatctactcctaatgcccaacagcatcacggcactctgggacaggcacggaggacggcgtgggcagcctgggcctgggcttggcccagggaaacagacggcagacacacctgtcccccagtgatgccacccaagctgcccatggggcttcctacggaagtttctaggcccgtcacctagggctctcctgttcagccttaacaggctcagcaaatcagggcgtggctggacgatttccttgcatctgagggcagacgctgctaccggagtgacctggacgtggccagatcttctcgcaggtcacaagaagccagtgagcccttgccttggtttctggaagttcttttccttggctggatttacccagtggttaggttgcatttctaccccatccagaacattcttggaagagcacccggagctgaagctgtccctgatgatgaaggtgaaacgtcagccctggccatggctccgctcagggccccggtcacctccgagtcactctgttccttgactgtctttgtgtttctgtacctcaaggcactgaagctggaggactctgtccatgcccgtgtcaccctcgtgtgggagcctctgggctcggcaggtccacatttcatgagctgaggcgtgggccagggccatctggaaagggaactcggcttttccagaacgtggtggatcatctgtcgggtgtgtggtgaacacgttcagttcatcagggcctacgctccgggaaggggcccccagctgtggctctgccatgccgggctgtgtttgcagctgtccgagtctccatccacctttagaaaaccagccacttcttttcataagcactgacagggcccagcccacagccacaggtgcgatcagtgcctcacgcaggcaaatgcactgaaacccaggggcacacgcgcgcagagtgaacagtgagttcccccgacagcccacgacagccaggactgccctccccaccccaccccaccccaggagcacggcacacagttcagcctctgagctggctcacacgtgccatccccaccccggtgctccagggaaggaggacacggacccgacgtgggaggtcctcaggcagcagtggcgcctggtgtcaggtctgtctggctgagtcccgggcgtcccctgccatggcctgtgccttgcatggaggcggcggtggcactgaagagatagctttcaagggcccaacactttgcacttcggctggctgtgagtttctgctttgtaggttgtggtcacatttgcaggctgcgggcagtggcaccgacttgggcctccctttctatgtggcatatttatttatttaaacaccccagggagttacgtggtaacaaggttgtccataaagaggttgcttctatatactagaggccccagatggccaggccttgggctacgtctggcttgcatggtctcccaagggaatcagccccatcaacaaagttcaaatcggggcagaggctgcacttgtgcccccagatgtttctgaggagccagactagggctggcattgctgtagagtgacggctgctgcccagagcgtgtcccagacatcacagcggggctcagcagttcccacagcctctgcctgccttggctaagcatgagttaagcagcaaaacgctcctccatgtctggatggggccggcaggtcctgtgtcccctgcacctggaggagagcaggctagaggcacagcggccacatggtgctggctctgaacgttggttggtggctggaaaacagccctgcttctgagggccgctcagttctgcacacgaaaccacctcctgagggctcagctctgcccccgccctgggctgcagcctctgcacgcaagcaccaggcatcctttgtgttgtcaactccgtgtaaccagtaactacagccatttacaattgactccgtttccttttgtaggtttccctgtctgtctgtgttagtagaaaaataaaatcctatgaaatctgaaaaaaaaaa

SEQ ID NO: 59731 - DNA, 710 bp, Homo sapiens
cttcacaggaatggacagccttccagagtgagcagaagctgtgaggtgaccccctcttctcagatcagggttgtacagtgtcttgggaggggaggggagaatccttgcagaaaggccactgtaaaagcatctttttccagcctgggcatcatagcaagaccctgtctctacaaaatgtatatgtatattatccaggcgtggtgtcatgcgcctgtcgtcccagctacttgagaggctgaggagggaggattgtttgaggctaggagttcacgaccagcctgggccacatagtgagaccctgtttaagtaaataaataactgtttttctttttccagggaaatgttttgggggatcaggtgacctccgcaggcatgtccgcactcacactggggagaagccgtacacatgtgagatctgtaacaagtgctttacccgctctgcggtgctccggcggcacaagaagatgcactgcaaagctggtgacgagagcccagatgtgctggaggagctcagccaagccatcgagacctccgacctcgagaaatctcagagctcagactctttctcccaagacacgtctgtgacgctgatgccagtgtcggttaaactccctgtccacccagtggaaaattctgtggtagaatttgatagccactctgacggctcctattgtaagttacggtccatgaatccaaccctcatggagtta

SEQ ID NO: 59732 - DNA, 1330 bp, Homo sapiens
cccacgcgtccgggggaagagcagccaacatggcggcggaacgcggcgcggggcagcaacagtcgcaggagatgatggaggttgacaggcgggtcgagtctgaagaatccggcgatgaagaagggaagaaacacagcagtggcatcgtggccgacctcagtgaacagagcctgaaggatggggaggagcggggggaggaggacccagaagaagaacatgagctgcctgtggacatggaaaccatcaacctggacagagatgcagaggatgttgatttgaatcactatcgcatagggaagattgaaggatttgaggtactgaagaaagtgaagactctctgcctccgccaaaatttaattaaatgcattgagaatctggaggagctacagagtcttcgagagctggatctttacgacaaccagatcaagaagattgagaatctggaggcgctaacagagctggagattctagatatttcttttaatctgctgagaaacatcgaaggggttgacaagttgacacgactgaaaaaactcttcttggtcaacaataaaatcagtaaaattgagaacttaagcaacttacatcaactacagatgctagagctgggatctaaccgcatccgggcaatcgaaaatatcgacaccttaaccaacctggagagtttgtttttggggaaaaacaaaattactaaacttcagaacctggatgcgctcaccaacctgacagtcctcagtatgcagagcaaccggctgaccaagatcgagggtctgcagaacctggtgaacctgcgggagctgtaccttagccacaatggcatcgaggtcatcgagggcctggagaacaataacaaactcacgatgttggacattgcatcaaatagaatcaaaaagattgaaaatatcagccatctaacagagctgcaagagttctggatgaacgacaatctccttgagagctggagcgacctcgacgagctgaagggagccaggagcctggagacagtgtacctggagcggaaccccttgcagaaggacccccagtaccggcggaaggtcatgctcgccctcccctccgtgcggcagatcgatgccacgttcgtcaggttctgagtccttcttggctcctcatgtggtccctctcctcggaagaactgcccagccacgggtttttaacccacctgttgctcctgaggtcgtcactatatcaacagtcacaaacccaatggcaataaaggcactgacgatagctggcgcgcgcgacgccacacaccattttcagatgccgttgcaattaaatcttgccacactgtcctcctggaaaaaaaaaa

SEQ ID NO: 59733 - DNA, 5014 bp, Homo sapiens
tttcgtccaacagccagctttatagggcatcagccttgtttgaaacaatccgacatgaggcacagctgagcacggactacaaactctccctctttgacctgcagacatcatcctaccaggccttgcagcgggtgctcgtcagcctaggccatcatgatgaagccctggctgtggcagaaaggggacggacaagggcatttgctgatcttctggtggaacgacaaacaggacaacaagactccgacccctactccccagtcactattgatcagatcttagagatggtaaatggccagaggggactagtgctttactattccctggctgcaggctatctgtatagctggctgctggctcctggggcaggaattgtgaagtttcatgaacactacctgggtgagaacacagtggaaaactcaagtgacttccaggccagcagcagtgtaacccttccaacagcaaccggctcagccctggagcagcacattgccagtgtccgggaggccctgggggtggagtctcactactcaagggcctgtgccagcagtgagacagagagtgaagcgggagacatcatggaccagcaatttgaagagatgaacaacaaactcaactcggtcactgaccccactggctttctgcggatggttcgccgcaataacctgtttaacaggagctgccagagcatgacgagcctgttcagtaacactgtgtcaccgacccaggacgggacctcctctcttcccaggaggcagagctcgtttgccaagcccccgctccgtgccctgtatgacctgctcatcgcgcccatggaagggggcctgatgcactccagcggccccgtgggccggcaccggcagctcatcctggttctggagggggagctctacctcattcctttcgccctcctgaagggaagctcctccaatgagtacctctacgagcgcttcggcctccttgctgtcccttccatccgctccctcagcgtgcagtccaagtctcacttacggaagaacccgcccacatactccagctccacatccatggcggctgtcatcggcaaccccaagctaccatcggccgtgatggacaggtggctgtgggggcccatgccatcggccgaggaagaggcctacatggtgtccgagctgctgggctgccagcccctagtgggcagtgtggccaccaaggagagggtcatgagtgccctgacccaggctgaatgcgtccactttgccacccacatctcctggaagctgtcggccttggtcctcacgcccagcatggacggcaaccctgccagcagcaagagctccttcggccacccctacacgatccctgagtccttgcgggtgcaggacgatgccagtgatggggagagcatctcggactgcccgcccctgcaggagctgctgcttactgccgccgacgtcctggacctgcagctgcctgtgaagctggtggtgcttggctcctcccaggagtccaacagcaaagtcgcagccgacggggtcatcgcgctgacaagggccttcctggctgccggcgctcagtgtgtcctcgtgtctctgtggcctgtgccagtggctgcttttaagatgttcatccatgccttctactcatccctgctgaacggcctgaaagccagcgccgccctgggggaggccatgaaggtggtgcagagcagcaaggccttctcgcacccctccaactgggcagggttcatgctcatcgggagtgacgttaagctgaacagcccctcatcactcatcggccaggccctcacagagatcctgcagcacccggagcgtgcgcgggacgccctgcgagtgctgctgcacctggtggagaaatccctgcagcgcatccagaatgggcagcgcaatgccatgtacacatcccagcagagtgtggagaacaaagtgggcggcatccctggctggcaggccctcctcaccgctgtgggcttccggctggaccccccaaccagtggcctgccagcggctgtcttcttcccaacctccgacccgggcgaccggctccagcagtgcagcagcacactccagtccctgctgggtctgcccaatcctgccctccaagccctttgcaaactcatcactgcctccgagacgggcgagcagctcatcagccgggctgttaaaaatatggttggaatgctccaccaggtgctggttcagctccaggctggcgagaaggagcaggacttggcatcagctcccattcaggtctccatcagcgtccagctgtggcggctcccgggatgccacgagttcctggcagctctaggttttgatctctgtgaagttggtcaggaggaagtaatcctgaaaaccgggaagcaagctaatcgacggactgtgcacttcgcgctccagtccctgctgtctctgtttgattctactgagctacccaagcgcctcagccttgacagctcctcctccctcgagtctcttgcttctgctcagtctgtttccaacgccctgcccttgggttaccagcaaccccccttctctcccaccggtgcggacagcatcgcctcagatgccatctctgtgtacagtctgagctccattgcctcctcaatgagctttgtctccaaacccgagggtggatcagagggtggaggccccggaggacggcaggaccatgaccggtccaagaacgcttacctgcagagatccaccctgcctaggagccagctgcctccccagacccgccctgcaggcaacaaagatgaagaagaatatgaagggttttctatcatcagtaacgagcccttggcgacctaccaagaaaaccgaaacacatgcttctcaccagaccacaaacaaccccaacctgggacagccggaggcatgagagtctcggtgagctccaaagggagcatcagcactccaaattctccagtgaaaatgactctgattcccagccccaactcacccttccaaaaggtgggaaaactagcaagctcagatacaggagaatcagaccagtctagcacagaaacggacagtaccgtgaaatcccaagaagaaagcaacccaaaactggatccacaagagttagcccagaaaattctggaggagacacagagtcatctcattgcggtggagcgtcttcagaggagcggcggccaggtgagcaagagtaataaccctgaagacggcgttcaggcgcccagcagcactgctgtcttcagagcgtcagaaaccagtgcgttcagcaggcctgttctctcccatcagaagagtcagccatcaccagtcactgttaaaccaaagcccccagccaggagctcctccctgcccaaggtgagttccggatatagcagccccaccacctcagagatgtccatcaaagacagcccgagccagcacagtggccggccatcgcccggctgcgactcacagacttcccagctggaccagcctctctttaaactgaagtaccccagctctccttacagcgctcacatttccaaatcaccaaggaacatgtccccaagctccggccaccagtctcctgctggcagtgcaccctccccagctctctcctactcctcagctggatctgctcgctcaagtccagcagacgctcccgacatagacaaactgaaaatggcagccattgatgaaaaggtgcaggctgtccataacctgaagatgttctggcagagcacaccccagcattccacagggccaatgaagatcttccggggggctcctggcacgatgacttccaaaagggatgtcctcagtctgctgaatttgtcaccacggcccaataagaaggaggagggagtggataagcttgaactgaaggagctgtccctgcagcagcatgacggagctccaccgaaagcccctcccaacggacactggcgcaccgagaccacctcgctgggctcactgccgctgcccgccggccctcccgccacagcccccgcgcgccctttgaggcttccttctggaaatggctacaagttcctgtctccaggaagatttttcccttcttccaaatgctaaagcatcttttatacccactgactctgagcagcctgcagatgggggcctggcgtttgcttcagcccttccctgagtgcagtccccccacagccaccagcaccctcatgatgctgtgctctgcaggcgaggggcaccaccacgtccaaaggctgccacacacactggtggcttttctgggccacattcaccaaaagccaggacttctgtggggctggtacaggaggctcatggaatttcctacacacttcaccaaatgtttgtttacctttgaactccctgcttctcatctttgatatgattcttcaccaggattttgtacaaaaatgatcatggttctggggtggggagaggaaagggagcacatattttgctaagaggtatatatgcagtaccttttataccacagaaatacaaatagagctttttcctaaggctttcggttgcctggttgggggtgggatatatgaaatttcagttgaattctacaggaaagtgttatattagcccaaaaacagaaaaatggtttttaaaatgccaatgatttgtaattaaattgtagcaattttggtctcatgatagtgtaatatctcagcaacaatgcaataattcacattgaaacagcgcttccattctgaactcctgctctgcaaatgtcttttgggtcccgctgtcaaccaaacttgaattttcttaaaaaaaaaattatgtaactcttatccaggcattttagaactatgcaattgtgatttaaaatgcaactttgtgcttttaaaacattattgaccttttttgtatatggataaacaacttggttttattatcaatagtactttgcatttatagctattatttttaaaagctcaaaaagttttttaaaatgtcaaattttgaatagtcatcaataagtaattatcaagtttggaaggaaaggttgaaatgactccgtttccttataagcaaaaaaaaaa

SEQ ID NO: 59734 - DNA, 1529 bp, Homo sapiens
ggcacgaggcgggctgcgaggtctggctaggctacgggccacgcgccgccgccgttgccgtcgccactgtcctcttctgaggcgcgggcccgacggaaaccatgtttgtggctcgcagcatcgcggcggaccacaaggatctcatccacgatgtctctttcgacttccacgggcggcggatggcaacctgctccagcgatcagagcgttaaggtctgggataaaagtgaaagtggtgattggcattgtactgctagctggaagacacatagtggatctgtatggcgtgtgacatgggcccatcctgaatttgggcaggttttggcttcctgttcttttgaccgaacagctgctgtatgggaagaaatagtaggagaatcaaatgataaactgcgaggacagagccactgggttaaaaggacaactctggtggatagcagaacatctgttactgatgtgaagtttgctcccaagcacatgggtcttatgttagcaacctgttccgcagatggtatagtaagaatctatgaggcaccagatgttatgaatctcagccagtggtctttgcagcatgagatctcatgtaagctaagctgtagttgtatttcttggaacccttcaagctctcgtgctcattcccccatgatcgccgtaggaagtgatgacagtagccccaacgcaatggccaaggttcagatttttgaatataatgaaaacaccaggaaatatgcaaaagctgaaactcttatgacagtcactgatcctgttcatgatattgcattcgctccaaatttgggaagatctttccatattctagcaatagcgaccaaagatgtgagaatttttacattaaagcctgtgaggaaagaactgacttcctctggtgggccaacaaagtttgaaatccatatagtggctcagttcgataatcataattctcaggtctggcgagtgagttggaatataacaggaacggtgctagcatcttcaggagatgatgggtgtgtaagattgtggaaagctaattatatggacaattggaagtgtactggtattttgaaaggtaatgggagcccagtcaatgggagttctcagcagggaacctcaaatccttccctaggttcaaatattccaagtcttcagaattcattaaatggatcttctgctggcagaaagcacagctgagtacaagctaactggagtaactttgctgttttgctgcttgttgcatgcacacaggaatggaaagcgagctccttttccccttccccagcgccgtttgacctctcccaagatacaccagcagcctgcttactactaaacgcaatccaaaaggcctttaaaaatacagtgtatattttttgtactagtcagtttattgacactatttgaaacttttgaaatataaacggagaggctttctgttgagacattgtcaccaaaacaattttttgaaatgttcctgaaactaatttgggtttaaagattaaaagggttgttaccattcttatctgagtagttgggaggagg

SEQ ID NO: 59735 - DNA, 7445 bp, Homo sapiens
ttttttcccacagcaactgccaatgaaggatgaatcccctttttaaaaagttgttgttgttgttgtttatttgatttcccaccacctccattagaccaagtgcaggaggaggaatgtgaagtagaaagggtgactgaacatgggacaccaaagccctttcgaaagtttgacagtgtagcttttggagaaagtcaaagtgaggatgaacaatttgaaaatgacttagagacagacccacccaactggcagcagcttgttagtcgagaagtgttactgggactaaaaccttgtgaaatcaaaagacaggaagtgattaatgaattgttctacactgaaagagctcatgttcgaacactgaaggttcttgatcaagtgttctatcagcgagtatccagagaaggaattctgtcaccctcagagctacggaaaattttttcaaacttggaagatattcttcaacttcatattggattgaatgaacaaatgaaggctgttcgaaagagaaatgagacctctgttatcgatcagattggggaagatttgctgacatggttcagcggaccaggagaggagaaattgaaacatgctgctgctaccttttgcagtaaccaacctttcgccctggaaatgatcaaatctcgtcagaaaaaggattctcgatttcagacttttgtgcaagatgctgaaagtaatccactgtgtcgtcgtcttcaactgaaggatattattcccactcaaatgcaaaggcttactaagtacccacttctgttggataatattgccacatacacagaatggccaacagaaagggagaaggtgaagaaagctgcagatcactgtcgtcagatcttaaattatgtaaatcaggctgtcaaggaggcagaaaacaagcagcgcctagaagattatcagcgtcgccttgatacctccagcctgaagttgtcagagtacccaaatgttgaagagctcaggaatttggatttaacaaaaaggaagatgattcatgaagggccattggtttggaaggtgaatagagataaaactattgatttatacacgttgctgctggaagacattcttgtattgttacaaaagcaggatgatagactggttttaaggtgtcatagtaagattctggcatctacagctgatagcaaacacacgtttagccctgtcattaagttgagtacagtgttggttcgacaagtggcaacagataacaaagctttattcgtcatttccatgtcagacaatggcgctcagatttatgaactggtggcacagacagtttctgaaaagactgtctggcaggacctaatctgtcggatggctgcatcagtgaaggagcaatccacaaagccaattccattaccacagtcaacacctggcgaaggagataatgatgaagaagatccttcaaaattaaaagaggagcagcatggcatttcagtcactggtttgcagagtccagacagagatttgggattagaatctaccttaatatcgtcaaaacctcagtctcattcactgagtacctctgggaaatcagaggtacgtgatctgtttgtggctgagagacagtttgcaaaggaacaacatacagatgggacactaaaggaagttggagaagattatcaaatcgcaatcccagattcacacctgcctgtctcagaagaacggtgggcattggatgcactaagaaatttgggtttgttgaagcagttgctggtgcaacagctaggtttgactgagaagagcgttcaggaagactggcaacatttcccaagatacagaacagcctctcaggggccgcagacagacagtgtcatccagaactctgaaaatattaaggcctatcattctggtgaaggacatatgccctttagaactggaactggtgacattgcaacttgttacagtccacggacttcaactgaatcttttgctccacgggattcagtgggactggcaccccaggatagccaggcaagtaacattttagtaatggaccacatgattatgaccccagagatgcctaccatggagccagaagggggtcttgatgacagtggagagcacttttttgatgcccgtgaagcacatagtgatgagaatccatcagaaggtgatggagcagttaacaaggaagagaaggatgttaatttacgcatctcaggaaactatttgatccttgatggctatgacccagtgcaggagagttccacagatgaggaggttgcttcctcacttaccctgcagcccatgacaggcatccctgctgtggaatccacccaccagcagcaacattctcctcagaatactcactccgatggggcaatttcaccattcacccccgaatttctggtccagcagcgctggggagctatggagtattcctgttttgagatccagagtccctcctcttgtgcagattcacagagccagatcatggagtacattcataagatagaggctgaccttgaacacttaaagaaggtggaggaaagttacaccattctttgccaaaggctggctggatcagccctcacagacaagcactcagataaaagttagagccgcatgtcctggaggtgactgcaggttgttggatttggagtatcggccgtgtctcaccacatcctggctccagtgtggatgcagagagagtgtgacagaggatctgcctgtgaaccacctgggattagtcaagtcccaaggtgcccagagtgggactagttcttcacagtgtggcagctgcactaatctgtttgtgagggaatatccattccctcactctactctcctcactatcggaaattcattttgattcagaataaaaaccaaatgtatagagctttgggtgtaggatatgaaattgtacttagatttaagaaaaagagaaaatcagatggatttatttgacttcattccgtatttgaaagcacattttaatttttatttgccttgttttgttttaattgagtagtgagagttttagacctttgtctttagtacacccaaggatcaactgctcctgaagcaaagaggtcaggatggagtatgcagaagttgggtagagaggttaagaagaggaggaagtgagacggggaagggaggagcaccttgcttcactatacagtattccaagctctctgctgtccagtaggctgcttctctgagggtcacctcaaaggtatgctatgccgtgtggctcttatgtgcccaggtggtgtggtcagagagtggatgggcttcctcccgccctgaggcaagcacctcttctctgtagctgggatcaaccacaattaataggaatcctcaacatactaaatagcaggcacttgaaaatgggtgtgttttcttccattgtcgtcttttctattgagggttgggatttgggtgggagaggaaagcaaattttattttcttgactataaatttgttattcttggtatcatttcatttttataattatacattagacattggcacttgtgtaaaactgtccctgcagattgagcaggaagtaaaaacaaatggaaatgcttcggatagtggcaggggtgggggttgctaaggaaagggtgggatgggagtgggtaaagagtttgggaaggttatctaactgaatcactactgagttgaatcatggctatcattagccacaggtactgctgattataaggccagtaaaattttagtacctggaggtttgactctaatttttgcactgatggtgccaaagggccctgagtcaaaaggatagccaagggtggagtggaaaaagatatggtgaaggcagaactgctcacaccagctccagaagcacgtcctctgacttcactgccgcagctctttccacacggggccgtgattgaccctaaaaattgcagaccagcacatacactggacactgcaggcaaggtgttggtaactgcctgctctaggatgaatagtagcgttagcagcaccctacagagggtaagtttcagaattgtaatttgagaactccttcaattatattgactttctttggttttccttgtgcattaaggtatatattttttgaagtaattttggccaactaaaaatgaagtctgtaaattctgttaataaacaaggagttcatccgttgctcacatctttcattggtgccctctgaactctgtgggttgctaggatgtaattttaatgcttccctgcagtccaaagatgattttttcaccacaaatggtaagggatgcccacctacttttataaacaccactgcaacttaacaagtttatttatctatgtccagatttctgtttctgtcctaaattgatctgtgtttttaggtggatcaacttggatctttagacctcatctataaattgaaattatatttttaagtcataagccaagtacaatctaactcagaatgggattaaaaattttagaagcagaagctaatatataaatgaagtttgggatttggaactttctgtatctcttaggaggaacaagtaaaaaccaaatggttacattgtgctgctagaaataatgtcattctcaattaaaagggttacacctgtagccacttgacactaacaccatcgagggcaattaatcaggagaaaagtaaatataaaaactttgctcttaacgtcacacactacagggtaattatgtaattctctagcactcaattaagaagcttgtaggttagcaaaatttcagtttctctagttcagccagtgtcttgtccttagtaattatttgctttccctgcagatcaatttctccttggaactctaacaggactaactggaaaaatactttgaccatagctctagtacttccaaataaattcatatctagattttcaaacaaagccccaagatgaagtctaattctgaaaatatctcacaatttttgaatgttctttttatcttaccgacctaacttctcttttccctcccaacttggcctcccacacgttccatttcattttggccattatagtcacatccgtttgactttggttgtgacatcttcctttcaggatgatggaattagatgcagtctgtctttgagtgagactggtcaccatcagaggagttttttctaagtgacgtgactagaagttgaaatctacttccctgctaaagggcacaggggtggtgtacaaagaaagctaccttcccagagcaagcaggctgcattttagctatggaagtgacctgctgtgacactgtgctctcttctgtgggcttaatggttcctttgctatgaagtggcaaattacatgtagagtgtctccttccttttcagagaacagttaatcaaggcaaatcagcaagcccccaaagtgctgtaatttaacatcatgattaccaccttcgaagctatatattttgcatactttaaaatcacctaacttggactgcttgaattacattggcttttagaaccgaaattgtaactatgtattgtatttcatgggaggtatattttatgagctttttggctttcttttttcccacagcaactgccaatgaaggatgaatcccctttttaaaaagttgttgttgttgttgtttatttgattttgagttaggagggataatagagaagtccatttaaaaattatttttagaagctaaagaaagtaattatgcttcctgtgaattgtcttttactggcatctttgttttcctctttgatgttagtaaatttggtgtaatacgtggggcttccatatttcaaagtggaagctttcttctctgaagtcgatatatggttttgaattactagagctttggtcagtatttccttccctatatgtcacagagggcaccactgagaactgcgtgcataggacctcaaaatacaaaattagcagggcctcacagtcagcttcctcatggctagtttttcccccttatattacaatttttgttttataagtcatttttttcctgatatttccaccacttttcagagtcatctacaaaatttttctttcctcaagaaaagagttccttttgccttattccttatgccttccccactggtattgagggttttgataataaattggtaggaaaaaaaagtacctcctagaaggaagccttccccaccatttccaggtgccaactgctaagcagatatattccaaaaatggtaactgtcatgtgcacactgttggttatttttaataagcctcttcctactagaacattttattttccttgttcaccatacaatcatgtactctttaacagaaattgcttttaaaaaatatctggaactatctttaaaaaaactttattaataatcatgtatttttactgatcacattttgaaatgcctaaaagactttattgttctaattatccagatgtacctttgtaaaatagctcttttatgaattagctgataaggctgtatgtttctggaacaaaatattggtcatctaaaaactttctgttttctggggtctgggaaaatagaaaataagatttcaaatattaaataagcttaaaggaaccaagcatgtgactttttatttgtattctggttgatttgtcttgtccaagttatattagaaaagttgaggagtcgaggagcctgtaattaattttcctgtcagtgactgtcagacatcttcctgcttattagagcatccctagcaacaaggctaaaccttcatgacagtgctggcaggtgggcttgccctaggcatgtggggcaggtttgttgtttttttaatagctttattgaggatatttcacatatcatataattcatccatttaaagtgtataatcagatgggttttggtatattattgatttttaattgtggtgaaatatatatataacaaaatttgctattgtaactatttttaagtataaagttcagtgaggtaggccagcttttatgacgcacctgaagataactttggttttaatcctaccctaaatgaagcatatgcctctatttttcctgtccccagtgctgggcttcttcacataccaacatttctgtgcttttaccaacagcattttagctcagaaggctcgcttactttgggcatttgctgtattttggttttgaaatacttgtaatttgacttattcttgggataatattttagttttcagtcattcaagggcacatttggctgacggagctaataagcgtaataaaatgcttagtagtttataccatcttttagttaaacattttaaagattaagactattcaaatgtactttgcggaaattaacctgtttgtatgcctggctttgtttacaaacatatatctatatctatatatatagatacagatacagatacatatctggtggaacaaagaaatacctgtaccattcccacttgctctttgatagccacctcctaggaatggagacaataaaactctgtatttgcatgtgaaaaa

SEQ ID NO: 59736 - DNA, 2009 bp, Homo sapiens
caaagtgctcagcataagggagccagcgcacagcacagccaggaaggcgagcgagcccagccagcccagccagcccagccagcccggaggtcatttgattgcccgcctcagaacgatggatctgcatctcttcgactactcagagccagggaacttctcggacatcagctggccatgcaacagcagcgactgcatcgtggtggacacggtgatgtgtcccaacatgcccaacaaaagcgtcctgctctacacgctctccttcatttacattttcatcttcgtcatcggcatgattgccaactccgtggtggtctgggtgaatatccaggccaagaccacaggctatgacacgcactgctacatcttgaacctggccattgccgacctgtgggttgtcctcaccatcccagtctgggtggtcagtctcgtgcagcacaaccagtggcccatgggcgagctcacgtgcaaagtcacacacctcatcttctccatcaacctcttcggcagcattttcttcctcacgtgcatgagcgtggaccgctacctctccatcacctacttcaccaacacccccagcagcaggaagaagatggtacgccgtgtcgtctgcatcctggtgtggctgctggccttctgcgtgtctctgcctgacacctactacctgaagaccgtcacgtctgcgtccaacaatgagacctactgccggtccttctaccccgagcacagcatcaaggagtggctgatcggcatggagctggtctccgttgtcttgggctttgccgttcccttctccattatcgctgtcttctacttcctgctggccagagccatctcggcgtccagtgaccaggagaagcacagcagccggaagatcatcttctcctacgtggtggtcttccttgtctgctggctgccctaccacgtggcggtgctgctggacatcttctccatcctgcactacatccctttcacctgccggctggagcacgccctcttcacggccctgcatgtcacacagtgcctgtcgctggtgcactgctgcgtcaaccctgtcctctacagcttcatcaatcgcaactacaggtacgagctgatgaaggccttcatcttcaagtactcggccaaaacagggctcaccaagctcatcgatgcctccagagtctcagagacggagtactctgccttggagcagagcaccaaatgatctgccctggagaggctctgggacgggtttacttgtttttgaacagggtgatgggccctatggttttctagagcaaagcaaagtagcttcgggtcttgatgcttgagtagagtgaagaggggagcacgtgccccctgcatccattctctctttctcttgatgacgcagctgtcatttggctgtgcgtgctgacagttttgcaacaggcagagctgtgtcgcacagcagtgctgtgcgtcagagccagctgaggacaggcttgcctggacttctgtaagataggattttctgtgtttcctgaattttttatatggtgatttgtatttaaattttaagactttattttctcactattggtgtaccttataaatgtatttgaaagttaaatatattttaaatattgtttgggaggcatagtgctgacatatattcagagtgttgtagttttaaggttagcgtgacttcagttttgactaaggatgacactaattgttagctgttttgaaattatatatatataaatatatataaatatataaatatatgccagtcttggctgaaatgttttatttaccatagttttatatctgtgtggtgttttgtaccggcacgggatatggaacgaaaactgctttgtaatgcagtttgtgacattaatagtattgtaaagttacattttaaaataaacaaaaaactgttctggactgcaaatctgcacacacaacgaacagttgcatttcagagagttctctcaatttgtaagttatttttttttaataaagatttttgtttcctaaaaaaaaaa

SEQ ID NO: 59737 - DNA, 2670 bp, Homo sapiens
gtattgtccccagtatcagaaccggaagaagaaaatgatcctgatggtccctgtgctttcagaaggcgggcaggatgccagtattatgctcctcgtttggaccaagctaaccattcatgtgaaaatccagaattggcagatttggataagttgaggtataggcattgccttacaacacttacagtcccaagaagatgtataggatttgcaaggaggcgaattggcagaggtggaagggtcataatggaccgaatatccacagaacatgacccagtcctgaaacagatagaccctgaaatgctgaatagtttttcaagctcttcccaaactatagacttttcttctaatttctctcggaccaatgcttccagtaaacattgtgaaaatagactgtctctttctgaaatattaagcaatatcagatcatgtcgactacagtgtttccagccaaggctactaaatttacaggacagtgatagtgaagaatgtacctcaagaaaaccagggcagactgtgaacaataaaagagtttctgcagcatctgtagctttattgaacaccagcaagaatggcatatcagggctcaagcacctctgactgtatgtctaaaacacttgactcagccagcgcccactttgctgcatctgcagtggtcagtgcacctgttccaagtcgcagtgaggtagccaaggaacagaacactggccacaacaacataaacggtgttgtccagccttcaggaacctctaaaacattatactccaccaatatggctttatcatccagcccagggatttcagctgtacagcttgtaaggacagttggccacaccactacaaaccacttaatcccagcattgtgcacaagcagtcctcagacacttcccatgaacaattcctgcctgacaaatgcagtgcacctcaataatgtcagtgttgtttctccagtcaatgtgcatatcaatacacggacttcagcaccatcgccaacagccttaaaacttgccacagttgctgccagtatggacagagtgccaaaggttactcccagcagtgccatcagcagcatagcaagagagaaccacgaaccagaaagattgggcttaaatggaatagcagagacaacagtagctatggaagtgacataacctaaaacacgtggctctgacctgtgctgatggtgtgcagtcattcatattccagctgaatgcaaaaggcaacactctgtggatcacagagtgtaacaatggacctaaatggactatagtatattggatgttaaatccatatatgatgtatattttgtaaaattgggaaaatcactaccttgtaaaatagtttatttgtatcatcaatattatttctgttacttgaatagtagatattcatcatcatgcttttgcacttgaatttgcaactgaatggattttaaaaaataattctttaatgggatcatgagcatgaaatgggatcctgcatcacttgttttaactatttattttgccatgtttacattttgtatcttgtaaaaataaatccaactttgtgtctaaaaagttaaagattcatagctaggaaatgaaattcttgtaatttttttctaaaggaactgtaaagttttcacttggttcattttgtttcacaatttgactagatggactttttggtaaatactttagtggcatttcactgtcaaatatgaagttcaaggcaaaatagtattttctattactgtgcaggggaaagggatggatcgatacatgcaaatttaatgtagtaactcacttttccatatattttgaatgtatatttctatttatgataccaatttataaaaaataattacacagaaaaaatggaataggaaaaattatgcatctagcacatttaaactgtgcaaatatgaaaatttttcgaggattacattttatctgaaggctgcatattttaactggctttaaaactgtaacacatcacataaaagatactttaccaggtatgtattgcattatatcattgcaataattattggaagtctagatatcgagccatccccaggtgttgggcggggggagggttgtggcaagattgtcttttcaattttggagagttttcctgtggctacaaggcaagtaacgggttggaaaaagtcctgactgtaagcgttggacaccttcatagtgtagtgttttagtgactttttttatacggttcttgtaaattagatacgtgtagtggtgtttcagaatgtttgtttatgcactagttcagacaactttccctgttacttgttcttgataagtgaaaactgcagggaaataaaaaatacatatcaaaacatggacatgctgcatatgtgtttatttcacaatgtgcacacagtataagtgaaaatttaagggagatgatagcacttaacagcacttttcatgttcacatgctttccaagcattaatgaaaagaactataggaagctcatctgtgggctctattgggtttcagataatccaatataaactacctttgatatgaaagttcgtaagatattttacagaatgtaagtaatttgcagtatcgcagtcattgaaatgtcataagtgagcctcattttataaataaaagtttagagtagaattatattgcaagggggttttgtcaagtaagtactggg

SEQ ID NO: 59738 - DNA, 2418 bp, Homo sapiens
gtgtctcagctggggaagcagagggagctggtgacacctcgtggggccacagggaaggtcggcgacaaaaccaggcaagccctgtggtcacgcaggaggagttgggaccacgctgcatcagaggaaggctgtggagtattcaatgaatggaatttaatgtaactatgacataaacacacacagggtggggaggacgggtgaccaagcgcagacgtgggtgacacgtggccccgctctctggaccctcagtgggaaaaagtctgaggctggcgtctctcaccaaaccccacctcccctggtgggtcaatactgatctggctgagtgacagcatctcgtgacccaggctggccctgggaaggcgccacaggcgaggcctgcgagtccagggagcaggcagacgctacagtggcccccgagcgcgccaggtgccagcctcgacgtgtaaatggcccgctgcgggcgctgctgggaaggaagacaagaagggtgagggctcgtcctcaccaagtgcttcctgagtgccgtaggacgtgggtgggacatggggacagtgagggtaacacaaacagcaacgaatgcacaaagacaagttccaggaacacccataaacccataacgttcaacaaaatggcaacaaaacgacgcccctgctggcctggcgaggctggcgcttccttcgtggcagatgccacctgcagctggctggctggcaagcgttggccaagctttttggtacctgggagctcaacagcataaaaggctgtaacctctacacggaaaaatttcacatccttcccctgaaactgacttcaggggcaaagaaacgagacttcttgaagaccagcctcttctgggaaaggggcttctgagacgagtgtcgacggcagagcagatggcctggggaaggcaggggtccctgggcagaggctgggagggtggccagagaccagggagggcccctccatctggtgggtttggcaggtgtgtcccctggtgctgccaccaggagccccgaggccggggtgttggctgcgacagcccctcactgggtccggagctggtaatctccattctgcgtgatataacgcacccagggcagggcctggtacccactcttctcaatgatcttcaggtagcgcacctggatgccggaggtagtgaagtaagggatctcgaacttgacactgatcgggggcttgccctccttgtcttcggcctccacactaggcaggccgaagtgggcccgcatcaggtactccttgccgcccgggaaggacttgatggaccacacgatctcgctgttctcggggacccacttaacgctccccaccgtcgtcttgaacttgggtgagtcggcatcattgggcacgggaatgtggatctccacgttgttggctgttgaccgccgcttgaactggcttttggccttgatcatgtactcgatgcggctgtgggagtgcttctcgatcaccgactcgatccatatcaaaggcttgacgtgggtgttgagacggtaggacatgagctcgaactcgccgtcgggtgggatgaaggagatggtgcggtcattctcgaagcgtgatagccgcacacactggtggaacttcacatcctccagctccacggatttgcttttgccgcggcccgtgttgtcaaagaggaccttgtcgttgaggcccaggcgcagctcgggcatgcccgagaggaagactcgcatcttgatggagcccacgatctcgctgcgcaggacattgccgttggcgctgaccaagaggttgacagactcgatgacgtccaagaacacctcattcttccgatacttgatgccttcggaccgccaggacaccgcgttggtgacggtggctggtggccgcggggcccctgtttccagcttgtggccttcctgagtgatgtactcctgcaggatcttgctgtcggtggtctgggggtagccgaagtccatgagctcgtccagcagctcgtagatgataacaaagttgtcccggatgctctcctcctccagctccttgaagtactcggaaaacacctgcaccaccttatagaggaaagaaaagaccagcgacacgcacgcgttcttcttggatgtggcaaccagatacaggttgttgtgtttgatccacatgaaacggacccccccgtgggccaggatgggcgacagcatcccctcctcctccttctccatcaggatgggcatgaagtgctccacctctgacatgtccacgtcgccacggtagttccggcagatgagcaccttgcccttcaggtccagcacgtagacggcgctggcggacatgatggctgcaggaggcctcggcagcggccgagggcggtggcggcggcagcgacggtggggactgctgggcgttgagcaaggacgggcgccgcccgcgacagct

SEQ ID NO: 59739 - DNA, 1768 bp, Homo sapiens
ccatcagcctgggggtgcctggaacattgtcaccaggctcattgaactcatcctggcacctccagtgcctgccacagtgtttgacacctcatagtaggctcttgatgcgtatcagaaatggatctgtgttggggcagtggctctacgttgctgcagggagggcctttgtgtcaaccgtctgtgagaggcagtgtccaggcagaagtcagctgccatagaagcaggagtggcgttttcctcctctaactcagggccgtgtctctgctccctcttcagctggtgctgccagaatactccatccatagcctcttctgcattatgttcctgtgtgcgcaagagtggctcacgctggggctgaatgtccctctacttttctatcacttctggaggtatttccactgtccagcagatagctcagaactagcctacgacccaccggtggtcatgaatgccgacactttgagttactgtcagaaggaggcctggtgtaagctggccttctatctcctctccttcttctactacctttactgcatgatctacactttagtgagctcttaacgcaaagaccatgcacatcatcagagactgagatgggagaggcctgagacggagaggtgcatttctgctggtgactggaggagggaccagaatgaggatacgtgagaaatagacccggcaggcagtcagactgaatgggagctggaatcacgcagcagctgggagccgagttaaccctgcgtgtctgtgtcaccctgtttgtcaatctttggcattcgaattccacacacggggtcctagagcccttctgagcatcagtggtgtgggggagtaggtgacgaaacactagacctctcctgagagagaattgctgcttcctgaatccacttcattgaacagcaccttgcaagttcaaatgagttcctgggagcggaggctggaaggccacaaggtgcttgctaaggaacagaatgacccagagtcaaggccaagtctgcagggacctgttgaaagcctcgagaatgtcttggctgcccaagactcttgttgcctttcttccaagccatggccatgccctttttctcaaatgggaggggctggagggtgtgtgggatttgtcttcagctgcaaccagccttgagcctgctgggctattttcagctgaggaggggtgaatataggaaaaatgcatttttgaaacgtttgcaacatgatcaaggtgttagttctccaccacacaagttgtattcttcttttgccacctcaaaccatcacagagtctttaaatgcaaatcaattggtcaatgctagtcaaagctatgttcttacaaaaaccccagacagctcagagctcagaaaatcctgtggagtggctgctctgtaccgtgggcatccggcagccaggaagtgagacaacataattataactttgttttatgatgctgcatcatttgtactgtttaggtcgacgtgaggacatcatcttatttagaattttccgtttggcattctcttttgggtgggagttatgctgggggttgtaaataatgacaaggctgagatttttatgatgtttaaattgggcacaatgattttgaccttattccccaaacttcttttcttttctactgtttaacatacacaggctatttatacacgtccccagctcccatctgaaacctgtgactcaggtttatgaatggtgtttgtgtagcaacacattgtgtgctatgtttattaaaatgcagcgacaacttgaaaaaaaaaa

SEQ ID NO: 59740 - DNA, 1155 bp, Homo sapiens
cgcgtggcgggcaggcggcaggaggcgggtgggtcaaggtaactctgggctacagagtccttgctgggggttcggggagcgcttggaccccggcttctgggacgcgtcaggagaagggagcactggctttgctttcatcaggccaaagatgcctttctttgggaatacgttcagtccgaagaagacacctcctcggaagtcggcatctctctccaacctgcattctttggatcgatcaacccgggaggtggagctgggcttggaatacggatccccgactatgaacctggcagggcaaagcctgaagtttgaaaatggccagtggatagcagagacaggggttagtggcggtgtggaccggagggaggttcagcgccttcgcaggcggaaccagcagttggaggaagagaacaatctcttgcggctgaaagtggacatcttattagacatgctttcagagtccactgctgaatcccacttaatggagaaggaactggatgaactgaggatcagccggaagagaaaatgaagaccccagagacatttattggggagtaggatgtggctgagtgctttttttttggccagactagcggattcagtcctggaagagagtatcatataatgagacccacaggcactggcacccttgggttggcaatagaaggtgacatggaatggagaaaaccaagattccagatggggatagtaactagaaggtgcttcagatgcactgcctgcgggtgccagtctgaaaaccagaccgcacagaggcctggggctgctgatgagcttttcggtgctctccacacacaagctcgcaaacacacatgtcccagaatagctctgttgggttgtgttgggagaagcggctggagttcattctctcacccccttatgttggtgtttggcgtgtgacagcagttctacagagctctgtgttggggtcatggatgagcggctctcttggctcttaaaggcaggcctctctcttcttgcctttaaagaatcctccttcctcacacctggcctcctctggcttcagcttctcagcagcaagcaccagccttccacaacaacactatatttttatgctactttcctgtttgcactactacttttttattaaacgatgttaaataatcaaaaaaaaaa

SEQ ID NO: 59741 - DNA, 2091 bp, Homo sapiens
gaattcccgggtcgacgatttcgtcgtcagtcaaaccggttctctgtttgcactcggcagcacgggcaggcaagtggtccctaggttcgggagcagagcagcagcgcctcagtcctggtcccccagtcccaagcctcacctgcctgcccagcgccaggatggccaccatcacctgcacccgcttcacggaagagtaccagctcttcgaggaattgggcaagggagccttctcggtggtgcgaaggtgtgtgaaggtgctggctggccaggagtatgctgccaagatcatcaacacaaagaagctgtcagccagagaccatcagaagctggagcgtgaagcccgcatctgccgcctgctgaagcaccccaacatcgtccgactacatgacagcatctcagaggagggacaccactacctgatcttcgacctggtcactggtggggaactgtttgaagatatcgtggcccgggagtattacagtgaggcggatgccagtcactgtatccagcacatcctggaggctgtgctgcactgccaccagatgggggtggtgcaccgggacctgaagcctgagaatctgttgctggcctccaagctcaagggtgccgcagtgaagctggcagactttggcctggccatagaggtggagggggagcagcaggcatggtttgggtttgcagggactcctggatatctctccccagaagtgctgcggaaggacccgtacgggaagcctgtggacctgtgggcttgtggggtcatcctgtacatcctgctggttgggtaccccccgttctgggatgaggaccagcaccgcctgtaccagcagatcaaagccggcgcctatgatttcccatcgccggaatgggacactgtcaccccggaagccaaggatctgatcaataagatgctgaccattaacccatccaaacgcatcacagctgccgaagcccttaagcacccctggatctcgcaccgctccaccgtggcatcctgcatgcacagacaggagaccgtggactgcctgaagaagttcaatgccaggaggaaactgaagggagccattctcaccacgatgctggccaccaggaacttctccggagggaagagtgggggaaacaagaagagcgatggtgtgaagaaaagaaagtccagttccagcgttcagataatggaatcctcagagagcaccaacaccaccatcgaggatgaagacaccaaagtgcggaaacaggaaattataaaagtgacagagcagctgattgaagccataagcaatggagattttgagtcctacacgaagatgtgcgaccctggcatgacagccttcgaacctgaggccctggggaacctggttgagggcctggacttccatcgattctattttgaaaacctgtggtcccggaacagcaagcccgtgcacaccaccatcctgaatccccacatccacctgatgggcgacgagtcagcctgcatcgcctacatccgcatcacgcagtacctggacgctggcggcatcccacgcaccgcccagtcggaggagacccgtgtctggcaccgccgggacggcaaatggcagatcgtccacttccacagatctggggcgccctccgtcctgccccactgagggaccaggctggggtcgctgcgttgctgtgccgcagagatccactctgtccgtggagtggagctgctggttctcccaggtggattttgctggaattctcccatgtcatcaccccaccaccgtcacttctgtacctgcatcaagaaaacctgcttgttcacaaaagtcatcgcaacttcagagcgaacggccacatctccccacctctcacccccaccctctcccctgccaggctggggcttcctcaggcatgggtgtccacagcactggccccctctccccagcctcagctgctgtccgcctgatctgtcttgggctgtaggctagaatgcccgggctggtgcccaccaggggctggggagaaggaggggtgggatgatgaggaaggcagcatccgtccgtccctctcccagacctctcctcttccagtgtccccggggaagggcagatgacactcccttcc

SEQ ID NO: 59742 - DNA, 1210 bp, Homo sapiens
tcccctcccgcccctctttaaaaagcggcccggggaattaacttttggggcccccaaaaaaaagacattcgttgcacccccgcgggataaaaaattggttctcttaaaacgggggccccctttttttttttttgatataaaacagctttatttgagggtcctagtctgtgaggggtggacagataaaagaggtatttgtgatagggcatgaagaccttaagaccctgagggtgctgtgaacagggaacagtctgatatctggaaccaaagggcaaggaaaggtcctggggctgaagtggggacaaggggcaccaaaaagccagtgggggcaggtggtgctggccaaggtcagaggctgatgcaacaggccctcttctccccagggccaggctcctgtccagcctgggcactgcccagagtgatggcattggtccggatgctgttctgtctctgcttggacaccttcgcaaagatttctttcaggacagtctcaaaggctagctcaacattggtagagtccagggctgaggtctccaggaagagcagtccattgttttcagcgaacattcgggcctcctcagtgggcacttcccgggcctggctgaggtcacttttgttacccacgagcatgacgacgatcgtggcttcagcatggtcatagagctccttcagccatcgctccaccacagcataggtctggtgcttggttaggtcaaacaccaggagggcccccactgcaccacgatagtacgccgaggtgatggctcggtaccgctccaggccagctgtgtcccagatctgagccttgacagcagcggtgcccaacatcacagtgcgggtggagaactcaaccccgatggtggtgcggctgtcgtggctgaactcattgcgcgtgaatcgggagagtagattggtcttccccacacctgattcgccgatcagcaccaccttgaagacaaagttataatcttcctcagttccattccccatcttggctccgcatggagggtgcaggtgtcttcggggacagaggcgacaaatctgtgtgttggctcaatgccctcaaccctcagctctcaaaagatctggtcctgcccctcctctcattgggggtaaggggacttctgcagccagagggattgggggccaactcaaggttaggcagggcctagggaggatcagctctggcaggtgggggtgctctcgtgcc

SEQ ID NO: 59743 - DNA, 1334 bp, Homo sapiens
aatgagactgtatggactgcttacgccaagcttggcacgagggcccggagccgctgccgccgcccccagctcccccgcctcggggagggcaccaggtcactgcagccagaggggtccagaagagagaggaggcactgcctccactacagcaactgcacccacgatgcagagcatcaagtgcgtggtggtgggtgatggggctgtgggcaagacgtgcctgctcatctgctacacaactaacgctttccccaaagagtacatccccaccgtgttcgacaattacagcgcgcagagcgcagttgacgggcgcacagtgaacctgaacctgtgggacactgcgggccaggaggagtatgaccgcctccgtacactctcctaccctcagaccaacgttttcgtcatctgtttctccattgccagtccgccgtcctatgagaacgtgcggcacaagtggcatccagaggtgtgccaccactgccctgatgtgcccatcctgctggtgggcaccaagaaggacctgagagcccagcctgacaccctacggcgcctcaaggagcagggccaggcgcccatcacaccgcagcagggccaggcactggccaagcagatccacgctgtgcgctacctcgaatgctcagccctgcaacaggatggtgtcaaggaagtgttcgccgaggctgtccgggctgtgctcaaccccacgccgatcaagcgtgggcggtcctgcatcctcttgtgaccctggcacttggcttggaggctgcccctgccctccccccaccagttgtgccttggtgccttgtccgcctcagctgtgccttaaggactaattctggcacccctttccagggggttccctgaatgcctttttctctgagtgcctttttctccttaaggaggcctgcagagaaaggggctttgggctctgcccccctctgcttgggaacactgggtattctcatgagctcatccaagccaaggttggacccctccccaagaggccaacccagtgccccctcccattttccgctactgaccagttcatccagctttccacacagttgttgctgcctattgtggtgccgcctcaggttaggggctctcagccatctctaacctctgccctcgctgctcttggaattgcgcccccaagatgctctctcccttctccaatgagggagccacagaatcctgagaaggtgaatgtgccctaacctgctcctctgtgcctaggccttacgcatttgctgactgactcagcccccatgcttctggggacctttcctacccccatcagcatcaataaaacctcctgtctccagtgaaaaaaaaaa

SEQ ID NO: 59744 - DNA, 2821 bp, Homo sapiens
ggggaggggagggggagagaaggggaagggaagaaggtggggaggcagtgggtccctcgggacgactccccattcccttcccttggattcttctccttactcaattttccctagacctaaaaacagtttggcagaagacatgtttaataacattttcatatttaaaaaatacagcaacaattctctatctgtccaccatcttgccttgcccttcctggggctgaggcagacaaaggaaaggtaatgaggttagggcccccaggcgggctaagtgctattggcctgctcctgctcaaagagagccatagccagctgggcacggccccctagcccctccaggttgctgaggcggcagcggtggtagagttcttcactgagccgtgggctgcagtctcgcagggagaacttctgcaccagccctggctctacggcccgaaagaggtggagccctgagaaccggaggaaaacatccatcacctccagcccctccagggcttcctcctcttcctggcctgccagttcacctgccagccgggctcgggccgccaggtagtcagcgttgtagaagcagccctccgcagaagcctgccggtcaaatctcccccctataggagccccccgggaggggtcagcaccaggaggggagggggggtcagggccagcccccgggggccctgggggtgatctctgtggtgacagggcaggattgaactcctggaaatggactggaaagaaggcctgccagccagagatggcattcatgcgacagcggttgaggacttcgggcccaggccttgtccacacggtggtaaggaagaagagagtgtccacagggtgcttcttcgagaccacgtccatgagtcgcacctgggaaggggcctctgctcgcacagcgagccaggccagcctcgtcccagggtaccgtcgctctaactccgctgctgcagccttcaccccaagaaatgggtctggagctccacggccaccttctcgtggcccgtagaccagcaacagggtgagcaatgcatgttctcgtggctccaggacattggctgcaaacgcctcgaggaaagccggggctgcagcagcttcagccaccaggagtggcagcaccagctgcactcgggtggcctcagtgacatagggcataggtaggatttccacccggctcagtggccgcagcaggctgaccctgcgagccagggcccgccggtgcccacgctgtgtcacacattccaacagcaggtccagggtgtactccatgccccgtgctgggtcgaagcgccgatagccgttgagcagtcgctgcttctggaagcgcaggcggggctgatagcgccgattgagctgctccagggcagtctccaacgcatcacccacgtccgccctgctagccccctgtagtgggcacttgggagccccatctgcacaggagaaggtgtgctgctctgtgaagtagtcccagcccagcacctcaaagcgagagtgtggtgtgaaaggagcagggagcccaacgggccagctcagccctgcctccccttcgggggtcagcacggtcaggttccggatctgagcctgcagttgttctatttcactgtaagcccgctccaactccagagcgctgaagcgtttgtggagccggtacatgagggtaccttcggagacagggtgcacggcgaaggcactcaggaaagccgagctcccttccttctcagggtccctatttttggccagttcaaatgagcgatactgctgcccctggtgctgtgagacacagccgacgcccagagagtcaatgaggcagcgtccaagccactcgtcaggacgggcactgagaatgtctcctcggcagccatccagatgtggccgcagacgaagcaggagactccgtgacaacaggtagccaaagcccccatgacagtaccgggcctgctcgcctgcgccaatgaactcctctgcccggcctaagtacaggtcttggttgatgctgaggtggccagcaagggctgccaggcggggggcctgcacatatgtgtcatcctgcatgatgaagaaccagtcgtagtcggccccaaagtgtgtgtgaaggtggcgcagggtctctgacatgagccaggcgggccgctcatccccatgagacaccacctgcatccctgctggagcccgggccccccgctgcccagtgaagtagagtaaccgagggaagtgatgggccaccgtacggttcacagccacggccaaagtggacagtgtagctcgggaggtcaggacagccaccagcaaccgctcacgggagcccagctctgtctggatgtaccgagtcctgagcaccttcttgtagggcttgttggggtccctgtagtaggggacaatccggggtttgaagtcttcatcactttggtctagccgagctctcgaatctggattctgtggccctcctcgctcccctacagcctcgacacagggatcttctccctccccctggatccaggaaacccgcaggaggctcaggctgcaccccagagacagccctaagatgaggggaagcgctggccgcagcagagccaacagggagctcagtcgcatggtggtaggccctgccaggtgggtgccccaggggcacagcctcaaggatcaatggattgatgggcaccaggccagtagtaggctttcagttttaaccagagaacctggggtcaatgaggccaaagacagagcaaggcccgctggcttccaggaccagcatccccaagaagattgtcctgtcttcacaactccttctgcctgctcttcaactgtgaaggtgtcggaactaaccccc

SEQ ID NO: 59745 - DNA, 1613 bp, Homo sapiens
ttttttttttttccatcaacaggtttcaagcagtctttacttgggtttaaaaacagtgcttcatgcatttacaataagttattacagaactctaagtcactgatgcacacacaaaagctaaacccaacttactaactatgcagacctctcctgatctccccaggctgggcagtaattagtaccttacaggtgtgatccatggcccagagaaggcagccactgtcagttacagttggactgctgcatcacagtggaggcagcagagttgaagatccacagagggctgtaatacagcccagaaaagacaatggagagtgaaggctagaaacattgaggaaggggtcaagaagcacttgtacttcctgttatcttttccaatagaatattcctgcaagttacccatcagaaaaaggtgttcagagggtttgaaaaagaagtggttagcccatgccagtgaaggtgacaaaaaacaaaacaacttgatttttggtcatatcagaaaggatggagggaaacacccaagtacatgcatggacacaagtgctccagccaaaggagtgctgttttcaccagccacaaattttctaacagcaacaacaaaaacccacagatgtaagtaacatggaagtggatcagtcctaagccaaataaggattcccacctggggcaaaagctgacttcctaggacatgaactgaacacatcacagtaaaagcccagtagaggctgctgccagttccagctattagtaattatgagggggacaggatgacacctcacacggaccacccctagcaagagggtttgtttcagttctagctgtgagaggaatgtctgcagttcccacaggtgtgccatgctgtgaagcccatggcccctgctcctctctctgcctcccacacacttaacagtacacacagactttgctggcaagtgctgtttgttcctgcactgctatactatacgactgcaggacaatgccatccgctccatggttcattcagcgccttgtcccaaggtagttggtggagagcaggaccacgttgtgcagcaagagagacagctcagcttctttcaggctgcaggaaatctgcagccattctcccagccaagttcgacacctatcttcaccaatatgcgtagaattcaggccacggagataacaagccgattttacttcctgagcagtcagctggccaatccccagctttgccaaagccttgtccagttggtgaatcacagttgtatgagtcttcaaacgatgtctcaacaagggaggaggcaggtaagatgtgagaagcatggcccggctcaaggctttctttcatgaagattgtgtacaggacatagaagcgggggaaatgacgacccaagaaacgatggtatttcccattaatcgcttttgtcttggttaccacataagacatcaagttcttcacatctgcctttggagaaaggtgaagctttgaagaccgaggggccccccaagccaggccagagcgaccaagttgcagcctccgggtgacaaaatgtccaggggtgactgccgagccccacacagccgaccgagcccagcacaccctggagagcgccatcttcacagcgagagaagcg

SEQ ID NO: 59746 - DNA, 954 bp, Homo sapiens
tttcgttgggcccgtccctgaggtatgaaagccccctgctctggctctggttcagtctcaatgggggcactggggctggagggcaggggtgggaggctccaggggaggggttccctcctgctagctgtggcaggagccacttctctggtgaccttgttgctggcggtgcctatcactgtcctggctgtgctggccttagtgccccaggatcagggaggactggtaacggagacggccgaccccggggcacaggcccagcaaggactggggtttcagaagctgccagaggaggagccagaaacagatctcagccccgggctcccagctgcccacctcataggcgctccgctgaaggggcaggggctaggctgggagacgacgaaggaacaggcgtttctgacgagcgggacgcagttctcggacgccgaggggctggcgctcccgcaggacggcctctattacctctactgtctcgtcggctaccggggccgggcgccccctggcggcggggacccccagggccgctcggtcacgctgcgcagctctctgtaccgggcggggggcgcctacgggccgggcactcccgagctgctgctcgagggcgccgagacggtgactccagtgctggacccggccaggagacaagggtacgggcctctctggtacacgagcgtggggttcggcggcctggtgcagctccggaggggcgagagggtgtacgtcaacatcagtcaccccgatatggtggacttcgcgagagggaagaccttctttggggccgtgatggtggggtgagggaatatgagtgcgtggtgcgagtgcgtgaatattgggggcccggacgcccaggaccccatggcagtgggaaaaatgtaggagactgtttggaaattgattttgaacctgatgaaaataaagaatggaaagcttcagtgctgccgaccaaaaaaaaaa

SEQ ID NO: 59747 - DNA, 2044 bp, Homo sapiens
ccgccaggtggaacggcaggtgggttcaggtaccagcctggccgggacccggctgtgggaccaacgcttccggtgagcgacagaggcagctccccagggcctggagacccgtggggcggactctgggatctgagcctatcgccctggcctggagcccccctttgtacctattccccattcccctaccgagctgggcagttagccagcccactccaactctcggaaccatgtttgcagacttggattatgacatcgaagaggataaactcggaatcccgactgtgcctgggaaggtgaccctgcagaaggatgctcagaacctgatcgggatcagcattggaggaggggcccagtactgtccctgcctctatatcgtccaggtatttgacaacaccccagcagccttggacggcacagtggcagctggcgatgagatcaccggtgtcaatggcaggtcaatcaaagggaaaactaaggtggaggtggcgaagatgattcaggaggtgaagggggaggtgaccatccactacaacaagctgcaggcggaccccaagcagggcatgtccctggacattgtgttgaagaaagtcaagcaccggctggtggagaacatgagttcagggaccgcagatgctctgggcctgagccgggccatcctgtgcaatgatgggcttgtcaagaggctagaggagctggagcggaccgctgagctatacaaagggatgacggaacacaccaagaacctcctacgggccttttatgagctgtcgcagactcaccgggcctttggggacgtgttctccgtgatcggggtgcgggagccccagccagctgcgagcgaggcttttgtgaagttcgccgatgcccaccgcagcatcgagaagttcggcattcggcttctgaaaaccatcaagccgatgctgacggatctgaacacgtacctcaacaaagccatcccggacactcgcctcaccatcaagaagtacctggacgtgaagtttgagtacctgtcgtactgcctgaaggtgaaggagatggatgacgaggaatacagctgcattgccctaggcgagcccctttaccgggtgagcaccggcaactatgagtaccgcctgatcctgcgctgccgccaggaggcgcgcgcccgcttctcccagatgcgcaaggatgtgctggagaagatggagctgctggaccagaagcacgtccaggacatcgtgttccagctgcagcgcctcgtgtccaccatgtccaagtactacaacgactgctacgcagtgctgcgggatgccgacgtcttccccatcgaggtagacctggcgcacaccacattggcctatggcctcaaccaggaggagttcacagatggggaggaggaggaggaggaggaagacacggcagctggggagccgtccagggatacacgaggggctgctgggcccttggacaagggtggaagctggtgtgactcctgagtgccccgcggctgtggtgccgggggcagggtgcgtgggaggacggagcctgggagcggggcggggccgccgcgcaagggggcgacgcataaaggcctgctggcttggggcgcctgcctccctgctcctctgtcctcgcacagcgaacctgggctcctgcccaggacaggcaccagggtcatggcctgggacctggacactggcccctccaccctccctcccctcccggctccccggccagagggagagcttggtctctggacctgccttaggaaggagagggagggcaggaaggaaaagaaaggacttggaggtggcaggagtccgagccctgctccttgtgggcgctcacactgcccccggagcctgctgggagtggggccagccgtggacagctgaggttggggtcaatgcctcctgggcacccttgcctcgccccagaccggcccgtccagtccccatcacacctcggcggcctttatttattctgttcccccagctcggccacttctctgaaggagggctgggttctgggcctgtatcgaataaacacaaacctggatggcgca

SEQ ID NO: 59748 - DNA, 1606 bp, Homo sapiens
tcctctgcgtgcgatccccggcgcccgcgcgcgcccacagcgctccgccagagctgccgccgcggactcgccgggagtgggggtctccgctggtgccagcccgcttctggagaccctccgcctcctgccaacccctgctcttccaggtcgggccccggggttctgcggctgttagggacagaggcaaagaagggcaggacggtccggtttcccgtggatgttcccgcccgagaaagacagcaagttgtgtgtgcgcccgggacgcgggagggaaggtagccgccgcccgccagccatggaccatcatctttagtgcagaggatggaaagttgatgcccagtaagactgaagatccattctgcattacggaactgtggattatctgtgggtccctggtgatttcacaccttcattcactcctgcagtccctgaacacttacttggggtcctcattgccctatctggtgaaagatggcatccagcctgacttgtactggagtaatctgggctttgctgtcttttctttgtgctgccacctcctgcgtggggttctttatgccttactggctctggggatcacagctgggcaagcctgtgtccttcggtaccttccggaggtgctcatatcctgtgcatgatgagagtcggcagatgatggtgatggtggaggaatgtgggcgctatgcctccttccagggcatccccagcgcagaatggaggatctgcaccatagtgaccggcctgggttgtggcctcctcctcctggtggcgctcactgccctcatgggttgctgtgtttccgacctcatctccaggacagtgggaagagtggctggaggaattcagtttcttgggggcttgttgattggtgctggctgtgccctctaccccttgggctgggacagtgaggaagtccggcagacttgtggctacacttctggccagtttgacctggggaagtgtgaaatcggctgggcctactactgcacgggagcaggtgccactgccgccatgctgctgtgcacgtggctggcttgcttttcgggcaagaaacagaagcactacccatactgagatggagctaccaagagcagacagaggagaagatgggccaaaggggcttggagaggtcaaaacatccacctaccttcaaaaggtgggatagtagttgtgatccaatacaatgctaataaaatgaaacccgataaaatcagggccatgatataggaaggaaggtttgtaggagatttgtgggggaaaaaaaaaaggagagtatagaatgatggagaaaaatggaccaaaggctaaaaatattgcagggcatcgggtgtttctattccacagagtattgttaatgtacaacacacacacacacacacacacacacacacacacacacacacaacaaatctacatatacaaacaagggtttgggttttagttttttttttttaaggtgaggactcagaaaatccaaagggctagtagaaacagtgtttatgttgggaagcagggttacccccaatagatggtttccctgttaggtccacgggcactccccaaaagcacacaagcacatacagacatatgccttccccacacacgt

SEQ ID NO: 59749 - DNA, 960 bp, Homo sapiens
ttttttttttttaaaattctaataaaataaatattttattaacgaaagtctggaaaatgtgtgcactaaaaagtgactataaatgttaaattaaaaaaccttcaaagaacacatatcacacattcaatttttaaaactttatataaaagctctattataaatacaaagctaaactatctgagtactaacaacacagttcatacaaagaaacttaacagtagtaaaatacagatatataagatgcttatttttggtcctttaggataaaagaactaagttggtttttttcacatggctccaggcacaaaaatagaatataagatggtaactgcaacattcttagtgtttatccttgtaattctttaaatgtcaccagtcataatagcaatgaactcctcttggtttatttctccatcaccatctttgtcaaattcttctatcatagctcgaagttcttcatcactcatgttttcacccaattctctagcaacacgtcgcaaattcctcaagcttattttacctgaatcatcatcatcaaatagtttaaatgccttgagtatttcttcatggggatctctttccaatatccagtctgtcacaacttcattaaaatcttcaaaggtgattttccctgtggcttctctgtcataatctttaagaatcttcagtacatcagctttttttacatcaaaccccaaggctctcattgccacctttaattcatgataatctattgcttcatctttgtctgtatcaaatagttcaaaagcatctttaatttcttgtttctgttcctcagacagttctcttctttttttcctctttgttttgtccactacaagctcacttctcagagctaaactcattatctcttcgcacagagacgttcctctcaagaacgattttaaccccctacccaaggcagcaagacgcccacagccgttcaaccggacgcgtggg

SEQ ID NO: 59750 - DNA, 2410 bp, Homo sapiens
tttcgtgctcagcagacaccaggccttccgggcaggcctggcccaccgtgggcctcagagctgctgctggggcattcagaaccggctctccattggcattgggaccagagaccccgcaagtggcctgtttgcctggacatccacctgtacgtccccaggtttcgggaggcccaggggcgatgccagaccccgcggcgcacctgcccttcttctacggcagcatctcgcgtgccgaggccgaggagcacctgaagctggcgggcatggcggacgggctcttcctgctgcgccagtgcctgcgctcgctgggcggctatgtgctgtcgctcgtgcacgatgtgcgcttccaccactttcccatcgagcgccagctcaacggcacctacgccattgccggcggcaaagcgcactgtggaccggcagagctctgcgagttctactcgcgcgaccccgacgggctgccctgcaacctgcgcaagccgtgcaaccggccgtcgggcctcgagccgcagccgggggtcttcgactgcctgcgagacgccatggtgcgtgactacgtgcgccagacgtggaagctggagggcgaggccctggagcaggccatcatcagccaggccccgcaggtggagaagctcattgctacgacggcccacgagcggatgccctggtaccacagcagcctgacgcgtgaggaggccgagcgcaaactttactctggggcgcagaccgacggcaagttcctgctgaggccgcggaaggagcagggcacatacgccctgtccctcatctatgggaagacggtgtaccactacctcatcagccaagacaaggcgggcaagtactgcattcccgagggcaccaagtttgacacgctctggcagctggtggagtatctgaagctgaaggcggacgggctcatctactgcctgaaggaggcctgccccaacagcagtgccagcaacgcctcaggggctgctgctcccacactcccagcccacccatccacgttgactcatcctcagagacgaatcgacaccctcaactcagatggatacacccctgagccagcacgcataacgtccccagacaaaccgcggccgatgcccatggacacgagcgtgtatgagagcccctacagcgacccagaggagctcaaggacaagaagctcttcctgaagcgcgataacctcctcatagctgacattgaacttggctgcggcaactttggctcagtgcgccagggcgtgtaccgcatgcgcaagaagcagatcgacgtggccatcaaggtgctgaagcagggcacggagaaggcagacacggaagagatgatgcgcgaggcgcagatcatgcaccagctggacaacccctacatcgtgcggctcattggcgtctgccaggccgaggccctcatgctggtcatggagatggctgggggcgggccgctgcacaagttcctggtcggcaagagggaggagatccctgtgagcaatgtggccgagctgctgcaccaggtgtccatggggatgaagtacctggaggagaagaactttgtgcaccgtgacctggcggcccgcaacgtcctgctggttaaccggcactacgccaagatcagcgactttggcctctccaaagcactgggtgccgacgacagctactacactgcccgctcagcagggaagtggccgctcaagtggtacgcacccgaatgcatcaacttccgcaagttctccagccgcagcgatgtctggagctatggggtcaccatgtgggaggccttgtcctacggccagaagccctacaagaagatgaaagggccggaggtcatggccttcatcgagcagggcaagcggatggagtgcccaccagagtgtccacccgaactgtacgcactcatgagtgactgctggatctacaagtgggaggatcgccccgacttcctgaccgtggagcagcgcatgcgagcctgttactacagcctggccagcaaggtggaagggcccccaggcagcacacagaaggctgaggctgcctgtgcctgagctcccgctgcccaggggagccctccacgccggctcttccccaccctcagccccaccccaggtcctgcagtctggctgagccttgcttggttgtctccacacacagctgggctgtggtagggggtgtctcaggccacaccggccttgcattgcctgcctggccccctgtcctctctggctggggagcagggaggtccgggagggtgcggctgtgcagcctgtcctgggctggtggctcccggagggccctgagctgagggcattgcttacacggatgccttcccctgggccctgacattggagcctgggcatcctcaggtggtcaggcgtagatcaccagaataaacccagcttccctcttgaaaaaaaaa

SEQ ID NO: 59751 - DNA, 1828 bp, Homo sapiens
  misc_feature (1)...(1828): n = a,t,c or g
ggcaccaatccaatgtcagtatctgcaggctgaagtacagacagttacactgaaattgcgtatgctctgaggaatgacactaaattcgcttccaggaaaattactcaattttgtaagtaattttcagttttttttctcagggatatttttcaactttcactttaattttctttagttgcttagttgtacattttgagaaggcaaatccattggaacttggggaggcttagaacataaatcagtattagaagtaaagggaacacacagctaaaagttttactttaatcacaaattcacaactagagatatcatttgcatatcttagaacgctaaagacctgttaaaattttttaaccaatcagcaaaaatatgtgccccacagatttctaatgttcataatttagaatttatcacatataatatttattaatagtttatttgcaaaattattattcttaaaacacttctttccaacacatttacaatgttcatgtgttttaaagaaaaaaaccaccctcatttaaaaatgtactactgactttaatgtgtggttataccagtgccaccaaattagaaaagaaaaagaaacatacagctgtattggatatgtagttactactacaaataatgacaacacacgtcctatacaaagatcatattcacgcttttctaccacttctcagtcattgtcagaaccatttggaggtaagaaaaccaatgcatcattgaaaatatggcccaaatgccctaaggcggtataccccatacatcatcacatgcatctgatttggagtcagtccattaaaagtaacagccatatctgaacaacagccttctactacctggttggggtgataagtcattgcctctttaatagaaagcccaacagatttggtattaaatacatcttttccatcagcatcttctgcattttctgcaaatactccagcatatttcaggcaaactgctagctgtttatcttcagatatcttccaaatcatccctccctgttcaggacacttttctgggatattgagaaggctgttaagtcttttcattgattctacacttaagacaattcctccttccatacccacatattcaaggtctccagattttatagtgtggcctagatagaaaggctgtgatggatccttttttaacaaaaaatactttaggttttcaatgatagcaaacgtagtggggcgtgcaaggaagaaccagttgtattggtctctatacttatcaaaggcgtatttgtaagcttttctcatcattaaccacatgtcatttgtgtccatattaattgactcaaacactttaacattttcagaactgaagaactctgctttgtcacagtgtttggtccaagtctcctttactgcagcccaaagactcacatctttgggttttacaaggataatacagtatactcgaaagctcttactgagctccatgcgctcatcctctgaaattttcaagatatcttctttgttaggagcttgtaggtgatgatgctcatggtggtgcattctatttccatgaccaatcctaatgtgtcctagcatagtgatcaaagcacagaaaatgcttccaagcatcacacccttcaaaaaggagctgctttcagaaagcatttttcccgcgtctagaacggcttggggacaggaaagcgcagccgcgcacgggtttcctctcacgttggcgcaccactccgttacgctcctgaccaggccccacgcgtccgcggacgcgtgggtcggccccgtnnttccnnnncnggngaactgtnctgcnccccatttcccggggggagnnnagaccagcg

SEQ ID NO: 59752 - DNA, 1597 bp, Homo sapiens
tcctgaaactgaagctttacgcctgaggtaccagttcgcaattccacgccacgcgtccgggcggcgcgtggcggcgatccccacgtggtggctttctcacgctagccctctttggtcctccttgacgtcccgggcctgtgggcccgctttctgccgagatgccgaaggtcaagtcgggggccatcggccgccgccgcgggcggcaggagcagcgccgggagctgaagagcgctggaggactcatgttcaacacggggattgggcagcacattttgaaaaatcctctcattattaacagcattatcgataaggctgccttaagaccaactgatgtagtgctggaagttggacctggaactggcaacatgactgtaaagttgttagaaaaggcaaaaaaggttgttgcttgtgaacttgacccaaggctagtagctgaacttcacaaaagagttcagggcacgcctgtggccagcaaacttcaagtactggtgggtgatgtgctgaaaacagatttgccattctttgatacttgtgtggcaaatttgccttatcagatctcttcaccttttgtcttcaagctgttgctacatcgaccttttttcaggtgtgctatacttatgtttcaaagagaatttgccctccgactggttgcaaaacctggagataagttatactgcagactctcaattaatacacagctgttggcacgtgtggaccatctaatgaaagtgggaaagaataacttcagaccaccgcccaaggtggaatccagtgttgtaaggatagaacctaagaatccaccaccacccatcaattttcaggaatgggatggtctagtaaggataacctttgttaggaaaaacaagacactctctgctgcatttaaatcaagtgcagtgcaacaactcttggaaaaaaactacagaattcactgttcagtccataatattataataccagaagatttcagcatagcagataaaatacagcaaatcctaaccagcacaggttttagtgacaaacgggcccgttccatggacatagatgacttcatcagattgctacatggattcaacgcagaaggtattcatttttcctaggtatttggaaaacagaaattttcaaggtcaagaaaagaaatgaattttgtattttttgtatttgagaagataatgcttttgctttactgagacattatttacttgactatttttggttcaatactactactgttgtcaccatttatgattctgaattttaaagttggaaagttctaagtatcaaagtttttaatatataatgctggtccaatctattcataataatcttcaagttcaggagccgcagagacgcacaactttacacttatcatttctaacagtttattgtataaagatgttactcttctatttactgttatatactgtaaggccttctttaggcctttagctctgttcctccagtaataaaaaagttaaaatatgcttcactagtcacacattccccataccatttcgtgttattcacattccccgtaccatttcttgttattcacatgtacagtaaaacaattgtttcttaaattaaaaaaaaaaaa

SEQ ID NO: 59753 - DNA, 1352 bp, Homo sapiens
tttttttttttttgtcagaaaactcagaggtcctgataaggcagtgagccagaccccagggagatgtctgtgagtgctgcgggggcagtgaaggcaggaagcaggttccccgcctggaaggggctggggcttccctggagctgcgctcaggcaccaagtctgtgggtctcatggctctagctctgctgctctgtgcagagccccaggatgaccgggaagaacccagggcactggacacatccctggaaagcagcaacctgctgccacaggtaaagcaaacccatgagaggaaacggtcagagccagcaggcatgggacagggaggactgctggcccctcccactgtggcccacaccggcgggttcaggccagtcttggaatgtgaagatggtggagggccagctgctggctggcagggtggcccgccagggtatcctgcttccccttcctcaaggagagcctccatcccgcagccaggccacaggatgcagagctccagagcttcacccggctgctgtagttgccggtacccaggagggctggctctggagggctgggcttggcaggctggggagagcaaggaggtggggaacccccagtctgccggcccggcccctggtcagcacccgcagccccagccttctccgatgtccttgctgttcagctggatgtggtcggggctcttctcgctgaacaaggggcccccgtgccgcatgatgagctccgtggccaccctcaggaaggcctcctccacgttgctcgagtccttggcagacgtctcaatggcacacaggatgtcatagtgctcagccaggctctgtgcctcagccaaggagacctcccgaagctcgctgaggtctgacttgttcccgatcagcagctgcacaatgttggagcccgcatacttcctcacatcctcaatccagtgaggcaccgacaggaaggagctcctcttggtgatgtcgtaggcaaggatggccccattggcactgcggtagtagctctgggtgatggtgcggaaccgctcctggccggccgtgtcccagatctgcagcttgacccgcttgccctggatctccagcgtcttcatggtgaagtcgacgccgatggtgcttccctggcgctccgagaaggcgccggtcttgaagcgctgcaccacgcacgtcttgcccacgcttgcgtcgcccaccagcaccagcttgaacaggaaatcgtactgctcgtccgggtcccccgggcctgggcccggccctgccatggcctagaagaagccgaagggccggcgctctggacgctgggaccggcctgagctcacgcaagccgcgggccgagctccgcccgctccagcccac

SEQ ID NO: 59754 - DNA, 4790 bp, Homo sapiens
ttttttttttttgtttttaaagcctttttatttttttaaaaaaacaaaaacccccaaacaaaaacaaaacctaaattaaaatatttcccattggaggctatttctttttttgtcttttaaaaattttattacacaaatatcacccattcccacgtgtcagaggaaagatgtccttgctctctctaaaaccaatagtggagaacttttggaaaacaaaacaaagtccaactagcttcctccttctctggcccaaaataacctcaatgtgtcaactgagatagcataagacttatccccttaatgcttacatttaatttaaactttttagcacaacattggagattgactctaaatcagcaacaaaaaaatatatatttacaatatttctccgaaaaacaaaaaacacaaccaaaccctttaaacataagtgactttaggagttttatttatggagcagttatttttttaatcaccaagtgattttatattatatatatataaattttcttcctttcctttgtggtttttcgccccggtgcttggaaagatggaggcaggggttctggtcctgcagtctgagggcaggctctcctggcaaggccgtgtctaagagcagattgtaggacatgcgatggactccccaggttcctctgtcccccaacagagacacttctttcctccacatggaccaaccctcacctctaaaaaccatttcccctcacagtcccaaagaaaaggaaaacccagcaagggcatggtccatctgctgccttttctgggctcccttttctgctgaccaatttacgtgcacggtaaaaatgcatgtttttccaaaccccaaaaaacaaacataaaaaccaaaacccaaaagaaaccattggcttggaaatttctgtggatgaaatgtcccaaagtcagaggcactctcccggcacaatccctgctctgaaggggtctctccacctccccttttataaaaagacaacaaaataaaacaaagtaatcttttcagtattttccacaggagcaaccaaagaaaaaggcaggaagcttccaattataggtcattaacgataataaggtttttgctcaatacccagggttctttacagagaagttcccctaactgaggcactctggaataagtcactggcatttcctcaaagtttcaaccccagattattggggcctggagaccaatggaagtgggcagagggtcatgggagcagactgctgtttgtaaggtgcagtcaaaagattcagcagattggaagaaacaaacaaaatgccaccccctaccaggatccagtttcttctaaggccagttaatgccagggtcaaaactggcctaggtggcaaagaggggaccactctgcctctattgctttggaagtggcaagggtgcagttggcgtctctcttctcagtggctcacactttagacccctggtgcctgggctccattccctaactctgtagggcttcaggaagaggaaagcctgagactgggctacaggaagagggccagaaagggacagggatggacgaccaaaaggcggggcggggtggggggaagaggttgtgctatcagtatccttacagagggggagcagagtgcaaatttgcatcaatcatttataagctcttgccataggctgctgctactgagcatctcctcacacacttaaaaatattgacccaaaagaaattccgacctttctttctttctttttttttttaaagtgcaaaaagctctctgctgccctagagagaggatctttggacaggccgttcaatgcaaagtaaaagggggcagctgatggggctcaacaaagggcggtggagcgggagacaccatgctcccctccctccctccctccacacacacgggcagaatacactcagccacacacacagaggcacgtgcacacccccttccatggctgcaggcagagggctggtgactggcttctaagcaggaccccctgactgccctgaaagttcagtgagccactggggctagacacaggcctgggctcagggggctccgctaaaccagaggcctggaggagcctggctgggaggcaggttggggcttggcccagtcctctgccgcctccagcttgggggagataggctgctccctctgaggacgtgcatcctgggaaagccttcttcaggcagaatgaagacacatggaaaagggcagtcagtgggaggcaaaagagagagggggaacaaggagatggtgcctgtctcagaatccacttgggtagcaacgaaatgggtgtgtccctggggtagacagttccagctcctctgaagagcttcaaccccaataagtgcaataaggacctcatagagactagcaagtaagtcgggtaggctggggtgggaaacctaattatgtgaacaagcacgagtgctgggcagaaccaagctcaagggagaggaaaggagggagagcacagttaaggacgtgaggtttgggagatctcaacagcaccagtgtgatcggcacgggtctgggactcctggggctgctggcccctcctgcgcaagccgggagagtgtgatggaggagagacgcgcactggacaccacaagaacctggccatggagacagggccgttttcttccctgggagtttgctcagaaccaggcactgctggggaccatggatggggaggaggggcacagggcccagtgcagatgaaggttgcacaaacaccccaaactgagagcccggcctcctggcaggcgagtaagcgagcaggcgcctcgacagcacagcctgtgctttcccctcagatcaatctgctactcccttttccttaggagggagaggagcaggcagataagcctggtgtccaccaccctctctgccccacctgtagaggaagggctcaagggacaggagagcagagagggagtgtgacgctggcctcagagcccgtgcagggtcgaggagaggctctcctcggtggggagtcaggggaagatcggtttcctgttgaatctgggctgggtgtgtcttagctgatcttctgtatcagcttctcgtcagacaggcagtagaggctgttgatggacaagtctgagatgaagtgctcgcaggcttttcgagtgatctgcttgcatcctcgaaggtcgatcaaggtgacgttggcaatgcgccgtaggtagatcagggtctggtctgtcaatttattgcaacctgccatattgagctctgtgagagagtagcgagtggaagacccgacagcagtgagtagattggaggactgatctgtaaggtggctgcagtgactgaggtcgagtcgagacaggaggggcatgtggcgaattatgaggcgaagcgtggcatctgtgatgtcaaggcctgccagccggaagtcggtcatgttccggagcttgctgcgattgtcctgacctggtttatcagccggtggagtaagcaagtcccgaatttgagggtccttgattcctactgcccaccgaagatcaagggtcctgagaagggggcagctggaggtgctgagggcagagactgcagaccaggagcagcctgctaggaggaggtctttcagtcctggcagcctattgacgagccatgtcagttgctttttagagatgttggtccaactgaggtcaaggctgactggctgcctcttgatgatgccactgagggcctggggcacaatggccttacacctactcaagtcaatttttgtccaaagtctcttgtcgcagcaccatttataccacgtcttgcacactcgcatacattcacaaagttctctgcggctgaggtagcggaagacagacatccagacctcccgctgcatccagctttcgtctccatcctgagcccaactgccccggccattcagcctggctgcacccccctcctctgcactgtcatcttcctcctcctcctcctcctcttcctcctcctctccccccagcccctcctcatccccacgctggggggttcgggctgggcagtgctgcactagcacacggggggaatggcgaaggttggcagaggaggccgtgatggcctgcagcttgggcacaatggatgtcccgtggagctctttggtgggcctctgtagcgtgacagtgaggtacgatccccggatcttggctttctcaacttcagacagctcctttttgccgctgggattgttctccttttcccgtaccatggtgcgctctgtggcctgcagccgcagcaactgccgccgtttgaagcgctcatcgcggctggcactgtggtggtcgctggggccagccccaggggatgaccgagtcaccataccccggggggaaaccgggtcatggatgagctgcagcatggaagtgggtgaatgaggcgggggcgtgagaggctcatcgcagctccgcaggggccgcaggactttggcttgcacagcttcttcgtcactctcttccattttccgcttctgggctttctccgagctgtcctcctggtagcactttggacattcccagcaatttggcaattcttcgttaagcaacccctctccgtccatctggaggcagccaggatgaacaatctcattgcagatacagcattccatgagtttcttctcaaagtcttgtgtctcttcattctgatccacctctccacagagggaacatgtgactgagtgaggcagtctgggctacaagaggacaaagatagaatccaagagaactgactcagatctttatcatttcagtttcccttaaactgaagatgggagatttgggtcctataattct

SEQ ID NO: 59755 - DNA, 1375 bp, Homo sapiens
cagaaaccctcctcccctcccagcctcaggtgcctgcttcagaaaatgaagtagtaagtctgctggcctccgccatcttagtaaagtaacagtcccatgaaacaaagatgcagtcgggcactcactggagagttctgggcctctgcctcttatcagttggtgtttgggggcaagatggtaatgaagaaatgggtggtattacacagacaccatataaagtctccatctctggaaccacagtaatattgacatgccctcagtatcctggatctgaaatactatggcaacacaatgataaaaacataggcggtgatgaggatgataaaaacataggcagtgatgaggatcacctgtcactgaaggaattttcagaattggagcaaagtggttattatgtctgctaccccagaggaagcaaaccagaagatgcgaacttttatctctacctgagggcaagagtgtgtgagaactgcatggagatggatgtgatgtcggtggccacaattgtcatagtggacatctgcatcactgggggcttgctgctgctggtttactactggagcaagaatagaaaggccaaggccaagcctgtgacacgaggagcgggtgctggcggcaggcaaaggggacaaaacaaggagaggccaccacctgttcccaacccagactatgagcccatccggaaaggccagcgggacctgtattctggcctgaatcagagacgcatctgaccctctggagaacactgcctcccgctggcccaggtctcctctccagtccccctgcgactccctgtttcctgggctagtcttggaccccacgagagagaatcgttcctcagcctcatggtgaactcgcgccctccagcctgatcccccgctccctcctccctgccttctctgctggtacccagtcctaaaatattgctgcttcctcttcctttgaagcatcatcagtagtcacaccctcacagctggcctgccctcttgccaggatatttatttgtgctattcactcccttccctttggatgtaacttctccgttcagttccctccttttcttgcatgtaagttgtcccccatcccaaagtattccatctacttttctatcgccgtccccttttgcagccctctctggggatggactgggtaaatgttgacagaggccctgccccgttcacagatcctggccctgagccagccctgtgctcctccctcccccaacactccctaccaaccccctaatcccctactccctccaccccccctccactgtaggccactggatggtcatttggcatctccgtatatgtgctctggctccttcagctgaggagagaaaaaaataaaactgtatttggctgcaaaaaaaaaa

SEQ ID NO: 59756 - DNA, 2696 bp, Homo sapiens
gtggggcgcgggcggtgtcgctgtggggagctggtgctgttctcagatgtttccttccaatgggcttttggtgtaggatgtcggagaaccaagaacaggaggaggtgattacagtgcgtgttcaggacccccgagtgcagaatgagggctcctggaactcttatgtggattataagatattcctccataccaacagcaaagcctttactgccaagacttcctgtgtgcggcgccgctaccgtgagttcgtgtggctgagaaagcagctacagagaaatgctggtttggtgcctgttcctgaacttcctgggaagtcaaccttcttcggcacctcagatgagttcattgagaagcgacgacaaggtctgcagcacttccttgaaaaggtcctgcagagtgtggttctcctgtcagacagccagttgcacctattcctgcaaagccagctctcggtgcctgagatagaagcctgtgtccagggccgaagtaccatgactgtgtctgatgccattcttcgatatgctatgtcaaactgtggctgggcccaggaagagaggcagagctcttctcacctggctaaaggagaccagcctaagagttgctgctttcttccaagatcgggtaggaggagctctccctcaccgcctcccagtgaagaaaaggaccatttagaagtgtgggctccagttgttgactctgaggttccttccttggaaagtcccactctcccacccctctcctcaccattatgctgtgattttggaagacccaaagagggaacctccactcttcagtctgtgaggagggctgtgggaggagatcatgctgtgcctttggaccctggtcagttagaaacagttttggaaaagtgagctctcggttctgctctgagatgggcagagaagatgcgggccaggagacttactcaggtgggactgggcacagggcaggtatgtgggaggctgggctgcttagtgtcttctagtcacctctgcttgggctgattgacagaggtcagtcattacagccccttatgcctcttccatgggaacaaatactgtgcagatgtttgtaagttaaacataagacacaggggctgttgcttttgaacagaaccctatattactctcctgggatctgagtttctgcaggtcatttgtatgtaggaccaggagtatctcctcaggtgaccagttttggggacccgtatgtggcaaattctaagctgccatattgaacatcatcccactgggagtggttatgttgtatccccatcttggctggcttcagtttttgctgtagccctagagcactttgtttgtgggaggctggcctcttgcctacctccttgcatggacagggggatgaatatttactttcccacctccttgctttttctttcactgataccactgaatggaactggtgctgtgactcctgctgctggggatttatgtcccgagaccttagcctggctgagtggagcctgagacctgcacaacagctcatggtcatgcatgagagagaagtggctggccacagccagagggaacagtaacagcccaggggcctttattttgggaaaggctgtccggggctgttactgtctcttctggttataaagcagacatgtggccatcttttccgcagggttagagtgggctcctttctttttggaatccttttcttctcctttggtagcagctccctgcctccagggcttccgccaccagcgtctctgctgtgttgcgcagtgcagtggggtgcaagggctttgtttctgccctgcctgaaagagagggctctggggatggagatgagaaacaacacgctctccttcagacaatgaggcattctgtcctcctgctgcccattcttcatctccactgagagcccagagtctggtaggagccgaagttgccacaggcattctgcattgctctactcttaggtttgtgtgtgtgatccttcccctccctgttcgcccactcctccctcctctggctattcctaaccctgttctgtggggctcttttaataaccagcctatggttgtggggaattgttcatgggcatttagttccagagtggaggggctttggtcctgaaataaaatgcaagtatttaagattgttgttgcaatttgtgtctaacaagctgtagcagagaaggagggagtgagcgctggcagtatttcctttcataaatcatgaatttatcagtgtggaaataatgcttcagaactgtgctctgtagccctcctgcattgtgtgtgcagctcaagttcaccactggaggaaggattgtcttccaaagagctgggatccaactcttctcacagttctgggcgtgaaccttgttaggtatactttacctgatgctgcttccatcctcgcagtctgtctgaggtgccaggtgctgaaagagaaataaagtttgtcaacaggcagatgcaaagccctggctggtattcatccctctttcctgcccgcctcccctgggtctctcctttatatgatgcagcagagcaaggcgaggatagaaaacctacagaggcaaatccaaaatgtcagaagaagttcatttaaaaggggaaaaaaactccatgtgcaaccctcacaaaaacccgacagatgctaagctaatggcatccgctctgccgattggtggggatggctcatgaatattaatgagct

SEQ ID NO: 59757 - DNA, 1014 bp, Homo sapiens
ctggtcgggatgagtggcggagggacagagacccctgtgggttgtgaggccgccccgggcggtggcagcaagaagagggactccctggggactgcgggctcagcgcacctcattatcaaggatcttggagaaattcattcaaggcttttggatcacagaccagttattcaaggtgaaactcgttattttgtaaaagaatttgaagaaaaacgtggtcttcgagaaatgcgagttcttgaaaatttgaagaacatgatccatgaaacaaatgaacatactcttcccaaatgtagagacacaatgcgggacagcctcagccaggttctccagagattgcaagcagctaatgactcagtctgtagactccaacagagggaacaggaacgaaaaaagattcatagtgaccacttagtagctagtgagaaacagcatatgctccagtgggacaacttcatgaaggagcaacccaacaaaagggctgaagtggatgaagagcacagaaaagccatggaaaggcttaaagaacaatatgctgagatggagaaggacctagcgaaattttcaaccttttaagaacttgaaccacaacaatcacaaactaatgagaagatgttcacctctctcctgaaaactattcccaccagaccgtttagcctctgcttcaagcttagcaatatattcagtggcactcttatatcagaagaaagaagtttctactggcattctgattggatatttaaagaagggtgccacatttttccagctttaagtgcctatatatgattatttgaatgaagaggagtaggaaggaaaatggaatcaatatactctttgttagtcagaattgatcatcttttccattgattagctcagagaactgtaggtatagacttcttagaaagataatttcattcatttctatacagggttaacaatagtttattattgtggcttaatgggaaggtatagaagctacctgtcatagcctccttggctgttggaaggatgtataaa

SEQ ID NO: 59758 - DNA, 5705 bp, Homo sapiens
ccgggtacgacccacgcgttcggacacacctttgtcaggacatgtttggaattttagagttgaaagaaacaaggtggagagaaagaaaagtgaacatttttgaaagatcactcagctttaacacaccttggctgggtctggataaaaaaaaagtgagcactgcaaatttctagaagaaaacatcaggagaagaaagagagagggggatttattcaaagttgtttccaattccttcaaaacctcaaaccaggtggctatggtatggatgtaaccaagaaaaacaaacgagatggaactgaagtcactgagagaattgtcactgaaacagtaaccacaagacttacatccttaccaccaaaaggcgggaccagcaatggctatgctaaaacagcctctcttggtggagggagccggctggagaaacaaagcctgactcatggcagcagcggctacataaactcaactggaagcacacgaggccatgcctccacctctagttacaggagggctcactcacctgcctccactctgcccaactccccaggctcaacctttgaaaggaaaactcacgttacccgccatgcgtatgaagggagctccagtggcaactcttctccggagtaccctcggaaggaatttgcatcttcttcaaccagaggacggagtcaaacacgagagagtgaaattcgagttcgactgcagagtgcgtccccatccacccgatggacagaattggatgatgttaagcgtttgctcaaggggagtcgatcggcaagtgtgagccccacccggaattcctccaacacactccccatccccaagaaaggcactgtggagaccaaaattgtgacagcgagctcccagtcggtgtcaggcacctacgatgcaatgatcctggatgccaaccttccctcccatgtgtggtcctccaccctgcccgcggggtcctccatggggacctatcacaacaacatgacaacccagagctcatccctcctcaacaccaatgcctactctgcgggatcagtcttcggagttccaaacaacatggcgtcctgctcacccactttgcaccctggactcagcacatcctcctcagtgtttggcatgcagaacaatctggcccccagcttgaccaccctgtcccatggcaccaccaccacttccacagcatatggggtgaagaaaaacatgccccagagtcctgcggctgtgaacactggcgtttccacctccgccgcctgcaccacaagtgtgcagagcgatgaccttttgcacaaggactgcaagttcctgatcctagagaaagacaacacacctgccaagaaggagatggagctgctcatcatgaccaaggacagcgggaaggtctttacagcctcccccgccagcatcgctgcaacttctttttcagaagacaccctaaaaaaagaaaagcaagctgcctacaatgctgactcaggcctaaaagccgaagctaatgacctgaagactgtgtccacaaagggcaagaccaccactgcagatatccacagctacagcagcagtggtggtggtggcagtggaggaggtggcggtgttggtggcgctggcggcggcccttggggaccagcgccagcctggtgcccctgcggctcctgctgcagctggtggaagtggctgctgggcctgctgctcacctggctgctactcctggggctgctcttcggcctcattgctctggcggaggaggtgaggaagctgaaggcgcgtgtggatgagctggagaggatcaggaggagcatactgccctatggggacagcatggatagaatagaaaaggaccgcctccagggcatggcacccgcggcgggagcagacctggacaaaattgggctgcacagtgacagccaggaggagctctggatgttcgtgaggaagaagctaatgatggaacaggaaaatggaaatctccgaggaagccctggccctaaaggtgacatgggaagtccaggccctaaaggagatcgagggttccctgggactccaggtatccctgggcccttgggccacccaggtccacaaggaccaaagggtcaaaaaggcagcgtgggagatcctggcatggaaggccccatgggccagagagggcgagaaggccccatgggacctcgtggtgaggcagggcctcctggatctggagagaaaggggaaagaggggctgctggtgaaccaggtcctcatggcccacctggtgtcccaggttctgtgggtcccaaaggttccagcggctctcctggcccacagggccctccaggtcctgtaggtctccaagggctccgaggtgaagtaggacttcctggtgtcaaaggtgacaaaggaccaatgggaccaccaggacccaaaggtgaccagggtgagaaaggacctcgaggcctcacaggcgagcctggcatgagaggtttgcctggtgctgttggtgagcccggggctaaaggagcaatgggtcctgctggcccagacggacaccaaggcccaagaggtgaacaaggtcttactgggatgcctggaatccgtggcccaccaggaccttctggagacccaggaaagccaggtctcacaggaccccagggacctcagggacttcccggtacccctggccgaccaggaataaaaggtgaaccaggagctccaggcaagatcgtgacttcggaggggtcatcgatgctcactgtcccaggccccccaggacctcctggagccatgggacccccaggacctccaggtgccccaggccctgccggcccagctggtctcccaggacatcaagaagttcttaatttacaaggtcccccaggcccacccggcccacgtgggccaccagggccttccattccaggcccaccaggaccccgaggcccaccaggggagggtttgccaggcccaccaggcccaccaggatcgttcctgtccaactcagaaaccttcctctccggccccccaggcccacctggccccccaggtcccaagggagaccaaggtcccccaggccccagaggacaccaaggcgagcaaggcctcccaggtttctcaacctcagggtccagttctttcggactcaaccttcagggaccaccaggcccacctggcccccagggaccaaaaggtgacaaaggtgatccgggtgttccaggggctcttggcattcctagtggtccttctgaagggggatcatcaagtaccatgtacgtgtcaggcccgccagggccccctgggccccctgggcctccgggctctatcagcagctctggccaggagattcagcagtacatctctgagtacatgcagagtgacagtattagatcttacctatccggagttcagggtcccccaggcccacctggtcccccaggacctgtcaccaccatcacaggcgagactttcgactactcagagctggcaagccacgttgtgagctacttacggacttcggggtacggtgtcagcttgttctcgtcctccatctcttctgaagacatcctggctgtgctgcagcgggatgacgtgcgtcagtacctacgtcagtacttgatgggccctcggggtccgccagggccaccaggagccagtggagatgggtccctcctgtctttggactatgcagagctgagtagtcgcattctcagctacatgtcgagttctgggatcagcattgggcttcctggtcccccggggccccctggcttgccgggaacctcctatgaggagctcctctccttgctgcgagggtctgaattcagaggcatcgttggacccccaggtcccccgggtccaccagggatcccaggcaatgtgtggtccagcatcagcgtggaggacctctcgtcttacttacatactgccggcttgtcattcatcccaggccctccaggacctcctggtcccccagggcctcgagggcccccgggtgtctcaggagccctggcaacctatgcagctgaaaacagcgacagcttccggagcgagctgatcagctacctcacaagtcctgatgtgcgcagcttcattgttggccccccaggccctcctgggccgcagggaccccctggggacagccgcctcctgtccacggatgcctcccacagtcggggtagcagctcctcctcacacagctcatctgtcaggcggggcagctcctacagctcttccatgagcacaggaggaggtggtgcaggctccctgggtgcaggcggtgcctttggtgaagctgcaggagacaggggtccctatggcactgacatcggcccaggcggaggctatggggcagcagcagaaggcggcatgtatgctggcaatggcggactattgggagctgactttgctggaggtctggattacaatgagctggctgtgagggtgtcagagagcatgcagcgtcagggcctactgcaagggatggcctacactgtccagggcccaccaggccagcctgggccacaggggccacccggcatcagcaaggtcttctctgcctacagcaacgtgactgcggacctcatggacttcttccaaacttatggagccattcaaggaccccctgggcaaaaaggagagatgggcactccaggacccaaaggtgacaggggccctgctgggccaccaggtcatcctgggccacctggccctcgaggacacaagggagaaaaaggagacaaaggtgaccaagtctatgctgggcggagaaggagaagaagtattgctgtcaagccgtgagctagccatggcaggacagctcctggaccaggtctcataatgcatgtggcacttaggtccaaggtctccagagggtgaaagctggagtctgtcaatgtcctactgagacagcacagccaacctagctagcaacatttgttttagtctgaacaatatatacttatagaattcagtcaaagatacacaatctgaaacagcttcatggggtggactctaacagtagttgcaatgttttagaatgagacttacttctctgctatctagatctgaactccttggcttctttacttagttcaagccccagcctaggaaagccagttacataaaagttggctcaggagtcttagagctttacctaaatatgagcccagaaaacggaggatgggggtggggcgccttcctggaggtgacacttgatgggggtgtgttctggttactgttctaaggctgtgccatcagctccttcctcccctgttcattctgcattctctagtcagttggctaagaagtgactcttgcaactaaaaaaattaagaaattcacttcccctctaggaggtgatgatagggtttctaatggttatatgtatatcacattcccatttgcttagaaagtctgattgtagctatgattgtccataggcccatactagagttcatggatatgttatactgaaccaggccagagcaaacagaaaaagaaggttgagggcaatggacaaggaaggaataaagggagaagagggaaaacagaaaacctgatgctggggacacagcatcagctcaagacgtcaccctccattctgcactcagaaaatggcacttgggggactttggcgcattggtcctttaaccacttttcaatgtctaaaaacatttgtttgtggtctataagatgaaacatcatttcaatcgtaaaatttcccattaaagaagtttttttttctaaaaaaa

SEQ ID NO: 59759 - DNA, 797 bp, Homo sapiens
ctactctcgcgggtcctcagcgttctcctgcggaacctttgaacggggtactcgagcccacaggggaagagcagcggaaggggcctttcggaacgatttggaacgaaaggaagtggaagaaacgcggaaccatggccgctgtggttgctgtttgcggtggtctagggaggaagaagttgacacacttggtaacggctgctgtcagccttacacatcccgggactcacacggtgctttggagaagaggttgttcacaacaggtatccagcaatgaggacctgcccatttcaatggaaaatccttataaagaacctcttaagaaatgtatcttgtgtggaaagcatgtagattataagaatgtacagcttttgtcccagtttgtttctccatttactggatgcatttatggaaggcacattacaggtctttgtgggaagaaacagaaagaaatcacaaaagcaattaagagagctcaaataatggggtttatgccagttacatacaaggatcctgcatatctcaaggaccctaaagtttgtaacatcagatatcgggaataaattctatcacgttaccactaataaacttattttacagtaagtggttgtatgatgccaatactgactcaaaccaacctttggatagaaaagtgtttgaggagtgaggtaaagaatgacacttccccttcataccaatgtccattaagcagattgctttattttaaaatgttaacactcatcacatttttatctatgttgaattaaaagtgggttctgtgtgattgtcatttaaaaaaa

SEQ ID NO: 59760 - DNA, 711 bp, Homo sapiens
tgaatcatgtcatttattttaaactaattgtaagacaatgaatataaagttcaaaaaggtgtaagcaggtgatggttttattggcaaacttataggggtagtgtatgaagtcatttcaaataacagattaagttgctttccttacaactaaaagcttcaattactacatttcaactttaatttaacatcacatctacatggggaagctttaatttcaggtctgggagcagctgtaaaatgaaagttaccacatccattctagtccttggatatcagtatattccccttcaccttccaccctattttcattgaaatttccagtatactttgccccatttgggaatgtgtaagtccccagtccatgaaacatattatccttaaattgtccttcatatactgctcctgaaaaatgctcaagtcttccaaaaccattcatcttgtcatctttccagcttcctgtgtagacaatcccattaggagtggtatgaatacctattccatttctctcgtagattccagaagatgttcttgtacagtcaccatctaaacagaggagaaaaacatacttgtctccatttggaaagataaagctgatcttatacacttctgaagttggccgagaggtgttagagagatcttccaaactctgcgactccccctgggcggccagctctgcggccgggagagaactaggcgctaggacagctccag

SEQ ID NO: 59761 - DNA, 879 bp, Homo sapiens
ggcacgagcggcacgagccgggctcggccgacccggcggggatctaggggtgggcgacttcgcgggaccgtggcgcatgtttcctgggagttactgatcatcttctttgaagaaacatgaagttacactatgttgctgtgcttactctagccatcctgatgttcctgacatggcttccagaatcactgagctgtaacaaagcactctgtgctagtgatgtgagcaaatgcctcattcaggagctctgccagtgccggccgggagaaggcaattgctcctgctgtaaggagtgcatgctgtgtcttggggccctttgggacgagtgctgtgactgtgttggtatgtgtaatcctcgaaattatagtgacacacctccaacttcaaagagcacagtggaggagctgcatgaaccgatcccttctctcttccgggcactcacagaaggagatactcagttgaattggaacatcgtttctttccctgttgcagaagaactttcacatcatgagaatctggtttcatttttagaaactgtgaaccagccacaccaccagaatgtgtctgtccccagcaataatgttcacgcgccttattccagtgacaaaggtaactgccaacagttgactttttccattccgccccctcatgtggtctgtccatgtaatctataaaacctatataagaccatcttttggagcagccttttggttttgaatttgtatcatctttgctttcaatatttaattttttcctttttacttatttatatttgctaaaagattacctactttattattactctacaaataaccagcttttgcttttattgcttggcttagttggcttttttaatttgctttttaaaattactgtttttat

SEQ ID NO: 59762 - DNA, 693 bp, Homo sapiens
ttttttttttttaacttttcacttcttttatttgttaaaatagtcacatccatatacatgaaaagatttgaccataatgcattcattgattgtggctcttgccatctcgtggcatccaggatcctggctgaaaggttttaccagtgctgctgggagccactgagggttcttcctttccaaagtatggagcagaggcatggcctttaatttgagtttgaactggtggaggcaggagttcctcactggtctctttactaaggagtttttctttttcataaaaatcttggctttttattttgatttcttctctgtgtttttcattctttagtatttcctccatagtaggtggagtctttcttgttcttctaatccaagcttcccattctgttggaatatcccctgcttcatagtctacttcttttttatttgctgcttctacaattcttttctctcgaatagtttgtcctctccagttcttgtactgcgggatgtagtagtatttgttcccgaattggtccgtgcccacgtgctctttcacttcccttgacagcgatctccacaaggcgcggaacaaatcctgagaccaacccatgccgtccacccagtttccagcgctgccaccagcggcccccgcagtaggggtaatgctccaaccgccgacaaagcccaccgaggcggagaagtcagccgaaa

SEQ ID NO: 59763 - DNA, 577 bp, Homo sapiens
cggccggcactgccgttaggaccgaaggcgcgcgtggcggcccagcagctccagcgaggggtcgcgcagcagcggggtctccccactccccgccgccccctgtgagatcgttctgcatgggctcgggctcagagcccgggcgctgtggaagagattctagaccgggagaacaagcgaatggctgacagcctggcctccaaagtcaccaggctcaaatcgctcgccctggacatcgatagggatgcagaggatcagaaccggtacctggatggcatggactcggatttcacaagcatgaccagcctgcttacagggagcgtgaagcgcttttccacaatggcaaggtccggacaagacaaccggaagcttctatgtggcatggccgtgggtctaattgtggccttcttcatcctctcctacttcttgtccagggcaaggacgtgagccagtgggagctggtgtctgtgggtgccaagggcagccagggtcttccctgcctggtgttttgggctccagaggacttacctacaaaatactcctttgcaattataattgtgggtcaggaatcttcttcctg

SEQ ID NO: 59764 - DNA, 1963 bp, Homo sapiens
tttcgtggcaagatggcggaagggtgagcttgtcgttttgctcctaggcgttggggcctgaattctcccagggttggggtgctgggcgagagtcccggtggggaacgtgagatcagcgggggcgtggactgatctgaaagggcagagtggagtcgcattgtgagggggtgggcaagcggtctgcgaagcctcggcccgcagggtacatctgagcggggaataaaccggatccttgggcgggcaggaatcgcaccgcggtgctgccagatgtgtctgtcttccacagggaggacgtgggatggtggcggagctggctgcagcagagctaccaagcagtcaaagagaagtcctctgaagccttggagtttatgaagcgggacctgacggagtttacccaggtggtgcagcatgacacggcctgtaccatcgcagccacggccagcgtggtcaaggagaagctggctacggaaggctcctcaggagcaacagagaagatgaagaaagggttatctgacttcctaggggtgatctcagacacctttgccccttcgccagacaaaaccatcgactgcgatgtcatcaccctgatgggcacaccgtctggcacagctgagccctatgatggcaccaaggctcgcctctatagcctgcagtcggacccagcaacctactgtaatgaaccagatgggcccccggaattgtttgacgcctggctttcccagttctgcttggaggagaagaagggggagatctcagagctccttgtaggcagcccctccatccgggccctctacaccaagatggttccagcagctgtttcccattcagaattctggcatcggtatttctataaagtccatcagttagagcaggagcaggcccggagggacgccctgaagcagcgggcggaacagagcatctctgaagagcccggctgggaggaggaggaagaggagctcatgggcatttcacccatatctccaaaagaggcaaaggttcctgtggccaaaatttctacattccctgaaggagaacctggcccccagagcccctgtgaagagaatctggtgacttcagttgagcccccagcagaggtgactccatcagagagcagtgagagcatctccctcgtgacacagatcgccaacccggccactgcacctgaggcacgagtgctacccaaggacctgtcccaaaagctgctagaggcatccttggaggaacagggcctggctgtggatgtgggtgagactggaccctcaccccctattcactccaagcccctaacgcctgctggccacaccggcggcccagagcccaggcctccagccagagtagagactctgagggaggaggcgcccacagacttacgggtgtttgagctgaactcggatagtgggaagtctacaccctccaacaatggaaagaaaggctcaagcacggacatcagtgaggactgggagaaagactttgacttggacatgactgaagaggaggtgcagatggcactttccaaagtggatgcctccggggaggtgagtgggcctggtgggtcagagggaagcgagcctaatggtcctgggtgtgagagctctccccagccagcccagctgtcccctcaggagggtccctgctcctgtctgaggtgacaggtggtgggaaaggagctggagcttcctgctcagacccacaacattggtcatcagcaggctgcacttttcctcagttccagggtggatagagggtcaagttcttgaccttagctctgtatcaaaattgcctgagaaactgcttaagaaaacagatgtcatgctgagcgcggtggctcacacctgtaatcccaacactttgggaggccaaggtgggaggattgcttgaggcgaggagttcaagaccagcctggccaatatagtgagaccccatttctgtttttgaaaaaaaaaaaaaaggggcggccctttag

SEQ ID NO: 59765 - DNA, 6769 bp, Homo sapiens
  misc_feature (1)...(6769): n = a,t,c or g
ttttttttttttaccttattatatagaatttgtacaatatatttcttttcgtttgcatattttaacccacagcttaacatcctttttacaggctgaactcactcaggctgatagaatcaaaattctttcaaccaaataagaaaaattcaaaatcgtaaacccgtaagaaaacaaattaaaaacggtgatgaaaatacgtcactcctctcgttaggaacagtgtctggtttgtaccacaaggtatgcctctggaacaaggatttctttacaagcgtaaggcacggtgtttccacctttgctctgcgggcttcgctccctccggagcctggggctccttggaaagcggcggggacgcggcgggctctgggcttcggcaggcgcaccccgggtggccgggaagacagaaggcgggccggggccgaagccggggaagaggcagcccgcgtggtgcgcagccggaactcagggcttggttttcccgtgaaacttgcagcgaagaatcccagaaccaagcaggggcaagtgggcggacaaggtgctcctggggagcccagcgttttattttacagctgaatcttccctaaccgggaagattgaattacaaccggcggcgattgccatagggggaggttaattccggccctaccgcccgctttactcggagtctggggtgtggaggggcgtgggtggcgctatctcgtctaccttccaggttggctgtgagtctgagcacgcagcggggcctccctcccaagcactaagacttgtttcctgtgagtcccctcttgggaaactccttactgggaggcctcctcgggtctgagggatgaagaaggtggggccttctctggggtggtgcaggcagctcccaaagcaaggtaggtttggcaaagagcaaaagatgggaaaagggtttctacggagccagcagcacctgcctattcaggtcccaagccacaggaaccaggccaggcctttccaccagggcaatggcctcagtcctcaggccaccaagttccaggacctgccccatgtgttcccgtctcccttaaatcccaccctccacccgccccgggatggttctaccagaactctggggcttagctgagaacccaattgtagggctgtgaagccccgctgcaccttggagtcctgacccagaaggcgaaagtgctccttaataggaagatgcttccagacctgcaagacttgggcccttgcaatccagatccctgcagaccctgcacagagggatcttcagaggccacggggcacactgggccatggcaatgctgacctggtcaagcttggccttggtggtggggccccttctctggctctggcactgtgtggtgggacgtgcttcggcccagacactgcccctaaaggcatgctccaaccccacgggtcccactaaggccggcacgcagcccacacgccagacttgcttcatgttcccaagcgtggctctggagggagaatcatcatcggcactccagggcaagactaaacccatcaaaagaaaaatgtaaaacagcactgactagaactaatgtcgttattgctacaagtgacagccaaacagccacgcagagtcccagaggtgggtatgacagactaccatgactatcaagcagaaataaaattatgtgggtttttactcttaaaataagatatcctctgatcatcttcacggtacataagctcacgcgtgctcctcacattctgctcctttcacagaatggtcagtccccggtcaatgccctcgagcccctccagggagacagtgtggttctgctctaaaaacgtgaggtggaaactgaaatatgtcaaaacaacaactgaggaactgcggctgtgctgcctggtgcatgagcagacgtacaggggcgcctgccggctgtccccaagggcacttgttctcctcaaggagttctctgggagggtgcggccgtgcagggagctagctcgatgcctggttctgtactggatgcttggggatcactggtggctaggaggggctctcgccagttttggtttggtgtgaaaagcaaagaggtgctcccaggctgggcagccactgggggtcttgctggaaaggtggatctgggtggactgtgcctccctctgaaggcaagtgcaggcagttccagctccacggagacagaaaccagttgagagaggccgcttccaagtcttcccaggcccacggctcctgcagtgacagcctctggagaaggctggtctctgaaccttcttaagggccccctgcccaccctttctgaggcattctgcactgcttggcttattttcaccatgctacagcctgtgcttgtgtccagcctacgcacgggagctcttggagacgtggctgcttggcatcctaactggagtggtcagctcaaggagagctgggcactggcgctacaggagttttcctgaatgaggttagatgtctgctctaaaatccctgtggcagatgaactagtcccatgcacgccccaccaagggctaacactccacattccagaggcgggtggccttgtttgggtagttgatggccaggctgatggcagcaatgttctgcagagcctgtgccgcacagcggagaaggtggtcgtccgtggttagggccagcaggtaatcctgcagcacgccaagctcctgggcacggttctcggtgacgaagaagagctcagtgagggcacgatgcaggggaaggaggatgccgggctgcgtcacgtcctcaaacaggccgtactccatgtgggtaaagagctgccacaggggcttcaacagcgcaaggtcacacaggtcactgtggccgcagcatcgcacaatcctcagaagtaagtggatggcttttaatcgttgatggccagtctggcgacaggccacgcccaccagccattcccaaatttttgccaatgggagatgaggcacgaccctttcttctgacaacatctgcttcaaaatctcgaatcctgtctggaaccgccccaggtgtccggccgtcacggtgaatctgtagccccactcggtgttgctcatgtcggaggtgaagcggtaatacagagtgtctcctggaagttcaaaatctttccacttctgctgagacccgctgaagctgtgtcggtcttgctggaagtcactgctgctggacatggctaactcgtcacagccctcctctgtgttgcactgagagtcgaatttgattgagaggtagatggcaccaggaatgtgaactttatcctcgaagttggtgttgttgttatacgggtgtttcgactccctcacttgcacctccattcctggctcctccatgaactggcatgcagccagggccatggtccccagcatgtcctctcggcagccctggagcactttctgcaggatctggtgggaagcagacagataaggtcagggcctgcaagtggcatcaggaagaagggacagtttacttcaacccaagctccacccaaaggtgctggcatcatcttagacctaggacgagcctctgtgactccaccacccaaaaccaactccaccagccacctctcacttgaccaggctcttggtgtcaatcaggacactgcagtcctttcagaatgatgctacttagaggtggtctgaaagaactaactgaaccaatcataaagggtcctggtccttgaaggagtccccagccaagcaggtggattggcctatggataaataatgaccacacaatgtaatcgatgcctggagtgaggtgcagggttgggagctctaggtggcaagaactgtgggaggacacgcctatgcaagggcctagtagaggcagggtggctccctctgtcccttccgaaagatagatatgctagagcaagcctgccagcacctgcagggctgcaaggccgggaaaagacctcgaggtctggtggtgttctcagatggacaaagcaaggctgagaggccaaatgaacttcctcatggactgcgtgtgtgtgtgtgaaggtgggtgagggacaggatcaaaaaggagctaccgaatgtgcctcaagatttctgcacttggaaactgggaagatggcgacaaagctttctggttcagctggaaatcgcgctcagggcccctgagttcctcactagcccaatccttgggagaggatacagtgaccctacctttgctgcattcacacctgtcagggagctgcacagccacacaggtagcctcgctccaggaagcactcactggaggaagcctgtggggcagaggaagaacctggtgggtgagcacaagctcagtctgcataactaccttctcccactcatgcttttcttccagctgcatgaacatatccaaaatgtaggtcatatgggcagggccactgagctccaggatgtcctcgctcactggcacgtggctaggccactcggcgagcagggatgcaagcacgtggcgggcgtacaggacagctgtggcctcgttcactcggaagaggtagtcccggacagccctcttactcttgcagttcagctccttgtgcaggagggcggcgctcttgctacggcgctgcttggcatagctctgctgcagttcgctctctgtgctggagatcagcttctgggtcacagggttcgattcagcagtggcttggtcacagcgtgcaggccgggacaagcatggcaggataatcatgtctgtatccacagctttggcgctctgttcttccagcctcagactcttactgggctgccaccgctgagccagggaccgtatcctttcatctgtggtgagctcatcaccatcaaacctcttctgaacctccaggaagaaataatcggtctttttcatctgcagttcgtatatggcccggagaatgtgcagaggggcattgagggcatcatgagccatcaagaaacatattctggtgggctcatccaggccctcaagggggtccagctttttctgctctgggtcgccagggctgctgactggccgttccacctcttcctctcggtcccctcgctcatccagctctaggtctccgtgctcagccaaagcgttgatctccttttttgaggagtacagcatgatggacaaaatttccaggtcccggaggagccacgttttactaaagccagtccctttgctgcactttttcaccagcaacttcagcaaatcggtctgaaggaaagtagcacggatctcctcaaaaccgtgagcctttagtgttttatacaatcctttcagggccagggacaggacccaagttgcttctactgcctcgggacaatggctgtccatgctgctttgcagaaggtgactggcgataaaggcaaagtgctgggagtactggctcagctgggcccgagagtcaccacactcttgtcctcctcccttctggaccagctggtagtccttcactgttttcctcttccgagttttgacatcaacaatcacagccctgttcttctcagtaaagtgcttcaagatgatcacattatggggttcattggcattatccatataaacgcagcgggttcccacacagaggacctgggggaagccaaccagcacgagcagggtgaagatgttggtgtgcttcagctggaatggcagctgcttgatgcagtggtctgtgaaggtggcaatgacatcacgccacagtggggcactgttgagtgaccgcaggatctctgccatggagcacgcccagtccaagcccacccggctgtccagacacacagctcccaggctaaagagcaggtgggtggttttccagccatctggcacaatggaactgtcccctgcagcaaacaggttgtgtttggctgagaggactttgatcactgcggcgtctacctctgctggcaaaagacggataattaactggccgagaagacccagggtgagatggtaggtttcattcaggtggcctgcgtttgagatgacaacctgaaacatgagtggaaggacgtgctccaggtctatcaggggaaccgtggggcccgactttaagggaggtaacatggctgctagtaatcccaaaatcctcttctgggaacactcagcaaacacttgctcagggcttggagtaactgctttttcctctatgggcttctgagatgacacttctgaatcttcagcatctggaagtcctgtaggtgggctagcatctgcaggtgaatctgaaatttgggtctggcatgaaggatccttcgataatgatacacctttatctgccttatttctctgcttgaaatctacaggtctgatttcctcatgaacagctctctttccattgcctgcttctgacagctcagcaccctggacagctttcttctctagctgctcctctgacgctccggtgggcacagtgactggtagggcatgatcttctaggctcgagtccccatctggcaatacacccagcaaagctagagctttaaggccttttccctgatgagccttcatcagacagtccccgacgagctgcatgcactggctccgcagggtggtggcactgctgcgcgtctgggggtccagcttctccccatccacatcctctgcactggccaggtgggcgctatagagagccagggcagcaaagagcagccaggagtagttatggatatatggctggatgagcctctgccggtcactgatccgaatggttaccattgggtgggccgtgatgctgtgggtaggcaaatggccgtaggagtatttctcggacgcgtgggtcgncccgggcgtacgggtctctaacgacgggcgtcaaaa

SEQ ID NO: 59766 - DNA, 1389 bp, Homo sapiens
cgatttcgtgtaagatggcagcggacggacagagctcgctccccgcttcatggcggtcggtgaccctcacccacgtcgaatatcctgcaggtgatctctccggccacctccttgcctacctgagcctcagccctgtatttgtcatcgtcggtttcgtgaccctcatcatatttaagcgggagctgcacacgatctccttccttgggggcctggcactgaacgagggggtcaactggctgatcaaaaacgtcatccaggagccacggccctgtggaggcccccacacagcagtgggcaccaagtacgggatgccctccagccattcccagtttatgtggttcttctccgtctattccttccttttcctgtatttaagaatgcaccaaacaaacaacgccaggttcctggacttgctgtggaggcacgtgctctccctgggactcctcgctgtggccttcctagtctcctacagcagggtctacctgctgtaccacacctggagccaggtgctctatggaggcatcgctggaggcctcatggccatcgcctggttcatcttcacccaggaggtcctcaccccgctgttccccaggatagcagcctggcctgtctccgagttcttcctaatccgagacacaagcctcattcccaacgtactctggtttgagtacacggtaacccgggcagaagccaggaacagacaacgcaagctggggacgaaactgcagtgaccagtgggtgtggctgggtccagcctccagatctggcccgcacgatgccttgcaggatggacaggatgacagacagggacgaagcagagacctctacagacccaagtcaccaagtggagcctttttttttcttattttaattttaatgaacaaggtggaccaaagggctgaaccagcccctcaaccaggaccctggggggcctgctgcctgggggccgtggccagagaccctcgctgtgctgctgccagcccctggctgggcagaaagtgccctcggcatgggcacctgggtgtggggtggaggaggagggctcgcgcctctggtctcggggccaggaattccaggtggcgtgagaagtacacactatttattttttggttttgtcagaggcaggcaggattttggagctggaagaatctgctctccggtggctgccctgtgaacagagggctcccggtcagcttcccaggcccttcgccctatgcccagagggcagactgcctctccctgggccggggtgggctgggtgccaggaggatgggagcatacaccacaccctatatgccatcggtggcgttcctgacactctgcctccgcatacgtggctggaggcgggctccatatcgagcacgtgcatggcagctgctgtgatgtgct

SEQ ID NO: 59767 - DNA, 1302 bp, Homo sapiens
ggcctgcgcctccacgtggatttggtagagaaaccccggactgggatcatggcagccgagactcggaacgtggccggagcagaggccccaccgccccagaagcgctactaccggcaacgtgctcactccaaccccatggcggaccacacgctgcgctaccctgtgaagccagaggagatggactggtctgagctatacccagagttcttcgctccactcactcaaaatcagagccacgatgacccaaaggataagaaagaaaagagagctcaggcccaagtggagtttgcagacataggctgtggctatggtggcctgttagtggaactgtcaccgctgttcccagacacacttattctgggtctggagatccgggtgaaggtctcagactatgtacaagaccggattcgggccctacgcgcagctcctgcaggtggcttccagaacatcgcctgtctccgtagcaatgccatgaagcaccttcctaacttcttctacaagggccagctgacaaagatgttcttcctcttccccgacccacatttcaagcggacaaagcacaagtggcgaatcatcagtcccaccctgctagcagaatatgcctacgtgctaagagttggggggctggtgtataccataaccgatgtgctggagctacacgactggatgtgcactcatttcgaagagcacccactgtttgagcgtgtgcctctggaggacctgagtgaagaccccgttgtgggacatctaggcacctcaactgaggaggggaagaaagttctacgtaatggagggaagaatttcccagccatcttccgaagaatacaagatcccgtcctccaggcagtgacctcccaaaccagcctgcctggtcactgactgcttactctaccttagctggacctcgtctcccagggattagagaaaagagcaggagtcctgggtcttcccagttgagactgctggagctgagacacagtactctcttaaagaaggtggggagctgcccagggcagaacccactggtgttcatgactacccctggctcctctcaccttgtccctccactgccaacagaaaacaaagcagctgactgagatggtcaaaggactttggaccataggggatctttggaaggctgtggggtcttgctcttccttagcactcctttctccttgtgagatctctcctcagctggaatgaggaatgtagtccatctaaactgcttgctaggctcaattaccacttctgtttgctttgtggatcctgggataacatgtatatgtgtacacaaaaaaaaaa

SEQ ID NO: 59768 - DNA, 824 bp, Homo sapiens
ttttttttttttaccttggaagaaaatgactttattctaattaactcacaaagaataaaatcataacataacagctagtttaaggaggccacacaaacatttgcccagtcccagattctacagagtagggacacccccacttccatttcaattctgaagcaaggaagctaggaatgacaggagaggtttaactgatggttacactttataccctcactatcaattctatttttatactaaattaacttagttatgagagctgattttccatctctccaggttgaacttcttcattaggccaatccgtttgcaagtcggcactgtttcagcacctcattgaaaccctcacagagcttgatgtcaccctggttctgggcacactccagaaactgtttgatctcatagaggcaaggctgctgctgctgtgctggctgggttccctgaggctcctggtaagtgatgtcaggcctcgcaggctcagcattacttcctccactgaagcccccagtaatggcgtgacccaatgtgtgccccacagcagagcccacagccacgccagctgcagtggttgccatctgggccatcagacctggctgccggggcgcagcagcagaagagccaactgcagatgggggtgccgctgctggtggctgagcgactggtgctggcctgggtgcagctctcatctgaggggcccggctggccggaggggccatgcgggaggtgcggcttcggcttccacgcggcatcctaggtaagcgacggctaggcctccggacgtgggacaaccaccgaagagcctcgtgccgaattcgaatcgatgg

SEQ ID NO: 59769 - DNA, 975 bp, Homo sapiens
aacggaagtagggtgcttttttttgctgccgggagttggtcgagagttgggttcagtcctggcccgttgtggggacggcacgcgggggaaggggaggggacggagaccgaagaacggaggtccttatgtttcttttctttccttaaatcttgcccggcctgaagaggccggaagttgcatctctggacaagtaaactctgagacctgggaatggcgggcgggacccgctcctcccttggggtctagaggagacccccggagatggtccctgatgagcagcgtgatggtggaaagctggactggtctcccgaaaggcgaagccgaggcttcttcctctgaacttttgggccagctgaggggcccacggacatagggcacccacaataggcgtgtgtctgctgtgtgtttgtgttcggccgtcctgcttctctgcttccacacgtacacatgcccctgtgttactttggttcatcttctgtactctgtcagttttctgctggtcagaacatctgtgactgtgacagagctgtccaggattgcagtggataggaatttcttcacatggctcctggagaagtgaccatcacagttcgcctcatccgttcctttgaacatcgcaatttcaaacctgtagtgtatcacggagtgaatttggaccaaactgtaaaggaatttatcgtatttctaaagcaagatgcactaaagattattcatcaagcacataaatcaaagacaaatgaacttgtgttgagtttggaagatgacgaaagactcctgctgaaagaagacagcactctgaaagcagctggaatcgaggaggaggatgagaatgatgtgcattccgatctcttggctgaggacagtaggtgtctgctctccaaatatgcagaatgcaaatggctgttttcagaagccagtgaaactgaaattgcattcttctgtgaagaagattataggaactacaaagctaatccc

SEQ ID NO: 59770 - DNA, 3021 bp, Homo sapiens
  misc_feature (1)...(3021): n = a,t,c or g
tttcgtatgagaggctgtgtgagangctgcagccgccggcagaggagacctcagcatcatctagagcccagcgctggccctgcctccgcctgccccgccgccgccgtcgccgtttctgttcctgctactgtcccacctaaacaactcccgttacacggacaagtgaacaactgtggctgtcctctccttttcttcctcctcttccaactccttctcctcctcccacttcccagccgcagcagaaagcccccaacccaactgacactggcacaactgcaaacggtgtcatccgcacaactttatctcgctcctcgggctcccctaaggcattggacccatcgccgcgtcttttattttttgcaaagttgcatcgctgtacatatttttgtccccgccacctccctctgtctctggagtgccctacagccccgcaaactcctcctggagctgcgccctagtgcccctgctgggcagtggcgttcccccccatcctcccgcgcccagcccctgctgctctgggcagacgatgctgaagatgctctcctttaagctgctgctgctggccgtggctctgggcttctttgaaggagatgctaagtttggggaaagaaacgaagggagcggagcaaggaggagaaggtgcctgaatgggaaccccccgaagcgcctgaaaaggagagacaggaggatgatgtcccagctggagctgctgagtgggggagagatgctgtgcggtggcttctaccctcggctgtcctgctgcctgcggagtgacagcccggggctagggcgcctggagaataagatattttctgttaccaacaacacagaatgtgggaagttactggaggaaatcaaatgtgcactttgctctccacattctcaaagcctgttccactcacctgagagagaagtcttggaaagagacctagtacttcctctgctctgcaaagactattgcaaagaattcttttacacttgccgaggccatattccaggtttccttcaaacaactgcggatgagttttgcttttactatgcaagaaaagatggtgggttgtgctttccagattttccaagaaaacaagtcagaggaccagcatctaactacttggaccagatggaagaatatgacaaagtggaagagatcagcagaaagcacaaacacaactgcttctgtattcaggaggttgtgagtgggctgcggcagcccgttggtgccctgcatagtggggatggctcgcaacgtctcttcattctggaaaaagaaggttatgtgaagatacttacccctgaaggagaaattttcaaggagccttatttggacattcacaaacttgttcaaagtggaataaagggaggagatgaaagaggactgctaagcctcgcattccatcccaattacaagaaaaatggaaagttgtatgtgtcctataccaccaaccaagaacggtgggctatcgggcctcatgaccacattcttagggttgtggaatacacagtatccagaaaaaatccacaccaagttgatttgagaacagccagagtctttcttgaagttgcagaactccacagaaagcatctgggaggacaactgctctttggccctgacggctttttgtacatcattcttggtgatgggatgattacactggatgatatggaagaaatggatgggttaagtgatttcacaggctcagtgctacggctggatgtggacacagacatgtgcaacgtgccttattccataccaaggagcaacccacacttcaacagcaccaaccagccccccgaagtgtttgctcatgggctccacgatccaggcagatgtgctgtggatagacatcccactgatataaacatcaatttaacgatactgtgttcagactccaatggaaaaaacagatcatcagccagaattctacagataataaaggggaaagattatgaaagtgagccatcacttttagaattcaagccattcagtaatggtcctttggttggtggatttgtataccggggctgccagtcagaaagattgtatggaagctacgtgtttggagatcgtaatgggaatttcctaactctccagcaaagtcctgtgacaaagcagtggcaagaaaaaccactctgtctcggcactagtgggtcctgtagaggctacttttccggtcacatcttgggatttggagaagatgaactaggtgaagtttacattttatcaagcagtaaaagtatgacccagactcacaatggaaaactctacaaaattgtagatcccaaaagacctttaatgcctgaggaatgcagagccacggtacaacctgcacagacactgacttcagagtgctccaggctctgtcgaaacggctactgcacccccacgggaaagtgctgctgcagtccaggctgggagggggacttctgcagaactgggtaaccctgaaaaggtttgctcagaacatcctttgctggccaactgcactgactccagaaagagacttctaagtgtaatcagagagcaaagcatatgctgtctgccccctggaagcaagaggaaggaagaatccaagggagtttatatggcggatattccacccaaccaaaatccaaaactgactgttcctttctgttgcactggagttgcttgagcctctgtgtctccccctcaggctgggccactcccatgttgagatcctaccttgaaggaatgggaacatagagcttgggaggccctctgtagagaatgctcctgtgaagcagagatttcaaaggactaaaatcttcattttaaatagagttaattttgcaaagggttgcaattgtttctcatgatctctgcttctctagaaatgtctctcattctctgctgagttcaggtctccaaataactatgggtgtaaaagcctgtttcctacttgcatatttatctttcagatcattttgtaactatctccctccttttttccctcgcttcccttattcagcaaatatttggtggtctcatgctcagtcctggtt

SEQ ID NO: 59771 - DNA, 1625 bp, Homo sapiens
tttcgtggagcagacaagatggcgacgtccgtggggcaccgatgtctgggattactgcacggggtcgcgccgtggcggagcagcctccatccctgtgagatcactgccctgagccaatccctacagcccttacggaagctgccttttagagcctttcgcacagatgccagaaaaatccacactgcccctgcccgaaccatgttcctgctgcgtcccctgcccattctgttggtgacaggcggcgggtatgcagggtaccggcagtatgagaagtacagggagcgagagctggagaagctgggattggagattccacccaaacttgctggtcactgggaggtggctttgtacaagtcagtgccaacgcgcttgctgtcacgggcctggggtcgcctcaatcaggtggagctgccacactggctgcgcaggcccgtctacagcctgtacatctggacgtttggggtgaacatgaaagaggccgctgtggaggacctgcatcactaccgcaacctcagcgagttcttccggcgcaagctgaagccgcaggcccggcctgtctgtggcctgcacagcgtgattagcccatcggatggaaggatcctcaactttgggcaggtgaagaactgtgaggtggagcaggtaaagggggtcacctactccctggagtcgttcctgggcccgcgtatgtgcacagaggacctgcccttcccaccagccgcgtcgtgtgactccttcaagaaccagctggtcacccgggaagggaatgagctctatcactgtgtcatctacctggcccctggggactaccactgcttccactcccccaccgactggactgtgtcccaccggcgccacttcccaggctccctgatgtcagtgaaccctggcatggctcgctggatcaaagagctcttctgccataacgagcgggtggtcctgacgggggactggaaacatggcttcttctcactgacagctgtgggggccaccaacgtgggctccattcgcatctactttgaccgggacctgcacacaaacagcccaaggcacagcaagggctcctacaatgacttcagcttcgtgacgcacaccaatagagagggcgtccccatgcgtaagggcgagcacctgggcgagttcaacctgggctccaccatcgtgctcatcttcgaggcccccaaggacttcaatttccagctgaaaacaggacagaaaatccgctttggggaagccctgggctcgctctagagtctctttcctgattatggctgctaagggatcttttccaaacagagtgagggtcttttcaagagggaggcccatgaggccatccaggtaagggcctgcctcagcgtggttgggagtctgaccaggtaggacttgaatgattcggctaccacctgttccagaggtgcagacaagaggtggcgagagcccccatcatgcccctcaacctatcccgttccttctgcctacaaataaaaagtgcaggctggaaaaaaataaataaactgaaaagaagctgaacacaagaactaaaaacaggaaaccccggggggggggggggttaaaaaagaatgttgggggggccaacattaatccgggagcagacttgtttttttttt

SEQ ID NO: 59772 - DNA, 1383 bp, Homo sapiens
tttcgtgagaaaccgggagggcaggcgcggccgttttgttttatccgggccgcttcccggcgggaggcgggctgctaatgggaagcgggaggaggaggccgggccgcgggctggttctatcacccccttgggagcccagctcttcacctagctctccggcgcttttcaaaatctgcagttaacaacaaaaatcgagcaacgccacgtcgcacaaacaggacaggagggggcgagggagataatagtagcagaatttcacaaaaaaatcaaagaggcatttgaagtctttgaccatgagtcgaataatacagtggatgtgagagagattggaacaattatcaggtcattaggatgctgtcctacggaaggagagctgcatgatctgattgcagaggtagaggaagaagaacctactggatacattcgattcgaaaaatttcttccggtgatgacagaaatactactagaaagaaaatacagaccaattccagaagatgtccttcttcgagcttttgaggttttagattcagctaaacgtgggtttcttactaaggacgagctgatcaagtatatgactgaagaaggataacctgagattttcccaaggtaaaatccaaatagagacctgatgtgccactggctcggccgtgcatgctagaatcaccagccagagatgaggatgaaccgcgtgccttcaggacagggcggagacggaggaagaaaggagtgtggtgatcctcggaacatcagcagacaggctgttgatgataggaacacattgcagcggggaaggaggatggctgagatatgaaatacccttcaaggtggacgcatacccaggggcatgtcattcggtggcaggggccagcacggacatgcagcactgaggcgtgtgctagcgcccagtgcgtcgacccaggcacggacttgtttggagcatacaggacagctctgcgttaagacctgtaagccattaaagaagtacagtctggtgaatgaaccctaatctcttgatgatcaagtgatgacatcatattcctgtctccgagggagacaccctctttgcacagaaggcagtagaggaagcttgcttcgagattgcctaccttccccagcgcccacctttcgagggttttttttcaaaagtttcgggattgatgtttcaacttcacatcttgtctcaaggcaatcctctctgtttagtctcatagagttggctttgtggaatgtaattcatttttatctttagcacaaatttgtctgtttcttttaaggccaccagaaagcacaacatagactccccacagaaatctcattttatctcctaagttgcagaataaaaagtaccttgtttgcaaagggaacattttcctttaaaaaatt

SEQ ID NO: 59773 - DNA, 1855 bp, Homo sapiens
ccggctcggtgatgtgactccccacccccagccgggtgctccgagccatggccgacaccatcttcggcagcgggaatgatcagtgggtttgccccaatgaccggcagcttgcccttcgagccaagctgcagacgggctggtccgtgcacacctaccagacggagaagcagaggaggaagcagcacctcagcccggcggaggtggaggccatcctgcaggtcatccagagggcagagcggctcgacgtcctggagcagcagagaatcgggcggctggtggagcggctggagaccatgaggcggaatgtgatggggaacggcctgtcccagtgtctgctctgcggggaggtgctgggcttcctgggcagctcgtcggtgttctgcaaagactgcaggaagaaagtctgcaccaaatgtgggatcgaggcctcccctggccagaagcggcccctgtggctgtgtaagatctgcagtgagcaaagagaggtctggaagaggtcgggggcctggttctacaaagggctccccaagtatatcttgcccctgaagacccctggccgagctgatgacccccacttccgacctttgcccacggaaccggcagagcgagagcccagaagctctgagaccagccgcatctacacgtgggcccgaggaagagtggtttccagtgacagtgacagtgactcggatcttagctcctccagcctagaggacagactcccatccactggggtcagggaccggaaaggcgacaaaccctggaaggagtcaggtggcagcgtggaggcccccaggatggggttcacccacccgccgggccacctctctgggtgccagagcagcctggccagtggtgagacggggacaggctctgctgacccgccagggggaccccgccccgggctgacccgaagggccccggtaaaagacacacctggacgagcccccgctgctgacgcagctccagcaggcccctccagctgcctgggctgaggtgtctggtgcctggaacagacttccctgtggaggattcctgccagaccctgcccggctcctccctgaccggtccttgtgccctcaccagacaccctgttggccatgactcaacaaaccagtgttgggagccgtctgcctccccagctcagtgcctttctgcaccccttctctcctggggagctgtctgcatccgccaccccctccaaccactgccctcagcccccgaccttatttattaccctcccctcccacacccccaatctacctggtgatgattttaagtttgcgcgtgtcttgggttgggctggggggtttcccacatgcagtgtcagaggggccgcccggtggggctatctccgttgctatattaatggcaagactaaatgaaacctagggcacggcctccgaagctgcgtgtggccccttagaggtgagcatcagagccagagcagtgagggggagactcacccaccctctccctctcccttcagctctgggaggcaggcgcagtgcccccctcccgtgggctggcccaggaccgcgggtgaaacctgggtctgtttagtttctttggtttttgtatgtttgtttgtttttgacacagtctcgctttgttgcccaggctggggtgcagtggcacgatcgcggctcactgcaacctccacctcccgggctcaagcgattctctcacctcagcctcctgagtaggtgggattacagatgcccgccaccacacccagttaatttttgtatttttagaagagatggggtttctccatgttggccaggctggtcttgaactcctggtctcaagtgatccgcccgcctcggcctcccaaagtgctgggattacaggg

SEQ ID NO: 59774 - DNA, 1417 bp, Homo sapiens
tttttttttttttatttgggttttttttctcttaaaaagatttattatcaaaaagtttgctccctttaaatactgagccaattcatcaatgcagctccattctttttaggattattagggcccaaataatttcagactaaaacaagaaataaaaaactggactataggttcagtaacatattcacagacatgtcagtgtgcactcaggaacactggtttcatttcttgattggaatgcttatcaccataaaatcttctgctagagtcacttcttggagatctaacactgattcagcttgcttttttagttctgcaatgccatctgtttctccttctctggccaaggcaactggtttgtacctctgactgaagtgagtcagaaccagcctctttgcacggcacaactttgcaaatgttgctgccatctgtggtgtgctgtggccatgctcctttgctttgtccatctgggcatcatccagggttgcttcgtggatcaacaggtctgcttcaaagcacagttttactcctccatcacccacaaccccagagcagtcacccaatatgcagatttttcttccaacaataggcttttttaagacatcttggggagaaattgtaaccccattttccagaacaacagaaattccatttttcagcttcccataggcaggacctggtggaacaccaaggtctttaagtttctgtgcattgagtttacctgggcgtttcttttccacgactgaaaacccaaatgagggaattctgtgaaagaggcgaaatgcttttacaacaaattgttcatcatcaaacagaaggtatgagttttcttctgagtctaacaggatagttcttccttgttcctctttgggaggactgtctgctctattcacatgcgcaaattcttttagttcttctgcaggacattgatctgctgtaggaaccagttcatgaaccacataatggaagaccagctccgtgtgagagagttccatggttcgccagataaagtcccgaagccctacagggccatagatttcaataggctgtttggacaccatggagccactctgcaggctgattgtgcagaggagcccaggaaggccaaagaaatggtctccatgaaggtgtgtgatgaagatcttggtaattctccctgctttaagttggcttttcataagctgtgtctgtgttccctccccacagtcaaagagccagcactcgccttcacaccgaaggaccacagcagaggcaccccgggttggagatgggtatgctgcacccgtccccaggaatgtcacatccatagacatcttccacccctctccccgaggcccgcgccaggagccgagggaggcgcaggcccgcaccctggcccagctgtccgcggggctacaatgcgcccgggcggaagtgcgcc

SEQ ID NO: 59775 - DNA, 2208 bp, Homo sapiens
ggcacgagggaagcagcagccaggagggcggggccgcgtatggcccactggccagggagggcgccgcgcggaggcgcggggcgtgtctcctgtcaaaagccatgctcggcaggtctgggtaccgggcgctgcccctgggtgattttgaccgcttccagcagtcgagcttcggctttctgggctcgcagaagggctgcttgtccccggagcggggcggcgtggggacaggggccgatgtaccccagagctggccctcctgcctctgtcatggcctcatcagtttcctggggttcttgctgctgttggtcaccttccccatttctggctggtttgccctgaagattgtgcccacctacgagcggatgattgtgttccgcctgggccggatccgcaccccccagggacctggcatggttctgctcttgcccttcattgactcctttcagagggtggatctgaggacacgagccttcaacgtccctccctgcaagctggcctctaaggacggggctgtgctgtccgtgggagccgatgtccagtttcgcatctgggacccggtgctgtcggtgatgactgtgaaagacctgaacacagccacacgcatgacagcccagaacgccatgaccaaggccctgctcaagaggccgctgcgggagatccagatggagaagctcaagatcagcgaccagcttctgctggagatcaacgatgtgaccagggcctgggggctggaggtagaccgcgtggagctggcggtggaggccgtgctccagccgccccaggacagcccagctgggcccaacctggacagcaccctccagcagctggccctgcacttcctgggaggaagcatgaactcaatggcaggaggtgccccgtccccggggccagcagacaccgtggagatggtgagtgaagttgagccacctgcccctcaagttggtgccaggtccagtccgaagcagcctctggcggaggggctactgactgctctacagcccttcctgtctgaggccctggtcagccaagtcggggcctgctaccagttcaatgtcgtcctgcccagcggcacccaaagcgcctacttcctggacctcactacaggacgaggaagagtgggacacggggtgcctgatggcatccctgatgtggtggtggagatggccgaggcagacctgcgggccctgctatgcagagagctgcggcccctgggggcctacatgagtggacggctgaaggtgaagggcgacctggctatggccatgaagctggaggctgtcctcagggccttgaagtagcagccttggctgactttccagagcccagtcccaagcctggcaccaagcctgaggggcctcttggaggaggaggtgttcatctgcaccacagagagttgaggccctaacaaatttcaggcccagccaagagcccatgaatggaggctgcaggaggctgagtccggctgccatgcacgtctcccctacagtggttctctggacaaggctttgtccatcccggtccccagctgagtgcccagcgctgagctgggtgcacggtgtgattccaggaggagagccaggcctgccctgccctgctggcttcctgactggagagacaggacccacagaaacagcctgacagcagctggtttggtccttgtgtgagggaccaagcatgtggcccaggctctaagctctgcggggattggagagggatggggagggaagggaaggcagctccaagaagaggtccctgtggcgaagttacctggggatcctggctggcccaccttcctggctgcagtccaggcccgtgctggcgggattgggcatgggaaggagcagggcctgctgcttccctggcgctgctcccaaagatttctgactcatctgccagctccgtcctgcatgcctggcgagctggggcccagggcagcatgaaggagagccctgcgttctgtgcttcttaccagaggtttgcaagcctcagacaaataaatgtggtgtttacaatgtaaaaaaaaaaaaaagggggggccgttttaaaggatccaattttacttccgcgggcttgcaaggtaatattttttttttggggcccccaaaattaaattccccgggccggggtttaacaacgggggggggggaaaacccggggggttccccaatttaatcgctttggagaaaatccccttttccccgggggggg

SEQ ID NO: 59776 - DNA, 1359 bp, Homo sapiens
ttttttttttttcttgaggcagggtcttactctgttgcccgggctggagtgcagtgggacgatctcagctcactgcaacctccacctccagggttcaagcaattcttgtgcttcagcttctgcatagctgggatgcccagctaatttttgtattttttttagtatagattttggccaggctggtctcaaactcctgacctcaagcaatcagcctgccttggcctcccaaagtactgggattacaatctgatttagttttacaaatgactaacaaacttcaaaaaacattcatagagtcaataatgtattatacatcttagatttatacatttcatatatgcttttaaagcttcaattaacagttcaatacaaaatttaaaaacaaatatatgcagcagtggttctcaggcacagaactgaggaggagactggagcaagtcttttccctaggcatacattacccgtggatactatgaaccatgagagtggtatgtttccttctgacctagctgcctttttgattgaattttgttacaatgaacagctttaataggtatgatattgctaactggaaacaatgagatttaaaataaattgataacctgtattttcttgaagtctttaagacctaaaatgattacttttctcctaatagagctccagaatcatccaatgaaaataatattgtccataaagcatctagagtatctgcctaagaaccactgcccagggttattcaatgtcttcaggcctcacaggatgaggtaatggtatgatggatttcttctcagtatccctggaaagtgctttcctcatatcataagcgtcctcatcaggctccccgttgctggccgaatagtactctatgaccgtcctatatacactgtagcccaactgcttgtacatgttaactgcaacttggttagatactcttacaaagagatccacaaaaaatccaccctttctttctgaaatctcctctagtaactccataagtttagcagccaaaccaaggcgtcgaaattctggggcaacagacagagctgtgacgtgcccgtgccattcttccctagctactgagccttctgctttacccataatataacccattaattctccaccaggtgcctctgcaacaatgaaatactctggccagtgggcgaggtattgtaggtagaaaggaatcccataagtttctgtaagtggatccaagttaatgttgttgaagcggaacaggtcgtcgcaggtaaaggcccgtagcgtggtcatcgcgccgccgccgcttccgaagaccgttcgccaagaccccgcgcccgccctgccggaagtctcccggagcgtggccgccgcggaaccgag

SEQ ID NO: 59777 - DNA, 2560 bp, Homo sapiens
ctcgagagaaacactaggctcagtcctctgatgcccctcatctctagatagaaaacaaacattccagcagaaggaataggagtgatgagactgctgtacctgagttcagtaagatttcattttttctggataaagtactttccaaatgcaagatggcacatctcttaagttctgagagccccactaacccatcctctaccaagattgcttatctagcgcaggacaaatgtgaggaggcagcccacagcccagcacatgtggggcaccatgttagcgtgtttaggctgagcattgggtttctgctggacaagtgtgtcattaactccctgaaacaggaaaagccttatgggcataaacttggctcctgattaacttgactgagtcattcctgtcaacatgctcttctagtgaacctccaatgcatctggcatctttgacagttgccacttcctttgtgcatagagccaggaagagcaatgtggacactaccagaagtccaacattttcctgggccttccgatctctcatgggccccataccccacaactcttttcctgtattctcactccctctgtcagtctttcttctttgaattcctccttcctcagtggccctcttctaatccctccaacaccctaacccacatagcctcttcctttgtgtatcctttagcctctcccagatccctgtcaggttgatccttctccaccttactctggaccctcttctaagcttctttgtgttcctctctactcagtttattctattttcctctaagccccaagatctcactctccctctgttagtcttccttctgagttggatgtttccttctcataggtcatcccctcccccaaggagcccctccctttctggcccttttccacctcttcctaagcagtcacctcctcctctctccccaagacagccaatctcttgttccttcccctgccccctccagaccagaccagctaaatccagtgccatttttaaatgactgattatgattctagctgaactttattcacagccgaaattgacagctgttcgttccttccatgccccatctaccaaacacacccgaacttttcaacaagacaaagggcttacagacagcatgtcatgtattcacaaatttgtattttttagagcaaaacaacagttaatgctggcaaagatgtttagttatcagggattccataagctttcaatacactgaaaggcaacattttttgcatgtctacaaattatacatttgtttccacacatgtgccaaattttaccctaacagttaggactttttcaccaaatcgtagacatagatatggaaatcatcatcaaacttgatgaaatacacagagggtttggcttccacttggtgaatgaccatgccgatccttttggagccatcttctttggtatattccacatgcttacctattaggccatctacaactcctcctggctccctctctgttggaggagactcactggattctggcatgatgcggaggtcaccttccttataatcatctagaagctggtacatgtacaagacaggatctttctcataggtaatataaaaccaggctttcatgataggtgcttgagctaagaccatccccctccattcatccttagaaccatgctctccctcaaacatatgttccactgctttgccaattatggtatttgcaaggttggcatcactaatgtgagatgatgccaccctgtcagaaagaattttaagagacaaaaccctttcatctctgtgaagttccagtccatagacacagtcaattccatcatatttcaccagataaagagagggatttataggcacctgatccagaacggttcctttccactgcgtgatgggctcatctccttccttccatccatgagaaattctgcagcccacgatgttcctgcagggttgggatgaaggtctgcctctctgcttcttttgggagacttttttctttgtcatgtttgcagacccagtggcccgtcctgcagctgccctggtttgttgcccttcggcttcctgtgcgttgggggtcttcatgcctgctgggggaggagagaggatagagaggcatacccagtgtgccacaaggcaaacttttccctatagccatgtctggatgtagtctgcgctagtgcctaagtttcccctaggagcctggaagcaatgctggaaatcctggctgcatgcccgcagtgctctccctcttaagttcctttgggctgtggggaagggctggggtggtgcagtagagctgtctggggttaggaactctgcagaagtggctgggccacctcctcctagctcagagcccactgccctcccggaaccccttgctaccactggcgtccacttccaatccccttgcaaagaggccttgaccggcacccactgccctccttccctgagcgtcccagctgctgtccacaacaccccctgcctaccctaaccacttctatggtacccaccgcccttgcttcccggcgctcaccttcaaatccttgtatggctcccgttcctacccccttttca

SEQ ID NO: 59778 - DNA, 3369 bp, Homo sapiens
tttcgtctggaaggcgctgctcttccggttctctgtcccggttcctggggttgcacagacagaccctgtaaacatgtcagggttcagtccggaactcatcgactacttggaagggaaaatctcctttgaggagttcgaacggcggagagaagagagaaaaacccgcgagaagaaaagtcttcaggaaaaaggcaagttatcagctgaagaaaatcccgatgactctgaagttccatcatcatcaggaattaactctaccaaatcccaagacaaagatgtcaatgaaggagaaacatcagatggagtgaggaagtcagttcacaaggtctttgcttccatgcttggagagaatgaagatgatgaggaggaagaggaagaagaggaggaggaggaggaggaggaagaaacacctgagcaacccactgcgggcgatgtatttgtattggagatggttctcaatcgtgaaaccaagaaaatgatgaaagagaaaaggcctcggagtaaacttcccagagctctgagaggtctcatgggtgaagccaacattcgttttgctcgaggagaacgtgaagaggcgatattgatgtgcatggaaatcataagacaagctcctctggcttatgagccattctctactctagccatgatatatgaggaccaaggtgacatggaaaaatcattgcagtttgagttgattgctgcgcatttaaatcccagtgacacagaagaatgggttagactggcagaaatgtctctggaacaagacaatattaagcaggctattttttgctatacaaaagctcttaaatatgaacctactaatgtccgttatctgtgggagcgatcaagcctttatgaacagatgggtgatcataaaatggccatggatggttataggcgtattttaaaccttttgtctccatctgatggcgaacgttttatgcagctggctagagatatggcaaagagttactatgaagccaatgatgttacttctgctattaacataattgatgaagctttctcaaaacaccagggcctagtctccatggaagatgttaacatagcagctgaactatatatttctaacaaacagtatgacaaagctttggagataattacagatttttctggaattgtgctggaaaaaaaaacttcagaagaaggcacctcagaagagaataaagctcctgagaatgttacctgcactatacctgatggcgtgccaatagatatcacagtgaagttgatggtctgccttgtacatctcaacattcttgaaccacttaatcctctcttgacaacactagtagaacagaatcctgaagatatgggagacctatacctagatgttgctgaagcttttctggatgttggtgaatataattctgcacttcccctcctcagtgctcttgtttgctctgaaagatacaaccttgcagtagtttggcttcgtcatgcagaatgtttaaaggccttaggctatatggagcgagctgctgaaagctatggcaaggtggttgatctggccccactccatttggatgcaaggatttcactttctacccttcagcagcagctgggccagcctgagaaagctctggaagctctggaaccaatgtatgatccagatactttagcacaggatgcaaatgctgcacagcaggaactgaagttattgcttcatcgttctactctgttgttttcacaaggcaaaatgtatggttatgtggataccttacttactatgttagccatgcttttaaaggtagcaatgaatcgagcccaagtttgtttgatatccagttccaagtctggagagaggcatctttatcttattaaagtatcgagagacaaaatatcagacagcaatgaccaagagtcagcaaattgtgatgcaaaagcaatatttgctgtgctcacaagcgtcttgacaaaggatgactggtggaatcttctgttgaaggccatatactccttatgtgacctatcccgatttcaagaggctgagttgcttgtagattcctcattggaatattactcattttatgatgacaggcaaaaacgcaaagaactagaatactttggtctgtctgctgcaattctggacaaaaatttcagaaaggcatacaactatatcaggataatggtaatggaaaatgtcaataaaccccagctctggaacattttcaatcaagttaccatgcactcccaagatgtacgacatcatcgcttctgtctccgtttgatgctgaaaaacccagaaaatcatgccctatgtgtcttaaatggacacaatgcatttgtatctggtagttttaagcatgcgcttggacagtatgtgcaagcctttcgcactcaccctgacgaacctctctatagcttctgtataggcctaacctttattcatatggcatctcagaagtatgtgttacggagacatgctcttattgtacagggcttttcctttcttaatcgatacctcagtttacgtgggccctgccaggaatcattctacaatttgggccgtggccttcatcagttggggctgattcatcttgcaatccactattatcagaaggccctggagctccctccacttgtggtagagggtatagaacttgaccagttagacttacgaagagatattgcctacaacttgtctctcatctatcagagcagtgggaataccggaatggctcaaacgcttttgtatacctattgttctatataaagcaccgcaactgagaacagagcaatggcagctgctgtgtgaggaccagtgtcttctgtctcagggcttattatttgtaactccaaaatagaaatgacaatttcagaattacctaacaaacagtgtatttatttttaatatgtgataatgatcttgtggtatatatgcaaaattattcctacaaaaatttgtatattggtctgtcattttcctttcacattctatagtgaattgttcccaatgttgaaatggacgtgtaagcctttgagctagcttggagtcgaatacactatttttcactcacaccatttattcatctttgtatttaatacctatagctctgtcaatatcacatgaggcagtttttcaaatacgtataaacagaggttgcttattattaaaggaaagacaaagtgggactctttatgatgtcatgacccatgataactaagcacctaagaaaattatttaaactagttatcgtggtaggcagaaagacaaataatttagttttttacttttcaccagcatgtatcttagctacctaaactgaaacatgggaggctgggcttaattcaaaatatattgctccaaggcaaataaaaaaatgctttatctaaaagtcgacgcggccg

SEQ ID NO: 59779 - DNA, 3722 bp, Homo sapiens
tttcgtcccgccccccttcgtagaagcctatggctggggttgcaggaagaactggaactggtctggccatagggggaagcggcgcgttaaatccgccccctctccataccctactttcaaggggtgggcggtagaggggaggttggggttggagcagcggcgagggggcccctcccttgcacctccccccaccggacttggtcgcgcccgaagtgtaacactttctctttgtcggaggagctcctctgtttcctgtgcagtagctcccgttgcggcggcacccgtggcagccctggcggacgcaggagcgatggcagcgaccgatatagctcgccaggtgggtgaaggttgccgaactgtccccctggctggacatgtggggtttgacagcttgcctgaccagctggtgaataagtccgtcagccagggcttctgcttcaacatcctgtgcgtgggagagacaggtttgggcaagtccaccctcatggacaccctgttcaacaccaaattcgaaggggagccagccacccacacacagccgggtgtccagctccagtctaatacctatgacctccaagagagcaacgtgaggctaaagctcacgatcgttagcacagttggctttggggaccagatcaacaaagaggacagctacaagcctatcgtggaattcatcgatgcacaattcgaggcctacctgcaggaagagctaaagatccgaagagtgctacacacctaccatgactcccgaatccatgtctgcttgtatttcattgcccccacgggtcattccctgaagtctctggacctagtgactatgaagaagctggacagtaaggtgaacatcatccccatcattgccaaagcagatgccatttcgaagagtgagctaacaaagttcaaaatcaaaatcaccagcgagcttgtcagcaacggagtccagatctatcagtttcctacagatgatgagtcggtggcagagatcaatggaaccatgaacgcccacctgccgtttgctgtcattggcagcacagaagaactgaagataggcaacaagatgatgagggcgcggcagtatccttggggcactgtgcaggttgaaaacgaggcccactgcgactttgtgaagctgcgggagatgctgattcgggtcaacatggaggatctgcgggagcagacccacacccggcactatgagctgtatcgccgctgtaagctggaggagatgggcttcaaggacaccgaccctgacagcaaacccttcagtttacaggagacatatgaggccaaaaggaacgagttcctaggggaactccagaaaaaagaagaggagatgagacagatgttcgtccagcgagtcaaagagaaagaagcggagctcaaagaggcagagaaagagctgcacgagaagtttgaccgtctgaagaaactgcaccaggacgagaagaagaaactggaggataagaagaaatccctggatgatgaagtgaatgctttcaagcaaagaaagacggcggctgagctgctccagtcccagggctcccaggctggaggctcacagactctgaagagagacaaagagaagaaaaagtaaactctgctgtttgctgcatgctgcatgagacccagggtcctgtttgggcttcctgtagacacccttttcctgcgcaacagagctgggcctccctttctctaatttcccccttaacatgcctggggggcatacaatccaacccgcgccctctcctctcttcctgccaaggtttatagaaacctgagaatctgagggtgatgtctggccgctggtcaagaagccaacagtcatgtggctcgcagatgcatcctgcatcccagtccccctcccagcacccccagccatcccccctgtcttcccccacatctttgccagaggtgtgacatggtcagggggcccatctgctactctttcccaccagctcccctgttccagttctggttgctgttagtttccctgaggtatttgcaaccaccatggctgggtaaccaccgatcagcacagctgtccccttggtctcctgtatcccagtcactagtcctccctggtccaccccaccctcatcctcaggagccacagccatttcttagagggtttcaaaaggacagcctttggcgccttttccttctaacctttgagtccagccctttccagttttcattcactcgaagtaactgcactcaagctgtgctcaaaatcggcaacgcatttatttacaccaagcccttcccataaaacacaactgctgaagaaaatagcagacgtttcccctctctctaactctgggtatcccacagatgcaaaagggagaataaacctgaatattattaccagcctagagtcttgaatgatagccttaccgaattcttcttgtgaggtatttcagcatctcggggggtaatttccggaagggctccatactgtcccaataaggttaggccagtagcaggaataataaatcccactttgtaggctggaaaactgagctgtcaaaagaatcaagtgtttgggggtttgctctgatgagtcttctagttcatttggtgaatgtcatgatgatttttaacatgcattttgcatgcatcccccaataagaagagatgagactcggccggagagaagaaaaggcccttaactttctttccaatttaaggagttgagagtttaaaaatattccagccctaagtttttatcatgggtcccatctgatagtggctttgggaacctctgtgaagtagagagccctcccttgtcagggttatgaggcacagtggcctttggtgtttggccagtgacagtgtgagagatggagttgacctggcaatgatctgtggctaacatgccgtctctctgcccttcctttgcagtaatccatggctgtgtactgaatagtattccccgctacagctggactggactccatttagccttttaagccgaggttcctattttaactgacagctttcctttggggtgccaggcagcgaggccccccacccctatcctgccatgtacttcaagctcacttcttctttttgagttccgcaacttgctcctgcctcccagccccactggcactgaccatgaccacctacttctattttttttttagagtttctttttttgatcacttactttcaaagcacacagtcaaacaaggttatgccaaatttccaggcctttttgaagtattgagaaggggaaggggatttctcacttcaattatagatcataataggaagcaaaaagaaaaaaatgaaaagcaaacatatgcacgcacttttcttgttgacaaagcaagaatataggtttgctgtgtaggtttggtgctctattgattggtgagtgaccagagcaagtatgaaggtgatgctgccaaagcacaagcctttttgaagtattgagaaggggaaggggatttctcacttcaattatagatcataataggaagcaaaaagaaaaaaatgaaaagcaaacatatgcacgcacttttcttgttgacaaagcaagaatataggtttgctgtgtaggtttggtgctctattgattggtgagtgaccagagcaagtatgaaggtgatgctgccaaagcacaagccagtttcttgggaaaattcaagttacagtggagtatttttttgaagaccatatgcttggaggtagaaacaaaccaacgaccaaaaaaaaaa

SEQ ID NO: 59780 - DNA, 1139 bp, Homo sapiens
ttcccgggtcgacgatttcgtccagggcggacaggctgggcgcacccgtgctcgcgcaccccaagatggctgagaggcaggaagagcagagagggagcccgcccttgagggcggaaggcaaggccgacgcggaggttaagctcattctgtaccattggacgcattccttcagctctcaaaaggtgcgcttggtaattgctgaaaaggcattgaagtgcgaggaacatgatgtaagtctgcccttgagtgagcacaatgagccttggtttatgcgtttgaactcaactggagaagtgcctgtccttatccacggggaaaacataatttgtgaggccactcagatcattgattatcttgaacagactttcctggatgaaagaacacccaggttaatgcctgataaagaaagcatgtattacccacgggtacaacattaccgagagctgcttgactccttgccaatggatgcctatacacatggctgcattttacatcctgagttaactgtggactccatgatcccggcttatgcaactacaaggattcgtagccaaattggaaacacagagtctgagctgaagaaacttgctgaagaaaacccagatttacaagaagcatacattgcaaaacagaaacgacttaaatcaaagctgcttgatcatgacaatgtcaagtatttgaagaaaattcttgatgagttggagaaagtcttggatcaggttgaaactgaattgccaagaagaaatgaagaaaccccagaagagggccagcaaccttggctctgcggtgaatccttcaccctggcagacgtctcactcgctgtcacattgcatcgactgaagttcctggggtttgcaaggagaaactggggaaacggaaagcgaccaaacttggaaacctattacgagcgtgtcttgaagagaaaaacatttaacaaggttttaggacatgtcaacaatatattaatctctgcagtgctgccaacagcattccgggtggccaagaaaagggccccaaaagttcttggcacgacccttgtggttggtttgcttgcaggagtgggatattttgcttttatgcttttcagaaagagacttggcagcatgatattagcacttagacccagaccaaattatttc

SEQ ID NO: 59781 - DNA, 3395 bp, Homo sapiens
tttcgtgtcgcggggtctcgactgctttcggcttgctcggcggagcaagatggcggacatctccctggacgaactcatcaggaagcgcggggcggcggcgaaaggacggcttaatgccagaccgggagttggaggtgtccgatctcgagttgggatccagcaaggccttctcagccagtcaacacgcacagccaccttccagcagagatttgatgcccggcagaagattggcctctcagatgcccggctcaaactgggagtcaaggatgcccgggagaagcttttgcagaaagatgcccgatttcgaatcaaagggaaagtgcaggatgccagagagatgttgaactctcgcaagcagcagaccacggtgccccagaagccccgccaggttgctgatgcccgggagaagatcagcttgaagaggagttcccctgctgccttcataaacccacccattgggacagtgacccctgctctgaagctcaccaaaaccatccaggttccacagcagaaagccatggcaccacttcatccccatcctgccggaatgagaatcaatgttgtcaataaccaccaggccaaacagaatttatatgacctggatgaagatgatgatggtatagcttccgttcctactaaacagatgaagtttgcagcctcaggcggctttctccaccacatggctgggctaagcagttccaagctttccatgtccaaggccctccctctcaccaaagtggttcagaatgatgcatacacagctcctgctctcccttcctctattcgaacaaaagccttgaccaacatgtcccggacactggtgaacaaggaagaaccccccaaagagctgccagctgctgagcctgttctcagcccattggaaggcaccaagatgactgtgaataatctgcaccctcgagtcactgaggaggacattgttgagcttttctgtgtgtgtggggccctcaagcgagctcgactggtccatcctggggtagcggaggtggtgtttgtgaaaaaggacgatgccatcaccgcatataagaagtacaacaaccggtgtctggacgggcagccgatgaagtgcaaccttcacatgaatgggaatgttatcacctcagaccagcccatcctgctgcggctgagtgacagcccatcaatgaaaaaggagagcgagctgcctcgcagggtgaactctgcctcctcctccaacccccctgctgaagtggaccctgacaccatcctgaaggcactcttcaagtcctcaggggcctctgtgaccacgcagcccacagaattcaaaatcaagctttgagcaggggagtgaggcagccagaagtgggggcagaggagggtggctctgtttccccaaggcaaagcttatgaccaatgggccatcggactggagacccctgattgtgggaagggttgccagggataaagagcttcctcactggatgggacccgcctttctgtgttgtgttctgccctgtgctcttctctctacgttaacgtttcctgtagtatgtttcttcatctcatcgccaaggtaggcttgtgtttttcagtgtgtgcctccccgagcctcagccccaagctgatttcttatctggaaatggtacactgaattctctgggtggctttcttgtggccccatgggatgcagcgtgggggctgtctgaaggaccctgctttttccaggggccgaggggctgcctttcctttgtgtgtattaagcttttcaaacaatggaggggatggaaagccctggtgtcctgacgggagccaggtcggcctgagagctgtgccgctcctctgtcttgtcagtggaggtgcctgggtggggagcaggtctcaggcctcttgtcctctccccagtggctccaggcctcactagtggcaagggcaggatgaggctgcaccgctgggaagagtctatctaagttcttggcttggagtcccgtgtcgtctccgcccagaggaagttctccagagttcacctttcccttttccttgagttgtgctgaatgccccaccccagctctctttcccttctgggtgtctttgctgggagggggctgtgttgtgagccctcccggttctcacctcgcctggcacttaaccacaccctggttttgtgtagccgccagctctcttctggttgggcctttgaaaggctcagcctcccattgtgcagtgcttgggtttggagcttatttgaatggaagaggtcagtttgttcctggctctccatttctggcctcagttgtctacaggacagtggtcagggatgcctggaggcatatatccagctgccaccaaggggcactgtttgttcccacttatgtgagtgaccccatccatccatgaccagaggattattttcctgccttggcagaggaggaggagtcaagggagcagggcagctctaccaggcaaggtgtttccccagcataggcgcagacagttgggacgaaacttcagagcccaggcagtccctgaatgaccaggccagtgttgtcactgagtggtcccctgctggttgggagtgaagagaatccaggctggcagagctggagccagttggggagcacggttctgggagctctgcaaaatcagtagcaagtgctggaaaaggcacatgccgaagatactcaagagctcccaagatttgcttgaggctagcccagtgaagaaaaaccagagactcatgtttccaggggtcagtctgtcaggcaggaaggacccaggatttgaacccagcttcagtgtgcaggctctgaggctgcccaggacgggaaagtccaaggaaggggcctggtggtgctccacttgcagttctttaaagaatgctgctttttattctcctaaccctttcaagtgggtgcagacttctcgttagcagctggaagacattcctcccacacttttcccttcctggcccaagagagcatccagaaggcagtaggacctggtttttcaggtactgggagccgggggctcactgcttgcactgtgcttagggtagggatggtaaatatcctccctgcatggctttatcctccctctcatcccaaagcaggtatcttctggttgtcacagagtttcattgagtccagctgcagccacgtggccatctggagctggtgctataggtgaccatctggtacattgaggggacctgtttgcctcctccactctataagcagtcatcttgggagaccgggaggagaaggtggtgggctagtcctgtgtcctcctccacttcccatgcctctatgttacccatctgtgtctcctgtgcagaaggagaggaaggggcattaagagatgaagggtgattatgtattacttatccatttctgaataaacatttgttattcctaaaaaaaaaa

SEQ ID NO: 59782 - DNA, 3707 bp, Homo sapiens
ttttttttttttcatgatttgaaatttttattttttgaaatgaaacaattgtacattgtacaaaccatatctactgatggaataaataagtgaaaaattatactgctgtccacccccccaaaaaaaaaaaaaattcttgaaaggggaaaaaattaggtaacggtgaaaaaaggtctttatgcctctaaccaggttcttggcgataatgaacattccaaaccatgacaccgtttgctaatgggaggtcaccaccctagaggaatcggtccacagccttccgggttgtgggtgtaagtgccagcactttgtggaatgtgtagccgcagcttccccgacttcacgttttggggggaattaggtttgccctgggagcccttgaggccacggggcctgatgtccacggaaggcttttgctcgggatcccccgccccctggctcgaagctgaaaaggtcttaagattctgtggtgggggggagggcgaggggtgcagggtgggtggggggcagcggctcgaaggagcgactgcgcccagggaaggaagcacatcggatttttgcagtcttgtcattctgcgtggaaagccttcttggccagcgtggagtgcagggctgctggcgctttgccctggcgtggccgtggtggggcccagctggtcccaatcgccggcccattcctaccttcaggcacttcagagaaatactagtgacagccttgggacggtggacgtcgtctgagtccttcacctgcgccaactccccttgccttgtccagagaggctgcggtcaacggcagggccacctacgcctctctgtttctgtggatgtgtgtgtttcattctccttcagctgtcttggttgtagcctctcgtttcccaaaaacagagaaggaaataaatatccaaattcatctctcaccaagatggagtttcgctgcaaagaaaaatgtgactctaactctacggaatctggaggtaacgccgcctcgagatgcgtggagaggaaccgcatcaggtaggttttgcgccaggatgcaggacacagttttcaacaaaactgactgcctaaggggcaaaattgataagtacaaggatttttttttttaagacagaaacctttcggcattgctaacttcaacattaagattttcaaagttgtggttttttttttttttcccttatttcaggagacacattttgcatgtaggtattttgaaattcaggaacattttgattcttctcgaagtgcaggaaatagacaggatcccttaaaaaaaaaaataagagcctcaccctcagaaactcttagaaaatggaatccagcagacacttcccatgatggtcagaagaaagagccacacgtcaaaggtggtacctgaatatgcaccaattagcccccaaaaacaacaaaacccatggaccccaccccacccccagtaacacacaactcaaagggagtcagaactccagtgcagtaaagaaagcttaggaaaaggtttaaggtctgaggagttcatatattaattaagagcaaaccaggcctcagaaccaaacgattaggcagttcgtccaagggggcgtctccgttcagtgagaggaagctgttccagcgaaggtgggggatgggagggaggggagattgcgtctctcctttctggagggtgtgcaaatctttccaattcctcgacgccttgtttgtggccttcgaggcccggccatcaaggcccactccccggtggggacagacggcatgttctggggatgagacacggtccagctgttggctcagagtcagaacagcctgagaataggaaagcacgtggattctgaccactgcgatcctgcctctccggggcacaggctggggcgtcgggggaggcaaagggcagcaggtgaccgtggatttgaaatccaagcgacgtcctatgagagaaagttcagcaccagctaatcctgccgccggctcccagcctccccggcccactcagtgccttaaggagacagccttgcagtcagccagagaagccatttcgtattcggaggtctgggagaaagcagtgatgggggtggtggtggtgggggcaatagagaggaagtgccagaaaattccaagggctttgcacgtccatctgggccatggtgggcttggagacgcccagtccttaaacgccccaaggaggggaagaagcacagcgagtgcccagcctgatccaaggggccgagcccttggggactgtgccccaacacctgcgcgtccttgggccctggtgcctggtgcttggggcgtgcctaaggtccccctgcacctgcaaaccaggtgggataaggagctccttcgctccaccctgcctgctccgatgaagtcctggggcagggaggagagcggtgagtagggtggcagccgccgcccgaaccaaaccaagagggcactttgcagagggggatgtaagaaccaccaggatacatgccagaggtcacctcaagggcacaaggcacaaaaaaagaaagcggaaggaatcggttgaacagtggaaagccccgccaaaaagcgttcctgatcggtaccaccctccgatagcttatatcgttacatagagaagtggggggaaaatacagcagcaacacaaatggaatcctggcttccgagacagtgtgcagacactcctgagctgtcagccccgcctgcctccccaaggacagtcccttaaaggtttgagtgttttgcttcacagcagagttcttcagtgtctgagaagtgacgccgttctgggtcttcttggatttgcacttggtaaacttgaaacgttagtagttctgttcgcacccaagaggaatcgctggggcaaagttgctctagaattaattgctgatgtaccttccatggaacatggatcggaggctttaaagcatcgtctacatctcttcggagttttgttgagaggcctccagtttcatctttttagagggtggcactccttccaaatcccccgacaacccaatgggctcccggccgatctggctgcccctctgagacctcgagcgaggtacctgagagattgcagacgtctctgcggccagacccgagtctccagacggctgccgatctactttctctgagctgttcatcgaatgttccatagaggactgtgaattctgctcatcagaagcatcttcagctcctgggtgctccttcccatcagcctgggcctcatccaccttggcctcggtgccgtcgctgggcacagccgagttgggctctggagcggggctggagttgctgctgttctcctgtttgatgggggaggcatctgcgatggagctctggttgctgttatcgtcatgcatgtccatcatccctggggaggaactgttctccggagtggtcacctctgagccacacttctcgtccttgccttttttcttattcttgtttttgtcatcaaccttgggctccgtcacagggacccatttgtagattcgtagggatgtgtcaccaacggtcacccatttcttctcccatttgcgcactttctcgatcgccgccatgaccctcttgatatcatctttggcccggctcctcgtctcggctcgaaccgacctgcccgacatggttccggcggggagacggaggctggggagcgcgcccgccgggtcatgctcgcgctccgcggcggccacactcgcgcccgcccgccgctcactcactcgcgc

SEQ ID NO: 59783 - DNA, 4684 bp, Homo sapiens
tttcgtggcggcggtaagatggctgcccacgggggctccgcggcgtcctcggcgctgaaggggttaattcaacagttcaccaccattaccggtgcaagtgaaagtgtaggaaaacatatgcttgaagcgtgcaacaataatctggaaatggcagtcactatgtttttggatggtggaggaatcgctgaagagcccagtaccagttcagcaagtgtctctactgtcagaccacacacagaagaagaagttcgtgccccaattcctcaaaagcaggaaatactggtggaaccagaaccattatttggtgctcctaaaagacgacggcctgcacgttcaatttttgatggtttccgggattttcagactgaaactattcggcaagaacaagaattaagaaatggaggagctatcgataagaaattaactacccttgcagatctattccggccacccattgatttgatgcataaaggcagctttgaaacagccaaagagtgtggccagatgcaaaataagtggctgatgataaacattcaaaatgttcaagactttgcatgtcagtgcctcaaccgcgatgtgtggagcaacgaagctgtgaagaatattatccgggaacatttcattttctggcaggtttatcatgacagtgaggaaggtcagagatacatacagttttataagttaggggatttcccctatgtttccatattggacccacggacaggtcagaagctagtagaatggcaccagttagatgtatcttctttcttggaccaagtgacgggatttctgggtgaacatggacaactggatggactttctagcagtccccccaaaaaatgtgcccgttcagagagccttatagatgcaagtgaagacagccagctagaagctgccatcagagcctccttacaagaaacacattttgattcaacacagacaaaacaggatagccgctcagatgaagaatctgaatctgaacttttttctggcagtgaggagttcatatccgtttgtggctctgatgaagaagaagaggtagagaatcttgccaagtccagaaagtctccccacaaagatttggggcatagaaaagaggagaatagaaggccgctgactgagccaccagtcagaactgatcctggaacagccacaaaccaccaaggattgccagctgtggattcagagatactggagatgccacctgaaaaagcagatggagtagtggaggggatagatgtaaatggaccaaaagcacagctgatgttgcggtatccagatggaaaaagggaacagatcactcttccagagcaagctaaactgctagctttggtgaagcacgtgcagtctaaaggatacccaaatgaacgttttgaacttctcaccaactttcctcgaaggaaattatctcatctggactatgatattacattgcaagaggcaggcctttgtcctcaagagactgtctttgtacaggaaagaaattaacaccatggcttgacctctctcagcttaccccttttttcccttttcctgtgagatacatgtcactaagtatgcattttggctcataggaccacagagccaaagttgggcaagcaagtcaccttccttctcttatttcttgatctctcctataatcagtctctttctccccctttgtttctttctcctcttctgttttctcgctccccactccgtacccttctgcctccccctccccccacacttttctttcttacctaatctggtgaccaaactgaagtgtaaggataagacctctcctagtactagcagcaggaattgtgtgttccagtaagtggtctcttgcacggcacttttttgggatcaaatgttaacgttactccccagactcttcgggcaaaggaatggctagattcagagtaagaacaaccctcccttttttgtaagtccccgtgtttagcagggagaagaaattctctaacatgggtttggttttgttgtgttcttcatgtggaaatgtcgcttaacaaaatatccaggcttttgtttacgtggaaaaagcatcccttgtaatgattgctcatcatacttaaaaacctttttcaaaggattttcatgttcccagctataaggactatttccatgacatgtgttattggcagaatgagtgttaaatatggagcatatagcatggggtgactttcattgtcctaacctgagacagttttccttattactctgtattgatcctgctagtccaagaatggacatgaagtgaacctatcgtggtgactgggataggaaggtgcttgctatttttgccagcacagcatattagttcctttggagccctccattgtctgagtctgcagtgatctgtaggaaggcagctggtcaataatcatgtagtacaatggcttggaattgtaaccactatggttattgattgtcctgtgttgtttcaggcatacttaggtatgtccctggggaaaaagaaaaccattcagctgagagttgctaaccatgttcttttggttagaaataatggttcattttttgcccctggttggaatagtctctaaaaggctctggtgactgaattgaacatgagtccgcatgctgttttctttcaaaaggtatcaaaacggaaagcctctctaaggggaagacctttcaactccattcagaagacaacatttagtaaggaggatggcggaggttactagtaattttcagatgtcttgggctttttctgccaacaaaacccaaaatcaaattagagttggtgaaagctttcttcagtgtttttagaagaggccatcttgaatctgtagaataccatttacacatcaacttcaccctatgctcatttcgtattttgagcttaaatggagtcctctgaagggggggtagtcgtgattctggtggcaaaactagaacttttaacttgtaaaatgaaaaatattaaatggacctttttgtcagttgaggatttagattgattcttttatctgaggagcgtatgttcctcagatgttgcgtagagacctttaggttttcatctactttaagattgctctcttggcaattaggggatttgggaaaagaagaaaaaaagatgccatgtgttgctagtacacagttataggatatggtttctaatggttgaattttgaggaactctccctaaagaatgagttttatatctcctcaaggaaatcatggaaaaatctgtttattcttcagtgagtccttttgaattaatgttcttaaatttttttctaagtctgtgtaagtgcttatgtataagtatataattgtataaatatttataaatatatttatataattacggtttcatttctaccttgagtcaaagttctgtctttagattggtgactgagtaatacttacactttggtgttttttcttaggttcttgaggcttacttaactagcagcttctgatttattgagtgaaagatggttttcatgttaattcctcagttgcatctctgaacttggataacatacttgccgtttgaaaaatagagctgtatactgtcaaaggtgcactggagggtaaaacatttgttggtagtagacaagctcagaaatccaaaaattcagggagggcacagggtaagaagagaggtttgctcagctttgtgctctgatggcacccatctgtactccagcaaagtcatagctgaagcccaaatcgctcaaacgtgtgaagtcaatcatttttcctatagggctctgtttccttttctttaccttctagcttctcttgataaaacagttgggagaactgccaacgtgttcatcagtgagagggtgtggttctttccgatatgttcagcacgtgcatattcatttatgagaaaccaaagtaacttcttcaactcgggttactgtgggatgattaagtagatataaagtgatttaaaagacagcatggtactttcactcagcttaacatgcagctgggatgtctacaatacaagatgtggtgggttttattttattttattttgaggcaggagtgtaattatcttagggttgatataaaggcccatgggaagagttacggattgtacatgggaagaatccataaggagtattgccttgctcaagaatttaatccgctgacagtatgcttcttccagtttgccttacttcctctgcaagtttctttgctccttagggcagaggttttattgaatagattaaatgaggtcagtaagattagttaaaaatagtcattccttgtgggtgttggacacagcttgaaaggagtgtttaaaaaaaaaaagctagggaggaaaagaacaagaaagatagacttcgagagtgataagagaaaaatacagggagatggaatggaaactaccaggaaggccgggcgcggtggctcatgcctgtaatcccaacactttgggaggcggaggtgggcggatcacctaaggtcaggagatcgaggccagcctgagcaacatggtgaaaccccgtctctactaaaaatacaaaaattacctgggtgggggggcgtgcacctgtaatcccagctactcaaaggctgaggcaggggaatggcttgaacctgggaggcagaggttgcagtgagccaagatcgcaccattacactccagcctgggcgacaaagcgacactccatctcaaatttaaaaaaaaaaa

SEQ ID NO: 59784 - DNA, 4746 bp, Homo sapiens
  misc_feature (1)...(4746): n = a,t,c or g
ttttttttttttattatatgaatattttaatgcaaaatgcttaacacttaaaattagcaaagcgtcatttaaattaaaattccatttaactaaagatggttaaccccaagaaattgtacagtagttgatttctgctatataatgccagtcctatgccatacaataagaactgcaacattagctgtcacttcctccattgctcttctggaccctaagggatgagggaggggactcagacacaaaacacaacccaaataaactgtgcagtgattcctaatagttataaacccaatctaagttgtccaaacagctgaagaataactgcaggtattgttccagagctgatacgaggttttgcttttacagcctggtaaaagttctgcactaggtgagaagtcacagtttaaggatgcatgttctgtaaatagttactacatatacacatttactgtctgtaaacactagaaatatacattagacagagtaccctcacaagttgggtacagtttaaaaaagaagatgaggtaacatgaatctcaaagtccacaggaatcctgcctgaagagtttgaacagctgcctgtaattcatttccaatgtgcagggagattaaggtttgccaaaactggattcactggctttcagcatagcaactgcatctttcactgcatggtagataacattcttcacctgtaatttatcttcgtgattggtatgagtctgtgacagatatcggaattcctgagtaagccagaagcagtgtttaacatgctctggagaaacaaaatcttcagccactttgatgcagctatataagttatgaacctgatgtggagctcctgccgggataaacaccacatccccaagaaactgtacaatagcccagccttgaactccatactcttgatgaagacgttttcttaatgatcggtctaaataccagctttgatcatgaataggatcgtggtctgctgggttttcttgaccttgctcttctgatacctttttaagaaattcccttatcttctccgtgtcctttgcagcatatatgtgccacagtgctcctggcttctcttttccttcaataaatcgctttattgtgagttcgtcagaatctccatcttggatggtcttaaggacttcttcttcttgctcacactgtcctttgggaattcccacatagaccatgacattagctgcatcagatacatctaagtgaagatttgttgttccatatttccgatcttcaggagtgattaatccataagcattatacatcttggggcccagatctggccgaacaaagtagtttggcagcctagaggccaaattcagtttgccatctcgccttgtgtactcgggcagtggaatgttggccatcagatcatcaaacctggaaggcatcatatctctaaaatcttctcctggtggccagtccttaagtttcaacaccattggttctttttcatttttcaaacgatttggaacatcttcaaatccatcccagaagtctcctactgtggctcctgtgatgatttcattggtcctacaattaactaggtctacttcctgctcaccaaactctttcctgaaggattcaggtttccaaagttcagagttcaatttatgatgcactccagacaccatcactggctgcccttgtttccagcactccctaaacacattccagttgctcttattgttggggtcttgcaagcacagcaagcgattatcacaaagccaatagtgaggagtgtcaaagcccagaatgctgggcttgatggttagtccttgaggcctcttagataaatcagaagtcgtcttattttgcaccaaagaggcaaagatgtcatcaaggatttttggtgtattcttgagtccattttctgtctttcctgtagaagaattcaagagattccggaggaaaccagaattgttgttgcttacgggtgtcaaaattgtgctgttaaacgtatggaggactgtgctggatttgcttaaaggtgggaggggtggaaggcatttgatttcattctttaaaattggcattgttggttgtttttccttgttttccttgttgacattcccgctggttaggtcggccagccagtttagaggagatgtgctggctggacaggcaggcttcatgctgccggctggcttggaggctgcttccccacccacagctgctggctccaacactgagggattctgctggagcactgcaccaagagtcggtttttctccagctaaagaagtctgttttaggtcttcctttgaggctggctttgaaaagagtttgaattgcctgtttgaacaagggcagtttgcctttattccccatttcgctcttacagaatgaacaatgtctccaacatcatagagtgcttttccaggaatgatctgtgtgggcattaagttctctggttcatgtatctgactcttcacacattttagccaagagaaagtcttgtaagcagcaccctgttggcaattctttctcttcatccggtagcagtccacacatactccaaacccacaccgaggacacacccagtgcaggttgaagatggtggtgtcgcacacatcacacatttctcgaacacctttgacagctcgcttccaagcaacctgtctgtgtggctcaatagttgacatagcttccttttcagaaatcaccatttgacagaagtggtctccaatgttggccaagatgtactttgctgtgtccaaatcaatccccacaacgtttttggttaaaggtaaccacaagccaattgcttcattgtcatacttgtttggtgttaagaagccttctacccgcaacacaccatgtttgttgaattgtaacctcctgaagtgaaagaagcggcaaaacacaggtgagtccttctgttgctccttatccttgcggagactgtccaagcgacactctcggcatttaggcaactgtgccacgatgttcacacaagaatcatcctgtacgaaggcctcgccactctgttgcagctttttgagtttagctgggtctgtcaaaaccgacttcctggatggggcattctggattttattgttgcttcttgaacaacagctttcattatctacttttactgaagattcctttaaattctgtgatcggcaagctaaagctgaaggttctaccttttttcctgaacagttattagggctatcactattgacacctgctttcacttctggtgcatttgaaacatccgatggggaaggtgcatgttctaggtgcttctgcagttcaggaggattggcaatttccaattctgccttagaagaagcctttgtaggtaagcactccttaggaaggccagtcaatgcttgtggaacagactccaatctgttttcctgatcagtgtttgtcttaggctgagtacagctgccttttggctcagtcagaattttcaagtctccagttccaatctgagaggactttgagagcaaccctgctttgcagacatctggttttgttctcagagcttcagactttgtatttagacaggaagaaatttcctctggtaaactttgtttatgacatccttgaggaatttttgctccaaggttaggtggagagttggcagcctggggagtactttgctgtcttgggtccttactaggtggagttgctgcagtacagccaagcagtatctccttaaaaactgttgtaggtacagactgcacaggacacatactgggagaggcctcagagcaagattttgcttgtttggaaaccagggttccattattctcagaagacttgcgttttacagctccaattcttgcagaattaccacatgtcacaaggttatcgtgtacaacttcaacatgaatcagtgacggatcaacaattttcagtgctggaatctcctcacagttgacttgaagagtttttgatgctgggtttccatttacaacggttgctgaaaaccactgagtagatgggtccaagctataaatttttacttctgaaccaactaagtttttgtcaccttttaaaagatggctttcatctaaatgcttcacaatcaaagcttgaaattctttactgacaatctgattatccgtaagagaaagtcgaagactgtttacatcctgtataggcttcaaaaggtctttagaaagaaatactctttgttgatctcccagaaagcgaacagaagttatggatcccaaaccagctttgtccaacagaggtttgtacgttattgcaggccactgtacaattcgttcagaaatttcaggtgactttcgttcagctaaaaccaaattatgttctactaaaaatgctctccttagaaggctgtagacttctatccatcttcttttcctccaagattccccatcaaattccacacacaccttcagatccttcttggtaacgtcggtgtgggaaacagctcgaatggtcccggagagccagggccactcggcgacgcgctccacgtcccagctgtcgtggctgccatcgctgccgtcggctgcggacagactgagaaacctcctccccaccaataccggccaactttctccgagcgtgagcaccatggtttccacgcctgcaggaagagctcctcccccgcctcccgcctccatgagtcaccggcggcagccgccgtttccagccgcctagccgactccagcgctgacacgaaatcgtcgacccggcaattccggnccggtaccgcgtgcgacaggctatcaaaggggnctcacacgc

SEQ ID NO: 59785 - DNA, 2139 bp, Homo sapiens
cgagcctacagctactacagtacttcctgacttctcccattcaaaccattctaggcctgcaatggggaacaggccctccccatcagtattggtaaagtgaccatgattcctacatagaggctctgctggtcaaatacttgactcccactcttgccactcctagctccagaagggctcagggccttccccacagatctaaggactggggctaccctgcctgtccactgaggtttctcctaaaacaaagaggcttgactctggtctgggccctgtggccctctgggaagctttgtacctcttttgcaggatccgggggtggggagggacaagctagttccccaacctcctatgactgctttctatgctcacagccttttttccataagaaccttcttgaaacttctccccgcacatactcacggaaaggaaccaatggtgctatttcccctctctcctcctcaacctgggaatacttcagaaaatttccaaattcatccttgtgtatagtctcacacccttccccataagtataaatgggcccatatttaacacattttgtgattttgggttatttattttgtgcatctgtggcaataaatgagatctcagtggtggtatggatttgactgatctctgtaactgtgtatggcaaaaggaccggaaaatgaaaaccagatcccagtaaggggtagagaggggccaagagaactgaacatctgggctgccggagaaatcaaagtctaggaagtaagaggtaagagtgtactacaggggacataccccaatctctttgctccctccctcttccttcctctcccagagacccaggtccctgggactatattggatctgtctctgaagctgaaaaacaaaaggcagaggagacagtcggctctaagtgaccaatctcaagccagctttgtcagaaatcctaaataacaggagaagggtgggaagaaaggatatgattatttcttattccattttccataagaggtgagaatgacaaggacctcttttctaactcctcttgagggtgtgagaagggttagcaggaggagaagggctgggagctctgaggtctcctgtaagacctcatatctcacaggcaaggactaagaattaggattaaatattttagtgggatagctctaaaccaggattagcaagcaaagttagggcgcaaattcctggaatctgactgggaccctggcagtgaaagctgggactgttgaaaacccaatttaagtgttcgctactcatgttgagagtgcagggccaagataactagatcccaggacaggcagtttggcagtgagaacaaaaggaagacactgggaccaaggtgcctagatccctcgagagagaagggtgggtattgggaggaaaaatgaggactggggaaacccaggaggctgggttctggaatagcagcaagtcagaatttcaggatctctgttcgtcctcctcttcctcttccctctatcaggcagaagagagggaaggagggggctggagaagtagccacatggatacatttagggccagacagacacaggaatgctggaggagagagggatttagtgctgcattggccctggagggggctgggaagggtcaggaggctggggaggggtggtgggggtcggtcctagggttgcacgacgccgtcctttgcggtggccacgtacacagtgtgtatgaccacagccctcttcttcctcctcatcactttccgtggagctctcgccaaaggcccgaggtttctcataaatacagcagcatttggatgagcggcggcccatgtgttcattgtccacagtgtcacttgtccattctacctttttctctggcttccgtttccgaagtttgatggtaaggctccggttctcgggctcggttgtcacggtaaccgttgtctcagtgacggtctcgctcagcccagcccctgcctcggccatggctaaggctcaggacagggaggagaggaggaagggggatgagacacccttccctttttctgtcgctgaggtctaagagaagcggtatcggattcagagtggtagccaggatcctccaccttctttattccccctcctcctgggcctccgcttctccacccctggggataacctggct

SEQ ID NO: 59786 - DNA, 1625 bp, Homo sapiens; identical to SEQ ID NO: 59678

SEQ ID NO: 59787 - DNA, 3474 bp, Homo sapiens
gaagtgtcccctcctacttcttgctgcctcacggttgctgttgcagacccaggagtctctgaaggcttccgcggctttggggccggttgtgagatgccaggcagaggccgctgcccggactgcggctccacggagctggtggaagactcgcactattcgcagagccagctggtgtgctccgactgcggctgcgtggtcaccgagggggtccttaccactaccttcagcgacgagggcaatctccgagaggtaacatattcccgaagcacaggggaaaacgaacaagttagtcgcagccagcaacgaggtctccggcgagtgagagacctttgtcgagttctgcagttgccaccaacatttgaggataccgcggttgcctactaccaacaggcatatcggcactctggcatccgagcggccaggctgcaaaagaaggaggtgttggttgggtgctgcgtcttaatcacctgccgacagcataactggcccctaacaatgggggccatctgcacgctgttgtatgcagatttggatgtgttttctagcacttacatgcagatagtgaagctcctgggactggatgtgccatctctgtgcttggcagaactggtgaagacctattgcagcagcttcaaactgttccaagcttcaccttctgtgccagccaaatacgtggaagacaaagagaagatgctgtctcgaacaatgcagttggtggagctggcaaatgagacgtggctggtgaccgggaggcatcccttgcccgtcatcactgctgcgactttcctggcttggcagtcgctgcagcctgcagatcggctttcatgttcccttgcccgattttgtaaattggcaaatgtggacctgccctacccggcgtcctcccgcctgcaggagctgctggctgtgctgctgcggatggctgagcagctggcctggttacgagttctgagacttgacaaacggtctgtggtgaagcacatcggtgaccttctccagcaccgccagtcactggtccgctctgcctttcgggatgggacagcagaagtggagacccgagagaaggagccaccggggtggggacaggggcaaggagaaggggaggtgggaaataattccttaggtttaccccaggggaagcggccggccagtcctgcccttctcttgccaccctgcatgttgaagtccccgaagcggatctgccctgtaccccctgtctccactgtcactggagatgagaacatttctgatagtgaaatagaacagtatttgcgtacccctcaggaagttagggactttcagagagcccaggctgctagacaggctgccacgagtgtccctaaccctccctgatggatatccactgggagcacttcatcctgttctgacagcttgataacattcctgttataaccaaggatggaagtgtacaccagtccgtaggtattgcttttcttgtttgaaggaaccaagaggggctctgccattagttggaccctgggtcctggagtaaagtcaggagtgcagggatgactataggtaggagagattcccatcccttggtgtgggagagcaagttgcctatgtccatgttctgtgagatggctttcctcatagatggatgggaaaatgtcaggctctttgctgctggtttgaattggacacactgctgcggctcctcctgcaggcctgagggggcttccctctgcttgtggagtggttggcattcccagcagtatcaaccctcaaaggagcgggaactggggaattctggccctacgtgcattcacaggcaatgatgggtttgtgtgtatggtgtcatgagatcctctacctcataacaaaaggacagtgggtagactaaggcagtagctcaaagggctttgcaaaattttaatatattaaaacaagaggcatctgctagaaaacattctattgtataaaacccgagttcttaaaaacatgttttctttggcactttcattccctccctcccctttccccagcatattgcaaaaagctctccagtgctaaggcattggcagggtgtgtaaacagcagccagcatatgtggaagaataatacaaagcttttttttttcttctaatatgtctgtgcagcaagcataaataacaggacccattccaaggagtgtgtgtgggttttccccctcccctgtgtcctctgtcaccttggtgatgaggccagagtgatgtgaagactgggagggaaccctaggtcagaccttggtttcctgttgttcttcccaagacccagggttccctcggtttccatttggtcctgtagtgaaatgctggtggttggttttaggttggggaaaagacgggtgctggtgtttaaaaggagtaaaggcataggcccctcatgacctgcagggaccccagccactgcctctgggcttggcttgagctcctgggagtcgggaagctggtttgacattttgtaggtttctctctactgtggagctggagatcaaatgattgggatggttcttcctctggccttacggaggcaaggaagtgctcttccttagtcccgtggtgttgtaaggctgagactagggagatgggtcttgtaactgaaaagtaactgcttctccaaacaccacctgcagctatctggggcaccattgtttacaggactagctttagggcatgactagattctgccccagttccacctgccctctccctctactcccctcagttcacccacaggcacctggcagtcagctgttgaggtgcagggcctcagctttgtcatcgtgtgccacctctgaaccctgctgtctggtttaagtaccactcctgtgggaatggtggcattgttcctagttgtgccccggttcccactcccctcccccaggactggttgatgtctagagctgcctttcacgtggccccaccctcccctcttgcatagtggatctgaaaagcagcaccttgtgacttaacatcacctgcttcatgtgctgggctagctctcgtgccagccaaactcgggaggaaaagggacctaggatctaggcaggggctgggctgaaatcagtagagggcagggaggaaagaacacagttcccacgctctcatctctgctttgctggtgaggctgatggcccccagtgaggccgcatggacagtaggcggggtgggagtacttggggagggtgcacctgggatgtgctgtgccctttcacacagacggaggccttccccgttcctgggagggcaccgacagtcagactgccccgggctggacggaaatgtattatgcgtgtttctgggattgtctgtcgctaccccagagggatgccctctaggcaagtggggaacatccgcctgtgggcttcctccagccatcggctcctctgcctccaacctgctgactacggagacaccttggagggccccgaggagcgggggaacgagccgcgtggccagcccgtctaccgcg

SEQ ID NO: 59788 - DNA, 1973 bp, Homo sapiens
ttttttttttttctctccaagtccttcctttaatgtcaggtagtgcttcaacccaaacacaagcagtatacataccatagagaaagggacctgagggcatctgagtcatgcatggtgtggtacatacaaaccttggcccagcccaaaggagcagtcaagggcctggaagaaagatggtttgctctttccccctcctcctctctctttcctaccgggcttaaagtccgtggaagagaaagtttttaatcagtggaactgataaggcctcagggccgtggagggtagatttggttgttcagtaatataaaatgtgtttaagaaaaaaaacagcccaggcttcccagcagtagcccatgtgttggctggttcagcagcctgacctctacatctagacaaggaagtgaggagggtgattgctgggcattggtgtaggtttatgacggagcagcataagattttccgtgccctgtgaacacgtatacaaacattcatagccccttcccctcagccctgctctgctgcaaggaagctgctgagagtgagtgaacagctggggccacaaagtgtcttgtgagaccagctatagggtctaatgcagtgaagtcagtcatttaggacctattttcacacaggggcaaggaaaaaccagaaacaacttctctcttaccctttaaactaagatacttcattctacacgattacctgaaacaaatgtctcaggtcaaatcacaagccttagcttctgctagggtttgaagtctgggaaatatataatccagctcttctctttcagtccaagctctagcttgtcagcaagactgttgcagaagatctatccttaagaggcagaaacatctgcggtgaggaaggcagctattgaaggtattccaggagcatgagactgagtttgcagagctgagggttgtcaatttccttttctactgatatcttcttcctttagagcaaacttcctccttaggacctcagagataagcacagcagggtcttcctccttcaataaactccggttcagatcttgactctgtttcattcggtgaaagtccttcaggatacccatcatgtctgcaaagctgctggccttggacaaagagacgcagtcatcctcttcagacgaactgcaggcagctttgtgttctggtttgcaacattcagggctggcagaacaaagcagggggactgatggaagctcagggacctccacctctgtctcctcggtgatgtcactaatgacaaaggaagttgtagagtggaatgaggatccaaaacaaggtaagggagaagagacatttgaacttcctggagataagaaatctggcgttaatgaagccgaagctgcatcagctgccactatctttgcaatctggctgcgcaagtggctcagctcgtcctgcagctcagtagtgcggcttagggctggcagagctggcttcttcagggccagaagcctctcctcggacccacgcaggttgggaacagaggcattgcgctgcatgacaatcagagggctgggtttccaggtgtgcctcagggggcgcgtatcactcctgacccgggcatatgtctcctcttcatccgcagcaatccaggcgatgtcagccagggtagggactgggggcacatctctcaaacacaggtcagagatgttgggcagggtctcaaaggacgcccgggcacacggcttcaagggtaggttggtcccaattcttcttactacacttcgagcagccccatgtggcttgttttgccagattgggatggtcacagtggcttccattcctgacatttgaaccagctcctgcacttgaaggacaaggcagccactgggcagctccgggaggcgggaggcgtgactccttcatatcaggccatctcaagctcgggctcccggactctctcacctcacggcccctccttccaccttgggccgcccagcctcgtgccaagcttggcgt

SEQ ID NO: 59789 - DNA, 1465 bp, Homo sapiens
ggctggtggcaggaacaagccctttccgaccccatggagctgtatgagacatccccctacttctaccaggaaccccgcttctatgatggggaaaactacctgcctgtccacctccagggcttcgaaccaccaggctacgagcggacggagctcaccctgagccccgaggccccagggccccttgaggacaaggggctggggacccccgagcactgtccaggccagtgcctgccgtgggcgtgtaaggtgtgtaagaggaagtcggtgtccgtggaccggcggcgggcggccacactgagggagaagcgcaggctcaagaaggtgaatgaggccttcgaggccctgaagagaagcaccctgctcaaccccaaccagcggctgcccaaggtggagatcctgcgcagtgccatccagtacatcgagcgcctccaggccctgctcagctccctcaaccaggaggagcgtgacctccgctaccggggcggtggcgggccccagccaggggtgcccagcgaatgcagctctcacagcgcctcctgcagtccagagtggggcagtgcactggagttcagcgccaacccaggggatcatctgctcacggctgaccctacagatgcccacaacctgcactccctcacctccatcgtggacagcatcacagtggaagatgtgtctgtggccttcccagatgaaaccatgcccaactgagattgtcttccaagccgggcatccttgcgagccccccaagctggccacagatgccactacttctgtagcaggggcctcctaagccaggctgccctgatgctaggaagccagctctggggtgccataggccagactatccccttcctcatccatgtaaggttaacccaccccccagcaagggactggacgccctcattcagctgcctccttagaggagagggcatcccctttccagggaggtaaagcaggggaccagagcgccccctcgtgtatgccccagctcagggggcaaactcaggagcttcctttttatcataacgcggcctctaattccaccccccaagtgaaacggtttgagagacgcagtgccctgacctggacaagctgtgcacgtctcctgttctggtctcttcccgatgccagtggctgggctgggcctgccctgaattgagagagaagaagggggagaggaacagccctctgttcccaagtccctggggggccaaacttttgcagtgaatattgggaaccttccagtggttttatgttttgttttgtttcgtgtgttgtttgtaaagctgccatccgaccaaggtctcctgtgctgaagttgccggggacaggcagggaaaaggggttggggcctcttgggggtgatttcttttgttaacaaagcatcgtgtggttttgccattgatttgtattttttttttttttttttgggcaaactaattggaatccctttttaaaaaaaaaa

SEQ ID NO: 59790 - DNA, 1812 bp, Homo sapiens
tttcgtcgcccctcctgcacggaggagtcgttctgcttccgcggcggcatctggatggagtttcactcttgttgcccagactggagtgcaatgacacaatctcagctcaccacaacctctgcctcctgggttcaagcgattctcccgcctcagcctcccgagtagccgggattatagaaccacaatggacactgccagccatagccttgttcttctccagcagctgaacatgcagcgagaatttggttttctgtgtgattgcacagttgcaattggagatgtttacttcaaagcccacagagcagtgcttgctgctttttctaactatttcaagatgatatttattcaccaaacaagtgaatgcataaaaatacaaccaactgacatccaacctgacatattcagctatttgttgcacattatgtacacggggaaagggccaaaacagattgtggatcatagtcgtttggaggaagggattcgatttcttcacgccgactacctttctcacattgcaactgaaatgaatcaagtgttctcaccagagactgtgcagtcctcaaatttatatggcattcagatctcaacaacccaaaaaacagttgtcaaacaaggactggaggtcaaagaagctccttccagtaacagtggaaacagagctgctgtccagggtgacctcccccagttgcagttgtctcttgctattggtctggatgatggcactgcagaccagcagagggcctgtcctgccacccaggccctggaggagcaccagaagcccccagtttccatcaagcaggagagatgtgacccagaatctgtgatctcccagagccacccctcaccctcatcagaagtgacaggccccacttttactgaaaacagtgtcaaaatacacttatgccattactgtggggaacgttttgattcccgtagtaacctaaggcaacatctccatacacatgtgtctggatccctgccattcggtgtccctgcttccattctggaaagtaatgaccttggtgaagtgcatccccttaatgaaaacagcgaggcccttgaatgccgcaggctcagctccttcattgttaaggagaatgaacagcagccagaccacaccaaccggggtaccacagagcctttgcagatcagtcaagtatctttgatctccaaagacacagagccagtagaattaaactgtaatttttctttttcaaggaaaagaaaaatgagctgtaccatctgtggtcataaattccctcgaaagagccaattgttggaacacatgtatacacacaaaggtaaatcttacagatataaccgatgccaaaggtttggtaatgcattggcccagagatttcagccatactgtgacagctggtctgatgtctccctgaaaagttctcgcttgtcacaagaacacttagacttgccttgtgccttagagtcagagctcacacaagaaaatgtggatactatcctagttgagtagcagcttctctttcagaatttttataccaattctgaaaaagaaaatttgcgtggcatttttaattcataaattattttcctcctcaagtttcattgactttttttcttcacagcttatccatggttttaaggttgtatatattagatcttctcataagacatattaatatgtggctattaaaatgtaacattcaattactactgtgaacttttcacaaacgaaataacaatttagaaatcagaaatcaatgtagaaatatggaaaccttaaatagttatttatagaattctaagtttttccagttatagaatcagtaaaat

SEQ ID NO: 59791 - DNA, 405 bp, Homo sapiens
gcagaacttaccatgtcgaccagccgcaaattaaagagtcatggcatgaggaggagcaagagccgatctcctcacaagggagtcaagagaggtggcagcaaaagaaaataccgtaagggcaacctgaaaagtaggaaacggggcgatgacgccaatcgcaattaccgctcccacttgtgagcccccagcgggctctgccctggtgcgcttcacacagcaccaagcagcaacaagaacagcagaaggggaactgccaaggagacctgatgttagatcaaagccagagaggagcctatggaatgtggatcaaatgccagttgtgacgaaatgaggaatgtatatgttggctgtttttccccaacatctcaataaaactttgaaagcagaaaaaaaataaaaaaaaaa

SEQ ID NO: 59792 - DNA, 1976 bp, Homo sapiens
ttttttttttttagcagtttaatttggtcctgagaatgttgcagtctttattaccccttttgcattaatccacttttctaaccaccttttaagctttaatttttaacactatacaccaagtctttgaaatcagtgatctgttatttaactctaaagcatttgacacttcttgccttaacagttttaaaaaccacacacaaaaaaactctgtaagtaatacagtaggccaaaagtttcatcctatctatcttgcagtttacctatctgatctgatctctgtaattatagttctgtcatttaaaatatactatttaaatctaatttttacatttcaaaaattatcttcagtagtaactaagtatattttctgtggattctgagaatgttatttttcagaatgtgagaatacatatgtacatttataatcttgtgactttaaagtctgttttcagatacagtatgtaaatacttgtaaaaaaatttgtataattttgtgataatgtagtttcccaaaaaaattatttagaaggcattatgttattagtaaatgagagcactgtatagaactgttcctattttctgcacttgccattccagctgcctccactgtccatacccacctcattcatcctgtcacagaaggcaggaaaactgggaactttaccaaagtagcactcagcctgagaggcctgtataatcatgcttttcaaactaaattcacttaaaaattaaaaagcagaattgaatattttaagcagcctcagtacctttggccaatgctgttttcatggtggattatgaacattatataatctttgggaaaagtgaaagtagtacaatttttagaataatgacaactgcctcactgcatctctccactcacacagcaaccgtgtagccccctaagctgcagtaccatgactaaccatgatgtcaatttcatatgctgatcctcacaacagcagtgcacaaacatgccccaaatattttaacagaatttagctcttccttaagctgtcttttcatagtaaaaacaaaacaaaaacacccaatgttaaaaccacataataaacttacaaacttgaaaaattagacacttcagatagataggcaataaaacttcatattatgaaagcaatatattccaagtttcaaagatttgacaagttctgtagagtatctttcatcagtacatgaaaacttccaaactgcatgatcttctgccaggcaggactgggtgctattcgctggtttgaggtcgaatccatttcaaggcatgtcgtggtgggacattaatggtgggatggtagaatgtgcagtccggtcttgtacattgagtgttaaacctacaatgttttggatgatagaagggacattccatcttcttacaagcagggaagtaacggcagagctgactactggaaggtggtgctggtggtgcaactgctggttttggagacagtactggaattcttctactcacatgagtgaagggacaatctggtttagtacactttgcatcatatttacaatttgggtgaacaaacaaacatttttcagcaaatttacaattggggaaggctttgcagggtgagatggggtgatggtaggcacactcatccccatttttacaagcaggccagtacttgcagcgctccaaaagtttttctggtttctgtgccacactcagttcactcatctcagcgttagaaaagctaccatttgggtcctcaagctgcctgctcagcaagtgcaactgctgtgggtggaggagacctctgagtcccttgtttgaggctgcagtttggtttacgggtttcattccttcaaagcacatgtcctcctcttgatctgacatgtatcctggggggctggggacaccatccagcgtcactataaacttgggacttgcaggtttatctggttgtacaagatctcgtgtctgcataaggtgtcctgaaagtacccgaagggaa

SEQ ID NO: 59793 - DNA, 3629 bp, Homo sapiens
ccggctcgacggctcggtcaccgcctcgctgtcgtcgcggcgcccccggccgtcctctgtccgtaccgcccccggagccagggccgagtcctcgccatgccggcccggcggctgctgctgctgctgacgctgctgctgcccggcctcgggatttttggaagtaccagcacagtgacgcttcctgaaaccttgttgtttgtgtcaacgctggatggaagtttgcatgctgtcagcaagaggacaggctcaatcaaatggactttaaaagaagatccagtcctgcaggtcccaacacatgtggaagagcctgcctttctcccagatcctaatgatggcagcctgtatacgcttggaagcaagaataatgaaggcctgacgaaacttccttttaccatcccagaattggtacaggcatccccatgccgaagttcagatggaatcctctacatgggtaaaaagcaggacatctggtatgttattgacctcctgaccggagagaagcagcagactttgtcatcggcctttgcagatagtctctgcccatcaacctctcttctgtatcttgggcgaacagaatacaccatcaccatgtacgacaccaaaacccgagagctccggtggaatgccacctactttgactatgcggcctcactgcctgaggacgacgtggactacaagatgtcccactttgtgtccaatggtgatgggctggtggtgactgtggacagtgaatctggggacgtcctgtggatccaaaactacgcctcccctgtggtggccttttatgtctggcagcgggagggtctgaggaaggtgatgcacatcaatgtcgctgtggagaccctgcgctatctgaccttcatgtctggggaggtggggcgcatcacaaagtggaagtacccgttccccaaggagacagaggccaagagcaagctgacgcccactctgtatgttgggaaatactctaccagcctctatgcctctccctcaatggtacacgagggggttgctgtcgtgccccgcggcagcacacttcctttgctggaagggccccagactgatggcgtcaccatcggggacaagggggagtgtgtgatcacgcccagcacggacgtcaagtttgatcccggactcaaaagcaagaacaagctcaactacttgaggaattactggcttctgataggacaccatgaaaccccactgtctgcgtctaccaagatgctggagagatttcccaacaatctacccaaacatcgggaaaatgtgattcctgctgattcagagaaaaagagctttgaggaagttatcaacctggttgaccagacttcagaaaacgcacctaccaccgtgtctcgggatgtggaggagaagcccgcccatgcccctgcccggcccgaggcccccgtggactccatgcttaaggacatggctaccatcatcctgagcaccttcctgctgattggctgggtggccttcatcatcacctatcccctgagcatgcatcagcagcagcagctccagcaccagcagttccagaaggaactggagaagatccagctcctgcagcagcagcagcagcagctgcccttccacccacctggagacacggctcaggacggcgagctcctggacacgtctggcccgtactcagagagctcgggcaccagcagccccagcacgtcccccagggcctccaaccactcgctctgctccggcagctctgcctccaaggctggcagcagcccctccctggaacaagacgatggagatgaggaaaccagcgtggtgatagttgggaaaatttccttctgtcccaaggatgtcctgggccatggagctgagggcacaattgtgtaccggggcatgtttgacaaccgcgacgtggccgtgaagaggatcctccccgagtgttttagcttcgcagaccgtgaggtccagctgttgcgagaatcggatgagcacccgaacgtgatccgctacttctgcacggagaaggaccggcaattccagtacattgccatcgagctgtgtgcagccaccctgcaagagtatgtggagcagaaggactttgcgcatctcggcctggagcccatcaccttgctgcagcagaccacctcgggcctggcccacctccactccctcaacatcgttcacagagacctaaagccacacaacatcctcatatccatgcccaatgcacacggcaagatcaaggccatgatctccgactttggcctctggaagaagctggcagtgggcagacacagtttcagccgccgatctggggtgcctggcacagaaggctggatcgctccagagatgctgagcgaagactgtaaggagaaccctacctacacggtggacatcttttctgcaggctgcgtcttttactacgtggtctctgagggcagccacccttttggcaagtccctgcagcggcaggccaacatcctcctgggtgcctgcagccttgactgcttgcacccagagaagcacgaagacgtcattgcacgagaattgatagagaagatgattgcgatggatcctcagaaacgcccctcagcgaacgacgtgctcaaacacccgttcttctggagcctagagaagcagctccagttcttccaggacgtgagcgacagaatagaaaaggaatccctggatggcccgatcgtgaagcagttagagagaggcgggagagccgtggtgaagatggactggcgggagaacatcactgaccccctccagacagacctgcgtaaattcaggacctataaaggtggttctgtcagagatctcctccgagccatgagaaataagaagcaccactaccgggagctgcctgcagaggtgcgggagacgctggggaccctccccgacgacttcgtgtgctacttcacgtctcgcttcccccacctcctcgcacacacctaccgggccatggagctgtgcagccacgagagactcttccagccctactacttccacgagcccccagagccccagcccccagtgactccagacgccctctgagcgagggcggcccctctgttctggtggccccagctgtgactgagggcctggtcaccacaattagagcttgatgcctcccggctttgcagggagaccaggcttcccaaaccaagtgccttgagctgcctgctctgcagcccacagaggacagtgctgaccccaggaagtgggagaagtggcccctcgtgacctacagggaactgggaagatgctggccccaaaagccttacggtcatgatgtctgcaaaggagggcctcagagacagcgcgagtagcacccccagccatctactggataaacttgcttcagactttttaaattcctgcttaatgtcagtctacaggcctttcaggaagggagaggagggaatcgtacattttgcttgcgtgctgggacagctaggctgagatgcaccaagtacagccttcactggagaccggaattgagaggtgggggatgctgaggagggggaggacggagttcagagggtgtcgtcctgcagtatgagatttctcattgatcacagatgtgcccagagtagcccaggtcactgttaactagtgtttctgcagaggcagcaggagccagcccggaattc

SEQ ID NO: 59794 - DNA, 920 bp, Homo sapiens
tttcgtgccgcgggctctgtagctgagtggtggctgggtatggaggcgaaggcggcacccaagccagctgcaagcggcgcgtgctcggtgtcggcagaggagaccgaaaagtggatggaggaggcgatgcacatgatactatgctatgcacagtgttttcatgtgggccatgttataagccccacagaagccctatcagccatgagtggaagcttcctgaggccctcactggaagcagatgctgataccatacttcttgtacagtctggagaactgccaaagaagccctcgaaaatactgaagttcctgttggctgtcttatggtctacaacaatgaagttgtagggaaggggagaaatgaagttaaccaaaccaaaaatgctactcgacatgcagaaatggtggccatcgatcaggtcctcgattggtgtcgtcaaagtggcaagagtccctctgaagtatttgaacacactgtgttgtatgtcactgtggagccgtgcattatgtgtgcagctgctctccgcctgatgaaaatcccgctggttgtatatggctgtcagaatgaacgatttggtggttgtggctctgttctaaatattgcctctgctgacctaccaaacactgggagaccatttcagtgtatccctggatatcgggctgaggaagcagtggaaatgttaaagaccttctacaaacaagaaaatccaaatgcaccaaaatcgaaagttcggaaaaaggaatgtcagcagatcttgaacatgttctgatgaaagaaccaagtgacccaaagtgacctggacaagattcatagactgaaagctgttgacatcgttgaatcatatgtttatatattgtttttaatctgcaggaaaatggggtctctcatcatttgctctgtaagggaacaaaatagcactttt

SEQ ID NO: 59795 - DNA, 1704 bp, Homo sapiens
ccatctcaaaattcttaattctatctgcaaagattcttttccaaataaagtaatatttataggttctgagggttagggcatgaacatatcttttgagggctaccatttgatccatagctgttcagcggtttacattctcggatttgacagtggcatgcttcacttgtgactgtgccattctggaatgaggttgaccagatggtgctgctggccacgtcaaactcatcctacaggctgtagcaagcaaggctcacacctccccatgtctgacacctgtgaatcacagctgggtctctggaaaaatgagtgagtgcaggaacaaaatcaaacaggagacctcatccaccactaggtctcagagaggacattgcagcccctgaaaagagagcatctctcttggaacttttgtactcagttgtattaacgcggcaaggaaaatggcacatttatgttggaaaatgtaattatttatggcacctgtgacaactgggcactttggaatcacaaagtttatggttgaagaccacttggggtgattatcctccaaaatgtttatttggcttcttgaagttctgcagaggttgaggcagctgtctcaaaactagaggacagagccctgtgggcaggtgggtgtgagaaactcaaacaccgcagtcttcacagacccacaagctattggcaggtgcaatgtgtttcttggggcagcagctatcctgagacaggatatcacagggtcacatcaaggaccccagtcatctcacaactcttagaccacagctgctgctgcagtttctggttgtaggtgacgtggagggacttggtctctttcttgttgtataggtaacggccaccaactccttccagctctggggtgactgctgcgtagatggaagtccacgctccttcatcgggggtcttgaaaagcaaccagccgagaagcttcttcgccagacgggtggcccagaacacgtgcttgtagaggtccgtgttgaccaccccggggtccaccacgttggcggtcacgtggcttccctcagccgccagcagccgctggaggtggtaggtgaacaggacaagggccagcttgctctgggcgtaggctgcgtggggtgagtagcaggcactgctctgaaggtcatccatgttcagctcagcgacgtaatgggtggcagaggagacggtgaccaccctcgcactgtggccaggggacccagactctttcagcgtatccaagagaaggttggtcagcaggaagtgccctaggtagttcaggccgaaatgttcttcgaatccatctctggttttcctctgagggaccatcatcaccccagcattgttgatcaggacatggagaggaatcttcttcatcttgaacttctgcacaaactgccggatggaagtcatggaagccaagtcacagtataaaaattccactttgtcgttcaaggtttcttcttttattttgcttacaacttgtttggctttgctgtcattatttccagctatgataacatgcatgccaagtctcgccagatgcttcgctgtagaatagccaatgccatctgtccctcccgtcactatagcgacacggtcaggtcgtggggggaaaactggctccagcaagcccccgcggcagcgccgcagcagctgcgccaggatcaccgcggcgcaaacagcgtagacccgcagggcccgacagcaacg

SEQ ID NO: 59796 - DNA, 860 bp, Homo sapiens
ttttttttttttcacagccacatatatgtttattctgcgagtccgtgtcccacagtctgagactcttcttcccctccccttcccgccccgtgaagtggcccggggccgagccccgcctccatcttggctcagccaattcccacccagtttccaggagtctcatttgcatttccgggagcagctgtccaatgggaaggcagcaccctgcccccccccacaagggggcggcactcctggtggatcgcaccactcttgggatccagggatggggggaacgggcttccactgaggtccgggtgacaggagggtggtcttccctcaaggcagggttggagttcagtggaggagggagttctggccttggaagaggcccagcagtccgctgtctggggcgggctccttgatgagtttctggatctccttgaactgggggtggacggcatcgcccacaagctgcagaatgagcccttcgctggtggagaggaaggcaccactctgtctcatgcgggccagagccaccagccggtccacctggctgcgtgaggagcaggcgtccaccaccacatggacctgcagcccccggtctaggaggtccagggtcgtgttcttgagcatgcgggcagccactgagacgatctgtgggaagtaggcgatgttgtggcggaacttctcctgcatgtcacacaggaacaggacagaggatcctgggaggactcggcccaggctgggcctggcagccgccattttccggaaggtgccgggttcgagcccggaacggcccctctgcaggtgaggcgggggcaccctcacctctcggcgctcggacggcctccgctgaggcctcttgcgggcttcccagg

SEQ ID NO: 59797 - DNA, 4670 bp, Homo sapiens
tttcgtctggaacccacgcggaggaaggaagagacgcaggcaggctgcggttacccaagcggccacccgggcctcagggaccccttccccgagagacggcaccatgacccagggaaagctctccgtggctaacaaggcccctgggaccgaggggcagcagcaggtgcatggcgagaagaaggaggctccagcagtgccctcagccccaccctcctatgaggaagccacctctggggaggggatgaaggcaggggccttccccccagcccccacagcggtgcctctccaccctagctgggcctatgtggaccccagcagcagctccagctatgacaacggtttccccaccggagaccatgagctcttcaccactttcagctgggatgaccagaaagttcgtcgagtctttgtcagaaaggtctacaccatcctgctgattcagctgctggtgaccttggctgtcgtggctctctttactttctgtgaccctgtcaaggactatgtccaggccaacccaggctggtactgggcatcatatgctgtgttctttgcaacctacctgaccctggcttgctgttctggacccaggaggcatttcccctggaacctgattctcctgaccgtctttaccctgtccatggcctacctcactgggatgctgtccagctactacaacaccacctccgtgctgctgtgcctgggcatcacggcccttgtctgcctctcagtcaccgtcttcagcttccagaccaagttcgacttcacctcctgccagggcgtgctcttcgtgcttctcatgactcttttcttcagcggactcatcctggccatcctcctacccttccaatatgtgccctggctccatgcagtttatgcagcactgggagcgggtgtatttacattgttcctggcacttgacacccagttgctgatgggtaaccgacgccactcgctgagccctgaggagtatatttttggagccctcaacatttacctagacatcatctatatcttcaccttcttcctgcagctttttggcactaaccgagaatgaggagccctccctgccccaccgtcctccagagaatgcgcccctcctggttccctgtccctcccctgcgctcctgcgagaccagatataaaactagctgccaacccagcctgtggccaggtcactgtctaccccagcccagcccagccctctgccgcttgtacatatgccatggggaccctgaggaactgaggccacgtcaatccctgtgccgccccattcgcccgttacatcttccaaactgggacggtcaaggctgaaggctcctctgggtttgagggtccaagggacaaggaggagaagcctagcaggatttcagatgcaggagagagacccaggaagcccggcagagccctgagccccactgcaattcctcctagggctgcacaatcatgtggccttagggcacactgtcctgcatccagtctgtgtcctcctgtctttctcatccaggtcaggcattgacactttgtaagaaagggggtaggggacacagctgggcaggtggagtgggtgggcaggatggctgtcccagtctgcccatcttctcttggctctgggaccagcggcttgttctagggatttggacctggaggccaagggcaataggagagggtctgaagcctgtgccgtctgctgcttgctgtgaatggccctcccgggtcatgacagagctcttttggggcaggaggtgagggcagggggccccgctccttggtaagggcctgccctggggctcccagggaagtgggagctggggagccaatccacccagacccgcgtccacctgggaggcatttggggttgcaggaccgagacccacatcctctcactcacttctccacccgccaggcagctgccacaggcctaaggctgagtgaggtgtgattgggccctccggctggatgttctgggggaggaggcaatcgctgtagctgccaggccagccccatctggaaggagtccctgctctgcctcagccctaacccgaggctgtgtgggagtcccttctgcacctcttatttcctaaacccttcctgtcagctgctgtttgctggctcgtccccagccaggcctcctgaggtcttcatagttggcacagtccacatctcttctagcttcactggccactcactcagcctagagtccctaagtgctcccccacttatctctgcatctctccaatttggaagccatccagctgatgctaacagccagggccagtccctccagctggtcccatgtaatgaggccagggctccttatcagcttccaggcggctgggatctcaggcagggtgtgcgtcagccctccaacccccagaggggcgcctgtggggagggaaccaggaggccacactgggggagcgtgcagccagcatgtgcagtggccaactccaggccagtggaaagttactgtgtggatacaggaaggctctgagtggatagcaggaccctcccttggcttcgccctctctctctctctcccctgtgctgggagctccgtctgccttgggaagggagacgaggtgtgctgttccttcccagccccatccctccccacccttcctactcccagctttcaagaaacattgcagaagcatttgaagttttgttccatcttggatatttgaagagaaaaggagccaagaactggcgggtggtgtgtgtgcagcaaaggcattgggggcacgggggagatgcccactgtgtgctgggctaaattaatccatcgcagagatcctccagagacagcgctctgctcatgtccgtagcagagggaaaagccgaggtgctcagaaaggctcggtaatgagtcccaggtcatacggctagcgagtggcgggcctggggttcagacccacagctgcctcaagcaaacagggtatcacgcttgcccctgggcctgggtgggggccggaatgagaccacatgagagcgcagagaggtgggtggtcaggccctgatgtcctggggatttcttgtcctcagtgccacccggcctcccgtctttcctgaaacccctcgccagattttgcactctgaggtttttatcttccagacaagagctgggaggcaagatttctggtttctggttcctagcctcactgccagcgggctcctgctattaggtgagggtttcttgctgtctggaattcagtttttccatctgccacatggaagttcatagccaggatagggcgggagaggcaccagaacatttctctccactgactttctcacccggttcccaccctcctccacctcctctcctccgggcccctcagtttcctctcctcatctctggcctcagttccagagggttagccccagcaccccactctcctgccactgtcagatagccttggtcatgcttcctagaatctacttgtccaagttctcctctccctgggataagttactgcagaaactggggatttagaagcttattcagggctgagtgccaaaagcttgggggaggagggacaggtcctcggcaataaacagtgtcacacacgcatcacagccatttgagaaatggcttctttgcagagctggggaagccgggcagaagatgccgcagcctcctactctgggtcctgagggggggtggcaggtaccacagtgtaggcagcagggtcagggcccaagtctatgcgtttcatctccaatccaggcagtgaggaatcctgaaacaccaggagaggcgtcagaagtaggaagggcaggggaacaggaatgcaagattaaggaaaccgcagctgagcaggtgtcacaagctgtaaaggaggaagggagtctgcaggcccttcacatttttggcctgggtggggctgggcccaggaaggggtgggctggattttgtaaagctggaggcagccaggaatctgactgtccggaatgtgagttgaggggtctcccactgaagtcctcttctggaagctgcagatgggggcccgggaggcacacacgagtctgggactcattcccgggcacacctatggctccttcggtatcacctggggaagccccggaatcttagttcttccattccctactcttccttccgagggagtcaggatgggacagacacccattttccaaaaggctccttgcctccttccctggcccacctgaagccaagtcccaggtgtcctggctgctctcctgggcggggtgggatttttgcataagcactttgcttgccctccagtggctgcttgaggaaaacgcagggcctggtttgggagagtcaccgagggcccatgtggctggaggttgggggcaggatctggcccgagctctcctcagacctccccagacctgtcttctcatcagccaccgctgttttcttttgccgaacgatggttgcatctctcggacacagtgtaccccctcccaagccctccctgagccgttctcctgagtccctgagggcagacacagctccagggacccaggccagctgccacacccccgacactcctgctgtccactggccttagctcctgcaagttccccagtgtccgcacctgttcccttccctgacctcaccttcctggggtctgtgactgactggagataaaaataaaagcaattgtgacacctgaaaaaaaaaa

SEQ ID NO: 59798 - DNA, 2624 bp, Homo sapiens
cgcctctcccaaagtctagccgggcaggggaacgcggtgcattcctgaccggcacctggcgaggctcatgcgtcccgtgagggcggttcctcgagcctgggggcgctcagattgctttggagacgctgagagaacctttgcgagagcgccggttgacgtgcggagtgcggggctccgggggactgagcagcacgagaccccatcctcccctccgggttttcacactgggcgaagggaggactcctgagctctgcctcttccagtaacattgaggattactgtgttttgtgagagctcgctaggcgccctaagcaacagagttctgagaaatcgagaaacatgataaggaattggctgactatttttatcctttttcccctgaagctcgtagagaaatgtgagtcaagcgtcagcctcactgttcctcctgtcgtaaagctggagaacggcagctcgaccaacgtcagcctcaccctgcggccaccattaaatgcaaccctggtgatcacttttgaaatcacatttcgttccaaaaatattactatccttgagctccccgatgaagttgtggtgcctcctggagtgacaaactcctcttttcaagtgacatctcaaaatgttggacaacttactgtttatctacatggaaatcactccaatcagaccggcccgaggatacgctttcttgtgatccgcagcagcgccattagcatcataaaccaggtgattggctggatctactttgtggcctggtccatctccttctaccctcaggtgatcatgaattggaggcggaaaagtgtcattggtctgagcttcgacttcgtggctctgaacctgacgggcttcgtggcctacagtgtattcaacatcggcctcctctgggtgccctacatcaaggagcagtttctcctcaaataccccaacggagtgaaccccgtgaacagcaacgacgtcttcttcagcctgcacgcggttgtcctcacgctgatcatcatcgtgcagtgctgcctgtatgagcgcggtggccagcgcgtgtcctggcctgccatcggcttcctggtgctcgcgtggctcttcgcatttgtcaccatgatcgtggctgcagtgggagtgatcacgtggctgcagtttctcttctgcttctcctacatcaagctcgcagtcacgctggtcaagtattttccacaggcctacatgaacttttactacaaaagcactgagggctggagcattggcaacgtgctcctggacttcaccgggggcagcttcagcctcctgcagatgttcctccagtcctacaacaacgaccagtggacgctgatcttcggagacccaaccaagtttggactcggggtcttctccatcgtcttcgacgtcgtcttcttcatccagcacttctgtttgtacagaaagagaccggggtatgaccagctgaactagcacccagggacccagtgtacccagcctctggcctcgtgccctgctggggaaggcctcacccagcgaaggccggagaagcggttgggccctggcacacagggctggctcagtgtgcggacagaggagaccactctgctcctggggccagaggccattcaatagcctgccttcgtccgggcccctcctgggcctccccggccaggcacgtggcaccgtcgccttgacaccgccatctcttttctttaaggcttcaggcagcgcgcacaggctctggcagccgtctcaggcaggactgggcagcaagcttgcagccgaaggccttgccccaaactaccagcgtttctgcaagcagcttgaagggctgaccttgcagccgggtgagccaagggcactttgctgccaccgctgcattcccagagatcaagcagcccggtgccgtggccagtgaactcagaggtgctggtggacgggctaggactttggggttaggccatggggctctttctctgaaggccactttcctgacgtactctctgtacataactcagcgtccgtgactgcagtaacagccagccctacccagagtatttctgagccatgaggggcccaccagattggttctgaattggattcatgcccagcgcattagcatagtaactcctttcagattttttggagggacgtttggaagtggcttactctcttctgccctctctcctacctccaccttctcagatgagccccatctgagcacatccagctgctccttacccagcatctggagtacaggacatagctctctcctgctaccagtctgtgccttagaggtctgttaggcctgccaaacggcgaccagctcccctggagcgagggcaggccccttccctctctttccccagacacctacttgagactcaccaatttctggcctgttcaggagcctcagataagtatttgtacttgagaccacctcacacaatctgtatggggcccaaccctgatctcaaacctccttccctctgcctgaagctgtcgtccttcctatggcaggaggggggggggggtcccaggacgtgccctcatacatgacttgagcttggcagtcccctgagtttccttttatgagatcaacgcgaggggcctggtttttgaattaaagccccctcgcttcaaaaaaaaaa

SEQ ID NO: 59799 - DNA, 1544 bp, Homo sapiens
  misc_feature (1)...(1544): n = a,t,c or g
cacgcgtccgtttaattaagcatggaatacagaaaacaacaaaaaacttaagctttaatttcatctggaattccacagagacaaggccactttatgtttcccaggctggactggaacccctgggctcaaatgatcctcctacctaagcctgcagagtagcgaggacttcagttttcttagctccctggacccggttgacctgttggctcttcccgctggctgctctatcacgtggtgctctccgactactcaccccgagtgtaaagaaccttcggctcgcgtgcttctgagctgctgtggatggcctcggctctctggactgtccttccgagtaggatgtcactgagatccctcaaatggagcctcctgctgctgtcactcctgagtttctttgtgatgtggtacctcagccttccccactacaatgtgatagaacgcgtgaactggatgtacttctatgagtatgagccgatttacagacaagactttcacttcacacttcgagagcattcaaactgctctcatcaaaatccatttctggtcattctggtgacctcccacccttcagatgtgaaagccaggcaggccattagagttacttggggtgaaaaaaagtcttggtggggatatgaggttcttacatttttcttattaggccaagaggctgaaaaggaagacaaaatgttggcattgtccttagaggatgaacaccttctttatggtgacataatccgacaagattttttagacacatataataacctgaccttgaaaaccattatggcattcaggtgggtaactgagttttgccccaatgccaagtacgtaatgaagacagacactgatgttttcatcaatactggcaatttagtgaagtatcttttaaacctaaaccactcagagaagtttttcacaggttatcctctaattgataattattcctatagaggattttaccaaaaaacccatatttcttaccaggagtatcctttcaaggtgttccctccatactgcagtgggttgggttatataatgtccagagatttggtgccaaggatctatgaaatgatgggtcacgtaaaacccatcaagtttgaagatgtttatgtcgggatctgtttgaatttattaaaagtgaacattcatattccagaagacacaaatcttttctttctatatagaatccatttggatgtctgtcaactgagacgtgtgattgcagcccatggcttttcttccaaggagatcatcactttttggcaggtcatgctaaggaacaccacatgccattattaacttcacattctacaaaaagcctagaaggacaggatactttgtggaaagtgttaaataaagtaggtactgtggaaaattcatggggaggtcagtgtgctggcttacactgaactgaaactcatgaaaaacccagactggagactggagggttacacttgtgatttattagtcaggcccttcaaagatgatatgtggaggaattaaatataaaggaattggaggtttttgctaaagaaattntatagggg

SEQ ID NO: 59800 - DNA, 7086 bp, Homo sapiens
tttcgtgtgagtggggccgggacccgcagagccgagccgacccttctctcccgggctgcggcagggcagggcggggagctccgcgcaccaacagagccggttctcagggcgctttgctccttgttttttccccggttctgttttctccccttctccggaaggcttgtcaaggggtaggagaaagagacgcaaacacaaaagtggaaaacagttaatgaccagccacggcgtccctgctgtgagctctggccgctgccttccagggctcccgagccacacgctgggggtgctggctgagggaacatggcttgttggcctcagctgaggttgctgctgtggaagaacctcactttcagaagaagacaaacatgtcagctgctgctggaagtggcctggcctctatttatcttcctgatcctgatctctgttcggctgagctacccaccctatgaacaacatgaatgccattttccaaataaagccatgccctctgcaggaacacttccttgggttcaggggattatctgtaatgccaacaacccctgtttccgttacccgactcctggggaggctcccggagttgttggaaactttaacaaatccattgtggctcgcctgttctcagatgctcggaggcttcttttatacagccagaaagacaccagcatgaaggacatgcgcaaagttctgagaacattacagcagatcaagaaatccagctcaaacttgaagcttcaagatttcctggtggacaatgaaaccttctctgggttcctgtatcacaacctctctctcccaaagtctactgtggacaagatgctgagggctgatgtcattctccacaaggtatttttgcaaggctaccagttacatttgacaagtctgtgcaatggatcaaaatcagaagagatgattcaacttggtgaccaagaagtttctgagctttgtggcctaccaagggagaaactggctgcagcagagcgagtacttcgttccaacatggacatcctgaagccaatcctgagaacactaaactctacatctcccttcccgagcaaggagctggccgaagccacaaaaacattgctgcatagtcttgggactctggcccaggagctgttcagcatgagaagctggagtgacatgcgacaggaggtgatgtttctgaccaatgtgaacagctccagctcctccacccaaatctaccaggctgtgtctcgtattgtctgcgggcatcccgagggaggggggctgaagatcaagtctctcaactggtatgaggacaacaactacaaagccctctttggaggcaatggcactgaggaagatgctgaaaccttctatgacaactctacaactccttactgcaatgatttgatgaagaatttggagtctagtcctctttcccgcattatctggaaagctctgaagccgctgctcgttgggaagatcctgtatacacctgacactccagccacaaggcaggtcatggctgaggtgaacaagaccttccaggaactggctgtgttccatgatctggaaggcatgtgggaggaactcagccccaagatctggaccttcatggagaacagccaagaaatggaccttgtccggatgctgttggacagcagggacaatgaccacttttgggaacagcagttggatggcttagattggacagcccaagacatcgtggcgtttttggccaagcacccagaggatgtccagtccagtaatggttctgtgtacacctggagagaagctttcaacgagactaaccaggcaatccggaccatatctcgcttcatggagtgtgtcaacctgaacaagctagaacccatagcaacagaagtctggctcatcaacaagtccatggagctgctggatgagaggaagttctgggctggtattgtgttcactggaattactccaggcagcattgagctgccccatcatgtcaagtacaagatccgaatgggcattgacaatgtggagaggacaaataaaatcaaggatgggtactgggaccctggtcctcgagctgacccctttgaggacatgcggtacgtctgggggggcttcgcctacttgcaggatgtggtggagcaggcaatcatcagggtgctgacgggcaccgagaagaaaactggtgtctatatgcaacagatgccctatccctgttacgttgatgacatctttctgcgggtgatgagccggtcaatgcccctcttcatgacgctggcctggatttactcagtggctgtgatcatcaagggcatcgtgtatgagaaggaggcacggctgaaagagaccatgcggatcatgggcctggacaacagcatcctctggtttagctggttcattagtagcctcattcctcttcttgtgagcgctggcctgctagtggtcatcctgaagttaggaaacctgctgccctacagtgatcccagcgtggtgtttgtcttcctgtccgtgtttgctgtggtgacaatcctgcagtgcttcctgattagcacactcttctccagagccaacctggcagcagcctgtgggggcatcatctacttcacgctgtacctgccctacgtcctgtgtgtggcatggcaggactacgtgggcttcacactcaagatcttcgctagcctgctgtctcctgtggcttttgggtttggctgtgagtactttgccctttttgaggagcagggcattggagtgcagtgggacaacctgtttgagagtcctgtggaggaagatggcttcaatctcaccacttcggtctccatgatgctgtttgacaccttcctctatggggtgatgacctggtacattgaggctgtctttccaggccagtacggaattcccaggccctggtattttccttgcaccaagtcctactggtttggcgaggaaagtgatgagaagagccaccctggttccaaccagaagagaatatcagaaatctgcatggaggaggaacccacccacttgaagctgggcgtgtccattcagaacctggtaaaagtctaccgagatgggatgaaggtggctgtcgatggcctggcactgaatttttatgagggccagatcacctccttcctgggccacaatggagcggggaagacgaccaccatgtcaatcctgaccgggttgttccccccgacctcgggcaccgcctacatcctgggaaaagacattcgctctgagatgagcaccatccggcagaacctgggggtctgtccccagcataacgtgctgtttgacatgctgactgtcgaagaacacatctggttctatgcccgcttgaaagggctctctgagaagcacgtgaaggcggagatggagcagatggccctggatgttggtttgccatcaagcaagctgaaaagcaaaacaagccagctgtcaggtggaatgcagagaaagctatctgtggccttggcctttgtcgggggatctaaggttgtcattctggatgaacccacagctggtgtggacccttactcccgcaggggaatatgggagctgctgctgaaataccgacaaggccgcaccattattctctctacacaccacatggatgaagcggacgtcctgggggacaggattgccatcatctcccatgggaagctgtgctgtgtgggctcctccctgtttctgaagaaccagctgggaacaggctactacctgaccttggtcaagaaagatgtggaatcctccctcagttcctgcagaaacagtagtagcactgtgtcatacctgaaaaaggaggacagtgtttctcagagcagttctgatgctggcctgggcagcgaccatgagagtgacacgctgaccatcgatgtctctgctatctccaacctcatcaggaagcatgtgtctgaagcccggctggtggaagacatagggcatgagctgacctatgtgctgccatatgaagctgctaaggagggagcctttgtggaactctttcatgagattgatgaccggctctcagacctgggcatttctagttatggcatctcagagacgaccctggaagaaatattcctcaaggtggccgaagagagtggggtggatgctgagacctcagatggtaccttgccagcaagacgaaacaggcgggccttcggggacaagcagagctgtcttcgcccgttcactgaagatgatgctgctgatccaaatgattctgacatagacccagaatccagagagacagacttgctcagtgggatggatggcaaagggtcctaccaggtgaaaggctggaaacttacacagcaacagtttgtggcccttttgtggaagagactgctaattgccagacggagtcggaaaggattttttgctcagattgtcttgccagctgtgtttgtctgcattgcccttgtgttcagcctgatcgtgccaccctttggcaagtaccccagcctggaacttcagccctggatgtacaacgaacagtacacatttgtcagcaatgatgctcctgaggacacgggaaccctggaactcttaaacgccctcaccaaagaccctggcttcgggacccgctgtatggaaggaaacccaatcccagacacgccctgccaggcaggggaggaagagtggaccactgccccagttccccagaccatcatggacctcttccagaatgggaactggacaatgcagaacccttcacctgcatgccagtgtagcagcgacaaaatcaagaagatgctgcctgtgtgtcccccaggggcaggggggctgcctcctccacaaagaaaacaaaacactgcagatatccttcaggacctgacaggaagaaacatttcggattatctggtgaagacgtatgtgcagatcatagccaaaagcttaaagaacaagatctgggtgaatgagtttaggtatggcggcttttccctgggtgtcagtaatactcaagcacttcctccgagtcaagaagttaatgatgccaccaaacaaatgaagaaacacctaaagctggccaaggacagttctgcagatcgatttctcaacagcttgggaagatttatgacaggactggacaccagaaataatgtcaaggtgtggttcaataacaagggctggcatgcaatcagctctttcctgaatgtcatcaacaatgccattctccgggccaacctgcaaaagggagagaaccctagccattatggaattactgctttcaatcatcccctgaatctcaccaagcagcagctctcagaggtggctccgatgaccacatcagtggatgtccttgtgtccatctgtgtcatctttgcaatgtccttcgtcccagccagctttgtcgtattcctgatccaggagcgggtcagcaaagcaaaacacctgcagttcatcagtggagtgaagcctgtcatctactggctctctaattttgtctgggatatgtgcaattacgttgtccctgccacactggtcattatcatcttcatctgcttccagcagaagtcctatgtgtcctccaccaatctgcctgtgctagcccttctacttttgctgtatgggtggtcaatcacacctctcatgtacccagcctcctttgtgttcaagatccccagcacagcctatgtggtgctcaccagcgtgaacctcttcattggcattaatggcagcgtggccacctttgtgctggagctgttcaccgacaataagctgaataatatcaatgatatcctgaagtccgtgttcttgatcttcccacatttttgcctgggacgagggctcatcgacatggtgaaaaaccaggcaatggctgatgccctggaaaggtttggggagaatcgctttgtgtcaccattatcttgggacttggtgggacgaaacctcttcgccatggccgtggaaggggtggtgttcttcctcattactgttctgatccagtacagattcttcatcaggcccagacctgtaaatgcaaagctatctcctctgaatgatgaagatgaagatgtgaggcgggaaagacagagaattcttgatggtggaggccagaatgacatcttagaaatcaaggagttgacgaagatatatagaaggaagcggaagcctgctgttgacaggatttgcgtgggcattcctcctggtgagtgctttgggctcctgggagttaatggggctggaaaatcatcaactttcaagatgttaacaggagataccactgttaccagaggagatgctttccttaacagaaatagtatcttatcaaacatccatgaagtacatcagaacatgggctactgccctcagtttgatgccatcacagagctgttgactgggagagaacacgtggagttctttgcccttttgagaggagtcccagagaaagaagttggcaaggttggtgagtgggcgattcggaaactgggcctcgtgaagtatggagaaaaatatgctggtaactatagtggaggcaacaaacgcaagctctctacagccatggctttgatcggcgggcctcctgtggtgtttctggatgaacccaccacaggcatggatcccaaagcccggcggttcttgtggaattgtgccctaagtgttgtcaaggaggggagatcagtagtgcttacatctcatagtatggaagaatgtgaagctctttgcactaggatggcaatcatggtcaatggaaggttcaggtgccttggcagtgtccagcatctaaaaaataggtttggagatggttatacaatagttgtacgaatagcagggtccaacccggacctgaagcctgtccaggatttctttggacttgcatttcctggaagtgttccaaaagagaaacaccggaacatgctacaataccagcttccatcttcattatcttctctggccaggatattcagcatcctctcccagagcaaaaagcgactccacatagaagactactctgtttctcagacaacacttgaccaagtatttgtgaactttgccaaggaccaaagtgatgatgaccacttaaaagacctctcattacacaaaaaccagacagtagtggacgttgcagttctcacatcttttctacaggatgagaaagtgaaagaaagctatgta

SEQ ID NO: 59801 - DNA, 1883 bp, Homo sapiens
tttcgtctcacgcctgtaatcccagcgctttgggaggctgaggctgacagatcatctgaggtcaggagttcaagaccagcctggccaacatgctgaaaacctgtctctactaaaaatgcaaaatttagccaggcgtggtggtgggtgcctgtaatctcagctactccggaggctgagacaggagaatggcctggacccaggaggcggaagttgcagtaagccgagatcgtgtcacttcactccagcctggacaacagagtgagactctgtctcgaaaaaaaaaaaggacaaaatgctgtaggattccactgatatgacgtacctggagtcagcagagccacagagacagatggtaaaatgcccgcagggccccggaccccggcttccaggagcgcttcttccagcagcgtctggaccacttcaacttcgagcgcttcggcaacaagaccttccctcagcgcttcctggtgtcggacaggttctgggtccggggcgaggggcccatcttcttctacactgggaacgagggcgacgtgtgggccttcgccaacaactcgggcttcgtcgcggagctggcggccgagcggggggctctactggtcttcgcggagcaccgctactacgggaagtcgctgccgttcggtgcgcagtccacgcagcgcgggcacacggagctgctgacggtggagcaggccctggccgacttcgcagagctgctccgcgcgctacgacgcgacctcggggcccaggatgcccccgccatcgccttcggtggaagttatggggggatgctcagtgcctacctgaggatgaagtatccccacctggtggcgggggcgctggcggccagcgcgcccgttctagctgtggcaggcctcggcgactccaaccagttcttccgggacgtcacggcggactttgagggccagagtcccaaatgcacccagggtgtgcgggaagcgttccgacagatcaaggacttgttcctacagggagcctacgacacggtccgctgggagttcggcacctgccagccgctgtcagacgagaaggacctgacccagctcttcatgttcgcccggaatgccttcaccgtgctggccatgatggactacccctaccccactgacttcctgggtcccctccctgccaaccccgtcaaggtgggctgtgatcggctgctgagtgaggcccagaggatcacggggctgcgagcactggcagggctggtctacaacgcctcgggctccgagcactgctacgacatctaccggctctaccacagctgtgctgaccccactggctgcggcaccggccccgacgccagggcctgggactaccaggcctgcaccgagatcaacctgaccttcgccagcaacaatgtgaccgatatgttccccgacctgcccttcactgacgagctccgccagcggtactgcctggacacctggggcgtgtggccccggcccgactggctgctgaccagcttctgggggggtgatcttagagccgccagcaacatcatcttctccaacgggaacctggacccctgggcagggggcgggattcggaggaacctgagtgcctcagtcatcgccgtcaccatccaggggggagcgcaccacctcgacctcagagcctcccacccagaagatcctgcttccgtggttgaggcgcggaagctggaggccaccatcatcggcgagtgggtaaaggcagccaggcgtgagcagcagccagctctgcgtggggggcccagactcagcctctgagcacaggactggaggggtctcaaggctcctcatggagtgggggcttcactcaagcagctggcggcagagggaaggggctgaataaacgcctggaggcctggaaaaaaaaaa

SEQ ID NO: 59802 - DNA, 1144 bp, Homo sapiens
agctgaggaaggggaagagaagtccagccgccaagtccagccttccccggcgcgcagccccgacggggccgcggcaggcgcggcgagagcgctgacggagccatgagagagtacaaagtggtggtgctgggctcgggcggcgtgggcaagtccgcgctcaccgtgcagttcgtgacgggctccttcatcgagaagtacgacccgaccatcgaagacttttaccgcaaggagattgaggtggactcgtcgccgtcggtgctggagatcctggatacggcgggcaccgagcagttcgcgtccatgcgggacctgtacatcaagaacggccagggcttcatcctggtctacagcctcgtcaaccagcagagcttccaggacatcaagcccatgcgggaccagatcatccgcgtgaagcggtacgagcgcgtgcccatgatcctggtgggcaacaaggtggacctggagggtgagcgcgaggtctcgtacggggagggcaaggccctggctgaggagtggagctgccccttcatggagacgtcggccaaaaacaaagcctcggtagacgagctatttgccgagatcgtgcggcagatgaactacgcggcgcagcccaacggcgatgagggctgctgctcggcctgcgtgatcctctgaggcggccaccgcgcgccggccgcgctctgcgcacaaaagccaaacgcatccgactctctaaatgtgatttatttcttgctttgagattggagaccactttgcattggccagggtgtcttgggagcccggctggcctccgcggccggcgtcccctgcctccaccctgtgcccgagggggtgtccggtcctgcccatccgatactctggtggaaatgtggctctttgcagcatgtacgtttctccctgattttggttgatgcatatttccccgtttaagtagccgttagggcgcagtatcggcagcttgacacccaccaagcaaaagtttcagcctggaaaaaaaatgggggggaagggtggatgaaaaggagggagagaaggtggaaatggtttttttttttcttttttcccattcccttccttttgttttttttctttttgggtcatcccgcgtttttttgcgccccagtcttgaaaccgtgtggggggc

SEQ ID NO: 59803 - DNA, 790 bp, Homo sapiens
tttttgatttccatgctatttaatcaagtaatttacaatgtacacattcctgagtatacaccattgtggtgatataatttattttggaattttctccattcagcttaaaaggtgtttcttcccaagaaactgaacttttctgtcaaatgcacttgatcgaataggagaattgggttcataaaatggattcattgaaaattttatatataaatcataaacatcagtaaagaagttctttattccatcttcttgtcttatgtcatgaagcataataaacctcatatgccccgcggtgacaaatgctgacacaaaccactcgttgaacttgtccacagttttcaagtacatgttgttcgacagccacatgttctcatctacgaggtcgagagcagcatgagctatgaactggttcagatgacgatggtcgtctttggattctgccttcccagctggcaaaaactccatttcaaaaactggattatcatggtgaccaacaattacaaagtagaagcttccagacatggtcttcaatatatggctcctcgggttcttcggcggggactccgcaagtccagccagggaagagaggggcgggggcgacaaaggcaagacaaggacaccgccgtccccagtccttgtcagctgagcttctgccactgtcagttgtgcctgtgtcactaccgcctctgcgtacaaggaaccaagccgcttctcgcgcttttccgctccgtcacttcggtgacgtcatagagcgccaaaggccggaactagtgaaaacaccagagaaaat

SEQ ID NO: 59804 - DNA, 1783 bp, Homo sapiens
tccctggtgtgtaggtatggatttagaaatcggtccactcagaacgcaggggctttcaaaagtttcctctaggaagcatctgtcagtataccctcttaatgtttgacagttctaatcacaattatatttagaatttgagaaacccccctgtgtgtctaatggctgccagcgtgatgccagagaaccctggcaggtggcctgcagtaagcagaaggcccacaccttctgcagagccaggagcagtgcccgagtcccccggtctgtgtctatcctttcacccacatggtcactgtggagatgaccatctgaccagacttcggagcccccaggcagaagaaaggctgcagggggcctgggaaggtggcctgggagtaggtgtgcaggtgggacccatcgcttacactgtagaaggacacttccccggcttcgaagtccaggaagatgcccatgtggctgggaggctccatcagcatgaccggggttagggcagagaaggtggataagtacttggtccccttggacagctgcaccacccagaagccgttttcggggcacttggggaccctgtctttccggctcacgttgtccctgcacacacccagggcccacaacgcgtccccggtgatgttcatgcccacctcccagtagtgcctcccagaggagaaggccgtctggcccacagcacaggggtaagccacaaatcggtccttgctgcagaacccactgccctccggcgaagagccgaggtagcgcctctggcggctctcatacaggaggaggtaggggtacgcggaggtggcatcaggcaccacatcctctagaaagcctcttagcacttcaatctgtccgggaactctgcacacagtcctgggtctggttgggggggcaacctctgggcactgcacactcacgttgttcttcctgctcaggggttccttcatgtcctgcagcatctggaggggcccctgtgtgctccgctcctccagctgcagcagcagcagctccagagagtgaccctgccggtccaggcaggccacgctctcccggagcctgctggcagtctcctcttcttccgtctccagagcctggaggagcctctgctcttcttccaccaggtagaggttcatcttctcaaactccagcacaatgcgttctctccgctccttcaccttgccctgccactcggctaagctctgctcctccctggcctgcagattccctgtcctggtgatctgctcccgaaggtactccatgtcctcctccagcttcaacttgtacccctgcactgcctcctcggcgggcagcaccctgtgcagccggtgctcccgggactccctgcacaccacacagatggggctctggtccttctggcagaaaagcttgaggggctcgtggtgctcctggcacaggtcttgcttctgcagaccaggatgctgctgcgccatctcggccaccttggtcagcagccggttgggcagcaggttcctctgcggggacatctctctgcactcggggcaggggaaggagcccttccgcttccgcctccccttcttgcccctcgccttttcccagctcagctggatgcaggctcggcagaagttgtggccacaggtggtcatcacagggtctgtgaagtaatccagacagatggagcacgtagcttcctcctgcagttttctggcgagttccacagcctccatggctcctgggagacacgaggcaggttcccgcttgagggactcttgttgaagcgcgctagcccctccagggacgcggcacgaaa

SEQ ID NO: 59805 - DNA, 1331 bp, Homo sapiens
tttcgtgccagggagccgcaggcaagggactaaggggaggggggctcagtgccagctgcttaaaaatgcccctgtggcagcgaggggcaccagaggctgggtctaattagttgagaagcagtgacacccccaaccactccccaaacaggctggctcccgtctccaggccccaaggagccacacctggaccagaccccaggaaaggcaagggcgctagctggtgggagccaccccgccatgctgatgtcagagaagcaagaactctggagaagcagcctcctgggaccagaggagggccagcagcaggcagcccggagacagaactctcacccacgcctctccaagcctcccaacagaagacagaggtcccccacagccagagacatttcctgaagacatggggaacacagaggcagaaacagcccatccacccaggagctgtcccccacactgccgggagccggcacccagagccgccaggtaaaactgaggccacctggttcaacatcacctttcacagaaggggaagcagccacagaaagaagggcctcgttaagaagtggaacctgggacccccaagcggtgtctctcatcctgactggggatccagagtaggagggagcctttggtggggtaagtggaatggggcggggtggggggtggccatagacccctcttctcagtaaggccctcatgtgaaggaggcaggggttgggacaagtgctaagtatgcaagactcaagggaagagctgctggagccaggaaaagcacctccctcccggcccctctgcccctcctcatagcccagctgcactgactcctcctccaggaagccttctcagcttccccaggggtgggaacctttttgtcctccaggtgtgcttggctgtcctttcttgggctctctctctctctctctcctcatcccacttgagtctgccccctattcaccttgtgaggggaattttccttctactcaatctgaccgaggtcctccaggtcaaggacagcgaggctctcagtcccacttccccttggcacatagaagaggcagtgcgctgaagggacaggtgaaatgattagaccctgcccccaaaccaaggcctggccaattggacagggcatgagacattcagcgtagaggttaaaacgagggccctgggttaggaaccccagctcagttctcagctctgtacccttggaaaattcccttcccatggagctttgtggatgcacaaggacttgcacaaagaaaacattcaatatccaggactataaaattccacaaatgattgtgcttattacattcattatcacgatgattattcca

SEQ ID NO: 59806 - DNA, 1612 bp, Homo sapiens
gatttcgtgggcagctgttcccactggctctgctgaccttgtgccttggacggctgtcctcagcgaggggccgtgcacccgctcctgagcagcgccatgggcctgctggccttcctgaagacccagttcgtgctgcacctgctggtcggctttgtcttcgtggtgagtggtctggtcatcaacttcgtccagctgtgcacgctggcgctctggccggtcagcaagcagctctaccgccgcctcaactgccgcctcgcctactcactctggagccaactggtcatgctgctggagtggtggtcctgcacggagtgtacactgttcacggaccaggccacggtagagcgctttgggaaggagcacgcagtcatcatcctcaaccacaacttcgagatcgacttcctctgtgggtggaccatgtgtgagcgcttcggagtgctggggagctccaaggtcctcgctaagaaggagctgctctacgtgcccctcatcggctggacgtggtactttctggagattgtgttctgcaagcggaagtgggaggaggaccgggacaccgtggtcgaagggctgaggcgcctgtcggactaccccgagtacatgtggtttctcctgtactgcgaggggacgcgcttcacggagaccaagcaccgcgttagcatggaggtggcggctgctaaggggcttcctgtcctcaagtaccacctgctgccgcggaccaagggcttcaccaccgcagtcaagtgcctccgggggacagtcgcagctgtctatgatgtaaccctgaacttcagaggaaacaagaacccgtccctgctggggatcctctacgggaagaagtacgaggcggacatgtgcgtgaggagatttcctctggaagacatcccgctggatgaaaaggaagcagctcagtggcttcataaactgtaccaggagaaggacgcgctccaggagatatataatcagaagggcatgtttccaggggagcagtttaagcctgcccggaggccgtggaccctcctgaacttcctgtcctgggccaccattctcctgtctcccctcttcagttttgtcttgggcgtctttgccagcggatcacctctcctgatcctgactttcttggggtttgtgggagcaggtaatggacactgtcgctaacagctcacactctgacgggcctcacagtatcagccacagggtccgggacctggtgactcatcacagtggctgtgggaggcaggggcctggctgttatggaccctggagccaggatccccccacggcctgcgggcctaagagcccaaaagcagacaggggggctggggaccctctcggggaccctctcgtcggcatcctcaagggcgccagccagtggggctgcagtggggatggcgccaggtggcggccgttcggctctctggggaggcgaccctcagctcagtgcaagaatccaggctctgaagcccgcaggccgtggggggatcctggctccagggtccataacagccaggcccctgcctcccacagccactgtgatgagtcaccaggtcccggaccctgtggctgatactgtgaggaccgtcagagtgtgagctgttagcgacagtgtcca

SEQ ID NO: 59807 - DNA, 2701 bp, Homo sapiens
ttttttttttttaaaagtgtttatttttggcaataaagagcacaacataatctccttcatgcgtcatcgtgccacttagctgagccagccagctctgcctccctccccaaagacctttggaccccagttcccctctacaggctagctcatccctctgggtggtcattccccgggtcacgttgagagcgaggctgactgcaccacctccctagctcaagggctcctttgggaggggccgcgtgctttatcatcctcctgccacaactcaaatagtggttatttacaagaaggtctgttcccacaaatcaggaccctaaagtattaaaaaacaaaacccaaaaaacaacaaaaaaccccacacaaccaaaagtttgacgtgaatagaaagatagcccttctgcatggtagtcaacaaataccagcactagaaaatcaattgctttaattgcattgcagcagggagcctcagcaccatgtggggaggaggaaatgggaaggtcttggtttcagagtgcttttggctggccagagggtggccaaacagggcaagggggctccctctgcttgggcattgtccacccctggtcagtgagaggggggcagcaggggtgctccccacggcagtcctgctgcggccttccctcctggcctattcctggggcaggaacaagctccagccttcctccacatggctgaggtaatcagcacccctaccccaggggcatcttcccagcctacaaagcaggaaggagcctgtgcagaagttacattttaaaaccagattttcacctgaggcgtcaaccagatgtcacctctgcttaaaactccaactgcaaggctggcaagcagcacagaggaagtgcagatccttcctgtgtcactccaggcccagaggaactgagaagccacctgctgttccggcccttgggctgtttgggaaaagccagcagtcagagtgccagcctcaagctctgattatccccctcctgtggccctggtagttcaagcaggtcctggcagcaggagggctgtgccatggaggatggacacgactgcactcatactcaaaaacagccttgaccgtggcctggtcatgggattaaaaaatttgtgtgtattggtggggaaggatggggtgagggtgaggggatctcattgatacagagtatgtcataagccatatatattaaaatcattaacagtatatagtcccacggtagctccaacccctcacacatgctcaggtggtgtggccagccctttgcctcagtccagcctcatccttgggggcaaggagggggcagcttgctccctttctccaggctcttggccgacagccccctgaggctgtccacggtacactgcagccagccccgcagcaggcagcccccagcagtcatcggtgctcgccagcactgtggtcactgggatggggtcttggcctcactgctgtccccctggctgggctttggctttagcaggatgaatctgttgaggaggtctgtttccgagctggcctgggctgccccatacccctcaccagcatagctggaggcttcggcgatgttctgggaaccagtgatgtggtgccagtaggcactgcgcggcagcatggtcgtgggtgtgcagggatacgagtaatgttccgtgcccttgttcagcagcctcacgttcttctccatttccagcaggacccgcttgtgctgctctgcgatggccagggtggcactgtggacgcgctggtaaatctgctccccctcttgtgtctggaaggtatagagtccttccccagcatcacacatccggccagcctcgaaggtaaagcgtgtggcatcccggccatagcggcgcagtgagcagaggggccacgagacgagcttcacacgggggttgtggatgtcccagaggtagatgttctcgtgggtgatctgcagcttgcactcgccatacacgtccaggttggggcagggcagcaggaagacattgaagcgatctgtctgttcacactgcacccctggggccaggaggtcaggttctcccagactgatgtcgttgaggcgggaccccagacactccacagatagtgtcttgtaccactcctctgcctctagctctgagtcgcaggtgaaggtacgtgccgagtcatcagtgaatatgatggccaccgcctgccgcttggtctccttggggagccgcgtaacacacttgacgttgctgatctcagtcaccttggggcagccccggaggcacaccgacttctcatctggatacttctccagccgctggggccccttgctggaggatttccggaacaccagccagcacctccggtagatcccgagcttcctgctcttcatcttcacgtagccttgcttgacgatgtcactgaaattggtcgccatggttttcccaccttttaggggcgcggggcctggcagaggcgaggggaaggatgcccaggtgcctgggtctccggctcctccaatcacctgttccagacactctgtcggggctgccgcgaggggctgctcctcacctcacccgcctcagcattgttctagcagctccttcgccccgcgcctgctggaaataaaaatgacagggagattagagacagtgacatctttctcttcctctcgctgtctcgctctcttttttccttcctcttcccacactcctcctctccccctcttccacgaaa

SEQ ID NO: 59808 - DNA, 826 bp, Homo sapiens
ttttttttttttcagagagtgacaaaaagtttattctgtgcttctcgcagcattaggcaggggataaaactggagagagggcctggtgtggaggtggagggactctgtgggcttcactctggtaggaggagagcatcagggcaggcctttaggctgttgctctgggcagggggtgggggtgcgggggcttacagtgggggcccttagttggcacaggttcggaagggccccaggcagacatgaattctcctgagacttgaggtaggttgcttcagccagcccgggcggagaagaagggcagagagcgaacataggagtccagtcgggagcgaaagagctcactttgcacagtttggcccagcgggcacaggggattcttcaccaccagctccacatacagcgcactgtagatgtggtgcagcacatctcggatgggtcccacgcccaagtcagtattcatgacaactttgatcccagtgggcgtctcgtagtaatggagtttgtaacggctagtttggaaggccaggaagccatccttcatgtctagcggggacatcttgctgacaaacgagcggatagagaagagcatcccgtacatcagcttatactcctcctccttgggaatccctgcttgcttcttgcggtgccattcgctgtagtgcagacacactccattccggtcaaacaggtacaggttgtggacagtcatctgcagggcagggagtgtgagcctcgctccggggccgcccccactccttgggctcgggttcccggacccacagccttccaaccaggtggggaccccacccacggaccgacagcaacg

SEQ ID NO: 59809 - DNA, 2262 bp, Homo sapiens
tttcgtgccctgcgccacgcttggcagagagggaagcgggaggacacgaccccagggcattgtgggaacactggccaggctggactttgccttcctcctcgtcctttagccgggagcctgtctttgcttgcctttgcctttgaggctctgtggctgtggggctgagtggcatcatggcggctcagaaagatctctgggacgccattgtgattggggcggggatccagggctgcttcactgcataccacctggccaaacacaggaagaggatcctcctgctggagcagttctttctaccacactcccgaggaagctcccatggacaaagccggataatccgaaaggcgtacctggaagacttttacacccggatgatgcatgagtgctatcagatatgggcccagctggagcacgaggctggaacccaattgcacaggcagactggattactgctgctgggaatgaaagagaatcaagaattaaagacaatccaggccaatctgtcgaggcagagggtagaacaccagtgtctttcatctgaggaactgaagcaacgtttcccaaatattcggttgcccaggggagaagtggggctcttggacaattccggaggagttatctatgcatataaggccctcagagccctgcaggatgcaattcgacagctaggaggcatagtgcgtgacggagagaaggtggtggagataaacccagggctactggtcacggtgaaaaccacctccaggagctaccaagctaagagcttggtcatcacagcaggtccttggaccaaccagctcctccgtcccctgggcattgagatgcctctccagaccctgcggatcaacgtgtgttactggcgagagatggttcctgggagctatggtgtgtcccaggcctttccgtgcttcctgtggctgggcttgtgtccccaccacatctacggactgcccacaggagagtacccagggctgatgaaggtcagctatcaccacggcaaccacgcagaccctgaggagcgggactgccccacagcacgcacagacatcggagacgtccagatcctgagcagctttgtcagagatcacttacctgatctgaagcccgagcctgctgtcattgagagctgcatgtacacgaatacccctgatgagcagttcattctcgatcgccacccaaagtatgacaacattgtcattggtgctggattctctgggcacgggttcaagctggcccctgtggtggggaagatcctgtatgaattaagcatgaaattaacaccatcttatgacttggcaccttttcgaatcagccgtttcccaagcctgggcaaagcccacctttgacctctggccagaagcctcccttctgtgcacaggagccagtttcacagatggagaagatgtctcagatgaagggagtgtccctgagatatcatccttttcttctgcctcgcctgaatcccccataaacaccagatgattgagtctaccttctttccttggcccgctccctttttcttctgcctcacttgaatcccccgtaaacaccagacgattgagtctaccttcttttcttggccacctccccattcacaactactttctcgctcccagaaggttgatcagatattctacaatcacagagtagcaaggacgtttgagatgggtatatcagtaagaagagggcacaagaactggctctggagaccaaagcagttgttaaaaattctctttgctgggggccgggtgtggtggctcacacctgtaatctcggcactttggggggctgagacaggcggatcacctgaggccaggaattcaagaccagcctggccaacatggtgaaaccctatctccactaaaaatacaaaattagctgggtgtggtggcgcatgcctgtaatcccagctacttgggagactgaggcaagagaatcacttgaacccgggaggtggaggtggcagtgagccgagattgcgccattgcactccagcctgggcaaaaagagtgagactctgtctcaaaaaaaaaacaaaacaaaaaaaacctctttgctggtatatttgaagagcttgggatggatttgactaaatctgccccgaggagggtgaacaaggtgatctcagagatcactactgctcttggagttccttctcctaaagctaaggccagcctccatcacaaatgcccataaaatctggctcgtctttgatgaacaataaatatttgttgaacaaataaataactgccctgcaaaaaa

SEQ ID NO: 59810 - DNA, 772 bp, Homo sapiens
tttcgtggccgaacgcctatctcgggcggagagcgcggttgtgcccagtatcccatccccgcgacccccgcgcgctccggagagaacaggactatgcccggggctggggacggaggcaaagccccggcgagatggctgggcactgggcttttgggcctcttcctgctccccgtaaccctgtcgctggaggtgtctgtgggaaaggccaccgacatctacgctgtcaatggcacggagatcctgctgccctgcaccttctccagctgctttggcttcgaggacctccacttccggtggacctacaacagcagtgacgcattcaagattctcatagaggggactgtgaagaatgagaagtctgaccccaaggtgacgttgaaagacgatgaccgcatcactctggtaggctctactaaggagaagaggaacaacatttccattgtgctgagggacctggagttcagcgacacgggcaaatacacctgccatgtgaagaaccccaaggagaataatctccagcaccacgccaccatctttcttcaagtcgttgatagacgtatgcagtaggggctggcacagggcagtggcgtgggaaggacttgggaggcacccaactcagcatcacagtgaaatggcaaaatggaccgtgttggggttttcttttgctttacactttccagagctgctggagttacatctaaaagctagaagagctcagcttgaacacttattctgctaccaaatagcttatgaaatactcttagcctctctc

SEQ ID NO: 59811 - DNA, 1038 bp, Homo sapiens
tttcgtgtgcgcgctctccgcctgataggagttgtagttctgcgggtgaagctcggcgttactatcaagcaaccaaactgcaagctttgggagttgttcgctgtccctgccctgctctgctagggagagaacgccagagggaggcggctggcccggcggcaggctctcagaaccgctaccggcgatgctactgctgtgggtgtcggtggtcgcagccttggcgctggcggtactggcccccggagcaggggagcagaggcggagagcagccaaagcgcccaatgtggtgctggtcgtgagcgactccttcgatggaaggttaacatttcatccaggaagtcaggtagtgaaacttccttttatcaactttatgaagacacgtgggacttcctttctgaatgcctacacaaactctccaatttgttgcccatcacgcgcagcaatgtggagtggcctcttcactcacttaacagaatcttggaataattttaagggtctagatccaaattatacaacatggatggatgtcatggagaggcatggctaccgaacacagaaatttgggaaactggactatacttcaggacatcactccattaggcacagtgaacgtgggtcaactaatcaaagaagtgaaaaagtttgagaaagtaatcgtgtggaagcgtggacaagagatgttgctttcttactcagacaagaaggcaggccccatggttaatcttatccgtaacaggactaaagtcagagtgatggaaagggattggcagaatacagacaaagcagtaaactggttaagaaaggaagcaattaattacactgaaccatttgttatttacttgggattaaatttaccacacccttacccttcaccatcttctggagaaaattttggatcttcaacatttcacacatctctttattggcttgaaaaagtgtctcatgatgccatcaaaatcccaaagtggtcacctttgtcagaaatgcaccctgtagattattactcttcttatacaaaaaactgcactggaagattta

SEQ ID NO: 59812 - DNA, 1575 bp, Homo sapiens
tttcgtcccgcgcccggactttgccatcggcggggcagtcgcgggatgcgcccgggagccacagcctgaggccctcaggtctctgcaggtgtcgtggaggaacctagcacctgccatcctcttccccaatttgccacttccagcagctttagcccatgaggaggatgtgaccgggactgagtcaggagccctctggaagcatggagactgtggtgattgttgccataggtgtgctggccaccatctttctggcttcgtttgcagccttggtgctggtttgcaggcagcgctactgccggccgcgagacctgctgcagcgctatgattctaagcccattgtggacctcattggtgccatggagacccagtctgagccctctgagttagaactggacgatgtcgttatcaccaacccccacattgaggccattctggagaatgaagactggatcgaagatgcctcgggtctcatgtcccactgcattgccatcttgaagatttgtcacactctgacagagaagcttgttgccatgacaatgggctctggggccaagatgaagacttcagccagtgtcagcgacatcattgtggtggccaagcggatcagccccagggtggatgatgttgtgaagtcgatgtaccctccgttggaccccaaactcctggacgcacggacgactgccctgctcctgtctgtcagtcacctggtgctggtgacaaggaatgcctgccatctgacgggaggcctggactggattgaccagtctctgtcggctgctgaggagcatttggaagtccttcgagaagcagccctagcttctgagccagataaaggcctcccaggccctgaaggcttcctgcaggagcagtctgcaatttagtgcctacaggccagcagctagccatgaaggcccctgccgccatccctggatggctcagcttagccttctactttttcctatagagttagttgttctccacggctggagagttcagctgtgtgtgcatagtaaagcaggagatccccgtcagtttatgcctcttttgcagttgcaaactgtggctggtgagtggcagtctaatactacagttaggggagatgccattcactctctgcaagaggagtattgaaaactggtggactgtcagctttatttagctcacctagtgttttcaagaaaattgagccaccgtctaagaaatcaagaggtttcacattaaaattagaatttctggcctctctcgatcggtcagaatgtgtggcaattctgatctgcattttcagaagaggacaatcaattgaaactaagtaggggtttcttcttttggcaagacttgtactctctcacctggcctgtttcatttatttgtattatctgcctggtccctgaggcgtctgggtctctcctctcccttgcaggtttgggtttgaagctgaggaactacaaagttgatgatttcttttttatctttatgcctgcaattttacctagctaccactaggtggatagtaaatttatacttatgtttcaaaaaaaaatcatcaactttgtagttcctcagcttcagtcgacg

SEQ ID NO: 59813 - DNA, 805 bp, Homo sapiens
tttcgtggccggtcggaccgccaaggcagccggcgctggcgatgggaagcggcgtggccgccgacacaggcagtggcaaagtttcccagacgtacacatctggacgcgcggctgccggctacccgtgacccctctaggaagggttcagggatttttaatttggaaaaaaatccacctggtttcctttgtcaaggtctctccgggtggccagcggcaggagctgcaaacttgggcacggcggctacaccggcagcggaccgggctttggagaacctcgggactcaggtgctgaggtgcccagcggctccggacgtgctacggggtgcgagcgcgggggagttcggggcgcacgacaaggaagggcccccgggagctctatatggaggaaggagcccagaatggtgtgcaccaggaagaccaaaactttggtgtccacttgcgtgatcctgagcggcatgactaacatcatctgcctgctctacgtgggctgggtcaccaactacatcgccagcgtgtatgtgcgggggcaggagccggcgcccgacaagaagctggaggaagacaaaggggacactctgaagattattgagcggctggaccacctggagaatgtcatcaagcagcacattcaagaggctcctgccaagcctgaggaggcagaggccgagcccttcacagactcctctctgtttgcacactggggccaggagctcagccccgaaggccggcgcgtggccctgaagcaattccagtactacggctacaacgcctacctcagcgaccgcctgcccctggaccggcccct

SEQ ID NO: 59814 - DNA, 3484 bp, Homo sapiens
gacggaccggtctggaattctcgggtcgacgatttcgtccggaggtttcgattagttgtctctgccgctggggaaggtaatgcggcgacggcgtcctcaggagctgtggggtcccctgctagaagtgggggactcggcgggggagtcatttaatacttcatgattagaacaaatatgtgaaagttcccaccaaccagtgagaatttcttccttcagacggttttggatcttactgcacagctttctgagaagttcttttggtgccatgttttgtggcttgcatcaaaagaggagtttgtcttcatgaagattcctaacattggtaatgtgatgaataaatttgagatccttggggttgtaggtgaaggagcctatggagttgtacttaaatgcagacacaaggaaacacatgaaattgtggcgatcaagaaattcaaggacagtgaagaaaatgaagaagtcaaagaaacgcctttacgagagcttaaaatgcttcggactctcaagcaggaaaacattgtggagttgaaggaagcatttcgtcggaggggaaagttgtacttggtgtttgagtatgttgaaaaaaatatgctcgaattgctggaagaaatgccaaatggagttccacctgagaaagtaaaaagctacatctatcagctaatcaaggctattcactggtgccataagaatgatattgtccatcgagatataaagccagaaaatctcttaatcagccacaatgatgtcctaaaactgtgtgactttggttttgctcgtaatctgtcagaaggcaataatgctaattacacagagtacgttgccaccagatggtatcggtccccagaactcttacttggcgctccctatggaaagtccgtggacatgtggtcggtgggctgtattcttggggagcttagcgatggacagcctttatttcctggagaaagtgaaattgaccaactttttactattcagaaggtgctaggaccacttccatctgagcagatgaagcttttctacagtaatcctcgcttccatgggctccggtttccagctgttaaccatcctcagtccttggaaagaagataccttggaattttgaatagtgttctacttgacctaatgaagaatttactgaagttggacccagctgacagatacttgacagaacagtgtttgaatcaccctacatttcaaacccagagacttctggatcgttctccttcaaggtcagcaaaaagaaaaccttaccatgtggaaagcagcacattgtctaatagaaaccaagccggcaaaagtactgctttgcagtctcaccacagatctaacagcaaggacatccagaacctgagtgtaggcctgccccgggctgacgaaggtctccctgccaatgaaagcttcctaaatggaaaccttgctggagctagtcttagtccactgcacaccaaaacctaccaagcaagcagccagcctgggtctaccagcaaagatctcaccaacaacaacataccacaccttcttagcccaaaagaagccaagtcaaaaacagagtttgattttaatattgacccaaagccttcagaaggcccagggacaaagtacctcaagtcaaacagcagatctcagcagaaccgccactcattcatggaaagctctcaaagcaaagctgggacactgcagcccaatgaaaagcagagtcggcatagctatattgacacaattccccagtcctctaggagtccctcctacaggaccaaggccaaaagccatggggcactgagtgactccaagtctgtgagcaacctttctgaagccagggcccaaattgcggagcccagtaccagtaggtacttcccatctagctgcttagacttgaattctcccaccagcccaacccccaccagacacagtgacacgagaactttgctcagcccttctggaagaaataaccgaaatgagggaacgctggactcacgtcgaaccacaaccagacattctaagacgatggaggaattgaagctgccggagcacatggacagtagccattcccattcactgtctgcacctcacgaatctttttcttatggactgggctacaccagccccttttcttcccagcaacgtcctcataggcattctatgtatgtgacccgtgacaaagtgagagccaagggcttggatggaagcttgagcatagggcaagggatggcagctagagccaacagcctgcaactcttgtcaccccagcctggagaacagctccctccagagatgactgtggcaagatcttcggtcaaagagacctccagagaaggcacctcttccttccatacacgccagaagtctgagggtggagtgtatcatgacccacactctgatgatggcacagcccccaaagaaaatagacacctatacaatgatcctgtgccaaggagagttggtagcttttacagagtgccatctccacgtccagacaattctttccatgaaaataatgtgtcaactagagtttcttctctaccatcagagagcagttctggaaccaaccactcaaaaagacaaccagcattcgatccatggaaaagtcctgaaaatattagtcattcagagcaactcaaggaaaaagagaagcaaggatttttcaggtcaatgaaaaagaaaaagaagaaatctcaaacagtacccaattccgacagccctgatcttctgacgttgcagaaatccattcattctgctagcactccaagcagcagaccaaaggagtggcgccccgagaagatctcagatctgcagacccaaagccagccattaaaatcactgcgcaagttgttacatctctcttcggcctcaaatcacccggcttcctcagatccccgcttccagcccttaacagctcaacaaaccaaaaattccttctcagaaattcggattcaccccctgagccaggcctctggcgggagcagcaacatccggcaggaacccgcaccgaagggcaggccagccctccagctgccagacggtggatgtgatggcagaagacagagacaccattctggaccccaagatagacgcttcatgttaaggacgacagaacaacaaggagaatacttctgctgtggtgacccaaagaagcctcacactccgtgcgtcccaaaccgagcccttcatcgtccaatctccagtcctgctccctatccagtactccaggtccgaggcacttccatgtgcccgacactccaggtccgaggcactgatgctttcagctgcccaacccagcaatccgggttctctttcttcgtgagacacgttatgagggaagccctgattcacagggcccaggtaaaccaagctgcgctcctgacataccatgagaatgcggcactgacgggcaagtgacttctgcaagcctgcggctggtcccaatgccctgaatcacctctctcatggaagaaccaattaacaccaatgaatcaaccattaaaaa

SEQ ID NO: 59815 - DNA, 2089 bp, Homo sapiens
tttcgtatccggtgcctcctgcagcccgcctgctgggcagggccggcgcggcccggccatggagtcctacgacatcatcgccaaccagcctgtggtcatcgacaacggttcgggggtgattaaagctggctttgcaggagaccagattcccaaatactgtttcccaaactatgtcgggcggccgaagcacatgcgggtgatggctggagccctggagggggacctcttcatcggaccaaaagcagaggagcaccgggggctgctgaccatccgctaccccatggagcacggcgtggtgcgagactggaacgacatggaacgcatctggcagtacgtctactccaaggatcagctgcagaccttctcggaggagcatcctgtgctcctcacggaggccccgctcaacccgagtaagaaccgggagaaggcggcagaggtgttctttgagaccttcaacgtgccggccctgttcatctccatgcaggctgtgctcagtctgtacgcaacaggacgcacgacaggagtggttctagactcaggggacggggtcactcatgctgtgcccatctatgagggctttgccatgcctcactccatcatgcgggtggacattgccggccgcgacgtctcccgctacctccgactcctgctgcgcaaggaaggggttgacttccatacctcggctgagtttgaggttgtccggacaatcaaagagcgagcgtgctacctgtccatcaacccacagaaggatgaggctctggagacggagaaggtgcagtacacgttgccagacggcagcacgcttgatgtggggcctgcacgattccgggcccccgagctgctgttccagccggaccttgtgggggatgagagtgaggggctccatgaggtggtggccttcgccatacacaagtccgacatggacctgcgccggacgctgttcgccaacatcgtgctctcaggtggctcaacgcttttcaaaggcttcggagaccgattactcagtgaagtgaagaagcttgccccaaaggatatcaaaatcaagatctcagccccgcaggaacggctgtactccacatggattggcggctccatcctggcctcgctggacacttttaagaagatgtgggtgtccaaaaaggagtatgaagaggatggctcccgtgctattcatcgcaaaactttctagtgcccaaggagggcggggcatgttgggagagggggagggaggggagacagagcctttaaccctttttggtcttggctcgtatactaggcttagggtcccctgcatgccctgaacccctgggtgggtggcacagcagtgcccccctgcagccttcccctctacacaggacatgcacacacaagtaacattgagctgcatggacaggagccttgagctggcgtgtgggaattgagcgccatgtcaggctgttgtgggtatccccctggcagggccagctaggcctgtggttccctgctccgactctcagggctgcctccctgagctccagggccagaatgcctggatgcctgggtagccagtttggggagtgggctgcaaggggcagccagcagctcccactggtgtgtcactgcatccattgccacctcctgttcgtgacctgacagggtgacacagcccctttcacactctgtcctcctatcttcctgggtagatgccctggtgtagggctgagtactgaatggtcttccatccccagcaagggggtgcagcccagggtcaggcccttcagagccagggcagaggacgcacggtggctagagccgctgcactatccttttcagagcacttcatccacttgctcctccctctaccctcggcaccctgggtgggaaagggttgatgctcatcatttattgaggggaagccacttaataaggagtcagacctaaaagggggtgggggacattttcttacctcacccaagaaagaggtcgtcacttttgctgtggccagggccccacctccctctctcagatatgtacaataatttaacacggttgcctgaaaaaaacttttgtaaatcattatagtaataattatggacaaggaaaaaaaaaa

SEQ ID NO: 59816 - DNA, 755 bp, Homo sapiens
tttcgtctcccctgagcctggcttcagcctggcacagctcaacctcatctggcagctgacagataccaaacagctggtgcacagctttgctgagggccaggaccagggcagcgcctatgccaaccgcacggccctcttcccggacctgctggcacagggcaacgcatccctgaggctgcagcgcgtgcgtgtggcggacgagggcagcttcacctgcttcgtgagcatccgggatttcggcagcgctgccgtcagcctgcaggtggccgctccctactcgaagcccagcatgaccctggagcccaacaaggacctgcggccaggggacacggtgaccatcacgtgctccagctaccagggctaccctgaggctgaggtgttctggcaggatgggcagggtgtgcccctgactggcaacgtgaccacgtcgcagatggccaacgagcagggcttgtttgatgtgcacagcatcctgcgggtggtgctgggtgcaaatggcacctacagctgcctggtgcgcaaccccgtgctgcagcaggatgcgcacagctctgtcaccatcacaccccagagaagccccacaggagccgtggaggtccaggtccctgaggacccggtggtggccctagtgggcaccgatgccaccctgcgctgctccttctcccccgagcctggcttcagcctggcacagctcaacctcatctggcagctgacagacaccagacagctggtgcacagtttcaccgaaggccgcg

SEQ ID NO: 59817 - DNA, 984 bp, Homo sapiens
gggttttccccctccccggtttttaaaaacccgccccgggaattttttttggggccccctaaaaaaaaaattttctttcccccccccgggattttaaatttttttcttttaaaggcccccccctttttttttttttgcacagaataagcaatttattgcaattgaattatccaatgtggttgactgaatataaatatttttattacaaaatattccaggtaaaaattcggagctgcttacaagcttctttagctttaagctcattgcatttcttcatgtctagagcatgggtgacgggctcaggtgtgcctggcctgccccgcagggtcctccttctccgtctgcagtgggtcccactcagtgaggacctctgaggacacctcagtgaacagatggtcccagtcccagccgacatcatcctgccaagaagggtttcgctcccggacttcgtgctccggcgcgagcactttggtgaggagtttcaggtcgatctccccatccagtgtctgaatggctgagtacttcatgaggtcattgtccaggtcacggtaggtcatcacccgctttatctggatgctgggaggggctgccacctgcaaaacaaagtcttcttcctgtacttcctccagatccggaatgataggaatatctcctccataatctgatccattcaggctctgtggtctgaggcggaaatcttctatttcttcagaagccttcctcctaaacttcgaagccttcacggaatcacctgcccagcctccctgtcggcagcgaggtaatttagcagaggaagtctctccagtcagagtcaaagaggaattcttgccattgaggtgattctcggcctgcgctgactcctgttgagctcggcgacccatcttggccctggaggtagccaagctgtagcgaagctcctcgtccaagtcgagcaaatcctccatctccgcggccgacgaaatcgtcggcccgggaattccgaca

SEQ ID NO: 59818 - DNA, 1340 bp, Homo sapiens
ttttttttttttcttgatacagggcctggctactgttggcccaggctggagtgcagtggagtaatcatggctcacctcagctttgacctccagggctcaagtaatcctccctaatacgggcatttctctcatcgcttcagaacccgccccacaaccaaacattcagatgcttattaaggcaacaaaacaagtgacagacgggacaatttttccaattctagatctaattgattaggctatgtctcatgaggagactgtacttgacctctaagctagcatctggaatacaatcttccagcggcttagggaaggtcggtgatagtagtatcgtcaggatcaattccgaagtgcagcttgccgtccttggcggctgcccagggcatggaggtggaggtccactttgccacccagtctcctgttttgctaaccacgatgaggccacctaaacctttaacccttgacttcatataacccaacgataggtccgcagcctcttctaccgtctttccttgttctatgtggaacagggtgagtctagccaggttcaccttcaggatgctttccccatgccctgtggttgagacggctccgatgtcattgtcggcataacctccagctcctagacacggtgagtccccaacgcggccgaccattttattaacgataccgcctgtggaggttgcgtaggctacattccctttgcagtccaaggcaacagcacccacggttcccaagtttttttgacaatctgttttctgagcacctttttcatgcttctctttttccaggcgctttttgtttctctctgtcaccagtttttctccaggaatctctggaacccccatagctgctgcaaactgcgctgcgccttggtcagtcagaaagcaatgaggtgtcttttccatgacaagccgagcaagtttaatgggatttgctatacactggactgcggacactgctcctgcagacaggtcttttccatccatgatactagcatccatttcaacctcaccatttgtgttcaagacagacccacaacctgcgttgaactcgggatcgtcttccagggcgacgacagctccctctacggcatccacggcgctcccgccctcccggaggatgccgtagcccacggtggcggctctgaccatgccctggtgcactcgctccttccgatccttggagatgggaccggctccgccgccgtggaccactacgatgggattcatgtcggcggatcccagggcaccgcaggacgcggacgccgagacctcaagctgggtcgagccagccccgcagccgcccggtaccgccgacgaaatcgtcgacccgggaattcc

SEQ ID NO: 59819 - DNA, 1708 bp, Homo sapiens
tttcgtcgcctccgctatctgggtcaggacgcgacggccgcggcgcgggaccttaggacccgcgggctccagggctactgtccgtccgccactgcgcgccagcaggtcctggtctccgctctccaacagctgaaaggccggcgcagtgaacacagaaacgaaaaccaagaaatgccttattccacaaacaaagagttgatacttggcatcatggtgggcactgctggaatcagcttgctgctcttgtggtaccacaaggtccgtaaaccagggatagcaatgaagttacctgaatttctttctctgggtaatacatttaattcaataactttgcaagatgaaatacatgatgaccaaggaacaacagtaatctttcaagaaaggcaacttcagatactggagaagttaaacgaattactgacaaatatggaagaactcaaagaggaaatcagatttcttaaagaagctattccaaagctggaggaatatatacaagatgaacttggagggaaaataactgttcataagataagccctcagcacagagcgagaaaaagaagactccccacaattcaaagttcagcaacaagtaatagttcagaggaagcagaaagtgaaggagggtatattacagctaatactgacacagaagaacagagttttccagtccctaaggcatttaacacacgtgtagaggaattaaatttagatgtccttcttcagaaggtagatcatttacgtatgagtgagtctggcaagtcggagagttttgaactacttcgtgaccacaaagaaaagtttagagatgaaatagagtttatgtggcgatttgctcgtgcttatggagacatgtatgaactatctacaaacacacaagaaaagaaacattatgctaatattggaaaaactttaagtgaaagagctattaatagagcacccatgaatggacattgtcatctgtggtatgcagttttgtgtggctatgtatctgagtttgagggtttacaaaacaaaatcaactatgggcacctcttcaaggaacatctagatatagcaatcaaacttttaccagaggaaccctttctatattacctcaaagggagatactgctatactgtctcaaaactgagctggattgagaaaaaaatggctgctactctgtttggaaaaataccatcttcaactgtacaagaagctttacacaatttccttaaggctgaagaactatgccctggttattctaatcccaattacatgtacttagcaaagtgttatactgatcttgaggaaaaccagaatgctttgaagttctgtaatttggctttattgcttcctactgttaccaaagaggataaagaggcacagaaagagatgcaaaaaataatgacttccttgaagaggtaaataaacgaatttactcttcaacaaatcagatgtggtctaccaaaatttaaatgaatcaaagttgtgcttttattatccttcatttttgatgtaagggtattgtgcttagatttgaaggtaaagccatgtttctgcagaatgcattccactagtagcactacaaaattaattatgttatttggagaatctatatactataatgtcaatacataatctataaacatgtatgctttatatttttcttatcaataaactgcagccttaagaatatttctttaaataaaatatttaaatccaataaaaa

SEQ ID NO: 59820 - DNA, 2211 bp, Homo sapiens
tttcgtgggcgagcatggccgctccgcgaggtgagccattggctggggtgtcggcgagtgtgttcgtggagcgcgtcctggggacgactcccggcattatcggccaggttgagtccgctcctggcattccgcggaaagatggtattcccactttcctgtgcggtgcagcagtatgcctgggggaagatgggttccaacagcgaagtggcgcggctgttggccagcagtgatccactggcccagatcgcagaggacaagccttatgcagagttgtggatggggactcacccccgaggggatgccaagatccttgacaaccgcatctcacagaagaccctaagccagtggattgctgagaaccaggacagcttgggctcaaaggtcaaggacacctttaatggcaacctgcccttcctcttcaaagtgctctcagttgaaacacccctgtccatccaggcacaccctaacaaggagctggcagagaagctgcacctccaggctccgcagcactaccccgatgccaaccacaagccagagatggccattgccctcacccccttccagggcttgtgtggcttccggccagttgaggagattgtaacctttctaaagaaggtgcctgagtttcagttcctgattggagatgaggcagcaacacacctgaagcagaccatgagccatgactcccaggctgtggcctcctctctgcagagctgtttctcccacctgatgaagagtgagaagaaggtggtggtggaacagctcaacctgttggtgaagcggatctcccagcaagcggctgccggaaacaacatggaggacatctttggggagcttttgctacagctgcaccagcagtacccaggtgatatcggctgctttgccatctacttcctgaacctgcttaccctgaagcctggggaggccatgtttctggaggccaacgtaccccatgcctacctgaaaggagactgcgtggagtgcatggcgtgttcagacaacacagttcgtgctggcctgacacccaagttcattgatgtgccaaccctgtgtgaaatgctcagctatacccctagctccagcaaggacaggctctttctcccaacacggagtcaggaagacccctacctctcaatctatgacccccctgtaccagacttcaccattatgaagacggaggtccctggctctgtcactgaatacaaggtcttggcactggactctgccagcatcctcctgatggtacaggggacagtgatagccagcacacccacaacccagacaccaatccctctgcaacgtggtggcgtgctcttcattggggccaatgagagtgtctcactgaagcttactgagccgaaggacctgctgatattccgtgcctgctgtctgctgtaaaggctgcagcctccccagctctcctctgccagccaccctaaattccagccaacctcacctcctcgggcccagctcaagcccccttccttgctctggaccccttaggtataccctggaagagctggggtgggggaggagggagcgtgaaggtagtgactcctgaacacacccaggtggaaccatctttggggaggagaggcccgtgtgaggggtctgatactccctttgtcttccctctctactcctcgctacacctgagccaggctcttgccaactctgttccagcctatggctttaggctagctgttaaatatgtgacccagcattagctcagcatctgtcagagcaagagaccaggtaatttctaagaacagggttctagcgatgggactgcccatttcctcagctgcagaggaggaaagggaaagggtaggcctgtagactaacgctgtttacacccttgttctgtcaaagcaattaaagatcacttgtgttgaggctgtggggtaatgagcactcagcctttggggtacctgttcctaaagtgggccaaaagagccctccctacatgatgccccagtttttgctttattcctatttcatacagcttctcgggggggtgagcaggctacactccagaacaccggtatgggaaggagtgggagaggaagccagctttggcctcacaggcacagcttgcaagcaggccttgggtctgcccagaggcacagcttgcaagcagccctacagagaaggtgactcaaaggatacaccagtcaccagtgcaagactcttcgctcctgtttttctctt

SEQ ID NO: 59821 - DNA, 1793 bp, Homo sapiens
tttttttatttttttttttcttttaaaatgtgagtttttaacacttgaaggatttcattcttaactctcaattatataattacaaaaaaaatccaagtttcaggaaaacatacttaatcctaacataaaattcatgtcacttatcacaaagacagtcaagtgtataaaggagaaacaaaacagaagcagtatttacaaatttaaactacatgagatgttgtgaacaatcttttgttaataaacagcacgttacatacttttacatactacatttcaaaaatgcatctgtgaataatatgataaagcgcatagtgttgaagactttaaattaaatccaaggtcatcatgttgaagacctgaaattaaattcaaggttgtagtgatgaaaaatttaaagtcaaggtcttagcgataaagactttaaattcaaagacagattgtctaaggacaaaccactagcgttcaagttgtttagtcaattagttctctgtgagtacaaaatattaggaatcactaaatggattagcctaattacaaattttgatcatttctaaataactcacaactgcaagaagtcttttcacagaatgagtcacatagtttctctctatccttgtgcaggtattttaaatcccttattcaaaacaggttccctctccatttctagatttttgtaagtataaaatattttaaaacaaaggtatgtccgttccttagctagagaactattcttccactgactcctggaagagaaaaaaaagattcccatttcttcctctacctcaaaaacacaaagcaaacccaaacaatccaattcctaatgtagtgtcacatagaacccagggcctgaaacaatatttcatgctagttttcctgctatatgcagagaacaatttagttatttacattattgagaaatctatttaacagcctagaatcatcctagtgcttccatcagcagaaggcttgctaaaaaaggcgtgagcagcggcgtctgcgaatgggaacatcaaagactctcctccgtctctcctcttcatcatcttcatctgattcatccatatctgctgaatcatcatcctcgtcttcctcctcttcctcctcctcctcttcttccatctcttcatattcatcaggacccatttccaatcgggctatagacaccctgaatgttggacatgccatatggaatcggggaatggcaacattaaagatcttgtctttaaagtaaagaaaatggaaggtataatatccttccatgtatcctgatgttgtagagaatgtggtacagcttgtgtattcatatacccgacctgggctgatgattggaaattcaccaactactccaggtccttgaacttcttccacgtcacccttagcatttgttattctccaatagcgactgtccaactgacaggccttctcaggaagtgcatcttttgacatttcaatcctgattcggtatgtgaagaaatagtggggtggatgtacagagctaagttctggcagaaacgatgtggaaactgacacagtaatatccccagttgttgctacacattctggatcgtgaacatatctgaaaatttggtctctgatgatggggaagccacctgatacaacatttttgacataagaggtaaaccagtcagtaaaagtagcacctataataaacatgtcaatagcagctggatttcgagccatttggtctggacattggtagaaaacttcatttttgtttcggccctctgcagcttccactgctatgtactgactcaaaccagtatgtatgcaaa

SEQ ID NO: 59822 - DNA, 2342 bp, Homo sapiens
gcggccgcgtctggggtggctcctcatccctcaatgccatggtctacgtccgggggcacgccgaggactacgagcgctggcagcgccagggcgcccgcggctgggactacgcgcactgcctgccctacttccgcaaggcgcagggccacgagctgggcgccagccggtaccggggcgccgatggcccgctgcgggtgtcccggggcaagaccaaccacccgctgcactgcgcattcctggaggccacgcagcaggccggctacccgctcaccgaggacatgaatggcttccagcaggagggcttcggctggatggacatgaccatccatgaaggcaaacggtggagcgcagcctgtgcctacctgcacccagcactgagccgcaccaacctcaaggccgaggccgagacgcttgtgagcagggtgctatttgagggcacccgtgcagtgggcgtggagtatgtcaagaatggccagagccacagggcttatgccagcaaggaggtgattctgagtggaggtgccatcaactctccacagctgctcatgctctctggcatcgggaatgctgatgacctcaagaaactgggcatccctgtggtgtgccacctacctggggttggccagaacctgcaagaccacctggagatctacattcagcaggcatgcacccgccctatcaccctccattcagcacagaagcccctgcggaaggtctgcattggtctggagtggctctggaaattcacaggggagggagccactgcccatctggaaacaggtgggttcatccgcagccagcctggggtcccccacccggacatccagttccatttcctgccatcccaagtgattgaccacgggcgggtccccacccagcaggaggcttaccaggtacatgtggggcccatgcggggcacgagtgtgggctggctcaaactgagaagtgccaatccccaagaccaccctgtgatccagcccaactacttgtcaacagaaactgatattgaggatttccgtctgtgtgtgaagctcaccagagaaatttttgcacaggaagccctggctccgttccgagggaaagagctccagccaggaagccacattcagtcagataaagagatagatgcctttgtgcgggcaaaagccgacagcgcctaccacccctcgtgcacctgtaagatgggccagccctccgatcccactgccgtggtggatccgcagacaagggtcctcggggtggaaaacctcagggtcgtcgatgcctccatcatgcctagcatggtcagcggcaacctgaacgcccccacaatcatgatcgcagagaaggcagctgacattatcaaggggcagcctgcactctgggacaaagatgtccctgtctacaagcccaggacgctggccacccagcgctaagacagttgctgctggaggatgaccagggaagccccctgataagccaagagggccagcacagcccttgctcccaggctcctgcctgaaactatctagcacactaggacccaggtggtaccctactcagtggctgagaattggataaagtcttgggaaatgagacaagtactgggcagtgaatccagctccttttccccagcctttccctgtgggccatttggggaaggccagcattcagcctgagatgttcctccctgcctcctggagggacagaaggggaggatggttaactcctgccgcatcctttttcttgtgttcacgtggcattctctaacccagggcagtggttccttcccaggccatgcacagaggctgggtgcctgccagacccacggagggttcgcgaaggaaggggcatcctccttcttgagctgcaagctttagctgaggcagtaagtcacacagtagttagttcagcctgggctggcacataagtaagtccccagtgtccctgttgagaggggaaagttgcctgctggttgaaaaactggcttttcctttctcgctgcctaatttcactctcagagtgaggcaggtaactggggctccactgggtcactctgagagggttgtggctctggttcttattaaaccagggccaggtgcagggctcacacctgtaatcccagcactttgggaaggtcacttgagctcaggagttcaagaccagcctgggcaacatagtgagaccttgtctctggaaaacaattagctgggcatggtggtacacacctgtagtcccagctacttgggaggctgaggcgggaggatggctttagcccaggaggttgaggctcctgtgaaccctgatggcaccactgcactccagcctgggtgacagggtgagaccctgtctcaaaaaaaaaa

SEQ ID NO: 59823 - DNA, 1346 bp, Homo sapiens
gcggccgctgcgactccggagccggcggggggctccggtccttccctgcgccaccgcacaggacatctctctggctggggagcggcggtgagacccgccgagggcgtctgtgtccctcctcccccgcggtcctcggtgcgtccgcacgcccctcctcctcggctccctccttcttctctccgcgcctctccgccccctccccgtctccgcaggccgagtggtgcggcccgcctccagctgaccggcctggaatcccggctccgagccccggactcgcgtccgcccgcgcgcccgctccttccccctccccccgccccgagccccccgacgccgccgccaccgtctcctcagagcggtgcccgggcccagccgccgccaccgctgccgccgccgagctccgccgccgccgagcaccatgggagacgctgggagcgagcgcagcaaagcgcccagcctgccgcctcgctgtccctgcggcttctgggggtccagcaagactatgaatctctgttccaaatgctttgctgattttcaaaagaaacagccagacgatgattccgctccaagtacaagtaacagccaatcagatttgttttccgaagagaccaccagtgacaacaacaatacctcgataaccacgccaactcttagtcccagccagcagccgcttccgacagaactgaatgtaacttcaccgagtaaagaggagtgtgggccatgcacagacacagctcatgtctcattaatcacaccaacaaaaagatcctgtggtacagattcacagtctgagaatgaggcttcaccagtaaaacggccacgactacttgagaatacggaacggtccgaggaaaccagtcgatctaaacagaagagtcgacgtcggtgcttccagtgccaaaccaaactggagctggtgcagcaggaattgggatcgtgtcgctgcggttatgtgttctgtatgttacatcgcctccccgagcagcacgactgcacattcgaccacatgggccgtggccgggaggaagccatcatgaaaatggtgaagctggaccggaaagtggggcgctcctgccagcgcatcggggaggggtgctcctgaaggccaggcatggccaccacgtgacgctgttcttagttcactaatgttagccttatttaggacaaagtcagccagacaccttgtactgggcacgcgtcagactgcagccagtccgtttcctttctttagccagccatcctggtactgtagtttaggggttgatggtggttgaaattgatttctggctggttactaaggtgcctgctagccattgtataaaattaaaacatgaagaataaaaaaaaaa

SEQ ID NO: 59824 - DNA, 1554 bp, Homo sapiens
ctcctctcgagcgtcctcagcgcagccgccgcccgcggagccagcacgaacgagcccagcaccggccggatggagcgtccgcaacccgacagcatgccccaggatttgtcagaggccctgaaggaggccaccaaggaggtgcacacccaggcagagaatgctgagttcatgaggaactttcagaagggccaggtgacccgagacggcttcaagctggtgatggcctccctgtaccacatctatgtggccctggaggaggagattgagcgcaacaaggagagcccagtcttcgcccctgtctacttcccagaagagctgcaccgcaaggctgccctggagcaggacctggccttctggtacgggccccgctggcaggaggtcatcccctacacaccagccatgcagcgctatgtgaagcggctccacgaggtggggcgcacagagcccgagctgctggtggcccacgcctacacccgctacctgggtgacctgtctgggggccaggtgctcaaaaagattgcccagaaagccctggacctgcccagctctggcgagggcctggccttcttcaccttccccaacattgccagtgccaccaagttcaagcagctctaccgctcccgcatgaactccctggagatgactcccgcagtcaggcagagggtgatagaagaggccaagactgcgttcctgctcaacatccagctctttgaggagttgcaggagctgctgacccatgacaccaaggaccagagcccctcacgggcaccagggcttcgccagcgggccagcaacaaagtgcaagattctgcccccgtggagactcccagagggaagcccccactcaacacccgctcccaggctccgcttctccgatgggtccttacactcagctttctggtggcgacagttgctgtagggctttatgccatgtgaatgcaggcatgctggctcccagggccatgaactttgtccggtggaaggccttctttctagagagggaattctcttggctggcttccttaccgtgggcactgaaggctttcagggcctccagccctctcactgtgtccctctctctggaaaggaggaaggagcctatggcatcttccccaacgaaaagcacatccaggcaatggcctaaacttcagagggggcgaagggatcagccctgcccttcagcatcctcagttcctgcagcagagcctggaagacaccctaatgtggcagctgtctcaaacctccaaaagccctgagtttcaagtatccttgttgacacggccatgaccactttccccgtgggccatggcaatttttacacaaacctgaaaagatgttgtgtcttgtgtttttgtcttatttttgttggagccactctgttcctggctcagcctcaaatgcagtatttttgttgtgttctgttgtttttatagcagggttggggtggtttttgagccatgcgtgggtggggagggaggtgtttaacggcactgtggccttggtctaacttttgtgtgaaataataaacaacattgtctgatagtaaaaaaaaaa

SEQ ID NO: 59825 - DNA, 1519 bp, Homo sapiens
aggagcgcaaaatggcggaaccgccgagccccgtgcactgtgtcgctgccgcggcccccaccgccaccgtctcggagaaagaaccgtttggcaagctgcaactctcctcccgggaccctccgggttctctgtccgccaagaaggtccggactgaggagaagaaggcaccgcggagagtgaacggagaagggggcagcggcgggaacagcaggcagctgcagccgccggcagcaccttcgcctcagagctatggcagccccgcgtcttggagctttgcccctctgtctgctgctccctccccgtcctcttctcggagcagtttctctttctccgctggcacggccgttccctcctcagcctccgcttccttgtctcagccggggccgcgcaaactgctggtccctcctacgctgctgcacgctcagcctcaccatctcctcctgcccgccgccgccgccgctgcctcggctaacgccaagtcgcgcagacctaaggagaagcgggagaaggagaggaggaggcacggtctcggtggggcccgagaggccggcggggcctcccgggaggagaacggggaggtgaagccgctgccccgagataaaatcaaagacaaaattaaagagagagacaaagaaaaagaaagagaaaaaaagaaacataaagtaatgaatgagatcaagaaagagaatggagaagtaaagattttgctgaaaagtgggaaggagaaaccaaaaacaaatatagaagacttacaaattaaaaaggtaaagaagaaaaagaaaaagaaacacaaagagaatgaaaaacggaagcgtccgaaaatgtatagcaaatctattcagaccatctgctcaggattgctaactgatgttgaagatcaagcagccaaaggcatcctaaatgataacataaaagattacgttgggaagaatttggataccaagaactatgattccaaaattccagagaacagtgagtttccatttgtctcattaaaggagccacgagttcagaataacctcaaaaggttggacactttggaatttaaacaactcattcatatagagcaccagcctaatggaggtgcatcggttatccattgcctacagtaacgaactctcccacctgtctcctatgggggatgggagaggtttgcagaagagtttgtggggtctaggtgttcagtgaaaatgaaaactctggcagctttcctacgtgatggggtattgttccatggggcagctacttatttaccctgactttttagactatttttcatttaattttccccaattcacccagtgaaaatggagatattgggaaagaaagatatagagacaacgactatgtccaattttcatgctcagagtctcactgtactccagcctggacgacagagtgagactccatctcaaaaaaaaagaaagaaattcatgataatgctatcctctaggtgggaaggagaaaccaaaaacaaatatagaagacttacaaattaaaaaggtaaacaaaaaaataa

SEQ ID NO: 59826 - DNA, 3826 bp, Homo sapiens
ccacgcgtccgggggtgctgggcctggcgggcaaactaaggctgcggaccgttgggcggttccgcggggcgttgtccggagagctgcgaggccggggttcccagggttcacgccacactctaggaagtgcctgagctagtgagctggccaacgagctccgcgggctgggaccatgggctgcttcttctccaagagacggaaggctgacaaggagtcgcggcccgagaacgaggaggagcggccaaagcagtacagctgggatcagcgcgagaaggttgatccaaaagactacatgttcagtggactgaaggatgaaacagtaggtcgcttacctgggacggtagcaggacaacagtttctcattcaagactgtgagaactgtaacatctatatttttgatcactctgctacagttaccattgatgactgtactaactgcataatttttctgggacccgtgaaaggcagcgtgtttttccggaattgcagagattgcaagtgcacattagcctgccaacaatttcgtgtgcgagattgtagaaagctggaagtctttttgtgttgtgccactcaacccatcattgagtcttcctcaaatatcaaatttggatgttttcaatggtactatcctgaattagctttccagttcaaagatgcagggctaagtatcttcgacaatacatggagtaacattcatgactttacacctgtgtcaggagaactcaactggagccttcttccagaagatgctgtggttcaggactatgttcctatacctactaccgaagagctcaaagctgttcgtgtttccacagaagccaatagaagcattgttccaatatcccggggtcagagacagaagagcagcgatgaatcatgcttagtggtattatttgctggtgattacactattgcaaatgccagaaaactaattgatgagatggttggtaaaggctttttcctagttcagacaaaggaagtgtccatgaaagctgaggatgctcaaagggtttttcgggaaaaagcacctgacttccttcctcttctgaacaaaggtcctgttattgccttggagtttaatggggatggtgctgtagaagtatgtcaacttattgtaaacgagatattcaatgggaccaagatgtttgtatctgaaagcaaggagacggcatctggagatgtagacagcttctacaactttgctgatatacagatgggaatatgaagtgcaatgtggaaccaggacttggtattaagcctttcccaacttgtgaatatagaatttgataatacacttttgtgtattagcaatggtttttactaatgctaaaacttttaaagtttattttttaataaattgttgagtattacatcatttacttgaggttcaaaaataattcattttaaattaagtagttttaatcagcttaaaagctatttaacccattttaataagcttgcagttttgtttctctgcatatgatattcttattagaaaacagaagtagctaaaagtttattattttaatcctatttaaatgttctttcaaatctctaataatttaaactttcctcagtgctccatgatactttttttgagactccatatcattgcttattttacctttttcaattaagagggatttgttactagtcgatcaattagaatgaacctatgcacatttttatgtacacatatccagttatataattgcttcctagttgcattatatggcaaatgagattttgtacatggagttgacataatactttgtaaattgaattttttaaagaaataggcatttgataaccagcttggcaagtaactctactaacagatgttggtatagctatttaaagactacttcgtaagtagtatgattatttgaataaattacacattgtttagttttttaatacaactgctatatgactcttctgcttcctgataagaaaaggtatatgcaatgctaaaactgtagaagcccaatcaccagcagtttttaaaaaggtgataacttttattagctcttgtgggctatcaagagaattagaccaaacccttgtgacttttaggtaagaaataggcatgatgataagctatgcagattattaaaaagcttgatacatttgatttttcattagatatgccattcatatcaagtaatgttcaagtatgataaaattattttggttgctttaaagcactgtttcccaaatctacctgatcataataatttaccaggaagcagaggagagctacttgtttaaaaatccacattcttggacccaatcctcagatgcacggattcagtcttcaggggaaactctgttttaaggggtatgttgtaatctaaagtaattggttcaggaggtgtcaataggttgaacttgtgagaaggcactgaatctgccatccacatcacatatagcagctattatgaaatcagctttcataggcctatttttaaaaggaatctgaaatttaattctattttgataaaactaagactgaaaataaccacttgtaaacattcctatgattgttactaaaatgtattttcatgtttaaaatgtttttggatatttttgggttaataactactacattgaattgcatgttaaggtgcagaaataatacattaaaagatttttactttaaattaattagtaatattgagcgctcaccctgtgcgtggccttgtgctaaccattagcactgcatcatttcaattcttttataagggcattcaatactacaaaatcaacatgatttcataaggtgcaaataaaagttggtgacagatttaatataattttgatcacaatttacaaatgatctttgcaaatagtggtcagacggcattagtttttcccttagttaagctaaattaaagggactccatcctgttatgattatattattattattattattattatttttgaggtggagtttcactcttgttgcccaagctggagtgcaatggcgcgatctcggctcaccacaacatccgcctcctgggttcaagcgattctcctgcctcagcctcctgagtagctgggaatacaggcatgcgccactacacctggctaatttttgtatttttagttgagatggggtttttccacgttggtcaggctggtctcgaactcctgacctcaggtgatccgtccacctcagcctcccaaagagctgggattacaggtgtgagctaccgcgcctggccatgatgatattattaaacaccattattcacatttcaaataataacaatactttttgtttttcaaaaataaaatgcaatgttatataaagctataaactaagttctttatgatatttgagcaacaactcaggaatataacatataagggagatgttaatttaaaaatttccactacacttattatctattaaccaaagcttaaaattttgtattcttctgttagataagaccttttacccatttaatttgtctttaaggacagtcatttggcttctgaatgtttgaaacgattttaaaaaataagtagtgctatggttgtttctataattctaacctttgatagtaatcagaatgtattacatttcatttctgaatagcttttgaatttatgaaaaattattaacaatgaaaaattggtaattttattaagttatatgtgtttaaatattatattagcttatttctcttgcattaatagtactgctgttttttgttttgcttctttatatttatgtctagcttttatatgtaatttatcttagtgtttataaaatgtgatttgtaataaatgttgttaaaatgaaaatggaaaaaaa

SEQ ID NO: 59827 - DNA, 1905 bp, Homo sapiens
gtacacccaccgggtcgacgatttcgtctagcggcggcgggagcggcgccgttggccgtttggcacgcgggcgccaggaccggccgaacgcagaggttgattcttcaccacactgaaaccattaggaaaaatccttgtggttaacagcagaggcttcagagtgtaacctgtactcgggcctagaaattatttaaaatggcgactgatacgtctcaaggtgaactcgtccatcctaaggcactcccacttatagtaggagctcagctgatccacgcggacaagttaggtgagaaggtagaagatagcaccatgccgattcgtcgaactgtgaattctacccgggaaactcctcccaaaagcaagcttgctgaaggggaggaagaaaagccagaaccagacataagttcagaggaatctgtctccactgtagaagaacaagagaatgaaactccacctgctacttcgagtgaggcagagcagccaaagggggaacctgagaatgaagagaaggaagaaaataagtcttctgaggaaaccaaaaaggatgagaaagatcagtctaaagaaaaggagaagaaagtgaaaaaaacaattccttcctgggctaccctttctgccagccagctagccagggcccagaaacaaacaccgatggcttcttccccacgtcccaagatggatgcaatcttaactgaggccattaaggcatgcttccagaagagtggtgcatcagtggttgctattcgaaaatacatcatccataagtatccttctctggagctggagagaaggggttatctccttaaacaagcactgaaaagagaattaaatagaggagtcatcaaacaggttaaaggaaaaggtgcttctggaagttttgttgtggttcagaaatcaagaaaaacacctcagaaatccagaaacagaaagaataggagctctgcagtggatccagaaccacaagtaaaattggaggatgtcctcccactggcctttactcgcctttgtgaacctaaagaagcttcctacagtctcatcaggaaatatgtgtctcagtattatcctaagcttagagtggacatcaggcctcagctgttgaagaacgctctgcagagagcagtagagaggggccagttagaacagataactggcaaaggtgcttcggggacattccagctgaagaaatcaggggagaaacccctgcttggtggaagcctgatggaatatgcaatcttgtctgccattgctgccatgaatgagccgaagacctgctctaccactgctctgaagaagtatgtcctagagaatcacccaggaaccaattctaactatcaaatgcatttgctgaaaaaaaccctgcagaaatgcgaaaagaatgggtggatggaacagatctctgggaaagggttcagtggcaccttccagctctgttttccctattatcccagcccaggagttctgtttccgaagaaagagccagatgattctagagatgaggatgaagatgaagatgagtcatcagaagaagactctgaggatgaagagccgccacctaagagaaggttgcagaagaaaaccccagccaagtccccagggaaggccgcatctgtgaagcagagagggtccaaacctgcacctaaagtctcagctgcccagcgggggaaagctaggcccttgcctaagaaagcacctcctaaggccaaaacgcctgccaagaagaccagaccctcatccacagtcatcaaacaggttaaaggaaaaggtgcttctggaagttttgttgtggttcagaaatcaagaaaaacacctcagaaatccagaaacagaaagaataggagctctgcagtggatccagaaccacaagtaaaattggaggatgtcctcccactggcctttactcgccta

SEQ ID NO: 59828 - DNA, 1042 bp, Homo sapiens
ttttttttttttgcccacctaatgccctttcccagggcagtttaattggtatcatttgtaaaaaggtcttttccatcacccccaaagcctttgcattccctttccaagaagggggctgttaactggtttgggccccatgggcaacagtaggccttggtatgaggctgccataacactcccatgggacactccagggtgacatccaagtgcaagtctatgttcagctctgggacagcaggggggaaggtgaggagagtcaggtctgtaaattgaagctgggcagggccctggctgggctgggagatgtgtggggcaaggtgagcaggccccatgttgcaccccagcttccagtgcccactgatgtggctgaagcccaggttggttgtggtcactttgccttcagaggaaggtctggcgggctctgactgctgctggggtgcggctggggccctctccgccgccgtctggcaccaccactgggccggccccgactccgccgctgccgcttggttgggggggagccctgctgagaatttgcagaactgcttgactgccgacggcgacggcagctaccctctgtcctctttgaagagctggaggtgccatagctatagcgttctggagacactggccggcgccgcttgcgcgccaggtgcggcagcaggtcgtggcgggccagcacgcgcaggagttgccccagcagccgcaggttgctctcgtcgcactgcccgcggcgctccagctccagcaggagctttaggccgctgcgggcccgggataagcctccggcggcgccaggagcctcatccagcagaaaggccaggagctccagctcgcactcggtcagttgcccgcccaccacctcgaacatacggtgaagcgacagcatcccgtagtagtccaggcactcatcctcctcccagcacggggccggggtcgacccggatagcgccattcccgggggagggaggcggaacaagctcagaacccggccagattctggcgtccgatgactcctgggcgacggccgcagccacttgtt

SEQ ID NO: 59829 - DNA, 800 bp, Homo sapiens
cttccatccatccacccatccacccatccatccatccacccacccatccatccatccatccatccatccatccatccatccatccacccacccatccatccatccatccatccatctgtggcttctacctgtgcgaatctctgtgctacaaaattcttttcaatttagcattaactttaatttccatacagttggcacctcactgccgccaaaagtgagtccgcaggaactccactggaatatttgctcaggggaaactaactaatcatctgtttcaaggttggtattcattttagtctttgacctctgattatggggactttcagggaaagctgtttgcaaggtgagcatgaatcaggtgaaacagcaagatctgaagtcaggacagagtaagcaaattatccacagacctaatatgtaccctctgaagctggaaagtgggggccacctggtagcatttgagcaggggtcacttatgttcccccataagtctgcacagctcctaaacaaggtccagtggggcaacttatttttatgtgggtccctttataggcatgctgttaaggggtgcataaccacaggccagttgaggaagggaaccctactgggatttaacccagtgacattatataagcaatcgcttggagccacataggtagttcgcaggtcctgaatatgtggtgcctgaaagcataggtgtaggcagtgttcattgcataggcattagctggacaggtttttttccatattggcacttattaattgacaaggtcagggtacacttccaatgagtgtaggga

SEQ ID NO: 59830 - DNA, 1290 bp, Homo sapiens
gctgcgagaagacgacagaagggcaaggaggagaacatgatgatggacctttttgaaactggctcctatttcttctacttggatggggaaaatgttactctgcagccattagaagtggcagaaggctctcctttgtatccagggagtgatggtaccttgtccccctgccaggaccaaatgcccccggaagcggggagcgacagcagcggagaggaacatgtcctggcgcccccgggcctgcagcctccacactgccccggccagtgtctgatctgggcttgcaagacctgcaagagaaaatctgcccccactgaccggcgaaaagccgccaccctgcgcgaaaggaggaggctaaagaaaatcaacgaggccttcgaggcactgaagcggcgaactgtggccaaccccaaccagaggctgcccaaggtggagattctgcggagcgccatcagctatattgagcggctgcaggacctgctgcaccggctggatcagcaggagaagatgcaggagctgggggtggaccccttcagctacagacccaaacaagaaaatcttgagggtgcggatttcctgcgcacctgcagctcccagtggccaagtgtttccgatcattccagggggctcgtgataacggctaaggaaggaggagcaagtattgattcgtcagcctcgagtagccttcgatgcctttcttccatcgtggacagtatttcctcggaggaacgcaaactcccctgcgtggaggaagtggtggagaagtaactgagcctgcgcttgagaccttctccacgcagcaggaagatcccaccgacccttcctggcctaatcctttagattaggtcacattacattaacatttaggaacccagaccgaaaagttgctgaaagggaaggagacacattcacaaagaaaagttgcgaaaattgcgaaatctgttgtgcatgctcaaatgaaaacgcctttcggctttgggcttttatttttttggaactgcgagtggcttaggtctagcctcattttgtttttgtttggttggttttatactatattaacttttattacggtgatccttttgtgccatgttcaaaagaagttcattcctgtctaaagtgggaaagttgcatttaatgttaggggtatttaatgtatttttgtaaatagtttagcactttctttttttacgtaaacctgaaatatattttaaatgtggaatgatgtatataaaatgtgctgaggatcctggtattgtaatattaaaaagaagtttctatatgaaaaaaaaaaaa

SEQ ID NO: 59831 - DNA, 2190 bp, Homo sapiens
gaagacattttccccgcacaactgctaaagctccagagacacgagcgtgtgtggcagcaagagccgccagttcgggaccaccgcagctggggtggcagcggcgcaggaggggtcgcggggagggagtggactgaccagggccaagtggcgctcggcgggcactacatggcggagggtgaagggtacttcgccatgtctgaggacgagctggcctgcagcccctacatccccctaggcggcgacttcggcggcggcgacttcggcggcggcgacttcggcggcggcgacttcggcggcggcgacttcggcggtggcggcagcttcggtgggcattgcttggactattgcgaaagccctacggcgcactgcaatgtgctgaactgggagcaagtgcagcggctggacggcatcctgagcgagaccattccgattcacgggcgcggcaacttccccacgctcgagctgcagccgagcctgatcgtgaaggtggtgcggcggcgcctggccgagaagcgcattggcgtccgcgacgtgcgcctcaacggctcggcagccagccatgtcctgcaccaggacagcggcctgggctacaaggacctggacctcatcttctgcgccgacctgcgcggggaaggggagtttcagactgtgaaggacgtcgtgctggactgcctgttggacttcttacccgagggggtgaacaaagagaagatcacaccactcacgctcaaggaagcttatgtgcagaaaatggttaaagtgtgcaatgactctgaccgatggagtcttatatccctgtcaaacaacagtggcaaaaatgtggaactgaaatttgtggattccctccggaggcagtttgaattcagtgtagattcttttcaaatcaaattagactctcttctgctcttttatgaatgttcagagaacccaatgactgagacatttcaccccacaataatcggggagagcgtctatggcgatttccaggaagcctttgatcacctttgtaacaagatcattgccaccaggaacccagaggaaatccgagggggaggcctgcttaagtactgcaacctcttggtgaggggctttaggcccgcctctgatgaaatcaagacccttcaaaggtatatgtgttccaggtttttcatcgacttctcagacattggagagcagcagagaaaactggagtcctatttgcagaaccactttgtgggattggaagaccgcaagtatgagtatctcatgacccttcatggagtggtaaatgagagcacagtgtgcctgatgggacatgaaagaagacagactttaaaccttatcaccatgctggctatccgggtgttagctgaccaaaatgtcattcctaatgtggctaatgtcacttgctattaccagccagccccctatgtagcagatgccaactttagcaattactacattgcacaggttcagccagtattcacgtgccagcaacagacctactccacttggctaccctgcaattaagaatcatttaaaaatgtcctgtggggaagccatttcagacaagacaggagagaaaaaaaaaaaaaggaaaaaaaaaagagggatccagcccttattagggatgtgttttgtgcaatgatgatatgctcctggttttaagtttggcaaagcttatgtatcttttaatagatgtgggagcatgatctcgaaaggatccttttcccttctcttattctcctacccaattggattctatcctgcaaaaaaagagagacctgtcattagaagcaaccaggttctcctgatacaagagaagaaatgtgtgatgacaatatgggtttgctgtatctgctcccatagctttgccataggaaaaaaaaaagtggaaagtttcttttaagatggaattcataaaagggaaaatacggaggaaaaaaggtctcactccaacttgtgaatcagtttaggagttcagatattaatagtaacaatacaggaaaaaggggaactccaacgttgggattactgtctgaggcttgtagcaagtgctttctgtggaatgatcttgttttgctaacaaacggcttgctccaaatgaacagtagtaggttggtgcagttctcgtaacaatcagcagaacttatgatgacacaatccattaattccagctgcgggcatagatcacatttttaaaatgtaaaa

SEQ ID NO: 59832 - DNA, 1123 bp, Homo sapiens
ggcctcgtgccagacccggcggcggacggcggctctcgactccggagagcggatcgcggggcgcaggagcccgatcgcgctggccatggcctccaactttaacgacatagtcaagcagggctacgtgaaaatccgcagcaggaagcttgggattttcagacgatgctggttggttttcaagaaggcttctagcaaaggacccagaaggttagaaaaatttccagatgaaaaggcagcttatttcagaaactttcataaggtaactgaactgcacaatatcaaaaatataaccagactgccccgagagacaaagaagcatgcggtggcaatcatctttcacgatgaaacatcgaagacatttgcctgtgagtcagagctggaggccgaggagtggtgcaagcacctctgcatggagtgtctggggaccaggctcaatgacatcagccttggggagcccgaccttctggccgcaggagtgcagcgggaacagaatgagagattcaacgtgtatcttatgcctacgccaaacctggatatttatggtgaatgcacaatgcagatcactcatgaaaatatctatctctgggatatccacaatgccaaggtcaaactggtgatgtggcctctcagctcactgaggagatacggtcgggactcaacgtggttcacgtttgagtcaggaagaatgtgtgacacaggagaaggactattcacttttcaaacaagggaaggagaaatgatctatcagaaggttcattctgcgacactggccatagctgagcaacatgaaagattaatgctagaaatggaacagaaggcccggcttcagacaagcttgactgaaccaatgacattatccaaatcaatatctcttcctcgcagcgcgtactggcatcacatcactcgtcagaacagcgttggtgaaatctacagtttgcaaggaaatcatgaaaatcggcactccgatttaacaggaaagagttgcaagacatccgagaacagatttcttgaagaaaatgcacccttggttatgtatggcatcactcaccatctgttcatggatacttctacatgcaaagttgtacatgacttggaataaaccagctctagttttatcatcaaa

SEQ ID NO: 59833 - DNA, 2608 bp, Homo sapiens
ggaattcgcggcgccggcgtccgcggcagctgataccagagtcttgctccggccgcggccagcggagccctgggctggggcaggagccgcaatgtctcaggctgtgcagacaaacggaactcaaccattaagcaaaacatgggaactcagtttatatgagttacaacgaacacctcaggaggcaataacagatggcttagaaattgtggtttcacctcgaagtctacacagtgaattaatgtgcccaatttgtttggatatgttgaagaacaccatgactacaaaggagtgtttacatcgtttttgtgcagactgcatcatcacagcccttagaagtggcaacaaagaatgtcctacctgtcggaaaaaactagtttccaaaagatcactaaggccagacccaaactttgatgcactcatcagcaaaatttatccaagtcgtgatgagtatgaagctcatcaagagagagtattagccaggatcaacaagcacaataatcagcaagcactcagtcacagcattgaggaaggactgaagatacaggccatgaacagactgcagcgaggcaagaaacaacagattgaaaatggtagtggagcagaagataatggtgacagttcacactgcagtaatgcatccacacatagcaatcaggaagcaggccctagtaacaaacggaccaaaacatctgatgattctgggctagagcttgataataacaatgcagcaatggcaattgatccagtaatggatggtgctagtgaaattgaattagtattcaggcctcatcccacacttatggaaaaagatgacagtgcacagacgagatacataaagacttctggtaacgccactgttgatcacttatccaagtatctggctgtgaggttagctttagaagaacttcgaagcaaaggtgaatcaaaccagatgaaccttgatacagccagtgagaagcagtataccatttatatagcaacagccagtggccagttcactgtattaaatggctctttttctttggaattggtcagtgagaaatactggaaagtgaacaaacccatggaactttattacgcacctacaaaggagcacaaatgagcctttaaaaaccaattctgagactgaacttttttatagcctatttctttaatattaaagatgtactggcattacttttatggacagatcttggatatgttgttcaattttctttctgagccagactagtttacgctattcaaatcttttcccctttatttaagatttcctttttggaagggactgcaattattcagtatttttttctttcctttaaaaaaatatatctgaagtttcttgtgtttttttttttccccacaaagtgtgtttccacttggagcaccattttgacccaggaatttttcatagtttctgtattcttataagattcagttggctgtccttttcctgctcccctcaaaagatttttagtcatacagaatgttaaatattatgtattctgactttttttttcccccggagtcttgtatatttatagttttctatataaactgtagtatcttcatgaagacccaaggctcaaatttactgtccttaaaaacaattctcataggattattcttttcatggtattttcttccataatatctcattttaaaaagaagttctttatgaacttagtgtccattgtcatgcaatgttttttttttccattctttttccctgtaattttggaatttctggtcctgggaagaatcaaacaaaatcttaagttctatgagaacttggttcattgacatattctgctgaagaaagaaaaattaaattggtagtaaaatatagtcttcaagtatacgtttgagagtgcttttttttgtattagttctgctgtcacttcatttcctgtattatatgtgatgtttttccccattaaaataccagagataatggagatattttgcactttagccttgatgaaaagtacaagatatgttcaaagcttccctaatttttttcttatttgtagccacataagtttcaagaataacatggcacacagaacaatggaaaaaagtttctttccattggaaaattatatcattttgggttgccacatcagtttataaatttggcgctcttttaattacactctgtagaaggttaatagagcttgagccctgctttaatatgtagtgaaagataattctgtagaaaaacgtcagccagtagggtaaagtcattctactgttcttaatttttatattgaggaacaatattgggtgtttgggagccagaaagctttgttgacagatcaaaaataagattgacttgggtgttatatttcatctctctccagactctaggtatatttccaactttatatatcacagtatttaaaaagacatgtttgcattgagaaattaaccctaaagggttttcaatagggtgtagacctccagtacctttgtaactaaagtctgtctagtcattgtaaatatttatctgtcagttttgacagattggggccagcttgatgttttaaatcttcagcccggtatgaaacttaaaggtatatattcaattttttaccattttatggaaaat

SEQ ID NO: 59834 - DNA, 2795 bp, Homo sapiens
ggtgagtctcctttctctgaggaagagagcatagagtttaaccccagcagctctgggcgctcagcgaggaccgttagcagcaacagcttctgctcagatgacacaggctggcctagcagccagtcagtgtctcctgtgaagacaccctcagatgctggaaacagccccattggcttttgccctggaagtgatgaaggcttcaccagaaagaaatgcacgattggaatggttggtgaaggaagcattcagtcctctcgatataagaaggaatcaaagtcaggccttgtgaaaccaggtagtgaagctgattttagctcctcgagcagcacaggcagcatttccgctcctgaggtccatatgtcgactgcgggaagcaagcggtcttcttcttcacgcaatcgaggtcctcatgggcggagtaatggagcttcgtcacacaagcctggcagcagcccatcatccccgcgggaaaaggaccttctgtccatgctgtgcaggaatcagctgagccctgtcaatatccatcccagttatgcaccttcttccccaagcagtagcaactcaggctcctacaaaggaagcgactgtagccccatcatgaggcgttctggaaggtacatgtcttgcggtgaaaatcatggtgtcagacccccaaacccagagcagtatttgactccactgcagcagaaagaggtgacagtgagacacctcaaaaccaagctgaaggaatctgagcgccgactccatgaaagggaaagtgaaatcgtggagcttaagtcccagctggcccgcatgcgagaggactggattgaggaggagtgtcaccgggtagaggcccagttggcactcaaagaagccaggaaagagattaaacagctcaaacaggtcatcgaaaccatgcggagcagcttggctgataaagataaaggcattcagaaatattttgtggacataaacatccaaaacaagaagctggagtctctccttcagagcatggagatggcacacagtggctctctgagggacgaactgtgcctagactttccatgtgattccccagagaagagcttaaccctcaacccccctcttgacacaatggcagatgggttatctctggaagagcaggtcacgggggaaggggctgacagggagctactggtaggagatagcatagccaacagcacagatttgttcgatgagatagtgacagccaccaccacagaatctggtgacctggagcttgtgcattccacccctggggctaacgtcctggagctgctgcccatagtcatgggtcaggaggagggcagtgtggtggtggagcgagccgttcagaccgacgtggtgccctacagcccagccatctcagagctcattcagagtgtgctgcagaagctccaggacccctgtccctcgagcttggcgtcccctgatgagtctgaaccagactcgatggagagcttcccagagtccctctctgccttagtggttgatttaactccaagaaatccaaactcagccatccttttgtctcccgtggagaccccctacgccaatgtggatgcagaagttcatgcaaaccgcctcatgagagagctggattttgcagcctgcgtggaagagaggttggatggtgtcatcccactggctcgcgggggcgtcgtgaggcagtactggagcagcagcttcctggtggatctcctggctgtggctgcccccgtggtccccacggttctgtgggcattcagtactcagagagggggaacggatcctgtgtataacatcggggccttgctcaggggctgttgcgtggttgccctgcattcgctccgccgcaccgccttccgtatcaaaacctaaatagaagttgttgttaccgtgtgccaatgtgtcccatgtgggttgtgccaggtagagaaacaggaagtcaatcatctgtgacagtctctattctgtcgttttgctccttggtatttgatttgcactatatttagttgaagcctgttcactgtttaaaaccggaggtatcttcaaaggcatggagacctggttccagtaaatgtcccaccagtggggtatagaaagcatgctcatgaccctgccgtgtcgtctgaggtacccgttcttatcctagtggttcaggaagagaaaacgcagtttgcactttcaagacagcttctctaaggctggcatgttatctccttgctttgctttttgccgttttaaaatgtgtaattgttccagcattccaatggtcttgtgcatagcaggggactgtaaccaaaaataaacatgtatttgtgtaattggtttgaagaagtcttgaatagctctttactgtcttacttggggttgataagatttgagtgtttgcaattttttactaaatgtagctccaaagtcttaaatggcttgtttgttcttaaactgttaattgatgaaactgtgcataagtttacaatgtactaacttattttgcttattatatatagtgttttattggaaattgtaaccacacacttcagcatgatgaaaataaagattagtgtttccatttaaataaatgttttatcctcccataaaataataattatttctgtgattttacttctatgtataagaaagacaatgaatagcagatcttacatctttatcaatagggggtctgtaaaaattgaattaaattaggaagagggaaaaagagttagttattaaagaaaatgaagatttcctacccttacttaaaaagcatcatttctgaataaaagtagatttgtttacttttaaaaaaaaaa

SEQ ID NO: 59835 - DNA, 2198 bp, Homo sapiens
ctcgttagtgccccctgtgtttggggccccgtgatctcaacggtcctgccctcggtctccctcttcccccgccccgccctgggccaggtgttcgaatcccgactccagaactggcggcgtcccagtcccgcgggcgtggagcgccggaggacccgccctcgggctcatggcggccccggtccgcctgggccggaagcgcccgctgcctgcctgtcccaacccgctcttcgttcgctggctgaccgagtggcgggacgaggcgacccgcagcaggcaccgcacgcgcttcgtatttcagaaggcgctgcgttccctccgacggtacccactgccgctgcgcagcgggaaggaagctaagatcctacagcacttcggagacgggctctgccggatgctggacgagcggctgcagcggcaccgaacatcgggcggtgaccatgccccggactcaccatctggagagaacagtccagccccgcaggggcgacttgcggaagtccaggactcttccatgccagttcctgcccagcccaaagcgggaggctctggcagctactggccagctcggcactcaggagcccgagtgatactgctggtgctctaccgggagcacctgaatcctaatggtcaccacttcttaaccaaggaggagctgctgcagaggtgtgctcagaagtcccccagggtagcccctgggagtgctcgaccctggccagccctccgctccctccttcacaggaacctggtcctcaggacacaccagccagccaggtactcattgaccccagagggcctggagctggcccagaagttggccgagtcagaaggcctgagcttgctgaatgtgggcatcgggcccaaggagccccctggggaggagacagcagtgccaggagcagcttcagcagagcttgccagtgaagcaggggtccagcagcagccactggagctgaggcctggagagtacagggtgctgttgtgtgtggacattggcgagacccgggggggcgggcacaggccggagctgctccgagagctacagcggctgcacgtgacccacacggtgcgcaagctgcacgttggagattttgtgtgggtggctcaggagaccaatcctagagacccagcaaaccctggggagttggtactggatcacattgtggagcgcaagcgactggatgacctttgcagcagcatcatcgacggccgcttccgggagcagaagttccgactgaagcgctgtggtctggagcgccgggtatacctggtggaagagcatggttccgtccacaacctcagccttcctgagagcacactgctgcaggctgtcaccaacactcaggtcattgatggcttttttgtgaagcgcacagcagacattaaggagtcagccgcctacctggccctcttgactcggggcctgcagagactctaccagggccacaccctacgcagccgcccctggggaacccctgggaaccctgaatcaggggccatgacctctccaaaccctctctgctcactcctcaccttcagtgacttcaacgcaggagccatcaagaataaggcccagtcggtgcgagaagtgtttgcccggcagctgatgcaggtgcgcggagtgagtggggagaaggcagcagccctggtggatcgatacagcacccctgccagcctcctggccgcctatgatgcctgtgccacccccaaggaacaagagacactgctgagcaccattaagtgtgggcgtctacagaggaatctggggcctgctctgagcaggaccttatcccagctctactgcagctacggccccttgacctgagcttatgccgtgaaacagcccccagcccccgtctgtcccccaacccaggctagccagccttttaacaacatcttttggggtacaattagaatctaagtgtttgcagccatatgtgtcatgtagaagatgcctagccctggggaccttgtgaaatacgcaggaaccagggataccatctggtccagtggtttttaaacaaagctgcttagcacctggaattccctggtcagggagatggagtcagtggggcattgcagcttggaatctattttatgtcaccagttggtcctcatcaaataaaatttccttaggagtgcagagggctcattgggaaaataaaaataataaaaataaataaaacttcctaaaagaaaaa

SEQ ID NO: 59836 - DNA, 2244 bp, Homo sapiens
ctccccgccccgaccatggtagtgttcaatggccttcttaagatcaaaatctgcgaggccgtgagcttgaagcccacagcctggtcgctgcgccatgcggtgggaccccggccgcagactttccttctcgacccctacattgccctcaatgtggacgactcgcgcatcggccaaacggccaccaagcagaagaccaacagcccggcctggcacgacgagttcgtcaccgatgtgtgcaacggacgcaagatcgagctggctgtctttcacgatgcccccataggctacgacgacttcgtggccaactgcaccatccagtttgaggagctgctgcagaacgggagccgccacttcgaggactggattgatctggagccagaaggaagagtgtatgtgatcatcgatctctcagggtcgtcgggtgaagcccctaaagacaatgaagagcgtgtgttcagggaacgcatgcggccgaggaagcggcagggggccgtcaggcgcagggtccatcaggtcaacggccacaagttcatggccacctatcttcggcagcccacctactgctcccattgcagagacttcatctggggtgtcataggaaagcagggataccagtgtcaagtctgcacctgcgtggtccacaagcggtgccacgmgctcataatcacaaagtgtgctgggttaaagaagcaggagacccccgaccaggtgggctcccagcggttcagcgtcaacatgccccacaagttcggtatccacaactacaaggtccctaccttctgcgatcactgtgggtccctgctctggggactcttgcggcagggtttgcagtgtaaagtctgcaaaatgaatgttcaccgtcgatgtgagaccaacgtggctcccaactgtggagtggatgccagaggaatcgccaaagtactggccgacctgggcgttaccccagacaaaatcaccaacagcggccagagaaggaaaaagctcattgctggtgccgagtccccgcagcctgcttctggaagctcaccatctgaggaagatcgatccaagtcagcacccacctccccttgtgaccaggaaataaaagaacttgagaacaacattcggaaagccttgtcatttgacaaccgaggagaggagcaccgggcagcatcgtctcctgatggccagctgatgagccccggtgagaatggcgaagtccggcaaggccaggccaagcgcctgggcctggatgagttcaacttcatcaaggtgttgggcaaaggcagctttggcaaggtcatgttggcagaactcaagggcaaagatgaagtatatgctgtgaaggtcttaaagaaggacgtcatccttcaggatgatgacgtggactgcacaatgacagagaagaggattttggctctggcacggaaacacccgtaccttacccaactctactgctgcttccagaccaaggaccgcctctttttcgtcatggaatatgtaaatggtggagacctcatgtttcagattcagcgctcccgaaaattcgacgagcctcgttcacggttctatgctgcagaggtcacatcggccctcatgttcctccatcagcatggagtcatctacagggatttgaaactggacaacatccttctggatgcagaaggtcactgcaagctggctgacttcgggatgtgcaaggaagggattctgaatggtgtgacgaccaccacgttctgtgggactcctgactacatagctcctgagatcctgcaggagttggagtatggcccctccgtggactggtgggccctgggggtgctgatgtacgagatgatggctggacagcctccctttgaggccgacaatgaggacgacctatttgagtccatcctccatgacgacgtgctgtacccagtctggctcagcaaggaggctgtcagcatcttgaaagctttcatgacgaagaatccccacaagcgcctgggctgtgtggcatcgcagaatggcgaggacgccatcaagcagcacccattcttcaaagagattgactgggtgctcctggagcagaagaagatcaagccacccttcaaaccacgcattaaaaccaaaagagacgtcaataattttgaccaagactttacccgggaagagccggtactcacccttgtggacgaagcaattgtaaagcagatcaaccaggaggaattcaaaggtttctcctactttggtgaagacctgatgccctgagagcccactgcagtt

SEQ ID NO: 59837 - DNA, 1207 bp, Homo sapiens
ggctgggtgcctttactttcccgaattctgccttccgatgcatgtaaaatatacaaacaaggtatcaatatcaggcttgacacaactctcatagactttactgacatgaagtgccaacgaggggatctaagcttcattttcaatggggatgcggcgccctctgaatcttttgtagtattagacaatgaacaaaaagtttatcagcgaatacatcatgaggaatcagagatggaaacagaagaagaggtggatattttaatgagcagtgatatttactctgcaactttatcaacaaaatcaatttctttcacgcgtgcccagacaggatggctttttcgggaagataaaacagaaagagtaggaaactttttggcagacttttacctggtgaatggacttgttttagaatcaaggaaaagaagagaacatctcagtgaagaggatattcttcgaaataaggccatcatggagagtttgagtaaaggtggaaacataatggaacagaattttgagccgattcgaagacagtctcttacacctcctcctcagaacactattacatgggaagaatatatatctgctgaaaatggaaaagctcctcatctgggtagagaattggtgtgcaaagagagtaagaaaacgtttaaagctacgatagccatgagccaggaatttcccttagggatagagttattattgaatgttttagaagtagtagctcccttcaagcactttaacaagcttagagaatttgttcagatgaagcttcctccaggctttcctgtaaaattagatatacctgtgtttcccacaatcacagccactgtgacttttcaggagtttcgatacgatgaatttgatggctccatctttactatacctgatgactacaaggaagacccaagccgttttcctgatctttaactgacgtggaaaaggatgccgtctaaccaaggaaagaaaatacagagaccctagaagtggatccaaatagaagggacaaatgctttcagtgaagaaaagggaattacacattgaatccgacacatcagtaataccgatacagtgaaatgggcctctaataagaatttcagcgagttttctgatgtgccattttttgtctttttaaaaatatacatattataaatgtaatagtttgacacattaatgaccctaagacctgcgtatgtggaagcagctatgagtg

SEQ ID NO: 59838 - DNA, 1479 bp, Homo sapiens
cccgtgtggcggaattcgcccggcagcagtggggcggggatggaggcggccgtggcgccggggagggatgcgccggcacccgcggcgagtcagcccagcggctgcgggaaacacaactcgccggagaggaaagtttatatggactataatgcaacgactcccctggagccagaagttatccaggccatgaccaaggccatgtgggaagcctggggaaatcccagcagcccgtattcagcaggaagaaaggccaaggatattataaatgcagctcgggaaagcctcgcgaagatgataggggggaaacctcaagatataatcttcacttccgggggcactgagtcaaataatttagtaatccattctgtggtgaaacatttccacgcaaaccagacctcaaagggacacacaggtgggcaccacagcccagtgaagggggccaagccccatttcattacttcctcggtggaacacgactccatccggctgcccctggagcacctggtggaagaacaagtggcagcggtcacctttgtcccggtgtccaaggtgagcgggcaggcagaggtggacgacatcctcgcggcagtccgcccgaccacacgcctcgtgaccatcatgctggccaacaatgagactggcattgtcatgcctgtccctgaaatcagtcagcgcattaaagccctgaaccaggaacgggtggcagctgggctacctcccatcctcgtgcacacggatgctgcacaggccttggggaagcagcgcgtggatgtggaggacctgggcgtggacttccttacaatcgtggggcacaaggacagagaacaccccaatgattgctggccttgggaaggtgagccctggtgagcttgaggagatgagttgattgccttgtcatcagtgtccccagcggctctagtaggaatctggggctttagggagatcatattcgtgatctcataagcggactgacaagaaaaagcctggaatctgatttatcaacctggagagctgtactttttcagatctgtggattagtggcacttgtttagcatttaaaagggaaaaactccgttgtctgtgtctcttttgacatgagaaacagtgatactgttacagcagaggtgaagtgtcaagctgtaggttcaccattcccaaaggcgtcggcagcccccgcaccatcgacgttctgtccccgattggtctgtggggtggccaatccagcacctgccaccagccctccactggggcctgtcctgcttctgcgacagtaacccaggctcaggttttgccgtgcgaaggcagaggtactggttaaacctcggcgtctgcaggctgctccctcactgtgcggcctctggtcaaaggccaccaccttcaagcaaccctccatgaaccacagctacattggttcccccatgtcccctgctgtcaccctctgtatgcggccgctctagagaatccacgcagcgtctgcgt

SEQ ID NO: 59839 - DNA, 1641 bp, Homo sapiens
  misc_feature (1)...(1641): n = a,t,c or g
ttttttttttttcaaggaggaagcttttattttgggaagagtgcggttctgctcggccctgatcagctctgccctgcccaccccatctcagccaggcggctttacttcttcctgatcttcaggtctttcttcttcctgatttccttggccagctccccaatcaatctccagtactcattgaacttgagctccgagtcctgattcacatccaagctcttcatcttctcatcaagagagcccacatccttgagcagatggggcaactgctgggtaaccagctctttgaactcgttgacgctgaggctatccttccggccctcctgccttgcaaaggtgaagaaggtggtgaccacggtctcaatggactcctctagctctgtcagtggttctgctgccattaggaccctgaggccaaagctgatgtcctcaaggggctagctgacctttgtcagggctgacctgtggaagagagaaggagcagagagggagagtcagggagccccaagatgcaggaatggttcagaaggtccctgccttggtgttatcacatcagtctcagcctggagggggcatatggggaaagagggagaggacaggggttgagcttggggcagcagaccaggcaacggcatctcagttttggtgggggcaggagattcagctccagaaaccccctcttctgtaggtctcacaatccgggatcctttttaaatgtctgtggcttagggacccctctgtggtgatccctcgatctggagacccctctacttgagaggaggtcttcagttgaaggtccttcttggagtccttcaagtctggtggcccctctgtggcgtgtctgtctcaagaatcccttcttgtctcacccagactcacaggtcataaggttgtttgtctccaaagcttgtttatgttgggccctggtctccggccactcgcatccgcccacacacactctaaccgctcctcccagcagagaagcacagggtctggcaaatgtcccctgtggtcagagctggctccgtctgaacagacccattttctctgccccgctccacccttacctctcctcagcggcagcagggcagagtgctgaacccaggaccccacagatcctccccgctcctgtctcccggtgacaagggtcctggaacggggcgtctctgactccctgctccaggacgggtttagtacaggcactcacaaccccctggggtgcggcgggtggggctggaagaggcattctcttttctgtccaccccgtcacacactcctgcacgcgctgttgctcgatcatccaaagctccttcctgaattcctgtctgagctggctctgggggagggacctgggagcccaggaagaaaaaatgatctccagcctccctccagggtcagccatgagactcacccggcaaggagatggggtagagtgagctggagcctcagggctgaggtttataagcagcggggaaggaggagagagctgcttccaagcccggaggtgtcaaatttccgtggtcgattcgggctcaaccagcacagccagccacaggtactgcaagaaacagcttggggtaagacatccagtgtccctcccaggacctccttccccggaaanccaccncgcggttttacgaaggt

SEQ ID NO: 59840 - DNA, 4569 bp, Homo sapiens
ccgggatcttgacggagagtgcgggggatgaaggcgggagctgagggctggagagtctctgttgacatagtaactcttcagctccgtctcccttgctctccgctcttacgcttcgctaccaccagcggccccgcctgtgccctctctgcccgggcgccccagacgcatcctcgcggggtctcctcggcctgacctgctcaggtcaagatcctctttgcacccccttaagtggtgacttttccccgggccagtgggcgagccacttgcggcgggcgtctgcaccccctgcttcaccgtcgtcccctgggcaccggtctgcccaggtccagttcggccgctgacgcgaaccctccgcaccgggtccccgctggaactgcccactcggctcccccgggagcggggcccaggccagtcgggcgttcccgccatgagccagagcccggcgttcgggccccggaggggcagttctccccggggcgctgccggagccgctgcgcggcgcaacgagagccaggactatctgctcatggactcggagctgggagaagacggctgcccgcaagccccgctgccttgctacggctactacccctgcttccggggatctgacaacagactggctcaccggcggcagacagttctccgtgagaaggggagaaggttagctaatcgaggaccagcatacatgtttagtgatcgctccacaagcctatctatagaggaggaacgctttttggatgcagctgaatatggtaacatcccagtggtgcggaagatgttagaagaatgccactcactcaacgttaactgtgtggattacatgggccagaatgccctacagttggcagtggccaatgagcatctggaaattacagaacttcttctcaagaaagaaaacctctctcgagttggggatgctttgcttctagctattagtaaaggttatgttcggattgtggaagcaattctcagtcatccggcttttgctgaaggcaagaggttagcaaccagccctagccagtctgaactccagcaagatgatttttatgcctatgatgaagatgggacacggttctcccatgatgtgactccaatcattctggctgcccactgccaggaatatgaaattgtgcataccctcctgcggaagggtgctaggattgaacggcctcatgattatttctgcaagtgcaatgactgcaaccagaaacagaagcatgactcgtttagccactccagatctaggattaatgcctataaaggcctggcaagtccggcttacctgtcattgtctagtgaagatccagtcatgacggctttagaacttagcaatgaactggcagttctggccaatattgagaaagagttcaagaatgactacaaaaaactgtcaatgcagtgcaaagactttgttgttggactccttgatctgtgcagaaacactgaagaagtcgaggccattctgaatggggatgttgaaacgctccagagtggtgatcacggtcgcccaaatctcagccgtttaaaacttgccattaaatatgaagtaaaaaaatttgtagctcatccaaactgccaacagcaacttctctccatttggtatgagaatctttctggtttacgacagcagacaatggcggtcaagttccttgtggtccttgctgttgccattggactgcccttcctggctctcatttactggtttgctccatgcagcaagatggggaagataatgcgtggaccattcatgaagtttgtagcacacgcagcctccttcaccatttttctgggactgctagtcatgaatgcagctgacagatttgaaggcacaaaactccttcctaatgaaaccagcacagataatgcaaaacagctgttcaggatgaaaacatcctgcttctcatggatggagatgctcattatatcctgggtaataggcatgatatgggctgaatgtaaagaaatctggactcagggccccaaggaatatttgtttgagttgtggaacatgcttgattttggtatgttagcaattttcgcagcatcattcattgcgagattcatggcattttggcatgcttccaaagcccagagcatcattgacgcaaatgatactttgaaggacttgacgaaagtaacattgggagacaatgtgaaatactacaatttggccaggataaagtgggacccctctgatcctcaaataatatctgaaggtctttatgcaattgctgtagttttaagtttctctaggatagcttatattttaccagcaaatgaaagctttggacctctgcagatatcacttggaagaacagtcaaagacatcttcaagttcatggtcatattcattatggtgtttgtggcctttatgattggaatgttcaatctctactcctactacattggtgcaaaacaaaatgaagccttcacaacagttgaagagagttttaagacactgttctgggctatatttggactttctgaagtgaaatcagtggtcatcaactataaccacaaattcattgaaaacattggttacgttctttatggagtctataatgttacgatggtcattgttttgctaaatatgttaattgccatgatcaacagttcattccaggaaattgaggatgacgctgatgtggagtggaaatttgcaagggccaaactctggttttcctactttgaggagggcagaacacttcctgtacccttcaatctggtgccgagtccaaagtccctgttttatctcttactgaagcttaaaaaatggatttctgagctgttccagggccataaaaaaggtttccaggaagatgcagagatgaacaagataaatgaagaaaagaaacttggaattttaggaagtcatgaagacctttcaaaattatcacttgacaaaaaacaggttgggcacaataaacaaccaagtataaggagctcagaagatttccatctaaatagtttcaataatcctccaagacaatatcagaaaataatgaaaaggctcattaaaagatatgtactgcaggcccagatagataaggagagtgatgaagtgaacgaaggggaactgaaggaaattaagcaggacatctcaagtctccgctatgaactccttgaagaaaaatctcagaatacagaagacctagcagaacttattagagaacttggagagaaattatccatggaaccaaatcaagaggaaaccaatagataatgcgaagacttccttagaaattcatatttatttgtccacttgaagccatattattttctgatttattttcttaagtgccaatgggcccaccttttaaacaagaaaacgttaaataacttgggccatcctatcatctggagccctagtatctaatttttttggtgattaaactccattgttcagggtaaaggctgtagataatgaggaaaattatgcccagttgtttggtgcttgttttataaactgctttcttggatataactaactcttgtgatgatgtcattgccatgtagtgtctgcctgaaaatgggtcccagcggacaggggctgacccacgttactccccatgcggtttttcctctgaagtttatttcaggttccttcttgcctgctctgtggatcccctgctggggactcccagctctgaaatttgggaaaaagtagcccatgggcctttagaatgctttaatcctttctttagaatgctgtttaaacaccatttaccctacttatccctcaatgcacatgattgataccgttcatacaaaatggtcttacatctatgtaaaattttctgattcatctatttgaaaaccattacaccttaacaatgaaaaaagttttttcctccactgaaccctggaaacatggtcccagttttgtgtgtgtgcgtgtgtgtaaatgtgtacacacagacataaagtacttgccctatttagtttgtggctaatgtggacacacaaaagctctttatgttataaatttttattggtcactaaaaaattttactgtctaaataagtaccttttattggagaaaaatcaaaaccccaaacaaacactgtggttgtttggttccattatagcacaattttgtgccatttctgggagcatttacagatgaatccccacacttagccattgaatgtaaaggggaaaaataaggtgagaatttgtaaatacttatctgttattttcaatatgttctatccttctacccaaatatataaaacaggaatttgcattcatgtgcatttaccaagaggttgttgttgttacttactgatcatgtgaagtggtgtcttaaacaactaaaagcgatgaaggttcatatgtttactcaaagaccattggcattcagaggatgctggacattaactggaactgctacttccaattcaataatgggagatttcaaatgcaaatctttaacttcatcttaaagatgaaatggttgcagaaaatctgtttagctccaactttggcttaatttaaatcaaagaacatttatgtaaccagatcagaaaatacagctgaaaatttggaattcgagctcggtacccgggg

SEQ ID NO: 59841 - DNA, 2256 bp, Homo sapiens
  misc_feature (1)...(2256): n = a,t,c or g
ttttttttaaaattttaaatccgtttactacacttgagttgatcttaaaaataatatcaatctttgggaaaacagaggtagaagtacatctggattaatagaatttacagttcaatcacggtgaatttaaaaaatacatttttctttcaataattattttatgttctaaatgaggtaaaatttataaaatctgcattaaagtaaggtagagggcactctggtgataacaacgatgaggtttatttttgtcaaaacatccaagggaaatattaattgttgtttgtcaactgtgaacttcacactacattgtctaaggatagaaaattgatgggtatcactctgtcagaaaatcctcaccaagaagccaattcaaggaatatgaaattgacaagcctttcaaacaaagatgtgttcggacttcactgatgcgatggtaggtcttttgggttacaatagatagggatgatataaaacacaatcttttcctgtctattccattttagaaaccggtgggtgtgctcacgtttgtctgggcattgcagcactgcacacatacatgaattaagcaaagcatcggaaagtattgacacatgagactaaaataaataagagaaacgagctgctctttatacctagaaatagctggaaattactgaaaaaaattaaagtgcagaggttttcattttagcaccatgaattgtgatgaaatcccatttctctcactatggcaggactgtatgcagtaaggaagctagagtgatgtgtttgaggcaatgtagatttttgcttcaaaaacagaagtcatgttatcattttagaacaatgggacatagtgaataaagtctgtaaaacatttcttctttgcttttcttaggcggattttcctgcattgggggtagtagttgcggaagtactttttggtagaggaaatccaagtcctaatccctttggcctctgcatggcttgaattggctcagagatccccttgccatctcgtccaaggcctgacccaggcgtccagcccatattctgaagcattcggtttccaatattattttctaggattggctgggcattttcacctacaaatcctgcagtagtaggtccaggcaaaggtgcagcttttcttctccgtttgatatctcccgtgcataaggatcctaaatgcatgcttgtttgcctgctggctgttctcacagaacaatttttcttgtgtcctctttcagctcgattatctctcagaagctgatgctggtcatgctctgtcctagccccagggctaaaccaatggtcatggtgatgagaatccggggaaaaatgaaccattctcttgttacccactgggccaggaatgggtaccattgaagttggagtccctccagattttttaatattctttgaagacattccatgaaggcgactgagtctagcttggaaacctcttctgcttgggtgtgacataaggggaaaagaaccagttaagatactttcaaagacaggatctggtacatttttgtctagctcagtaggatcttccttttcccaccagggcacaactccagtgataccacatgctccacctgattccttttcgtagaaccagtcactctgttcatcatcaccttgtcttccctcatcattggtaaacaatccagcatcagtgctgctgagactgctggaatcactttcactcatgagctcatctgagactttttgctcttcacattccattttgtccttattggtctggttcgtttcctcactttctaaaactactccttcatcttggatttttggtccttgtctgattattttcaactttcttttttttgacttggttcttctaaactagaatcagagccttcacttaagcagtgaccagtctcccacgggtgatgcacattatacgacctccgttttctccctctccttttccttgcctggcgtttcagagggcaagatatacttcgagaatggtctcctgtttcagcaaatccacctcgagcttgctctgagctctcttccaatgctgagacaaggtcatgaaccagctcctccatggttctactgaaatgccagctgttcccggctgctggagctccgatcggttggcgcccggcggccccgaacattaacgacacccgggagcctggcctcgaagctcaggcccgtgaacagactccaactacaacagcaccggcgacttccaaagagcgaattccccgcncttcggagggtctcaatctcgatgggcgg

SEQ ID NO: 59842 - DNA, 1715 bp, Homo sapiens
ctgacgggcccggcggcggctgagccgcgctgcgcagccgacgcgggaatgaagcgggcgctgggcaggcgaaagggcgtgtggttgcgcctgaggaagatacttttctgtgttttggggttgtacattgccattccatttctcatcaaactatgtcctggaatacaggccaaactgattttcttgaatttcgtaagagttccctatttcattgatttgaaaaaaccacaggatcaaggtttgaatcacacgtgtaactactacctgcagccagaggaagacgtgaccattggagtctggcacaccgtccctgcagtctggtggaagaacgcccaaggcaaagaccagatgtggtatgaggatgccttggcttccagccaccctatcattctgtacctgcatgggaacgcaggtaccagaggaggcgaccaccgcgtggagctttacaaggtgctgagttcccttggttaccatgtggtcacctttgactacagaggttggggtgactcagtgggaacgccatctgagcggggcatgacctatgacgcactccacgtttttgactggatcaaagcaagaagtggtgacaaccccgtgtacatctggggccactctctgggcactggcgtggcgacaaatctggtgcggcgcctctgtgagcgagagacgcctccagatgcccttatattggaatctccattcactaatatccgcgaagaagctaagagccatccattttcagtgatatatcgatacttccctgggtttgactggttcttccttgatcctattacaagtagtggaattaaatttgcaaatgatgaaaacgtgaagcacatctcctgtcccctgctcatcctgcacgctgaggacgacccggtggtgcccttccagcttggcagaaagctctatagcatcgccgcaccagctcgaagcttccgagacttcaaagttcagtttgtgccctttcattcagaccttggctacaggcacaaatacatttacaagagccctgagctgccacggatactgagggaattcctggggaagtcggagcctgagcaccagcactgagcctggccgtgggaaggaagcatgaagacctctgccctcctcccgttttcctccagtcagcagcccggtatcctgaagccccggggggccggcacctgcaatgctcaggagcccagctcgcacctggagagcacctcagatcccaggcggggaggcccctgcaggcctgcagtgcccggaggcctgagcatggctgtgtggaaagcgtgggtggcaggcatgtggctctccttgccgcccctcaacctgagatcttgttgggagacttaatggcagcaggcagccatcactgcctggttgatgctgcactgagctggacagggggagtccgggcaggggactcttggggctcgggaccatgctgagctttttggcaccacccacagagaacgtggggtccaggttctttctgcaccttcccagcacatgcagaatgactccagtggttccatcgtcccctcctgccctgtgtacctgcttgcctttctcagctgccccacctcccctgggctggcccactcacccacagtggaagtgcccgggatctgcacttcctcccctttcacctacctgtacacctaacctggccttagactgagctttatttaagaataaaatcgtggtggtggtcaaaaaaaaaa

SEQ ID NO: 59843 - DNA, 2303 bp, Homo sapiens
attttatctttggaaaaaaagataaaatggatccaaatagatccactttcttgttaattacttttcgttactgttgcggttttctgagaactagcctaattgtttctgtttctctttatcatcatcaaacattgcagctacgactacctgtcatttatcccgctctcggatatcatgtgatatttgtctgtgtcttctttttaaaaacactgtcgtcatatttgtggtctaatacttgttttcttcccccctaggaggaatcattatagattctaaaaatatattttcccttctctgtggacttggtataaaacgtagctttttttctgcttggatttattttctaaaaatcaacaccgtaaacccatatcagatacaacaaaattggggtagttaaaaccatgagttgtggaaatgagtttgtggaaacattaaaaaaaattggttatcccaaagctgataatcttaatggagaagactttgactggttgtttgagggcgttgaagatgaatcgtttctgaagtggttttgtgggaatgtgaatgaacagaacgtgttgtctgaaagagaattggaagcttttagcattcttcagaaatcaggcaagcctattctagaaggggcggcattggatgaagctcttaaaacgtgtaaaacttctgatttgaagacacctagactggatgataaagagctggagaaattagaggatgaggttcaaactctactgaaattaaagaacctaaaaattcagcgacgtaataaatgtcaattgatggcttcagtaactagccacaaatctctgaggttaaatgctaaagaagaagaagccactaaaaagctgaagcagagtcaaggaattctaaatgcaatgatcactaagatcagtaatgaacttcaggctcttactgatgaagttacacaattgatgatgttcttcagacattctaatttaggtcaagggacaaatccactggtatttttatcgcaattttccttggaaaaatacctaagtcaggaagagcaaagcacagcagcattaactttgtataccaaaaaacagttctttcagggtatacatgaagtagttgaaagttccaatgaaagccaatttttcaactttttaaaaatacagacaccatctatttgtgataatcaagaaatccttgaggagagacgactagagatggctagactgcagctcgcatacatttgtgctcaacatcagttaattcacttaaaagcaagtaattcgagcatgaagtcaagtataaaatgggcagaggagagtcttcacagcctaaccagcaaggctgtggacaaagaaaatttggatgctaaaatttctagcttgaccagtgagattatgaaacttgaaaaagaggtcactcaaataaaagacagaagtttacctgctgtggtaagagagaatgcccagttattgaatatgccagtggtaaagggagattttgatctgcagattgctaaacaagattattatacagcaagacaagagttagttttaaatcaattaataaaacaaaaggcatcatttgaacttctacagttatcatatgaaattgaattaagaaagcatcgggacatatatcgtcaacttgaaaatttggttcaagaacttagtcaaagtaacatgatgctctacaagcaattagaaatgttaacagatccatcagtttctcaacagataaatccaaggaataccattgatactaaggattattctactcataggctttaccaagttttggagggagagaataagaaaaaagaattgtttctaactcatggaaaccttgaggaagtggctgagaaattgaaacagaatatttctttagtacaagatcagttggcagtatctgctcaagaacattctttctttctgtccaaacggaataaggatgtggacatgctttgtgatactttgtatcaaggaggaaatcagcttttgcttagtgatcaggagttaacagagcagtttcataaagttgaatctcaactgaataagctaaatcatctcctcactgatattcttgctgatgtgaagacaaaaagaaaaactttggcaaataataaattacatcaaatggaaagagaattctatgtatattttttaaaagatgaagattatctgaaagatattgtggagaatttagaaactcaatcaaagattaaggctgttagtcttgaagattgaaaattactgaaaactgaatctttattacgtgtcctcttttatttattagaagactgtgtataataaacactactaaatttttaaaaa

SEQ ID NO: 59844 - DNA, 775 bp, Homo sapiens
  misc_feature (1)...(775): n = a,t,c or g
tggcaaattcatctcttttatcctcgcttatgaataagatgtctcagggcaaccctggcctgggcagcctgctgaacatcaaggcggaacagaggggagccccgctgcggancctcgcccttcctaggcaaggccgtgaaagngctggttcaggagaagttggcagagccctggaaggtgtacctgcgcaggtttggtacaaaggacttctgtgacggccagtgtgacttcctccacaaggcccacttccactgcgtggtggaggaatgcggcgcgctcttcagcaccttggacggggccatcaagcacgcaaacttccacttccggacagagggaggagcagcaaaaggaaacacagaggctgcctttccggcctcggccgccgagaccaaacctcccatggccccctcgtcccctccggtccctcctgtcaccacggccacggtgtcctctctggaggggcccgctcccagcccggcctccgtgccctccacccccaccctgctcgcctggaagcagctggcttccaccataccccagatgcctcagatcccagcgtcagtgcctcacctgcccgcctcgcccttggcaacgacttctctagagaacgccaagccccaggtcaaacccggattcctccagttccaggagaacgatccttgcctcgccacggactgcaagtacgccaacaagttccacttccactgtctctatgggaactgcaagtacgtctgcaaaacgtctggcaaggccgaatcccactgcctggaccaca

SEQ ID NO: 59845 - DNA, 4458 bp, Homo sapiens
tttcgtactgcggattcaggagggaatgaagccggggggcccagctcctgtgagccgcagctgtgtctctccatctcctgggtcctatgagctgcggctgcttctctccatctcctgggtcctgtgaggcgcagcccatcatggggccattgttcaggtgcaccctttgctcccgggctcatccaccatcatgatccatgacttgtgcctcgtcttcccggccccagccaaggctgtcgtttacgtgtcggacattcaggagctgtacatccgtgtggttgacaaggtggagattgggaagacagtgaaggcatacgtccgcgtgctggacttgcacaagaagcccttccttgccaaatacttccccttcatggacctgaagctccgagcagcctccccgatcattacattggtggcccttgatgaagcccttgacaactacaccatcacattcctcatccgcggtgtggccatcggccagaccagtctaactgcaagtgtgaccaataaagctggacagagaatcaactcagccccacaacagattgaagtctttcccccgttcaggctgatgcccaggaaggtgacactgcttatcggggccacgatgcaggtcacctccgagggcggcccccagcctcagtccaacatccttttctccatcagcaatgagagcgttgcgctggtgagcgctgctgggctggtacagggcctcgccatcgggaacggcactgtgtctgggctcgtgcaggcagtggatgcagagaccggcaaggtggtcatcatctctcaggacctcgtgcaggtggaggtgctgctgctaagggccgtgaggatccgcgcccccatcatgcggatgaggacgggcacccagatgcccatctatgtcaccggcatcaccaaccaccagaaccctttctcctttggcaatgccgtgccaggcctgaccttccactggtctgtcaccaagcgggacgtcctggacctccgagggcggcaccacgaggcgtcgatccgactcccgtcacagtacaactttgccatgaacgtgctcggccgggtaaaaggccggaccgggctgagggcggtggtcaaggctgtggaccccacatcggggcagctgtatggcctggccagagaactctcggatgagatccaagtccaggtgtttgagaagctgcagctgctcaaccctgaaatagaagcagaacaaatattaatgtcgcccaactcatatataaagctgcagacaaacagggatggtgcagcctctctgagctaccgcgtcctggatggacccgaaaaggttccagttgtgcatgttgatgagaaaggctttctagcatcagggtctatgatcgggacatccaccatcgaagtgattgcacaagagccctttggggccaaccaaaccatcattgttgctgtaaaggtatcccctgtttcctacctgagggtttccatgagccctgtcctgcacacccagaacaaggaggccctggtggccgtgcctttgggaatgaccgtgaccttcactgtccacttccacgacaactctggagatgtcttccatgctcacagttcggtcctcaactttgccactaacagagacgactttgtgcagatcgggaagggccccaccaacaacacctgtgttgtccgcacagtcagcgtgggcctgacactgctccgtgtgtgggacgcaaagcacccgggcctctcggacttcatgcccctgcctgtcctacaggccatctccccagagctgtctggggccatggtggtgggggacgtgctctgtctggccactgttctgaccagcctggaaggcctctcaggaacctggagctcctcggccaacagcatcctccacatcgaccccaagacgggtgtggctgtggcccgggccgtgggatccgtgacggtttactatgaggtcgctgggcacctgaggacctacaaggaggtggtggtcagcgtccctcagaggatcatggcccgtcacctccaccccatccagaccagcttccaggaggctacagcctccaaagtgattgttgccgtgggagacagaagctctaacctgagaggcgagtgcacccccacccagagggaagtcatccaggccttgcacccagagaccctcatcagctgccagtcccagttcaagccggccgtctttgatttcccatctcaagatgtgttcaccgtggagccacagtttgacactgctctcggccagtacttctgctcaatcacaatgcacaggctgacggacaagcagcggaagcacctgagcatgaagaagacagctctggtggtcagtgcctccctctccagcagccacttctccacagagcaggtgggggccgaggtgcccttcagcccaggtctcttcgccgaccaggctgaaatccttttgagcaaccactacaccagttccgagatcagggtctttggtgccccggaggttctggagaacttggaggtgaaatccgggtccccggccgtgctggcattcgcaaaggagaagtcttttgggtggcccagcttcatcacatacacggtcggcgtcttggaccccgcggctggcagccaagggcctctgtccactaccctgaccttctccagccccgtgaccaaccaagccattgccatcccagtgacagtggcttttgtggtggatcgccgtgggcccggtccttatggagccagcctcttccagcacttcctggattcctaccaggtcatgttcttcacgctcttcgccctgttggctgggacagcggtcatgatcatagcctaccacactgtctgcacgccccgggatcttgctgtgcctgcagccctcacgcctcgagccagccctggacacagcccccactatttcgctgcctcatcacccacatctcccaatgcattgcctcctgctcgcaaagccagccctccctcagggctgtggagcccagcctatgcctcccactaggccgcgtgaaggttcccggaggatgggtctcagccgagcctcgtgcacccccaagatggaacatccctgctgcattcacactggaacaagcccctccagatgagtgccccggccccaggccagcttcactgccgtctcttcacacagagctgtagtttcggctctgcccattagctcattttatgtaggagttttaaatgtgtgtttttttcctttcaagtcttacaaagctaagactttttggctcattcctttttgcatggttgtctagggtttctggacaatgtgctgttgcatttttattttcctagccttgctaaaatctttcccttctcaagactttgagcagttagaagtgctctttagaagttgtctgtgggtgatgttactgtagtggtctcagggaaaggattgtccagttactttagggggtttttggtggggtttttccccctgtgaaaacttactttgcccctagtctggctgctgctaggacttctgaggagcaatgggacatgagtgtccctgtatctgcgccactgccgcaagggaagcctcaggaaccagcacctggaggccaggatagccaagccctgggtgagcgagaggctggagaacacaggagctcacccagggctgctgcccaaccatgggccactgtgaacagacttcagtcctctgtttttgtttcataagccgttgagacatctgatggacttggcttaggccctgctgggacatcccacgtgtgatccctttcactccatcaggacaccaggactgtccttaggaaaatgtccttgagatggcagcaggagtcatattttctgtgtgtgtgtttcggaaagccgctgtgtcctgcctcagcacaaagacccagtgtcatttgctcctcctgttcctgtgccactccagaaccttcagcagatctgagccaccgcctgccagtgtgagaggcggccactttcatggcagcttatcaggcgcagggccccagacagcttcccagccggccctagagcccggcctgggccaatgatggagggcggccaccagcccagggcctgcccatccagaagggactccccagggcctgggggaggagacccttggaaaagtcctctcttcccagctcctgattctggatctgagattctcagatcacaggcccctgtgctccaggccgaggctgggccaccctcagggagatccagagactcatgcccatggccatccatgcgtggacgctgtgtggagagtccaggatgacgggatcccgcacaagctcccttcagtccttcagggctgggccatgtggttgatttttctaaagctggagaaaggaagaaattgtgccttgcatattactttgagcttaaacttgacaacctgggatgtaaataggagccttttaactggtttatttaataaagttctattggtgattttttaaaaaaaaaaaacctcgtgcc

SEQ ID NO: 59846 - DNA, 1598 bp, Homo sapiens
gcggccgcagccgctgccccgggccgggcgcccgcggcggcaccatgagtccccgctcgtgcctgcgttcgctgcgcctcctcgtcttcgccgtcttctcagccgccgcgagcaactggctgtacctggccaagctgtcgtcggtggggagcatctcagaggaggagacgtgcgagaaactcaagggcctgatccagaggcaggtgcagatgtgcaagcggaacctggaagtcatggactcggtgcgccgcggtgcccagctggccattgaggagtgccagtaccagttccggaaccggcgctggaactgctccacactcgactccttgcccgtcttcggcaaggtggtaacgcaagggactcgggaggcggccttcgtgtacgccatctcttcggcaggtgtggcctttgcagtgacgcgggcgtgcagcagtggggagctggagaagtgcggctgtgacaggacagtgcatggggtcagcccacagggcttccagtggtcaggatgctctgacaacatcgcctacggtgtggccttctcacagtcgtttgtggatgtgcgggagagaagcaagggggcctcgtccagcagagccctcatgaacctccacaacaatgaggccggcaggaaggccatcctgacacacatgcgggtggaatgcaagtgccacggggtgtcaggctcctgtgaggtaaagacgtgctggcgagccgtgccgcccttccgccaggtgggtcacgcactgaaggagaagtttgatggtgccactgaggtggagccacgccgcgtgggctcctccagggcactggtgccacgcaacgcacagttcaagccgcacacagatgaggacctggtgtacttggagcctagccccgacttctgtgagcaggacatgcgcagcggcgtgctgggcacgaggggccgcacatgcaacaagacgtccaaggccatcgacggctgtgagctgctgtgctgtggccgcggcttccacacggcgcaggtggagctggctgaacgctgcagctgcaaattccactggtgctgcttcgtcaagtgccggcagtgccagcggctcgtggagttgcacacgtgccgatgaccgcctgcctagccctgcgccggcaaccacctagtggcccagggaaggccgataatttaaacagtctcccaccacctaccccaagagatactggttgtattttttgttctggtttggtttttgggtcctcatgttatttattgccgaaaccaggcaggcaaccccaagggcaccaaccagggcctccccaaagcctgggcctttgtggctgccactgaccaaagggaccttgctcgtgccgctggctgcccgcatgtggctgccactgaccactcagttgttatctgtgtccgtttttctacttgcagacctaaggtggagtaacaaggagtattaccaccacatggctactgaccgtgtcatcggggaagagggggccttatggcagggaaaataggtaccgacttgatggaagtcacaccctctggaaaaaaagaactcttaactctccagcacacatacacatggactcctggcagcttgagcctaaaagccatg

SEQ ID NO: 59847 - DNA, 1385 bp, Homo sapiens
ttttttttttttagagttgtgagtgaattgcatttttatttacgtttaagagtctctctccctccttgtgttctagtctgtgaatggctcacacttggacttagtgtaggctcctatgggaggagcgggcggtagtgagaatcttcatcaaatggagtaacatgacccaaatctctagaggtttcataattttgctcttgcttctgaaaacataatcatctcttatggggtgttatgtgctttgtatcctgaaattttccacttgctgcttcttggtgtgaggcgagaaatgccaccacgtggcactgcaggaggagactggtggaagccacagggctaggccttcacttcccagtgacactgttcccaattccctccaggataagctgagactcctcaggatgtggttctgcagcagatgaggtgcgaacaaagcctgctctgccctgggcacccaggatggcactgagttctaaaaggcaaagggtatgtggtgaggggccaggctgaggccctggtgtggtaccatcatgggcagcagcaccatttgaggccgggtaggagagacgtgcagggcctggccccccaagagaccagcagacaaactgaggcggcagagagagagattccagtgtcaccaggaagactgcagatcataacaacaatggttgctgatttggcatcaaagaggtggcactgtcaaagccgtaattgctgaaaatggcaccaacatgctgcagctggagagagtgggtgaccaacatttgtttgaagaacagatgatgctctttgaatggctcagccaacagcccaaagttttaagggaagacctctctgccagcttctcttggacagtgtctcatgtaaaacctccaaggcacttacatagcatatttttgtgtccactctcttgctagtctgttgtacttctctctgtcggccttgtaggtgtgtgctatctctggcaccagggggtcatcggggttggggtcgcagagcagcgagcagatggacaagagaacttttgacacagtcaacgctggagaccactgagaccgcaggatatcaaggcagatgctgccattgctgttgatattagggtgataaattttggttgtgaaagcaacctttgggggcttgaacgggtaatctgtaggaaagtggatggtcaggaagaaaacacctccttggtaaggactgtcattcgggcccatgatggtggcctgccagtggaacaagtcatcaccgacaggtcctgcagaacactgggcaggaggatccctctgcaagtcggttaattccttctggatccgctttagcgccatcctaccccgctgccggggacccgggcggcccggccggggctgcctgaggcggcccgctgc

SEQ ID NO: 59848 - DNA, 1790 bp, Homo sapiens
ttatttcaaagatgagaaatatttgtttggatatctatgactgtctgtttatactgtaaggggcttaatcagcagctccatcttttagttttagttctaaaggaaaagtagcctaaagtcagtataactaaagggtggaacgaggtgggacaaggtccggaattgctgctcagtgatgtgtgtgtgcctgccgctggtggagctgagactgctcatctcagaaggatggggatgcttgatttcctggccaggttgtcccagcacagtggggattggccctgttgtatgacgaagacagcacatggtggcagagatagatactaacccatggactttccaagggagggaataggtctttggagggtatgcaagacaaaggtagacactggataaagaacccggtagtgcccaggtattaccccatctgggccattactcccacactcaggaaccagacgttgtgggtgaggacatgctgtccctcctgccaagtaataacttccttcccagccaggatcctgccccaagtaggaatatagctctgcatttacagcagctcctgctcagaccttgtcaaaaccaccctgcagcttaggattaaggagcatggtcacaggaaggtggggtttcagggcatcccctcaggaactgcccatctccccagaattccaaaatgaaggtccatatgcttgtaggtgtgctggtcatggcgggcttcacagtaggaaagggtaagtggggcccaggggcagggagggaggaaggggtaactgagtccaggaagggggtggagcgtggccatggataatcgggcttcctactggcccagggtatttgagagtgacccagtgcctccatccctccttctgcctccccagatcctgttcccgacatccggacgtgccacttctgcctcgtagaagacccttctgtaggatgcatttcaggctcagagaagtgtaccatcagcagctcatccctgtgcatggtgatcaccatctattatgatgtcaaggttcgcttcatcgttcgaggctgtggacagtacatttcctaccgctgccaagaaaaacgcaacacctactttgcagagtactggtatcaggcccagtgctgtcagtacgattattgcaactcctggtcaagcccccaactccagagctctctgccggagccccatgacaggcccctggccctgcctctgtctgactcccagattcagtggttctaccaggccctgaacctctccctgcccctccccaatttccatgctgggacggagcctgatggcctggaccccatggtcacactgtccctgaacctgggcttgtcttttgctgagctgcgccgcatgtacttgttcctcaatagttcaggacttttggttcttccccaggctggactcttgacacctcacccttcctgaattccacagtgcaaatatctttctgtaacaccctcagcatcctgcactgcactccagcctgggtgacacagtgagactccgtctccaaaaaaaaggatgaggaatagaattctgtgcagatgtcctgacttggcaattttgtgtccctgcctcactgtctccaccaacccccgcctgtcctagtgttgttctgcctcctgtcctctcttgctctcttgtcagtctctggcttcctcggccccatttcacttcactgagtcctgacacccatctccctaggggcctgtgagaggagagggaagggtctgttctgctcagctccatgtcccccattttcctccacaataaaactggggactgggct

SEQ ID NO: 59849 - DNA, 1166 bp, Homo sapiens
ttttttttttttacagaattccccaaactttaatgctgtgctctgaaaagggaggctggaggttgtggtgggtcacagtgttgctgacacctctggcctccagccctgcatccctaggcaccatgtgaccaggcagtgagaaggacggggcctcactcccatgccagactgctcctcgggctgagcaggacctgaagctctcagggcttccaccaaagcccagcaaacttgggggaggcctgagggggcatcagcagtccttaaaggcctgagcttgcaacactcaggcaggactcggctgagggcctctgtggtgccaccatggggtaggaggtaaagagagaccctggttccagcctgggaaccagtgggtgccctgaagggaggggaggcctcagggagttcgggacaggagtgtgcatggtactgggcggcccatgggggctcctggcctcttggttcaggcaatccctgagctggggacacattccatcttaggtccaagagacggaggtcaggagcatccctagaacgacctcccaggcacgaggaaggcccggggcagggccgggcgcagcgtggctggcttcagtaccctcgggcatcttgactcctgccctctgggactgcaaagggatctgcgggcgcctctgctgagtcaatcgtctggtaggcactacggtcctgagaagacccaaggaaaccagtgtggaccaggagctcacccccgcgctcccggtacatgtggtagacgaagcagcaggagagcggcttgagcagcaagctgaggatggccatgcccacgccaaagcggcccgtgtccgtgaggctgacccgcgggtagaagatgctgatgtgcacgatgtccaggaagatggtggccagcaagccacccagaaacatgcttatggcgtcgatggagtcccgctgagccacagcccacacgcccaaggccaggatggtgaagttggcccaggcataggagcctgagaatacaatgcagccccaggttgtcagcagccagtgacctaggagaatcaccttcaggttcacagcaggcagctccatcccgactcaggccgagggcacctgcgccgcagccgcggggggctcctaggctccgaactcggggaacaaacttgcccggccccgccccgcccgttgcg

SEQ ID NO: 59850 - DNA, 2135 bp, Homo sapiens
gcccggaattcccggtcgacgatttcgtacgagactgacccggacttaggcgttccgcctggcccggcggcggtgaaaaaaggcagttttgaagcatttagtggcaaaaggggtaggagacggctgctgaagtgtctactacattcaggggacctggaaggcttccagatatccgcaatgaacaatgaaaagaaattgtgaaagaaggcgcttccctcaagccggaactaatgaactcctgggtcacgtggtgcgcacgcgccaaaggcacacgataaaggaaaacgcgggcttatcgtggcctttaaaatccggcttggtgagcttgggtcgcctctgaaggagaaccattttccatctctttcatagttttttcccccagtcagcgtggtagcggtattctccgcggcagtgacagtaattgtttttgcctctttagccaagacttccgccctcgatcaagatggtggttggacggccttcctaacctttacggggcctggcggtgctgacgcctgagctggtaggggtggagcaggtaggaaacagcaaatgcagaagctgctgcgcggaagtcggccatggactggaaagaagttcttcgtcggcgcctagcgacgcccaacacctgtccaaacaaaaaaaaaagtgaacaagaattaaaagatgaagaaatggatttatttacaaaatattactccgaatggaaaggaggtagaaaaaacacaaatgaattctataagaccattccccggttttattataggctgcctgctgaaaatgaagtcttactacagaaattaagagaggaatcaagagctgtctttctacaaagaaaaagcagagaactgttagataatgaagaattacagaacttatggtttttgctggacaaacaccagacaccacctatgattggagaggaagcgatgatcaattacgaaaactttttgaaggttggtgaaaaggctggagcaaagtgcaagcaatttttcacagcaaaagtctttgctaaactccttcatacagattcatatggaagaatttccatcatgcagttctttaattatgtcatgagaaaagtttggcttcatcaaacaagaataggactcagtttatatgatgtcgctgggcaggggtaccttcgggaatctgatttagaaaactacatattggaacttatccctacgttgccacaattagatggtctggaaaaatctttctactccttttatgtttgtacagcagttaggaagttcttcttctttttagatcctttaagaacaggaaagataaaaattcaagatattttagcatgcagcttcctagatgatttattggagctaagggatgaggaactgtccaaggagagtcaagaaacaaattggttttctgctccttctgccctaagagtttatggccagtacttgaatcttgataaagatcacaatggcatgctcagtaaagaagaactctcacgctatggaacagctaccatgaccaatgtcttcttagaccgtgttttccaggagtgtctcacttatgatggagaaatggactataagacctacttggactttgtccttgcattagaaaacagaaaggaacctgcagctctacaatatattttcaaactgcttgatattgagaacaaaggatacctgaatgtcttttcacttaattatttctttagggccatacaggaactaatgaaaatccatggacaagatcctgtttcatttcaagatgtcaaggatgaaatctttgacatggtaaaaccaaaggatcctttgaaaatctctcttcaggatttaatcaacagtaatcaaggagacacagtaaccaccattctaatcgatttgaatggcttctggacttacgagaacagagaggctcttgttgcaaatgacagtgaaaactctgcagaccttgatgatacatgatctctgaaagactagactgtcttatattatgagatacttgaatgctgcatgtaaagcctttaaagcaaaatcctcagaaatggtctaaataaaacacttgatatgcctagagaacacagcaaatgttttggttactggaattttggttgcaatagtttagaagcaataggaccaaatattgcttgttaggag

SEQ ID NO: 59851 - DNA, 1481 bp, Homo sapiens
ggccgcagggcctccgtccgaggtggtgaatcaagattccttgtttcctgagcccgagccgggccccgccccccaggtgcttctggggcctcagggccccggcctcatcaaaggggttgcacctcccaccctcatcaccgactccacagggacccaccttgtcctcaccgtgaccaataaaaatgcacacagccctggcctgtccagagggagcccccaacagccctcgtcccagcctggctctccagcgcctgccccctctgcccagatggacctggagcacccactgcagcccctctttgggacccccacttctctgctgaagaaggaaccacctggctatgaggaagccatgagccagcagcccaaacagcaggaaaatggttcctcaagccagcagatggacgacctgtttgacattctcattcagagcggagaaatttcagcagatttcaaggagccgccatccctgccagggaaggagaagccatccccgaagacagtctgttggtcccccctggcagcacagccatcaccttctgctgagctcccccaggctgccccacctcctccaggctcaccctccctccctggacgcctggaggacttcctggagagcagcacggggctgcccctgctgaccagtgggcatgacgggccagagcccctttccctcattgacgacctccatagccagatgctgagcagcactgccatcctggaccaccccccgtcacccatggacacctcggaattgcactttgttcctgagcccagcagcaccatgggcctggacctggctgatggccacctggacagcatggactggctggagctgtcgtcaggtggtcccgtgctgagcctagcccccctcagcaccacagcccccagcctcttctccacagacttcctcgatggccatgatttgcagctgcactgggattcctgcttgtagctctctggctcaagacggggtggggaaggggctgggagccagggtactccaatgcgtggctctcctgcgtgattcggcctctccacatggttgtgagtcttgacaatcacagcccctgctttttcccttccctgggaggctagaacagagaagcccttactcctggttcagtgccacgcagggcagaggagagcagctgtcaagaagcagccctggctctcacgctggggttttggacacacggtcagggtcagggccatttcagcttgacctccttttttgaggtcagggggcactgtctgtctggctacaatttggctaaggtaggtgaagcctggccaggcgggaggcttctcttctgacccagggctgagacaggttaaggggtgaatctccttcctttctctccctgctttgctgtgaagggagaaattagcctgggcctctaccccctattccctgtgtctgccaaccccaggatcccagggctccctgccatatttagtgtctttgtgtagtgtaacca

SEQ ID NO: 59852 - DNA, 1512 bp, Homo sapiens
cccacgcgtccgggagaggccgcggccccttcccgttgcctgcggccaccggccggcattcagagcccctcgcctggcgctaaatttaaaaacgtaacacgagcagcaggctggtctcggaaacgaaacgaaattcggtccctgggcctcctcccgggcgctgccggtccctcagcgcgccgcgccacccggaacagacccttctcccgccattttcggcggggctgggagactgaggcccgcggcgctgagcctgcggcgccccggaagaggcgggcggcatggccgctggcgtggactgcggggacggggttggcgcccggcagcacgtgttcctggtttcagaatatttaaaagatgcttcaaagaagatgaaaaatgggctaatgtttgtaaaactggttaacccctgttcaggagaaggagccatttacttgttcaatatgtgtctacagcagctgtttgaagtaaaagttttcaaggaaaaacaccattcttggtttataaatcaatcagttcaatcaggaggtcttctccattttgccacacctgtggatcctctatttctgcttctccactacctcataaaggctgataaggaggggaagtttcagccccttgatcaagttgtggtggataacgtgtttccaaattgcatcttgttgctgaaacttcctggacttgagaagttacttcatcatgtgacagaggaaaaaggtaatccagaaatagacaacaagaaatattacaagtacagcaaagagaagacattaaagtggctggaaaaaaaggttaatcaaactgtggcagcattaaaaaccaataatgtgaatgtcagttcccgggtacagtcaactgcatttttctctggtgaccaagcttccactgacaaggaagaggattatattcgttatgcccatggtctgatatctgactacatccctaaagaattaagtgatgacttatctaaatacttaaagcttccagaaccttcagcctcattgccaaatcctccatcaaagaaaataaagttatcagatgagcctgtagaagcaaaagaagattacactaagtttaatactaaagatttgaagactgaaaagaaaaatagcaaaatgactgcagctcagaaggctttggctaaagttgacaagagtggaatgaaaagtattgatacctttttttggggtaaaaaataaaaaaaaaaattggaaaggtttgaaactttgaaaataaaatctagcaaaaatatttgctttttacatgtttcagtttgtccttcctgactgttaatgactacctttggttgggggaaggaagaggccaatttcatgttctcttaaacatttctttgcatttggtttttgtgttcctgaacaaaatatgggaaagtgtctaacttcatggctatggccttttggagtctcatctgacataatgaaaagtaatcacttgaagagaattaacatatagcatcatgattttctcaataaactgatgtgtgacaataaa

SEQ ID NO: 59853 - DNA, 656 bp, Homo sapiens
tcgacccacgcgtccgcccacgcgtccgcgcaggagctaacgcagggggaatccttgcaggtgggagcatttcagagcgcacaagccatggtggccaaacagcggatccggatggctaacgagaagcacagcaaaaacatcacccatagggggaacgtagccaaaaccctgaggccgcaagaggagaaatatcctgtgggaccatggctgttggcactgtttgtttttgttgtctgtggctcaggtcaaccacataaattggcctctcctggagactgccagaactttctcaaagttgtaacatccagagggagtcaccccacccccaagaccggcaactgagatgtttaaaggaactggctggccctgaaggaaagactgaggccattcatctgctctggagttcatcctcgggatctgagatgcacagcctgaagacatctcatcagccatcagctcccttaaggtgacctgtagcctcctttgtgccctgggggcatttgggattgtgtagaggctctctctcagaagcatctttctgttattttaatgcggatagaaagctttacattctttgctaataacatctgggttttaatagcgcctccttgccctgcctgtctccggcatctctcttttttccctcttctccatct

SEQ ID NO: 59854 - DNA, 519 bp, Homo sapiens
ttttttttttttacagtttgaacatttattcgcctcctgagcttgtacaacagtcgtgggagttgctgcagaagcaagcgaaaagccagatgagcgcttctaaacttagagagaggtgagtaaggcttgtgggcgatcacttgtcggctggggcctctttggcctcttcccagaggatgtcctgaagaaacttccccagggcctggctgtgctgctggtactgaacccctgacagcttgattccaacatcaaagggggcgttgaaccggacttccagttcatcctctgccccttctgcttgacctccatcttccgggcggagccagcctgctagagctcggggctgcagcttggctggtggcttcttcgactcctttctctgctggactctctggtgttcagggctcaggaagctggagcctgccatggccaagtccagccagagcatgccgaggagcaggaggctgcagacggtccctggggagggcatggcctcagctgggttgcagacaggtgggc

SEQ ID NO: 59855 - DNA, 4285 bp, Homo sapiens
cttcctctgccaccatcggggaactgggctgtgaatgaggggctctccatttttgtcattctggtttggctggggttgaacgtcttcctctttgtctggtattaccgggtttatgatattccacctaagttcttttacacaagaaaacttcttgggtcagcactggcactggccagggcccctgcagcctgcctgaatttcaactgcatgctgattctcttgccagtctgtcgaaatctgctgtccttcctcaggggttccagtgcgtgctgctcaacaagagttcgaagacaactggacaggaatctcacctttcataaaatggtggcatggatgattgcacttcactctgcgattcacaccattgcacatctatttaatgtggaatggtgtgtgaatgcccgagtcaataattctgatccttattcagtagcactctctgaacttggagacaggcaaaatgaaagttatctcaattttgctcgaaagagaataaagaaccctgaaggaggcctgtacctggctgtgaccctgttggcaggcatcactggagttgtcatcacgctgtgcctcatattaattatcacttcctccaccaaaaccatccggaggtcttactttgaagtcttttggtacacacatcatctctttgtgatcttcttcattggccttgccatccatggagctgaacgaattgtacgtgggcagaccgcagagagtttggctgtgcataatataacagtttgtgaacaaaaaatctcagaatggggaaaaataaaggaatgcccaatccctcagtttgctggaaaccctcctatgacttggaaatggatagtgggtcccatgtttctgtatctctgtgagaggttggtgcggttttggcgatctcaacagaaggtggtcatcaccaaggtggtcactcaccctttcaaaaccatcgagctacagatgaagaagaaggggttcaaaatggaagtgggacaatacatttttgtcaagtgcccaaaggtgtccaagctggagtggcacccttttacactgacatccgcccctgaggaagacttctttagtatccatatccgcatcgttggggactggacagaggggctgttcaatgcttgtggctgtgataagcaggagtttcaagatgcgtggaaactacctaagatagcggttgatgggccctttggcactgccagtgaagatgtgttcagctatgaggtggtgatgttagtgggagcagggattggggtcacacccttcgcatccattctcaagtcagtctggtacaaatattgcaataacgccaccaatctgaagctcaaaaagatctacttctactggctgtgccgggacacacatgcctttgagtggtttgcagatctgctgcaactgctggagagccagatgcaggaaaggaacaatgccggcttcctcagctacaacatctacctcactggctgggatgagtctcaggccaatcactttgctgtgcaccatgatgaggagaaagatgtgatcacaggcctgaaacaaaagactttgtatggacggcccaactgggataatgaattcaagacaattgcaagtcaacaccctaataccagaataggagttttcctctgtggacctgaagccttggctgaaaccctgagtaaacaaagcatctccaactctgagtctggccctcggggagtgcatttcattttcaacaaggaaaacttctaacttgtctcttccatgaggaaataaatgtgggttgtgctgccaaatgctcaaataatgctaattgataatataaataccccctgcttaaaaatggacaaaaagaaactataatgtaatggttttcccttaaaggaatgtcaaagattgtttgatagtgataagttacatttatgtggagctctatggttttgagagcacttttacaaacattatttcatttttttcctctcagtaatgtcagtggaagttagggaaaagattcttggactcaattttagaatcaaaagggaaaggatcaaaaggttcagtaacttccctaagattatgaaactgtgaccagatctagcccatcttactccaggtttgatactctttccacaatactgagctgcctcagaatcctcaaaatcagtttttatattccccaaaagaagaaggaaaccaaggagtagctatatatttctactttgtgtcatttttgccatcattattatcatactgaaggaaattttccagatcattaggacataatacatgttgagagtgtctcaacacttagtagtgacagtattgacatctgagcatactccagtttactaatacagcagggtaactgggccagatgttctttctacagaagaatattggattgattggagttaatgtaatactcatcatttaccactgtgcttggcagagagcggatactcaagtaagttttgttaaatgaatgaatgaatttagaaccacacaatgccaagatagaattaatttaaagccttaaacaaaatttatctaaagaaataacttctattactgtcatagaccaaaggaatctgattctccctagggtcaagaacaggctaaggatactaaccaataggattgcctgaagggttctgcacattcttatttgaagcatgaaaaaagagggttggaggtggagaattaacctcctgccatgactctggctcatctagtcctgctccttgtgctataaaataaatgcagactaatttcctgcccaaagtggtcttctccagctagcccttatgaatattgaacttaggaattgtgacaaatatgtatctgatatggtcatttgttttaaataacacccaccccttattttccgtaaatacacacacaaaatggatcgcatctgtgtgactaatggtttatttgtattatatcatcatcatcatcctaaaattaacaacccagaaacaaaaatctctatacagagatcaaattcacactcaatagtatgttctgaatatatgttcaagagagagtctctaaatcactgttagtgtggccaagagcagggttttctttttgttcttagaactgctcccatttctgggaactaaaaccagttttatttgccccaccccttggagccacaaatgtttagaactcttcaacttcggtaatgaggaagaaggagaaagagctgggggaagggcagaagactggtttaggaggaaaaggaaataaggagaaaagagaatgggagagtgagagaaaataaaaaaggcaaaagggagagagaggggaagggggtctcatattggtcattccctgccccagatttcttaaagtttgatatgtatagaatataattgaaggaggtatacacatattgatgttgttttgattatctatggtattgaatcttttaaaatctggtcacaaattttgatgctgagggggattattcaagggactaggatgaactaaataagaactcagttgttctttgtcatactactattcctttcgtctcccagaatcctcagggcactgagggtaggtctgacaaataaggcctgctgtgcgaatatagcctttctgaaatgtaccaggatggtttctgcttagagacacttaggtccagcctgttcacactgcacctcaggtatcaattcatctattcaacagatatttattgtgttattactatgagtcaggctctgtttattgtttcaattctttacaccaaagtatgaactggagagggtacctcagttataaggagtctgagaatattggccctttctaacctatgtgcataattaaaaccagcttcatttgttgctccgagagtgtttctccaaggttttctatcttcaaaaccaactaagttatgaaagtagagagatctgccctgtgttatccagttatgagataaaaaatgaatataagagtgcttgtcattataaaagtttccttttttattttctcaagcccccagctgccagcccccaagcagccagctgccagccaagcttttttttttttttttttttttttagcacttagtatttagcatttattaacaggtactctaagaatgatgaagcattgtttttaatcttaagactatgaaggtttttcttagttcttctgcttttgcaattgtgtttgtgaaatttgaatacttgcaggctttgtatgtgaataattctagcgggggacctgggagataagttcgtacggggaattcttaaaactgtgctcaactattaaaatgaatgagctttcaaaaaaaaaa

SEQ ID NO: 59856 - DNA, 2158 bp, Homo sapiens
tcacccagtgaagacactgtaagtctggaggtaggggacagcaatcagaggccctttggtcactgcacagttcctttaactgcaaccctaggctggcctgacccagctgctgcaggaaggggaggggccatgggagggggtcagagcccacagcaggactgttgcataatccttggggcctggccttgggcaatccaccctggttctgaagtttgtgctttgtgtctggttccttccttttctgccttctctcctgctttctagctctgggctttcccagctccgaagtcaatactgagatcccagatgtgtccagagacatcctgaagaggctcgggggtggaggagccttagtgtgtccacaaagggactcctgaaactgactgagagccagtggatttgccagcagtctgagcttctaccgagtcttcccccacctcaatccctgttgctatggagactaccaatggaacggagacctggtatgagagcctgcatgccgtgctgaaggctctaaatgccactcttcacagcaatttgctctgccggccagggccagggctggggccagacaaccagactgaagagaggcgggccagcctacctggccgtgatgacaactcctacatgtacattctctttgtcatgtttctatttgctgtaactgtgggcagcctcatcctgggatacacccgctcccgcaaagtggacaagcgtagtgacccctatcatgtgtatatcaagaaccgtgtgtctatgatctaacacgagagggctgggacggtggaagaccaagacacctggggattgcgtctggggcctccagaactctgctgtggactgcatcaggtctcagtgtccctatctgtaagatcaacaagaaacacggttaagggaggtcgtcactggggtgggagaagaggggctggtagaccgaagccttgtgcataaggattttttcccaggaaaagatagactttataaacagtgggagcccatgaacaaacatataaaagtagcaacagataatgaccaataactggttcagtggctggagtattaggggcctggggattggagaacggagaagaagttgtagcagagggaaatgagacaggaagatgctctggggacacattttttatgtgttatcttcagccatgagaagcagtgatgactatcccatatcacagatatgatttaccaccaccaccctgcccccgctcccgtgaagaaagcagggcaagtgctgtgctgcccatttgggcctgcatagtgccatgattggaacccaggaactctggtctccttgcctagtgcttttcaaaactctgtgctacacaggagtggatccaggcctgaaggtcatccaaatctgggggactctcttttaagaaaaagaattctaaaatatcttacttttgcaaacattatgaaaatatactgccacattaatatgttgctagggcccctgctaggaccttaagaaggagctcatgtgagtcaggaccctgaatgttaggcctcgttagctctatggttcatatgcttcttgaaccaagtcacagggcacttcccagccacattgccaggcaacaggactaaactacctccaaagcaagcagtcttttcagttttgactgagtgatgtgagaaacttcttttcttttcttttcttttttttttttgaggcagtctccctatgtcacccaggctgtgttgcagtgagccaagatcacaccactgcactccagcctgggcaacagagcaagactctgtctccaaaaaaaaaaaaaactctgctaaggaccataagcatatttcatcacttgcagagaggcatcactgtcaccccaatttacagatgggaaactgagcagaaagttgttaaaacacccagcactttgggaggccaaggtgggtggatcacctgaggtcaggagttcaagaccagcctggccaacatggtgaaaccccatctctactaaaaatacaaaaattagctgggcatggtggtacatgcctgtaatcccagctacttgggaggctgaggcaggagaatcacttgaacctgggaggtggaggttgcagtgagccaagatcacgccactgcactccagcctgggtgacagagcaagactctgtctcaaaaaaaaaa

SEQ ID NO: 59857 - DNA, 1822 bp, Homo sapiens
  misc_feature (1)...(1822): n = a,t,c or g
ttttttttgaattttctccagatatttaatgcaggatgccaatgtagccatattcccatgaaatgtggttagcagtaggggagttgtagccctatcgaatcaaagtattacaatacagctgaaagctttatatagacgtatttcggttcttaattgcactaatgcagacagtttaatagataagcttctctcttgtgctttttctactttgggaggttatatactttagatgagagacaaagaaactctactggtttaagagttctcagttttacttttactatagaccttttttcccaccagtttagatgggaagacccagcctttggtataaataacttacttccacaaaaatatttaaagggtatctttagtgttcactgtcagttgtgtagtcttttggtaagggggtggctagagcctctttactctcagtaagtgctctgggctgatggataaacacactaaatttaacaccctggttgtttgcagctctgacaaaaccactattagcagtcattgtgatggcttttagggtgtctcccgtcccaaaaattgttaatgagcggctattaatttttgaactggccactagtctcaaggcacgctcagaaggctggtctggtaccacattaattcgcttaattaacacagtggccctctctctctccccaggtcctcctaaggtatctaaaatagactgaaagtccttgacagcagattcacaagcaaacaactccttgtccttcataaaggcctccagctgaggtagaacctgctctttcctctcttgctctgcttgttctgtgagcactttctctttgaaaataaagtggcagcctccatagctgagggcagatacatatgtgattaaagtagtaatgtccagatttactcttttgcacacatcgaccttaatttctgttggaaacgcaacacttgctagtatattttctcggtcaactctggtcacctgcaaaagttcagggccctcatcatctgattcactctcacttggttgaagctcttcagggtgatctaacagagcgttgactgctactatgtctcctctcacagatatgcccatttctttcagcttctctgccatggggctggagacactgttgtaaaatgcaaagatgatgtgagggttgctatactgcactggctgctggtgactggcctggaggaagtcttcagcctgctcaatgatgcttttgtcaccatattggcccctgcccagccagatgttatgaagagcttcagccttccggccaatggctttcacccaagtatgaccaccatttgcaactacatctaccacaagggtttgcttttctcctaaggtatctgtataaccaaagacatgaagaacactaacaacttcttccaggttttctgctgattccacaatggctctcaggtgtgttaggttagtgctctgtaaatgagactctttaatagctactttcccagcttctactttctgcaagaattttaattctgccttcaatttgctgcacagctttgcaccaccttctatgccaccttttcttgatctagaaagtgattctgctctcttgatcagttccttggctatggcgattcgttcacagagcatggaatgtgcagacatgctgtcagcattattcctttccagcagcgccagaaccgcgagcgcgagcacgcaggcgcgtgcacgcagaggccgggacccgccgggaaatctcaaccgggcagcccccaccccgctcgaacgccgaggcggctccacccgcgcgagccacgaaatcgtcgagnnnnnattccggaccagagcctc

SEQ ID NO: 59858 - DNA, 742 bp, Homo sapiens
tttcgtctttccagacaaagacaagtgacaagaattttaggtttaaaaagcaaccagattcatctcagcagcttttgtagttttaaataagcaaggagtttctccagcgaaacttcctcacacctcttggtcttggtctcttcagacactttccttcctgttctctggagatcttgcagaaaagagcctgcagtgtttcccttgctcagccatgctcctggagcttatcccactgctggggatacattttgtcctgagaactgccagagcccagtcagtgacccagcctgacatccacatcactgtctctgaaggagcctcactggagttgagatgtaactattcctatggggcaacaccttatctcttctggatggaaagaactgttgaagaagcttttatacttcttgtttgcttgaagccttggagggtagcaagtagtctggagaaaaaggagaaggaggatgaatctttccagctgctacttggctcacgctataatgtattaaaggcacactgtcttctacctttgataagatggctaacttcaggtgactcactgttatcagctcagccacattgcccacagggactgtgatgggcactttatgcgaatcttaaaggaggttcctgcagcatgagaggcttctccagcgtccggctcctgcagtgcacccacaccaggttcctgcgctgtacagtggccagcagtgtcctccagcacttccatttttgcgtggta

SEQ ID NO: 59859 - DNA, 845 bp, Homo sapiens
ccggtcccccatcccgggtcgacgatttcgtggctgcagcggcagcagctgtcgcgccagtcgcaacagaagcaggtccgaggcacagcccgatcccgccatggagcagccgaggaaggcggtggtagtgacgggatttggcccttttggggaacacaccgtgaacgccagttggattgcagttcaggagctagaaaagctaggccttggcgacagcgtggacctgcatgtgtacgagattccggttgagtaccaaacagtccagagactcatccccgccctgtgggagaagcacagtccacagctggtggtgcatgtgggggtgtcaggcatggcgaccacagtcacactggagaaatgtggacacaacaagggctacaaggggctggacaactgccgcttttgccccggctcccagtgctgcgtggaggacgggcctgaaagcattgactccatcatcgacatggatgctgtgtgcaagcgagtcaccacgttgggcctggatgtgtcggtgaccatctcgcaggatgccggcagccttggaagtcagaagtccaaggtcaaggtggtagcaggactggttccttctggaggtgctgagggaaaaaacccttccctgccaaaggtgactgtgttttctgccgccgaaggagggcccggtccctccaggctcagtgtggcttctccctgacccccgccctagaacttttgccagtgccttttctgaaactcctgtgtcccgggccccccaggcggagaaggatatgccggattctgcctggggctgggctctaggagaccccaaatttgacaccacagaaagcaaataaaacacttgaaatacg

SEQ ID NO: 59860 - DNA, 1503 bp, Homo sapiens
tttcgtctggagagcccggtggggtgtaagtacactgcgcttataaaactctagcaggaagctagcagctgtctccaaacccagagaaggggaaacaggaatcgattaggaataaaggattataatccactttccttctgaggaaaagctgggaaccttctcattttgccttatgaaaactaagctgaatcgactgctgccaaacatctattaggcaaaattggcctcttgcccatgatttgactttccagcacagccagttctttttctcctctgcagctgattggctctggagtgtggccagaagcctctctcctgcaattaaaggagtcgggtctctaactgttgatctgtttttttcccttctgagcaatggagcttaccatctttatcctgagactggccatttacatcctgacatttcccttgtacctgctgaactttctgggcttgtggagctggatatgcaaaaaatggttcccctacttcttggtgaggttcactgtgatatacaacgaacagatggcaagcaagaagcgggagctcttcagtaacctgcaggagtttgcgggcccctccgggaaactctccctgctggaagtgggctgtggcacgggggccaacttcaagttctacccacctgggtgcagggtgacctgtattgaccccaaccccaactttgagaagtttttgatcaagagcattgcagagaaccgacacctgcagtttgagcgctttgtggtagctgccggggagaacatgcaccaggtggctgatggctctgtggatgtggtggtctgcaccctggtgctgtgctctgtgaagaaccaggagcggattctccgcgaggtgtgcagagtgctgagaccgggaggggctttctatttcatggagcatgtggcagctgagtgttcgacttggaattacttctggcaacaagtcctggatcctgcctggcaccttctgtttgatgggtgcaacctgaccagagagagctggaaggccctggagcgggccagcttctctaagctgaagctgcagcacatccaggccccactgtcctgggagttggtgcgccctcatatctatggatatgctgtgaaatagtgtgagctggcagttaagagctgaatggctcaaagaatttaaagcttcagttttacatttaaaatgctaagtgggagaagagaaaccttttttttggggggcggtttttttggtttgttgttggttttttttttttttttggcaggaagagggagttttgctcttgttgcccaggctggagtgcagtggcgtgatctccgctcactgcaacctccacctcgcgggtttaggcgattcttctgcctcagcctccctggtgcctgtggtcccaggtacttggggggctgaggcaggagaatctcttgaacccagaaggcgaaggttgcagtgaaccgagatcgtgccgttgtactctggcctgggtgacaagagcaagactccgtctcaaaaaaaaaa

SEQ ID NO: 59861 - DNA, 1678 bp, Homo sapiens
tttcgtctgcgatcgagggcccgggcggccggccagccgtctcgccgagtgcggactggccggatctgctgtcagtcagcgggaacagacttctccctctccatctggtcaactgcgggagaaaaattttcgagaatttccagcaggcaaggcagtggccgctttgactgcttgcttcggagatccgagacgacggagaaggcactcttatttaccgaccaagaaagctcctcccccgtcctccgttagctaattaaaacatttttcagggacgtagccatccagagggatttgcttcctaaggagaagaacttggaaactctgttgaccttggcttttctagaaatagataaagccttttcgagtcatgcccgcctgtctgctgatgcaactcttctgacctctgggactactgcaacagtagccctattgcgagatggtattgaactggttgtagccagtgttggggacagccgggctattttgtgtagaaaaggaaaacccatgaagctgaccattgaccatactccagaaagaaaagatgaaaaagaaaggatcaagaaatgtggtggttttgtagcttggaatagtttggggcagcctcacgtaaatggcaggcttgcaatgacaagaagtattggagatttggaccttaagaccagtggtgtcatagcagaacctgaaactaagaggattaagttacatcatgctgatgacagcttcctggtcctcaccacagatggaattaacttcatggtgaatagtcaagagatttgtgactttgtcaatcagtgccatgatcccaacgaagcagcccatgcggtgactgaacaggcaatacagtacggtactgaggataacagtactgcagtagtagtgccttttggtgcctggggaaaatataagaactctgaaatcaacttctcattcagcagaagctttgcctccagtggacgatgggcctgattaccagctgggacttagagtttctgtgcaacagtttttcactgagcatgtcaagaaactgataagatcaaaaaggtctcctaactcactagatcagcgcacaagtcagtgtaaaccacttagatagtagttttttcataaatgctcatcatatttatgttccgctgtacatgttcagtataaatatatgtgtagtgaagctactgtgagtctttaaatggaaagagcaaatgagaagtggtttggatacacttgatgagagatgagagtgtcacattaataatttttaagactcttaggcagctatgggtttcttttgatcatttttgttctttattcatttgaacacgtttttgaagttcttcaaaactagtcagtttgaattttgacagctattcaatatgtgatctccaagtttaaaaaaatttttttccagacttccctaatcctaaaatgcgagtttttatttttaataactgtaccaaggaataagtatgaaaacagttctctgttaccatattttgtattctggaccacttactggtgaaagcaaccatgcaaaagaaattaatttggccaggcacagtggctcatgcctgtaatcccagcactttgagaggccaaggtgggtagatcatctgaggtcaggaattcaagaccagcctggccaacatggtgaaaccctgtctctagtaaaaatccaaaaaaaaaa

SEQ ID NO: 59862 - DNA, 1368 bp, Homo sapiens
ctcctctggaagcaggacctggcttcctccctcctctctccgcccaccctcgtcggcgtctgccccgcgcccgccatagcgacggcaacgggcgctgcggagtgctccgagccgtgagggcggggccggcgcgatgccccgccccttcgatagctcatctttgcgcgtcgcagtcgcgcggagcccggcttccgacgtgcagcctggcagtgcagtgagctgtctggccttttgtccttgatccttggttaaggaaatgaccaaccagtacggtattctcttcaaacaagagcaagcccatgatgatgccatttggtcagttgcttgggggacaaacaagaaggaaaactctgagacagtggtcacaggctccctagatgacctggtgaaggtctggaaatggcgtgatgagaggctggacctacagtggagtctggagggacatcagctgggagtggtgtctgtggacatcagccacaccctgcccattgctgcatccagctctcttgatgctcatattcgtctttgggacttggaaaatggcaaacagataaagtccatagatgcaggacctgtggatgcctggactttggccttttctcctgattcccagtatctggccacaggaactcatgtcgggaaagtgaacatttttggtgtggaaagtgggaaaaaggaatattctttggacacgagaggaaaattcattcttagtattgcatatagtcctgatgggaaatacctagccagtggagccatagatggaatcatcaatatttttgatattgcaactggaaaacttctgcataccctggaaggccatgccatgcccattcgctccttgaccttttccccggactcccagctccttgtcactgcttcagatgatggctacatcaagatctatgatgtacaacatgccaatttggctggcacgctgagcggccatgcctcctgggtgctgaacgttgcattctgtcctgatgacactcactttgtttccagttcgtctgacaaaagtgtaaaagtttgggatgttggaacgaggacttgtgttcacaccttctttgatcaccaggatcaggtctggggagtaaaatacaatggaaatggttcaaaaattgtgtctgttggagatgaccaggaaattcacatctatgattgtccaatttaaacatcaaagtctccaggcttatgctgcaaagagaatgtacggattgatcatgacattccttaccttcttaggcttgtttaaaagaaatatagcatttattgtagcaaagacttaaattttgtagatacaatatgaatcttttcatgttttattggaaatgctgttcatactttaacataaagctttcttaatgc

SEQ ID NO: 59863 - DNA, 2167 bp, Homo sapiens
  misc_feature (1)...(2167): n = a,t,c or g
ccagtttctccgtcagcctgcgggtcccggctggcggctgcttccggtaggagagcggtgtagagcgagcaggtctcagctcctcgtcatgtcatacggtcccttagacatgtaccggaacccggggccctcggggccccagctccgggacttcagcagcatcatccagacgtgcagcggcaacatccagcggatcagccaagccactgctcagataaagaatttgatgagccagctaggaactaagcaggactcaagcaagctacaggaaaatctgcaacagttacaacactccacaaatcagctcgccaaggaaacaaatgaattgctgaaagaattagggtccttgccccttcccttatctacttcagaacagcgccagcagagacttcagaaggaacgcctcatgaatgacttctctgcagccttaaacaatttccaggctgtgcagagaagggtatctgaaaaggaaaaggagagtattgccagagcaagagctggatctcgtctttctgcagaagagaggcaaagagaggagcagctggtctcatttgacagccatgaggagtggaaccagatgcagagccaggaggatgaggtggccatcactgagcaggatttggaacttattaaagaaagagaaacggcaattcggcagctggaggctgacattttggatgtcaatcagatatttaaagatttggccatgatgatccatgaccagggtgatctgattgatagcatagaagccaatgtggaaagctcagaggtgcacgtcgaaagagccactgaacagttacagcgagctgcttactatcagaaaaaatctcgcaagaagatgtgtatcctggtgcttgtcctgtcagtgattattctaatcttgggacttattatctggctagtttataaaacgaagtgattgcctccgatcgttctcccgctgagctgttttcaagggcaagtgcttgttgaagtcttgccagaacaaactgatcacaagaagacagcatatatcagaacgtcctgtaatcatttagttagaaactaactactaactagtctttggaattcgtgacctatggagacagtaattatcaatttattgattctattgatttctcaaattaggaattaacttatgtggattttgcttcctcttgtattctgattgcccttcatcccaagtgtttactgaaaattccattctagatattcttgttttgacaaatgacactacagtctcgtaatattgtcttttatgtatatacaaaatttacctttttactagcatctgagatagagttactttctggtacccagtatattggagtctgtcagaaactctataataggccaccagtttttattatttaacatttttatttgaatttctaagaagcctattctctatctattttgaaagattttggcactatatttaattggaaggtaaaatattgtacatgtgatccagagtaaatgagaagtctctatctgagctggtcagttactggagtacatgttactaatctgggtttaaagtttacttcattatctgctagtgtcatccacagcagttcatcctcatccacactaagccatcctgttagcttttaaaggaagttaatttaattaacattaatatactctatgggctccctctcccacctgtctgcatagaaaggcagaattagacatagcatgctttggaaaagcaaataggaattgttgggaatgnnnnnnnnnnnnnnnnnnnnnnnnnnnnnnncacttgtggttctacattcctggtgaatgatgaatgttgctgtcaaagggctgccccctaccttataagggttgctgggcatttgaaggcaggaagatttttaaagatagattgaggttggtttaaaattattcctgtaaaccaacaataaagcaaagaagaggttcatttttgtaaataacactggtttcaaatagtgatgttagacttaacctaatttataaacaagagatttatatctccatgcatagttttagacaaaaaaagatgtttcaataaaattactgtcttgtaatatnnnnnnnnnnnnnnnnnngggggggccgttttaaaggatccaagtttacgtacccgggcttgcaacgttttagcttttttatagggccccctaaattcatt

SEQ ID NO: 59864 - DNA, 1768 bp, Homo sapiens
  misc_feature (1)...(1768): n = a,t,c or g
gttgttttctatgaatgtattattttagctattggggtattttttaaggggacggagcccagaggacttggtgactgttttgagcatgtgggggtgagctgggtgactcgtcccccaggctctgacacaggagctgggaggatgggcagatgtttaccacggccagtgtggtgggacacacacacctgaaagcctgggacttggcctccaccctgctggcaccatccctcggcctgggccacgccctgctgcagtaacacccagtggggcttcagaagcacaacatccttccaggtctttattgacgccaggcacaagttgccgtgaggggtggcgaccctaagggggtgagtggggtcccccaccgaggtgaaccctgatggcggctgtttgcccagggccaggcctctgcaggcaggcggagggccaggcctaggtccagcagcagcttgggtggcaggagggtcaccagctcaggatgccagggcagtacttgtcaatgagcccctggtagtagggccgcagcttgtccacgtccggcaggtccgggcacttggtgtagaggtcgaacttgctgcagcagggaggggcnggtgagcccccgtgaaaaaacccccaaggccccccacccaaccccctctttcactcccacaacacccctcggcgggtagcggggggcgttacttgaactcccgcacccagggcagcatggccaggtcctgctggctgcacagctgcttggtagtcgcggcccgtgtgccaggggtagaaaggagtggaccccgattcatgtagaaagcctgcgggcaaggccacccagcggctcacttggggctgcaggaccgggcctggtggacgggctgcgttgcccctccccccacctacctcagggggcagtgagaacttgttaaacttcatcacctggtacatgtactctgtggggagagggtgtcaccagcaggcactgcctctgccccaccgccccccaccgtcccccaccgccccccaccgccccactgcccgcctctggcctcaccatcatggccccaggacatgaggaccctgtcgagcccacagtggggctgatacatcccgagctctgtgctgtatcgaggatcctggaggtcagggttgtcctggaaggtggagtcgcagaaaaccacggaggcctgcggacggcatccgacggggaaggtgtcgccgacgacagcccactggggctccccgaacagggccaggaccttccccaggtcgtgcaggagcccgacgaggtggaaccagtccttgtctgggtgggccttccggatgccctccgctgtctggaaggcatggaaggagttggggaaatctacgtccgggtccgactcatccaccagcccatccagcaggtccacggcctccatgactgtcattttcttgtaggagaagcccccaaactgggcatgcttgctcctgacgaagtccactgtctggtgcgtgtgcatgagcttgtaggtggtgaagacacggtccaggaggggacctgacgtgtagttccggaagctggccttgtctttggccacctctgggtccacatcaggtcggtagaccagggaagggtctgggccctgggtaggtggaggattgaacctatttcaccatcatgtcagctccacgaggaagcacagacattcccagggtggctgcagactccaagcctgcctctgctcgagggctggtgggtgacacgcgaggacacagcctctcccgcgccatcatcccagcccct

SEQ ID NO: 59865 - DNA, 2948 bp, Homo sapiens
  misc_feature (1)...(2948): n = a,t,c or g
cccttacttgtagatgttgatctcagcttgtcagcatatgcaatgccaaaaagtattatgatcacaagagatatgctgctaagaaaacaccaaagactgttgaagctgctgagaaggcattcaagtcagcagaaaagaaaacaaagcaaacattaaaagaagttcagactgttacccnctattcaaaaagcaagaaaagtatattggttgacctgaaatagtagccagcgcaccctaagggtgaactactgaagagggtgcttaacccattacttccctatggaccagctctcattgaacactgtcttttagaaaatggattctcgggtaatgtcaaagtggatgaaaaacttgaaactaaagatattgaaaaagtacttgtttctctgcagaaagcagaagactatatgaaaacaacatccaacttcagtgggaagggatatatcattcagaaaagagaaataaaaccatgcttggaagcagataaaccagttgaagacatactgacgtatgaggaatttcatcctttcttgttttctcaacattcacaatgtccatatatagaatttgaatcatttgacaaggcggtggatgaattttattccaagatagaaggccagaaaattgacttaaaagctttacaacaggaaaagcaagcattgaagaaattagataatgttcgaaaggatcacgaaaacagattggaagctcttcagcaggctcaggaaatagacaaactgaaaggagagctcatagaaatgaacctacaaatagttgacagagccattcaggtagttcgaagtgctttagctaaccagatagattggacagaaattgggttaattgtgaaagaagcccaggctcaaggagaccctgttgcaagtgcaatcaaagaattaaaactacaaacaaaccatgttacaatgctgctaagaaatccatacttgttatcagaggaggaagatgatgatgttgatggtgacgtcaatgttgagaaaaatgaaactgaaccaccaaaaggaaaaaagaaaaaacaaaagaataaacagctgcagaagcctcagaaaaataagcccttacttgtagatgttgatctcagcttgtcagcatatgccaatgccaaaaagtattatgatcacaagagatatgctgctaagaaaacacaaaagactgttgaagctgctgagaaggcattcaagtcagcagaaaagaaaacaaagcaaacattaaaagaagttcagactgttacctctattcaaaaagcaagaaaagtatattggtttgagaaatttctgtggttcattagctcagagaactatctaattataggtggacgagatcagcaacagaatgaaataattgtgaaaagatacttgacaccaggagacatttatgtacatgctgatcttcatggagctactagctgtgtaattaagaatccaacaggagaacccatccccccacggaccttgactgaagctggcacaatggcactttgctacagtgctgcttgggatgcacgagttatcactagtgcttggtgggtgtaccatcatcaggtatctaaaacagcaccaactggagaatatttgacaacaggaagcttcatgataagaggaaaaaagaattttcttcctccctcatatctaatgatggggtttagcttcctttttaaggtagatgagtcttgtgtttggagacatcagggtgaacgaaaagtcagagtacaggatgaagacatggagacactggcaagttgtacaagtgaactcatatcagaagaaatggaacaattagatggaggtgacacgagcagtgatgaggataaagaagaacatgaaactcctgtggaagtagaactcatgactcaggttgaccaagaggatatcactcttcagagtggcagagatgaactaaatgaggagctcattcaggaagaaagctctgaagacgaaggagaatatgaagaggttagaaaagatcaggattctgttggtgaaatgaaggatgaaggggaagagacattaaattatcctgatactaccattgacttgtctcaccttcaaccccaaaggtccatccagaaattggcttcaaaagaggaatcttctaattctagtgacagtaaatcacagagccggagacatttgtcagccaaggaaagaagggaaatgaaaaagaaaaaacttccaagtgactcaggagatttagaagcgttagagggaaaggataaagaaaaagaaagtactgtacacattgaaactcatcagaacacaagcaaaaatgttgcggctgtgcagccaatgaaacgaggacaaaagagtaaaatgaaaaaaatgaaagaaaaatacaaagaccaggatgaagaagaccgtgaacttatcatgaagttgctggggtctgcaggttcaaacaaagaagaaaaagggaagaaggggaagaaaggaaaaacaaaggacgaacctgtgaagaaacagccccagaaacctagaggtggacagagggtctctgacaacattaagaaagaaactccgttccttgaggttataactcatgagttacaagactttgctgtagatgatccacatgatgacaaggaagagcaagatctggatcaacagggaaatgaggaaaacctatttgattctttgacaggccagccacatcctgaagatgtactactgtttgccattccaatatgtgccccttacaccaccatgacaaactacaaatataaagtgaaacttactcctggagtgcagaaaaagggaaaagctgcaaaaacagccttgaatagtttcatgcattccaaagaagcaacagcaagagaaaaagacttattccgcagcgtaaaggacacagatttatcaagaaacattcctggcaaagtgaaaagtgtctgcacccaatcttctgaacgtaaaaaggaaatagctgaaatgaaattc

SEQ ID NO: 59866 - DNA, 2327 bp, Homo sapiens
ttttttttttttagaaatgcaggagctttattataaatcatttaatattcttgaagttaacaactgataaactcatttaggcaaacattttggatttaatgatctaaagctcacagatgcatgccacatctagctaaaagtacataaaaagcgcacctctggaaataacagccctccctctggctgaagactgagaagcattaaggatgcttctggatttctgcagcggcagggcaggggtctgcacaggcctgacctggtgttgctggagcgcggcatcccctcctgggtgctgctccgaaaggcaggctgggaggtgcttgctggggtgttccatggcagcgctgccaaccaagtctgggtctctaaaagccaccctcagtttataccaactgatcaggaaataggtggtgacagggccttgaagggtacatgccggcttcccttaagttgattagatgggaaaccaaacaccgtctttcaagtgtgaggctgtgccatgctccctcagggaggaggggcgctgggtctgaccaggtctgcctctgccctcaccagctggcagacgtgaactggagaacagcaccagaaaggctggtggttggcagctgctcacgacacagttgctgacctgcagcagatcggctgtgggtgagcaggacagtcaggccctccacaagcactgttctggagtttcgtctgactaggtgaaccctctggcttttcgaggacgcagggtaccctactgccaccagccagtgagcagactaggacatctctagacaggaaactcatctaaaaatcggaggacaacctgatgcacccaagtgacaatggacccaggcagctgtgcaacacccaggtgggaggcgtttggaacagttagactcatcagtggataggtttttctagcacaaatggaatgtggtgtctcatgtccctagggagacaaagggcaggtttcttatctggtctttccaagctttcaactctctggctcaagtgtcccagaatgaactagaagtctattcctccaccctggtccgtggtcacttccagaactctgaagtggctcaggaggtgactcctgaaaggcagcccttgcttgatctcctggtggagcctgtctgggctgaggcgatgctgggcttgccgtgccgagatctcatgccagaagtcctccctcggagctacctgtctccagcctcattctttggcatgttgactcctggaattgaggggctatttctaagatgcatgctttttcggcttttctcatgggtgcctcatcagcctgcacaggatcccccatctcacgagagagggaaatttggcattgctgttccctgcctctaaggtcctttatgaggggccgcccaaactcattcccttagttcttactctcccacaggtgttgagattttattggcccatactaaaaagcatgcaatgactgaggttttctcctaaccttaatctcatcttctcaaatgtgtgccttcttgtttttaagaccatagacaaggacgtcaggtgactgctgaaatagaactaaagctaaaatttttctcggatcttggcaaattctgctaatggcacctctaggggcacaatgatcctcaaatgacatccaaccagactccccataaacaaggtttgggctggagctgtttctagttttaaatatggaaatgtaaggcaaaggacagagcacttggttttgccttagatttcccagcagagtaggatttgggcgaaactgctggttctctctgtcagggaaataccaagtgcagcagagccggggccatggggcaggctggtggactccaggctcacttgcgtggctgctggatgtgctgggttcttggggaaggatgcttgtccatggaggcatgcggcttctggtgagccacctgcgcagccgccggggggaaatctttgtcaccccgggcgatgaccccagagatgaacacagtgggtttaggtggactggggctttcccattcctggtcatccttgtctttctcttctttggtgtctcctgtatgtgggtgtttctgcacaattcgcattccaccagctttcacggcgggcgggtgtccagctttagtctctagtttcccttcgggaggcgaagacatggcgcggcggggcttccgcggggccgaggcggcggcgcggttctcgggccgggcgggcgtgcgcgagtgagctcaggtgtgagcgccggggagcgagcgggcgggagaacgacgcgcgcgcgtggggcgccggggccgcgcgagccgggtgagtgccactgccgttaacgggggcgcggccgc

SEQ ID NO: 59867 - DNA, 3343 bp, Homo sapiens
tttcctctaaagttgagtatatttaatttcttttgttacagaatttaaaatgatacaaatactgcatgtctttaaaatttcagtctgtttttctactgagttcaaaaagtttaaaagatggaggctaccacaaatatataaaaaaacttcactctattctacaacttacatacatctagtacttttggtgagtcctcttaaaattttttctggcattaccaatctgagagtcactttttatcaatatatgttatcttgttttgcaaaaatgcatttttaaaaggtttccaaagtcaccttgataatcatagtgctcactcacttgacacttactgctaaaaggttgttatgcatcttttatacctggttgaggttcaacttccagctatcagagaaaaatgtccctatacttctataattgacaaaagggaaaagataaaaaagggaaagagaacagggtggtaagaaagattgatttttcatttcttatcttgtgatacatgctgcagcagtaaacaccactatctctcaagtagaccctttgaagacagggggagaaaacactccaagagaaagctttaaactagagattgccttcctattctatgtggctttgaccttttggaaagtgcatggcctcttctccttgtattaaataaaacaagaatatgaggactgatgatttgatttggtgagttagttatggaagtagttctggcatctcttatttccattctgttatccattacttctgttctgttaatggcagcagacacttgattaactactgagatttggacatgcaggagatccaaggtggattggggaagtacatcattagctaaatctccattacatcttcacttcaccggttcctctgtttccagatttctggcagactggcatctaaaggccttcatgttagaagcaggagaggctctaaatatttcaagaataattgaggaaaaaatacacattataacagcttgtcaaactactgaatggaacggtggttcatcattttttggaaggattaaaagcaaatctcctcttcccgaacaaaaacaaacattagtacaaaaactgaaagaggaagttaagagaattataccatttctaaatacttataaaattattaatttatgcgcaaccataacagagactggggaccaccctatatatattcatagctacggctgtaagcaaaaattccaggtaaaaaggcaaaaatccaaatttcttattaataatcagtataacatccaacaataacaatcacttaccataggggctaacatttactgtaagccaaaatcctagaaaacattaatataaaatacaattatatatttcctagctgatttgcttatatatccaggtcataaaaaaagaaaggcaacttttttctatgtggcttatacagaatcggatgttacagctaaaagtaattgtaaaggcttctgatagttcaaatgattgtgaaatcccaaagaataaaggaatttctgacagcctaaaattagaaggtatggaactcatacttttattcttctcattctcagttcagtgcttatttttcctaaaaaattaaaaagtaaaaattaaaaatttcagtttttaaaaaaccaaaaatattaataagcttccacacttaatatatgtcagtatccacaaggaggcaaaatcatttatgtaaaatcaaaaatagaacatgaagaaaaacgtttattataaaacttaagaagcaaccaatcaaccaaattatgaaaaaaaattttgtcactgaccaaacctcataacctgaaaagaaccaagaaaagaaattcccattatacttgtacttctaaaagggcttagaggtctaaactagacttcgttgcaatccagaaagttaaaggactaaaaaactggagaaatagagttaagaattagatttatcagacagcatagtctatgctgagatagcaaaatagacatggctttatttgctgattgagaagtggtccagccgtgggctagcagtcatttacatatcagtgaccaaatgcaaacatacccgtactaacagtgctttggtccatgacatacccttttgacagcccaaagctgaaacgtcaactctatctggggttacttgcttatacaaagatgttactctaacaattgttgcttgagggcaagaccagatgattgtcactagtaggaagaaagcagaagtgatgcagcttacactgcatagtccctacccttctggattaaatgaaaaagttgctcaaacataaacttgttcttacaaagtggataagattcaaaataagacaaatataaagatgccaaggctaaatacagataaaaaaaagtgtggtacgtaagaaagccattttgaaaaaagccactatcagtcataactacttattccatcctataatctcataaatcaaagctttcaattgtctggactcatctgtgactgtattcttcccaacatgcattctttcttcttcgaggggttgttcaataacagcaggtatgtttgtgccataaagttcacagtgtcctaaaaactggacacattcttgaataacactgtcatgaatgactatcatgtgttttgacatgttttctaacaaggacaggaagcatcttttggcataataccaggtatctgttcccagctttttattataaggctccaagcttttgataactcgagaaataccaaactcatagtttcctttggcacaataaagagttcctatcaccaaattcacaatgcagagatggtacattttcctatttgggtcatcataagagagctgctcttcctccttttcaatcttcctcatcaactcctctgctttttcattttgacttgtcataatataggaaacacagagattagccagtacaatagcactgacattcaggatgttatcataatgcttcttgactatgggttcatagaaaccaatggcttctttgtatttgttttcctgcatgaacagaacatgagccacattcaacttccacacatcatggtcgttacagaattccacagatttgcggaagatcttttccaccattggataattttcaagattccagtagatttttgcctgagccatcaacacaggaatgtatttctccatggtttcatcatattcattcactgcctttttgatagcttcatcatctctattgtgtcttgcttcctgtacttgcttggtgagtctccgaagctgctcagtcagcatccctgctagcccatcaagcttaatgaaagcctcttcaggagctgtctggcaagtgatcagggcatctaaaaagtcatagagatagggtg

SEQ ID NO: 59868 - DNA, 1942 bp, Homo sapiens
  misc_feature (1)...(1942): n = a,t,c or g
ttttttttttttttagaatacctggtttattcgggaaaacttcataatgaaaactacaattagctttttccacaacttacaaaataataatctgatatttaaaatgaattggttttcattatgtaagtcgaaatggtaaaaaatcataatgacctatccgatgcatcatatatatgctattcagagaaactcaaatccccgaattctcctgtggcatgttttatatcagacatttaaaatctgtttaccaagaaagaccaggattttaactatatgtaggtttctgcttacagttgcaaactatcagaagcctgtctatatgatagagcccagataaacctgagatttagaaaagcaagtcatttattctcctgaggctgttttagtggcacttttgtgacaagaatgaccctcctaatgctttactacacaacttaaccagatctatcagtcatgataaattagacccagtccatctttcaatccagtctactctggttctgaacatataaacacaaaacactacagatttattaatatagcattttcccacaccctaaccctataaagaactttaaaagagaaaatttcatctaaatatttcacacttaaaggaaagccttaccaactatggcaacaggtttggaccatgaaatagtactttcctagatgacatatcgagtcaacatgaagccttagctaaaatgaatgattcaggatattaatgagaaattctcacaaatgatatgcatttaggaaatgattttgctttccttaaatagttcgaaggcttgaaaataaactttttttttgcatttcttttagaatgtttggtcattaacaacttttaaccttatcttcctcttctccttagcccttaacagaccaagtccattctatttggaaataacaagaacttgatcagattattaaatcttggaaacctcatttttaccttataaagtgttaagtttcacgtgcatattctcttacaaatgtagtataaatgttatggatagatataaggaaatattggcatagtataggtaattagtgaaaagacacaacttcacaaaacataataaaagataaacatgaaactataacactacttaaaaaatattttctcccaaattattttagcatttttgactagtttaataatatgaacactgccaaaaaatgggttcaaagtcgcctggagaaacagtttcttcttctggagtccatctcagcagcagcgattttctcccacattcattcccaagttaggcagatgtgtagaagtacctgggcttggcattgcccagaaggtcatcttcgtagttggggaggcagcagaagaagaaggcacagccgatcaggataatcgtggctgcccacccaaagccgtaggcccagttatagatgtaagtgacagcacggttggcatgaagggtgaaggtctgggtgtacttcacggggtaaattaccagggagatgatctggaacacagcagccaaggcaaggagacctccaatcactctcaggaagacaagcatctggggtccacagagggcgaagaaggagaggatgaaacagatcaccaggatgatgaagccacagaagagcatggcagccgctgctctaccccacgcgtactccatgaggctctgacagccctcctcgtaggacccgctgccgccgccctcttgggagcatttccaccacagcgaggacgtctggccgtggtcgctagactgcaaccagccgcggccggccagcgcgatgatgtcgaaggcgatggcgctgagtaggagcaggggcaggatccagcggcagcgctcgcaggccaggccgcagcggatcatgttgacgggcggcgcggggccgagcggagcggagcggagcgggtcggaggagcgcgcgggacgggcgacagcagagagtggccntgcgagcg

SEQ ID NO: 59869 - DNA, 2001 bp, Homo sapiens
aagcctcttttattgtaagcttataatttacaatggactgttaaacacattttataatttatgcattttaatttagttttaaatgttattatctaaaaataagtatctgctttttgttttaacataggttatcttatgatgaggcttttgctatggctaatgatcccttggaaggcttccatgaagtaaaccttgcttcacctacttctccggaccttcttggtgtgtatgaatcaggaactcaagagcagactacctcaccaagtgtcatctaccggccacacccttcagctttatcctctgtacctatccaggcaaatgcattagatgtttctgaacttcctacacaacccgtgtattcatcccccagacgtttaaattgtgcggaaatatctagtatcagctttcatgttacagacccagccccttgctctacctctggagtcacagctggattaactaaattaactacaagaaaggacaactataatgcagagagagagtttttacagggtgctactataacagaggcttgcgatggcagtgatgatatttttgggttgagtactgatagtctgtctcgtttacgaagcccatctgttttggaagttagagaaaagggctatgaacgattaaaagaagaactcgcaaaagctcagagggaactgaagttaaaagatgaagaatgtgagaggctttcaaaagtgcgagatcaacttggacaggaattggaagaactcacagctagtctatttgaggaagctcataaaatggtgagagaagcaaatatcaagcaggcaacagcagaaaaacagctaaaagaagcacaaggaaaaattgatgtacttcaagctgaagtagctgcattgaagacacttgtattgtccagttctccaacatcacctacgcaggagcctttgccaggtggaaagacaccttttaaaaaggggcatacaagaaataaaagcacaagcagtgctatgagtggcagtcatcaggacctcagtgtgatacagccaattgtaaaagactgcaaagaggctgacttatccttgtataatgaattccgattgtggaaggatgagcccacaatggacaggacgtgtcctttcttagacaaaatctaccaggaagatatctttccatgtttaacattctcaaaaagtgagttggcttcagctgttctggaggctgtggaaaacaatactctaagcattgaaccagtgggattacaacctatccggtttgtgaaagcttctgcagttgaatgcggaggaccaaaaaaatgtgctctcactggccagagtaagtcctgtaaacacagaattaaattaggggactcaagcaactattattatatttctcctttttgcagatacaggatcacttctgtatgtaacttttttacatacattcgatacattcagcagggactcgtgaaacagcaggatgttgatcagatgttttgggaggttatgcagttgagaaaagagatgtcattggcaaagctgggttatttcaaagaggaactctgatgctctgcgtgggaccatgcctgaactccccgaataactgaaaaatggctgaatatttttatggttacttgatatttatttccaaggagtgagcctaagacttttttccccttttgcaaattgctctaagaagtaccatgatttcttttaaactgatctatgctgtgtttgcttattctttagttgaacacactatgaagaattccaggtgtactagtgaatgtaatttatagttgccaaaaaaaaaaaaaacctgaaaaaaaaaaaggtaaaatgaaaggggggcactttttttttttaacctttgactgggattttgggtttaccaaatggtttaaaaaagaatttttaaacctacccagtggtttctttctttgggaaaggcaaaaaaaaatcctgggggaataaaatattttttcaagggcccccccttaaaaaagggtttattttaacgggcttcaattgg

SEQ ID NO: 59870 - DNA, 2222 bp, Homo sapiens
ttaagaaaagcacaagaggaaatattctcctcttttgcactgttattttattttgtttaggcccaaatttaatataaaacataacgggaaaaatgaccgattttataaaataatttggggtgtttggatgaaaaaaaatacaagagctttgccttcatgtctacagatctcttaatatattgttggtcttgcaccttagatatcaaataaagatatctagcttgacacaaaagttggtagctgcaaggttaagctgtattagtttgatgatgggccaggaaatgatatatttccctaaatttggtcccctaaatattggctgtaacaaatgctgatatagcaaaaagtaagcttctattagacagcaagagggaaacttgagtgaatgaatgcaacttacctccaagtcctcttaaaggaggtaaaaaaataaatactgtgttttaccagtgctcccctcaaagcattattctaagcatgcaggagggtatagtgagcagctacaatagtaagatccaacccagaggtaggttcaaggccaagagtaggagagtggttgaggaaatcctcctagggccagtaccatttcatagaatgcccatttgtgctgggagatgagtctatggcctattttcttctgattcaaaaggacattcccaatttcaaccttgctgaaaaacaggcatttttgtacctgctgttaagaacagctaggatacaggataaggctggcataaaattatttagcaagcacatgctagctattccagtttgaaatctaccaaactgtaacatcagggagaaataaaaagttgaagatgaagttgttcctcaagctgagggaacaaaatcttacaaaaggagggattaggcactcgctaaactctatatggagaacatccttctcaagctaggtggaagatgaggaagaatattaccaaaagctgaccaggccatttggagaccaaaaggagaggaaaaaaggcatttaggaagcaagctagtaaaagaagttcttctgggtctgactaggtaagttaatctaaggcaaccataccaaagatatgttacccattactccagcatgaagccagtggcaaaatacctcaagatattttaaatccagagaagtgtatgaaaaatatgatagttaaccaagcaaattaaaatcaaaccactaatggtaaaaatctcttcagatttgaaatccaagatactcactttccattaattctgtgtcttacggggggaaaagaaaagtaacaaatgtaaagattttttttatttctactggggagggaggaggataaatagagctgttttccaatttgctctccactgtatacacacatacccacacacatacataaacatacatacaccaaaaataccccaaacaaaaaacaaaaaaaccaggaatcaaaaaccaaaacaccctcaaactgcaccaatacttcatattttgaccaaaaaaatatcctgggaggaagtgcaaaatgcaaaatcaaatgaccgaaaaatgctgaacaaacagcattattaatatacaaaatatttatattactgaactagtaacaggtgatgttctccatgtctgtaaaactttggaaccacatagctgatttgttaaatctagtccatgccagcttccaaaaaccaaacttttagttagcttcattctttgatgcctcatcaaaattttctacaagatctggaacatcatcatcttcctcatcaatgtcttctggttttggtgctttactgtccaagacttgccgtgggaactgttcagctaacttcctaaggcttgttaaactgtcagcaccaagctgacttaatattccaggaagcatttctgtgattggtttggcttctgcatgaccagtaattgcaaaggtattagcagaaagggaagcttggactttgggattgttgaaatgaataactgtcccatcatctttaatcatgttcacctcttcaataccagctatattattcacagccagtttttttagagaactctgaagctttttgtcatcagctgtggctgttctatgtaccaccttcttctttctgcgagctgtacccttgccccctatccggacctgagcctgaagtttggctaacttttcttgattcatgctgttggtaaatctgaagcagggagggtcctccaacaccagcacgcggcaagagaaagatggctgccgtcgacgcggccg

SEQ ID NO: 59871 - DNA, 1175 bp, Homo sapiens
ttttttttttttgtgagcccgctagtttattcaatactaggaataagccggtataaaatacatttttagaaaattcacttggagataaaaaatcttgtccccactcctcccccaatcccacacatctgtgctcttctgcctgagttaattcagctttgctgagcctcctgcaagagcttgagcagggggtcgtcagccctgagggcgaaggtgagcgtgcgctgctggtagtgcctagggtcacactccaagttctcgatcacctcagccagcaggtgggcccgctccacgcctgagccgggggcctcgaagcccagggcggtgaagtgcacatgcaggtggtagtaggagggcaggtagtgcaggtatactcgcagatggtctcccttcatccggtagcgctgcaggatggcctcctgcccctggtggaggatgttcctgagcagcggcaagtgctccggagtaaggtcgcgtagggatctgatgccccggcgatggcagatggcgatcaagtacaagtcatcgagctgctgttggttccacttgaggtcagggatgaggacaaaaccatcagagggatctgggttctcgaaaacaatccggtccgcttcagccttcttgtcgagaatgttatacacccactggatgctgaggctctgggactccaggtggggtaaagtaatattcctgtagtcatctcccgtctctcggatcaggcggaggtcctggcgcaggtacttctgcaggtgtttctctgtggcagggtaaaccacggtcgtctttacatcattcagttgtcttggagggaacaagtgataggtgctgtagatatcattggagaactgcaattggagctcagggctgcccgtcaggagctgagccacctgttccacctgaaatggcgtcttctccaggatcacaacggcatcctctccatccccatccccagaggcctcattcaccttcccgtgtaggaaaatgattttgtcccgcgcagactccctcagcaccttctgcagtctgaagccggagaacggtaagcggacaggagcacaggtaccatttccaactcctgcctccttttcctctgtgctggcggcgtgggcctcctccacgtccaattcgcgcttcctcttgcctagttgaggagctgcgtccgccatgctgcctcgtgc

SEQ ID NO: 59872 - DNA, 599 bp, Homo sapiens
aaagtactctaagcagaaggttctaacgtttttattgattagatttgtgtacagtggtaatccttccatcatacaggtaatatataataacattcaaaaatctgacattaaaataacttattgactaatgctaatattaacacacaatagttctatctctattaataataaaaaccaaaccactgagtttatcttagaaaacttaaattcaggccattattttacaatttggaagtctgagtaatccaacttcaagatgactttttcattgttgaagtttgctttgtcgatgtgtgatttaggacttcctcttgtttcaagccattcctgcatatgacgcaccttggagatgggaccttgcaattgtccttgcactgtgccccggtcagtgttctggacccagcctaccaatcccagctttttaccctcagcctgagtatgcttacggaaaaacaccccttgcaccttcccaaaaatttcataatccactgatatcagggtgtttccttctgccatgctcaaaccctccttgtcttccccaccggctgccaggatcactccgggaccaccacgccaacggctcaccaaggcgcgcaaac

SEQ ID NO: 59873 - DNA, 4838 bp, Homo sapiens
ttttttttttttaaattttactattttatttgtgaaaaaactacaaggcagaattcataaatagacatttctatttaaagcaggaaaatgataaagtggcttctaataacatagtcgtgcacatgccagtaacaggaatatattaacatcttttatttgctagacaaagagcagtgtccaatataaatttcccccaaaacatttaagacctgtgaatttttgaccagttcacaaaaccaccaactgacactttagcatgaagaaaaaaacaaacctaacagactgtcagctctaaagacattacagagcagaaacttccaaaagcgttatacaagctgtctttctgggcaaatgaaaaatatagctcgtataatacattaacaaaaattcacaagataagattgttttgacatacttaacaagcattctctatttgtctccaacaaacaaagctaaggaaataatgtaaccatctttacacagtaaattaaggttacaagtcatacacaagaacagaactgcttgcgcattaaaaactgttcagctccattgtcatactctaaatgttggctcttaaaccattttcggttacatacaagcaaaggttattatatattcagcaattaataaattttcaataatttaagatacggtagcttaaaaaagtagactgagaatggtcttgataaggcaggtgaaacatcttagtggaactaaactcacagaagcttctgccaatgtttttaaatatccagattgaaactgaaaggttttgattagaatattgtgtgggtgtcaagatgtctttttttttgtaactgcatgactcaagcagagcaagtcaggtaagctctgtgtgcgcgcacacgcacgagtgtgaaagattgcgtggtattaaaacaaatggaaacttgcaagcgtaacactgtgctttttgtttgtttaacctgctttctgtgccactgaataccaagtatttctggtcctcttttaatgtatatctttataatctacactagtgtttttacacgctgcctactaattgtagggcatactgcagacacaggaagttacaggaattccatttccagaatacatgcctgagggatgtcatcaatttccaaaattaaaagtctataaagtacctactacctcactacccaacagaatacaccacagcagctaaagggctggccctgtaacatctgattgcttagataactcccactgttagctgcggtttctacaaagatggtaatttcatgccacttgttctaaagcaatcttcttccccttccttcacccctccccattctttaatttatcacggaggcaaaactgaaaaaccaaaacattggcatgaatgaattagcagcctatgagtagctggttaatcagctttttccactaatctatggggtccaatcactttacatgaaactagtttttgaaaaagtacacagtgtgtctgaacaaagtgcataccaacagttattggttcaataagcagtgcaacctacatgagtttggtggcatttaagttttttcaaaaagttaaaaacagcaatttcttaaacctctggaaaataaatatggctgactaatttaccctccctgagacccttaataaaaggaatattaaaactttagaaggaatgtctttgcaatatcccaccaatattaaaatgtggatttaaaattcatagtcaaatcactatgtattatatattctgatgcttatagaaagcatctgatttcctttggttcattaataaatactttaaaaatgtatttaaaaagataagcaaagcttgcatcccagacacaagcattattttaaaaaggggggaacattgtccatgcatttgagaataggaccacagcaacaaatggcactgctttataatctatacctttgagaaaagaatttaaattatggtacattagtgactacagaatagttttaatgtaaatgtgaaaggaacctttcctgttggctactcaaattcaaagctgttaatttttttatttgttgcctccacagacagaaattactgctattattaagcaaaccaggtttttaacaccaaaatgtggtgcttcattacaaatcaggctgccctcccgtgagtccctaaaggtcaaataaagagaggtaacctcaaattctcatgcttgaaatgtctctgaagtactacaaactctgtatctaaatgtaaaagtcaaatagaagagagaccccacatccaaacaaaagcaaaacaaaattttaaaaaattattttaataaggagaggtggaatcttattagtggtctttgattattattattattatttttttttttgcaagacagtaaaaagagtgaagagaatgaaatagaacagtttactcaagctatctttatgtccaggaagaaaaaagattacatgctgctcgcagtaagtacgagctttccctgcaactctggctgcaggcgcgcaagccgttcaccactggagttcctaccacagcaggggattgagaaatgtctccaaacactgaaaagctccatgtcaggactggatgtgtggttgataacctttgttcagtaaaacaaatcatagtaggttttgagaaggaaaaaaagaatgctcacaactgaatcggtagagtgaaggtttatcagacaaagggacatgaggcaaacaaattttaattacagaaaccaccactgcaatgtcatgtagaaaggagaaacaagggactagcttcctggatggaccaaaaatacagtttatagactgtttcaatcctaaaactaagacaatttctagatttacctcagacatgagtagacgtctggaaaatggatggaattcaagttacagaataccatattttcatgagtgcttatgtaagaacagcaaatgataacatgtaaccgtaatttacacgaatacttggcattctggagctactttagttacttttgaatgatcaaagccctgcccaactaaaccacttgtgatttgtcagttattccattgcaaatgcaggctatctggagcagtctttaaatttgagatcacattgtttaaaaaatatatatttttatatcgtccagtactctttagacagatgagagagtcaagttcccacatggattggaacatacttcatgtaagactgattttaattaaatttcagcactttcatagaagggactgtcccagatctgtaactgttcaatgttgtattcacttcacagtgtatcaagcaccagcgttgccatggattggtttcaaataaccctttatatataattttatatttatatatatatagttatatcaaaactgatagtacatagtataactggaagaaagaactaaacttaaaaggatatgctgaaaggatggagtttgtgaacacaataaataaaagttccctccccctcccagccctccccaccggcaacaaaacaaaaacaaaaaaccagttgtaatgtacatggaaaattgtgcccagcagattttttttttttttataaaaagtagattcaggagcacatccaattataaatgattgttaggaaaatcatataaaacaatggaatacataaaagtgtcaagagtaatcgtcagggtgcgaaattccttggtggccagatgcccatggcaagcagaaattatcctggcagcatcactaagaggtcgatgtccacagaagattctccagggatgcaagcagcatgggcaggtggaggttttgaatttcataccctgattcatagttttcacaattccatgtgcaatttcagaaagattcatcattgactgctgacatgtcgccctttggcgtggaggaacgggaggagcccttgtctgtgctctctgaccccgagctgctctggttctgctgttctgaccctgcactggaggtcactgtggatgaggatgtcgatgaggagcgagtcttttccttaaagtctgtgataatgacggtgacgttgcccacagttactgccaactgctgtgcagtgctcctgtccacgtttttcagccggggccttgaggtgtgatttgtttcgctggtctttgttgtagcatttgcagactgtatgctgtttgcttcactaggaggatctttcagaatgtcagactttggtttggttttcttgttggtatttttcttggtaacactaggactaatttccttgtctttctcaggtttctctttgtcctgcttttcaactttctccttcttctcctttttagggggtggtggggtggcatactgttgtgccacttgttgtgccaccagctgagaattgatccgaggttttctggtggaggtgcctttcctcacatcgcagatgctgcatttaaaggcttcagcactgtttctgaaggtgcagacgctacaatcccaaaacccttcgtctgcggcaggtttcgcttgtctttttggcctggtcgggctcttcttgtcgcccatggtcatggatgggctgtaccccgccccccccaagccgaaaccggcgccgctcggaggagaaacgcacgtcaggaccgctacggacctccaccagagtttcctctggcttcgccctgcccaggcatagttcaccatctttcgggtcctaacacgtgcgctcgtgctccacctccccggcgcggcgggcgagacgggccggtggtgcgccctcggcggactggagaggcctcgggatcccacctcggccggcgagcgcgccggccttcaccttcattgcgccacggcggctttcgtgcgagcccccgactcgcgcacgtgttagactccttggtccgtgtggagggggggggcggcccgccg

SEQ ID NO: 59874 - DNA, 4088 bp, Homo sapiens
acggtgggggcccgcgatccccgggacttaccactgaataaatccagtccagcgtgcgacgacttactggcttcatggggtcgcagccgccgctggggtctccgctgtctcgcgaggagggtgaagcgcccccgcctgctcccgcttcggagggtaggcggagaagtcgccgggtacgccttcgcggatcctgccgacaccgacctagctttctgggctgccgggagctcgcggcgagcgccccagccaggcctgcgccggcatcctccgagataatggcatcagctgctaaggaatttaaaatggacaacttttcacctaaagctggcactagcaaattgcaacagacagtaccagctgatgcatctcctgattctaagtgtcctatatgcttggatagatttgataatgtgtcttacttagatcgctgcttacataagttctgttttcgctgtgtacaggagtggtcaaaaaacaaagctgaatgcccactatgtaaacagccctttgattctattttccattctgtgagggcagaagatgacttcaaggagtatgtcctaaggccttcgtataatggttcttttgtcacccctgatcgacgatttcgctaccgtacaactctgacaagggaacgaaatgcttctgtgtattcacctagtggtcctgtgaacagaagaacaacaactccaccggatagtggagtactgtttgaagggttaggcatttcaacaagacctagagatgttgaaattcctcagtttatgagacagattgcagtaaggaggccaactacggcagatgaaagatctttgcggaaaattcaagaacaagatattattagttttagacgaactctttatcgtgctggtgctcgagttagaaatattgaagatggtggccgctacagggatatttcagctgaatttttccgtagaaatccagcttgccttcacagattagtcccctggttaaaacgtgaacttacagttctttttggagctcatggatctttagtgaatattgtccagcatattatcatgagtaatgttactcgctatgacttggagagtcaggcatttgtgtctgatttaagaccatttttacttaatcgaactgagcattttatacatgaatttatcagttttgcccgatctccttttaacatggcagcctttgaccagcatgccaattatgattgccctgctccttcatacgaagaaggcagccattctgattcttcagtcataacaatatctccagatgaggctgagacccaagagctggatattaatgtagccactgttagtcaggcaccatgggatgatgaaactccaggaccatcttactcaagctcagagcaggtacacgttactatgtcttctcttttaaatacttctgacagttcagatgaagaacttgtcacaggaggagccacgtctcagatacaaggagtacaaaccaatgacgacctaaataatgacagtgatgattcttcagataattgtgtcattgttgggtttgttaaaccactagctgagaggaccccagaacttgttgaactgtcctctgattctgaggacttaggttcttatgagaaaatggagacagtgaagacacaagaacaggagcaatcttacagttctggtgatagcgatgttagtagatgctcatctccacactctgtccttggaaaggatgaacaaataaataaaggtcattgtgattctagtacaagaatcaaatcaaagaaggaagagaaacgatctacatcattgtcatctcccagaaacctgaactcatctgtaagaggagacagagtatattctccatataaccatagacacagaaagaggggaagatcaagaagttcagattcacgttctcagagtagaagtgggcatgatcagaagaatcatagaaagcatcatgggaagaaaagaatgaaaagtaaacgatccagaagcagggaaagtagcagacctagagggagaagagacaaaaagagatcaagaactagagatagcagttggtccagaagaagccaaactctgtctctaagtagtgaaagcacaagcagatcaaggtctcgtagcagtgatcatggtaaaagaagatcacggagcagaaatagagatcgttattatttaagaaataattatggaagcagatacaaatgggagtatacttattacagtagaaacaaggacagggatgggtacgaatcatcttacaggaggaggactctgtccagagctcattattctagacagtcttcaagtccagaatttagagttcagtccttttctgaaagaacaaatgctaggaaaaaaaataatcacagtgagaggaagtattactactatgaaaggcacagatcaaggagcctgtctagtaacagatcaaggactgcatctaccgggactgaccgggtgagaaatgaaaagcctggagggaaacgaaaatacaaaacacggcatttggagggtactaacgaagtggctcagccatctcgtgaatttgcttctaaagcaaaggacagtcattaccaaaaatcttcatcaaaattggatggaaactacaaaaatgagagtgataccttttcagacagccgatcatcagacagagagacaaaacacaaaaggagaaaaaggaagacccggagcctaagtgtagagatagtttatgaaggaaaagctactgatacaactaaacaccataaaaagaaaaagaagaaacataagaagaagcataagaaacaccatggagataatgcttcacgttccccagttgtaattaccattgacagtgacagtgataaggattctgaagtaaaggaggatacagaatgtgacaatagtggtcctcaagaccctctacaaaatgagtttttggctccttccttggaaccatttgaaactaaagatgtagttacaatagaagctgaatttggtgtgctggacaaggaatgtgatattgccacacttagtaacaacttgaataatgccaacaaaactgtagataatattccacctctggcagcttcagttgaacaaactcttgatgtaagagaagagagcacctttgtttctgatttggagaaccagcccagtaacattgtgtctcttcaaactgagccatcaaggcaattgccatcgccacggacatcattaatgtcagtatgtcttggtagagactgtgatatgtcttaaaactgccaaagcatttcattgagaattatgatgttataaaaaggaaaaaggaagaatgtcgtctactgcagtctatttaaagatgacatttggtgaaaactctcttcctccttacaatattttaaatgattttttttttggtgttaatttgtaaaaatcattatttgttcaaaatgtatgtcccaccctcaaagatatgcacttttaagtgaagaaaatgatactgctagcagcttatttaaaacttggggtcctttttaaataagaaaaattatataaattttagaagttatttcataaagccatacggtattgacatatttttaaggtagtcaatgagtatttttgaatttttttttttttgagagttattctggaaatgtgttataagctaggagaatccctttggacagtctttatttttcttcttaaaaatttatatgattcaaaaccatttcttcaggttaaattgaggcattttaatctgcacagtttatcttctgccaaaataaaaatttactatttcctttatatacttgtttatctggactgccagtaaaacaaatgtgtattcaacaaaagaaaaaaaataaaacagtaacactttaaaacaagaatcagacattttcctatgcagtatttttttttaaagtttattttagtaaagttaaaatcttgaaagtagctaagggcataattatgtcataaatactgaacttcaggtgaacaaatactttatagttttaattattttctttgattttgaggagtatcttatttgctttctatcatcagtaaaaacagcatttaacttgctaaataaacatgaaaaacccttggcatacttcttttacattgggaggtctttcatataag

SEQ ID NO: 59875 - DNA, 1154 bp, Homo sapiens
ggcacgagcagcgtcgccctaggctgggactctagtaggtcttcggctcagttttggctgcagcgcccgcgtagatcgcttcggccgcgttctacgcccggctcaactatgagccggtgcgcccaggcggcggaagtggcggccacagtgccaggtgccggcgtcgggaacgtggggctgcggccgcccatggtgccccgtcaggcgtccttcttcccgccgccggtgccgaaccccttcgtgcagcagacgcagatcggctccgcgaggcgggtccagattgtccttcttgggattatcttgcttccaattcgtgtcttattggttgcgttaattttattacttgcatggccatttgctgcaatttcaacagtatgctgtcctgaaaagctgacccacccaataactggttggaggaggaaaattactcaaacagctttgaaatttctgggtcgtgctatgttcttttcaatgggatttatagttgctgtaaaaggaaagattgcaagtcctttggaagcaccagtttttgttgctgcccctcattcaacattctttgatggaattgcctgtgttgtagctgggttaccttctatagtatctcgaaatgagaatgcacaagtccctctgattggcagactgttacgggctgtgcaaccagttttggtgtcccgtgtagatccggattcccgaaaaaacacaataaatgaaataataaagcgaacaacatcaggaggagaatggccccagatactagttttcccagaaggtacttgtacataatcgttcctgtatgattacttttaaaccaggagccttcattccaggagttccagtgcagccagtcctcctcagatacccaaacgaggctgaaactggtgacctgggccatggcaagaatatacattcattcagctttgtatgcttactttctgccagctcttcacaaaggtagaagttgagatgtttctgttcttttgggaaggaagcagcaagcattgtttaaaaatatcttccttcttttgcattttttctcttcgaagatttaaaagaagaattacacaaagaactagaactgcacatttgttaagattgtccttttaaaattcctctctgttgcaaggaaaaaataaaagagtagttatagtgtcaaa

SEQ ID NO: 59876 - DNA, 2241 bp, Homo sapiens
ggcacgagccgcctctgctctcagtgccccggatcggaggccgtccatcgcccctcgggccgacgccatgaacatcaaagatgccgagaaaccctctttcccatggtttggcatggacattgggggaactctaacaaagctctcggactttgaacctattgatatcacagcagaggaagagcaagaagaagttgagagtttaaaaagtattcggaaatatttgacttctaacggggcatatggatccaccggcattcgggatgtacaccttgaactgaaagatttaacactttttggccgaagagggaacttgcactttatcaggtttccaacccaggacctgcctacttttatccaaatgggaagagataaaaacttctcaacattgcagacggtgctatgtgctacaggaggtggtgcttacaagtttgaaaaagattttcgcacaattggaaacctccacctgcacaaactggatgaacttgactgccttgtaaagggcttgctgtatatagactctgtcagtttcaatggacaagccgagtgctattattttgctaatgcctcagaacctgagcgatgccaaaagatgccttttaacctggatgatccctatccactgcttgtagtgaacattggctcaggagtcagtattttagcagtccattccaaagacaactataaacgagtgactgggacaagccttggagggggtacctttctgggtttatgcagtttattgactggctgtgaaagttttgaagaggctcttgaaatggcatccaaaggtgatagcacacaagctgacaagctggtccgtgatatttatggaggagattatgaaagatttggtttgccaggttgggctgtagcatctagttttgggaatatgatttataaggagaagcgagaatctgttagtaaagaagatctggcaagagctactttagttactatcaccaataacattggttctgtggcacgaatgtgtgctgttaatgagaaaataaacagagttgtctttgttggaaactttttacgtgtcaataccctctcaatgaaacttttggcatatgcactggattactggtcaaaaggtcaactaaaagcattgtttctagaacatgagggttactttggagcagttggtgcacttcttgggctgccaaatttcagctaaagcatcaggtctctctctctgctaataaatgtcatccaagaggaactaaaaccagaggcattattactgcattgtttgtcactgggaaccaaaggataaaagagtagcataagctgctgaatgttgccatattaaaggagagaacttggtaacgtgaagtatttctcattgaaatgctttcccttttgtatatagccagtgttaaatccttaaatgcaatacagcctctgattattgagcttcctcttaaaaagatttttttattttatgtagccaacattgcagtactgtatgctcaaacacaaatcttaaagtatcggaactgtttagcttatgaaaataatcgactctgaatatttgttacaagtctgttttatgtgttttgattactagtgagcagaaaataacataccctgtattcaaaattactgaaatggcaatcaaagatgatcatttttatgtgattttagaaatgttaaggcaatactactaattattgtaggtttttttaacgtatcacccaaagcatgtatgtgatctttccccattagtatctttttctcaaatgccataattaactgaaatactattattaaattttcatgagaattctaaaatgaatcctgggaaatgcacgtttggtgatgttgcactttctgtattttacaggaattagtcaatacatgttgaaatgtttaacattttaagattggaggcttaattactgggagtctgtctaatgaagtcctgggactattgtaatggaatatgatttgagttcactgtgctctttctgtttgtccccactgtctcttccttttcgtccctcctctcctctgtctcactttttgcctgttgctctccttttccatcgtttccctctctttataccccctcattcgccattctttttattgctctcttttgcatctttttctccttttttttcttttttacttctttccttcttttccattttttatccacggtttatcttatcctattgctattttattcctccattttccttatctctttctccactgttcttcttttcttcc

SEQ ID NO: 59877 - DNA, 1161 bp, Homo sapiens
tttttttttttaatgaaagaaactaaattttacaatttattccatcttcaggattacagacattacagggcaggatggagtaaaaaaggcaaatgaagcgagcaccttcagcttcccccctaccccgacatttaacccagatgcagcattttgacatttttaggatatgcaggttgacaattcactgacttgggttgagagctggcaatagcagatctttgcaatttaggttcttcctccacagctattccaagtatcttaattcctgaactgcacactgagagctctgaaatggtgttcactgcaacattcttgcagctttcacatcttaatctgacacctcttgtgaaggcagggaactgtgttaaaagctgtcttcctctttgctaatccaggccaccatcaatcttaaccattagttactatataaaaataaaagtgtgctcaaaagcactcactgaaacttttgtgcccagatcccttttcagagcattagttccctgagaggaaaaaaaagaggtcctaaccaattgctttcataaatagtgaccccagtacagtgtatatgtcttttgcagcagaaatcaagaggtcaggcagctctgctcatcctgactagtttatcatcgtttgcatacaaggtatatttatgtaaagctgattccacgccaagtattgcaaccataatctcaaaaaaattgttcaattttagcacacagttcctgcaagataccacagcaggtgagaaatcatctcaaagagttcatcttttacaactgagaggaaaacatcgaaggaggaaataaaactcctctctcctaagttcctcatcaaatctgatggctatgttcacagagttagttgacaaaaatccagagtcctcaatttctggacttgcgaaatccttcaaggtgactgtcaaggtcaagaagaattttcaggcttttctttgccatggcccatgaactccagtccttcaataggaatctctttctcctttattgctttctgaacacactgctggtagcgcttgaagaggtcggtgcacgggtccccggagctgtcccccttgagaaatttctcggcgaaccagcgattgaagcactggtcgtactcgcgcttcatgtccgtgcatgcctcccccacactgttcctcgtgcc

SEQ ID NO: 59878 - DNA, 2080 bp, Homo sapiens
ttgagaagaacaatcgccaaatgctgccagtctttaggagtaccgctggaggagactcagtgcagatctgcacaaacccgctggacaccttcttcccctatgatccctgtgtgctgaagaggtcaaagaaattcattgatcctatttatcaggtgtgggaagacatgagtgctgaagagctacaggagttcaagaaacccatgaaaaaggacatagtggaagatgaagatgatgcctttctgaaaggcgaagtgccccagaatgataccgtgattgggatcacaccaagctcctttgacacgcatttccgaagtccttcaagtagtgtgggctccccacccgtgttgtacatgcaacccagtcccctctgacggcagaaatttgtgactgagatgtgacatttgggattccccatcacttgtcatgccctcagcacccagcttgtgccattgggcattgatggcattgaactagagcgagtgcctgcctcggctgtggcacttccaggttcgactgaatcaagcatctgaagactgggtttttttgttgttgttgttccccttacagacaaaatgaagactatcatgtgcaatcttttacagtggggttgatgatacatttggaaggatttgcttgtttaatatgtacattttttgtgttaacagctttttgacacaattactgggtaatttctaatataggcagcagactgttttacgggttgctgttttaacatgggtttttgtcagatccatggtcttaggacttgactgatgagctttcagtgaagaatcctctaagataaaacttctatttaaagactttaactagaaagtgtttattttggctacattgttcaccttctgctgtattggtatttgtctgttgggatttcaagggagtgtagagaagacagaaggaaagctgagagctggcccgacatggtctgggacacagagttggagctggcactgaagatctccagggacttcagagaccaataaaagcccatagggaagagagagaggatatagggaaacagaatcagatgtgtaatatacttggcacagcgaaaaaatggatttaaaagacaaaaatggaggtccaggtagatgtaattcacacagactgaaagtgagttcgggcttgtgtaaaacacatgagattggatttgaccccttggctctcaagtgtccccttagatctagaactgctccttggtggccattagatcgagtcagttttgatctgcatcacttagttattgggaatttctttgttggaaacaggaaaatttttttagattatttggtgtacggttttgctcacaacaataggtggaagttgctagtgcagtcttggtctgatggctgtgtgcatcgcacattcggcttggtgaaatccttctctaaagcctctttttgtatttttataactaaacagaggaagtcttcagaagacctcgctttaaaacaaatttgtgcaaacactgctagagtcattttgaagctcaagcattttcactttgtttcttacatgtgtacttttttgtttacttgtgaaaatggccatctttaagcatatttattttctgccactttatttaaaggcaagcaatattttcttgatcataaatattttgtaatgaaatacttcctcttttccagggctttgtatgcacttgtataattacattgatggcaatgtagagtttgaatttcagtctgtaaatacttttttggaaaatagaaatttttattgctttaaagttttggatatgggtggttttcttttccgggtttggtggaaagtaatttgagaactttaaggttgtctttttaactgctggcaaaatgttgattttttaatattagataaaacgagtaaacgaaattccccagaaattagtagtaagtggggtctttgtgggttgggaagtagttttaatgtagaaagacatttacatataagtctgtttaatttcaaaggagtttgtgaaaaaaaaatccatggtgaaaatgaaacaatgacatggttaatctggaacttacgttcttataccaataaaaggtacctcaat

SEQ ID NO: 59879 - DNA, 2800 bp, Homo sapiens
ttttttttttttcttcaaaaaaaatgcattaaaagaatttcaacttcatgtgcatgccacacatttccatccccaccccaaccctgccccaccctctacagggcacacatatttcacacaccaaagggactccttcctgtaactggggaacagaatgtaaaaaaatccatccaagtggcccacccgataccagaaataaccaaatgcatttacactcacaacatcagtcaactcacatgcacaaggagaagcgtctccaatcggagcttagagccaaaaattacaaatggcagagacttgagctatccataagataattttaaaaatccttccactggacactccccttcattacaaaagtatgcaaacaatcttgctataaatggaaaacaggcgtgtggctctctccctgggacatgagggcatagctaaaattccctgggtggaattaatgcctggaccattgctcctccctttcaggacaaaagggaaaggatgaagaggagcagcagggtagggacccacctcaggagcaggtggggcaccctggagctgcctcaggggctgggaacgtgttggcatgtgaccagctgatggaggagcacagtgtcaagtgggccacgatggctgtagagaaacccaagtgctctgcacccgtagggagtccagaaggtagaggtccacggacaggacaggcctggcctgctttgcttcctccacctaaggccttgggaccgatggcgtccgtctgagaggctgcatgattattttagggttgcaggaaggatgcttcccatctggacgtaagtgcacaaaccatgtctatctggatctcaaaagatgacttcccctttacacaacccccactccctgccactgcagatcccagcagagtggtgggagatcttggcagtgggaaccagaatgctgttgccacacagcacacaggctgaggcacattggtggagggttcagaggaacgaggagaagagaggaagaggaatctgtgacccgccttgtgactggtgggcagattcaagtctctaccgctgctgctgagcaactgggcatctgcttcttggaagaacaagaaaggggtggggtaaagacttgaggcctgggttctaggttgggcaggaagggatggggcagaagtcagggttccatctatagtgacaaatcataggggcttgcttgggaagtaccatctttcgtggaaggtgccgggtgtataaaggagtacctttgggcagcctggtcccaaagctgaaagcccaggtctggtgcctctggggcaggttggctgcccaggggagaaaccaaatcattaatgtgtccacctagtgggggctgcgagattgtcgaagcctggctgagagctgatcgatatgcattctgggatgttcccctgagggaagagactgcagctctcctaggaggggtccccaagatccctggactccccaccccttgcctgactctgttcttggggctccccagggaaaggggaactgcaacttcaggcagtgtaatttgtctaaaaagaaacacggggaaaagaggtagctgcaaaacatcgagccatcctctactttccccccacttcccacacaccctttgggacacagccagatttgggaccagattgagggccaaaggagacagggcactggaggcaaggctggcgatgcccagggtcctcggccattaggctgggtgtggcgtcaatgcatcttgcccagctggatcttcttccaggcctcagaggctgtgaagatgcatgagtccaggatgccggcgacggtgaaggtcccgccaatgatggcacagatcgtggtgatgaatctgtacagcggctgccgtctctctgtgtacttgaccgtgatggggctgaggtcgtagcggaaccagattgcagggatgatgcggcccgtgtggctgtaggcgacgtattccttgttggccaccgtgtactggtaggagtaccgctgcttgccactcttgtcctcataaaccgtgggcacaatcttcaggatgtagtcgtgggaggccagggggttggaggtgagtctgtctgctcccccgagagcattgaaagctccgtggatgttctggacctgtagcgtgtccccaaaggagagcttgtggatgacatgcgtcatgtctgggttctgtggctgggctgtggcactgtgtgtggacacgtggaagttgccggggaccttgttgatgctgaactgcccctcgaagcggcagcctgccccattgttcagcgggatcttcatggagttgtcgatgtggcccacttcgtgcctgcccatctcatcctgaatgtcaagcccaaccaactcgcagtgcagattgggtaaactgatgttcagactgacgtcgatcttgccaccgctgtccttgtctgggtcatcgacatagagctcgttcacaacttctgtcgttataaatccggtgagctccgagaggaagaggaagaggatgaagaggcagcagcagatggagataatggccccggtgtacgttggctgcgtaaggtccttgggcaccttcctgtagatgtcaaacctttccaacagggctctttgcttcttgtgagtaagtttcaagtccacctgcctgggcctggcgttccaggctggtcacagcttctccagcctggctgccaacccagtctctctctccagtccagcctctcacaggaatgacgtgctgcccccccctagggatgcagggatcactgacaaggcgcatgtcttcctctggcctcaagtgcttccggacgcgtggg

SEQ ID NO: 59880 - DNA, 1467 bp, Homo sapiens
ctcttgagctcccgggcgtccggaggcgaaggtcccggagcgttcacgagaatccgggtcccggcgagtccggggtccgctcctccagctgcgcccagggcgcacgagccggccagcctcggggagagggcgcgggggcgctgggggttcttacgggaagatgaggaagcccgacagcaagatcgtgctcctgggggacatgaacgtggggaagacgtcgctgctgcagcggtatatggagcggcgcttcccggacacggtcagcacggtgggcggcgccttctacctgaagcagtggcgctcctacaacatctccatctgggacaccgcagggcgggagcagttccacggcctgggatccatgtactgccggggggcggccgccatcatcctcacctatgatgtgaatcaccggcagagcctggtggagctggaggaccggttcctgggcctgacagacacagccagcaaagactgcctcttcgccatcgtggggaacaaagtggacctcactgaggagggggccttggcgggccaggagaaggaagagtgcagtcccaatatggacgctggggaccgtgtctccccaagggcacctaagcaggtgcagctggaggatgcggtggccctttataaaaagatcctcaagtacaagatgctggatgagcaggatgtgccggccgctgagcaaatgtgctttgagaccagcgccaagaccggctacaatgtggacctcctgtttgagaccctctttgacctggtggtgccaatgatcttacagcagagagctgagaggccgtcacacacagtggatatatccagtcataagccacccaagaggaccagatctgggtgttgtgcctgactttcgagggcctcctggactcagactgtgcatgttgggaaggggtctgaccaggcaagctgtgatctgaaaggagcaaggaacagcaaggaattattttccagaatgacacccgcagcagaatgttggagtggaaatgatggctggctatgaagaggaggtcaacgtgtgtggtctcctcagtctctgtcagaggggtggggaggtgggaaacaggaatcctctgcaaagcccaatctgcagagtcgagacccctggtgctctctgccccgctgcctggcactggtcctttgcagccagccaccaacggcccccttgcccttgcagaggcagaagcctgcgtctgcacctgcacctctgaccgtttcagcaccctgggttgttaccacgtcctacaactctgacatttcttgttctcaagcgtttctcttcactgtgagttgtctttggtcctcccacttggtacttgtatcttgatgctttataatcctgactctcgacgtgttcatttatacaaaatcaggaataactttgtttttatactgattgcagcaatgttggctacatgtattattaaagaggatttttggtcgacgcggccg

SEQ ID NO: 59881 - DNA, 1004 bp, Homo sapiens
ccccccaggcggcgcgaccgggccggcgctggggtaagaagcctgctgagggatgcccaagaagttccagggtgagaacaccaagtcggcagcggcccgggcacgtagggcagaggccaaggcggccgctgatgccaagaagcagaaggagctggaggatgcctactggaaggacgacgacaaacacgtcatgaggaaggagcagcgcaaggaggagaaggagaagcggcgcctcgaccagctggaacgtaagaaggagacgcagcgcctactggaggaggaggactccaagctcaagggcggcaaggcgccgcgggtggccacgtccagcaaggtcacccgggcccagatcgaggacacgctgcgccgagaccatcagctcagggaggccccggacacagccgagaaagccaagagccatctggaggtgccgctggaggagaacgtgaaccgccgcgtgctggaggagggcagcgtggaggcgcgcaccatcgaggacgccattgcagtgctcagcgtggcggaggaggcggccgaccggcacccagaaagacgcatgcgggcagccttcacagcctttgaggaagcccagctgccgcggctcaaacaagagaaccccaacatgcggctgtcgcagctgaaacagctgctcaagaaggagtggctccgctctcctgacaaccccatgaaccagcgggccgtgcccttcaatgcccccaagtgagcccagaacttggggagccagttcacccacgggtggtccaggtcacgactctgcacgcccttaggccaggtcagctgcgagggtcacagagcgttccgggggccaaggcgccgggccctggggccatgctcttatcaccagccacccgtcctcccgccagagggtccctgccccgagtgacaccccatcccctcccatgccccggcgcgtgtgtgtagagcctcagggctgagtgcccaaataaaggtggcggcaaggctgcggtgaggcaaaaaaaaaa

SEQ ID NO: 59882 - DNA, 3746 bp, Homo sapiens
tcatctagaagaacctggaccattcttgacagagctgaatacagtgatcacgttgtcctccaaggagcaggggtggggtggggtacttctaggagtcagttctacaggctgtacaggaagcatggctggggaggcctcaggaaactgacaatcacggcagaaggcgaaggggaagcaggcacgtttcttcttaatattcctttgaaattctttatggtgcacaggtagcgtagaaaataactgcttcacgctgactgtcatccctctggggcgggggtagggggttttctggatgattttcccatagtgatcaaacaccagtcgagtcccaaccttcgctgatacacggcaggtagaaatggtgacatcactcagtgcacaaagtgagctcagagcttccccccgaaagccaaaagtttccacctgagttaggtcggcaaactcttgaatcttacatgtgtgatgtttcagagtaaagccttcgaagttttcttcttctaccccacatccattgcctgaaacttcaatgagatccactccatagtccttaagctttagatcaacattagtggcaccagcatccagactgttttctactaactccttcaccgcattcggccttagactcggtaccaccggcccagagcaaatctgatggactgacttccgatcaataggtttgatggccttagcaggttctgtactcgagttctcagctcgctccaaggatgcaacaccggatccgcctcggggactgggaaagttccctccacggctcccacaggcgccccgcctcctgggctcccaacggctgctttcgacgttgtgctccaccctttccgggcggggcggaaaaaatacttcccgtctctccttttcgcctagtggctctgtcaaaggtcgagtccgtgacgtcaaagagcctggaccaatcagagcacaccggactgcgttttttccgaacgccagcagcagggtcagaagggaggtggtcgccctccgtcgtggtctggcgtgtattccgagccttggtgtctggcggtttccgagcgttggtgtctggcggtttccgagcgttggtgtcttggcggtttccgaccgttggtgtctggcggtttccgaccgttggtgtctggcacgcgccaccctctcttgctttggttgcgccatgccgatgtaccagacaagaagacaagaaaatgatttgaggacagcttcaatcgcggtgtgaagaagaaagcagcaaaacgaccactgaaaacaacgccggtggcaaaatatccaaagaaagggtcccaagcggtacatcgtcatagccggaaacagtcagagccaccagccaatgatcttttcaatgctgcgaaagctgccaaaagtgacatgcagcaccgagaagtccgcgtgaagtgcgtgaaggctctgaaagggctgtacggtaaccgggacctgaccgcacgcctggagctcttcactggccgcttcaaggactggatggtttccatgatcatggacagagagtacagtgtggcagtggaggccgtcagattactgatacttatccttaagtgagtcctgggaagaggggaggccagtgtctcagacctttgcccttccagggtcatctccctccacctgtcacagctgactcttccatctgtgcaggttgactgaggtcattcctgagttgcagtatgttgagagggtaatatttctgtcttctctaacttcccatactcccttgtcttccactctccacttaggagtttttttgtgagttatgtccttgttgcttttgcctctttttctttctagccttgattgtgccagaagacaatgtccctattcacacactctttctgcttttctgtgggcaggaacatggaaggggtgctgatggacgtggactgtgagagcgtctaccccattgtgtaggcctctaattgaggcctggcctctgctgtgggtgaatttctgtactggaagtgagtggggctccttttacgtttctttaacaccaccctctcggtttctctcccacatgtgctgctgccctacttaaggcctccccatctccgtggaagtctctctgctgtctcttttcctctctcagctccttggggctttccttagctctgcacctccttttcctttatcatctccttgggccatctcctccctctgtggtcatcattacacctccttgtttcctcctgtgctgagccctttccttgtgtccattccaccagacttttctaccctgagtgcgagataagaacgatgggtggaagagagcaacgccagagcccaggtgcccagaggactttcttccagcttctgctgtccttctttgtggagagcaaggtgacatacacagagataactctggctgttgtgcataggacctacaagtgggctggggttggtggttcacgcctgtaagcccaacactttgggaggctgaggtgggaggatcctttgagcccaggagtttgagaccagcttgggcaacatagtgagaccctgtctctaccaaaaaaatacataaatcagccaggtgtgggggggtgcacccgcaatcccagctactcgggaggctgagacatgaaaattgcctgagcccgggaggcaaaggtttcggtgagccgagaactgcccactgcctccaccctgggtgacaaaatgagacttgctctccacaaagaaggacagcagaagctggaagaaagtcctctgggcgcctgggctctggcgttgctctcttccacccatcgttcttatctcgcactcagggtagaaaagtttccagtacagaaattcacccacagcagaggccaggcctcaattagaggcctacacaatggggtagacgctctcacagtccacgtccatcagcaccccttccatgttcttaaggataagtatcagtaatctgacggcctccactgccacactgtactctctgtccacgatcatggaaaccatccagtccttgaagcggccagtgaagagctccaggcgtgcggtcaggtcccggttaccgtacagccctttcagagccttcacgcacttcacgcggacttctcggtgcttatcatgcagagtccaaccaatatattttaaatagctgtcggtgaggaaagacgtgctgtagctttgcatccaacacccaatttcctcaatgcagatagcacggatctcaggaaggacatccctgcatgtcacttttggcagctttcgcagcattgaaaagatcattggctggtggctctgactgtttccggctatgacgatgtaccgcttgggaccctttctttggatattttgccaccggcgttgttttcagtggtcgttttgctgctttcttcttcacaccgcgattgaagctgtcctcaaatcattttcttgtcttcttgtctgcaagtggccagtgccaagtgctgggccgccgctcctgccgtgcatgttggggagccagtacatgcaggtgggctccacacggagaggggcgcagacccggtgatagggctttacctggtacatcggcatggcgcaaccaaagcaagagagggtggcgcgtgccagacaccaacggtcggaaaccgccagacaccaacggtcggaaaccgccaagacaccaacgctcggaaaccgccagacaccaacgctcggaaaccgccagacaccaaggctcggaatacacgccagaccacgacggagggcgaccacctcccttctgacccacgaaa

SEQ ID NO: 59883 - DNA, 2443 bp, Homo sapiens
  misc_feature (1)...(2443): n = a,t,c or g
ttttttttttttaactttggggatgtttattgcaaatggttataatttaagtgatatttacaattgtttaagacagagggcaaacaggctctgagccaggcctcagctttagaggcccatcctggagaggaaatggcacttgcagggaacatgagctcaatcactattgctcactaagcacagggtcacactggagtcatcttagggaggctgcgaggaagaaaagggagtgcacagagccatgaagcaactactttaaattctgaatcttgctgtgttcccactgagcatgctgccttcctagagcaggccttggagccatcccagggactaacacagatccttcctggggcgcaggcttctcacactagcgtagggtgcctaggtcatcctcatcattgtttatcatcacagacttctttctgcctgccagatatcttccctacttgtggctttaaaacaccagcaggagggaagtcaaggaatgttcttgttagtataaatccatagcaaaaacgatttgagaactggatgcttcccagggttggcaggtgtgtggatggttccctgaattctttatccacaggatgcttgaatgggtggtgctgttgaggctgacaaatgtctgagctttacagacttgttcatgtttttgagaacctatggggatactcattgggcagaatcagagcccagcagaacacggggacggggaagggtaaagaggggaaaccgacagagtcctgaggtcatcccgggaggaagggggactacttccagaagcagcagcacaaagggctctgccgagactctgcggagggggtccagggtactgggggtggaggggtcccctcttgcagtgtggggttactgtttgggtaaagcgaagtcccaggcagtttcctgtgcacatttccacatggcctgcatgaggcgagtgaaacccatgtctttgggcttttccaggcctctcatcagccgttgcttcatgatggaaacaaattccttattgctcagttcgccattgccatcacagtcaaagagtgcaaacaccacatcacacacgtggtctgagagctccactttagccactgtcctggccacctgctgcatggtcactttatcaagagatgctccagccatatggtaaaaactcaatgcagtgtccacatcattaatgttctttaggaaagtaaagaagttctccacctcctgaaatgtcagaccctttccttctttgaagtgcttcttgagctgcctctgcatggcggtcagcttcttggactgcaccccactgtaggcaagtagcatgccaccaaactgcctctcagtaattctcccatccacagggtcatggcgttcaaactcaagcttcagaacatcatgctgcagtttacgctgaaattcgaggaagtttttgattgtcagctttcccttcagatcagctccaaaaaagtaggttgtgagggctgaacacaagccagacttgagggtgttgccagtagttggacgatctctgtggcgcatacccatactggtttgggagcgaatgatgctctgaacctgttcaaattcttccatatctacttctccatctccattcaaatcaaacatcttgaaggcaatttcaaaatttctctgaggagtggaaagaacagttgtgaggaaaatgtagtctgaaaaggatatgagcccacattctccaagggtgtaaaatatactgccttcatcagcaaatttttctcgttcctgggaaattttctctgtctttccatcaaagcgttttattatatattgatccagacccaagtgttctggttgtttttcattgggtgttatggatcgcacaaaatcttctggtgtcataaacacttctgcttcaccaggctcactgatgactttcaaggtggcaaaatatcggaagattttgtctggcgtggagtaggctcgaatcctattctcatattccatcacttttctgtctctgaatccagaacgtttcttctttttctcttctgggtgaggggcaagatctgcagtctttttctcatggttacaaacatccccttcatctttattcttccctttatcaccgatgtcactttttaggttgtctacacatggtggagattctgcatgggccctcttccacaaaagaccagtacttgcagttactgcagatgctcccaggaaagccaccatcattagtcttcgccggatctggatgggctgtgatcctccatggtaccatcgagaacccacagccagttctgccaaagcagaaagtgagttcagacgaaacatcgcgtccaaacacgagctccagcagcctctcggtcaaagccgcccacctctgacagccatagagatgaaacagcggagacaaacctccaccccctccgcccactcacgaaatcgtcgacccgggaattgggnccggtac

SEQ ID NO: 59884 - DNA, 1614 bp, Homo sapiens
caaaaatcattttcctcttaaatgtttcttgataattcactactggtgccttgtgaaatgagtctctaaacctgcagacatcctacactgcctctgcaatgtaaccagtgccgagctcagcaatgacatcagaaactaatttccgttgtttttcctaagctgtaaagagatctttcaccagcgaggggagccattgtgttggcaaaggagttgtcctaaatactgttgtgtactgcattccgccacagttctccattttctgaagactgcctttcttaactgctagaagatactcatgtactaagaaaaagagatttaaggtgggttaattatagtagctgtatgtttaatactgctgtaaagatacacttttttcatacaattattgttaataatttgaagatgtttattgcattctatttttggtgggaaaaaaatgtaacatacatttatttagcacgacattgtgaaatacacaaaacatgtaactgagaaagcaggaattttctattcctagtccatttctgaggactaaatcatgaactgctcccaatgtaattaaatatttcttacaatagttgggcaccaagtttaagatttattaattttctcctctcagtataggcagcaattcaccattttctttcagttccttcacaatatccaatcctcccaccagctcccctttcacatacagctgagggtatgttggccaatttgagtaagcttttaatccttgccgaacttcttcatcctccaatatatcgaatgtttcatattcaacaccagtactatttagtatttccagaatttgtttgctgaatccacattttgcttcctgtttgtttcctttcataaagagcatcacagaagctttatttgtcagcactttgagcctttcctctaatttgggagctttgggacaaattgtatctagttcttcagatgcttctagctccttaattatatcaagtcctcctatgagctctccagaaacatagagctgaggataggtaggccaactggaataggctttgagtccctgtcgaacctcttcatctgagaagatatcaaaactgctaaactgaatattatgtttgtgaagaatttccaccatctgcttgctgaaaccacagcgtggttcttgaggagttcctttcataaacagcatgcagggggcagcatgagtcaatttcttcaagcgaaggttgagatcttctttaagatgttcattagcgctgggtaggaaggagccactagatgcatgtcgctgaacttttttggtcaactctggggcatgtgcaccatctaatcggtcgattttctgagaattcttgaaaaacagaaaagtgggaacagagctaatttcatatttttcagatacttcaggaacaccttcagcttccaacttcacaaatgaaacttgagggagttctttagctaactctgccataacttcgttcatctgtgcacactgtggagcccatggtgcccagaaatggaccacaaggagggacttggctttgaggcgcagcagctcctcaaactgcccggctgagccgacctcctccacggccgctacagctgcctcagccgcccccgccgccatgctgc

SEQ ID NO: 59885 - DNA, 1228 bp, Homo sapiens
ggcacgaggccagagtgcggggtcgcggtgcggacttcgagcacgagccctaaagacgctcagcactcgtcgcttctcctagcagaccctgcccggcttggcgatggagtttccggacctcggcgctcactgttcggagccgagctgtcagcgcttggattttctgccgcttaagtgtgatgcctgctcaggcatcttctgcgcagaccatgtggcctacgcccagcatcactgtggatctgcttaccaaaaggatatccaggtacctgtgtgccctctctgtaatgtgcctgtgcctgtggccagaggggagccccctgaccgtgctgtgggagagcacattgacagagactgtcgctctgatccagcacagcaaaaacgtaagatcttcaccaataagtgtgaacgcgctggctgccggcagcgagaaatgatgaaactgacctgtgaacgctgtagccgaaacttctgcatcaagcaccggcatccactggaccatgattgctctggggaggggcacccaaccagccgggcaggacttgctgccatctccagagcacaagctgtggcttctacaagcactgtccccagcccaagtcaaaccatgccttcctgtacctctcccagcagagccacaacccgatctccgtcctggacagcccctccagtgattgctttgcagaatggcctgagtgaggatgaagctctgcagcgggccctggaaatgtccctggcagaaaccaaaccccaggttccaagttgtcaggaggaagaagacctagctttagcacaagcactgtcagccagtgaggcagaataccagcggcagcaggcccagagccgcagctcgaagccgtccaactgcagcctgtgctagggccctgggcttggggagggaggttcacctgaggaggactgtggccctcacacctctagggtacacagggagaggaggcccggagcaccctggagggcagagacaagcgggagtgatgtggaggtcgccctgggagcctctggaaggccttgctagtgctccagctgcatggaagagagcggctagcaactgttccctggttgggccctcagtggatgctggccaggccctactcttagccccttcatcatgtcatctcccttatgctggagctgccccgatgtggagtgggcaggaaggggcctggaaaaaataaaggatcttggcagttgataaaacgtaaaaaaaaaa

SEQ ID NO: 59886 - DNA, 1246 bp, Homo sapiens
ggcacgagcagctcagctcttcagttgttgatcattgtctattgttctccaaacagtaaaccagtatttcacactgagattgtcggctgcgggtatattccaattccccgtctcctcatgaatatgaagtgaagggctctgaccctggaagtggttctaagcagggcaaaatggggtctcggaagtgtggaggctgcctaagttgtttgctgattccgcttgcactttggagtataatcgtgaacatattattgtatttcccgaatgggcaaacttcctatgcatccagcaataaactcaccaactacgtgtggtattttgaaggaatctgtttctcaggcatcatgatgcttatagtaacaacagttcttctggtactggagaataataacaactataaatgttgccagagtgaaaactgcagcaaaaaatatgtgacactgctgtcaattatcttttcttccctcggaattgctttttctggatactgcctggtcatctctgccttgggtcttgtccaagggccatattgccgcacccttgatggctgggagtatgcttttgaaggcactgctggacgtttccttacagattctagcatatggattcagtgcctggaacctgcacatgttgtggagtggaacatcattttattttccattctcataaccctcagtgggcttcaagtgatcatctgcctcatcagagtagtcatgcaactatccaagatactgtgtggaagctattcagtgatcttccagcctggaatcatttgaataaggacaaaatgttttccattatcaagacatggccatctatctaaatattatatcaactgtgtagacttgagggcaatattgaaatgatggtgctttctgcatttgggtgtttatttgtaaaaaatttgcagtcctcactgcacatgcaaggtatacccaccccttcccatttaggtatggttttttaagtaatatgcatcagaaacttcagaaatacttctgccctttgatcaaacaaatcccatttcccaagaatctgtactagggaagtaaataagaatatgagagaaacctttatgcaaatatgtatattgcaacattatttaatattctggaaaattggaaacaccccaaaattctaaactcagaggaaggattaagtaaagagtggtacatactgtaaatgttttctgatattaaaaaaaaaattaaataaaaaataaagagtactacaaagaagtaaaaaa

SEQ ID NO: 59887 - DNA, 803 bp, Homo sapiens
tacggctgcgagaagacgacagaagggtacggctccgagaagacgacagaaggggatccagaatacatttccaacaagagcactggccaagtcagcttcttctgagagagtctctagaagacatgatgctacactcagctttgggtctctgcctcttactcgtcacagtttcttccaaccttgccattgcaataaaaaaggaaaagaggcctcctcagacactctcaagaggatggggagatgacatcacttgggtacaaacttatgaagaaggtctcttttatgctcaaaaaagtaagaagccattaatggttattcatcacctggaggattgtcaatactctcaagcactaaagaaagtatttgcccaaaatgaagaaatacaagaaatggctcagaataagttcatcatgctaaaccttatgcatgaaaccactgataagaatttatcacctgatgggcaatatgtgcctagaatcatgtttgtagacccttctttaacagttagagctgacatagctggaagatactctaacagattgtacacatatgagcctcgggatttacccctattgatagaaaacatgaagaaagcattaagacttattcagtcagagctataagagatgatagaaaaaagccttcacttcaaagaagtcaaatttcatgaagaaaacctctggcacattgacaaatactaaatgtgcaagtatatagattttgtaatattactatttagtttttttaatgtgtttgcaatagtcttattaaaataaatgttttttaaatctggaaaaaaaaaa

SEQ ID NO: 59888 - DNA, 1058 bp, Homo sapiens
ttttttttttacagaatggtagggagatttaatgttgtccatagaaagacattaaatgtcagacctgacaatttagttatgggttacaaaccggaaaaccatgccatttggagtaatggaatttgaagttactagaaaacgacaacagatttttgatacagaatgacaaggcttatctataacacgtcaacgttttcgacgactctgaaatttataaatagctggggagttcaccgtttctttcttcaccttcactttctgagttttatccataagatctttgcgtgtttgaattttctgagcaataacgaacaatttcttctctcgttcaatccgctgtgtcaggcagttatactgcttttgcctttctttagctattcgcttaagtccagtctgattggtaactcctttcactttttctttctgcaaggtctctatcctgggcctattaaagactctgtcgactagctccggggctgtttgcaggtgagttgcgacatcaaactgttcaacttcctttttggtgtcaaaaaagaacacatgcttgttctgttgcttcccctggaaatccagcagatggagctctgattttagtctttcgattttcttagcttctgcaaccctcttcatttctatatatttgacgtcctgagttctcatcagctttagttgttctggggttacttcttccttagtctccttaataatatgtactccatcctggagtttaacccgagtcattttgtagtagaattcatctggatttttttcaagagccttcttccgaagagctttgaggtattcttgttttttacggtagtcatctgcacgaagtttgtaatctttctttttctccagcaggcccagatgttttcgaaagccaggctggcttcgctctctgtgttcccgctgccgggacttagccgccttccgaaaagccgccgccatgtctgtacagccttggaaaagatcagtggagaacgccggatccgcactgcctctgccgccaagtccactgattcctaccggaccccttctgtcgtcttctcgcagccgta

SEQ ID NO: 59889 - DNA, 1302 bp, Homo sapiens
cgttgctgtcgctcttgcttgctgtgactggtggagctgccgcgctgtccgcgttatctcctcccggtgagaacgaaccgcagtgtccaccggcgaggagccagccctgtcccggtcagagaaagacgacgaggatacctgggagcgggcggcggccgggctgggccgcgccggtgcgggctggcgactctgctcctccgcttgctgctgtctctgggaactgggtgccagcgctgaggggcttccagcggacagggacccccttccccggctcccctgcccaccctgccggggagggcggaagatgccggtgaagaagaagagaaaatcccctggggtggcagcagcagtagcggaagacggaggcctcaaaaagtgtaaaatctccagctattgcagatcccaaccccctgctagactaataagtggagaggaacatttttcaagcaagaagtgcctggcttggttttatgaatatgcaggtcctgatgaagttgtagggccagaaggaatggaaaaattttgtgaagacattggtgttgaacctgaaaatattattatgttagttttagcgtggaaattggaggctgaaagcatgggattttttaccaaggaagaatggttaaagggaatgacttcattacagtgtgactgcacagaaaagttacaaaacaaatttgactttttgcgctcacagttgaatgatatttcgtcatttaagaatatctacagatatgcctttgattttgcaagggataaagatcagagaagccttgatattgatactgctaaatctatgttagctcttctgcttgggaggacatggccactgttttcagtattttaccagtacctggagcaatcaaagtatcgtgttatgaacaaagatcaatggtacaatgtattagaattcagcagaacagtccatgctgatcttagtaactatgatgaagatggtgcttggcctgttcttcttgatgaatttgttgagtggcaaaaagtccgtcagacatcatagcaagaactatgtgaagaaaatgcaaacctttcaattcccacgtgtatacaagctaatgtgatgagggggaaaaaaatccaacgggtgcattttcattcatatgaaagacttctcatagtacttttttttcctttttttaaaggaggtttttcttgttacatgtgatgggcattgagccacacctcttcttagactgaatattgaagtttttgttttgagttatgtttataacatttatttcagaacaataaagattcagatttgtgacaaaggcaaaaaaaaaa

SEQ ID NO: 59890 - DNA, 1163 bp, Homo sapiens
ttttttttttttaaaccacaaatacgtttattcctctaaaaacagtataccatctttccaattttcaaaatgttattatcaattgtctgcagattactctcattaagctgatttttaaaaatctcagacagagcagagcaattcaccagcaccatcatcaagtgagctacaaatctatcttttaccagagcaaggagacacttaagatcaattcaagagaatagctttcagtgttcacagaaggggtactcacattcatttgtcacatatttcaggccctcatacaccccttttaaattgtctaactcctatcccagtttctttttatagtctaaaaacaaggaatcacccaagtaagatactccttcagagcactgctgaaaacggatcaaacgtggagatcccccagatccctgttctcaagtgttaaaaatattttatattagcacatagaatacccttagatatattctgttatgttctaaagagtttgtgtttccccctttttgatgatgtcttcaatttcttctgagacctttcctgtatagtcatttggttctattgcttttaacttctcttgatactccagcggcaaaccattttcttttgcacccatgcaaataatctttttatactgtggggatgggggagcactttcgtaatttgtcatcagataacttcgacaggttatttcttttccttcttgagttgcaactttaacttctattacaacatacattccacttttaaccccttcttgctcatccagagaatttaaattgcttttgttcattttccatactactccccacacttcatcgccaggactctgaaaaatggtggctatccctccatgccaagtttgacttgttttgccttgggaattgccaaagtcaagcttaaaatcctgcaggcgggccacacagaagaacgccgccgaggggtttcggaggtggatcctctctgtcagcaggttgctgccgtaggcaaagtacagaaaactctcctcatctggacccgtgacgtccttgcagcccgagttggccatatcccactacgcccctgcactggagcctgaagcaaagtgtaaggaacggccagagagcgcaacactggggcccactaccccggcgcagtgaccgccgcgcggcagccctcgtgcc

SEQ ID NO: 59891 - DNA, 1148 bp, Homo sapiens
ggcacgagaacgccggggccagagtcttaaaaccgagggcccgcaggggtccccgcggccgccgcgatgcagaaatacgagaaactggaaaagattggggaaggcacctacggaactgtgttcaaggccaaaaaccgggagactcatgagatcgtggctctgaaacgggtgaggctggatgacgatgatgagggtgtgccgagttccgccctccgggagatctgcctactcaaggagctgaagcacaagaacatcgtcaggcttcatgacgtcctgcacagcgacaagaagctgactttggtttttgaattctgtgaccaggacctgaagaagtattttgacagttgcaatggtgacctcgatcctgagattgtaaagtcattcctcttccagctactaaaagggctgggattctgtcatagccgcaatgtgctacacagggacctgaagccccagaacctgctaataaacaggaatggggagctgaaattggctgattttggcctggctcgagcctttgggattcccgtccgctgttactcagctgaggtggtcacactgtggtaccgcccaccggatgtcctctttggggccaagctgtactccacgtccatcgacatgtggtcagccggctgcatctttgcagagctggccaatgctgggcggcctctttttcccggcaatgatgtcgatgaccagttgaagaggatcttccgactgctggggacgcccaccgaggagcagtggccctctatgaccaagctgccagactataagccctatccgatgtacccggccacaacatccctggtgaacgtcgtgcccaaactcaatgccacagggagggatctgctgcagaaccttctgaagtgtaaccctgtccagcgtatctcagcagaagaggccctgcagcacccctacttctccgacttctgtccgccctaggccccgggacccccggcctccaggctggggcctggcctatttaagccccctcttgagaggggtgagacagtgggggtgcctggtgcgctgtgctccagcagtgctgggcccagccagggtggggtgcctgagcccgaatttctcactccctttgtggactttatttaatttcataaattggctcctttcccacaaaaaaaaaa

SEQ ID NO: 59892 - DNA, 1232 bp, Homo sapiens
ggggagggtgacgcactagctctccagttcgcccgttcctggcctgacccccaccaaggcccataccgctgtaggctcctcgggctgcccctcggttgacaatggtctccaggatggtctctaccatgctatctggcctactgttttggctggcatctggatggactccagcatttgcttacagcccccggacccctgaccgggtctcagaagcagatatccagaggctgcttcatggtgttatggagcaattgggcattgccaggccccgagtggaatatccagctcaccaggccatgaatcttgtgggcccccagagcattgaaggtggagctcatgaaggacttcagcatttgggtccttttggcaacatccccaacatcgtggcagagttgactggagacaacattcctaaggactttagtgaggatcaggggtacccagaccctccaaatccctgtcctgttggaaaaacagcagatgatggatgtctagaaaacacccctgacactgcagagttcagtcgagagttccagttgcaccagcatctctttgatccggaacatgactatccaggcttgggcaagtggaacaagaaactcctttacgggaagatgaagggaggagagagacgaaagcggaggagtgtcaatccatatctacaaggacagagactggataatgttgttgcaaagaagtctgtcccccatttttcagatgaggataaggatccagagtaaagagaagatgctagacgaaaacccacattacctgttaggcctcagcatggcttatgtgcacgtgtaaatggagtccctgtgaatgacagcatgtttcttacatagataattatggatacaaagcagctgtatgtagatagtgtattgtcttcacaccgatgattctgctttttgctaaattagaataagagcttttttgtttcttgggtttttaaaatgtgaatctgcaatgatcataaaaattaaaatgtgaatgtcaacaataaaaagcaagactatgaaaggctcagatttcttgcagtttaaaatggtgtctgaggttgtactattttggccaagtctgtagaaagctgtcatttgattttgattatgtagttcatccagcccttgggcattgttatacaccagtaaagaaggctgtactcaagaggaggagctgacacatttcacttggctgcgtcttaataaacatgaatgcaagcaaaaaaaaaa

SEQ ID NO: 59893 - DNA, 6517 bp, Homo sapiens
cctaaattaggttgtagttcaccacttgtagaggcagcttcaggccaaatttaatttaatttaataaactaatgaaataaataagggagagtctgattcagttgaattgtatttggagttagaaatgtttattttaaagttcaccagaggatttaaatatacactgaagtttaagaatcattgctgtacaaaggtgaaaaataacatgctcttttaattttgtagtctgtcaagaactacaccaaatgtcatgtgagaaatgagcagatttgtaacaaacttaccagctgtaaaagctgttcactaaacttgaattgccagtgggatcagagacagcaagaatgccaggctttaccagctcatctttgtggagaaggatggagtcatattggggatgcttgtcttagagtcaattccagtagagaaaactatgacaatgcaaaactttattgctataatcttagtggaaatcttgcttcattaacaacctcaaaagaagtagaatttgttctggatgaaatacagaagtatacacaacagaaagtatcaccttgggtaggcttgcgcaagatcaatatatcctattggggatgggaagacatgtctccttttacaaacacaacactacagtggcttcctggcgaacccaatgattctgggttttgtgcatatctggaaagggctgcagtggcaggcttaaaagctaatccttgtacatctatggcaaatggccttgtctgtgaaaaacctgttgttagtccaaatcaaaatgcgaggccgtgcaaaaagccatgctctctgaggacatcatgttccaactgtacaagcaatggcatggagtgtatgtggtgcagcagtacgaaacgatgtgttgactctaatgcctatatcatctcttttccatatggacaatgtctagagtggcaaactgccacctgctcccctcaaaattgttctggattgagaacctgtggacagtgtttggaacagcctggatgtggctggtgcaatgatcctagtaatacaggaagaggacattgcattgaaggttcttcacggggaccaatgaagcttattggaatgcaccacaatgagatggttcttgacaccaatctttgccccaaagaaaagaactatgagtggtcctttatccagtgtccagcttgccagtgtaatggacatagcacttgcatcaataataatgtgtgcgaacagtgtaaaaatctcaccacaggaaagcagtgtcaagattgtatgccaggttattatggagatccaaccaatggtggacagtgcacagcttgtacatgcagtggccatgcaaatatctgtcatctgcacacaggaaaatgtttctgcacaactaaaggaataaaaggtgaccaatgccaattatgtgactctgaaaatcgctatgttggtaatccacttagaggaacatgttattacagccttttgattgattatcaatttaccttcagcttattacaggaagatgatcgccaccatactgccataaactttatagcaaacccagaacagtcgaacaaaaatctggatatatcaattaatgcatcaaacaactttaatctcaacattacgtggtctgtcggttcaacagctggaacaatatctggggaagagacttctatagtttccaagaataatataaaggaatacagagatagtttttcctatgaaaaatttaactttagaagcaatcctaacattacattctatgtgtacgtcagcaacttttcctggcctattaaaatacagattgcattctcacaacacaatacaatcatggaccttgtgcagttttttgtcaccttcttcagttgtttcctatccttattgctggtggctgctgtggtatggaagatcaaacaaacttgttgggcttctcgacggagagagcaactgcttcgagaacgacagcagatggccagccgtccctttgcttctgttgatgtagctctggaagtgggagctgaacaaacagagtttctgcgagggccattagagggggcacccaagccaattgccattgaaccatgtgctgggaacagagctgctgttctgactgtgtttctttgtctaccacgaggatcatcaggtgcccctccccctgggcagtcaggccttgcaattgccagtgccctaatagatatttcacaacagaaagcttcagatagtaaagataagacttctggagtccggaatcgaaaacacctttcaacacgtcaaggaacttgtgtctgagaaatggaaaccgctcctgtatattctgtactgttttacttcgggcttctgttaaagctgttctatggccttggattttatggaggcagatctctgtatcatccagagcctgagtacagtttccttccaaatggacaatgacccaggtggccaaagaatgttcatgagttttataaaagtattgatggtcacaggtgataaagtcagtttttaccactatcttaggcttattatagctaacattaaattactctggaaaaagatgtatattgtttcttaatgaagatgaaaaatatgtaattcatataaatcaactgtttatatcccaagactttaaagaaagacattttttaatgcctgaatgatgagaattgtacagtttttgcctcataagcaaacttgaatcacctgtgtatgaacagggaatgaacacattgcaatggctttaaatgctcttttatctcgttgtaaaggtaaggcaagattttgatgtagtaggatgtaggtaatgtatttaaatatttcatatgaccatatcgtgtccaaactcagtctgaggaatgtgacagctttccgcctaactaggaatgcagaccaggaatgagttccaactcattctgtggcaactttcacaggggggttttatttggaatgctcagtgtagaggacattcctgtcatccatgccaactacctaactcgttattcagagctgataggagcatgggaaaagtctgtccagcgatcagttgttcccctccttccaaaaacagcctccaataccacaacctgaaaagagccgaaatggttattttacagcatacaagcttctgctccagtatgataatttttaattgcctaagaatcattggatcagacctaaatgatccatctgcatttttataagaatggatctttctttgcccttcctctcctagctgctagattttaactaccttttacaaatgttacaaaatgtattttagaggcgacatctctcaagatgacctgagttccttcctgccaactgttccacctagaatacaagtagagaagagcactggctggcaagcatcaacaggagtcttcttcccaacacgagcgcatccatgtcctgagaaaaagtctgtggtttagaaaatatgtccatggttgcccacagtcagcacactcttagtgactcaaaattctgaattatggcagaaaggaaaaataaaacatacttcacattagaacacagaatcatttacatcctaatactgaccacagttcactaaagctcagtagcattaacagatatagtttggaattgcagtttcctcacttcagggtgacaagatatgtataacagtgacagaaatctccaaagctgctggtatatggatatagctttgttaaatatggaaggtcctttaaatacaattgatgtttagtacctataatatgtacttttccatattcctttggatttctggaaggttatggacactttacctgtttaacagctaatgccatagttacttgcatgcccatggttgtacagtagcagactatgaccctattgtgatattaagtgtttatttcataatgccatttatacatagctgaatttggatgaggattggaatgtccatatataagaggaaatgatccatacaatatgtagttgccatccttaatgtaagatttcctaggttgccatcctaacccatgactatgtcattattttgataattaggcatttatgaattatagtatatattcctcatgttggcatgataattttgctattttccatgcattaaaaataagacaaattccttagagtaattttagtaattttatctataatctgtggggtttttttggagggggaggccactggttgtttctacttccctgtgatattttctctctcattaaaggaatgagctaagtttgtaaatatctcctaaaaacaatcaagtaattttattagcttcttttggaccctctaaatattgacttctctcatgaaaaaataaattgatgaaactaatgattacaaagatataatcattttttaaaaagtgattgcccaatgtatttctctaacaattgtcacaagagaaagcataacaataaaaatacaaaaacatacagatttagatgtaaaatctatataagctatatttttagggaggctaagcagatagtattactgtggaagaattatcaagttttattcacctcaaatcccactgggttcttaaaacttgaaaattcaaattgtagagaattatgagacacaatgtgatgtttagttaaagtcatgctatacctttctgggccacatattgctaactctgtggctaattatgcaattaattctcaacgtatcaaagcttttcactggcagtaaattctttgccctcaggtgaagtggattgaaaagacatcaaggatcaaggataatcactttgaatctgttggtttttccccctacattccagacactttaaatttggatgctttcattttttttaaatcaaaccacacaaatatgcagatactttcccagaatttcgcagttaaatggctgatcctcttgaaaactaaccttaatggaattctaaacatttcagtttagaatgactttgaaaaattccttagatttttaggatgttttattctgccaagtatgaaaaaaaaatggttaaatacaatggagttttaaaaattaacctggggattctatttgaactagaaaattcctattggaaaagaatttgcacatacttacagattcagctaataaattttaagaggattaggattctcataattctttaaatgaaaatttgttttagtgatacacagagatgccgtatactatagtgttatgttcagtaggaaaacttcaaatagttcgtatttaaaaaggtaattgatccttgctgtacttcccaacatctcatcttcttttagctgcagcaagatagaggtgactgtatggctacagttcatggtataagagcatttagggtgcacactggcacacaggctggaaaacgggcactggacccagctttcaggtgtgtggtgctgggtaagtttcacctttgaagcctcagccttccatctgtaaagggcggtaatggtgcccacctttcgaggcattgcgaggctagatggtaacacacagaaagctcccacagtgggaccttgatgcagcgtagctggtattaacaaccgtggggacaccaggccactctttttctaccagttgttttatgaatccacctattaattttcatccatcttttggtcgtaggtaaaggtcaatcaggtttttcaaaaagactccctgaataacttaagttcctgtatttctaagatatagggatttctacaaaacgactttgacatttagtcaataaagacttaaactcttcttaaatctatagttttaggagagtttttcttaaaattactgactgatgacattgagacaagagcatcaatgatcacctttcacgtacaaactaggcaagacagggtcagtgcttacattttgtggttatacatgatacatcttttctcagtgaacataaaactatgatttgaaaggtgtcttatatttaaaaaagattgtaaaatgaaaactgaccaaatgaactaattctacccacctatggtctttttaaatgtcgagtttcaaaacccatttgccgtatactagagtgagcttggaaacttacctgattacaggaattgcttgggttcaggcagattcccactttcacctctagagatttagattcagaaacactggggtaggccctggagagcagtactcttaacaagctcctcagtgcttcttaccattaggcaaattagggaaacactgcattgggtcaaagtgctgcctttaatcgaccattagagggagttctctaaataacaaagttattactctaattcaaaatgctttaaagaattttccaaggaatacaagccatctggttggtgttagttatagcagtgatttcattagagtgtacatttaacattttagttttatcaaaattttttgaaattaagaattagaaccagagctcctatcagtatatatgtacacaggtgtgcatgccagtgttcaaaacagattgtgtaaaagttcaagcccgttttagaaagccaacattttatgttataatatgctgttaatcaggactttattaaataaaaacattggctcttccaacccccac

SEQ ID NO: 59894 - DNA, 1481 bp, Homo sapiens
ctgtatttattacataatatttaaatggttggttatgattctagttttctaacaatttctgtaatgtatctttcccttcgtctatttactaactgtctgaaaccttatggggaaggtacaaggggcgtggtggattaagacatccactgctttttacccagcaggatatctctgtgtctctaaggaccccaggtgaggggagaatatcaatttatgattcctgggtgcagcaagtccccacccccacttttcctctttagctccccatccagatcagccagagttcacccctgtccaagatgagctggaagccatggaactgtggggccctggagtctgatagcctcaggagaaatttgaagaccaactgcaagaactcttaaggaatcttgtttgagaaaatgttgttatgtggtttgtatgctacttttggggggcagggctcatttcagcagcctaaatctcctccttggataatgttaatattattattattattaacaaaaaatatatatttttaaaaagttcccttaatctatgacatggtagcaatgatttccctttggtgtcttaatggcatgtcagataatttgtttttccagagaagagagctcaaagaggaattgggaaaaataaattgaactctggaatcttctctctcaagtcctaaaatgaacaaacagatatgattgtgtttgagggaaatatgtccctagcaggaaaagaattcaaagaggttcaaagaatatgtcacttactcctacttgctataggaataaccttgctgataagaaaaaaagggacaatattggagaaactacctcttgtttaattgatctgtccaactctgagatcacttggtaactggtttcatgtgtatccaaaaatcagcatttggatttaagctttctgaatttgggtagtttaagaaacagatttagttttttcagtgggttttaactgcatgtgaaataatgattttccaccagctctgatgcaaagagatataattttaatgaacgatttatccagcagtttgttccaggggttgcctctccttatctacggggattactttgtacatgcagataagttttcgcaaacctatttccattttcttttgtaagcaaataaaactttaaaacaatgtatgtggattctttttcctgcatttctaagtatcaccttaagcttttgtagtcttaactgagtgtccaccagaaagacaacagttgtcttcctttaggtaagcattcaaactttcattcattcgtttactcactcactcattcattcattctgagtgcagtagaaaacagaagaagcagttaacttgggactaagagattagcgacattttattgttcatttataatctagcaggcagcaaagaccctgcaaatgcatgacctctgctaaataaatgtttatcaatagttgactgaggagcccacctatcttctgatattgaggaaagccta

SEQ ID NO: 59895 - DNA, 2013 bp, Homo sapiens
ggcacgagcccaaagtcaaacaaactgacttacagaagctggcacagagggaggaagccctccaaaaaatacggcagaagaatacaatgagacgagaagtaacggtggagctaagtagccaaggattctggaaaactggcatccgttctgatgtctgtcagcatgcaatgatgctacctgttctgacccatcatatccgctaccaccaatgcctaatgcatttggacaagttgataggatatactttccaagatcgttgtctgttgcagctggccatgactcatccaagtcatcatttaaattttggaatgaatcctgatcatgccaggaattcattatctaactgtggaattcggcagcccaaatacggagacagaaaagttcatcacatgcacatgcggaagaaagggattaacaccttgataaatatcatgtcacgccttggccaagatgacccaactccctcgaggattaaccacaatgaacggttggaattcctgggtgatgctgttgttgaatttctgaccagcgtccatttgtactatttgtttcctagtctggaagaaggaggattagcaacctatcggactgccattgttcagaatcagcaccttgccatgctagcaaagaaacttgaactggatcgatttatgctgtatgctcacgggcctgacctttgtagagaatcggaccttcgacatgcaatggccaattgttttgaagcgttaataggagctgtttacttggagggaagcctggaggaagccaagcagttatttggacgcttgctctttaatgatccggacctgcgcgaagtctggctcaattatcctctccacccactccaactacaagagccaaatactgatcgacaacttattgaaacttctccggttctacaaaaacttactgagtttgaagaagcaattggagtaatttttactcatgttcgacttctggcaagggcattcacattgagaactgtgggatttaaccatctgaccctaggccacaatcagagaatggaattcctaggtgactccataatgcaactggtagccacagagtacttattcattcatttcccagatcatcatgaaggacacttaactttgttgcgaagctctttggtgaataatagaactcaggccaaggtagcggaggagctgggcatgcaggagtacgccataaccaacgacaagaccaagaggcctgtggcgcttcgcaccaagaccttggcggaccttttggaatcatttattgcagcgctgtacattgataaggatttggaatatgttcatactttcatgaatgtctgcttctttccacgattgaaagagttcattttgaatcaggattggaatgaccccaaatcccagcttcagcagtgttgcttgacacttaggacagaaggaaaagagccagacattcctctgtacaagactctgcagacagtgggcccatcccatgcccgaacctacactgtggctgtttatttcaagggagaaagaataggctgtgggaaaggaccaagtattcagcaagcggaaatgggagcagcaatggatgcgcttgaaaaatataattttccccagatggcccatcagaagcggttcatcgaacggaagtacagacaagagttaaaagaaatgaggtgggaaagagagcatcaagagagagagccagatgagactgaagacatcaagaaataaaggagggcatgcaagtgtggagtatttacttgctcagtaactgtgactgttgtctattgagacctagcctagttttcctgcagacaatgaacgaagtgtgctcattgaaataaaatacagagtcaaatcgctattgttgttttaatgatctgtttttagctggatggtctttattacaaagtattagatttttcttctatttaacggaaaacttgactttggtgaatgtgcattacttccttttattttgctctttaaataataaaattcaagaagcatattctatgtggaaaaaaaaaaa

SEQ ID NO: 59896 - DNA, 2412 bp, Homo sapiens
acgggggagccggggcgccggggggccgcggcgctgctagcgctgctgtgcgtggcctgcgcgctgcgcgccgggcgcgcccaatacgaacgctacagcttccgcagcttcccacgggacgagctgatgccgctcgagtcggcctaccggcacgcgctggacaagtacagcggcgagcactgggccgagagcgtgggctacctggagatcagcctgcggctgcaccgcttgctgcgcgacagcgaggccttctgccaccgcaactgcagcgccgcgccgcagcccgagcccgccgccggcctcgccagctatcccgagctgcgcctcttcgggggcctgctgcgccgcgcgcactgcctcaagcgctgcaagcagggcctgccagccttccgccagtcccagcccagccgcgaggtgctggcggacttccagcgccgcgagccctacaagttcctgcagttcgcttacttcaaggcaaataatctccccaaagccatcgccgctgctcacacctttctactgaagcatcctgatgacgaaatgatgaagaggaacatggcatattataagagcctgcctggtgccgaggactacattaaagacctggaaaccaagtcatatgaaagcctgttcatccgagcagtgcgggcatacaacggtgagaactggagaacatccatcacagacatggagctggcccttcccgacttcttcaaagccttttacgagtgtctcgcagcctgcgagggttccagggagatcaaggacttcaaggatttctacctttccatagcagatcattatgtagaagttctggaatgcaaaatacagtgtgaagagaacctcaccccagttataggaggctatccggttgagaaatttgtggctaccatgtatcattacttgcagtttgcctattataagttgaacgacctgaagaatgcagccccctgtgcagtcagctatctgctctttgatcagaatgacaaggtcatgcagcagaacctggtgtattaccagtaccacagggacacttggggcctctcggatgagcacttccagcccagacctgaagcagttcagttctttaatgtgaccacactccagaaggagctgtatgactttgctaaggaaaatataatggatgatgatgagggagaagttgtggaatatgtggatgacctcttggaactggaggagaccagctagcccacagcaaccaaagagacttcctcttggcgttcaggaaacacagattctttgtccttttcccaacagcccaggctgttgatacctcagagccttctctttactctccaaagtgaaagggaagcccccgtctctctaactgcatgtcatcaggggtgagcctgcctttcctatcttcacacctgccacctcatgttcacacctatctttctcaccttttttttgagatggagtctcgctctcttgcccaggctggagtgcaatggcacgttctcagctcactgcaacctccgcctcttgggttcaagcaattctgctgcatcagcctcccgagtacctgggattacaggcatgtgccaccacgcccggctaattttgtatttttagtagagacggggttttgccatgttggccaggctggtctcgaactcttgacttcagatgatccatctgccttggcctcccacagtgctgggattacaggcgtgagccaccatgcccggcctctttctcacctttacacctgtcttcttatcctcacatctgttttcacaccttcatccctgtcttcctcatgttcacacttgtcttccccatgttcatagctgcctttcttaccattttggtttgaagggcagtcttctctggcttgtttttttgtttttcccagaaaatcagtattattttttaaataagaaaaacattcctagaagatgataattgtgaaaacctcctttggcttatttgcttttccagattttagtctcctttctccccatccgggaaagatggtggaagacataggctaaatttctccagcctcacaatggtcttcacttggtctgacttgtaccaattctagcacccactgaaaaacaagttgagtagagagtgtagagtgcagaaatgtggcttttgccccactttgcatctccaaaattacaacggttggccgatcccatttgaggacaatgcttagttataagtctccgagttggaaaaggaagaaagccagagctgtctagtttcattcattctttcagtaaatatttattgagtacctactgtgtgctaggcattgacctgggaactagaactagagatacttcacagaataacagggaaagttccctgtgctcatggagcttacattctacaggaagaaagagatagccaacacataggaataaatatatgcagggt

SEQ ID NO: 59897 - DNA, 1318 bp, Homo sapiens
gtggttccaaagccctctcaggcaggcagacccagggcctccccgccacaccttgttcatggattttgtcgctggagccatcggaggcgtctgcggtgatgctgtgggctaccccctggacacggtgaaggtcaggatccagacggagccaaagtacacaggcatctggcactgcgttcgggatacgtatcaccgagagcgcgtgtggggcttctaccggggcctcttgctgcccgtgtgcacggtgtccctggtatcttccgaggtttttggcacctaccgccactgcctggcgcacatttgccggctccggttcggtaaccctgacgccaagcccaccaaggccgacatcacgctctcgggatgcgcctccggcctcgtccgcgtgttcctgacgtcgcccactgaggtggccaaagtccgcttgcagacgcagacacaggcgcagaagcagcagcggcggctttcggcctcggggccgttggctgtgccccccatgtgtcctgtgcccccagcctgcccagagcccaagtaccgcgggccactgcactgcctggccacggtagcccgtgaggaggggctgtgcggcctctacaagggcagctcggccctggtcttacgggacggccactcctttgccacctacttcctttcctacgcggtcctctgcgagtggctcagccccgctggccacagccggccagatgtcccgggcgtgctggtggccgggggctgtgcaggagtcctggcctgggctgtggccacccccatggacgtgatcaagtcgagactgcaggcagacgggcagggccagaggcgctaccggggtctcctgcactgtatggtgaccatcgttcgagaggagggaccccgggtccttttcaaggggctggtactcaattgctgccgcgccttccctgtcaacatggtggtcttcgtcgcctatgaggcagtgctgaggctcgcccggggtctgctcacatagccggtccccacgcccagcggcccacccaccagcagctgctggaggtcgtagtggctggaggaggcaaggggtagtgtggctgggttcgggaccccacagggccattgcccaggagaatgaggagcctccctgcagtgttgtcggccgaggcctgagctcgccctgcccagctactgacctcaggtcgaggggcccgccagccatcagccagggttggcctagggtggcaggagccagggaggagtgggcctctttgatgagagcgttgagttgcatggagtcggttgttcatcccagcctccccatggccctcgcctcccatgtctttgaagc

SEQ ID NO: 59898 - DNA, 1235 bp, Homo sapiens
gccttgagaggctctggctcttgcttcttaggcggcccgaggacgccatggccgagtgcccgacactcggggaggcagtcaccgaccacccggaccgcctgtgggcctgggagaagttcgtgtatttggacgagaagcagcacgcctggctgcccttaaccatcgagataaaggataggttacagttacgggtgctcttgcgtcgggaagacgtcgtcctggggaggcctatgacccccacccagataggcccaagcctgctgcctatcatgtggcagctctaccctgatggacgataccgatcctcagactccagtttctggcgcttagtgtaccacatcaagattgacggcgtggaggacatgcttctcgagctgctgccagatgactgatgtatggtcttggcagcacctgtctcctttcaccccagggcctgagcctggccagcctacaatggggatgttgtgtttctgttcaccttcgtttactatgcctgtgtcttctccaccacgctggggtctgggaggaatggacagacagaggatgagctctacccagggcctgcaggacctgcctgtagcccactctgctcgccttagcactaccactcctgccaaggagggattccatttggcagagcttcttccaggtgcccagctatacctgtgcctcggcttttctcagctggatgatggtcttcagcctctttctgtcccttctgtccctcacagcactagtatttcatgttgcacacccactcagctccgtgaacttgtgagaacacagccgattcacctgagcaggacctctgaaaccctggaccagtggtctcacatggtgctacgcctgcatgtaaacacgcctgcaaacgctgcctgccggtaaacacgcctgcaaacgctgcctgcccgtaaacacgcctgcaaacgctgcctgcccacacaggttcacgtgcagctcaaggaaaggcctgaaaggagcccttatctgtgctcaggactcagaagcctctgggtcagtggtccacatcccgggacgcagcaggaggccaggccggcgagccctgtggatgagccctcagaacccttggcttgcccacgtggaaaagggatagaggttgggtttccccccttttatagatggttcacgcacctgggtgtttacaaagttgtatgtggcatgaatactttttgtaatgattgattaaatgcaagatagtttatctaaaaaaaaaa

SEQ ID NO: 59899 - DNA, 1202 bp, Homo sapiens
  misc_feature (1)...(1202): n = a,t,c or g
cctttgagtcacctaggccgcctggggctgagaagacctaaccgaggggccagatggcttcgaccggcttagaactgctgggcatgaccctggctgtgctgggctggctggggaccctggtgtcctgcgccctgcccctgtggaaggtgaccgccttcatcggcaacagcatcgtggtggcccaggtggtgtgggagggcctgtggatgtcctgcgtggtgcaaagcacgggccagatgcagtgcaaggtgtacgactcactgctggctctgccgcaggacctgcaggccgcacgtgccctctgtgtcattgccctcctgctggccctgcttggcctcctggtggccatcacaggtgcccagtgtaccacgtgtgtggaggacgaaggtgccaaggcccgtatcgtgctcaccgcgggggtcatcctcctcctcgccggcatcctggtgctcatccctgtgtgctggacggcgcacgccatcatccaggacttctacaaccccctggtggctgaggccctcaagcgggagctgggggcctccctctacctgggctgggcggcggctgcactgcttatgctgggcggggggctcctctgctgcacgtgccccccgccccaggtcgagcggccccgcggacctcggctgggctactccatcccctcccgctcgggtgcatctggactggacaagagggactacgtgtgaggcggaggtttcccctgggagcccactgctccccactgcccggccctttcgaccttggcctgatgaccagatgccctgctccatcacaacctccttccccaggaaaacccactttccaaaagcccaagctacacctggctgcagggctgggtcagctggcctggctgagctcttctcagtggggtcccctttgatgttctcccccaagttgggcagcctagaggtgttgggaaccctggcctgcccccacctccccagtaattgtttccttccgttgcacaggacactggctggccttccttctcttctgagccctcccctgccccaggaaccctggcctcaccaaaacagcagcagctcgttggctccaaaaccagggagcagaccatgccctcccaaccctggagttgtcagggagggcctgcccatcacctccctctccccaacatccccaccctcgagttggaaataaagagcatttgtanaaaaaaaaaa

SEQ ID NO: 59900 - DNA, 897 bp, Homo sapiens
tttttttaccccattgtagaagaggaataatttatttctataaggattttaataatgttccctaagtaattagtaatcaagattttcttcaaattcaaattaacaaatatgtttgttaatctaaataatatacatatttatgtatttatatatgtatatattttaatctttctgtaattcagtctttaactgtgaacttttacatgatggaagcagtgaaggactcaatgtcatagtacattttgatagtatttgataggctttttcaggtcaattaatttagttgcttgcaaatataaatcaagcttgctccagttccacaaggactccaccacagtctttaggatggagaaaaatcactggttttccatgtgctcctattttgacctcttcacttagactgcggatcttcttttttttcaaatccatcacagctgcattaatattatccacctcgatgcagatgtgatgcattcctccagccttgtttttctgcagaaaacctgcaattggactgtcacgtcccaatggatgaagcagttccatcttggtatttcccaggttgacaaaaacaacagatactccatgttcaggaagagggaccgcttcacttacctgggcccccagaatattcttataaaatgctgcagccttttccaaatctggcactgctatggctacatggttgagtcgacccaggttccacacagaacctgtcacttgatccaagggctgtgatgtggaagaagctcttactgttggaatgggagcttgaagtctggaaaaaagccctttgagtgttcccaacagaaagctggtcacgcttggagttcggccgactagtagttgttgtttttacggaacgtgctctcctttctggtttcctcgtgccgaatt

SEQ ID NO: 59901 - DNA, 1593 bp, Homo sapiens
cttctgtgaaacatggattcatagtgctccctttgtgccattacagaatatctcacttatattgaagaattgacttctcttcacagaggtcttttcctactgaaaaacttccttaaaagagaaaaatattctaaatatacttctagaaatgacaatgtctttgttgattgacttagattcagtttattttaattacatatattgtttgatctaatgaagtgttacggcaggacagaagggtgaaattaaaaatctgaaagaaatctttaataatcttatatacttaaaaaagtagtatgcaaactgacagaagaagtattttatttatttataatatcattttgtaaacaatcacactgtgcacttttttattcaacaataagaacaatttttttctagggatttatagcaaaccctatataaagtgaatgacttaatacacgagtgaagatcgactagggtagaataatttctgaaaatgtcaaattacagcacttgatacaaagactgatgataactatctgtaccataaaaatttacatgccacgaaaacattaatttataattttaaatatacagtaaaacatagttataaaaagagtattacatttattataaaccagtgaattactcagagaaatatttattaaaacctactaaaaaccagtaaatattgcaactgaggtaaaaatttataagtaaacaaaactatcatttataaggaccaagaagtaaacaaaagggcagacattttctgatgactgtgtctactccttgatattttgaagcagcttcaacaaatgtgactcaataacctgttgaacacttctatagcctagggctacagctagatccatagaattatatccagagtcagtttcaattgttggatcagccccactttctaagagcatctttacacatttcacatgatttccatgtacagcataaagcagaggtgttcctccattccaatcatattcatttacatcaactccacaatcaagcagcattttgacaatatctgtgtagcctttactacaggccaacgacagtgcactttctcgaccttttcctaaaagttggggatcagcaccctggtatgggaagtagagataaaagacttctcaattagtttaaacaagaatattgttattcctgtcaacaataattatagttcaacactaggcctggtaatgttctgggcttaataaagaaataatggaaacttttactcatggatgcttttattgagattgcctggatgccttccttcctccgtcctgtatcaatcctaattatcctttcactctggagtcaagtcacagctcctccatgaagccttctccttcaaagctgacagtacttctgttcccgtgggatgtagaggggtctgggcgttaaattatttctcactgttgcatgtatgattagtcttgccttcccaactagatccaagttccacaagaatatgaaaagcattaaactttttttggtagcctctaccattatatctagctggctggatatataaaaactctactaaagacttaacttaagtaactatacatatacattttctgaggcattttc

SEQ ID NO: 59902 - DNA, 647 bp, Homo sapiens
tttcgttggcgctttatagctacacagtgctatgccagagccagcgaagtctgctcccgccccgaaaaagggctccaagaaggcggtgactaaggcgcaaaaaaaagacggcaagaagcgcaagcgcagccgcaaggagagctattccatctatgtgtacaaggttctgaagcaggtccaccctgacaccggcatttcgtccaaggccatgggcatcatgaattcgtttgtgaacgacattttcgagcgcatcgcaggtggagtggctgaaacttctcagcaggcgcatctacactagtgacctgaggagagaaaccctaaccccacaatggctgcatcttctctgaagacgagactgatgctcatctttgaaatgaagggcagtgtgtgcatttctccatgaaggtatccagaaacagccatgccagagctgctgtggggtggctgaactgctattccttttctagggtgggatccccactctttgtaaggaaggatattggggtcctgacactgggaactcatcttgtcagtgaggccttctttaactgctgtcttgtaattgagccaccccatctgtgtttcctgttccaatttaggacttttttttttttatcataatataaagatctgaaatgctaaaaaaa

SEQ ID NO: 59903 - DNA, 1515 bp, Homo sapiens
agattaatttagataacctagtggttaatatgctcatgaacatcagcaacaaccgtgcattccttggcagatgggatgcgatggaaaccaaaggtttccttaaggcaagcacttcacaactagttttctgtcaattcttgcgtaaatcacattctgtattcatacaaaaactttgtttttctctgacaaactgtacacatagaaacaaatttccaaatggacaggaacttaaatttgtggagatgccccatgtcttgtgagacttaaaaaaaagaaaaagatcccagcttttatcttcacaaaacaacatgggagttggggcaatgagggtggacaggacagggccagccaggctggtagctggcagcagtctcttcatcttgaagacctcattgagggttcctgggattcaggtgcccagaaaagagttcagggctacaatggtgcaggcttccttttgtttctcttggtgagtccacaagaagttcttacatactgtccagagaggcctcagggtactcagttccagcttctaccgaccccttccaccaccccgtgaagctcctcgcctcggcgggccagagttcatgttactccctctaccccagttactgccactccggccccctcgagaaggggtgccactgcctggagggcccccaaaaggttcatctctgtggtatccatcgtggtgctctccgtctaaggagctggaacgcccagatttgggcactctctgagcaggtcctgggccccctcggcctttgcctcctcggtcttcagaagggcctcctggggcctccatctctctgtgctcagaagtgcctgggccatcatgccaggggcgctttcggggaggtagggatgccatgtccatgccttggagagaagaggagcgttctctgctggctggggaatgaccgtcgtgagggggatgatcagggcggggagtatcacgaaaatgttcatgacctggcccaggctctctgtttccatcccaggaatctggcttccgccctccttcaaagcgagggaactcgtcaggagtgggaagtaaacccttccttcctcctcgtggggtaccccgacctcgacctctgagatctcgtcctcgggccggcttcctcagaagcatcaaaattctcctctggaccaaagtccttcaggaccaggaaaaccatcccttccctctggggggagcacggccctcatgcctcggcggggctcctcttctgaaactgtaaagagaaaacagcagaatgtccatctcagagaacaccttgccactctaagttcatgtttcaaagaagcatatgatatgagaaagcatgatacaatgttaattgggaggaaaacaaaataaaactatatatttttgaaaggatacattatataatcctattaatactatcagaggcaaaaacagaccagaaggaaacacaccagagtgtggagttactttaagcttcttttaggcttttaggtatatacaagtattacttcatttcattcatt

SEQ ID NO: 59904 - DNA, 3773 bp, Homo sapiens
tttcgtggccgcgaggcaggggtgagaccggcggccacccgggagccctccgcacccgcaccatgcagaagagcgtgcgctacaacgaggggcacgccctgtacctggcctttctggcgcgcaaggagggcaccaagcgcggcttcctgagtaagaagacggccgaggcgagccgctggcacgagaagtggttcgccctctaccagaatgtgctcttctacttcgagggcgagcagagctgccgcccggcgggcatgtacctcctggagggctgcagctgcgaacgaacgcccgcgccacccagggccggcgccgggcagggaggcgtccgagacgcgctggacaagcagtattactttactgttctttttggccatgaaggtcagaagccactggagctgcgctgtgaggaggagcaggatggtaaagagtggatggaggccattcaccaagccagttatgcagacattttgattgagagggaagtattaatgcagaagtacattcatctagttcagatcgtagagacagaaaaaattgcagctaaccaactccgacatcaacttgaagatcaagacacagaaatcgaaaggcttaaatcagagattattgctcttaataaaaccaaagaacgaatgcgaccttaccaaagcaaccaagaagacgaagatccagacatcaagaagattaaaaaggttcagagcttcatgcgaggatggttgtgcagaaggaaatggaagaccatcgtgcaggattacatttgttctcctcatgctgaaagtatgaggaagagaaaccagattgtgttcaccatggtggaggcagagtcagagtacgttcaccagctctacatcctggtcaatggctttctccggcccctgcgtatggccgccagctccaagaagccccccatcagccacgacgacgtcagcagtatttttcttaacagtgaaacaatcatgtttcttcatgaaatatttcatcaaggactaaaggcaaggatagcaaactggcccactttaattttagctgatctgtttgatattttgctccccatgctgaacatttatcaagaatttgtgcgtaatcaccagtacagcctgcaagttctcgccaattgtaagcaaaacagagattttgacaaactcttaaaacagtatgaagccaatccagcctgtgaggggaggatgctggagacattcttgacctatcccatgtttcagatccccagatatatcatcacactccatgagctccttgctcacacaccccatgagcatgtggaaaggaaaagcctggagtttgccaaatcaaagctagaggaactatccagagtaatgcacgatgaagtcagcgacactgaaaacataaggaaaaaccttgccatcgaaagaatgatcgtggagggctgtgacatcttgctggacaccagccaaacgttcatccgccaaggttctcttattcaagtaccttccgttgagagggggaaacttagtaaagttcgcctgggttcgttgtctttgaaaaaggaaggagagagacaatgcttcttatttacaaaacactttttaatatgtacaagaagttcaggagggaagcttcatctgctcaagacaggtggggttctgtctctaatagactgcacattgattgaggagccagatgcaagcgatgatgactctaaaggttctgggcaagtgtttgggcacctggattttaaaatagtggtggagcctcctgaccgtgccgccttcactgttgtcttgttagcaccctcacgccaggagaaagctgcctggatgagtgacatcagtcagtgtgtggacaatatacgatgtaatggtttaatgactatagtgtttgaagagaattccaaagtcactgtgccacatatgattaagtctgatgcccgtcttcataaagacgacactgacatttgcttcagtaaaacactcaactcctgcaaagtgccccagatccgttatgccagcgtggagcgcctcttggaacgactgacagacttgcggtttcttagtattgatttcctcaacacctttctgcacacctatcgtattttcactactgccgctgtggtgctggggaaactctccgacatatacaagaggcctttcacctccatccctgtcaggtcattggaattgttttttgctaccagccagaacaacagaggtgaacatttggtggatggcaaatccccacgtctgtgtcgcaaattctcttccccgccaccactggctgtgtccagaacatcttccccagtgagggccagaaagctgtctttgacttctcccttgaactcaaagataggagcattggacctgacaacttccagcagtcccaccaccaccacccagagtcccgctgcgtctccaccaccacacactggtcagataccactggatctcagcagaggcctctcttctccagagcaaagcccgggaacggtagaagagaatgtcgataacccacgcgtggatctgtgtaacaagctaaaacgaagcattcaaaaagcagtcctagagtctgcaccagcggaccgagcaggagtggaaagctcccctgcagcggacaccacagaactttcaccttgcagatccccctcaactcctcggcacctccgctatcgacagcctggaggacagacggcggacaatgcccactgctctgtttcaccggcttctgcttttgcaatagccacagctgcagcaggacatgggagtccaccaggctttaacaacaccgagagaacatgtgataaagagtttattatacggagaacggctaccaatcgagttctgaacgtcctccgtcactgggtctcaaagcacgcacaggatttcgaactcaacaatgaactaaagatgaatgtcctaaatttgctagaagaagttttgcgagacccagaccttcttccccaagaaaggaaagccgccgcgaatatcctcatggccctttcacaagatgaccaagatgacatccacctaaaattagaggatataattcaaatgactgactgcatgaaggccgaatgctttgagtccttgtcggccatggagctggcagaacagatcaccctcctggaccatgtcattttcagaagcattccctacgaggagtttcttgggcaggggtggatgaagctggataaaaacgaaagaactccttacattatgaaaaccagccaacacttcaatgacatgagtaacctggtggcctcccagataatgaactatgctgatgtcagctcccgtgccaacgccatcgagaaatgggtggcagtggcggacatctgccgatgcctgcacaactacaacggcgtgctggagatcacctcggccttaaacagaagtgccatctacaggctgaagaaaacctgggccaaggtctctaagcagacaaaagctctaatggacaaacttcaaaagactgtttcctctgaaggaagatttaaaaatcttagagaaacccttaaaaattgtaaccctcctgcagttccttatcttgggatgtacttgacagacctggcatttattgaagaaggaacaccaaactttactgaggaaggccttgtcaatttctccaaaatgagaatgatatcacacatcatcagagagatacgccagttccagcagacttcctacagaatagatcatcagccaaaggtcgcacagtacttgcttgacaaagaccttatcatagatgaagatacgctatatgagctgtcactcaaaattgaacctcgactccctgct

SEQ ID NO: 59905 - DNA, 2181 bp, Homo sapiens
cccctgggttcgaacacggcacccgcactgcgcgtcatggtgcaggcctggtatatggacgacgccccgggcgacccgcggcaaccccaccgccccgaccccggccgcccagtgggcctggagcagctgcggcggctcggggtgctctactggaagctggatgctgacaaatatgagaatgatccagaattagaaaagatccgaagagagaggaactactcctggatggacatcataaccatatgcaaagataaactaccaaattatgaagaaaagattaagatgttctacgaggagcatttgcacttggacgatgagatccgctacatcctggatggcagtgggtacttcgatgtgagggacaaggaggaccagtggatccggatcttcatggagaagggagacatggtgacgctccccgcggggatctatcaccgcttcacggtggacgagaagaactacacgaaggccatgcggctgtttgtgggagaaccggtgtggacagcgtacaaccggcccgctgaccattttgaagcccgcgggcagtacgtgaaatttctggcacagaccgcctagcagtgctgcctgggaactaacacgtgcctcgtaaaggtccccaatgtaatgactgagcagaaaatcaatcactttctctttgcttttagaggatagccttgaggctagattatctttcctttgtaagattatttgatcagaatattttgtaatgaaaggatctagaaagcaacttggaagtgtaaagagtcaccttcattttctgtaactcaatcaagactggtgggtccatggccctgtgttagttcatgcattcagttgagtcccaaatgaaagtttcatctcccgaaatgcagttccttagatgcccatctggacgtgatgccgcgcctgccgtgtaagaaggtgcaatcctagataacacagctagccagatagaagacacttttttctccaaaatgatgccttggggtggggagtggtagggggaagagctcccaccctaaggggcacacactgagttgcttatgccacttccttgttcaaaataaagtaactgccttaatcttatactcatggcttggagttaccttatattcaggtatatgtgatattttgcctggtttgttaaaattgccccatttagattccttctataattgttcttatagataagtaatttatatatgagctgtgttagtattttttcagtgtgagatctctggattctttcacaataaagctgttgaattttaacaggagtattagtacataaattttctactcaacaattccgagataggattatgcctagtttgtcatatcacagaaaaactccaagttaacttcatgttttggaagggcaggtcgtttttaaagtatttctttttttaactggatgaaaaatcttcatgttaggattaattttcttaatcacctccacactgtacagaggaaactcaagccttaaatgtttaagtaaactctgtctcagttttaggattaaaatacccaccggtggtgtgatgatgccatataccgcagggcttgcttctgtcaagtgtgactctatctcagtaattaaaataagtgctgatctactgattttttttaatggattcatttctaaatgggcattataaatagagcttgttcatttttaagaacgaaacattcatatgataaactatcgctttaaattgcctttcttgcttcatataactttttcctgtcaggatccttagtgtttgaaactcctcgtgcggggctggcctcctgcggactctagtttcgcctccttgatgtggcgcctgggatttcttcacttcagagctgtatttttacaggcaagagtaagttcctgggcacagtggctcatgcctgtaatctcagctactcaggaggctaaggtgggaggattcttagagcctgggaggtcgaggctgcagtgagctgtgattgtggccactgcactccagcctgggtgacagagcgagactctgtctcaaaaaagaagaaagagtaagagctgaggcatataatagaattctgctaaagcacttaaggtgaaatcacattttcttttcccaggatgttgctcacatctttcgtttttattgaggtgtcatttatatacaataaaatgtactcattttcagtgttaaa

SEQ ID NO: 59906 - DNA, 3967 bp, Homo sapiens
gtaattcccgggtcgacgatttcgtgacagcagtgaatctgtcagtgaagatgatgaggaagaagagaagggtggcacccatgtcaatgatgtcttaaaccagcgtgacgcccttgggcgggtccttgtcaacctaaaccaccctccagaggaggaaaatgtcttccttgccccacagttggcacgggctgtgaaacctcatcagattggcgggatccggttcctttacgataacctagtggagtctctggagaggtttaagaccagcagtggctttggctgtattctggcccacagcatgggtctggggaaaactttgcaagtgatctctttcatcgacgtcctcttccgccacacgccagccaaaacagtccttgccattgtgccggttaatactcttcagaattggctggcagagttcaacatgtggcttccacctcctgaagccctcccggctgacaacaagcctgaagaagtccagcctcggttctttaaagttcacatcttgaatgatgagcacaagacgatggcatctcgtgctaaagtgatggctgattgggtgtcagagggtggcgtgctgctgatggggtacgagatgtacagactcctcactctgaagaaatcatttgccacaggtagaccgaagaaaaccaagaagcgttctcacccagtcatcattgatctagatgaggaagatcggcagcaggagtttcggagagagtttgagaaggctttatgccgccctggccctgatgtagtaatctgtgatgagggacaccgcatcaaaaactgccaggccagcacctcacaggctctgaagaatatccgctctcgccgccgggtggtgctgactgggtaccctctgcaaaacaacctcattgagtactggtgcatggtggactttgtgcgcccagacttccttggcacccggcaggagttcagcaacatgtttgaacgccctatcctgaatgggcaatgtattgacagcacacctcaggacgtccgcctcatgcggtaccggagccatgtcctgcacagtcttctggagggctttgtgcagaggagaggccacactgtgctgaagattcatctccctgccaaggaagaaaatgtgatccttgtgcggctctccaagatccagcgagatttgtatacacagttcatggatcgcttccgggactgtggtagcagcggttggctggggctgaacccccttaaggcattctgtgtgtgttgcaagatctggaatcaccctgatgtgctgtatgaagcccttcagaaggagagcttggccaatgagcaggacctagacgtggaagaacttggctctgcagggaccagtgcccgctgtccaccacagggaacaaaaggcaagggagaggatagcaccttggcttcctcgatgggagaggcaaccaatagcaagttcctacagggcgttggcttcaaccctttccaggagcgaggcaacaacattgtcacatatgaatgggccaaggaccttctgactaattaccagactggagtcctagaaaactctcccaagatggtactgcttttccacctgattgaggaaagtgtgaagcttggggacaagatccttgtgtttagccagagtctttccaccttggctctcatcgaggaattccttggaaaacgagaagtaccctgtccacctggtaccgaggggcaaggagcacagaagtgggttcgaaacatcagctacttccggctagatggtagcacccctgcctttgagagggagcggcttattaatcagttcaatgatcccagcaacctcaccacctggctgttccttctctctacaagggccggatgcttgggtgtgaatctgattggtgccaaccgagtggtggtgtttgatgcttcctggaacccttgccatgatgcccaggcagtatgtcgggtataccgttatggccagaaaaagccctgttacatctatcgccttgtggctgattacactctagaaaagaagatctatgaccgtcagatttccaagcagggcatgtcagatcgggtggtggatgatctaaatccaatgctgaacttcacacggaaagaggtggaaaacctactgcactttgttgagaaggagccagctccccaagtttccttgaacgtaaaggggatcaaggagtcagtcctgcaactggcctgtctgaagtaccctcacctcatcaccaaggagcctttcgagcatgagtcattgctcttgaaccgaaaggatcacaagctaaccaaggctgagaaaaaagcagcaaagaaaagctatgaggaagacaaacgcacatcagtcccctatacccgcccatcgtatgcgcagtattaccctgccagcgatcagagcctgaccagcatccccgccttcagccagagaaactggcagccaactttgaagggtgatgaaaagcctgtggccagtgttcgtcctgtgcagtccacccccatccccatgatgccccggcatgtcccattgggaggaagtgtaagctctgcctccagcacaaatccatccatgaactttcccatcaactacttgcagcgtgcaggagtccttgtgcagaaggtggtcaccacgacagatattgttattcctggactcaacagctccacagatgtacaggcaagaattaatgctggtgagagcatccacatcatccgtgggacaaaagggacgtacatccgtaccagtgatggacggatctttgctgtccgggcaactggcaaaccaaaggttcctgaagatggtcggatggctgcctcaggttcccagggaccttcttgcgagtccacaagcaacggcagacacagtgcctcatcacccaaagcccccgaccctgaggggctggccaggcccgtctctcctgacagcccagagatcatcagtgagcttcagcagtatgcagatgtggctgctgcccgggaatcccgtcagagctccccaagcaccaatgccgccctgcctggccccccggcccaacttatggacagcagtgctgttcccgggacagctctcggaactgagcctcgactagggggtcattgcctcaatagttccctcttggtgactggccagccctgtggtgacaggcacccagtgctggacttaaggggccacaagcgaaagttggccacaccacctgctgcccaggagtcatcccgccggcggtccaggaagggtcatctgccagcccccgtgcagccgtatgaacacgggtatccagtctctggcgggtttgccatgccacccgtctccttaaaccataacctcaccacccccttcacctcccaggctggggagaactccctgtttatgggcagtaccccctcctactaccagctgtccaatttgctggcagatgcccgcctggtgtttccagtgactactgaccctctggtgccagcaggccccgtcagttcctcttccacggctacctcagtcactgccagcaacccctccttcatgctcaacccttctgtgccagggatactacccagctattcactcccattctcacagccactcctgtccgagccgaggatgtttgcgccttttccttcccctgtcttgcccagcaacctttcgcggggcatgtctatctatccaggctacatgtccccacatgcaggctacccagctggtggcctcctacggtcccaggtgcctccatttgactctcatgaggttgccgaggttgggttcagctccaatgatgatgaggataaagacgatgatgtgatagaggtcactgggaaatagctagggagcccctccccacctcacttggggcccccagcaggttgcccaccaagctggaaggcagcgatttagaccttttgagaataggacacttggcaggagggaaaaggaagaggacaaaggagggtggttggccaaagtggcagagctctgttgctgtttaacaaaagaggcaaaaaaaaa

SEQ ID NO: 59907 - DNA, 1856 bp, Homo sapiens
ttttttttttttggcagctcccggcatttattgattgcagcccccacagagcacactgcccttcccaggtggggtgaagcccagcgaccagggaggcagaggatgcagcatccgccccgtcggactccttgtcggggagaaggccctaaggaggaaccgcggcccgcctgggccattcccccagggagccaagcgggggggcccaggtgcccgagggacgcaggcacaatccctgaagacagagaccgcctgctggtgagtggagaggctttggcaaaactaactgttaaagccactgcagggcaggcagcggtgcgcgggacctcggtggccctcgaccctcacccacaatggctccagaacctctctgggccactccctcccaggcactcgcttgtggtctgcgttgcttgttcatcccacccagctgcggggtctcgcggggagttgcagctgcccgaggacatggaaggtctggttgctctcagcagacacgaagtgcagagctagcacttgggtgagcaacagccaggctgcacccacactctgccacccaagtcctcgatggaaagtgctggaagatgctgctttgggcatcgggggcaggaggcagggataatacccctcccctggcccaggagaggggagaaatcagcctctggtagcccctgttcccctgaggagctgccagcgggagaggggcaaggccacgcagtgcccagccgggagagcctggtagccagagcgggggtggtgcagctacagctgagaggggacgaggccaggaggagctcagccagcaggtggggggacagcaggggcctgctgcggaggatgggtggccacggccagggaggtcgtggccccaggagcaggtgctgggcttgggactctttggaagaacctagcgtgtctggcctggcagcccagccattcccacggctggtcaggatggcactttgatgccaaagtttttgcgtagctgttccagaaacacaaaagtgagcacggtgtgggggatgaggcggatgccagctgggacgaggcccttgtaaaaggccagaggcccgagcttcgctgtctccacggcgcagtggaaaacgccctgatactcccccttggagttcatcaggcgagtcttcagcacatccaggggctggcacaggaacgtggcacatccacctgcaataaagctggcgacaaagtgagtgaagatgttgtcagagaggtacccggtgctaaggaccagctgcttggcctggtcgtagcaggacagctggcccacagtgactaaggcccctcggctggatgccatggttgcacccgagaacagtctcctgagaccctcttcacgagctacgcggtacaggccatccagcgcatgggcgtagttgcgccgctgaccctggggcagcttcacgtcgttctgcatcctgacgttgaccaagtctgcgggcgtccccacgaagcctccagctaaaccgctgacggagcccagcaacaccttctcgtggaaggggagaggcccctggctgcccttggccacacggtcccgcacagtctcgtagatggcgaaccgagtcagggagtaggtcatctgtctgcacagcgaggcgctcaggccgctgtagagtgccaggatgccgtcggtacgcaccacccgcagcgccatgcccgtcatgcgcagcttcacctcctgctgcgtctgcagatgcaccttgagcaggtccagcgggtgcgtgcagcaggcggccccgcaggaggccagccccccgaagtaccagcgcgacacgcgcgcctcggctgccatggcccaggagagcccaatcccggcccgaccacaacccgacacgaaa

SEQ ID NO: 59908 - DNA, 715 bp, Homo sapiens
ggaattcccgggtcgacgatttcgtagcgaggcctctttccccctcgctcccactcagaccacccccaagcctggactggaagtgtgttgagcccctgggtcaggctggcgagccagctcggccctgcccacccaggggtttccgagatcacccctggtgaggcggcgtgccagtcccttgctttcttacttgttctgcagagcggggagctgaggctgcatgagggaagactcccgtaccccagcacggtggagggtgggatggggtcacgcctgtgcgacccaggaggtggccagcagaaggaaacagtagtgtccaccatggtctgcgtctccccaccacggattgtcttggctccggatttgagacatggcagggccagatgaggacaacttgatgacagtttacagagatggaggcagggtgccaggaagccacgggggagcccccagggcactcagcagtccaggcagggctgggcgtcctggcaaggagcagggaccttctgcccaggggtgtggccagcctgtgggtgctgtgtgcaggaccccaggaaccaaggccgcagtctcttccctcgctccagcatcctcccaaggccacccttggctgcactcagccagagagctggggcacagggaccccacaggtttccctggaggctgtcaggggctccggtgggggcggggggtgagcccgctgggttcactgcat

SEQ ID NO: 59909 - DNA, 1051 bp, Homo sapiens
ttttttttcaggcccagcccttggggcccctttattgaaacaactcacagcacagtatttgagacagacagtgttggccggcggaaccccaggaggctgagaagtcgaggttgcggcatccctcactgccctcctgggggaggcatcctccaagcagacctgagcggccccgggctggggcgggcgatccacacacagaggcgataagagcacttggaatcagggcagccatgcagcactgccctaggcggggatcccccaaagtctgacagtttgggcatcagtggggtggcaggtgccccctcagctgcctttatgagcgcgctcttccacgtaaagctgcatctttaaaatgtccgacgtcatggtttttagtggtatcagccgggggtcatgcatgtggacatcctgctcatccgccaggatccaggggaaatccttgatgacctggatcttctccatgttgcgagtggcggcttctctcgtgtgcaccaggactgtgaaggtacagcctggggggttgtggtccaggacggcatcgcacacgctgatcttcaggatgaaggcccggagcagctgctccacatgagacaacagcgagtctgagctgatggacagcagtggaggctgggtgatctcaaagacgaatttctccactgggcggtgctctttatccaaaatcaccaccaccactttctccacatcattcttctccaggagtggcttgacgcagtgcagcgtgtcctggatatactgattcagctccgggtggcaggacatctggaccggcacgttgtacttcttgcgtttctggaagatgcccacggggtagacctcgcgcacgtagaggatgagatgcacagccacctccaggaactcgcagagcacatcggccaccacttggccaaagttgaggtcttgtcgtgtgagcgtggtcatccttcccgctaccggctctgcgctcggttcccgcccgagatcgggcccggccccgccgcggggagccaccgaccggaccgatcgcgcctcccgctcaacccggggcacgaaa

SEQ ID NO: 59910 - DNA, 714 bp, Homo sapiens
ggtgtgtattcccccctcagtgcggggggaattgtgaaagcgttgataagagtggcactctccagtattatacttctaagggcactctttctgtttcccctcacccaggtgagcttcaggtagtggcgccatctccccctcctccttctcctccttcccctccttctcctcttcctcctcctgtggctccgccctgacctcctctgacattttctgtggtgactcctgggggcctctggcttcctcctgcgggggtgaaggtctgggtgcagtgtcggggccctgggagctggctggaggtgcactgggtgcagaagtagtgggggtggccggcagagggtttccggagggctccaggtgactcctgtactgcagccagttgcggccgaaccgttcccggaagctgctcatgagctccagctccgggtgctgctgcacgaaccatccagccggagaggggttcagagttcggggctccgggtccgtatcactgggttcagagatgcttgcccgcctcacacggactcggctctgaggttggtggagggagaagttctgtgaaagccaagcctccagccctgccatccacggctggccatccaaccttgaccttatgaagcaggggctgggtcacaacaccccctgaggagaggctgtcactcaggtcagggccacctgaggtttcaggagtactccccactggccagggcaaag

SEQ ID NO: 59911 - DNA, 712 bp, Homo sapiens
aatacaggtggcattgaggtgaaataatctcctggcaatgttggagactagattgctgaaagagaagtggatcttggcattttcacctatgtcagcatctgtggcatggagctgtgtcactgaagtgcctacaggagcattttctggtatactgacttcaatctctgtctccttaaagactgggtggttgtcatttgtatcagtaacactcacttgcaaaatagcagtactggatctttgaggaaagccaccatcttcaacctttactttcatcacgtaggtatccttctcttccctatctaactccttttgaacaatcagttgtggcatcttgtctcctcctggtgtttcaatgacatcgaggccaaaaatgttttgactcttaattagttcgtagttttgaactccgtttattcctacgtcaggatcaacagccgctgggagagtatatttagagtttatagccgagttctctggaattgatatgttgataactgttgctgggaacaatggtgcattatcatttatatcttctatcagaaaacgtatcttaaccagtctaaatatttcatccggcaaaatggcaacctccacttcataaaagcaatgctcatcccttgggataccagcacataatttctcacgatcaatgcgagcgccagtagtgaagatctcaccagtatcctcttcaattcgaatcagtggcacatct

SEQ ID NO: 59912 - DNA, 733 bp, Homo sapiens
gggcgactcccaggcgcggcggtacctcacggtggtgagggtcacagggatgcagcactcccagtagaccaggagctccgggaggcagggccggccccacgtcctctgcgcaccaccctgagttggatcctctgtgcgccacccctgagttggatccagggctagctgctgttgacctccccactcccacgctgccctcctgcctgcagccatgacgcccctgctcaccctgatcctggtggtcctcatgggcttacctctggcccaggccttggactgccacgtgtgtgcctacaacggagacaactgcttcaaccccatgcgctgcccggctatggttgcctactgcatgaccacgcgcacctactacacccccaccaggatgaaggtcagtaagtcctgcgtgccccgctgcttcgagactgtgtatgatggctactccaagcacgcgtccaccacctcctgctgccagtacgacctctgcaacggcaccggccttgccaccccggccaccctggccctggcccccatcctcctggccaccctttggggtctcctctaaagcccccgaggcagacccactcaagaacaaagctctcgagacacaatgttacaccgtgggactcagctgaccctgcctcaccctccacactccttgcgacctcatgagccatgcgcagggtggttgttctgttcaaataaagggacgtgttttccacactgaaaaaaaaaa

SEQ ID NO: 59913 - DNA, 1705 bp, Homo sapiens
  misc_feature (1)...(1705): n = a,t,c or g
ttgcccaacccgaggctcgggaggtggctggggagtgaattttttggaaggcgactttaaaggcgccgggactgagcgaagggcgtttgggtactgccgtcgccgccgcccaggccggggaggggtgcgttagtgtcaggaagcgggctgcgccgaggtcgtagcggaaccagctggcgaccccgcagaatgaaccacaagagcaagaagcgcatccgcgaggccaagcggagtgcgcggccggagctcaaggactcgctggattggacccggcacaactactacgagagcttctcgctgagcccggcggccgtggcggataacgtggaaagggcagatgctttacagctgtctgtggaagaatttgtggagcggtatgaaagaccttacaagcccgtggttttgttgaatgcgcaagagggctggtctgcgcaggagaaatggactctggagcgcctaaaaaggaaatatcggaaccagaagttcaagtgtggtgaggataacgatggctactcagtgaagatgaagatgaaatactacatcgagtacatggagagcactcgagatgatagtcccctttacatctttgacagcagctatggtgaacaccctaaaagaaggaaacttttggaagactacaaggtgccaaagtttttcactgatgaccttttccagtatgctggggagaagcgcaggcccccttacaggtggtttgtgatggggccaccacgctccggaactgggattcacatcgaccctctgggaaccagtgcctggaatgccttagttcagggccacaagcgctggtgcctgtttcctaccagcactcccagggaactcatcaaagtgacccgagacgaaggagggaaccagcaagacgaagctattacctggtttaatgttatttatccccggacacagcttccaacctggccacctgaattcaaacccctggaaatcttacaaaaaccaggagagactgtctttgtaccaggaggctggtggcatgttgtcctcaatctcgacactactatcgccatcacccaaaattttgccagcagcaccaacttccctgtggtatggcacaagacggtaagagggagaccaaagttatcaaggaaatggtataggattttgaagcaagagcaccccgagttggcagtcctcgcagactcggttgaccttcaggagtccacagggatagcttccgacagctccagcgactcttccagctcctccagctccagttcgtcagactccgactcagagtgcgagtctggatccgagggcgatgggacagtgcaccgcaggaagaagaggaggacgtgcagcatggtgggaaacggggacaccacctcccaggacgactgtgtcagcaaagagcgcagctcctccaggtgacccagcaaggctgttgtctgtatggaaggacacgctcgcggcaagggcagggcctggggagggtggcctgtcccagtcctgcagacaaggggaggcctgacagagcccaagaatgaggacaccctcggcacgggaacccattcacttagcgtttgctccagtagctttccctctgctaccaatgcagataaacgcggcgtttttttactcagagncaagagaatgtgaataagtgccaaagaaaatcctttacattatttaataaaaattgaatccattttctatcttggaaaaaaaaaaaaaa

SEQ ID NO: 59914 - DNA, 1605 bp, Homo sapiens
atgtggaagcgctcgcgcaggagaccccgggtgacggggcccggcgccgctaactggagcgaaccccagcgtccgccgacatggcctggaccaagtaccagctgttcctggccgggctcatgcttgttaccggctccatcaacacgctctcggcaaaatgggcggacaatttcatggccgagggctgtggagggagcaaggagcacagcttccagcatcccttcctccaggcagtgggcatgttcctgggagaattctcctgcctggctgccttctacctcctccgatgcagagctgcagggcaatcagactccagcgtagacccccagcagcccttcaaccctcttcttttcctgcccccagcgctctgtgacatgacagggaccagcctcatgtatgtggctctgaacatgaccagtgcctccagcttccagatgctgcggggtgcagtgatcatattcactggcctgttctcggtggccttcctgggccggaggctggtgctgagccagtggctgggcatcctagccaccatcgcggggctggtggtcgtgggcctggctgacctcctgagcaagcacgacagtcagcacaagctcagcgaagtgatcacaggggacctgttgatcatcatggcccagatcatcgttgccatccagatggtgctagaggagaagttcgtctacaaacacaatgtgcacccactgcgggcagttggcactgagggcctctttggctttgtgatcctctccctgctgctggtgcccatgtactacatccccgccggctccttcagcggaaaccctcgtgggacactggaggatgcattggacgccttctgccaggtgggccagcagccgctcattgccgtggcactgctgggcaacatcagcagcattgccttcttcaacttcgcaggcatcagcgtcaccaaggaactgagcgccaccacccgcatggtgttggacagcttgcgcaccgttgtcatctgggcactgagcctggcactgggctgggaggccttccatgcactgcagatccttggcttcctcatactccttataggcactgccctctacaatgggctacaccgtccgctgctgggccgcctgtccaggggccggcccctggcagaggagagcgagcaggagagactgctgggtggcacccgcactcccatcaatgatgccagctgaggttccctggaggcttctactgccacccgggtgctccttctccctgagactgaggccacacaggctggtgggccccgaatgccctatccccaaggcctcaccctgtcccctccctgcagaacccccagggcagctgctgccacagaagataacaacacccaagtcctctttttctcactaccacctgcagggtggtgttacccagcccccacaagcctgagtgcagtggcagacctcagctctctggacccctcctacagcactagagctaaatcatgaagttgaattgtaggaatttaccaccgtagtgtatctgaatcataaactagattatcatagttatctagtttatgagtcataagctagatttgattcttcaaagaagaaaagtcagtgagcaaatttaaaa

SEQ ID NO: 59915 - DNA, 1633 bp, Homo sapiens
ttttttttttttgctggtcaaggcagagtttactgaactgttagtttcctcctgcacacaccgggcatgacaccttcaagtctgtccagcagtgggtccagaaagtaccctgtgtgccttggacgcagaggctacagttctcactgtgtggcatgggagccttcacagtgccctcgggagctgcccctggtctttgtctgcaaaggtgactgggaggatagaaaaagcagcgggctggcattgtttcgggggtggggtggtgggcagtgtgcctgggcagtcgcagggaggctgacttggttctgggctgcaagatctgtgcataggaggcccctgggtttcttccaggctcttcactgaaatgcaaagagtctgaagaggaggcagtgggcatagtgcccctgaatctggttaggtggagtttactgcatttaaaggcccatggtgagtggtgagttctgggatttgggagattcccagaggcctgacaggcctgtcccaccctcctggacttcactacagggagctgaagtcagggcccaggcaggggagcaggccacccaggtagggaacaaatgcctgcccatgcagggcagagggcagaaggcagggctgtcagggccttggttggtctgggcactggggcaggtggaggggaggcaggggtgaaggagaggcaggggtggaggaggtggggctctcctgggcgggtggaggagaggcaggggtggaggggaggcaggggtggaggagaggcaggggtggaggaggcggggctctcccaggaggccatcacttgtcggcgtgctgcagcagcaggtccactgcctctgcgaggttgtccacgtacccatcagccttcacttccggatggtgctcgtcactgggcctgaacttcccggtgcgcacctgcagcgctctcattccacaccgctgggcaccgccgacgtcgcccacgatatcgtccccaatcatgacggcctggtgggcttccactcctatcgcttgcagggcagacttgaaaaactcaggagaaggcttcccccccacctcggctttgatgccacaggcatactcaagcgccttcatgtagggaccaacgtccagcatcaggccagaggtctccttgtagtaacgcccttttcccagtgatatgagcacaggtttttccagctccatgagcacctggaaggcgttattcatgttttgataagaaaagctttctcctgcgtctgcaattaccacacagtttgggttggatgtgtcgatctgatcaaattctgagcggactccgtcatggatgagcaggtatggtcgcaggcctcgctccttcaggatctggcaggcagctggtgccggggcggtcacctcctgctcagagatgtcaaatcccagcctctgaagctgccccaccagctctgcccgggacttctgcgactcgttggtgcagaacctcaccttcagccgggaacgcttcagtctggccaccgcctccaccgagccggcgatggccgtgccgccgcccgcgccgctgtcgtacagcacgcccgagatgtcaagcagcaccccgcgcacgccagccagccgcttgccccacggtgccatggcgccccggacgcgtgggtcgacccgg

SEQ ID NO: 59916 - DNA, 1076 bp, Homo sapiens
ttttttttttttcatagtgtaatttcttttaatgtataggattgtttccaactcatcaggtctggtgcaaattctgtcaacgaatttaaacatggaaacatccgggctgcccttccctgaaataatcccagggcaaagagcagtagtgagtgattcttctcttttctcgggttcactttgacctgaagcaagttgctatcttcggagagtatgtatggaccccaacagaatggggcccaggggtcttcatcccttacaaatcctggactgtatcaaagggaaggcctcggtaattcgtgctcacccagcccattcggatcctggtcctccctctcttggggttcagggggttcctagagttttcttgttcccacccaggcatggggggctagtgtccagctgagagttctctctccactgggcgggggtccgtgcctggatggccagcgcatggaccggacctgccagctcctcggccagcgctgcgtggaccagccggtgtcgttgtagggggctcagtccctcgaaacgagagctcaccacagccacgcggaagtgagtctcactgccaggcgggaccgcgtggccaccgctctcgttgcgaagctctagcacctcggggctcagggcctcctccaacttcgtgcgaatggcggcctccaccggaccgatggccccggatcccgcgctgccctggcacaaacaaacgcggccagccatggagaccagacccaggaccagccgcccactcagcatgggctacgccagagactcagacgccaggagtgagggtcggggcgatccgcctggtgagagcacaatgtcaacacccgccccgcgatccccgcatccgccctaaccccacgcccggacgtccacaccagctcctatagggagcccgccttgatgccacacggggagacccgagacaccgccccttttctctacgtgacgtggtgaattcgacctccagttgtggttgggccgaagcccctgtgttccctgtgaagccccggagacgccccttctacctgccgctcagcctcggccactgcgattcccgctcagggccagga

SEQ ID NO: 59917 - DNA, 2247 bp, Homo sapiens
tttttttttttgggattttgatcacatgaaacactttatttattacagcattgttttaactcccttataaccaagattatccatatttattgcaaaagcaacaatatcaaagaatgctttaaaatgcaattaaatttgtttaatatagataaactataagtaataagattgttttcattataatataggtgtcacacatttctcctggtaactaagaaagataaatgggcagataaaacataacagtagaagcatctagaatagtaaattttattactggaagtctctccctagcaatggacaaactcaaccacattcaacacataaggaaaccagggacaagagaggctggcattcttcactctacgaatacttagggcactgactatgtgccaggcacttgctttgtgctagggatataaaattaaacatacaaggtacccgtacccaaggagctcacagccaagataatggatgagtgtcctgaaagcagaaattatcacacagcttaataattattgtgagaaatgcatgctcaagatgcaaggtgcaactcatccaggcttgggagcaactcttgtgaatgagctgacctggaaggagatgcagaagtcagacagagaggttatgaagcagcgttctaggaaggccaaagtgcgggcaagcccagtgcatttaatgaccaaaggagtgacagtacgagggaactctagtcctgggtttaggagacaatagtctcctgactccctgttcagtgctattttagaatactgcctgtgtattgacaagtctgtgaagattcagcacatacatcaatactcttgcatagaaaaaaaagaagcttacatggctcgtgctatgccagtgtagacattaggattctctaaactgccttgctcaaaatgtttctttagaggaataattacttcctattttagcttttcatttccttctaaatgtttatatcaattgggccatgccataaaattcttaagtctggaagggatttaagttatcatttttttggcaaccaagggagtgcagggacagggtggagtagggctcagtgggagcaatgcccaccctggtgcagcaataaagggggcattctctgcagggaatttaagaattaataataaaattgaccaaaatcactctgctttttattatcactaattctgaataatgtcaacaataaatacttgctgccaaggcaaacttctcttactgacccttccctatgtgcatggcactgcattatgtgtatacccgtgcatgcagaaaaccagccctgaacaggcattagaaatacccaaagtgtccatattagccatctagtcagttcatatggccacaccctcgccattcaattttcttctgtaaacagagcttgagtagtcaaaatcagacacatcaaacccccacatcaatgtgcatcttcctaaaattatatttctctccaattagcattcacatcttgactagtctcatatccatctccagctggggccgcagggggctgacatccgatgctgccgcttccctatgcacaggctcaccaggagcagtcttcgctcatcttctccagttgggccatctggcacgtgcttggaggggtaaacaccgaggggtctttaatacccagctggatgtcaaaaaaccgcgtagacaatatcacactgtagtttatggtaaaggtttcctggacaggatagcaatccttgactgtatagatgccaatccaggtttcataggatctagctgactttctgtccgaccactcctggacggtgatctgctcctgaggccccccaatggagtactggtcttcaaaggtggagttttgaggaatgtcaagaggatcccagggctgtgtcagggtcatctttgagcactgcttggtggcttggtcaatctgaaacatcactccatccttatacagcaaaatatattcaaataatctcttgcaggggatcagcgccttcctctcgtccagcacccgcacgcgctggttgagcccgtcgtaggagagcagggcgcggctgttgcgcccgctactttgctggtacataacctggcgcccctcccactgctgcggcgcctggcacgggcgcggggctcccaccgcccccaggctgcacaggccgcacagggtccaggcccagaggccgcccagcagccaggcacccagggcgcccgggacggtgcggaggggagcgcgataaagaaatcgcggtcagccttccc

SEQ ID NO: 59918 - DNA, 4177 bp, Homo sapiens
ttttttttttttgtacaaaacctggaaatatttttacttttttaaaactttgatctaagttgccttagacctcatggactcgatacaagagtaaatatgaattgggaaataaaaccactttaatagccacgataaactttgttagaaatgtacatgttgccaaaataataataataaaattaaaaaaaagagagagagagaacagcttgatgtccaggttagattatataaatgttcaacaagggcagggtaaaggaaactttaaaaacaccagttctgaataagcctggggccccgtgagactccccctctcccacccagtctcgggccctagggactgcgtccctccaaacaggacaagtgggagtggataaggcctccaccaagctgcctctcccagtggacaaaaacatccaggtaatgggtatataaacaaagctcataagaaatgtacaaatataaaaagctacaaacattaataaattacagcatcacaaaacacggaaacacttcacaaggtgctagtaaaataactgtatcccccaatcccctcatcatacaaggaaaacaaagagctggtattaaagttgaagattcatcttcaaaatgtgtctgaaatagatcttttgtgtactatttgcttctgtaaagacagagtgtaaggctgcacagacatcacttgtttttcaggcaataccttagttcttaaaagaaaaaaataataataataaaaggaaaggagaaggaaaaagcatcagaacccaactgtccatctgactcagcaaaaaactcgtataaatgttaatgaagaactctatagaaagaaattcctaaagatacttttactcttataaaaaagaagttatttaaaaagctatttacacgctacattctatgaaaaatatgcttcaggaaatacatctaaaattaaaatacaggattgcctgagaaacaaatccagcccctccgtgtcgatggtggacacaccatccaggtacgacccatgcaggcgacaccacacgctgacacgggagaacagagaagtgccgaccgtaagtcctcgggccgcctggccactgtccctgcccctgcccctgccctgccagtcccagggcaggggtgccttggctgagaagtgcttctccagagtgtggccagcagggcaagacggtccctgccacatggcttagcctgggcctcccagaccccaagatgtggctgagcccttgccctttcctggggaccccacaatggctcccctgcccgctaacacaccaacccagctgccagtcttagctgccccccagaaatgctcctgggcattcaggctgaacacccaccatcctgctgccacctgccaaccagaaagctcggggcagacccttcctcacccgccgagcactgtctggacttggctgagaatcactcaggaagagaaggggggacataaacatcccacttgctcctcctctttctgtgttctttgcctttttttttaagcccctggaggctgccagcctgtggccagctctgactctggggctggtgagcattggctcactctgtcttccttgaaggactcatgctctcagcagagctgcagaggccctgcaatcacacccacgctcagggggcctgaaggctgtccttaaagtggaataagcggtcctcaaacttgcagggccgcttttctgggacagatcactcttagcaacttgagaaaagacgtccattttcaaattgaggggccacgctgggctcgctctgccggctgaagggacagacgcttgttggggagatggcagccgggaagaggcaaggccctccctggtgaggcagctcggcaccctcctgggaggcagatgttttcgcggggctccgggggtcctgagcggagcagaaggatcctggctttccaaatcttaaaggagtagtttcccgttccgatgaattttcaaaattttcccaagcctctgcttggcggtcgccatgccctttttcgtacgttttcctttggcagcggtgttgttgtttggagacgatgcggagggccgcctctgtgtgagaaagaccccaggggccatgggctgggaggtgcggccagcctgggccccggtgaaggtgccagcggctgtgtactcatggtccgccaggctgctgctatgcgactcaggcgggggctctggcgagctgccctcctgcgaggcctggctgctggccgtgctggtggaggccggggtggtggaggccggtgtggtggaggcaggggtggtagaggctggcgtggtggaggtggaggtggtgccggcagagatggaggtggaggtggaaggggaggtggtgttaggagtcagcttcctcttggcactcttttttttcttgcttttctgctcctcctgctgggacaacttagctgcagcagccgccagcccggtctcgatggaagccacccgtgtaccctcacgcacaggcctgtcctgtcttggcaccgatgggccgacccttgctgttgggctgtagggagcgtcgtctgagcctttccttttcttcgaccgggacttaaagatggggttgtcttcatctgactccagtgaggggtaaacgtagtctgagtccttgaagcaggcatccaggtggtcctgctcttcctcgtagtcgtccaggtcgacactgttcttggcagccctcttcagcagtcgtttgcctgcactcttgccactgccacccccattcttccgggcaccatgggcagccagcgagctccccttggcctggccagctccccacgtggtctgcaggcaggagtcggaggcctgcaggttggccatggacagcattccctgaatggcttcctgtgtgctgggggaggccgggggctggctgctggggttgtactccagcgcgccaacctcctcactggcctgcagcaggtccaagatgccagctgccgagctcccactctccttcttgactctggcattgcggccgggcttggtgtctgtgtcgatgtgcagcgaaccctcgtccgaggagtcatcactctgcttgtacgctgccgagtccagctttggcttcgtgacaggcgtgggcagcacagccttcttatccaacaagaaggacaagtcccttttcggggcgtttttcttcctcctgatgggaaactcgtcgatcttgagctcaccgtcatccgacacgtactcatactcatcccgcacgggcttgggcttgtcctccttgaagttctgcaaggccccgaacacaccagggctcgtcgggggcctgagagccttggagccgaggagtttcttgttggagaaagaaaaagagaacttattgtctttgtttccagctagaggcgacttctctagcttctgctcctcttccatcttcagtaaggagtcaggtttgctgttcttgtacttccacttggcctctgacttgctcttggtttgctctcgaatttccagcctctccacatcattctgcatgtgaaccacatctttgttgggcacactcaggacactctttgtggccttgcccttcttgggcggctccatcttggtcagtgcctccttggtgtgggcttcgagcaggtccaggttggggatggtgggtgaggctgactcccgggacttcttccctttcttcttgcctccatctttgagcttcagcgttttggggggccttgggggcttagggggcttcgggggcttggggattttggatggcttgggcatcttcacagttttgggagtcttttttttggacactttctccaggagggattgaggcggggtggcctcaatgggagacgggggctcctccttctcccggtccccgtcacacacctcatctgacgaggcgacagtattcacttccggtcggacggctttggaggcattctgggatacagaaaggagagggtcacatgctgcttctgccaaactgtggcccaggacggtccacacaccaggatgctggagacactcagtgccaggctggcggggaactatcagcccagaaaggctcagctaccccacaccatcatgtgacacactcacacccaacccatgctattgtgtgacacactcacacctgcgacatgccatgagtcacttgctctccccaaggctcttctgtcctaccccagcacagcggctgagggctcatccaggaa

SEQ ID NO: 59919 - DNA, 946 bp, Homo sapiens
cgctctacggtgggcccgagctcgtgttccccgaggccatgaaccaccccgcgctgaccgtgcatccggcgcaccagctgggcgcctccccgctgcagcccccgcactccttcttcggcgcccagcaccgggaccctctccatttctacccctgggtcctgcggaaccgcttcttcggccaccgcttccaggccagcgacgtgccccaggacgggctgcttctgcacggccccttcgcacgcaagcccaagcggatccgcacggccttctcgccctcgcagctgctgcggctggagcgcgccttcgagaagaaccactacgtggtgggcgccgagcggaagcagctggccggcagtctcagcctctccgagacgcaggtgaaggtgtggttccagaaccggaggacaaagtacaaacggcagaagctggaggaggaagggcctgagtccgagcagaaggagaagggctcccatcacatcaaccggtggcgcattgccacgaagcaggccaatggggaggacatcgatgtcacctccaatgactagggtgggcaaccacaaacccacgagggcagagtgctgcttgctgctggccaggcccctgcgtgggcccaagctggactctggccactccctggccaggctttggggaggcctggagtcatggccccacagggcttgaagcccggggccgccattgacagagggacaagcaatgggctggctgaggcctgggaccacttggccttctcctcggagagcctgcctgcctgggcgggcccgcccgccaccgcagcctcccagctgctctccgtgtctccaacctcccttttgttttgatgcatttctgttttaatttattttccaggcaccactgtagtttagtgatccccagtgtcccccttccctatgggaataataaaagtctctctcttaatgacacgggc

SEQ ID NO: 59920 - DNA, 2224 bp, Homo sapiens
ttttttttttttgcagtttttaaaaacctaaatatttatttatttgcattatatttacaaaggtgggaaggagaccaaaggagaccccaagaacacccccacacctggctgaccaggccccttgcactgcagaggaggcagacacagctgggaaggaacaggatttatgttgcatacttgaactacagcgagtgtaagactggtcctatttacagggcagaaacactgcaggtggagcgcgggggtggcagggtgggcaccagagtcctggccaagggtacccttgcctgccatcttccccacctctcccagatgcatctctgaggccccgctgggattctccggggggaacgaggaccactcacatgatgctcgctggggtgaagacagggcccacgcacagggtgtctgtgatctcccagccgcaggacagaggcttgcacacaccctccacgtcatcctcctgttctgcagccatcagctgccttcgcagcgcttcccaggccacccgggacatggcataggtgatgtggcaggcctgggtcccccaaaagggggaacccatgcccacagtgtaggcgcccatgttgtcaaagaccagccagtcccctacgtgtagttgcggcagccacaggccctcagccacgcaatcacagccatcaaccgccgggccccacaggctgctgctgtacaggggctgctccgtggatggtttcttctgcaggatgggggtagggcagatgttgtcaaacaggactgagttgaagatcccatacacgccctcatcaaggtggtacacgatggtcttggaggtggaaccattttcctcctccctgccaggctggtctagcagaacctccttcttggcaatgatgctgactgccacagtgaaggccgaggtcacgtagtagcgccccagctcagcaaagatgtccacgccacagccctctgggaagtacaggtccaaggctgagttgatcacggaagcaatctcttcaaatctcactttggccccttctgtgccagggaagccaccaccaaggtccagaacgtgcatcttgtgacccagctcggtgcccatttcaaacacgagccgggcgtctgcgatggactgagcataggcctgagggtcaggacagccactgccaatgtgaaaactcacacccaccacctccacatggtgcttcttcgcattttcaagcaggtgtctgcaggatttcagtgacactccaaactttaggctcaggcagctcagggagtgggagtcatcggtagcaatgcacagaaccatcttggcactggggtggctctttaccacctttgccagctccatctcattgtcaaagctcagcagctggatcccatgcttggcagcatatttgatctgtgcaatttgcttacaggggttggcgcagatgatcttactggcagggattccaatatgctggaccaactccatctctgccttgttggcacagctaaagcccagccccagctgggccagaaccttcagcacacctgggctgctgttgcacttgacagcataaaagggccggactcgtggcaggcacttcagaaagcaaaagtgcttcctcactatggcacccaggtcagccacgaagaaggcagctacctcgtcaagtccattcagcagatgttagatggcagtttctacaaggtgcaatgcaggggcatggagaaagaaaatagaaaatctgcctggggcgatcaggaaaggcaacactgatgagaagcaaggaatgacgtggtggcctgtgaggcccccagagtgagttccttcagcaggtctcgggtactgaagccctcctccaccatcacaaagtccgattcactcaggtagccagccatgccttgcaggaggagctgacgggctggatggagccgctgctgcagccgccgccttagaaagtatgcaacacacaaactccgtcctccttcgcgggggccagagccaggcgcgctgctagggggggtcgccggtgacctcgaaacttgtgcaacaccccgaggaggagtggcagttgcggagccgaggcctctgcttaaaacgcatttacacggcttcggcccataggtctccccagggagtgaatcggatcctcggcgcctccgctctctcgcttccccgggctcgggtcccgcggcctgcgccccgccagcccagcagacgaaatcgtcgacccgtgaactcaagagcggtcgc

SEQ ID NO: 59921 - DNA, 1577 bp, Homo sapiens
cgtacccagcgtggtggaattccaccgagcagggaggttgcgcacgtccgggtgtgagtcgtgggagcccgtttcttttttccatcctcctgggctgacgcggaagagaggtccttcatcctgcctcagttgccttaggactcacagaaagggagaagaggcagaaggcccctcgcattggcacaagctgtatcccattgcccagggagatcgccaatcacccatcaatatcatctccagccaggctgtgtactctcccagcctgcaaccactggagctttcctatgaggcctgcatgtccctcagcatcaccaacaatggccactctgtccaggtagacttcaatgacagcgatgaccgaaccgtggtgactgggggccccctggaagggccctaccgcctcaagcagtttcacttccactggggcaagaagcacgatgtgggttctgagcacacggtggacggcaagtccttccccagcgagctgcatctggttcactggaatgccaagaagtacagcacttttggggaggcggcctcagcacctgatggcctggctgtggttggtgtttttttggagacaggagacgagcaccccagcatgaatcgtctgacagatgcgctctacatggtccggttcaagggcaccaaagcccagttcagctgcttcaaccccaagtgcctcctgcctgccagccggcactactggacctacccgggctctctgacgactcccccactcagtgagagtgtcacctggattgtgctccgggagcccatctgcatctctgaaaggcagatggggaagttccggagcctgctttttacctcggaggacgatgagaggatccacatggtgaacaacttccggccaccacagccactgaagggccgcgtggtaaaggcctccttccgggcctgagctgcccatctgcctagccggccactagggcaccatcttctcaagggcttccatgtcagcagacaccaaaccatctgaggcttcctccctggggggtgctggggaccctccttcagccagtttgctccttggtcaccctggaggcttctggatgggacccttgagtctggggcacccttcagctgccctgggacaggaaggacaggagctaagcagggtccaagcctggggctgcctctgctctccaagacccaaagaccctgggaacctcctctggtcttccccactggcagtggcagcagccccaccccgagcgcacactgtgatggaggagactgagctccctggggcgggcagctgacactaccagagagactcaagcaataattagaggtgggcagagctgccctctcggcattacctcttctgcaggctctgccatgcacgcacctcactgccaggccattaaaatcagcacccagcatgctggaggtgacgtggccttctccctccagccacctgctgccacgggcaggccctggctatagcttatacagtatctccccttgtccccacccagtcaccaaagccacctacatgacagtccatccctgttgaattaataaattaatgtatccatgcaacaaaaaaaaaa

SEQ ID NO: 59922 - DNA, 661 bp, Homo sapiens
ctgcactccaagtatctagctcctgcactatgctctcagccagggatgatgcgctgctgccgccgccgctgctgctgccggcaaccaccccatgccctgaggccgttgctgttgctgcccctcgtccttttacctcccctggcagcagctgcagcgggcccaaaccgatgtgacaccatataccagggcttcgccgagtgtctcatccgcttgggggacagcatgggccgcggaggcgagctggagaccatctgcaggtcttggaatgacttccatgcctgtgcctctcaggtcctgtcaggctgtccggaggaggcagctgcagtgtgggaatcactacagcaagaagctcgccaggccccccgtccgaataacttgcacactctgtgcggtgccccggtgcatgttcgggagcgcggcacaggctccgaaaccaaccaggagacgctgcgggctacagcgcctgcactccccatggcccctgcgcccccactgctggcggctgctctggctctggcctacctcctgaggcctctggcctagcttgttgggttgggtagcagcgcccgtacctccagccctgctctggcggtggttgtccaggctctgcagagcgcagcagggcttttcattaaaggtatttatatttgtaaaaaaaaaa

SEQ ID NO: 59923 - DNA, 716 bp, Homo sapiens
ttttttttttttgaaggaaataagaggaggttcccctcgtacgttcattctgtttatttatttgtgtgcgcacccggctccccgcagcctccacccctcccgcgtcccgctttcagaaaggaacgcggccctcagctccctccggaagaggccccggggtcaggggctgcagccgggtccccgtgcgtcggcccagctcgtccagcaccgccttctccttctggaacatctgctgccactctgcctccgtgccgtgtgtgaatcccagcaagtgacagagtccgtgggtggccgtcacagtcaggacgtcattgtaatcttcattttctttacactgatggaagatatactccactcctaggaaaatgtctcccaaattgtagtcatctggaaaatcaggctggggaaattcacctgctttcagatgctcatgaaatggaaaagaaagcacatcggttgggacatttctatctctgtagattctattaatgtgctgaatattcttgttgtcaacacagatgatccccaggtcaaatttctgcactcctaaaatcctccttacaatctcgatcttactgcgaagtggcgctctcctgatggggatgactcgctgcagatttctaatcaccaaactcatttcaggaagaataaccagccctttaaaaatgtttgcaacggaaccggtgtctggacccagcaaaggacgcgaagctggc

SEQ ID NO: 59924 - DNA, 1389 bp, Homo sapiens
agccagtcgctgcaaaccaaaccgcgtgtgtccgctgggtctctgggcatgcagtttgctcccactgcgggaatggggtgggggcaggccgagcctgggctctgggggctttgctgggggagcttctggtcctgggggtacccacttgtgagggagtggggggacagctggaatagcgttgctcagtgcgtcctttgggcgctgttggggacaccctccctcgctctcccacaccactggcaccaggccccggacacccgctctgctgcaggagaatggctactcatcacacgctgtggatgggactggccctgctgggggtgctgggcgacctgcaggcagcaccggaggcccaggtctccgtgcagcccaacttccagcaggacaagttcctggggcgctggttcagcgcgggcctcgcctccaactcgagctggctccgggagaagaaggcggcgttgtccatgtgcaagtctgtggtggcccctgccacggatggtggcctcaacctgacctccaccttcctcaggaaaaaccagtgtgagacccgaaccatgctgctgcagcccgcggggtccctcggctcctacagctaccggagtccccactggggcagcacctactccgtgtcagtggtggagaccgactacgaccagtacgcgctgctgtacagccagggcagcaagggccctggcgaggacttccgcatggccaccctctacagccgaacccagacccccagggctgagttaaaggagaaattcaccgccttctgcaaggcccagggcttcacagaggataccattgtcttcctgccccaaaccgataagtgcatgacggaacaataggactccccagggctgaagctgggatcccggccagccaggtgacccccacgctctggatgtctctgctctgttccttccccgagcccctgccccggctccccgccaaagcacccctgcccactcgggcttcatcctgcacaataaactcggtatgccacaccactggcaccaggccccggacacccattctcctgcagcaggagaatggctactcatcacacgctgtggatgggactggccctgctgggggtgctgggcgacctgcaggcagcaccggaggcccaggtctccgtgcagcccaacttccagcaggacaagttcctggggcgctggttcagcgcgggcctcgcctccaactcgagctggctccgggagaagaaggcggcgttgtccatgtgcaagtctgtggtggcccctgccacggatggtggcctcaacctgacctccaccttcctcaggaaaaaccagtgtgagacccgaaccatgctgctgcagcccgcggggtccctcggctcctacagctaccggagtccccactggg

SEQ ID NO: 59925 - DNA, 1803 bp, Homo sapiens
ggcctacgagtgcggcgcggcctgaaggggcacgcgggggacctgcaaagctagtgaggggcggggcaggcggcgcggtgggggcgggccgagcccggaggccagatgagcggacacagccccacgcgcggggccatgcaggtggccatgaacggtaaggcccgcaaagaggcggtgcagactgcggctaaggaactcctcaagttcgtgaaccggagtccctctcctttccatgctgtggctgaatgccgcaaccgccttctccaggctggcttcagtgaactcaaggagactgagaaatggaatattaagcccgagagcaagtacttcatgaccaggaactcctccaccatcatagcttttgctgtagggggccagtacgttcctggcaatggcttcagcctcatcggggcccacacggacagcccctgcctccgggtgaaacgtcggtctcgccgcagccaggtgggcttccagcaagtcggtgtggagacctatggtggtgggatctggagcacctggtttgaccgtgacctgactctggctggacgcgtcattgtcaagtgccctacctcaggtcggctggagcagcagctggtgcacgtggagcggcccattcttcgcatcccacacctggccatccatctgcagcgaaatatcaacgagaactttgggcccaacacagagatgcatctagtccccattcttgccacagccatccaggaggagctggagaaggggactcctgagccagggcctctcaatgctgtggatgagcggcaccattcggtcctcatgtccctgctctgtgcccatctggggctgagccccaaggacatagtggagatggagctctgccttgcagacacccagcctgcggtcttgggtggtgcctatgatgagttcatctttgctcctcggctggacaatctgcacagctgcttctgtgccctgcaggccttgatagattcctgtgcaggccctggctccctggccacagagcctcacgtgcgcatggtcacactctatgacaacgaagaggtggggtctgagagtgcacagggagcacagtcactgctgacagagctggtgctgcggcggatctcagcctcgtgccagcacccgacagccttcgaggaagccatacccaagtccttcatgatcagcgcagacatggcccatgctgtgcatcccaactacctggacaagcatgaggagaaccaccggcctttattccacaagggccccgtgatcaaggtgaacagcaagcaacgctatgcttcaaacgcggtgtcagaggccctgatccgagaggtggccaacaaagtcaaggtccccctgcaggatctcatggtccggaatgacaccccctgtggaaccaccattggacctatcttggcttctcggctggggctgcgggtgctggatttaggcagcccccaactggccatgcactctatccgggagatggcctgcaccacaggagtcctccagaccctcaccctcttcaagggcttctttgagctgttcccttctctaagccataatctcttagtggattgagccctcttggaaagacttctctgccatccctttgcacctgagaggggaagttctcagctgagctgaagctggattattaaagtggattgtcactcagactctccgtgctacgcttatttggagactagaggagtgggagttgagcctggcttgaacctttggaaccagaaaagttggggagcaggtggaggaggccacactcctgggagctgatggttttaaatctggttttaaatctca

SEQ ID NO: 59926 - DNA, 1253 bp, Homo sapiens
cccacgcgtccggcttctccgcccgagccgttcgcggagctgccgggggctccttagcacccgggcgccggggccctcgcccttccgcagccttcactccagccctctgctcccgcacgccatgaagtcgccgttctaccgctgccagaacaccacctctgtggaaaaaggcaactcggcggtgatgggcggggtgctcttcagcaccggcctcctgggcaacctgctggccctggggctgctggcgcgctcggggctggggtggtgctcgcggcgtccactgcgcccgctgccctcggtcttctacatgctggtgtgtggcctgacggtcaccgacttgctgggcaagtgcctcctaagcccggtggtgctggctgcctacgctcagaaccggagtctgcgggtgcttgcgcccgcattggacaactcgttgtgccaagccttcgccttcttcatgtccttctttgggctctcctcgacactgcaactcctggccatggcactggagtgctggctctccctagggcaccctttcttctaccgacggcacatcaccctgcgcctgggcgcactggtggccccggtggtgagcgccttctccctggctttctgcgcgctacctttcatgggcttcgggaagttcgtgcagtactgccccggcacctggtgctttatccagatggtccacgaggagggctcgctgtcggtgctggggtactctgtgctctactccagcctcatggcgctgctggtcctcgccaccgtgctgtgcaacctcggcgccatgcgcaacctctatgcgatgcaccggcggctgcagcggcacccgcgctcctgcaccagggactgtgccgagccgcgcgcggacgggagggaagcgtcccctcagcccctggaggagctggatcacctcctgctgctggcgctgatgaccgtgctcttcactatgtgttctctgcccgtaatttatcgcgcttactatggagcatttaaggatgtcaaggagaaaaacaggacctctgaagaagcagaagacctccgagccttgcgatttctatctgtgatttcaattgtggacccttggatttttatcattttcagatctccagtatttcggatattttttcacaagattttcattagacctcttaggtacaggagccggtgcagcaattccactaacatggaatccagtctgtgacagtgtttttcactctgtggtaagctgaggaatatgtcacattttcagcggc

SEQ ID NO: 59927 - DNA, 1315 bp, Homo sapiens
gtgcttgaagggagtgttccgtcgtttccgttgccggctgtttgcagtggggaaaccgaggcagctcctgctccccctagttcttccgctcctgtgaggaaaaaaaaatgtttatttctttgtgggagttcttctatgggcacttttttcgattttggatgaaatggctattacgacagatgactgggaagtgtgaattgcagcgaatatttgatacctatgtaggtgcacaaaggacacacaggatagaaaattccttgacatactccaagaataaggttttacagaaggcgacacatgttgttcagagtgaagtggacaaatatgtagatgatattatgaaggaaaagaatattaaccctgagaaggatgccagttttaaaatatgcatgaagatgtgcttactgcagataactggttataaacagctgtatttggatgtagaaagtgtgaggaaaaggccatatgattctgataacctacagcatgaagagctactcatgaagctttggaatcttctaatgcccacgaagaagttaaacgctagaatctccaagcagtgggctgaaattggttttcagggtgatgatcccaagacagacttcagaggcatgggcatacttgggttaatcaatcttgtgtatttcagtgaaaattacactagtgaagctcatcagattctttcccgttcaaatcatccaaaattagggtattcttatgcaatagttggaatcaatcttacagagatggcttatagcttactgaagagtgaagctttgaagtttcatctctataaccttgttcctggtataccaacaatggaacactttcatcagttttactgttatcttgtctatgaatttgacaagttttggtttgaagaagaaccagaaagcattatgtatttcaatttgtatagagagaagtttcatgaaaagattaaaggacttttactggattgtaatgtagcacttactttaaaagtataaatcatccactgtatcttctatttctaccacattttgcacattcaacagaatttatatgttgtaataggaattatctgatcaattacactcttatatataatttcctacaaaaatatttcagaaattctatttaagaaagctagtggacaatcagtgtatgtttacaattgtttatacactgttctccaaaggtaccttatccttccaaagatcccctctgtagagtcatgcgaactacagtttggaacttgggacttagcccgttggtgtaaaagtataaatcaggtatttgtattaaattgattaaaatgtgtaaaatcaaaaaa

SEQ ID NO: 59928 - DNA, 488 bp, Homo sapiens
tttcgtctcccggctctcggtccgggacgtgcgcttccccacgtttcttgggggccacggcgcggacgccatgcacacggaccctgactactcggctgcctatgtccccatagaaactgatgcagaagatggaatcaaggggtgtggaattaccttcactctgggaaaaggcactgaagttggtgagttgaagattctctcgaggttccagaatgcttaattttcagatgagattctaatttagattcttagattcattagaatcttgatttaaattgagttctgatcttgtttttatctgtatttacactgctcaaagtgagtaaaaacagtgtttcatgggttgttacttgtttcactgggagaaatttaaaagtgacagaatttggcctctctccttgcaatcatatctagcctgttagaaaatccttggctgttagaccgtttctctgtgtcaaatgaccgctacaagggtgcttttcacctgc

SEQ ID NO: 59929 - DNA, 977 bp, Homo sapiens
ttttttttttttcacgttaaaaaaagttttatttagggagctccagggaatgcggtgggaaaggagaggtgcagtgtcattgccgccctctcctcccacctagtgcattaatagtggatgggagcatctgacagaagtgagatcaggcagtgggtgtctgcaccccacagcgcatgttggctggaacagcaaagtctatctgctgaggtttaggcaagttcaggttgcccatgattttgacaaactcctcacagctgagggtgagccgagggttcagagtcctctcctcctccacggtggacactgtgaacccatggtaatcgtgagcagggtagatcagacagtctcctggaagtgtgaagatcttttcatggaccgagtggtacaaggtcttggcacagccttgctggaagtctgtccgcccacacccacggatcaacagggcatctccagtgaaggccatgctgtggtcattcaggacgaaggtgacacagcctggggtgtggccagggctggccctggtctccaacgcgaagcgcccgaagcggatggagtctccatcctcaatgtgtaagtcagcctgggccccactaaggcgggagatgacagactggcagccagggaggagggaacggagcagccccgagcctgtaatgtggtccgcgtggcagtgggtattcacagcatagagcagccgcagccccagctccttgatcagctgggcatcccgaggcgctgtttccaggactgggtcgatcagaacggcctcccgggactctctgtcacccagcaggtacgtgaaggtgcagctcacaggctcgaacatctgccgcaggaggatgggggctccagacccgccgcgctggctcagctgccgccgggcgaccctcagtacagcctccgccatcgcgcccactgcggggtcaggaatgagcggaggccgagcgtctgcaggagccgggcgctacggcactagg

SEQ ID NO: 59930 - DNA, 1829 bp, Homo sapiens
ggtgtgagtgtgtgggagtgagagtgtgtgggagtggggtgagggagaagctgacgggacgcgaggctgtgagaaactgggcgagtgtgcgaggacgcccggccagcctgcgggagccgcagtcggcggaggagaaaggaggcggctcccggtatcccgaccccctccccctcctcttcttcccccacttccagccgcccggcggcccgcgctttctcgaaggccccagcccggctcagtcggccgagagcgagggaggagccccccgacccaggtagacgttacatccaagaggaaataatccaggcaaggaagcacaagctgatcaagatgtgtagttctgtggctgccaagttgtggtttttgacagatcgtcgcatcagggaagactatcctcaaaaagagattttacgagcattgaaggccaaatgttgtgaggaggaactggactttagggctgtggtgatggatgaggtggtgctgacaatcgagcaaggaaacctgggtctgcggatcaatggagagctaatcactgcctacccacaagtggtggtagtcagagtaccaaccccttgggtgcaaagtgatagtgacatcactgttttgcgccatctagagaagatgggatgtcggttaatgaaccgacctcaagccatcctgaactgcgttaataagttctggacatttcaagagttggctggccatggtgttcctctgccggatactttctcttatggtggccacgaaaattttgctaaaatgattgatgaggctgaagttctggagttcccaatggtagtaaagaatacgcggggtcacagaggtaaagctgttttcttggctcgagataagcaccatttggctgatctaagccatcttattcgccatgaagcgccatacctgttccagaagtatgttaaagagtctcatggacgggatgtacgtgtcattgtcgtgggaggccgtgtggttggcaccatgttacgttgttcaacagatgggagaatgcaaagcaactgctcattaggtggtgtggggatgatgtgctcattgagtgaacaagggaagcagctagctatccaggtgtctaatatcctggggatggatgtgtgtggcattgacctgctgatgaaagatgacggctccttctgcgtctgtgaggccaatgcaaatgtaggtttcatcgcctttgataaggcttgtaatctagatgtagctggtatcatagcagactatgccgcctcccttctaccctctggccggctcacccggcgtatgtccctgctctccgtggtgtccactgccagtgagactagtgagccggagctgggtcccccagccagcactgctgttgacaacatgagtgcaagttccagctctgttgacagcgaccctgaaagcacggagcgagagctgctcaccaagctcccagggggcctgttcaacatgaaccagctgctagccaatgaaatcaaactactggtggactgactccactggtaattaaccaacaaaacccttgtaaaactttctttcttcttttctatttttaaaaccaacttgcaatgctgttcatggaggatgctcaggaagatgagagaaaattactacgattagttggagagagtgggagatagatgagacctctgctagtaagatgttactttcatttacaaatcctacaaatagagaggcagaataggtggggtatagaaaaatgtcaggctctcatagttacccttttaaattgctaaaaaatgtgtatgctcataggccatgaggaacaaatactttttttttttcatggtcccttgcttttgtttttgtac

SEQ ID NO: 59931 - DNA, 1644 bp, Homo sapiens
tttcgtctcccgagctctcctccgcgttcgcagccgccgtcatcccgcggaggagcgcgcagccccggggaggccggaggacgcgcccatagaatgcccaggggcgacaaactgtcctgagcccctctggtgcagccacctgcctgtcccatacgccccgcccaccatggagtccagagggaagtcagccagcagccccaagcccgacaccaaggtgccccaggtcaccaccgaggccaaggtacccccggcagccgatgggaaagcccccttgaccaagccctcgaagaaggaggccccggccgagaagcagcagccgccagcagcccccaccacggcacctgccaagaagacctcggccaaggccgaccctgcccttctcaacaaccacagcaacctgaagccagcccccacggtccccagcagtcccgatgcaaccccggagcccaagggtcctggggacggggcggaggaagatgaggctgccagtggggggcctgggggccgaggtccctggtcctgtgagaacttcaaccccctgctggtggctgggggtgtggccgtggcagccatagccctgattctcggtgtggccttcctggtccggaaaaaataatacctgggggccaggcggggggcacggagccacttcctgtacagacccgaggaagccagtgcatgcagagttcacccttacctattcgtacacacgcacattcattacacacctacatatgcccccaacacacgcgcacggtgaagaggacgcccgagcccacccctgctgacccaggacttccccaacctccagggcagaaagagcccaggctccggggtccacagcacaggatgtggggcgagggcacagctggggaacggcaagaaaggaatggaccctgtgtgtggcccccccacccctggcggctgggtgatcctgggcccccagggctggtctgagtgcaggtgggggtgccgggatgggttgggcctgggcccggccctcgtggggacattaaagggcgcggtggctccactcgccccatttctgctctttgcgtacccaccgggggtctgcatgggcgaatgcagtgggacggacctggggtgggcactcacctcagcagagcctcaatgccacctccccacaccacccaagcctagctgggtgggaagacggagccctgaagcctgcgtgtggagggggtgctgcccaaggctcgccttccccagcttgtgctccaggggagccccgacgccggcggggaggcagggatgtcgagggcccctcacagctgtgccccgccctgccccgttagactgcccctcccagcttgcaccccagcacccacctgagtctaaccagcgtataatgcaataacaggtagagtagaactgcttttggcggcgaccgtcacacactgtcctcagcccactgcaccctggggaaacccctcgtgcagcccctccttagcacatccagtcccagcgtggcccttggcgcgcagcagcaggcgaactcccagaaggtggtggtgggcactgtgagaacgtggcctgccctgcaactggccagtggccacaggaaccccgggcctgagtggaggctgagtctgaaataaactctgtcgtctgaaaaaaaaaaaa

SEQ ID NO: 59932 - DNA, 2293 bp, Homo sapiens
ttttttttttttaaggatttactaatatttattaagtgccaccaacatttcaacgggccacaggcagggctgggagttgggggagaaggagtggctcccctcccgacaacaggtgaccctcacccccggctcagggccccgagggggtcctggaaacactcacgctcaaggagcggaggtgaatggcttcctgttctcacctccgggtccaggcactgggggtgaggaagtggctgggaggccaggaagctggaggaggggaggtgctggggcccagggctgtgcgggaggggatgggatcctgtgggtaccttggcccgtgtgccagggtcgggggaacgtgacactaggtgagaattgggtagaaagtgtgtgtgaaagggcatgcgtgcatgtgatgttggtgccatatctataggtgtcgttgtcatggtgtgtgttgtcactgtgtctgtgtgtgacatcatcaccgtctgtgtgatgccatcgccgcgtctgtgtgacattaatatgtgtgacgtcgacatggcccgtgacgtcgttgctgcatctcggtgtgacgtcatgccaagttccccatgtctgtgtgcgacgtgctgcatctgcacgacgccatcgctatatctcttcgtgacgtctacatggccacgtgacgccatcaccacggtgatatgtgacgtcagcgccgttgcttgcgtgacgtcatctccgcggccgtgtgctctgggtgagggatcgtgaggcgcgggtgcgggtgtgagagggtactaggggtttgcatgcagggagttgtctgatggtggccctgggtggttgggggcggcgggagggggttgtgtcgggcgctgtgagcatatccctgcatcctccgcaaaccgccgagtcgggccatcccttggtcctcaggcctggagcctcctcagccactggatggggctacagggatgcctgcagggggcctctgggactccaggatcttcctcttgaactcctccaggctagctgggtcgatgggctgggggttggggacagggcccatgggccttgacactggcatcatcggctgcgacttggtcttgatgcaggtgtccagggctgagtttctgatggccagctccatcctgagctgctccgcctccctcttcttctcttccagctccttggccaggttgtctcgttccttccgcagcaccgccttctcctccagcgctagctgggtctgccgggagcattcagcttggagcttggcctcccgggcctgagcctccttctccaccttctgtttcgcctcctgactggcccgcaggccctgctgggcttccagcttctggcgttggaggtctgagttctcgcgggccacgcgttcgatatccgcccggaggctccgggccagctcctccaccttggagctcatgaggctgggcatgtggtcgcaggctctgcggatggaggccaattccgagcccaggggatggtagaggttgtaacccaggttgtccaggctgcgtgggataatggagtccctccacaggttacgaaggtccatctcaaacttgtccttgtccaggggcaggcagagggcttgcaccttttgcagttgctccttggccagctggcgctcttggtgctgcagctcccgggttttcacgcattcaaccagctgttcctccgccacgcgtttgttcagcagcacgctttccttatccttagtgcaaatggtcttctccttggctatctccacctccagcgtcttcaccttctgattcagcatgaagagcaaggcatcgcagctcttgttcatgtccttgaattgatctctgcattgcttctcactcaagatgatggcagccatgtacctctgattgttcgtgtagatgacccggtcaccctggcactggcggaagctggcattgatgcggtccaggtcgcggcgagcattcagccacatctgcatgatggcatccttggcgcgggtggtgaagttgagctccttggtcaagttggactgggaggccgtgagccctaggagctgactgtataggccctcggctcggcgctcggtggcctgcaggttggactctgtgctcacgtgcacgttgccatagaccatgaagagcacgagccccaggatgatgaggaattggatgagggagacgaagaggaagaagtagcgcaggtaataccagcagccccgagagctgccccccgcccgagcgtaggaccctccgtgctccatggccagacccatttgctcgatcccgcagtccggtgcaccgtccctgctcacacgaaa

SEQ ID NO: 59933 - DNA, 3421 bp, Homo sapiens
  misc_feature (1)...(3421): n = a,t,c or g
acatccccgggtcgacgatttcgaggggagcttctttcttgctcaccctggcgatggctagtatggccgcagagtgagacaaggctcccaattgcatccttggaggcaaagttaaagattttatgattaagtacttaacatttcctgttggaagtttggtggcctcagatttctcctctgagcaggacatacaacagagggttggacacagatggccagagttgaagctaggccaggaaacatcgctgtgtctttggaaacaaaagtcaccttccttcctccaggagcaagggcgggtgagaggaagagggcttatagagagccttttcaagcccctagcttggttatgggttattttgtttttgtcattttagggtgaggcaactccaaggtcctactctctttctgtgcctgttacccaccccgtcctcctagggtgcccttgagccgcaaaactgctgtccacgtggaccgggggtgacatcgcacgtccatctgccaggacccctgcgtccaaattccgagacatggcgaccaacggcagcaaggtggccgacgggcagatctccaccgaggtcagcgaggcccctgtggccaatgacaagcccaaaaccttggtggtcaaggtgcagaagaaggcggcagacctccccgaccgggacacgtggaagggccgcttcgacttcctcatgtcctgtgtgggctatgccatcggcctgggcaacgtctggaggttcccctatctctgcgggaaaaatggtgggggagccttcctgatcccctatttcctgacactcatctttgcgggggtcccactcttcctgctggagtgctccctgggccagtacacctccatcggggggctaggggtatggaagctggctcctatgttcaagggcgtgggccttgcggctgctgtgctatcattctggctgaacatctactacatcgtcatcatctcctgggccatttactacctgtacaactccttcaccacgacactgccgtggaaacagtgcgacaacccctggaacacagaccgctgcttctccaactacagcatggtcaacactaccaacatgaccagcgctgtggtggagttctgggagcgcaacatgcatcagatgacggacgggctggataagccaggtcagatccgctggccactggccatcacgctggccatcgcctggatccttgtgtatttctgtatctggaagggtgttggctggactggaaaggtggtctacttttcagccacatacccctacatcatgctgatcatcctgttcttccgtggagtgacactgcccggggccaaggagggcatcctcttctacatcacacccaacttccgcaagctgtctgactccgaggtgtggctggatgcggcaacccagatcttcttctcatacgggctgggcctggggtccctgatcgctctcgggagctacaactctttccacaacaatgtctacagggactccatcatcgtctgctgcatcaattcgtgcaccagcatgttcgcaggattcgtcatcttctccatcgtgggcttcatggcccatgtcaccaagaggtccattgctgatgtggcggcctcaggccccgggctggcgttcctggcatacccagaggcggtgacccagctgcctatctccccactctgggccatcctcttcttctccatgctgttgatgctgggcattgacagccagttctgcactgtggagggcttcatcacagccctggtggatgagtaccccaggctcctccgcaaccgcagagagctcttcattgctgctgtctgcatcatctcctacctgatcggtctctctaacatcactcaggggggtatttatgtcttcaaactctttgactactactctgccagtggcatgagcctgctgttcctcgtgttctttgaatgtgtctctatttcctggttttacggtgtcaaccgattctatgacaatatccaagagatggttggatccaggccctgcatctggtggaaactctgctggtctttcttcacaccaatcattgtggcgggcgtgttcattttcagtgctgtgcagatgacgccactcaccatgggaaactatgttttccccaagtggggccagggtgtgggctggctgatggctctgtcttccatggtcctcatccccgggtacatggcctacatgttcctcaccttaaagggctccctgaagcagcgcatccaagtcatggtccagcccagcgaagacatcgttcgcccagagaatggtcctgagcagccccaggcgggcagctccaccagcaaggaggcctacatctagggtgggggccactcaccgacccgacactctcaccccccgacctggctgagtgcgaccaccacttgatgtctgaggataccttccatctcaacctacctcgagtggcgagtccagacaccatcaccacgcaggacaggggaggtgggaggacagttagacccctgggtgggccctgccgtgggcaaggatacccggtggcttctggcacctggcgggctggtgacctttttaatccaggccccatcagcatcccacgatcggccttggtaaccgccgcggtagatcatttttatcccgccagggagtgtgatgcaggaagaccacatgcgctcctggcttttaaacctgttcctgactgttctcttactgccgaaacccttgactgttatctcggactttgcaggagttcctttccctccgaacgctgctccatgcacaggaaaagggcattttgttacaatgggggactttcccgggaacgcttgctcttaagtaccagaagccggcggagctctggctttcgtgattttggttttctccttcccaaggcagctggattgaaaaaacaaaacaaaacaaaaaaacccaggggcgtcagtcgatattctcagggccgcttctcctgcagtctgtggagcgtccttgtccccgccgccggaatgaatgagcattctgcagcccgatgtccctgtcccctcctcgccgggccattctgattggacctggcccagtgcaatctgtccagacaagccctgcttgctggaaaactgccacaagcacaattgatctctttttatcgccattccaggggcctcaggtcctactggggaaacttcctataccggagctccagtttctcttaagctgcccaatttcacagagtacaaaatagttgtaggggaaatcaaggtgaaggatctgtccgacagtcaagacggatccacaggaatctttcggtctccttaaactaccaccctcgctgccacccaccccaaggtgnttgccgcctcaccttccttgaaatttctcagcgggagtctcaacacaaccactaaaacccacccagaccgtgtattgcggccgctcgagaggat

SEQ ID NO: 59934 - DNA, 1483 bp, Homo sapiens
  misc_feature (1)...(1483): n = a,t,c or g
tcatggcaagagcgagcagtggtgctgatgttgagagaagcccagggtaccactaattgagggagtgaggaagagagcagctcgcttctaactggactgcacgttggtgacagcgtcccaagctggtgacagacccactctgtaactttcagctagattcagccaccagatcccagaaacatgacccttgctgcctacaaagagaagatgaaggagctcccgctggtgtccttgttctgctcctgcttcctggccgatcccctgaataagtcgtcctacaaatatgaagcagacacggtggacctgaattggtgcgtcatttccgacatggaagtcatcgagctgaacaaatgcacctcgggccaatcctttgaagtcatcctgaagccaccctcctttgatggggttcccgagttcaacgcctccctgccaaggcggcgagacccatccctggaagagatccagaagaaactagaagcggctgaggagcgaaggaagtaccaggaagcggagctcctgaaacacctagcagagaaacgggaacatgagagagaggtgatccaaaaggccattgaggaaaacaacaacttcatcaagatggctaaggaaaaactggcccagaagatggaatccaacaaggagaacagggaggcccacctcgccgccatgttggaacggctgcaagagaaggacaagcacgccgaggaggtgcggaaaaacaaggagctgaaggaagaggcctccaggtaaagcctagaggccaaagaactttccaggtcagccggacagctccagcagctccacgttccaggcagcctcgcccgccggctgcgctcccagcactggggtttggggggaggggggtggccaaggggcggtttcctctgcttttggtgtttgtacatgttaagaattgaccagtgaagccatcctatttgtttccggggaacaatgacggggtgggagaggggagaggagagagtttgggaaagggagatggagaagaactcaaggacattgcaaccctgcccggcgcagatctgattttcacatctctacctggacattgagcctccaggcaccatgttgaggagagatgaaaaccagggcggtagaacttcagggtgaaggacagagtcctgggtggggcagcggctgcagggcgcaccagagaacccagccagagggggtgtgagtaccagtggtgttgcttccaccctgcagcaggtgggatgaggtctgtgtgtgtgtgtgaaccatcattttttgatcatcatgaccaatgaaacattgactccaagtgtccagttctttatttcccaaatgtgtcctttgggtaattgttaaaaagttctcgaaacctggctttcatccatctgatggcagatgcccctttgcttccttaattctgccattcaagcatctggagcctgggtgaggtgggttgaatcangccagcctttggcataattgaaaggttttt

SEQ ID NO: 59935 - DNA, 2688 bp, Homo sapiens
ggcacgagggaaccggcggactcggttggcgttgtggggcagggggtggtggagcaagatggcggctcatctgtcctacggccgagtgaacctaaacgtgttgcgcgaggcggtgcgtcgcgagctgcgcgagttcctggacaagtgcgcaggaagcaaggcaatagtttgggatgaatacctaactggaccctttggcctgattgcacagtattcactattgaaggaacatgaagtggaaaaaatgttcacacttaaaggaaatcgtttgccggcagctgatgtgaagaatataattttttttgtcagacccaggctagagttgatggatataatcgctgaaaacgtgctcagtgaagatagacgaggcccaacgagagattttcatattctgtttgtgccacgccgtagcctgttgtgcgaacagcggttgaaggatctgggtgtcttgggatcctttattcacagggaggagtacagcttagatctcattccattcgatggggatctcttatccatggaatcagagggtgcattcaaagagtgctacctggagggtgaccagacgagcctgtaccacgcagccaaggggctgatgaccctgcaagctctgtatggaacgatcccccagatctttgggaaaggagaatgcgctcggcaagtggccaatatgatgatcaggatgaagagagagtttacaggaagccagaattcaatatttcctgtttttgataatctcttgttgcttgatcggaatgtggatttattaacacctcttgccactcagctgacatatgaaggactcattgatgaaatttatggcattcagaacagttatgtgaaattacctccagagaaatttgcacctaaaaaacagggcgatggtggtaaggacctccccacggaagcaaagaagctgcagctgaattctgcagaggagctctatgctgagatccgagataagaacttcaacgcagttggctctgtgctcagcaagaaagcaaagatcatctctgcagcattcgaggaaagacacaatgctaagaccgtgggggagatcaagcagtttgtttcccagttgccccacatgcaggcagcaaggggctcgcttgcaaaccatacctcaattgcagaattgatcaaagatgtcactacttctgaagacttttttgataaattaaccgtggaacaggagtttatgtctggaatagacactgataaggtcaacaattacattgaggattgtatcgcccaaaagcactcgttgatcaaggtgttaagactagtttgcctccaatccgtgtgtaatagtgggctcaaacaaaaagttttggattattacaaaagagagattctccagacatacggctatgagcacatattgaccttacacaacctggagaaggccggcctgctgaaaccgcagacggggggcagaaacaattacccaactatacggaaaacattacgcctctggatggatgatgttaatgagcaaaaccccacggacatatcgtatgtgtacagtgggtatgccccgctcagtgtgcggctggcccagctgctttcccggcctggctggcggagcatcgaggaggtcctccgcatcctcccagggccccactttgaggagcggcagccactgcccacaggactgcagaagaaacgtcaaccgggagaaaaccgagtgactctgatatttttccttgggggcgtaaccttcgctgaaattgctgccctgcgatttctctcccagttggaagatggaggtacagaatatgtcattgccaccactaaactaatgaatggaaccagttggatagaggctctgatggaaaaacctttctaggatgttcagaggagacttaacaagtgtactgcagaataaactacctctttgaagaaattgctgaaaggaagtaaaaccccatagaagaaacatgggaatacagaatatattctggggtcagcttcttaaattatactactgtttactgctttctccgtctcttttgtattcccttttttttttcctttgaaacggagtcttgctctgtcacccaaactaaagggcaggggcacggtctcacctcacttgcaacctccacctcctaggttcaagcaattctcctgcctcagcctcctgagtagctgggactacaggcatgcaccaccacacccggctaatttttgtatttttagtagccatgggtgtttcaccatgttggccaggctggtctcaaactcctgacctcaggtgatccacctgcctcggcctcccacagtgctgggattacaggcctgagccaccgtgcctggcccctaatctgctgaagaaagaagaatagaagaaaatcaacctgagtaaaagcagcactggttttgagttttctaagctcagggtcttcattagagacctctggaaatacattaaggatggtgggggtagataatccattcagccagacaaacggggccagctcttaaaataagaaagctgagactgaggaggtgaaactgaaaataaaaagagaaagttcatcctctaatccccagtgctgtatttcttcaaggtgcatcaggcctaggacagtggttaagtgttgggagctggagatcattttatcactgagttgagatttctttttcctgcagagtgtgggagattatatttagggtcattgtatt

SEQ ID NO: 59936 - DNA, 3048 bp, Homo sapiens
tgtgcgtcgcgctctcgccctcctcttcccgctgcagtgtctatggagcgaggctacgtttcattgccgccctggcttaacccttccggcgcctaaaaggacggccggccggccggctcccttgcaccaggaagaagtcttagcagccagcgggccctggtcaggaaactctaaggtacaaggaaaacagttgaggaaggagccagagcgctccggtttggtcctcgggcttcgctggggcggggcgcaggcgttggctttaagaaaggggaggggacagtgcaatccgggttgcccgcggagttcggccaaggaagtcttccgctcgctccggagcgaggagcctgtaaagaggctgttcccagctccagctctaacctcgcctacaccttgggcgggcccaagtgtcacgtttgcaattgctcaggaaggatccggcccgtctccggaggcaagtcgggctgcggtttttgctgcttatctgggaaggcgatgcctaagggacatgctgcttgctaggcagcaccctgccgggatccgactgcgatagttagctctccctggccctgaagccatcgccggggcgcctgttctctgtccggaccagccagcgctcctcaggagtctcactgaaacagaaccatgggtcatcccccgctggagttcagcgactgctacctggacagccccgatttccgcgagaggctcaagtgttatgagcaggaactggagaggaccaacaaattcatcaaagacgtaatcaaagacggcaacgcgcttatcagcgctatgagaaattattcttctgctgttcagaaattttcccagacgctgcagtcatttcagtttgatttcattggagacactctgactgatgatgaaattaacatcgctgaatccttcaaggaatttgctgaattgctcaacgaggtagaaaatgagaggatgatgatggtacacaatgctagtgatttgctgattaaacccttggaaaatttccggaaggaacaaataggcttcaccaaggagcggaaaaagaaatttgaaaaggatggtgagaggttttattctttactggatcggcacttacacctgtcttcaaaaaagaaagaatctcagttacaagaggcagacctacaggtggacaaggagaggcacaattttttcgagtcctctcttgattatgtttatcaaatccaggaagttcaggagtccaagaagttcaatattgtggagcctgtcttggcctttcttcatagtctgttcatttctaacagcctgactgtggagctcacacaggatttcctcccatacaaacaacagctccaactcagtttacagaatacaagaaatcatttctccagtacccgggaagagatggaagaacttaagaaaaggatgaaagaagctccccagacatgcaaacttccaggacagccaactattgaaggctatctctatacacaagagaaatgggctttaggaatatcctgggtgaaatactattgccagtatgagaaagagaccaaaacactgaccatgacgcctatggagcagaagccaggtgctaagcaggggcccttggacttaacactgaagtactgtgtgagaaggaagacggagtctatcgacaagaggttctgttttgacatagaaactaatgaaaggccaggaaccatcactctgcaggccctttcagaagctaacagaaggctatggatggaagccatggatgggaaagaacctatctaccacagccctataacaaaacagcaagaaatggagctaaatgaagtgggcttcaagtttgtcaggaagtgcatcaatattattgagaccaaagggatcaagacagaagggttgtaccgcactgtgggcagcaatattcaggttcagaagctgctgaatgccttttttgatcctaaatgcccaggagatgttgattttcataatagtgactgggacattaagacaatcaccagctccttgaaattctacctcaggaatctttctgaacctgtcatgacctatagacttcacaaagagctggtctctgctgccaagtctgacaacctggattaccgcctaggagctattcactccctggtatataagctaccagaaaagaaccgagagatgctggaacttctgataagacacttggtcaatgtgtgtgagcacagcaaagagaatcttatgaccccctccaacatgggagtaatctttgggcccaccctgatgagagctcaggaggacactgtggccgccatgatgaacatcaaattccagaacatagtggtggaaatactaatcgagcactttggcaagatctatttaggtccacctgaggaaagcgctgcaccgccagtgcctccgcctcgggtgacagcaagaaggcacaaaccaatcacgatttcaaagcgcttgctgcgagaaaggacggttttctatacttcttccctggatgaaagcgaagatgaaatccaacatcaaacaccgaatggtactatcaccagcagcatagaaccccccaagccaccacaacaccccaaactacctattcagaggagtggggaaactgatcctgggaggaagtccccaagcaggcctattttggatggcaagttggagccctgcccagaggtggacgtggggaagttggtgtctaggctgcaggatggagggaccaagatcaccccaaaggccaccaatggacccatgccaggctctgggcccaccaagaccccctctttccacataaagagaccagctccccggcccctggcccaccacaaggagggggatgctgacagtttcagcaaagtgcggcctccaggagaaaagccaaccatcatccgccccccagtgaggcccccagatcctccctgccgggcagctactccccaaaagccagaaccaaagccagatattgtggctggcaatgcgggggaaatcacatcatctgtggtggcttccaggaccaggttttttgaaacagcttcccggaaaacaggaagttctcaaggcagacttcctggagatgaaagt

SEQ ID NO: 59937 - DNA, 1570 bp, Homo sapiens
gggtcacgccccgcccgggagcgcctcgggtcagtaactcgggaagacgaccaagcgggagcgggagcgggagcgggagccggagcgagagcgcgcgggcgcggccgacagtgcctgatttgagatggggtcccaggtctcggtggaatcgggagctctgcacgtggtgattgtgggtgggggctttggcgggatcgcagcagccagccagctgcaggccctgaacgtccccttcatgctggtggacatgaaggactccttccaccacaatgtggctgctctccgagcctccgtggagacagggttcgccaaaaagacattcatttcttactcggtgactttcaaggacaacttccggcaggggctagtagtggggatagacctgaagaaccagatggtgctgctgcagggtggcgaggccctgcccttctctcatcttatcctggccacgggcagcactgggcccttcccgggcaagtttaatgaggtttccagccagcaggccgctatccaggcctatgaggacatggtgaggcaggtccagcgctcacggttcatcgtggtggtgggaggaggctcggctggagtggagatggcagcagagattaaaacagaatatcctgagaaagaggtcactctcattcactcccaagtggccctggctgacaaggagctcctgccctccgtccggcaggaagtgaaggagatcctcctccggaagggcgtgcagctgctgctgagtgagcgggtgagcaatctggaggagctgcctctcaatgagtatcgagagtacatcaaagtgcagacggacaaaggcacagaggtggccaccaacctggtgattctctgcaccggcatcaagatcaacagctccgcctaccgcaaagcatttgagagcagactagccagcagtggtgctctgagagtgaacgagcacctccaggtggagggccacagcaacgtctacgccattggtgactgtgccgacgtgaggacgcccaagatggcctatcttgccggcctccacgccaacatcgccgtggccaacatcgtcaactctgtgaagcagcggcctctccaggcctacaagccgggtgcactgacgttcctcctgtccatggggagaaatgacggtgtgggccaaatcagtggcttctatgtgggccggctcatggttcggctgaccaagagccgggacctgttcgtctctacgagctggaaaaccatgaggcagtctccaccttgatggagaggccaggcgggagaactaccgcagcaggccaagtggaacccctgggagatgacaggacaccacctctgaccccacaggaaccctgtcggtgtgcaccagcgcatccagctctcatgtctctgagatgacatgggtgttttgtccagactgggatgacggcagctttggggcagcagaggaggcatttttcagatgttttcatcttcgaatgaacttggtgatctggatgtctgcggcaagtctcagcaatctctttatgaatcatcattattattatggttcagttcatggtctttcccagggcctgggtgctgatgc

SEQ ID NO: 59938 - DNA, 1104 bp, Homo sapiens
ggttttttttttaaaaaataaataatgagcttttattattctcaacaacagagaagactccagcctgatgtctatgggacctgagtccacactgtggagggcacaagctgtgggagggcctggaagacacgcctcagagattctcccagtcctgccaccctgtgggagacacttcaaaggaatcgtaaactcatgtgaccagcagggaggacaacgatgaagaaactttcctgcctaaaatcagctgctgtccagagctagcacctggaaggagacactccctctcctggggtcacatcttcactgcaaggcgggtgggagctcactgctgtgacccacatatactcctctctcggcgtctctatcctgctgctttctctgactgcatcttcctctgttccttggtcagtgtttgagaagagaatgttgaacaagtcacatccttgtcactctgagtcagaaccctcatttgacttggaagatttgtgcttccgttttttcttctttttcttttctttcttccttttcttatgcttttctttcttcttctttttcttgtgtttctctttaccttcagaggaactggagctgctcctatcttcacctgaggtagaatcctccagtaactgttttaactgctgtatccttacattcttttcatgttgtttattgtctcgtatgatgtcatacatgaaatcctcatgtgctactctgaactgttgtaacttttggttgtctttgataaagaaagggcattctttgtagcctgttcggtgaccgtaccatttgcaatgccaaccttgataagcccaggaggaggtttttcataactagcagcgccgtggccagtccccgccgcccattctctcttcttccgggcctcgccacaccaacactgcaggacccgtgtcctcgtcccttctccatagcagaggatgaaaagaacggggtttctccatgtcgcagtggcccagggaactcagaggtggagcgcgggggcagcgtgctcggttgaacttgcctgttcggtccacaaatgccgagcaagcgccaataactcttggcttccacgtaatcgtcgtcccgggaaatccaagccgggcg

SEQ ID NO: 59939 - DNA, 3205 bp, Homo sapiens
ttttttttttttcacatacacacattttatttttcataaaataaaggataatgtgcccacccataccctgtaagtttcatagcctaaaagtcagtttcatagcctagaagtcttcctagtagtcagattttctgtcccccagagggagaactcccgcacccccagttcccagggggcctggtgtttgaggagctgcatcaagctgcatcttcttacaagcccaggggagaaaggatgtgtttaagggtagaagttgttcattttgttttcctttgcaagattttgatagaatctagtataaaggctgtctggcttagctcagaatgcaagaaaaggtgttattctttcgcatttgggcacttcacagagggcatgggcactcccccatctaaacaggcttgaaaaaggacacagacccaagagaggcccttgcggaggcccagcaaagagtggttcaggatgcacagacaggctctctggggctgtgggccaggagtgggaaagccaccttagtcctgctggagcagatttgggaagggtcatgggaacaagtttctctgctctggggtctgggccacagtctaccatgtcccatctctctggttctgcccagtgttccttccttcctgtcatccccagcacctcatcagtgctccccgctcctgaacaccatggtcaatcatcctggggcttctcacatctgtgaaagaacaggtctctcgaccacctaggggtagacttccaggatggtgcctgcttaactttcctacaatccagggtcatcggggaaatgagccaggtggggagggtggagtctcacttgcagccagaaaccctgggatgtagcctatctgtgacaagggcagatcggcaaccatctgcaaccagaaacaggccgggtgttctatccactgcccccagatgctgcctcccaggttccaagagccaccttgagtcccagctcagctgccacccagacaccgagcattcgaccagggcagtgcagtacatggcggtgccttggaatccctggcatcaccctcccccgacctgcccctttttttcatccccacctgacatctctcctgtccttcaatacctcctggggctgttactcttcctggagaaggggctctcggtccccttccagaagcctctcatcctcctccttctccatgcagcccactgtggcagccaacccagcacccacgccacccccaaccacagcggcccctgtggcccccacggcagctccagcagccaccatcccagcctctgcagccagtgcagctgctgccatgccagcacccaccacgccccctgccaggcccatgagcccggcccccacagcaccccccacagcagctaggtggccacagaagcgcatcgtgtaggagtccatgaaggccttggccgtggcctgcagctcagcttccagtgcctccaaggtctgatctctccccttgcagagtaaggccacaccatggcgggccagaatggcatctttctgggtggagaggaggttccgcatggtgtctggcaggacccgcagcgcagagaatatgcgcttggtggctacgtcctgctgcctcacatactcctcgaactccctcttggcagcttccaccttcctcaggtcgtgcagctgagcagccatctcatccggagaggtgaaaccgggccctgtcctccccatccatcctgagaggttcttgatttcctgagctagctgctgccccgtgagtaggcgtctgtcccccctggccacggcgcgcccctcgttccagtacccctggcagcggctcttagcgtgctggggggccgcactcagcacatctgagacgtaggcccccagaaggtggcggaagtcatcatctgtgtcaccaccagggcttgcatggccttggttcatccgccgcctccctggggcaggcaagaggcagcaacgggctcgcttcccttgcagcagctcctgcaccttggggtatctgccagacaatctctggaagatgttgcctacatgcccctgccctgccttgttggggtgggatgagtcacgaactaagaggtccagatgctggattggcaccatcccataatgcttgcccatcacctcggccacgtggacaaacatctccagatagtccaggtctgtatccttcagctcctgggaggtgctgaggatctggtaggagctcagcatcgtggtgagagcacagagcttgatccttgtttccctgctcagctcagggctcatggcatcccctgtgtccaccaggaacaccgccaccttcttcccttctttccccagcaagaaggggtggctccacatccatatgcccctggcgaggccattggcgccccacctgcagccctgcagggatgcctctcctcctcttggccggccgccctcaccagactccaggcccggcaagccctgaagcaaatggttgaggaggaaggacttccctgagtgctgctcccccaggacagcgaggaggcagactggggtgtccctggccagagggtgcttcaggcagcggttgatggcccccatcctaaggatgaggcccccagaggcattgatgcggaccagcagcagcggctccgccctcacaggacacgtctcctgcagtgcagggggcagcggccgctgcggcaggagcttcatcttctcgcccaggctccggaggcccctcttctgcttgcatatcttccggcactcaggacagcagggcggctcacagcccgggagacggtgtgtgctgaagcaccgtatgcagaagtcgtggccacagtccagcgagatggggtcgcgcaacctctccaggcagatggagcaggtagggagctcccggggcgccatgggctggggccccaggcctagctccaacttggggaaaggtgtatgggaccaactgttgccgctgtttcccatgaagctctgttttctctcccgtttgccaagccgatgacaaaaggaagtgactgacaaggcgggccttggcatgggaggctgggatggggagagggtccggatgcagagggggaggccccgagaccttcaaccagaggtaaggatgccttttctcccggaaaggctagcaggctgcggtaggtggaaggtgaggtcgggggatggtatccccgaggagctgactcccggtcagagctggaaaagaaatgtgccagtcaggaaagagga

SEQ ID NO: 59940 - DNA, 2279 bp, Homo sapiens
ggtcgacatcactgttaaggagatcttcatgtgattcactaaaggagatctacatgtatttttcacatgaagatctcctttagtaatcactgttaaggagatcttcatgtgaaaaatacatgtagatctccttcctttagtaatcactgttaaggagatcttcatgtgaaaaatacatgtagaagttttaaaaatttgtggatataattgtcattcagaattaagcaggttgattgctgttatctaggatgggtctcttcctttatgtttttcagtcacataatcttgatttccatagttatcacatgtacttaaaggaagttaatcaatgcctatatggtccaaggtataatttgcacacagtagtttttggtttttatattgtggatcatatgtatcaaaggtaatattcataaagaacaatgttatagttggctacaaagggacaattccacatttctatacagggaatattttaagggtagagttatatcagctatggtgattgagtttaaatatccctgcagggtcaggaacaaaccagctttcccataagtcgttgtgaacactagggaagtcccaaggtttatgtcttccattccagtggagtaatttagcttcctgcagaaaatgctccgaatatctggcatctggattccagcccaggtgccttatgtgccacagggggttaattgtggaatatttcccatgaaacacaatcagcattggggaggtggccacccctcctcccagggagctgctatagaggttttcctccacattcttttgcatccatttctccaattgcttggtgatgcgctggtgcttccattctgtcatgttggcaacaatcacaccaggattgaaagagcaggtgctggggctgatgccaaggtccttgatggccttcttccggtagtccagatagcccatatatgtgttctgaagtcccacgagtctgtttatgtcctgagcagagggcaaatcgcagtcatctgagaaagccgccgcgtggcccagggccaaggtggtgtcatacagttcttggatatcaccttgtacaattacatcatcgtccaaatagatgactttctcgtgttggtggataagtagagggagataaaatcgaacaaagttcagaggctggagcaattcaggcctcgatgagtctggtctgatcttccctttgaggcccatcgggttgaattccacgattttaaagtttatttctctcagtttggaatgttcaatccattttcgtattcgagtcagagtattccggagtcccactacatagaacaagatgttggcgtcagtgttgctgtagatgctattgatggcagccatagtggcacccatcctccctgctgcagcacaaatcaccacaggaatctcttcttccagttcttcaggagtctcggattcatcatctgcgtcattcttgggcacagtccccttatgaactttcttatacagaatcacacagagggtcacgatcagaaggaacagcagcacctgattaatttttcgtaacagagccatgtgtattcatgcggataagaactgtaaccctggagaacttcctttcctatggcaggcccagggactattcaagaacagatgtccaatactcagctcacaatcttcttccacgctctgcaccttctaacctcagcccacctccacgctgctcttcccacaggacctggtgaatggtgagggtagggctttgggctcctcggtccagaagagctgcaaggcagagcgttcaaatcgtggctggccctgggctgccgccctcacgctgcttcggctgcttctaagatcccattggaagtcccaaagggctggagagccccaaggccaatattacgtttccaaaagaatattcctccccgacccgcactcccctttgcttgcgttgacttcggaacgtctcgggtttcttccacctctgcgcgaagccgctgggaacccaggagttgcgctggcagagaggggcggccccaaaaaccacttccagatgtgctcggctggccggctcggatgcgccagacttcctctggctaagtgcaaaacatgcaaaaaacaacgctgttctcttgtggctcacggttcccaagcttcctggcatggctccgcacaaagctgccttcggttcgcccggcaggctttgtagcgaccttccctgcccgggtcccagtcacggtcgggagcagccgccgtggcccgggctcgcgaggcaggctcccgcccgcaccctcccgtgtgagacgaaa

SEQ ID NO: 59941 - DNA, 1849 bp, Homo sapiens
cacaggctgagtgctgcggcgcgatccttgcttccctgagcgttggcccgggaggaaagaagatggtgctggatctggatttgtttcgggtggataaaggaggggacccagccctcatccgagagacgcaggagaagcgcttcaaggacccgggactagtggaccagctggtgaaggcagacagcgagtggcgacgatgtagatttcgggcagacaacttgaacaagctgaagaacctatgcagcaagacaatcggagagaaaatgaagaaaaaagagccagtgggagatgatgagtctgtcccagagaatgtgctgagtttcgatgaccttactgcagacgctttagctaacctgaaagtctcacaaatcaaaaaagtccgactcctcattgatgaagccatcctgaagtgtgacgcggagcggataaagttggaagcagagcggtttgagaacctccgagagattgggaaccttctgcacccttctgtacccatcagtaacgatgaggatgtggacaacaaagtagagaggatttggggtgattgtacagtcaggaagaagtactctcatgtggacctggtggtgatggtagatggctttgaaggcgaaaagggggccgtggtggctgggagtcgagggtacttcttgaagggggtcctggtgttcctggaacaggctctcatccagtatgcccttcgcaccttgggaagtcggggctacattcccatttataccccctttttcatgaggaaggaggtcatgcaggaggtggcacagctcagccagtttgatgaagaactttataaggtgattggcaaaggcagtgaaaagtctgatgacaactcctatgatgagaagtacctgattgccacctcagagcagcccattgctgccctgcaccgggatgagtggctccggccggaggacctgcccatcaagtatgctggcctgtctacctgcttccgtcaggaggtgggctcccatggccgtgacacccgtggcatcttccgagtccatcagtttgagaagattgaacagtttgtgtactcatcaccccatgacaacaagtcatgggagatgtttgaagagatgattaccaccgcagaggagttctaccagtccctggggattccttaccacattgtgaatattgtctcaggttctttgaatcatgctgccagtaagaagcttgacctggaggcctggtttccgggctcaggagccttccgtgagttggtctcctgttctaattgcacggattaccaggctcgccggcttcgaatccgatatgggcaaaccaagaagatgatggacaaggtggagtttgtccatatgctcaatgctaccatgtgcgccactacccgtaccatctgcgccatcctggagaactaccagacagagaagggcatcactgtgcctgagaaattgaaggagttcatgccgccaggactgcaagaactgatcccctttgtgaagcctgcgcccattgagcaggagccatcaaagaagcagaagaagcaacatgagggcagcaaaaagaaagcagcagcaagagacgtcaccctagaaaacaggctgcagaacatggaggtcaccgatgcttgaacattcctgcctccctatttgccaggctttcatttctgtctgctgagatctcagagcctgcccaacagcagggaagccaagcacccattcatccccctgcccccatctgactgcgtagctgagaggggaacagtgccatgtaccacacagatgttcctgtctcctcgcatgggcatagggacccatcattgatgactgatgaaaccatgtaataaagcatctctggggagggaaaaaaaaaa

SEQ ID NO: 59942 - DNA, 1780 bp, Homo sapiens
tttcgtccttgagcccagtgggtcaaggctgctttgagccgtgatcatgccactgtactccagtctgggcaacgggaagactctgtaaaagcgaatgattaaaaataagtgttgggattatattttctttggatttctcttttctatttaaagattgccctatcagaatcccatcttcatttttttgttctttctgacataggttttcaagggacatgagtgacccgaggatggtgttgagcctctctttgtaagggttgtttctttgttactcacgtactggtaattatcttaccatctctgcagagcccacccacctttgggttcctgttggacatcgatggagtgcttgtgcggggccacagagtgatccctgctgctctgaaagccttccgaaggctggtgaactcccaggggcagctgcgggtgcccgtggtttttgttacaaatgctgggaacatcttacaacacagcaaagcccaggagctgtcagccctgctggggtgcgaggtggatgcagaccaagttatcctctctcacagccccatgaagctcttctccgagtaccatgagaagcggatgctggtgtctggacaggggcccgtgatggaaaatgcccagggactgggcttccgaaatgtcgtcaccgtggatgagctgcggatggcctttcctctgcttgacatggtggacctggagcggcggctaaagaccacgcccctcccgaggaatgacttcccccgcattgaaggggtgctcctcctaggggagccggtccgctgggagaccagcctgcagctgatcatggatgtcctcctcagcaatgggagccctggggctggcctggcaacacccccctacccccacctccccgtcctagccagcaacatggatctcctgtggatggctgaagccaagatgcccaggtttggacatggcacctttctgctgtgcctggaaaccatttaccagaaagtgacgggcaaggagctgagatacgagggcctgatgggcaaacccagcatcctcacttaccagtatgccgaggacctgatcaggcgacaggcggagaggcggggctgggccgcccccatccggaagctctatgctgtgggtgataaccctatgtctgacgtatacggcgccaacctgttccaccagtacctgcagaaggcaacgcatgatggggcgccagaactaggggccgggggcacacggcagcaacagccctcagcaagccagagctgcatctccatcctggtgtgtacaggcgtctacaatcccaggaacccacagtccacggagcctgtccttggaggaggggagcctccattccacgggcaccgagacttatgcttcagtccagggctcatggaggcctcccacgtggtgaatgacgtgaatgaggctgtgcagctggtcttccgcaaggagggctgggctttggagtgagggcagtgcggtggaggtgagggggtgagcctggacctgtgggcgagtcccattggctgggctctggcctgatcactgggctcaggtcagggcttggttcccttgccacccttcttgctgccccatgagtgtggcattactggtcacttggaagaagacagtgactctttttccctgctgggtagcattttgtatggaacggttggaattttctgggcccagttcccacgtgcctttcgtggcagtctaacctcaggccattctcttcccctgtgtgcctcagtgtccttctcatttcagtagggacttctgaagtgggagcggtcgc

SEQ ID NO: 59943 - DNA, 5677 bp, Homo sapiens
tttcgtgtccgctcggccgggtgcgccgccccagtgctctgtgggatactggaagtctcgagcgtcggctccgggttcccagccctcctctggcccgcactcatagaaacattcacacaccccctgcctcccctctcttccctctccgcctcccccttccccccctcgcgataagaagacccggcggcaggagaggggatgaagatggcggacgcgaagcagaagcggaacgagcagctgaaacgctggatcggctccgagacggacctcgagcctccggtggtgaagcgccagaagaccaaggtgaagttcgacgatggcgccgtcttcctggctgcttgctccagcggcgacacggacgaggtcctcaagctgctgcaccgcggcgccgacatcaattacgccaatgtggacggactcactgccctgcaccaggcttgcattgatgacaatgttgatatggtgaagtttctggtagaaaatggagcaaatattaatcaacctgataatgaaggctggataccactacatgcagcagcttcctgtggatatcttgatattgcagagtttttgattggtcaaggagcacatgtaggggctgtcaacagtgaaggagatacacctttagatattgcggaggaggaggcaatggaagagctacttcaaaatgaagttaatcggcaaggggttgatatagaagcagctcgaaaggaagaagaacggatcatgcttagagatgccaggcagtggctaaatagtggtcatataaatgatgtccggcatgcaaaatctggaggtacagcacttcacgttgcagctgctaaaggctatacggaagttttaaaacttttaatacaggcaggctatgatgttaatattaaagactatgatggctggacacctcttcatgctgcagctcattggggtaaagaagaagcatgtcgaattttagtggacaatctgtgtgatatggagatggtcaacaaagtgggccaaacagcctttgatgtagcagatgaagacattttaggatatttagaagagttgcaaaagaaacaaaatctgctccatagtgaaaaacgggacaagaaatctccactaattgaatcaacagcaaatatggacaataatcagtcacagaagacctttaaaaacaaagagacgttgattattgaaccagagaaaaatgcatcccgtattgaatctctggaacaagaaaaggttgatgaagaagaagaaggaaagaaggatgagtctagctgctctagtgaagaagatgaggaagatgactcggaatcagaagctgaaacagataagacaaaacccctggcttctgtaactaatgccaacacttctagtacacaagcagctcctgtagctgttacaacacctactgtgtcatcaggtcaagcaacacctacatcacctattaaaaagtttccaaccacagctacaaaaatttctcccaaagaagaagagagaaaagatgagtctcctgcaacttggaggttaggacttagaaagacgggcagctatggtgcacttgctgaaatcacagcatctaaagagggtcagaaagaaaaagatactgcaggtgttacacgttcagcttcaagtcccagactttcctcctctttggataataaagaaaaggagaaagatagtaaaggaactaggcttgcatatgttgcacctacaataccaagacgactagccagtacatctgacattgaagagaaagaaaacagagattcttcaagtttgcgaacaagtagttcatatacaaggagaaaatgggaagatgatcttaaaaaaaatagctcagttaatgaaggatcaacgtatcataaaagttgctcctttggtagaagacaagatgatttgattagttctagtgttccaagcaccacatcaacaccaacagttacctctgcagctgggcttcagaaaagcctgctttccagcacaagcactactacaaagattacaacgggttcttcctcagcaggcacacaaagcagtacctcaaatcgtttgtgggctgaggatagtactgagaaagaaaaggacagtgttcctacggcagtgaccattcctgttgctccaactgttgtaaatgctgcagcttctaccacaaccctgactacaactactgctggcactgtctcctccacaacagaggtcagggagagacgcagatcatacctcactcctgttagggatgaagagtctgaatcccaaagaaaagcaagatctagacaagcaagacaatctagaagatcaacacagggagtgacattaactgatcttcaagaagctgagaaaacaataggaagaagtcgttctacccgaaccagagaacaagaaaatgaagaaaaagaaaaagaggaaaaagagaaacaagataaagagaaacaagaagaaaagaaggagtcagaaacatctagagaagatgaatataaacaaaagtactccagaacgtatgatgagacttaccagcgttataggccagtatcaacttcaagttcaaccactccatcctcttcactttctactatgagcagttcactgtatgcttcaagtcaactaaacaggccaaatagtcttgtaggcataacttctgcttactccagaggaataacaaaagaaaatgaaagagagggagaaaaaagagaagaggagaaagaaggagaagataaatcacaacctaaatcaatcagagaacgacgacgaccaagagagaaaagaagatctacaggagtttcattttggacacaagatagtgatgaaaatgaacaagaacaacaatcagacacagaagagggatccaataagaaagaaactcagacggattccatttctagatatgaaaccagttctacatcagctggtgatcgatatgattccttgctgggtcgctctggatcatacagttacttagaagaaagaaaaccttacagcagcaggctagaaaaggatgactcaactgactttaaaaagctttatgaacaaattctagctgaaaatgaaaagctgaaggcacagctacatgatacaaatatggaactaacagatcttaaattacagttggaaaaggccacccagagacaagaaagatttgctgatagatcactgttggaaatggaaaaaagggaacgaagagctctagaaagaagaatatctgaaatggaagaagagctcaaaatgttaccagacctaaaagcagacaaccagaggctaaaggatgaaaatggggccttgatcagagttataagcaaactttccaaataaaaaaaaaaaagcagcaagtaatggaattgcacatattagtaacccagtggaccataattggcagtcactggaagtctgggaagaatccttggagactgtcattttcggatatcctgccaaatgccctcttatctagaatttttgtttcattttgtttaattttctggggtgtttttgttgttgttggtttgttttttgttttttttttttaatcaagaccattgtttcatgttaatgcagctgctgagaagatttttttttaatgactgaggaaaacttgtttacagctccagcatataaggaaagtgttcaaggccagatatgcctcagatatttaacccagtaaggccttagttgtaccataaatacttttgtggtcaacaaaaacttttcagctcttcacagaagacagttactcaacattttttggatgtgccacagtttcgagtttttcgatatttaaattttttggcttttcatctaagtttgggtttgtattttttccttctaaactcttcatgtggcagagtcttctatgttttcacagctttttcattacagaaaagaacacttgctcttctgtgattattgtcatgtattagggctaatgctgggttgcctcccacctggaactgaattgcttggtggaacatatgctttcactgtttgtgcaatatgcatttatttcttatatgaatgctttaaagtcatttgaggttagatcttttaattcctattttctgcttcattggtcactttttttttattgtagtataagatgttagattctgtaatcttcacattcattttagcaggtactgagtgatgctgtatatacaaataagtgtattgttttgatttttagaccaccacatggcatgcttgactatttcttatttcaaatgtctgctaatgcagagtaggctactccatgatagtgttaaaaaacaaaatttgctaacaatgtgatataaagactttaaaagttacacattatgtggagccctatcatctttacaaaagtttcctactgtaaagtgcttttattttcagttttcatttgatagtactcaaccataattaaagttgcataagataattgctttacatttcacatacctatatttatctgagtgctgtctaaaactgttgtgctagccaaagtaatgctatgaaatcatttgcagaattaacccgtgagttaatgttaaatgcactgttattgccatgtgaagaggcatcgactttgataccaccatcatgttcagaccattttatacatttcagtggccttttttttttttaaggaaaaaaaagcgcaaaaccaagtacatagtgacgatggcttttatttggacaaatagcttttatattttcattaaaccatgcaaaaaatactacatctttctggcacataactgtctccttaaccactgaacagttcagccatttgaataaattgtacattgtaaagcttatagtagctgattgtattattgattgtattgtatactatattaaatgtgaatttgtaccccttcattttaaaaggtcattgtgttctactgcctattttagattactttggggttggggaagggtgttttggtaagcaggattttaagtcctctctctctcgattggttttatgaagatataaggttatgctcttactaccaagctcaggattcttgattttaaaggtacaaggatagttgtgggagttttatttttggttatatttgaactgtatgaatggtaggtctgaatattgagaatttccatggtcttatgtggaggtaaaatatacagataactgatcagtttgagtgactgcaacatgttctggttgcacaacagttaggcatgctatggtttatatttgtgaagtttggatgcctgtgaagaatgattaaatacatgtttctaatattttagtgttttgtatttaggttatttattctttgtatctaaaactgaacagctactgtgctatattgattttattggtagtattgagcagaccttgtttctgcatgaaactagttgcaaaacccactattttggaaataaaaatgtattttgacatatacaaataaaatgaataaaactattttaaatgtgtgaacttttaatgaagacattttaaattttgttctgagatatttaaattctgcatgggtattttttcactaattgctttacttggataccaatttgaataatttctgaaattgtaatattgtgataatttgcacagcattgtacatgcacatctgtaaatgcaatcttaattgccatatttatgcaatcctgtgtaccaatttggacaaatgtttatatattttacataaagctgtctgtatgcagaatctgaaaaaaaaaa

SEQ ID NO: 59944 - DNA, 1938 bp, Homo sapiens
aggaggagcttgatggaagcgtgcgagaaggggcgtaactgatttggaaaccagaggaaaggcgctgttttcaccgaattagaatcgcgggaaaatagagaagagtttgtttgaaggtctcgcgagatcgagtgagtacggctcgccaagttggagcgctctcgcgatagacacagcaactattcagctgcgaggggacgggagaggtggtgagcactctcgcgagatttgaaggagcggcggaggccagagggaggagaggaccggaagtccttcatctcaagcatccaatgctgaaagcggcctgattttctctaccggaagcccttttccagaggctgggaacacggcccacctagcaggaagtcccacctccttgagctccgccacccttcccgaagtttttctgtcacctgtgttaggctccgtcccctttccgcgttttatccccgtaccagaaaaggatacatttagtgcctcccacccagctccactaaacgggttggatatctcattctttgagttggtgttccttccccggcgcccccatgtagctgggaagtgggacctgggggtggttggacccctgggatcctaaaggaggggcagggagggcgcagaactccgcttctgctccttgctaccaggacgcgcggcctcctcagcctctttcctcccgctgccatgcaccctgcagccttcccgcttcctgtggttgtggccgctgtgctgtggggagcggccccgacccgggggctcattcgagcgacctcggaccacaatgccagcatggactttgcagaccttccagctctgtttggggctaccttgagccaggagggcctccaggggttccttgtggaggctcacccagacaatgcctgcagccccattgccccaccacccccagccccggtcaatgggtcagtctttattgcgctgcttcgaagattcgactgcaactttgacctcaaggtcctaaatgcccagaaggctggatatggtgccgctgtagtacacaatgtgaattccaatgaacttctgaacatggtgtggaatagtgaggaaatccagcagcagatctggatcccgtctgtatttattggggagagaagctccgagtacctgcgtgccctctttgtctacgagaagggggctcgggtgcttctggttccagacaataccttccccttgggctattacctcatccctttcacagggattgtgggactgctggttttggccatgggagcagtaatgatagctcgttgtatccagcaccggaaacggctccagcggaatcgacttaccaaagagcaactgaaacagattcctacacatgactatcagaaggaccagtatgatgtctgtgccatttgcctggatgaatatgaggatggggacaagctgcgggtactcccctgtgctcatgcctaccacagccgctgcgtggacccctggctcactcagacccggaagacctgccccatttgcaagcagcctgttcatcggggtcctggggacgaagaccaagaggaagaaactcaagggcaagaggagggtgatgaaggggagccaagggaccaccctgcctcagaaaggaccccacttttgggttctagccccactcttcccacctcctttggttccttagccccagctccccttgtttttcctgggccttcaacagatcccccactgtcccctccctcttcccctgttatcctggtttaataaccccccacacatacacctctggtgacctatttgcacagaccgtcgtcttccctccagtcttctgagggataggggacattccatcccaagcttctcccttacccacacctatccttttgaggggctttggggtggggctggggcaagcagagggactgggtcttcacttcttgggctaataaaattgtttctttgtggacc

SEQ ID NO: 59945 - DNA, 5365 bp, Homo sapiens
tgatcgaccgccctggaattcccgggtcgacgatttcgtcacgaacctaattcatctctccagcaaaggacacatctctccagcaaaggacacctctctccagcaaaggacacctgcagagatgtccccagtccttcacttctatgttcgtccctctggccatgagggggcagcctctggacacactcggaggaaactgcaagggaaactgccagagctgcagggcgtcgagactgaactgtgctacaacgtgaactggacagctgaggccctccccagtgctgaggagacaaagaagctgatgtggctgtttggttgccccttactgctggatgatgttgctcgggagtcctggctccttcctggctccaatgacctgctgctggaggtcgggcccaggctgaacttctccaccccaacatccaccaacatcgtgtcagtgtgccgcgccactgggctggggcctgtggatcgtgtggagaccacccggcgctaccggctctcgtttgcccaccccccgtcagctgaggtggaagccattgctctggctaccctgcacgaccggatgacagagcagcacttcccccatcccatccagagtttctcccctgagagcatgccggaacccctcaatggccctatcaatatactgggtgagggccggcttgcgctggagaaggccaaccaggagcttggtctggctttagactcttgggacctagacttctacaccaagcgcttccaggagctacagcggaacccgagcactgtggaggcctttgacttggcgcagtccaatagcgagcacagccgacactggttcttcaagggccagctccacgtggatgggcagaagctggtgcactcactgtttgagtccatcatgagcacccaggaatcctcgaaccccaacaacgtcctcaaattctgtgataacagcagtgcaatccagggaaaggaagtccgattcctacggcctgaggaccccacacggccaagccgcttccagcaacagcaagggctgagacatgttgtcttcacagcagagactcacaactttcccacaggagtatgcccctttagtggtgcaaccactggcacagggggccggattcgagatgtccagtgcacaggccgcggggcccacgtggtggctggcactgccggctattgctttggaaatctgcatattccaggttacaatctgccctgggaggatctaagcttccagtatcctgggaattttgcccggcccctggaggttgccattgaagccagtaatggagcttctgactatggcaacaagtttggggaaccagtgctggctggcttcgcccgctccttgggcctccagctcccagacggccagcggcgtgagtggatcaagcccatcatgtttagtgggggcattgggtccatggaagctgaccacataagcaaggaggccccagagccaggcatggaagttgtaaaggttggaggtcccgtctacaggattggagttggaggtggagctgcttcatctgtgcaggtgcagggagataacaccagtgacctggactttggggctgtgcagcgaggagacccggagatggaacagaagatgaaccgtgtgatcagggcttgtgtggaggcccccaagggaaaccccatctgcagccttcatgatcagggcgctggtggcaatggcaatgtcctaaaagagctgagtgacccagctggagccatcatttacaccagccgcttccagcttggggacccaaccctgaatgccctggaaatctggggggctgagtaccaggaatcaaatgctcttctgctgaggtcccccaaccgggacttcctgactcatgtcagtgcccgtgaacgttgcccggcttgcttcgtgggcaccatcactggagaccggagaatagtgctggtggacgatcgggagtgtcctgtcagaagaaatggccagggggatgcccccccgacacccccgccaacccctgtggacctggagctcgaatgggtgctgggcaagatgcctcggaaggagttcttcctgcagaggaagccccccatgctgcagcctctggccttgcccccagggctgagcgtgcaccaggctctggagagggttctgaggctgcccgccgtggccagcaagcgctacctcaccaataaggtggaccgctccgtgggaggcctggtggcccagcagcagtgcgtggggcccctgcaaactcctctggcagatgtagcggttgtggcactgagccatgaggagctcataggggctgccacagccttgggagaacagccagtcaagagcctgctggacccaaaagtcgccgcccggctggccgtggccgaagccctcaccaacctggtgtttgctctggtcactgacctccgggatgtgaagtgtagcgggaactggatgtgggcagccaagctcccaggggagggcgcagctttggcggatgcctgtgaggctatggtggcagtgatggcagccctgggtgtggcagtggatggtggcaaggactccctcagcatggctgctcgggttggcactgagaccgtgcgggctcctgggtcactggtcatctcagcctatgccgtctgcccagacatcacagccactgtgaccccagacctcaagcatcctgaagggagaggccatctgctctatgtggctctgagccctgggcagcaccggctcgggggcacagctctggcccagtgcttctcccagcttggggaacaccctccagacctggaccttcctgagaacttggtgcgggccttcagcatcactcaggggctgctgaaagaccgcctcctctgctcaggccacgatgtcagtgacggaggcctcgtcacatgcctgctggagatggcctttgctggaaattgcgggctacaggtggatgtgcctgtccccagggttgatgtcctgtctgtgctgttcgctgaggagccaggcctcgtgctggaggtgcaggagccagacctggcccaggtgctgaagcgttaccgggatgctggcctccattgcctggagctgggccacacaggcgaggccgggccccacgccatggtccgggtgtcagtgaacggggctgtggttctggaggagcctgttggggagctgcgagccctctgggaggagacgagtttccagctggaccggctacaggcagagcctcgctgtgtggcagaggaggaacggggcctgagggagcggatggggcccagctattgcctgccccccacctttcccaaagcctccgtgccccgtgagcctggtggtcccagcccccgagtcgccatcttgcgagaggagggcagtaatggagaccgggagatggccgatgccttccacttagctgggtttgaggtatgggacgtgaccatgcaggacctctgctctggggcaattgggctggacactttccgtggcgtggccttcgtgggcggcttcagctatgcagatgtcctgggctctgccaaagggtgggcagctgctgtgacctttcatcccagggctggggctgagctgaggcgcttccggaagcggccagacaccttcagcctgggcgtgtgtaatggctgtcaactgctggctctgctcggctgggtgggaggcgaccccaatgaggatgctgcagagatgggccctgactcccagccagcccggccaggccttctgctacgccacaacctgtctgggcgctacgagtctcgctgggccagcgtgcgtgtggggcctgggccagccctgatgctgcgagggatggagggcgccgtgctgcccgtgtggagtgcgcacggggaaggttacgtagcattttcttctccggaactccaagctcagattgaggccaggggcttggctccactgcactgggctgatgatgacgggaaccccacagagcagtaccctctgaatcccaatgggtccccagggggcgtggctggcatctgctcctgtgatggccgccacctggctgtcatgcctcaccctgagcgggccgttaggccttggcagtgggcatggcgaccccctccatttgatactctgaccacctccccctggctccagctctttatcaatgcccgaaactggaccctggaagggagctgctgactggccacaggggctcacctgggccccatggcttttcacctaagtgggtcctgccccctcccccatgaccttcaggagcaccccatattatttccaaaaatatcttggacagacaaggaccaaaatgccaaaatctcagcggactcgataatctgcctgctgatgttccttctgtggctgtgtctattttcagttctgctctaacatggcatgccctttctcagcccaggaaacagcatgtggttcagagaaaagagcgacaaggaaaagttaggactcctgaggtccgaacaggggcttctgttgcccacttcacaacacccagtgatcaccggtgtgcaattgcctccttggctctgagggatgttttgcgctcccttttctcatcattggggttagcgggtgcagacaaattcagcaatagtatgcagatcagcccctcaccacctcattgttctcatctggaactgaaactttctggatttctcttgaagtgctacactgcactgaatgtaaggaattgttgcttgtggaagtttctcagcgtttctggctgtcttagggctggcctcagaacccagcattcctgttatttgcttctaaattagcagctctctttttttttttttttttgaggcagtctcactctgtcacccaggctggagtgcagtggcgtgatctcggcccactgcaacctctgcctcctgggttcaagcaattttcctgcctcagcctcccgagtagctgggagtacaggcacacaccaccacacccagctaatttttgtatttttagtagagatagggtttcaccatgtctcccaggctggtctcaaactcctaacctcaagtgattcgcctgcctcggcctcccaaagtgctgggattacaggtgggagccactacagctggcccagcagctctgtttctgatagaggtggttggggctctcatccctagatcctaaccctttagtatgctggaattctactcttcacttactgcattgactgttgttgattagttattattgcaaagcactgtcaccggcctcagggagtttatgtgtaatagaattaaaaataatagctgtgtataacacttagctcaagccacgcatgtgtgaggcatttggtatgtatctgaattaattctcactaaaattcagcaaaggacttgatagcctctccccgccttttcaataaaggatgaatgaagaaaaaaaaaa

SEQ ID NO: 59946 - DNA, 594 bp, Homo sapiens
ttttttttttttcaaatgagttggtttaatttcaggtgatacaaagtttagggtagaacaaggaccaaagaacagactctggcaagattctgagctggttttactttaaattcacagttatggtaggaatgacttagtgaaaacaactaaagagatgatgagccactgtaagatttttctttttttacaaaagtttattcttaaatgtacaacagctccaagacaacacttaattccagctatacgtggcaaaagatgttatggcagggaatagagaggtttaaatacagatgaaataaagggtcaccatctcctcaggcacaaggaacagcttactttttgccagatttcttaattccacctgtggccaagggccccttccccgcggccttcgcttttagctcctcgagtttcttctgctcctctttttgtttctgcttgaaagccttatcttcctcgtccatctccttggcctgcttcttgggctgtttcagtggcttcttcttgccaccttcgcggccggacatggcgcctgccgccgcttccccagaccctgccaccggaccccttctgttgtcttctcgcagccgtaga

SEQ ID NO: 59947 - DNA, 1682 bp, Homo sapiens; identical to SEQ ID NO: 58672

SEQ ID NO: 59948 - DNA, 1938 bp, Homo sapiens
catgtcctttcagcaccacaagctcgggctgaggagggaggactcctggccgtcctcctcctcttcaaattggcttgaatctgctctgaccccccacgagtgcagcacagtctgggaagaaaggcgtaaggatggtgaagctgaacagtaaccccagcgagaagggaaccaagccgccttcagttgaggatggcttccagaccgtccctctcatcactcccttggaggttaatcacttacagctgcctgctccagaaaaggtgattgtgaagacaagaacggaatatcagccggaacagaagaacaaagggaagttccgggtgccaaaaatcgctgaatttacggtcaccatccttgtcagcctggccctagctttccttgcgtgcatcgtgttcctggtggtttacaaagccttcacctatgatcacagctgcccagagggattcgtctataagcacaaacgctgtatcccagcctccctggatgcttactactcctcccaggaccccaattccagaagccgcttctacacagtcatcagccactacagcgtggccaagcagagcactgcccgggccatcgggccgtggctgtcagcagccgctgtcatccatgagcccaagccgcccaagacccagggccactagaggcctgccccagccagaatggggggcggggtggagaggaggacccccattggctaagccaagctccagttacaagacaacactgtactcctgggatatgggggcgggggcggggcagggcagggtggggggaagaacgcaccaaaaacgtggtgtgtgctggagttgtctgaaccgatatttctttttgttccttggtattgttgattcgtcgccgagtcaggctcatgtacaaaggcatgtttcgtgttgattgttcccatgtaagatatttttaaagccactgcttattctttgttaggaaaatgtaacagcagaaaaggaaagaaacaaagaacatgaacaaaaagcattaaactggctccatcagaagacgttgaagggcagtgaagagcacagactctgtgggcttcttagataagaaaacgtagcttcagtgggggctccagggttgcagagtatgagtgacacagaccgggactattccattagcctgtggtctgcagggtaggcccgcaggaaatgaggaatggccgagctggagagaagagctgattttggcattactaagcccagaacgcacataacccatagtgaaatgtgctggcctctggtgcattttgcaagatgagcacaaactttctgggcctccatcctaggacctgggcagacccacatggcctgggctctgaatgcccaccctgcgacggtgggttctgcatcagcaaacgctgaggagtgggcagattttctttgtcttttgcttgcattttctagatccacacctggatactgcccatgttgacgagacagcagcagggggagagggagggaaggaaggtgcggctgcaagaaggaaggcacgggacaggcatgtgacactaggccacaagcgataagcacaggcacctgacttttaagtttttgtttgtttgttgtttcccaaagtgctgataacaataacaacaacaataggattccaaccaggagcctcaagtgacagccaggaagagacctgaaggttggggccaccacaatgccaaatcgtttctaaaggaagctgaaaaatgggactgtcttttgcccacttcgttgtgttaaaaggggacatttgtccaaactccccaaccgagttctagaagctcctgacaaggaggcagcatccagccttgaccaggcctcccagttccctggaaccgtatcaggcattcgcctgcctctcacaaatgtttcagggaggccagttctgcagggtgtcagctccaggacccacagggccagaaccagctgg

SEQ ID NO: 59949 - DNA, 1743 bp, Homo sapiens
cttcgtattgccgaaccggctcggaattcccgggtcgacgtttcgtggaccaggcgcctgtgcctcctcctcgtccctcgccgcgtccgcgaagcctggagccggcgggagccccgcgctcgccatgtcgggcgagctcagcaacaggttccaaggagggaaggcgttcggcttgctcaaagcccggcaggagaggaggctggccgagatcaaccgggagtttctgtgtgaccagaagtacagtgatgaagagaaccttccagaaaagctcacagccttcaaagagaagtacatggagtttgacctgaacaatgaaggcgagattgacctgatgtctttaaagaggatgatggagaagcttggtgtccccaagacccacctggagatgaagaagatgatctcagaggtgacaggaggggtcagtgacactatatcctaccgagactttgtgaacatgatgctggggaaacggtcggctgtcctcaagttagtcatgatgtttgaaggaaaagccaacgagagcagccccaagccagttggcccccctccagagagagacattgctagcctgccctgaggaccccgcctggactccccagccttcccaccccatacctccctcccgatcttgctgcccttcttgacacactgtgatctctctctctctcatttgtttggtcattgagggtttgtttgtgttttcatcaatgtctttgtaaagcacaaattatctgccttaaaggggctctgggtcggggaatcctgagccttgggtcccctccctctcttcttccctccttccccgctccctgtgcagaagggctgatatcaaaccaaaaactagagggggcagggccagggcagggaggcttccagcctgtgttcccctcacttggaggaaccagcactctccatcctttcagaaagtctccaagccaagttcaggctcactgacctggctctgacgaggaccccaggccactctgagaagaccttggagtagggacaaggctgcagggcctctttcgggtttccttggacagtgccatggttccagtgctctggtgtcacccaggacacagccactcggggccccgctgccccagctgatccccactcattccacacctcttctcatcctcagtgatgtgaaggtgggaaggaaaggagcttggcattgggagcccttcaagaaggtaccagaaggaaccctccagtcctgctctctggccacacctgtgcaggcagctgagaggcagcgtgcagccctactgtcccttactggggcagcagagggcttcggaggtagaagtgaggcctggggttttggggggaaaggtcagctcagtgctgttccaccttttagggaggttactgaggggaccaggatgggagaatgaggagtaaaatgctcacggcaaagtcagcagcactggtaagccaagactgagaaatacaaggttgcttgtctgaccccaatctgcttgaaacctgactctgcttctctcatttgtcttcctaccctactcacataattcactcattgactcactcattcaccagatatttattgacctgctattataagctttacatcctcccatgttgtcctggcatgtgcagtatacacggtctaactcatctctccccagatctctcagaaccttgagcttgggaattgaactggggtcacctgtgtcctttcttatggactcgcaggattttagaaccctaatgcacccg

SEQ ID NO: 59950 - DNA, 2682 bp, Homo sapiens
ttttggtccaaggggtttaaatgggggaccccccgggttttcccctccccgcggtgttaaaacccgggcccgggaattgaattttggggccccataaaaaaaattttaccttgccagcccgggggcgttaaacttggttccttaaaacgggcccccccttttttttttttttcatttttgtcatttattaacctggaagcaaatatgacaaaacagtcatactagtaagtcatctgaattttttaaatctcttaataaaacaaccaaatcccacgcaaatcagtccacaagggaggcccccgcctccacagtgcagggtgactgagtgtacaactacgggccaacccccgcctctcaaccggaagggagggcactcaaaagaggaatttatagaaaaggcggagagggcggacctcgggaaagggtctgggcgggagccccacctggctccccacccctcccgaaaccaggggaaaagcctgtggcgtggcgctgctgtctcccattagcagttacagggccgaggcttcccgctgattggtggaaattccgatcttctgatccctgatttgcatagagactggggcctgcacccccgccccccaccagcagcaatcggccaacgccaacggtgctgcgccaggagcgttctgggctcggcgccgcccagtcctcctggtcatctcggaagctgttttcttccagctgcttgggacagcttttgtgaatgcctcccttagggatgttcgaaagaggagtggcccgacactgctagaaactggtcctttccttcccacctgtggtaaggatagtttctgctacggcaagcactcaaactcaggctggtttgaagctaaaggattcagacgacttccaagtatcaagaatgaaagaaaaagaaacataataaggagcccaccaccaagacttgtagttatttcctcagaaagcccccatgccccatttgtgacaaaatccattcctgaagactgattctagaagaaaccaagtaagatctagaactttccccaccagcatcactttccaaaatgtaggcagaagtttaccaaatacaatttattcaggaaaaaaataaattttaagaacttatttttattttattttagaacttaaaaataaatttttaagaactaaaaaagtgaaagagcccagtggctgagcagaaaacagcttactacaaggagtaccagatcagggcagagacttcccagctgggtaaggcatgctttgagggaagactccaccagccctgccaggaaagggcagcaggcgcagtgcccctatggggcccacatggctggtaacagcagcaggacacctcttccaaagctgtccaccagccccactaggggctcctactcatggcaaaaaagactacatgagcccacaactgtcaactaacacagtgccacctcctcccaaagcaaacacatatacatacaatgttaagaacctattatcagaacagcagtgcagcagaccctggccttggtctctgaaagtcctgtgtcactggctgtaaggacgcttggccacaggttcctcctccttctcccgcttcagccattgctctaggagtcctgcagtgcctctcttggtggggagtggactcttctgcaggaactgactggaccactggggaacatctgactcttccttttgaggtgtttttgagtcttcctttttgggtgactttgtggccaaccactgcaacatcctctggctactgccacttgccctgagctcctttttgaccaccaagtcgacaggagccagacactcaggagtgttgtttcgcgagttgttcaccacagaagagactgcatggaaggtgatgttctctgttgggtggattaatttcagagcttcctgagttgagacttcaccaaagtcaagccatttagaaactgcctcctctccatctaatatggcaggcatcctgtggtggatgtcactcaagcctttgcaggaatccactgtgatgatggtataggaatacaggacatctcctccctctgggggctcccagcagtcaaagatcccggccattgtcagcagcctccagttgtcccagactttctcccagttctcaggactatctgcagcaccaatgctacctgacttctctgtcttgatttgaggaaaatagatgaagtatggctgcctctggtttgttccctgacatcgctgccactcatagaatccatctgctaaaacgacacagcgtcttccctttcccagaggcaccttaaatgaccgtttctccattacggtatcactacgacagttggtagtattgaactgcagcttggaaggatcactttctttgaaccaagaagggaccaagccccagcgcatgggagcaatgatacgctcagatgagtctgcatccttctcaaagtgcagtcgagacagaagcactgggctgttggattgaggactcttgttgtaagaggggcagtacttatcagggtccctccactccgggagccgctgctggccccgccgatcctggtaggcgcaagctctcgtgagaacatctctaggtaagtgacaggatgttcgcccacacattcttcaacaccgcccctcgcaacctcgccccggcagcgcgcgtcacctccctcgactctcctcacccccgctccgctccgctttggc

SEQ ID NO: 59951 - DNA, 1596 bp, Homo sapiens
tattactgcgagatgacgacagaacggggcgccggaagtggaagaccaggcagcccagctgaaggcagtaagctcggctcacagtcgcaggagagttctggggtacacgggcaaaggggcttgagaaggcccggaggcgaagccgaagagaagcaactgtgccccggagaagagaagctcgcccattccagactgggaaccagctttcagtgaagatggcagggccagaactgttgctcgactccaacatccgcctctgggtggtcctacccatcgttatcatcactttcttcgtaggcatgatccgccactacgtgtccatcctgctgcagagcgacaagaagctcacccaggaacaagtatctgacagtcaagtcctaattcgaagcagagtcctcagggaaaatggaaaatacattcccaaacagtctttcttgacacgaaaatattatttcaacaacccagaggatggatttttcaaaaaaactaaacggaaggtagtgccaccttctcctatgactgatcctactatgttgacagacatgatgaaagggaatgtaacaaatgtcctccctatgattcttattggtggatggatcaacatgacattctcaggctttgtcacaaccaaggtcccatttccactgaccctccgttttaagcctatgttacagcaaggaatcgagctactcacattagatgcatcctgggtgagttctgcatcctggtacttcctcaatgtatttgggcttcggagcatttactctctgattctgggccaagataatgccgctgaccaatcacgaatgatgcaggagcagatgacgggagcagccatggccatgcccgcagacacaaacaaagctttcaagacagagtgggaagctttggagctgacggatcaccagtgggcactagatgatgtcgaagaagagctcatggccaaagacctccacttcgaaggcatgttcaaaaaggaattacagacctctattttttgaagaccgagcagggattagctgtgtcaggaacttggagttgcacttaaccttgtaactttgtttggagctggcacctcttgaaataaaaaggaggatgcacgagctggcaggcatgcagcaaggcttgttcttgtctgggctgggttcccctttatgtttgaaactagaggaaataggagtatgctgggcaacttgttatttttaaaatgttgtaaatgttccttctggtgactcttagtaatgaaagtcggagaaagggggaaacctcaggctactgataatatataaaatcttggccgggcacagtggctcacgcctgtaatcccagcactttgggaggctgaggcgggtggatcacttgaggtcaggagttcaagatcagcctggccaacatggtgaaaccccgtctctactaaaatacaaaaattagccgggcgtggtggcaggcgcctgtaatcccagctacttgagaggctaaggcacgagaatcgcttgaacctaggaggcggaggatgcagtgagctgacatcgtgccactgcgctccagcctgggcgacagagcaaaactccatctgaaaaaaaaaaaaaagtcgac

SEQ ID NO: 59952 - DNA, 3252 bp, Homo sapiens
tttcgtgccggaaggggaagtttcgcctcagaaggctgcctcgctggtccgaattcggtggcgccacgtccgcccgtctccgccttctgcatcgcggcttcggcggcttccacctagacacctaacagtcgcggagccggccgcgtcgtgagggggtcggcacggggagtcgggcggtcttgtgcatcttggctacctgtgggtcgaagatgtcggacatcggagactggttcaggagcatcccggcgatcacgcgctattggttcgccgccaccgtcgccgtgcccttggtcggcaaactcggcctcatcagcccggcctacctcttcctctggcccgaagccttcctttatcgctttcagatttggaggccaatcactgccaccttttatttccctgtgggtccaggaactggatttctttatttggtcaatttatatttcttatatcagtattctacgcgacttgaaacaggagcttttgatgggaggccagcagactatttattcatgctcctctttaactggatttgcatcgtgattactggcttagcaatggatatgcagttgctgatgattcctctgatcatgtcagtactttatgtctgggcccagctgaacagagacatgattgtatcattttggtttggaacacgatttaaggcctgctatttaccctgggttatccttggattcaactatatcatcggaggctcggtaatcaatgagcttattggaaatctggttggacatctttattttttcctaatgttcagatacccaatggacttgggaggaagaaattttctatccacacctcagtttttgtaccgctggctgcccagtaggagaggaggagtatcaggatttggtgtgccccctgctagcatgaggcgagctgctgatcagaatggcggaggcgggagacacaactggggccagggctttcgacttggagaccagtgaaggggcggcctcgggcagccgctcctctcaagccacatttactcccagtgctgggtgcacttaacaactgcgttctggctaacactgttggacctgacccacactgaatgtagtctttcagtacgagacaaagtttcttaaatcccgaagaaaaatataagtgttccacaagtttcacgattctcattcaagtccttactgctgtgaagaacaaataccaactgtgcaaattgcaaaactgactacattttttggtgtcttctcttctcccctttccgtctgaataatgggttttagcgggtcctagtctgctggcattgagctggggctgggtcaccaaacccttcccaaaaggacccttatctctttcttgcacacatgcctctctcccacttttcccaacccccacatttgcaactagaagaggttgcccataaaattgctctgcccttgacaggttctgttatttattgacttttgccaaggcttggtcacaacaatcatattcacgtaattttccccctttggtggcagaactgtagcaatagggggagaagacaagcagcggatgaagcgttttctcagcttttggaattgcttcgacctgacatccgttgtaaccgtttgccacttcttcagatatttttataaaaaagtaccactgagtcagtgagggccacagattggtattaatgagatacgagggttgttgctgggtgtttgtttcctgagctaagtgatcaagactgtagtggagttgcagctaacatgggttaggtttaaaccgtgggggatgcaacccctttgcgtttcatatgtaggcctactggctttgtgtagctggagtagttgggttgctttgtgttaggaggatccagatcatgttggctacagggagatgctctctttgagaggctcctgggcattgattccatttcaatctcattctggatatgtgttcattgagtaaaggaggagagaccctcatacgctatttaaatgtcacttttttgcctatcccccgttttttggtcatgtttcaattaattgtgaggaaggcgcagctcctctctgcacgtagatcattttttaaagctaatgtaagcacatctaagggaataacatgatttaaggttgaaatggctttagaatcatttgggtttgagggtgtgttattttgagtcatgaatgtacaagctctgtgaatcataccagcttaaatacccacacctttttttcgtaggtgggcttttcctatcagagcttggctcataaccaaataaagttttttgaaggccatggcttttcacacagttattttattttatgacgttatctgaaagcagactgttaggagcagtattgagtggctgtcacactttgaggcaactaaaaaggcttcaaacgttttgatcagtttcttttcaggaaacattgtgctctaacagtatgactattctttcccccactcttaaacagtgtgatgtgtgttatcctaggaaatgagagttggcaaacaacttctcattttgaatagagtttgtgtgtacctctccatatttaatttatatgataaaataggtggggagagtctgaaccttaactgtcatgttttgttgttcatctgtggccacaataaagtttacttgtaaaattttagaggccattactccaattatgttgcacgtacactcattgtacaggcgtggagactcattgtatgtataagaatattctgacagtgagtgacccggagtctctggtgtaccctcttaccagtcagctgcctgcgagcagtcattttttcctaaaggtttacaagtatttagaactcttcagttcagggcaaaatgttcatgaagttattcctcttaaacatggttaggaagctgatgacgttattgattttgtctggattatgtttctggaataattttaccaaaacaagctatttgagttttgacttgacaaggcaaaacatgacagtggattctctttacaaatggaaaaaaaaaatccttattttgtataaaggacttccctttttgtaaactaatcctttttattggtaaaaattgtaaattaaaatgtgcaacttgaaggttgtctgtgttaagtttccatgtccctgctctgctgtctcttagatatcacataatttgtgtaaccaattatctcttgaagagcatttaggaagtacccagtattttttgctggattaattcctggatgcagaattcctgggttttcattttaatgaaggaggatgcttgctaactttgaaaaa

SEQ ID NO: 59953 - DNA, 3690 bp, Homo sapiens
tttcgtaaggctacagggtatccacgtgggttctgagcgtgtttctacgtccctggaagccggtcatttaagctcattcctcgccacggcttagtcaacatgggtcgctcgggaaagttgccctctggtgtctcagctaagttgaagcgctggaagaaaggccacagcagcgacagcaaccccgccatctgccgccaccgtcaggccgcccgcagccgcttcttcagccggccgtcaggaaggagtgacctgacagtcgatgctgtgaagttacataatgagctgcagtcagggtccttgcgcttgggcaaaagcgaagccccggagacgcccatggaagaagaggcggagctggttctcaccgagaagtcctcgggtaccttcctgagtggcctttccgactgcacaaacgtcaccttcagcaaagtacagcgcttctgggagtccaactcggctgcccacaaggagatctgtgctgttctggctgctgtcactgaggtgattcgctcccagggagggaaggagacggagactgagtacttcgctgctctgatccggaaggctgcccagcatggagtatgctcagtcctcaagggcagtgaattcatgtttgaaaaggcccctgcccatcatcctgctgccatttccactgccaagttctgcatccaggagattgagaagtctggaggctccaaggaggccaccaccacgctgcacatgctgacgctgctgaaggacctgctgccctgcttcccggaaggcctggtgaagagctgcagtgagactctcctcagggtcatgaccttgagccatgtgctggtgacagcctgtgccatgcaggcctttcacagcctcttccacgccaggcctggcctgagcaccctgtcagcagagctcaacgcccagatcatcacggccctgtacgactatgttcccagtgagaatgatttacaacccctgctagcctggcttaaggtcatggagaaagcccacatcaacctggtgaggttgcagtgggacctggggctaggccacctccctcgcttttttggaactgcggtgacctgcctcctttccccacactcgcaagtgctgactgctgctacgcagagcctcaaggagatcctgaaggaatgcgtggctccccacatggctgacattggctccgtgacctcctcggcctcaggccctgcccaatctgttgccaagatgttcagggcagtggaggagggcctgacgtacaaattccatgcggcctggagctccgtgttgcagctgctgtgtgtcttcttcgaggcgtgtgggagacaggcccaccctgtgatgaggaagtgcctccagtccctgtgtgacctgcgcctctcccctcatttcccccacacggcggctcttgaccaggcagtgggggctgcggtgaccagtatgggacctgaggtggtgctgcaggctgtgcctttggaaattgatggctctgaggagactctggatttcccacggagctggctgctgcctgtcatccgagaccatgttcaggaaacgcgacttggttttttcaccacctacttcttgcccctggctaacaccctgaagagcaaagccatggacctggctcaggcaggcagcacagtggaatctaagatctacgacacactccagtggcagatgtggacactcctgcctgggttctgcacaaggcctacagatgtggccatctccttcaaagggctggcacggacgctgggcatggccatcagcgagcgtccagacctgagggtcaccgtgtgccaggccctgcgcaccctcatcaccaagggctgccaggcagaggctgaccgtgctgaagtgagtcgctttgccaagaactttctgccgatcctcttcaacctgtatgggcagcccgtggcagccggggacactccagcccctcgccgggctgtgctggaaaccatcagaacttacctcaccatcactgacactcagttggtgaacagtctcctggaaaaagccagtgagaaggtgctcgaccctgccagctctgactttaccagattgtctgtcctggacctggtcgtggccttggctccgtgtgctgacgaagctgccatcagtaagctatactccaccatccggccctacctagagagcaaggcccacggggtgcagaagaaggcctaccgagtgctggaggaggtgtgtgccagtcctcagggccccggggccctcttcgtgcagagccacctggaggacctgaagaagacactgctggactcgctgcggagcacctcctcacccgccaagaggccccgtttgaagtgcctcctacacatcgtgaggaagctctcagctgaacacaaggagttcatcactgccctcatcccagaggtgatcctgtgcaccaaggaggtgtcggtgggcgcacggaagaacgcttttgcactgctcgtggagatgggccatgctttcctaaggtttggctcgaaccaggaagaggccctgcagtgctacctcgtcctgatctaccctggcctggtgggcgcggtgaccatggtcagctgcagcatcctggccctgacccacctccttttcgagtttaaaggtctgatggggaccagtacagtggagcagctgctggagaatgtgtgcctgcttctggcctcccgcacccgtgacgtggtcaagtctgcactgggcttcatcaaggtggcagtgactgtcatggacgtggcgcacctggccaaacatgtgcagctggtgatggaagccattgggaagctttcagatgacatgcggcggcacttccgcatgaagcttcggaacctgttcaccaagttcatccgcaagtttggatttgagctggtgaaaaggctgttgcccgaggagtaccacagagtcctggtcaacatccggaaagctgaggcccgggccaagaggcaccgagccctgagccaggctgccgtggaggaggaagaagaggaggaggaggaggaggagcccgcccagggcaaaggtgacagcattgaggagattttagctgactcagaggacgaggaggacaatgaggaggaggaaagaagccgaggcaaggagcagcggaagctggcacgacagaggagccgggcatggctgaaagagggcggtggggacgagcccctcaacttcctggatcccaaggtggcccaacgagtcctggccacgcagccagggccaggccggggcaggaagaaggaccacagcttcaaggtgagcgccgatggccggctgatcataagggaggaggcagacggcaacaagatggaggaagaggaaggtgccaaaggcgaagatgaagagatggctgacccaatggaagatgtgatcatcaggaataaaaagcaccagaagctcaagcaccagaaagaggctgaggaggaggagctggagataccccctcagtaccaagctggaggctctggcattcatcgccctgtggccaagaaggctatgcctggggctgaatacaaggccaagaaagcaaaaggtgatgtgaagaagaaaggccggccggatccctatgcctacatccccctcaacagaagcaagctcaaccgcaggaagaagatgaagctgcagggacagttcaaaggcctggtgaaggctgcccggcgaggttcccaggtgggacacaaaaaccgcagaaaggatcgtcgaccc

SEQ ID NO: 59954 - DNA, 899 bp, Homo sapiens
tacggctgcgagaagacgacagaagggtacggctgcgagaagacgacagaagggtacggctgcgagaagacgacagaagggtacggctgcgagaagacgacagaaggggcttccgccacggccgtctctggagagcagcagccatggccctacgctaccctatggccgtgggcctcaacaagggccacaaagtgaccaagaacgtgagcaagcccaggcacagccgacgccgcgggcgtctgaccaaacacaccaagttcgtgcgggacatgattcgggaggtgtgtggctttgccccgtacgagcggcgcgccatggagttactgaaggtctccaaggacaaacgggccctcaaaaagggccacaaagtgaccaagaacgtgagcaagcccaggcacagccgacgccgcgggcgtctgaccaaacacaccaagttcgtgcgggacatgattcgggaggtgtgtggctttgccccgtacgagcggcgcgccatggagttactgaaggtctccaaggacaaacgggccctcaaatttatcaagaaaagggtggggacgcacatccgcgccaagaggaagcgggaggagctgagcaacgtactggccgccatgaggaaagctgctgccaagaaagactgagcccctcccctgccctctccctgaaataaagaacagcttgacagaagccctggctctcctgctgtccgtgggtgggtgtgggtgtgtcgggggcccgcagtcccctgtctggtgcccgctctgagccacaccctctccgggtgctgcctggtcgtgaatcaaaagccgtggcccgcccacccttcccggggcagcaggtgaggaagccgccgtactgcaaatgactttaatcattaaatagcttctatgccaaaaaaaaaa

SEQ ID NO: 59955 - DNA, 2418 bp, Homo sapiens
atctgaccatcttccgcagcttctcagggaggggggaccctgccctttggacttggcgcagctggcctgcaaagccatagagcatctggcctgagctctccaatcatctgggcaaacttgcacaggcgaggccccattgactgctctcctgagccacagaactaaggccgtatagctaccttactggggtagcagcccaagtgcactgtctccatgtgtctggtgggtctccagattgaagggctgccaggagtgattaggaaatcatattttttaagtattggactgaaaaagagcactttaataaatggtttaatttttgcctgagggaaaaatagctacttttctccaataatacaaaacataatgttctaaatgaaatgaaattgaaaaagcagcatgatgctctgttaaaatcagaggtttctttctcttttccttgttttctaacataagtgactttatgtgaggtctaaactgaatctttactgtttctcttagttttaaactccttatacatattttctttgcatttctcactgtagagttaggacctgaatctttttctgccattttatgttgctggtataagaaatgatgaaattttgactttgcagaaaactaacgaggttaccttttaactgctagaatactgatactgtgttttaaaaagttacataaagggtactagtgtccatttaaatacctataataacgcactagagaaaaaaaagcactgaccttgagaggtgttcattgtactcttccaggaggcagttattgcacattctagtgtatagcattttcagttcatttttagcttttgttgactaatgctttgctacccaagtccttcctttttatttgtttgtgttctgtgaatagaagttggaaagcttgttttcagcctgcccgagtgtttacatttttatttggcatttcagcctctctataacaatacatagattgtatgtggaagtgccatttagttacagatgcagaaaagcttgcagatacttgttcaggcaaagtgaaaagtaaagtagcattttaccccgagtccaaaaaattatcctaagcaaatacagttgttttttaaagtgtgggagaaattttctttttctctcaaaagtaaaatagaaatcacagcttagtggtcaaccttagctagcttaggtgtgaaaatcccatttcttcccatgtgggccatgtgggtgtatctctggcacacacaagaggtctgtttagccgccttattttggcagatagggaagacatatctgaaaattggtactcactcgtatgttgtgtgtgtgtgtgtgtgtgtgtgtgtgtgtgtgtgtggtggctttgtatcttcttgtttccaggggacatgatgaccttgttgatgaaaaaagacactctgacagaagaggagactcagttttatatagcagaaacagtattagccatagactctattcaccaacttggattcatccacagagacatcaaaccagacaaccttcttttggacagcaagggccatgtgaaactttctgactttggtctttgcacaggactgaaaaaagcacataggacagaattttataggaatctgaaccacagcctccccagtgatttcactttccagaacatgaattccaaaaggaaagcagaaacctggaaaagaaatagacgtcagctagccttctccacagtaggcactcctgactacattgctcctgaggtgttcatgcagaccgggtacaacaagctctgtgattggtggtcgcttggggtgatcatgtatgagatgctcatcggtaagttgcatggtttcagaggactttttctgtgcatccatgacagacttttacattgataccagcctctgtttcaattggcagtgatctaagtgatttccctacttgtctttcaaagtgaattgttttagacagatgacacctctttcagtaagatgtatcccactccattcttgggcttactggcatcctgcaattgctttgctgatcattttttatgtttttctttctcttataccttcatcttctccatctagaagctcttttagtcactagcatttattaaatatccgttgtatgcagagcacttcaactgggcattgcctcactttcctaatttgccgcccccttcctctgtcaaagccttcaaatcatgggaccctctggcctctctccctcttattgtattggtgtgtctctgtatttatgggacgcatctgtgggggtggtcatatgccagtgagcactagattaagtatatccttggtggttccgggtgagtctatctggctgctttggcttcaggaacatgggaacgatgcctgtggaggtgggcgtacaccgtctggagggaagatggggtgatagggtgtgtgcgtgtttgtcttct

SEQ ID NO: 59956 - DNA, 2047 bp, Homo sapiens
tcaataccgcgtccgcgcccaggcggctgcccgtgacctgcctgggcgcggggaactgaaagccggaaggggcaagacgggttcagttcgtcatggggctgtttggaaagacccaggagaagccgcccaaagaactggtcaatgagtggtcattgaagataagaaaggaaatgagagttgttgacaggcaaataagggatatccaaagagaagaagaaaaagtgaaacgatctgtgaaagatgctgccaagaagggccagaaggatgtctgcatagttctggccaaggagatgatcaggtcaaggaaggctgtgagcaagctgtatgcatccaaagcacacatgaactcagtgctcatggggatgaagaaccagctcgcggtcttgcgagtggctggttccctgcagaagagcacagaagtgatgaaggccatgcaaagtcttgtgaagattccagagattcaggccaccatgagggagttgtccaaagaaatgatgaaggctgggatcatagaggagatgttagaggacacttttgaaagcatggacgatcaggaagaaatggaggaagaagcagaaatggaaattgacagaattctctttgaaattacagcaggggccttgggcaaagcacccagtaaagtgactgatgcccttccagagccagaacctccaggagcgatggctgcctcagaggatgaggaggaggaggaagaggctctggaggccatgcagtcccggctggccacactccgcagctaggggctgcctaccccgctgggtgtgcacacactcctctcaagagctgccattttatgtgtctcttgcactacacctctgttgtgaggactaccattttggagaagggtctgtttgtctcttttcattctctgcccaggttttgggatcgcaaagggattgttcttataaaagtggcataaataaatgcatcatttttaggagtatagacagatatatcttattgtggggaggggaaagaaatccatctgctcatgaagcacttctgaaaatataggtgattgcctgaatgtcgaagactctacttttgtctataaaacactatataaatgaattttaataaatttttgctttagcacttggccccattgtagattgccctgtgcagtaaactttcaaggtgtcggctgccccagattgcttcatttgctgggtgtggaaagagttgctatggccaggcatatgggatttggaagctcagcagaagtgacttctgctctgtggttgctgctccccggctttcacagacatggtatggcagccattcttttatctatttaaccaagaggatgctggggaattgtgctgcttgtcctgttggctggtggctgcattatgtcctggggtgtgcatgtgggtctatttagagcttctgtcccttccttcccattgcaagttgcacccagatgagacagctgtagtactaggtctctttcacctctcattgcctgtccctgcttcgagctggttgtcttgtgcgtgggacatgggccttcctatctgtgttttctcaaagtcaggagctgaccaggagcacactaaggtgtggtcatgcatcataaccaacattcactcatctgggacattcttaagatacatttataaatcatttcagcagtagtactttgtatgtgttgagagtttacagagctctttgacatacgcgatcttagtctttacaaataaggaaaacagctcagtttgggaagtatcagagatgggattcaaacccagatcctctggtccaagttgtatgtgcactgaactaatcaggcaggaaaaaagcccagccactgtctcacagattgttttttgtatattgtagcaaaatcctgaaacaatggggtccttccagtctcatcatacaaaatggcaatcttggctgggtgcggtggttcatgcctataatcccagtgctttacaaggctgaggcaggaggctctcttgagaataggagttcaagaccagcctgggcaacatagcaagatcctgtctctccaaaaaaaaaa

SEQ ID NO: 59957 - DNA, 1958 bp, Homo sapiens
acgaatccccgtgtcgatgatttcacgggcggcgcagaggcggcaggaagatggagttggggagttgcctggagggcgggagggaggcggcggaggaagagggcgagcctgaggtgaaaaagcggcgacttctgtgtgtggagtttgcctcggtcgcaagctgcgatgccgcagtggctcagtgcttcctggccgagaacgactgggagatggaaagggctctgaactcctacttcgagcctccggtggaggagagcgccttggaacgccgacctgaaaccatctctgagcccaagacctatgttgacctaaccaatgaagaaacaactgattccaccacttctaaaatcagcccatctgaagatactcagcaagaaaatggcagcatgttctctctcattacctggaatattgatggattagatctaaacaatctgtcagagagggctcgaggggtgtgttcctacttagctttgtacagcccagatgtgatatttctacaggaagttattcccccatattatagctacctaaagaagagatcaagtaattatgagattattacaggtcatgaagaaggatatttcacagctataatgttgaagaaatcaagagtgaaattaaaaagccaagagattattccttttccaagtaccaaaatgatgagaaaccttttatgtgtgcatgtgaatgtgtcaggaaatgagctttgccttatgacatcccatttggagagcaccagagggcatgctgcggaacgaatgaatcagttaaaaatggttttaaagaaaatgcaagaggctccagagtcagctacagttatatttgcaggagatacaaatctaagggatcgagaggttaccagatgtggtggtttacccaacaacattgtggatgtctgggagtttttgggcaaacctaaacattgccagtatacatgggatacacaaatgaactctaatcttggaataactgctgcttgtaaacttcgttttgatcgaatatttttcagagcagcagcagaagagggacacattattccccgaagtttggaccttcttggattagaaaaactggactgtggtagatttcctagtgatcactggggtcttctgtgcaacttagatataatattgtaaaatgcttttcaagtgtgggttttgccctgattgttgcaaatacaatttccaccttctggaaaggtaggtttgctgtggaggaaataatgtactagatcattgtcacagaaaaaccaactatgatttatggttgtgttttcagaattcaacattaaagattaatgtttatttaaacgaacacattcctgcattcaggatgtgaggccatttaataaaaagggcacaaagcctgtcagagttttcaacggtgcttatagctgccagctggattccaaacaggtaccccattgtctctgagctaatgtttatatttttccattcaggcaccgaaatagttaatatttaaaataagtcttcaaaagaaaacataagagattattgagttcttgggactggatcctttatttcataagttcagatcatcttaaatgaaaatgccatgattatctgcagttaagtagatgacagctattctacatcagacttgatttttgtcagctaattacataattggtaagctataattgaaaccttatggcttaaaattccttaactcctttttgattcatgtttgtagtcatgttgtcaacagaggcaaagttaagcttgatgatggttaaaatcggtttgatagcaccatgggacatttttctaacaaaaataaatgcatgaagagacatagccttttagttttgctaattgtgaaatggaaatgctttacaggaagtaaatgcaaattacttttaagtgtgctttaaagaaaaatattttccccacaagagaaatttaaataaagaattttatttgttaaaaaaaaaa

SEQ ID NO: 59958 - DNA, 721 bp, Homo sapiens
gcgagccgagacggctacatggacgccactatcgccccgcaccgtatcccccccgagatgccccagtacggggaggagaaccacatcttcgagttgatgcaggcaatgtggctctgcaaacatctgaacagcagtctcctcaccctggagaacctgatcttaaatgagttttcctatacggccaccgaagccagaaggctttatctgcaaaggaagacagttcccagcgcgctgctcgtccagctgattcaggaacgcctggctgaagaggattgcatcaagcagggctggattctggatggcatccctgagacgcgtgagcaggctctgaggatccagaccctggggatcacacccagacacgtcattgtgctgagtgctccagacacggtcctgatcgagagaaacttggggaagagaatcgaccctcaaactggagagatttatcacaccacctttgactggccacccgaatctgaaatccagaaccgtctcatggtgccagaggacatctcagagctggagacggctcagaaactgctggagtatcataggaacatcgtcagggtcattccctcctaccccaaaatcctcaaagtcatcagtgctgaccagccatgtgtggacgtcttctaccaggctctgacctatgtccaaagcaaccatcgtactaatgccccgttcaccccgagggtgctgctgctcgggcctgtgggcagtg

SEQ ID NO: 59959 - DNA, 1617 bp, Homo sapiens
gtggcgcctgctctccatccaggccccattccggctcccacccgacgctgcttttgttcccacgtttcggggggcagctggcactgtgattcctgccccatgagtgcctagaggcacggagccaccagggatcaccccacgtgggacacagggcttggggaggatggggcaggaccagaccaagcagcagatcgagaaggggctccagctgtaccagtccaaccagacagagaaggcattgcaggtgtggacaaaggtgctggagaagagctcggacctcatggggcgcttccgcgtgctgggctgcctggtcacagcccactcggagatgggccgctacaaggagatgctgaagttcgctgtggtccagatcgacacggcccgggagctggaggatgccgacttcctcctggagagctacctgaacctggcacgcagcaacgagaagctgtgcgagtttcacaagaccatctcctactgcaagacctgccttggcgtgccaggtaccagggcaggtgcccagctcggaggccaggtcagcctgagcatgggcaatgccttcctgggcctcagcgtcttccagaaggccctggagagcttcgagaaggccctgcgctacgcgcacaacaatgatgacaccatgctcgagtgccgcgtgtgctgcagcctgggcagcttctatgcccaggtcaaggactacgagaaagccctgttcttcccctgcaaggcggcagagcttgtcaacaactatggcaaaggctggagcctgaagtaccaggccatgagccagtaccacatggccgtggcctatcgcctgctgggccgcctgggcagtgccatggagtgttgtgaggagtctatgaagatcgccctgcagcacggcgaccggccactgcaggcgctctgcctgctctgcttcgctgacatccaccggagccgtggggacctggagacagccttccccaggtacgactccgccatgagcatcatgaccgagatcggaaaccgcctggggcaggtgcaggcgctgctgggtgtggccaagtgctgggtggccaggaaggcgctggacaaggctctggatgccatcgagagagcccaggatctggccgaggaggtggggaacaagctgagccagctcaagctgcactgtctgagcgagagcatttaccgcagcaaagggctgcagcgggaactgcgcgcgcacgttgtgaggttccacgagtgcgtggaggagacggagctctactgcgcgctgtgcggcgagtccataggcgagaagaacagccggctgcaggccctaccctgctcccacatcttccacctcaggtgcctgcagaacaacgggacccggagctgtcccaactgccgccgctcctccatgaagcctggctttgtatgactcctggcaggagggcgtgggcttcctcctgggcgactcctgctctttctccactgcacgccagaggcccatttactcctggggcagctgccaggtcgtcctcaccatagccaatggccttggggcctgcccagggctgctcccctgggcccagctcccctgccctgcctctttgtactttgctctttatagaaaaataaactgtttgtacctgg

SEQ ID NO: 59960 - DNA, 1585 bp, Homo sapiens
agactctgtcttcagccaggcactccctccctccctcccagcactatgccctacaacttctgcctgcccagcctgagctgccgcaccagctgctcctcccggccctgcgtgccccccagctgccacagctgcaccctgcccggggcctgcaacatccccgccaatgtgagcaactgcaactggttctgcgagggctccttcaatggtagcgagaaggagactatgcagttcctgaacgaccgcctggccagctacctggagaaagtgcgtcagctggagcgggacaacgcggagctggagaacctcatccgggagcggtctcagcagcaggagcccttgctgtgccccagttaccagtcctattttaagaccattgaggagctccagcagaagatcctgtgtaccaagtctgagaatgccaggcttgtggtgcagatcgacaacgccaagctggctgcggatgatttcagaaccaagtaccagaccgagctgtccctgcggcagctggtggagtcggacatcaacggtctgcgcaggatcctggatgagctgaccctgtgcaagtccgacctggaggcccaggtggagtccctgaaggaggagctgctctgcctcaagagcaaccatgagcaggaggtcaataccctgcgctgccagcttggagaccgcctcaatgtggaggtggatgctgctcccactgtggacctgaatcgggtgctgaacgagaccaggagtcagtatgaggccctggtggaaaccaaccgcagggaagtggagcaatggttcaccacgcagaccgaggagctgaacaagcaggtggtatccagctcagagcagctgcagtcctaccaggcggagatcatcgagctgagacgcacagtcaacgccctggagatcgagctgcaggcccagcacaacctgcgagactctctggaaaacacgctgacagagagtgaggcccgctacagctcccagctgtcccaggtgcagagcctgatcaccaacgtggagtcccagctggcggagatccgcagtgacctggagcggcagaaccaggagtaccaggtgctgctggatgtgcgtgcccggctggagtgtgagatcaacacataccggagcctgctggagagcgaggactgcaatctgcccagcaatccctgtgccacgaccaacgcgtgcagcaagcccatcggaccctgtctctccaatccctgtacctcttgtgtccctcctgccccctgcacaccctgtgccccacgcccccgctgtgggccctgcaattccttcgtgcgctagaacctagggaatgccagaggagcaaggatgcagggcccaggactccagagctgtgacctggctctggttcaacaaaaggggcctgaaaacatcatttgcatggctggagttgcccgcgtaaggcagccaagaaactcacccaaagcctgtagcctccccaactactccagactgtcctgctcaccctttccttcctgggggtctgttccttcctatgctcacccagagaactctctgatgtgccagtggccctcccttttaacctcctaataaatatcatttccttggc

SEQ ID NO: 59961 - DNA, 485 bp, Homo sapiens
ttggcccggaactctcgggtctacccacgcgtccgaagaaactgaaagctaaccagacgcccattgccatggattgctgtgcctctcgcagctgcagtgtccccactgggcctgccaccaccatctgctcctctgacaaatcctgccgctgtggagtctgcctgcccagcacctgcccacacacagtttggttactggagcccacctgctgtgacaactgtcccccaccctgccacattcctcagccctgcgtgcccacctgcttcctgctcaactcctgccagccaactccaggcctggagaccctcaacctcaccaccttcactcagccctgctgtgagccctgcctcccaagaggctgctaatggatggctactttgctcagtgcctgagattgaaaaagtcaacatagaagctttagcattcacctatctcagtacctacaactaatgtactctgctttagaaattggaacaaggatggag

SEQ ID NO: 59962 - DNA, 2031 bp, Homo sapiens
gtccggaaattctgcgaagacccacgcgtccgactaagcttgcctaatttgcttcagaattggaagagggaattgcagcaggaaaatatgtgaagagtttttaaacccacaaattcttcttactttagaattagttgttacattggcaggaaaaaataaatgcagatgttggaccatgttggaaaccttgtcaagacagtggattgtctcacacagaatggaaatgtggcttctgattctggtggcgtatatgttccagagaaatgtgaattcagtacatatgccaactaaagctgtggacccagaagcattcatgaatattagtgaaatcatccaacatcaaggctatccctgtgaggaatatgaagtcgcaactgaagatgggtatatcctttctgttaacaggattcctcgaggcctagtgcaacctaagaagacaggttccaggcctgtggtgttactgcagcatggcctagttggaggtgctagcaactggatttccaacctgcccaacaatagcctgggcttcattctggcagatgctggttttgacgtgtggatggggaacagcaggggaaacgcctggtctcgaaaacacaagacactctccatagaccaagatgagttctgggctttcagttatgatgagatggctaggtttgaccttcctgcagtgataaactttattttgcagaaaacgggccaggaaaagatctattatgtcggctattcacagggcaccaccatgggctttattgcattttccaccatgccagagctggctcagaaaatcaaaatgtattttgctttagcacccatagccactgttaagcatgcaaaaagccccgggaccaaatttttgttgctgccagatatgatgatcaagggattgtttggcaaaaaagaatttctgtatcagaccagatttctcagacaacttgttatttacctttgtggccaggtgattcttgatcagatttgtagtaatatcatgttacttctgggtggattcaacaccaacaatatgaacatgagccgagcaagtgtatatgctgcccacactcttgctggaacatctgtgcaaaatattctacactggagccaggcagtgaattctggtgaactccgggcatttgactgggggagtgagaccaaaaatctggaaaaatgcaatcagccaactcctgtaaggtacagagtcagagatatgacggtccctacagcaatgtggacaggaggtcaggactggctttcaaatccagaagacgtgaaaatgctgctctctgaggtgaccaacctcatctaccataagaatattcctgaatgggctcatgtggatttcatctggggtttggatgctcctcaccgtatgtacaatgaaatcatccatctgatgcatcaagaggagacacaacctttcccaaggacggcgtgaggccgtattgtgaagcatctgacactgacgatcttatgacaacctcctgagggatggggctaggacccatgaaggcagaattatggagagcagagacctagtatacatttttcagattccctgcacttggcactaaatccgacacttacatttacattttttttctgtaaattaaagtacttattaggtaaatagaggttttgtatgctattatatattctaccatcttgaagggtaggttttacctgatagccagaaaatatctagacattctctatatcattcaggtaaatctctttaaaacacctattgttttttctataagccatatttttggagcactaaagtaaaatggcaaattgggacagatattgaggtctggagtctgtggattattgttgactttgacaaaataagctagacattttcaccttgttgccacagagacataacactacctcaggaagctgagctgctttaaggacaacaacaacaaaatcagtgttacagtatggatgaaatctatgttaagcattctcagaataaggccaagttttatagttgcatctcagggaagaaaattttataggatgttc

SEQ ID NO: 59963 - DNA, 5497 bp, Homo sapiens
tcgacccacgcgtacgcggacgcgtgggatgacgggcccggtgctgaagggcagggaacaacttgatggtgctactttgaactgcttttcttttctcctttttgcacaaagagtctcatgtctgatatttagacatgatgagctttgtgcaaaaggggagctggctacttctcgctctgcttcatcccactattattttggcacaacaggaagctgttgaaggaggatgttcccatcttggtcagtcctatgcggatagagatgtctggaagccagaaccatgccaaatatgtgtctgtgactcaggatccgttctctgcgatgacataatatgtgacgatcaagaattagactgccccaacccagaaattccatttggagaatgttgtgcagtttgcccacagcctccaactgctcctactcgccctcctaatggtcaaggacctcaaggccccaagggagatccaggccctcctggtattcctgggagaaatggtgaccctggtattccaggacaaccagggtcccctggttctcctggcccccctggaatctgtgaatcacgccctactggtcctcagaactattctccccagtatgattcatatgatgtcaagtcgggcggagtagcagtaggaggactcgcaggctatcctggaccagctggccccccaggcccccccggcccccctggtacatctggtcatcctggttcccctggatctccaggataccaaggaccccctggtgaacctgggcaagctggtccttcaggccctccaggacctcctggtgctataggtccatctggtcctgctggaaaagatggagaatcaggtagacccggacgacctggagaccgaggattgcctggacctccaggtatcaaaggtccagctgggatacctggattccctggtatgaaaggacacagaggcttcgatggacgaaatggagaaaagggtgaaacaggtgctcctggattaaagggtgaaaatggtcttccaggcgaaaatggagctcctggacccatgggtccaagaggggctcctggtgagcgaggacggccaggacttcctggggctgcaggtgctcggggtaatgacggtgctcgaggcagtgatggtcaaccaggccctcctggtcctcctggaactgccggattccctggatcccctggtgctaagggtgaagttggacctgcagggtctcctggttcaaatggtgcccctggacaaagaggagaacctggacctcagggacacgctggtgctcaaggtcctcctggccctcctgggattaatggtagtcctggtggtaaaggcgaaatgggtcccgctggcattcctggagctcctggactgatgggagcccggggtcctccaggaccagccggtgctaatggtgctcctggactgcgaggtggtgcaggtgagcctggtaagaatggtgccaaaggagagcccggaccacgtggtgaacgcggtgaggctggtattccaggtgttccaggagctaaaggcgaagatggcaaggatggatcacctggagaacctggtgcaaatgggcttccaggagctgcaggagaaaggggtgcccctgggttccgaggacctgctggaccaaatggcatcccaggagaaaagggtcctgctggagagcgtggtgctccaggccctgcagggcccagaggagctgctggagaacctggcagagatggcgtccctggaggtccaggaatgaggggcatgcccggaagtccaggaggaccaggaagtgatgggaaaccagggcctcccggaagtcaaggagaaagtggtcgaccaggtcctcctgggccatctggtccccgaggtcagcctggtgtcatgggcttccccggtcctaaaggaaatgatggtgctcctggtaagaatggagaacgaggtggccctggaggacctggccctcagggtcctcctggaaagaatggtgaaactggacctcagggacccccagggcctactgggcctggtggtgacaaaggagacacaggaccccctggtccacaaggattacaaggcttgcctggtacaggtggtcctccaggagaaaatggaaaacctggggaaccaggtccaaagggtgatgccggtgcacctggagctccaggaggcaagggtgatgctggtgcccctggtgaacgtggacctcctggattggcaggggccccaggacttagaggtggagctggtccccctggtcccgaaggaggaaagggtgctgctggtcctcctgggccacctggtgctgctggtactcctggtctgcaaggaatgcctggagaaagaggaggtcttggaagtcctggtccaaagggtgacaagggtgaaccaggcggcccaggtgctgatggtgtcccagggaaagatggcccaaggggtcctactggtcctattggtcctcctggcccagctggccagcctggagataagggtgaaggtggtgcccccggacttccaggtatagctggacctcgtggtagccctggtgagagaggtgaaactggccctccaggacctgctggtttccctggtgctcctggacagaatggtgaacctggtggtaaaggagaaagaggggctccgggtgagaaaggtgaaggaggccctcctggagttgcaggaccccctggaggttctggacctgctggtcctcctggtccccaaggtgtcaaaggtgaacgtggcagtcctggtggacctggtgctgctggcttccctggtgctcgtggtcttcctggtcctcctggtagtaatggtaacccaggacccccaggtcccagcggttctccaggcaaggatgggcccccaggtcctgcgggtaacactggtgctcctggcagccctggagtgtctggaccaaaaggtgatgctggccaaccaggagagaagggatcgcctggtgcccagggcccaccaggagctccaggcccacttgggattgctgggatcactggagcacggggtcttgcaggaccaccaggcatgccaggtcctaggggaagccctggccctcagggtgtcaagggtgaaagtgggaaaccaggagctaacggtctcagtggagaacgtggtccccctggaccccagggtcttcctggtctggctggtacagctggtgaacctggaagagatggaaaccctggatcagatggtcttccaggccgagatggatctcctggtggcaagggtgatcgtggtgaaaatggctctcctggtgcccctggcgctcctggtcatccaggcccacctggtcctgtcggtccagctggaaagagtggtgacagaggagaaagtggccctgctggccctgctggtgctcccggtcctgctggttcccgaggtgctcctggtcctcaaggcccacgtggtgacaaaggtgaaacaggtgaacgtggagctgctggcatcaaaggacatcgaggattccctggtaatccaggtgccccaggttctccaggccctgctggtcagcagggtgcaatcggcagtccaggacctgcaggccccagaggacctgttggacccagtggacctcctggcaaagatggaaccagtggacatccaggtcccattggaccaccagggcctcgaggtaacagaggtgaaagaggatctgagggctccccaggccacccagggcaaccaggccctcctggacctcctggtgcccctggtccttgctgtggtggtgttggagccgctgccattgctgggattggaggtgaaaaagctggcggttttgccccgtattatggagatgaaccaatggatttcaaaatcaacaccgatgagattatgacttcactcaagtctgttaatggacaaatagaaagcctcattagtcctgatggttctcgtaaaaaccccgctagaaactgcagagacctgaaattctgccatcctgaactcaagagtggagaatactgggttgaccctaaccaaggatgcaaattggatgctatcaaggtattctgtaatatggaaactggggaaacatgcataagtgccaatcctttgaatgttccacggaaacactggtggacagattctagtgctgagaagaaacacgtttggtttggagagtccatggatggtggttttcagtttagctacggcaatcctgaacttcctgaagatgtccttgatgtgcagctggcattccttcgacttctctccagccgagcttcccagaacatcacatatcactgcaaaaatagcattgcatacatggatcaggccagtggaaatgtaaagaaggccctgaagctgatggggtcaaatgaaggtgaattcaaggctgaaggaaatagcaaattcacctacacagttctggaggatggttgcacgaaacacactggggaatggagcaaaacagtctttgaatatcgaacacgcaaggctgtgagactacctattgtagatattgcaccctatgacattggtggtcctgatcaagaatttggtgtggacgttggccctgtttgctttttataaaccaaactctatctgaaatcccaacaaaaaaaatttaactccatatgtgttcctcttgttctaatcttgtcaaccagtgcaagtgaccgacaaaattccagttatttatttccaaaatgtttggaaacagtataatttgacaaagaaaaatgatacttctctttttttgctgttccaccaaatacaattcaaatgctttttgttttatttttttaccaattccaatttcaaaatgtctcaatggtgctataataaataaacttcaacactctttatgataacaacactgtgttatattctttgaatcctagcccatctgcagagcaatgactgtgctcaccagtaaaagataacctttctttctgaaatagtcaaatacgaaattagaaaagccctccctattttaactacctcaactggtcagaaacacagattgtattctatgagtcccagaagatgaaaaaaattttatacgttgataaaacttataaatttcattgattaatctcctggaagattggtttaaaaagaaaagtgtaatgcaagaatttaaagaaatatttttaaagccacaattattttaatattggatatcaactgcttgtaaaggtgctcctcttttttcttgtcattgctggtcaagattactaatatttgggaaggctttaaagacgcatgttatggtgctaatgtactttcacttttaaactctagatcagaattgttgacttgcattcagaacataaatgcacaaaatctgtacatgtctcccatcagaaagattcattggcatgccacaggggattctcctccttcatcctgtaaaggtcaacaataaaaaccaaattatggggctgcttttgtcacactagcataggagaatgtgttgaaatttaactttgtaagcttgtatgtggttgttgatcttttttttccttacagacaaccataataaaata

SEQ ID NO: 59964 - DNA, 1913 bp, Homo sapiens
ccacagccacctccggagggatctggctgaggaggaagtggaggtgtcactggccccggcctttgccccaatcttgtgtgggcactgaagggggactacaggttcgagatacttcctcgcgtattgctaaaggaggagttgaccacaccaaaatgagtctacatggtgctagtgggggacatgagagatcaagagatagacgaaggtcaagtgacagatcacgagattcatctcatgaaagaacggagtctcagctcactccttgtattagaaatgtgacttctccaacacgacagcaccatgttgaacgagaaaaagatcacagttcctctcgtccaagcagtccgcgtcctcaaaaagcatccccaaatggttccattagcagtgctgggaacagcagcagaaacagtagtcagtcaagttcagatggtagctgtaagacagctggggagatggtgtttgtatatgaaaatgcaaaagaaggagctcggaatataagaacgtcagaacgagtgacactaatagtggataacactagatttgttgtagacccatccatttttactgcacagccaaatacaatgttgggcaggatgtttggatctggccgagaacataactttacacgacccaatgagaaaggagagtatgaggtggcagagggaattggttccactgtgtttcgagcgattctggattactataaaacaggaataatccgttgtcctgatggcatatctattcctgaactgagagaagcatgtgactatctttgtatctcttttgaatatagcactattaaatgtagagatctcagtgccctaatgcatgagttatcaaatgatggtgctcgtagacaatttgaattttatctggaagaaatgatcctccctctcatggtagctagtgcccagagtggggaacgggaatgtcatatagtggtgcttacagatgatgatgtggttgattgggatgaagaatatccaccacagatgggagaagaatattcacaaattatttatagcacaaaattatatagatttttcaagtatattgaaaacagagatgtggccaagtcagttttgaaggagaggggtcttaagaagattagattgggaatagaaggttatcctacctacaaagaaaaagtaaagaaaaggcctggaggccgcccagaagtgatctacaactatgtccaaagaccctttattcgaatgtcctgggagaaggaagaaggaaagagtcggcatgtagactttcagtgtgtaaagagtaaatctatcaccaatcttgcagcagctgcagcagacattccccaggaccagctggtagtcatgcatccaactccacaagtggatgagctggatattctccctatccatcccccttctggcaacagtgacctcgatcctgatgcacagaatccaatgctgtgatgctgatcttccttgaaaccatagcatgctactcttcacagtgacgttgtactctcctcattctgcactgcaaggccactcttcttcattgtgagatgcacataacaatgtttaggatattgcagtgtaggcttttttaaagaccaaaggtagctgaatggtttttttttaaatgagtacaactctagcattttgaagttccagttgtaaatgtatttgtttaccagtaggtttgtgaaattggttctttgtatgggggatggtcctttttcacacagctaggtcttttcagaagtggtggaaattggcagctggggtactttcagtttggactgatattcatcacacctcagataaaatgcagagtaatatatagttgcactttataaatggtggttaaatggaaatgttcaagccattttatagttgtgatgcacaatataatttaagtgcttctgtcaaagtattcctccagta

SEQ ID NO: 59965 - DNA, 1216 bp, Homo sapiens
tcccgggtcgacgatttcgtaggaaggagagttcttcttccaggtggtttcctgcagactgcctgctagggctcagaggaccagcttcttccctgctgtctcctgagcccagtccctcttggccatcacattccccttgccctatggcggccctcacagacctctcatttatgtatcgctggttcaagaactgcaatctggttggcaacctctcagagaagtacgtcttcatcacaggctgtgactctggcttcgggaacctgctggccaaacagctggttgatcggggcatgcaggtgctggctgcttgcttcactgaggagggatcccagaaacttcagcgggatacctcctatcggctgcagaccaccctactggatgtcaccaagagcgaaagcatcaaggcggcggcccagtgggtgagggacaaagtgggcgaacaaggcctctgggccctggtgaacaatgctggtgtgggcctgcccagtggtcccaacgaatggctgaccaaggatgactttgtgaaggtgattaatgtgaacctggtgggactgatcgaagtgacccttcacatgctgcccatggtcaagagagcccggggcagggttgtcaacatgtccagctctggtggtcgtgtggctgtcattggtggtggctactgcgtctccaagtttggcgttgaggccttctctgacagcataaggcgtgagctctactactttggggtgaaagtctgcatcattgagccagggaactatcggacagccattctcggcaaggagaacctggagtcacgcatgcgaaagctttgggagaggctgcctcaggagacccgggacagctacggagaggattatttccgcatctatactgacaagttaaaaaacataatgcaggtggcagagcccagagtcagagatgtcatcaacagcatggagcatgctattgtttcccggagccctcgcatccgctacaaccctggcctggatgccaaactcctctacatccctctggctaagttgcccacccctgtgacagatttcatcctaagccggtaccttccaaggccagcggacagtgtctaaactggggaggatcaatgggtcagtggagcctagaagtgggggaggaaggaaggaccgtggggtcacaaaaggtggtatcggttatcctgggggcattggctgcaaaggaagcttggctcacttgacaccca

SEQ ID NO: 59966 - DNA, 4394 bp, Homo sapiens
atgtccaccctctacgacatcagggcccacaaggcgcagctgctccggttcttcgccagctccgactccaacaaggcgctggagcagcggcgcacgctgcacacgcccaagctggagcacctggaccgcgtcctgtacgagtggttcctggggaagcgctccgagggcgtccccgtgtcaggccccatgctcatcgagaaggccaaggacttctacgagcagatgcagctcactgagccctgcgtgttctccggagggtggctttggcgctttaaggccagacacggcattaaaaagctagatgcatccagtgaaaagcagtcagccgaccaccaggccgcggagcagttctgtgcgtttttcaggagcttggctgctgagcacgggctgtccgccgagcaggtttacaacgctgatgagaccggccttttctggcggtgcctgccaaatcccactccggaaggcggggctgtgcctggccccaagcagggcaaggaccggctgaccgtgctgatgtgtgccaacgccacgggctcccacaggctcaagcccttggccatcgggaagtgcagcggtcccagggctttcaaaggcatccagcacctgcccgtcgcctataaggcccaggggaacgcctgggtggacaaggagattttttccgattggttccatcatatctttgtgccctcggtgagagagcacttcagaaccataggtttgccggaagacagcaaagccgttctcttgctggacagctcccgggctcacccgcaggaggccgagctggtgtccagtaacgttttcaccatcttcctgcctgccagcgtggcctcattggtgcagcccatggagcagggcattcggagagatttcatgaggaacttcattaaccctccggtccccctgcagggcccccacgcccgctacaacatgaacgatgccatattcagcgtggcctgtgcctggaacgcagtccctagccacgtcttcaggcgggcctggaggaagctgtggccgtcggttgcgtttgccgaaggctcctcctctgaggaggagttggaggcagagtgcttcccagtgaagccccacaacaagtcctttgcacacatcctggagcttgtgaaggaaggctcctcctgcccgggccagcttcgccagcgccaggccgccagctggggggtagcgggaagggaggcagaagggggacggccccctgctgccacgtcgccagcagaggttgtgtggagttcagaaaagactccgaaagctgaccaggacggcagaggagatcctggtgagggcgaggaggtggcctgggagcaggcggccgtggcctttgacgcagtcctgcgctttgcggagcggcagccatgcttcagtgcgcaggaagtggggcagctgcgggcgctgcgtgccgtgttccggagccagcagcaggtgaggaggcggcgtggtgccctcggggctgtggtcaaggttgaagccctccaggagggccctggtggctgtggggccacagctcagtctcccttgccctgctcatccacagcaggtgacaactgatggcttctctgccctgccctggccactggccctgtttctcccacaccctggagtggcatggtcctgtgccccgaccccacctgaggcaggagggcatgtgcagacactcaagagcccttccaggagtgggtcgcccacgggtgtggctcgggtgcccaggacggtctgtgcccgaggttcctgtcaatacaggttttattttatcacttgccgtgtcatccgaaagtgaggaaatgttttggaagggtccaccctagcctagaacaagccagagccgcaccctggctggaatgggggccaggctgagccgatctggtctcgtgttcgctggctgatcattgcagtatcagagggtggagatgtcagtctgtccacgtggagagaagttgccctccaggccgacaggaggccatgcccaccgcccctggacaggcttcgtctcagaaggctctatctgctgggctggcggccatccccgtgttgggtggaccccgagcacggttgcctgaggtccgatggcccgagagctgggactcagttcttggcctgctagcggctgaacaggccgcacatctcacttcagttgtggcctcattcagcagaatgactctggaaccatcctctgttacccgcagatcctgtcccatgggctctggccccaagatgttggggggccccacggagagttgacttggtagagttcctttctgggaagaaagtaggagtggctgaccaggccctgctcatcacccggatagaggacacggaccctgtgtggtattttggcattttggctcagagtccaatgtaccatgttgcccagaatttcatacttacggcctttacatgaatacgtcttgatcagacattcagagattagtcttaggtttccacgtaagtcactgaaaacagtaaaacaggctgcttagatttctagcagtatgtgtgctcttatccccagctgttagcacgttagtaatacttttggggaggagttgtctgtcctggtcagttttcacagaggcggttgtaagaggatgtggttattttctccatgtctgtagttgctttgcggcatctccatttcacgggcaacactcactgcctgcagctgagattccagaacgccctgtgtccacagtgattagcctcgtctttcagcgagcataaaataggtgcattgtccttttcttttcttgaggcagggtctcgctctgttgaccaggctggagtgaagtggtgtgatcccagctcactgcagcctcgacctccctggcttgagtgatcctcccgccccagcctcctgagtagctgggactagaggcacgcaccaccgcgcctttttattttttttgtagagacagggtctcactgtgttgcccgggctggtcttgaactcttggcctcaagcgatcctccttcctcatccttctaaagtgctgggattacaggtgtgagccacagcactcggcctaaataggtttttcttgctatgttattttcagtgctttgcccttgaattcttttcctctcttaaattcatatcatttggccgagtcagcacgtagtttgcattccagcgtctgctgttgattccactgaaacctctgttctcatgaaggagaggatttggctcgctgtgtgttctcgtactttcacatctctgtagatacaggggcaaaagtcattgctgacagagccctatctatgtcctggaagtgtgtgtttcttgctttgaatgcatgtgtgaagattataaaagccaaatagtttttaaagatctcggtgctgaacgacagtcccagttcccatttgtgtcccacacaggcgaggatcgttgggcctccttagtagccaaaggaactgaggtccagagcagggaatgtgttgcccagtgtcagcatggtctgctctggggtcaggcgtcttgccctggtcctaagccaccccaagccaaggcatgtccctgggcccatttcctctctcgaggtcttgggttccctatttctgatgtgtgtgaaaggaaggcctgtcctctggggtgaccatgaggctcagggggaggagctgccaggcttgagctgggacttggcacctggccagccttttttctatttcattgtaccttgatgggctgtcagttctgaagagaaaaaatacactaggaatccattcttcctccaccattctccctggcagagggaagtgactacacccctatggtgtggacatactgacgctcctccatgaagcagcaaagttctgttgtttcaggagactgtgggccttgaggatgtggtagtgacctcaccagaggagttggcaattcctaagtgctgcctggaggcctctacagagacataatgttggagaacttctgccacatggcagtgctgggtaagacccctctgtccccaccagtgcccttgaggttatgggtgttggtaggtctgtggcctccatttccatgacgatggtgttaaggactgcatgtttgtgtccccccccaaagtttatatgttgaaaccctgacccccaggagggtggtattaggaggtggggcctttgggaggtgactaggcttaggtgagatcgtgagggtggggctcgccgatgagatcgagtccttataagaaaaggaaggaactagagcgaggtcactttgtgctgtgtgagcatacaagaaaactgccatcttcaagctgggtgcagtggctcacgcctgtaatcccagcactggaaggccaaggcattaggattgcatgagtccaggagttcgagaccagcctaggcatgataagaccttattgctaaaaaaaaaaaaaaggggg

SEQ ID NO: 59967 - DNA, 2782 bp, Homo sapiens
  misc_feature (1)...(2782): n = a,t,c or g
ctcaggggccgccgcctcctgagccgcccagccccggggccgccgcgctgcgccgaccgccaccgccgccgccgccatgaacattttccggctgactggggacctgtcccacctggcggccatcgtcatcctgctgctgaagatctggaagacgcgctcctgcgccggtatttctgggaaaagccagcttctgtttgcactggtcttcacaactcgttacctggatctttttacttcatttatttcattgtataacacatctatgaaggttatctaccttgcctgctcctatgccacagtgtacctgatctacctgaaatttaaggcaacctacgatggaaatcatgataccttccgagtggagtttctggtggtccctgtgggaggcctctcatttttagttaatcacgatttctctcctcttgagatcctctggaccttctccatctacctggagtccgtggctatccttccgcagctgtttatgatcagcaagactggggaggccgagaccatcaccacccactacctgttcttcctgggcctctatcgtgctttgtatcttgtcaactggatctggcgcttctactttgagggcttctttgacctcattgctgtggtggccggcgtagtccagaccatcctatactgtgacttcttctacttgtacattacaaaagtactcaagggaaagaagctcagtttgccagcataagtgccaaagaccatcaccagcatctgtccttcagggtgctcggacagaattcttaccacagcaaaggcataagatgcttgatacggaaaatcagaaacttaactcttttgttgcagatagtcatcagtggctctgtaaaaacgcagaggaaaagagccagaaggtttctgtttaatgcatcttgccttatctttttttattactgtgtacaaagatttttttacacaaagaaacttaatgctgtattaataaattcagtgtgtagcttcaattgggatagttccaaaagtgaagattttgtgaggaataagtgcaaattttttttttattttaaaaaattctttgaaactcttaagtctttgtgtctgcaatgaaattgtactccttgacagttgatagattatatattcttccatccctcaaacttgcattccactatatttattttttggcaaaagatgagctgtatttgtttgaaatctgagacactatgttcaattggatgtatctgttcaaatttattcccacgtgacgtggaagtccttcgttggatgtcacaacactacatttaaggttggtaaggatgacttggaggtccatggttttcattaccaacattttaagattctgaatgtcgatggagtctcactgaagagtcaccaaaggtgcctgccctcctcccctgctgggaagtgtcagttggagactgtcccaagggtgctgaagaatccagtggcaggggttctggctgctttccatctgagtgtgggatgggaggggtgttcatgatcatttggatatagcaatctactctgagaaatggaacacaaggagttacctatcactttcacttataattccaaaagatgactacaaccatgtccatgctcagattcaaacagttttccatatcacttttgggtggtaagatgatttacagttttttttttaattggcagcaccactaaccattccttacattcttttttgtatgtgtggttttctttttatttaacccgcagccgacatcgtagtttcttgttttgttttgttttacagagctgttgcatgacttatgttaccatcctaaaaaacactatattaaacatggaataaattgtctttttatgaattaggctttttgaacatcctgtgttgggatttttttgtttttcaattggcaacaaaagctctgtagggctgcagacatttaaagttcacataatcatctgtaagacattatgtattttgtggaaatactagaatttttttcctgattttgccattatatggatttgctattttttgattaatgcaaaagtatatgactttgttttttatgtgatacaccataaatattaaagtgttgaatactaacagtgctgactacaagaaggatgtagtattttggctttctgcattacaacgtcttctggaggaagggagcaggatgggtttcatttgtatctagtgtgtgtcttaacatctttctaaatcggcagtgtaactgcatagtttaacttcctgtctgtctccctcattttactcttccctccttgtcttatgttttggcttttgtgtatcagaggcatctttctttgcagcatccttagtcttgcttcagcnttctgtgggtctctttttcatcctgccttgaaagaattcggagtgtggaagggaggctaggaagtctggtgcagtaggtgagcagacctcttgctgccccagcccaagggtgggtggggcgcacacctgtctttgtgcatgcaaatctgatacacctggcgcatcctctggagagcacaacgcatggaaaggtctggaagctctgtgtagccattccttctgcagtcatcctacccaagtaaaagtaaccttggctatgttaccaccgttttggtcacccaggaggacatcttagcaagggtgcctgcgagggagtgtgggactgggcctcatcctcgccggcgttggaaaccaaggccttgtatgccacgccttatgaagcactgtttcacagttactttcacttcccgaataaaggttaccaggtaattaaaaaaaaaa

SEQ ID NO: 59968 - DNA, 1543 bp, Homo sapiens
gcacacgcgaggctcccatggctctggcggtggccccgtgggggcgacagtgggaagaggcccgcgccctgggccgggcagtcaggatgctgcagcgcctagaagagcaatgcgtcgacccccggctgtccgtgagtcccccttcgctgcgggacctgctgccccgcacagcgcagctgcttcgagaggtggcccattctcggcgggcggccggcggaggcggccccgggggtcccggcggctctggggactttctactcatctacctggccaatctggaggccaagagcaggcaggtggccgcgctgctgcctccccggggccgaaggagtgccaacgacgagctcttccgggcgggctccagactcaggcgacagctggccaagctggccatcatcttcagccacatgcacgcagagctgcacgcactcttccccgggggaaagtactgtggacacatgtaccagctcaccaaggcccccgcccacaccttctggagggaaagttgcggagcccggtgtgtgctgccctgggctgagtttgagtccctcctgggcacctgccaccctgtggaaccaggctgcacagccctggccttgcgcaccaccattgacctcacctgcagcgggcacgtgtccatcttcgagttcgacgtcttcaccaggctctttcagccatggccaacactcctcaagaactggcagctcctggcagtcaaccacccaggctacatggccttcctcacctatgatgaggtccaagagcgtctgcaggcctgcagggacaagccaggcagttacatcttccggcccagctgtactcgcctggggcagtgggccatcggctatgtgagctcagatggcagcatcctgcagaccatccctgccaacaaacccctgtcccaggtgctcctggagggacagaaggacggcttctacctctacccagatggaaagacccacaacccagacctgactgagctcggccaggcagaaccccagcagcgcatccacgtgtcagaggagcagctgcagctctactgggccatggactccacatttgagctctgcaagatctgtgctgagagcaacaaggatgtgaagattgagccgtgcgggcacctgctctgcagctgctgcctggctgcctggcagcactcggacagccagacctgccccttctgccgctgcgagatcaagggctgggaggccgtgagtatctaccagttccacggtcaggctactgctgaggactcagggaacagcagtgaccaggaaggcagggagttggagctggggcaggtgcccctttcggctcctccattgcccccacggccagatctgccccccaggaagcccagaaatgcccagccgaaagtgagactcctaaaggggaactcccctccagctgcgctgggaccccaggaccctgccccggcctgaaggccagggcacccagatgtgctgctcaagggagccccaagggctggaagggggttgtgaaaccgaaataaactgccaagcctggtctgccaaaaaaaaaa

SEQ ID NO: 59969 - DNA, 1669 bp, Homo sapiens
cgacccacgcgtccgccgccccagcctgcgtctgccaatgattcaggagccgctcctttccactcgggaaaccttcagaggagtctcagaaaggacacggctggctgcttttctcagcgccgaagccgcgccatgctcgtcctcagaagcgccctgactcgggcgctggcctcacggacgctggcgcctcagatgtgctcatcttttgctacgggacccagacaatacgatggaatattctatgaatttcgttcttattaccttaagccctcaaagatgaatgagttcctggaaaattttgagaaaaacgctcatcttcggacagctcactctgaattggttggatactggagtgtagaatttggaggcagaatgaatacagtgtttcatatttggaagtatgataattttgctcatcgaactgaagttcggaaagccttggccaaagataaggaatggcaagaacaattcctcattccaaatttggctctcattgataaacaagagagtgagattacttatctggtaccatggtgcaaattagaaaaacctccaaaagaaggagtctatgaactggccacttttcagatgaaacctggtgggccagctctgtggggtgatgcatttaaaagggcagttcatgctcatgtcaatctaggctacacaaaactagttggagtgttccacacagagtacggagcactcaacagagttcatgttctttggtggaatgagagtgcagatagtcgtgcagctgggagacataagtcccatgaggatcccagagttgtggcagctgttcgggaaagtgtcaactacctagtatctcagcagaatatgcttctgattcctacatcgttttcaccactgaaatagttttctactgaaatacaaaacatttcattaactgctataggatctgtctgctaatggtgcttaaattctcccaagaggttctcacttttatttgaaggaggtggtaagttaatttgctatgtttcttgcattatgaaggctacatctgtgctttgtaagtaccacttcaaaaaatagttctgtttactttctgcatggtatttcagtgtctgtcatacattaaaaatacttgtcactgttttaagatcttgactcttcatttgtttcagaatagctcttctactgtattctgacaactctttgctttatagcattttgttgtattcaaatgataatggtagcatttccatgcttgtgacagcatttttaagttattaatatattttatcaacctttccatcatgtctgttttcctggttttttttggttgttttttgaccagtaaaatttattttgtaataccaaataggatttaagaaaattaacgtatttctttactatggaaaaccacattgtcatttgtgacatcatctatattaaatatggttttcacattagttatttgtcacttacttggaaaatgatgctgttaggtcctggtattaaaaatctagaaaagacttgttggtttatgtgctgaaatgtctttatttataattaattttaactactatttacttcatttcggatcctgtttaacaaagatacttgagacatccatttgttttaatgaaatctgtatggatatggaaatgcttgccctaataaaagcctacatataccaaaaaaaaaa

SEQ ID NO: 59970 - DNA, 3803 bp, Homo sapiens
ctcggaagtcgagagaccagggcctggccagattctccctgcagaacctctagacgattccaagaatgccacagggaactcagcctcaggcctgggggctggcaggaccgcagaagataccgtggaagatgcctgcccagccgagggcagcagggaggccagacccaacacgcaccccggcccggcccccaccccggccgagctgccctggaccaatattgacctcaaggaggccaagaaagtgcccagccactcggccgctggcttccccgagaccaccagcctctcctctctggggctcctcccactgggcttggaggagccgtatggggtggatgaccacccgctgtgggcctgggtgtcgggaggcggctgcgtggtggaggcatgtgccatgcccagatggttcactgtccaggcgggtaagggctcctgcagggcctgggggcatccacatggccaggtgccctgggggtgtggggtgtgggaggaggccggggtcagggggctcgggcaggcctgctgtcctccctggacgcctcactgtgctcagcagctctgagccaggcattgcgctcctctgtggcctccagagaccagcccgaggctgtcaggacctggaagcacggtggccagtgccccttcccctgtctgcagcccctcccctgtgctagcggtggtggctgctttccaggctgaattactgggggagagcaactcatccatcagggcaaagggtggaaggaggcttaacagagagcgtagcttttgagctagaaagggctgatttggtggaggggagcgccgtggcttcctgcccagctgcgggcaggacagtgccccggccctgaggctctctctgccccacaggcctgtcctcctcggtacacatgctgtccctgtccatcacgccggcccagaccgctgcctggaggaagcagatcttccagcagctcacggaaaggaccaagcgggagctggagaacttcagacactacgagcaggccgtggagcagtcggtgtgggtgaagaccggggcgctgcagtggtggtgcgactggaagccccacaagtgggtggacgtgcgcttggccctggagcagttcacggggcacgacggcgtccgggacagcatcctcttcatctactatgtggtccacgaggagaagaagtacatccacatattcctgaatgaggtggtggcgctggtcccagtgctgaacgagaccaagcactcctttgccctgtacacccctgagcggacacggcagaggtggccggtgcgtctggctgctgccaccgagcaggacatgaatgactggctcgccctgctcagcctgtcttgctgcgagagccggaaggtgcagggccgcccgtccccgcaggccatctggtccatcacctgcaagggggacatcttcgtgagcgagcccacccagacctggaggcccacgagcaccccctgccctgcgaccagatgttttggcggcagatgggaggccacctgcggatggtggaggccaacagccggggcgtggtgtggggcatcggctatgaccacacggcctgggtatacacaggcggctatggaggcggctgcttccaaggcctggccagcagcaccagtaacatctacacgcagtcagacgtgaagtgtgttcacatctatgagaaccagcgctggaaccccgtcacaggctacaccagcaggggtctgcccacggaccggtacatgtggagcgatgcctcggggctgcaggagtgcacgaaggctggcacgaagcccccgtccctgcagtgggcctgggtttccgactggttcgtggatttcagcgttccggggggcacggaccaggaggggtggcagtatgccagcgacttccctgcctcataccatgggtccaaaacgatgaaggattttgtgaggaggaggtgctgggccagaaaatgcaagctggtgaccagtgggccctggctggaggtgccccccatcgccctcagggacgtgtccatcatcccggagagcccgggtgccgaggggagtgggcacagcatcgccctctgggccgtcagcgacaagggggatgtgctgtgccgcctgggcgtgtcggagctcaaccctgcgggctcctcctggctgcacgttggcaccgaccagcccttcgcctccatctccatcggggcctgctaccaggtgtgggccgtggcaagggacggctccgccttctaccggggatccgtgtacccctcgcagccagccggtgactgctggtaccacatcccgtccccaccgagacagaggctgaagcaggtgtccgcggggcagacgtcggtgtatgccctggatgagaatggaaacctgtggtatcgccaagggatcacgcccagctacccgcagggctccagctgggagcacgtgtccaacaacgtgtgccgagtgtccgtggggcccctggaccaggtctgggtgatcgccaacaaagtgcagggcagccacagcctgagccgggggacagtgtgtcatcgcaccggcgtgcagcctcacgagcccaagggccacggctgggactacggcatcgggggaggctgggaccatatctctgtccgggccaatgccaccagggccccccggagctcgtcccaggagcaggagccgagtgccccaccagaggcccatggccccgtctgctgctgaggcccccccacacacctacatgcagggacggtgcccagtttgggggatcaaggctgagccattcttgtgctggagtgtgcaccgtgggagcaatgtggcccaggtggactcaggagggaacctggccccaaggctgcggccacttcagaggcactggctgagacggccctgaaatgtgaagctccgcggacactcccacacgtgtccccgtctgcgaggagtcccggggtgtggggcatggggtggggctgcacctcccagaggcccctcccacccttcccttcccctctcccttctgcctttccaggactagaaccgggaacctggagccctccgggaacgccggccctggggcagcagagccaggatggagccctcctgagctggcatctcagacagcacccgggcccgccacccctcaccaagagagatggccatggggctcagggcctctttaccatgtgcagtgaccatttctcagagcaggacttgcaaagaggctttaatttcaaaagtgaaggaaggaggccaggcgccgtggctcacgcctgtaatcccagcactttgggaggctgaggtgggcagatcacctaggtcaagagtttcaaaccagacgggccaacatggtgaaaccccatctctactaaaaatacaaaaaaaaaaattagctgggcatggtggtgggtgcctgtactaccaactattcatgaggctgaggtggaagaattgcttgagcttgggaggttgaggctgcagtgagccaagactgcatcactgcactccagcctaggtgacagagcaagccccgtctcaaaaaattaataaggctggatgcggtggctcacgcatgtgatcccagcactttgggaggctgaggtgggtggatcacaaggtcaagagctcaagaccatcctggccaacatggtgaaaccccgtctaacaaaaattagctgggcgtggtggcgcacgcctgtaatcccagctacttgggagactgaggcaggagaatcgcttgaacccgggaggtggaggttgcagtgagccgagatcgcgccactgcgttccagtctgggcaacagagtgagactccgtcacacaaaaaaaaaaa

SEQ ID NO: 59971 - DNA, 840 bp, Homo sapiens
ttttttttttttagccgtaaccatatttttttattgagccatttggatgggggttagtgataagggagttcttactcctcatcacagtgcccctgccaaggagaggaggctcagcatctgctgcagctagtggggtaaacatcccagtgcaggccaatggcatcgatgagagaaccagaccggccactgatgaagcggagcacggtgttggggtgcaaggggacggcattgaaacttgtgccactgtctttcccaaaagacagatagcggcccttgtctgtcacaaataccagcttcttcaggtaccacttgtacttcccagaaacctggatcactgattccccagggtgcagaaagatctcctccaggtctccgttgcgaccacccacatagtcgctccacaccttgccatagcgcacctgaagacctacgatgtagtatgtgttgactcggacccggagggcggtgatggggccgtccaactggttgccagaatgagagaatcgctttccaccaccacttccatactctccactataggaggaagacctggcctgaatggcattgccagaggctgaggcacagagaagggctaggagagcgactgtcaacattctggggctggggagcaaagttggtgacagaaggaactgtgccagcaccagtatccaagcagtgctggtggaactaggacagacagagaagttgcagaaggagtcgggaccagctcaagatattagaccccaggtgcctggtctatgtgtcacttcttttctccactaacacacatctggccatttctattctcctgaacatcccaggtgtccccagtccttccgg

SEQ ID NO: 59972 - DNA, 1037 bp, Homo sapiens
gccttttcctctcccaggtgcgcttccctgcttgatctgtgtaccctgctctttctccttcattccgcagcctcctttgccctgtgacctgcaggtactggacggtccctagagaggataccgggacgctcctgaagccgcgagatgatttcaagcagatgcagcctgaccattagggccaaggccaaattgcaaaaaaaaaaaaagttggcctttattctactccatccacatctaaactttggaggccagggctggggacagatcaaaaaacatagttccctccttctggggctccacatccttcattcactgatctttggaaaggaggatgggtggcaggatgggtcttccatgatactgaagggagagccacatgttgatgcccaggaccagctgcctccttggtctgaaaggcctgatcgaggccaggattggctatgagagctgggaaatgggaccatctttgaagccatgggagagggtgagagccaccatcactcatgttcttgaatgggaactgcctggagaccctgaagaagaaggagcctgaaggaggaaggaggaggctgagccatcccgggaacatgggctggatgaggccaagccaggagacgacaccaccagatagaagtcaccattcaggatttggacttttctgtggagatcctggccccgagatcgaacccttctccctgtgggtgttcccgcaggagatggtgctggagatccaccagctgttcatggaccatgaatacccatgtcaccacatcacttctcactgcacctgggtggcagcacactggaccacgtctcagagctgcgcagcatggcagggctgcaggcgggcttgctgctccacgtggtggaagagccctgcacaatgcacaaggcccacggtgatgagtgccacatttgagactgctcaggagcctggacccagctgatgcagctccttgtccttcctgagcgtcttcactgacagaggcctgagagacggcaggagcagaaagacttggagatggaccccaccgact

SEQ ID NO: 59973 - DNA, 968 bp, Homo sapiens
ggcacgaggtgaaaccccaatttatgtagcgtatctcttggtccactgtctggccattctgtcatgttctgctctgttggtcatatactgagtggcaatacttcccaccaaggggtcggctggaagaaaagaatgtagattactttggagaaaggaaaagaacattttaaactttagcgaatagtgacagcttgggtagatacgtacgacaaagtatgtgtgatcaaacccatcttcgaaacaccactccaccatgctggatatttttccatcaaaatttcaaaaaaacataacgttgggggaagagggaatgcttaggctttagtgtactggtctgtctttatcttagttcattccatttttctcccaacaaacaacactcaattggagtttctttactcttatgtgttaggctgagttcagtagagactggaacggtcaaggcttcagactgcaatgaacatccagctgtgttcatgtgacccttagctcaatgtcaccagttaacggcattgtgaatactgtgaagtcttcggggctgttgcagtgcaacactattaacctttacgctggttaaagagccaggttgccaggcaaaacctggacctccaattaagtatagtatttctctgaatcttaggatctttaataaatttatatttggtttacctagaaaatatatttgtctgtgtgtgtgtatatatatacatatgtgtatatatatatattttttgagacggtctcgctttgccacccaggctggaatgcagtgcagtgacatgctcatggctcactgcagctttgaccttctgggttcaaacaatcctgacacctcagccaccctagtagctgtgactacacaaaaatattttttaaatgaaatgaagtcccaaaaaagtcacaattcaatagtcactaagtatttaacaactaccattttcaaaattgagtgccagtcgacgcggccg

SEQ ID NO: 59974 - DNA, 3248 bp, Homo sapiens
acctcattgtccccagtaaaggggttttatatataccacgaatgtaatggaatcctagccctttaccaacaatagagccaggtaccacggattccccccaaatatggaaatggtgaaaccgaaattcagggaaagacttttaggggagaaaggtcttagagaataaatgtgaactatacagtagaagaaggtagttcctcattgcccattttcttactgagttgtagtaccagattgagtccccaagtcatattcttactgatttttatgctgtagtatacaaaatttaaaactttaatgaacagccaagcacggtcactcatgcctgtaatcccagggctttgggaggcagaagggggaggatctcctgagcccaggagttcccaggctgcagtaagccctgatcatacaactgcactccagcctgggtgaaagagctagaccttgtctccaaaaaataaaaataaaaaaatcaaagctttaatgaacatccttaattagatatggcaataatatcctttggtcattgagtaaaactctttatttttatatacttaaaagtgttctttttattttaaaacatctgtataatttttagttaaaaaaaatggaacctttttcctgtgacactttcgtggcattacctccagcaacagtcgataacaggattatttttggaaaaaattcagatagactctatgatgaagtacaagaggtggtttattttcctgctgtagttcatgataacctgggagaacgtcttaagtgtacatatatagaaattgatcaagttcctgaaacatatgctgttgtcctgagtcgcccagcgtggttgtggggggcagaaatgggagccaatgagcatggagtttgcattgggaatgaagctgtatggggaagagaagaagtttgtgatgaagaagcactattaggaatggaccttgtcagacttggccttgaaagagctgatacagctgaaaaagccctcaatgtcattgttgacttactagaaaaatatggccagggtggaaattgcacagagggtagaatggtatttagctatcacaacagtttcctgatagctgataggaatgaagcctggattctggagactgcagggaagtactgggcagcagaaaaagtacaagagggagttcgtaatatttctaatcaactttccataacaaccaagattgcccgggaacacccagacatgagaaactatgctaagcggaaaggttggtgggatggtaaaaaggagtttgattttgctgcagcatattcctatcttgacacagccaagatgatgacttcatcaggcagatactgtgagggctacaagcttctaaataagcacaaaggaaatataacttttgaaacaatgatggaaattcttcgagataaaccaagtggcattaatatggagggagaattcctgaccactgcaagcatggtttctattttacctcaagactccagccttccttgcattcacttctttacagggactcctgatcctgagagatctgtttttaagcctttcatatttgtgccacatatttcacaactattggataccagttcaccaacatttgaacttgaagatctagttaaaaagaaatcacattttaagcctgacagaagacacccactctaccaaaaacatcaacaggcattggaagtagtaaataataatgaggaaaaagccaaaataatgttggacaacatgaggaaactggagaaagaactattcagagagatggaatcaatccttcaaaacaagcatcttgatgtggagaaaattgttaatctctttcctcagtgtacaaaagatgaaattcaaatttatcagtcaaatttatcagtcaaagttagttcttagtgatcatatggtcagctaatattagttcttagtgatcagtggtcagtaatcttcaaagtcaggaatctatccaccttgggtaaattatattaaacctaacttgagcagatctggattattcttggggtagtattccagtgggtatccttggactatttaaactacgtatagtgttgctgaaatagaaagaaaacagcattggaattggattcatgtatcgtgggatacaggtgttatttcaggtgatgtacttgcattattttctttagccatactaactttttgtcacaataactaagtattcaattatatataaagagtgaaacattaaaatgacgcatggatttatatttattataattatgtagtaccctcaaatcattttgtcagttacatcaagaaagcagatttttttttagtcatgaaaaatatctcaagtggtaagttgtttgtgctttaggcaaacattaaccagctctaacaagaaaaatgtctagatttacacattgtcaatacagtatattagttctgcaaatgcacttttgttaaactcaaacatgctctttgtcaagacttggctaaccagtgagcttgtagctctgattatctagcatttttagggtcattctccttaataggcttttatgttaataagatatatttttagaagagcttgtttgggagattagagaataagataaaagaaccaaaaccttaggatatactgtttctgggtctgaaatctctctcattgtttacttctgttcactcagtgaaaacagaaacaagaatgaggtagtggcaatgaaatagaattattagtatattatgaacattataacattttgaacactataatgcattatatattatgaacttttatgaactttatacatgagtaatagcttcctaaagtttataaaacattgtttaggttacataaagattaccaagtaagactcaaaattgcaaatataaacaaaagaaaaatccaactgaaaataacactaagtatttttgagtttctagaatgtccattttgggatttggttacattatcatatttactagtcactatcagcacaattaggttaataaagaagtgggtcattatattcaaagagtgctcaggaagttatgtgttcaaagttctctcataaataccatcgtctgcctgatactgctcttgtctaatagagggttgacattacaaaagaaaagatgtctgactcaagaactcagttgattctgtttggccttaagtttggttcagtgataggctggtcttctaacccctgatactcctcttctctgcctttaaatagatgaggaaactaagggcaaacagttcgttacacttacggga

SEQ ID NO: 59975 - DNA, 3175 bp, Homo sapiens
  misc_feature (1)...(3175): n = a,t,c or g
cgttgctgtcgcccgcctgctacgagtagaacgctgtccgcagcttgcgcatttcgcagccgctgccgcctcgccgctgctccttcgtaaggccacttccgcacaccgacaccaacatgaacggacagctcaacggcttccacgaggcgttcatcgaggagggcacattccttttcacctcagagtcggtcggggaaggccacccagataagatttgtgaccaaatcagtgatgctgtccttgatgcccaccttcagcaggatcctgatgccaaagtagcttgtgaaactgttgctaaaactggaatgatccttcttgctggggaaattacatccagagctgctgttgactaccagaaagtggttcgtgaagctgttaaacacattggatatgatgattcttccaaaggttttgactacaagacttgtaacgtgctggtagccttggagcaacagtcaccagatattgctcaaggtgttcatcttgacagaaatgaagaagacattggtgctggagaccagggcttaatgtttggctatgccactgatgaaactgaggagtgtatgcctttaaccattgtcttggcacacaagctaaatgccaaactggcagaactacgccgtaatggcactttgccttggttacgccctgattctaaaactcaagttactgtgcagtatatgcaggatcgaggtgctgtgcttcccatcagagtccacacaattgttatatctgttcagcatgatgaagaggtttgtcttgatgaaatgagggatgccctaaaggagaaagtcatcaaagcagttgtgcctgcgaaataccttgatgaggatacaatctaccacctacagccaagtggcagatttgttattggtgggcctcagggtgatgctggtttgactggacggaaaatcattgtggacacttatggcggttggggtgctcatggaggaggtgccttttcaggaaaggattataccaaggtcgaccgttcagctgcttatgctgctcgttgggtggcaaaatcccttgttaaaggaggtctgtgccggagggttcttgttcaggtctcttatgctattggagtttctcatccattatctatctccattttccattatggtacctctcagaagagtgagagagagctattagagattgtgaagaagaatttcgatctccgccctggggtcattgtcagggatctggatctgaagaagccaatttatcagaggactgcagcctatggccactttggtagggacagcttcccatgggaagtgcccaaaaagcttaaatattgaaagtgttagccttttttccccagacttgttggcgtaggctacagagaagccttcaagctctgagggaaagggccctccttcctaaattttcctgtcctctttcagctcctgaccagttgcagtcactctagtcaatgacatgaattttagcttttgtgggggactgtaagttgggcttgctattctgtccctaggtgttttgttcaccattataatgaatttagtgagcataggtgatccatgtaactgcctagaaacaacactgtagtaaataatgctttgaaattgaacctttgtgccctatcacccaacgctccaaagtcataattgcattgactttccccaccagatgctgaaaatgtccttgtgatgtgcacgtaaagtacttgtagttccacttatagcctctgtctggcaatgccacagccctgtcagcatgaatttgtaatgtcttgagctctattatgaatgtgaagccttccccttatcctccctgtaacttgatccatttctaattatgtagctctttgtcagggagtgttccctatccaatcaatcttgcatgtaacgcaagttcccagttggagctccagcctgacatcaaaaaaggcagttaccattaaaccatctccctggtgcttatgctcttaattgccacctctaacagcaccaaatcaaaatctctccactttcagctgtcttttggaggacgtacgtaataaggttttaatttagtaaaccaatcctatgcatggtttcagcactagccaaacctcaccaactcctagttctagaaaaacaggcacttggcagccttgtgatgtcatacagagaagtcacagggcagtacctgagggtctgtaggttgcacactttggtaccagataacttttttttttttttataaaaaagcctgagtactccacactgcacaataactcctcccagggttttaactttgttttattttcaaaaccaggtccaatgagctttctgaacagctggtgtagctacagagaaaccagcttccttcagagagcagtgcttttggcggggaggaggaaatcccttcatacttgaacgttttctaattgcttatttattgtattctggggtatggcgtaagtacagagaagccatcacctcagatggcagcttttaaaagattttttttttttttagaacctagcattttatttagatcttcattaaactgttggaattgagaaccagacatacgtaataaaccttcaaaaatagatcctgaaaggcactttctgcttagggcaagcagtcatggaataagcatgtaaacaagctggcttctctgtaccacaccagccaagtcagctttctccatggccagccgcaccagctctgccctcccttctgttaacaccagccagaccccctgtaggtctaacccaaggtttttctgtaggacaccttggcctacctgggaatgctggaaacatgttgttaaaggaatcatggtgttgagagaaaaaaaaaaaatcttttaaaagctgccatctgaggggatggcttctctgtacttacgccataccccaaaatacaataaataagcaattagaaaacgtttcaagtatgaaagggatttcctcctccccggccaaaaggcactggctctcttgaaggaagctgggtttctctgtaagctacaccagctggttcagaaagctccttggaccaaagtggccataggctgcagtcctctgataaattggcttcttcagatccagatccctgnacatgacccccaggcggagatcgaaattcttctcacaatctctaatagctctctctcactcttcctagaggtccataantgaaaaatgagatagataatg

SEQ ID NO: 59976 - DNA, 1509 bp, Homo sapiens
tttcgtcgcagtccccgacgggagcgccatggtccatccgccgcccgacgtggagggggacgactgtctccccgcgtaccgccacctcttctgcccggacctgctgcgggacaaagtggccttcatcacaggaggcggctctgggattgggttccggattgctgagattttcatgcggcacggctgccatacggtgattgccagtaggagcctgccgcgagtgctgacggtcgccaggaagctggctggggccaccggccggcgctgcctccctctctctatggacggccgagcgcccccagctgtcatggccgccgtggaccaggctctgaaggagtttggcagaatcgacattctcattaactgtgcggccgggaacttcctgtgccccgctggcgccttgtccttcaacgccttcaagaccgtgatggacatcgataccagcggcaccttcaatgtgtctcgtgtgctctatgagaagttcttccgggaccacggaggggtgatcgtgaacatcactgccaccctggggaaccgggggcaggcgctccaggtgcatgcaggctccgccaaggccgctgtggacgcgatgacgcggcacttggctgtggagtggggtccccaaaacatccgcgtcaacagcctcgcccctggccccatcagtggcacagaggggctccggcgactgggtggccctcaggccagcctgagcaccaaggtcactgccagcccgctgcagaggctggggaacaagaccgagatcgcccacagcgtgctctacctggccagccctctggcttcctacgtgacgggggccgtgctggtggccgatggcggggcatggttgacgttcccaaacggtgtcaaagggctgccggatttcgcatccttctctgctaagctctaggaatcttccggccgctgcttcctgccgcctcactcagccaggtggagagcaccaatctgaaccagcaatgcctgcagcccagcccctcctctgaacactcagctattactgcgctttccctccccacggccccaactccagggcaggagcaactggacagtgggcctggcccgtggagctgccacgcaggtgcctgagggccaggtgccacgcaggtgtctgaggaccaggtgccacgcaggtggtgggggtacagacaagatgctgggatgtcccctgccccatggtcaagggtgtcctgcctgcctgggtccagggcctgagggagccacatggatcccgagacttgtgttctcttggctgaaaacactgaggtgctcccatctgtgcgtggcccatgagctgggatggtcctccagctgcccacaaggtccgcccctctgtctctgcaccacctgtttgcataaacacactttgctacaatcttgctagtgcgttttcttaaaagataatctatttactgtaaaaataaattggactttgcaaaagcttttagaaggaaaagaaagaggattaaagagaattgctggtgaaaaaaaaaa

SEQ ID NO: 59977 - DNA, 2144 bp, Homo sapiens
tttttttttttattaatagagattatattttaatggttttaaaatgtatttgatacattacaaaattattttagttacaagcatatcattaaagctattctttattattacaaaatgcttttacaatgctattcttgacaacaggaaaatacttaccctcactgaagtatgtggagtaccattttttggaaaccatgtcaagcataatggcaatattcaggttcaatcttcctatagatctgctcaatatttatctaaaccttagcttctattcttttcacatgttattagttatattttcacttaaaaaattggaggctgaaggggtaagcaaacaaacttttgaagtagacaaagctcatctttaatcaacagaatttagagtccagtctttccaaatctgtttttaacgacagaaacttctccctcccctggccccattttgtcctccccattaaatggtacctgggtcaataaaattcccaagcgacctctttaaatcagcgttctttccgatgctggctaccacagtcatggaaaagggagatgtgttggacaggcctgtcattacaggtagtagttggtggtacatccagtctgtatttcttacacaaaattacatctaaatatttgacatgaggccatttgctatcataagccatcactaggaacttctagtctgtctcactcgattgaggctacaatgttgttaggtgctatgaccacaatgaatacaacagacagcctctcagctgtgctgcaaagtattcataaccaaaagaccatatttcaaattaaatcatagtagcgaatgacataccatttacatattacaatctgagcctctgaaacagggggaacatataatggtatccagaacatctttacatcaaaataacctatcatactacaaagttttcacttccaaaaagtgtaacagagtttaaggcactggtaactttgtccactgttagagattaaaacttccaaagcaaatgaaagaaccaatgttcacctttaacgtggggaaagttggcaaaaagaaccccaggaggacacccaaaccttctctgtgtcctctgtggaacctggcttttttctcttgtcctcagagaaagaaacaaatgccgatatcctctgtttaaaatatgaaagtaccttacaccaataacccctaacagcctggggtctcagtggaactaacttaagtgaaagaaaattaagacaggcatagaattaggcctttgttttgaggctttaggggagcagagctccattgtggcatctggagtttcacctgaggcctacaggggtttcaaatggttgcatttaaggtcagaatctttgtgttgggaaatgctggcgactgagccttgacagctgagcacgggttgcctcatccctctcatgctgtctatttcttaatctaacaactgggcaatgcgttaaactggcttttttgacttcccagaacaatatctaattagcaaataacacaattcagtgacattcagcaggatgcaaattccagacactgcaatcatgaacactgtgaagacagtcttctccgtgggccgggacacaaagcagtccacagtgttgggacaaggccaggcgttgcacttcaccagccgctgcatggagaagccgtcgtacatgacatagaagacgtacatgaaggcggcttcgaagatgacccggaagaagatgctgcttgtgtaggtccaccacagggagccttcgatgcggaccttctgggttttgatctcctcgatgtccttaaattcactctttatctcccccttgatgaacttcctcttcttctcatgtctccggtaggccacgtgcatggccactaggagcgctggcgtggacacgaagatcagctgcagggcccatagccggatgtgggagatggggaagtagtgatcgtagcacacgttcttgcagcctggctgcagggtgttgcagacaaagtcggcctgctcatctccccacacctcctttgcagccacaacgaggatcataatgcgaaaaatgaagaggacggtgagccagatctttccaatgctggtggagtgtttgttcacaccccccaggatcgtctgcagcgtgccccaatccatcttctaccgacagcaacg

SEQ ID NO: 59978 - DNA, 1677 bp, Homo sapiens
  misc_feature (1)...(1677): n = a,t,c or g
gcttaattgagcctgttggctgctcaagactggtcaggtggaactcacttcaagggtgacaggggctcagtaactggctggtacaaatggaactaatggcatttgcactgacatgaagtccccaactgcagccccaggtctatagagtttcaacaactttattggccaaatgcttctcctatgtttacaacttagtgtgagcctgctcactggcttctccttctaagcccctaagcgggcagcaaactttagtacaggcctggagatggggtaggggttaatgagtgagttggaaacctgctgatgctccacaattggacagcaggacagcaaatcttctacttcttattgccgaaaactgcagaaagacacgaacaggatggagacaggaccgagagtgcatctctgccactggtcccagtttccagtttctggtgcatccaacagagtataccctttggtattcttgcttcagggattggggtngatactatgtccagcctacgcattttgcagaagtacatagggccaaaattggccaatgaggttttggtattaccagctccccaacctgacaggatgagaagaaacaaaatgtgtccatgaaaacccttcggaagtgagtcagatcttccacctgtacctggatgctgtattgattggccaggagctcaatggcaccttgcaccacatactcgttctgtaagtgtgagagtgagcaggtagaatagacaacatggcctcctggtttggtggcaaggagtccagccgcaagaagctgcacttgcagcacaggcaatatctgtcgctccttcttccttgaccgcttaaagatgttgttctcctcctcatgaagggagtggcggtctgtggtacagggcacatccaccagcacccggtcataggtgtccccctccagttctccccatttcctgccatcccatgaggtaactcgaacttgatttccatccctgatctcttcaggcacatagctgtgaaggatcttctgtagtctggctattcgggacggggagagatcattggcagcaagattgcggcaacagccagtctgaagcaacgctagtgtctttcccccaggagctgcacataggtcaagcacgatgtccccaggctgcaggccgagggccagaacaggcagcaagggggcagcatccatcaggtagtactccatgacacccaggctgccaggtctggcaggagggaagcgactgatatcccctctgtcaaaagtgaagcatcgaaggttcggactgcaggcccaggaggcaggggatggggctgcagattggccaccctcagactgcagttcccagtgggagatggcttcattcacaaaatccttggcactcagctgctccagcttagcacttacatgatcccaggcagcaaagttattgaccagtgcaccatacttctgctctgagaggagactgacacggattgatggccaaagatctccaaactgcacactgtaagtcatgtcaaaattctgcaaagccagtcgaacagcagggaatttgggctctgtggcagcccatttcttcttatatcgatgtctccgcgggaccgtcgcgaggtccacacgcttcagcagctcccggacacccctcagtgtcagcgcagccatatcggcgtgctccacggggtaattccgac

SEQ ID NO: 59979 - DNA, 1713 bp, Homo sapiens
cggaaacgtttctttcctacgcagccgctcctgccgccgtggtcgctggagctttgcctctctaggccggcagcgcctctcctccatggtcctgtctgtcagcgctgttttgggagcccgccggtgaggccgggccacgctcagacacttcgatcgtcgagtctgtcactgggcatggcgggtcagttccgcagctacgtgtgggacccgctgctgatcctgtcgcagatcgtcctcatgcagaccgtgtattacggctcgctgggcctgtggctggcgctggtggacgggctagtgcgaagcagcccctcgctggaccagatgttcgacgccgagatcctgggcttttccacccctccaggccggctctccatgatgtccttcatcctcaacgccctcacctgtgccctgggcttgctgtacttcatccggcgaggaaagcagtgtctggatttcactgtcactgtccatttctttcacctcctgggctgctggttctacagctcccgtttcccctcggcgctgacctggtggctggtccaagccgtgtgcattgcactcatggctgtcatcggggagtacctgtgcatgcggacggagctcaaggagatacccctcaactcagcccctaaatccaatgtctagaatcaggccctttggacatcctgctgacacttgggccccttaacaccttgggctgctcagaccctccagatgaggtccagcccagatctgagaggaaccctggaaatgtgaagtctctgttggtgtgggagagatagtgagggcctgtcaaagaaggcaggtagcagtcagcatgacagctgcaagaatgacctctgtctgttgaagccttggtatctgagaggtcaggaaggggacctctttgagggtaataacataattggaaccatgccactcttgagccacaatacctgtcaccagcctgttgttttaagagagaaaaaaaatcaaggatatctgattggagcaaaccacttctttagtcatctgtcttacctccctgggacagctgttacctttgcagtgttgccgaatcacagcagttacctttgcaatgttgccgaatcacagcagttctgttggagaaacgcttggtttccggatccagagccacagaaagaaatgtaggtgtgaagtattaggctgctgtcagggagaggatggcagatggaggcatcaagcacaaggaaaatgcacaacctgtgccctgttatacacacgttcatgtgcacccaagaacctatgactttcttccagttccttctaccaggtccccatcctgctgccagctctcaacatagcaggccataggacccagagaagaatcccagtgttgctcaaagtctaaccatcataaagacactgcctgtcttctaggaatgaccaggcacccagctcccactggactccaattttttttcctgccttatttagaattctttggcgggaagggtatgatgggttcccagagacaagaagcccaaccttctggcctgggctgtgctgatagtgctgagggagataggaatttgctgctaagatttttctttggggtggagtttcctcctgtgaggggcttgcagctatccttcctgtgtatacaaatacagtattttccatggttctgcctgcacttactttgtaatgccacggttgagattgagagagatcagtgccgccggccaggag

SEQ ID NO: 59980 - DNA, 629 bp, Homo sapiens
cgttgctgtcgagcccctgcgtaatcgataaggaaacccggacgctgctgcccctttctttttttcaggcgtccgggaagatggcggacattcagactgagcgtgcctaccaaaagcagccgaccatctttcaaaacaagaagagggtcctgctgggagaaactggcaaggagaagctcccgcggtactacaagaacatcggtctgggcttcaagacacccaaggaggctattgagggcacctacattgacaagaaatgccccttcactggtaatgtgtccattcgagggcggatcctctctggcgtggtgaccaagatgaagatgcagaggaccattgtcatccgccgagactatctgcactacatccgcaagtacaaccgcttcgagaagcgccacaagaacatgtctgtacacctgtccccctgcttcagggacgtccagatcggtgacatcgtcacagtgggcgagtgccggccttgccggcctctgagcaagacagtgcgcttcaacgtgctcaaggtcaccaaggctgccggcaccaagaagcagttccagaagttctgaggctggacatcggcccgctccccacaatgaaataaagttattttctcattcccaaaaaaaaaa

SEQ ID NO: 59981 - DNA, 2286 bp, Homo sapiens
ttttttttttttaacaattcagtcggttggatctcgatgcagtttattaaaaaaaaatcagtacattttcatataaactgcaatcaaaaaagtaatttactttgtcaaagaagttatgaagttgcaagttattttttgtaatatgcagaacagtaaaatgtaagcatgctcttggatgcaggtgctcctgtgcaccatggagttattttgaagagcctgctaacgtctgcaggcagtttataggatgcaattattttctccacaacttaggtacatgagaataaaactgatatttatgaataaagtatttttctcgaaaaagttgaggcagcttttgttgaatgctatctgtgtgggtacacttgctacaccttgaactgtactgagagagagacagacagcaagaagcccatgttcatgctgaaacctgaaaaatccctccatacgtgttgaggagttccaagaaaaagaagagggtaaaacactatacacaactgttcatcgtcttacattaacagaacacaccgagaaactttacataacaaggaagcaaatccccttcactgcttttagtcaaagtccgttgtatctatagtggaggatgaaagtggagcaagcctagtagggataaagcttaagtctacatctcatgcagagttgtccttggtctgtcctctaatatttctcagacatccgagttagaactgaggtttgttaatctggggtccgcattgatttcatatctgtaatgatacccttccatgtgatccctgcaggcatctctgatgttatgcatccacttttttatccccttgcggttcaaatacaaaaccaggaggaaaatagcgcctatcagggctaaaccaatacccaggaagacataagaggtttgcagggatgggggaagaatcgggtcacagtccaggtcagcactgttgagttccaagaggacccgattcctcattttttccggatatgcacaggtgagccggtctttgccctgcactacctctgtttccttgagccaggtcaccatgtctgccatgtggcagtcgcagacccagggattgttgtccaggaaaaccctaatgtggggtagaccttgcaactcagccagggtgccattgtgaaggaccttgagggcattgtcctccaggtggaggctttctagatgtgtcaggttgcggaaggacacgtaggtcaggctcaccagcgaattattacttaagtccaggtgcctgaggctgggcagttgggccagcacatcccgcggcaggtaaaggaagtggttgctggccagctccaagcggcggagcccctgcagtgcacggcccgccagcagggccgccaccaccatgccctcgaagctccggttctgccgctcatcttcagggggcacgatgtggttcaggatcagttccacaaggggactgggggccgagacgctggcattgctgcccgagaaagcgaagggactgaggtcggccagtgggttgtggctgaggtcgagctggcgcaggctgggcagatgctcgaaggcgcccgcgcgcacctcgtccaggcggctgccgctgaggttgagcgcggccagctccgccagcggcggccggcgggcgaaggcgccggcagggagcacggccagctggttgccggtaaggaagaggttgcgcacgtaggcgggcaggtccgtgggcacctcggtcagattgcggttaacgcacttgactgtgcgcgctgcctcggagcactcgcacagcgcggggcactggtccggcagcgggggctgggcggacacggcggaagccaggaacggcgccgaggaggagaaggaggatgccgaggaggtgggagaagacgaggagacccagcccaggagtaccagcgctagtcgcgccagccgcagacgcccgtccccggcggcggggccccgggagcaccccccaggcatcgcggctcgcgtttccccggagctgggctgggacggcgcccgctccgaaggctcgggaggctgggcccggagggcgcgagccggcggaagcgtctggaaaaaaaaaactttcctctcgtggaaccgagggagtggcgccgcagccggaacttggctaaccccctcgccaccgggcgcttccctcaggggccgattcccccgccccttccctccagaaagtacgcacggcgggtcgggacgctccgctccgcgctcctgctcccgctcctcttcctgccgccgccctggtgccacctcttcgcctcttgttggcacccctcgctggatcctctgaggga

SEQ ID NO: 59982 - DNA, 2161 bp, Homo sapiens
  misc_feature (1)...(2161): n = a,t,c or g
ctgaaaattttaatttgttctgacaacgaaactaacacagcataaggacttaagccctcaagctaggcaagacactgatggcccttggagaaagcaccagggcagctggcaggaggcgctaagatggattcttggtgggaaaggaatgaggcacacacataaaccgtgggaaagacttaggtgtcagggcccaagccagaagagggataaggatggactgttccagccttagtctgtgcttaaaaagacagaaatgcccttctctggaattatgagggagaggtctgagggaagggaggcaggcagcttactacttgccctttcactgacctatagcatctgaggcatctgagagcaaagttaaatagaatgaggctggtcgcaagcactgggaagaggtggcggtcctcgggtttaaggagccaaaccctgggcttggaattcagctcccagggccagagcagcatctctcttctgcggaggaggtcacctgagctcacaggactgggaatgtcggctttggaccctcctgatccctggttgttgagattcccttgtgtctcaaaagccttggagcagtgaagtgtctctccaggattttctttcccaatcagtcagcagtcaactttcctggaagaatgtcctttctacccaatctgcccaggagggcgggaatgtggccggccctcaggaagggcctctgggtggcctctgcatccctggctggagaatgcgcacagtttgcagaggctcagaactcccaatcgtccacctccagctcttccaggtttgttaccaggccaaagattccactgtggtcctgagactggctgccctcaaaattggtgatgggggtgacaggacgaagcaattcgggcaaagcctctgaggcacgtcgcttgatctgcttgaagaaagagtggttcaggagggtgctggcactgggcctggcatccgggttgcgctgaaggcactgctccacaaagtggtggaagtggggggagaaggttcggtggtaggggtgggagggcgagtcaccgttggagggccggggggtgctggtggtcaggctgtcactcaggccagagttggccactgagcgcgaagggctcatggtcagctcctcagcggggatggtgctggtatccaacaggcagggcactgtgccgttcagtttctctagcagcatctgggtggcaggcatatccttaaaggggacatggccgttggccagttcacaggctgtgattcccacactgtagatgtcagacttggcatcataaccctggagattctgctggaggacctcggggctgagccacggcagaaccttgacactgtacttgggaaaatcgtggaccactcgctgccgctgcccatggcttatcatgctgaggttgctgcgcaaaccagacaggtagaccttcccatccacagagatcaggatgtggctggctttgacactcctgtgtacatatcccatgtggtggatgtagtcgagggccttcagcaccccctgcaggatgtaagcaatcgccagctcattcatgccatccatgaagtgtgtacagatgagatcttttgcagaaccgtatgccatgaatgatgtgacaacccacagctcattgtctgcaattaaagtggctcgatatggcacgatattgggatggttgagagtttggaacatgcagctcgccctgcaagatgttaccatctcattggaacaagcttctaagttaattctncgtacaggcacgtactctcctgttggtttgtaccttgctagattcacagtcatcaggtcctcaaatcctttgcctatcacagtgagcagctcgtaacaccctccctctggcagaaagctactcatgacctcctgtttagagaaggatgctattgactctgagctcgcatcattggtttttctctgagtgtcacccggaggctgctctccaaatagttccaaatctcttaagccctcaacaatgaacttttccgagacccaccgaagaaatgacatgagttcctactgtgtaggcctacttcagtttcaaaaacttaaacctgttcctggagttagcaagcagccccgaccgtcttggctccgcctcctcagttttactgccgcgccgccgccagacgaaatcgtcgacccgggaat

SEQ ID NO: 59983 - DNA, 702 bp, Homo sapiens
ttttttttttttgtgggagacccatttaatgtggacactcaaggcctgggcagagtggggagcgcccaggagttgggtgggcaggcaagtgggtgggttgcaggcccactcttggccccaggagggcatgccaggtggtgggggctggcccaggtaggccaaggggaggcccaggcaggaagggtggcccaggcaggcagacccaccaggggtccctgaaggccagcccttgagaaggtgtctaagccagggggtgagtgcccaggccagagcctagcccagggaggcagggttgggtcccggttgggggctcttggagcctaggggctggcatcactgggggcctccccgagctgctgctggaactccaggcgtgtctgccggttggactccagcagctcctggaggcgggcgtggaggtggtcattcttctcctccaggtggtccagacaggagttgatctggtccagcatggagttgatggcagcgtattctgcttccccgaagccgtcctcctcgccttccgctcccgcctccaccggcatccccaggtctccgttggggcccgacattgcgggctcgggcgcccgaagggccgcgcgacgatggaacgcggcgaccgtcgcgccgaaagccggcgccggatggaaggtggaggcggcggatagaacacgggccggaagggtagaacgcggctggtcc

SEQ ID NO: 59984 - DNA, 5064 bp, Homo sapiens
tgtgttgctcgctaaccagtcccccataacagtagactggagcccagagcctgcttacttgtcaggtgtttattttgtcttgcttttttttttttttaaatgaagtcaaaatgccaataagaccagatctccagcagttggaaaaatgcattgatgatgctttaagaaaaaatgatttcaaacctttgaaaacacttttgcaaattgatatttgtgaagatgtgaagattaaatgcagcaaacagtttttccacaaggtggacaaccttatatgcagggaacttaataaagaggatatccacaatgtttcagccattttggtttctgttggaagatgtggcaaaaatatcagtgtattggggcaagctggacttctaacgatgataaaacaaggactaatacaaaagatggttgcctggtttgaaaaatccaaggacattattcagagtcaaggaaattcaaaagatgaagctgttctaaatatgatagaagacttagttgatcttctgctggtcatacatgatgtcagtgatgaaggtaaaaaacaagtagtggaaagtttcgtacctcgcatttgttccctggttattgactcaagagtgaatatttgtattcagcaagagattataaaaaaaatgaatgctatgcttgacaaaatgcctcaagatgcccggaaaatactctctaaccaagaaatgttaattctcatgagtagtatgggagaaaggattttagatgctggagattatgacttacaggtagccattgtagaagctttgtgtagaatgaccacagaaaaacaaagacaagaactggcacatcagtggttttcaatggattttattgctaaggcatttaaaagaattaaggactctgaatttgaaacagattgcaggatatttctcaaccttgtaaatggcatgcttggagacaaaagaagggtctttacatttccttgtttatcagcatttcttgataaatatgagctgcaaataccatcagatgaaaaacttgaggaattttggattgattttaatcttgggagtcagactctctcattctacattgctggagataatgatgatcatcaatgggaagcagttactgtgccagaggaaaaagtacaaatatacagcattgaagtgagagaatcaaagaagctactgacaataattctgaaaaatacagtaaaaattagcaaaagagaagggaaagaattgcttttgtattttgacgcatcactagaaatcactaatgtaactcaaaaaatttttggtgcaactaaacatagggaatctatcagaaaacaaggtatttcagttgccaaaacgtcgctgcatatactttttgacgcaagtggatcacagattctagtgccagaaagtcaaatctcaccagtcggagaagagctcgttagtttaaaggaaaaatcaaagtccccaaaggaatttgctaaaccttcaaaatatatcaaaaacagtgacaaagggaatagaaataatagtcagcttgagaaaactactcctagcaaaagaaaaatgtctgaagcatcaatgattgtttctggtgcagatagatacactatgagaagtccagtgcttttcagcaacacatcaataccaccacgaagaagaagaattaaaccaccactgcaaatgacgagctctgcagagaaacctagtgtttctcaaacatcagaaaatagagtggataatgctgcatcactgaaatctagatcatcagaaggaagacatagaagagataatatagacaaacatatcaaaactgctaagtgtgtagaaaacacagaaaataagaatgttgaattcccaaaccaaaattttagtgaactccaggatgttataccagattcacaggcagcggaaaaaagagatcatactatattacctggtgttttagacaacatctgtggaaataaaatacacagcaaatgggcatgttggacacctgtaacaaacattgaactatgtaataaccaaagagcaagtacttcgtcaggagacacattgaatcaagatattgttataaataaaaaacttactaaacaaaaatcatcctcttcaatatctgatcataattctgaaggaacaggaaaagtgaaatataagaaagaacaaaccgaccatatcaaaatagataaagcagaagtagaagtttgcaagaaacacaatcagcaacaaaatcatcctaaatattcagggcagaaaaatactgaaaatgccaagcagagtgattggcctgttgaatctgaaactacttttaaatcggttctcctaaataagacaattgaagaatcgctgatatataggaagaaatacatattgtcaaaagatgtgaatactgctacttgcgataaaaatccatctgctagcaaaaatgtgcaaagtcatagaaaagcagagaaagaattgacttctgagcttaattcctgggattcgaaacaaaaaaaaatgagagaaaagtcaaaagggaaagaatttaccaatgtagcagaatccttgataagccaaatcaataaaagatacaaaacaaaagatgacatcaagtctacaagaaaattaaaggagtctttgattaacagtggtttttcaaacaaacctgttgtacaactcagtaaggaaaaagttcagaaaaaaagctacagaaaactgaagactacctttgttaatgttacttctgaatgcccagtgaatgatgtttacaattttaatttgaatggagctgatgaccctatcataaaacttggaatccaagagtttcaagctacagctaaagaagcttgtgcggataggtcaattagattggtaggtccaaggaatcatgatgaacttaaatcttctgtcaaaacaaaagataaaaaaattataacaaatcatcaaaagaaaaatctgtttagtgatactgaaacagagtacagatgtgatgacagcaagactgatattagctggctaagagaaccgaaatcaaaaccacagctaatagactatagcagaaataaaaatgtgaagaatcataaaagtggaaaatcaagatcatccttggaaaagggacagccaagctctaaaatgacacccagtaaaaatatcacaaaaaagatggacaagacaattccggaaggaagaatcagacttccacgaaaagcaaccaaaacaaaaaaaaactataaagatctctcaaattcagaatcagagtgtgaacaagaattttcacattcatttaaagagaacataccagtaaaggaggagaatatccattccagaatgaaaacggtaaagctaccaaagaaacaacagaaagtcttctgtgctgaaacagaaaaggaactatcaaaacaatggaaaaactcatctctactaaaagatgctatacgagataattgccttgacttatctcccagatctttatctggcagtccatcatctatagaagtaacgagatgtatagagaaaataacagaaaaggattttactcaggattatgactgcataacaaaatctatatcaccttatccaaaaacttcatcacttgaatccttaaatagtaacagtggagttggaggtacaataaagtcacccaaaaacaatgagaaaaacttcctgtgtgcaagtgaaagttgttcaccaactccacgaccactgtttttggccagacatactccaactaagagtaatactattgtaaatagaaaaaaaataagttctctggtacttacacaagaaacacaaaacagtaacagctattcagatgtaagcagatatagttcagaagaacggtttatggaaattgaatctccacatatcaatgaaaattatatacaaagcaaaagagaggaaagtcatttagcatcttcattatccaagtctagtgaaggaagagagaaaacgtggtttgacatgccctgtgatgctactcatgtatcaggccccacccaacatcttagtcgcaaaagaatatatatagaagataatctaagtaattccaatgaagtagaaatggaagagaaaggagaaaggagagcaaacttgcttcccaaaaaactgtgtaaaattgaagatgcagatcatcatatccacaaaatgtctgaaagtgtatcttcattatcaacaaatgacttttctattccttgggagacctggcaaaatgaatttgcagggatagagatgacttatgagacttacgagaggctcaattcagaatttaagagaaggaataatatccgacataaaatgttgagttattttactacgcagtcttggaaaacagctcagcaacatctgagaacaatgaatcatcaaagtcaggactctaggattaaaaaacttgataaattccaattcattatcatagaggagctggagaattttgaaaaagattcacagtctttaaaagatttggaaaaggaatttgtggacttttgggaaaagatatttcagaagttcagtgcatatcaaaaaagcgaacaacagaggcttcatcttttgaaaacttcattggctaaaagtgtcttctgtaatactgatagtgaagaaactgtttttacatccgagatgtgtttgatgaaagaagatatgaaagtgctgcaagacaggcttcttaaggacatgctagaagaggagcttcttaatgtacgcagagaactgatgtcagtattcatgtctcatgaaagaaatgctaatgtgtgaaatctagtttttatcaccatactttatctaattattattctctgtatataactgaggaaataagaatagtcctacaaagagaaaaatatacatgtcaccgaagcaagtgtaccctttataggaaccctcaaattaaaaaaaaatgtcttttaatggatgagagggaaccactataacatgagtccaagcccagaagacttctgtctatacaatatttttttttaattttggagataaaagctttaagaaactttttgagttaattatactcataaaatgagtttctttaataaattaaattttattgtgtaaaatgtattattacataaaatgtgtttttgaatcaatgcagtttgggccg

SEQ ID NO: 59985 - DNA, 693 bp, Homo sapiens
ggcctttgctcagcgcgagacggctgggcgccgagtgggacagcgctggtgcggagactgcttccggactccaggtaccgcgcttggcggcagctggccccagacttctgtcttttcagctgcagtgaaggctcggggctgcagaattgcaaccttgccaatggacctgatcggttttggttatgcagccctcgtgacatttggaagcatttttggatataagcggagaggtggtgttccgtctttgattgctggtctttttgttggatgtttggccggctatggagcttaccgtgtctccaatgacaaacgagatgtaaaagtgtcactgtttacagctttcttcctggctaccataatgggtgtgagatttaagaggtccaagaaaataatgcctgctggtttggttgcaggtttaagcctcatgatgatcctgagacttgtcttgttgctgctctgagcatctggaggaacagaaaactaagttcatgtcatcctgctgtaatgggcagagcatattttttttgtatttaaaagataaacttcaatatggaatgctagaaacacaaatagcactgtcacctctaatatgaacattagtttgaggtagtttttttctaaagcaaaaattttaactgttttcctaattgtcaagcactattttcattaaaagtgtctaatgaatcaaaaaaa

SEQ ID NO: 59986 - DNA, 1306 bp, Homo sapiens
ttttttttttttttcacagccacaagtatttattgagtgcctgtagtgcaagaaagagagatggtccctgctcccgcggagcttacagcttcacgactccagcatctggctagattcagaaacaactgcagcaagcacttgtctacccaccagcagcactgtaaaaagcacatttctcacattatcggtcactgttacagtgaaattgttagatgtaaaaattatccttgaaatctgtagtcatagagatgacatggtacataatgtccagcaaatgcacatttatggcttgattcctcacatatctgaggggtctatggaaataaagtacaaatcaggcagaaaagacttagtaacacagttcctaagaatactggggtagtagtttattatcaaactaccatagagctcttggcagggcaggaaattatttccagcaaaatttgtgcaatatagtggatttaatcaaacctgcaactgtcaaccatacatggtccctcatgacaggtaaatataatctacctgtctgaatggtaaaaggctacaggtgtgcatttattttttaaagcttcttaaagactcatagcacaagtggcacattgaaatctagtgaaaacttgagataatctaaaaattaaagtgacaaaagtgtctaattttactacatatgtaggtgcagagttcagatttcaagtagcgtccagcaaagcacgtggcttttctgggcgagaaggggatagcttttggttggctatcacagactccacctacatctcctaacacccactggcaggcacttcctgtgcatggttctgcccacaagctgtcacctttagatgaaacatttgaaggggcaattatttggaggatactggcaataatttttagaaaaacaacctatatttataccaaataacccccaagtcaccaattaagaccaaagtgctttctgaacttacacgtgacaggttatcaaatttgttaaatttttggtggctaaaaaaccaaacacaccagagggatgcttaatttaaactccaaaaaagctcatttttttgcaaagcgtgaagagaacatcttagaccacctaacaaatgtcagtccaaggcagtttttaggtcaactgcttcggacataatctacttttttatttcagaaagtatgctacctcaaggctgggcgcagtggctcacgcctgtaatcccaacactttgggaggccaaggcaggcagatcatttggggtcagaagttcaagaccaggatggccaacatggtgagaaccccgtctctaccgaaaatacaaaa

SEQ ID NO: 59987 - DNA, 1116 bp, Homo sapiens
gatgctaacaaatcgagatttattttaaaaactattctcctgctatgagttcaatatttttatttctttagcaatgatttcagaagagattacaaagagattaatatacttaaagaatcagactcttgcaaacagtgacatcattaaaaagagcttattttcattaacatgtgattaacaggaaggagatgattggtgagttttcttcgtaaccaggttcactgtggataggaagggcctgccttccttcccaccatggagatcctaaaatcacaagctccagcctccatcaatgatgacagggttaccagttacataagcagattcatcagaagccaaatacacgcagagcatggctatttcttctgcagttgcgaatcttcccgtcttttgtctcttcaggaaatcattccgtgcctcttcaggatttcctctggcttgtattctttcttgtagagatggcgtatcaactgttcctgggcacacacagttgcacctgatgccctgctggatgaaatctgcagccacagattttgtgaggccaatcacggctgccttggttgtgctgtacacacatctgttcacaactcctttgacgctggaagccacagaagacatgttgataatattgccagatttctgagcaagcattttaggaaggaatgccttgatcatcaggtacatgctgcgcacattgagattcatcgagaagtcccagtctttctcctcacaatccaggacagttccatgatggacaaaaccagcaacattaaagagaacatcaagtctctcaacttcactggcaaactgatcaatttgtttcttctttgtgacatcaaggacacgagtttgaatacccgggtacttttccagttcctgaagtttggactcattaatgtctgtggctatgactttggcaccttctcttgcaaaagctaaggcagctgcttggccaatcccctgagcagcggccgtcaggatgatgactttcccatcaagtcgacccataatggaacctgtggtttaattttaagcagcgagctgatggcgttctccagaactcggttcggacgcgtgggtcggccgtcatagggtctcatccccagggtgtcatta

SEQ ID NO: 59988 - DNA, 568 bp, Homo sapiens
cggccgcgtcgacttttttgtttcataagcatttattaatcagaggtacatgagcaggctcagcctaggggaataattgccaacaaacacttttgggaagcctgggaccatggctctgccaggaatctgtgacatctccagggcatcatttgagtcctgccttctcaaagtacttgtgacaggcagacgtgattgcagccacgaacacgatgaactcactgaagtccacctgggcatctccattggcgtccaggtccttgagcaatttatccacggcatccttgtcttttccactctgcaggaagcctggtagctccttctccatcagcaccttgagctcccccttggtcagggtctgcgtgctgccctcgctgcccgaatatcgggaaaagacgtctatgatcatgcccatggctgtctctagttccgtcatggtgctagattcagacccaccttcctcctgggggctggcagggccgagaaaatccccttctgtcgtcttctcgcagccgtacccttctgtcgtcttctcgcagccgtacccttctgtcgtcttctcgcagccgta

SEQ ID NO: 59989 - DNA, 803 bp, Homo sapiens
tttttttttaggagttgtatatccgctctcagatccactaccatcattatctgctcctttacccatataaccattagtaatataaccagaattatttgttaccacaccatttggaattggtatagtatcagacttatctacagactgattctctccagatttattttcataagacttcccattctttttgtccatactgtttttctgaatgaaattcttgggttttaattcctgctttcccaaagggtgttgggccctttacagtctgccttcaaggcctagtgtcctacaacttgctgggttgcccattgaaggaacccctggaaataggggttggtggcttcatcagaactcaggttctttaaagatatttctctttctccagcattaccgtttagttcaccatagcctgttttcttcttcggcgtttcctggtgctgctggagggtgtgtttctgctcatgtttcagcggctttggctgggccttggggctgccctcggctccatgctgcaggtattggtgaggctgctggtgatgatggtggtggtggtggttgtggctgtggttgtagaaataataatggtggtggtggtgcggctgctgctgctgctgctgagggtgatggtgcggatggtggtggctgtgatggtgctgaggctgtggctggccgggcttctcctccattgaaagcggctgggactccctggctgaggctgcgggctgctgcaccgtcaggatctgagactgcttctcagggctcactcagtatatctccccttctgtcgtcttctcgcagccgta

SEQ ID NO: 59990 - DNA, 2587 bp, Homo sapiens
agatgccggaccgctccttcccagctcctccccgtgctcgctaacacagcacggccgcctgcagtctcctctctgggagatcgcgcgggcctaagatgtgtcctggggcactgtgggtggccctgcccctgctgtccctgctggctggctccctacaggggaagccactgcagagctggggacgagggtctgctgggggaaacgcccacagcccactgggggtgcctggaggtgggctgcctgagcacaccttcaacctgaagatgtttctggagaacgtgaaggtggatttcctgcgcagccttaacctgagtggggtcccttcgcaggacaaaaccagggtggagccgccgcagtacatgattgacctgtacaacaggtacacgtccgataagtcgactacgccagcgtccaacattgtgcggagcttcagcatggaagatgccatctccataactgccacagaggacttccccttccagaagcacatcttgctcttcaacatctccattcctaggcatgagcagatcaccagagctgagctccgactctatgtctcctgtcaaaatcacgtggacccctctcatgacctgaaaggaagcgtggtcatttatgatgttctggatggaacagatgcctgggatagtgctacagagaccaagaccttcctggtgtcccaggacattcaggatgagggctgggagaccttggaagtgtccagcgccgtgaagcgctgggtccggtccgactccaccaagagcaaaaataagctggaagtgactgtggagagccacaggaagggctgcgacacgctggacatcagtgtccccccaggttccagaaacctgcccttctttgttgtcttctccaatgaccacagcagtgggaccaaggagaccaggctggagctgagggagatgatcagccatgaacaagagagcgtgctcaagaagctgtccaaggacggctccacagaggcaggtgagagcagtcacgaggaggacacggatggccacgtggctgcggggtcgactttagccaggcggaaaaggagcgccggggctggcagccactgtcaaaagacctccctgcgggtaaacttcgaggacatcggctgggacagctggatcattgcacccaaggagtatgaagcctacgagtgtaagggcggctgcttcttccccttggctgacgatgtgacgccgacgaaacacgctatcgtgcagaccctggtgcatctcaagttccccacaaaggtgggcaaggcctgctgtgtgcccaccaaactgagccccatctccgtcctctacaaggatgacatgggggtgcccaccctcaagtaccattacgagggcatgagcgtggcagagtgtgggtgcaggtagtatctgcctgcggggctggggaggcaggccaaaggggctccacatgagaggtcctgcatgcccctgggcacaacaaggactgattcaatctgcatgccagcctggaggaggaaagggagcctgctctccctccccacaccccacccaaagcatacaccgctgagctcaactgccagggaaggctaaggaaatggggatttgagcacaacaggaaagcctgggagggttgttgggatgcaaggaggtgatgaaaaggagacagggggaaaaataatccatagtcagcagaaaacaacagcagtgagccagaggagcacaggcgggcaggtcactgcagagactgatggaagttagagaggtggaggaggccagctcgctccaaaacccttggggagtagagggaaggagcaggccgcgtgtcacacccatcattgtatgttatttcccacaacccagttggaggggcatggcttccaatttagagacataaaacacaggcagatcaagtagcattgatcaatggcatgattccaactcagatttgtgggacaccaaagcccaggatcttcccaagtgccctgctgcagtttagcaggtcctctccagctaaagagcagtgagacattgggagcccaggagtgttgaggccaggccaggctgaggcccatcagtcacaggtgtgactgggctgcttgtcacacacagggcgtggtctggccactgttgccagtgctcactcagcggccaaatgctttttaatatgacccctgaggcactgaaaaataaccccaggccaactgcaggatagagagagaggtcaggacagcagccctgtgggctgcatgatacactgtggctggagttattgtgaccccctggtgcagtgctcccacggccagtggtgcacacagggccattcactgtccatagactgaaaccatgtgaccatttgagagggccgggcacactttcccctgagggatggggcagcctgtggccagcacctctgcagttactctgcatagccagctcaccagcatgccatgcccagggtgccccccagtgacaacctcatgggagacgggcctggatttgaatttgttggaattaaatgtgctctggctttggtctttgaaacatatctatttttattccttggtgacatgtccttaagtgacaagactccagccttcctgggcgag

SEQ ID NO: 59991 - DNA, 1927 bp, Homo sapiens
agcggtggaattcgatcatggaacttgcactgctgtgtgggctggtggtgatggctggtgtgattccaatccagggcgggatcctgaacctgaacaagatggtcaagcaagtgactgggaaaatgcccatcctctcctactggccctacggctgtcactgcggactaggtggcagaggccaacccaaagatgccacggactggtgctgccagacccatgactgctgctatgaccacctgaagacccaggggtgcggcatctacaaggactattacagatacaacttttcccaggggaacatccactgctctgacaagggaagctggtgtgagcagcagctgtgtgcctgtgacaaggaggtggccttctgcctgaagcgcaacctggacacctaccagaagcgactgcgtttctactggcggccccactgccgggggcagacccctgggtgctagaagcccacaccctctaccctgttcctcagcatggagctctggcatccccacctcagtatctaacctgaaccagcctggcttttcaaacactccggggggaggtagtcccagcctcccccggaaccctctaccaatgccttctgaccttctgaagctttccgaatcctcccagttgaggcagtagctgtgtcctctgagggtggatgggaatcttgggagaagcccaagcaagggagccctcagaggtggtgtttggaccaaagcatcggggtgggggaggggtctgccgctgtcccccacctgctggcccccttgtccttcctcaccccctccaatatagtctcggagctacaaccgcagcagccactataaagggcaatattgatctttctgtccatgtggctctatcttttaaaacctcaaggccctccactgtcctaagataaagcctctcataggcactggggaccctgcacagtctggccatgtgaccctctccccaggcaagctctgaagtccctgcaggtggaggccatgcctgtcttaaactcagttgcatccctggtgcccaaagcaacaccagaaccaagaaggagctccataaatccttcttgggtgaagcctagacaaagccgccaggtcttgtggctccaggcaccagagccttgagtactttctcctgcctccaggcattggctcagggtgaattacaaggggctactgaatggctattactttcatcacgactgatccccacctcctcagggtcaaagggctactttctggaagtctccccaggctgactccttctccctgactgcaagggctcactccctcctccaagctcccacaatgcttcatggctctgccgcttacctagcttggcctagagtggcaaatggaacttctctgatctcccccaactagactggagcccccgaaggatggagaccatgtctgtgccatctctgtttcccctgttttcccacatactaggtgctcaattcatgcctgtgaatggcgtgagcccataatggatacacagaggttgcagcagatggtgtgggtacctcacccagatatcttccaggcccaaggcccctctccctgagtgaggccaggtgttggcagccaactgctccaatctgcctccttcccctaaatactgccctggtctagtgggagctgccttccccctgccccacctctcccaccaagaggccacctgtcactcatggccaggagagtgacaccatggagggtacaattgccagctcccccgtgtctgtgcagcattgtctgggttgaatgacactctcaaattgttcctgggatcgggctgaggccaggcctctcctggaaccacctctctgcttggtctgaccccttggcctatccagttttcctggttccctcacaggtttctccagaaagtactccctcagtaaagcatttgcacaagaaaaaaaaaa

SEQ ID NO: 59992 - DNA, 1100 bp, Homo sapiens
ggcacgaggcgagctggatgtccaggctgcgggcgctgctgggcctcgggctgctggttgcgggctcgcgcctgccgcggatcaaaagccagaccatcgcctgtcgctcgggacccacctggtggggaccgcagcggctgaactcgggtggccgctgggactcagaggtcatggcgagcacggtggtgaagtacctgagccaggaggaggcccaggccgtggaccaggagctatttaacgaataccagttcagcgtggaccaacttatggaactggccgggctgagctgtgctacagccatcgccaaggcatatccccccacgtccatgtccaggagcccccctactgtcctggtcatctgtggcccggggaataatggaggagatggtctggtctgtgctcgacacctcaaactctttggctacgagccaaccatctactaccccaaaaggcctaacaagcccctcttcactgcattggtgacccagtgtcagaaaatggacatccctttccttggggaaatgcccgcagagcccatgacgattgatgaactgtatgagctggtggtggatgccatctttggcttcagcttcaagggcgatgttcgggaaccgttccacagcatcctgagtgtcctgaagggactcactgtgcccattgccagcatcgacattccctcaggatgggacgtggagaagggaaatgctggagggatccagccagacttgctcatctccctcacagcccccaaaaaatctgcaacccagtttaccggtcgctaccattacctggggggtcgttttgtgccacctgctctggaaaagaagtaccagctgaacctgccaccctaccctgacactgagtgtgtctatcgtctgcagtgagggaaggtgggtgggtattctccccaataaagacttagagcccctctcttccagaactgtggattcctgggagctcctctggcaataaaagtcagtgaatggtggaagtcagagagcaaccctggggattgggtgccatctctctaggggtaacacaaagggcaagaggttgctatggtatttggaaacaatgaaaatggactgttaaaaaaaaaa

SEQ ID NO: 59993 - DNA, 632 bp, Homo sapiens
tccttgcgcaccggggaacaaggtcgtgaaaaaaaaggtcttggtgaggtgccgccatttcatctgtcctcattctctgcgcctttcgcagagcttccagcagcggtatgttgggccagagcatccggaggttcacaacctctgtggtccgtaggagccactatgaggagggccctgggaagaatttgccattttcagtggaaaacaagtggtcgttactagctaagatgtgtttgtactttggatctgcatttgctacacccttccttgtagtaagacaccaactgcttaaaacataaggatgtttcagttcctccatttaacagatatgaagagcattttaagaggtgcagcctctggaagtggatcaaactagaactcatatgccatactagatatgtttgtcaataaacttatgacgtgaatgcttaatgcctcttttttgaaatagggaatgtaataattgggccattttgcctactttattatttgggtaacattccagtattactctctgtgatttagcttatttaatggtgttaaactgaggttatattaaatttttgattcccaggtcaggattttgttggtaatttatataataaaagggaaatacaaatcgaaaaaaaaaa

SEQ ID NO: 59994 - DNA, 2309 bp, Homo sapiens; identical to SEQ ID NO: 58770

SEQ ID NO: 59995 - DNA, 1490 bp, Homo sapiens
gaattcccgggtcgacgatttcgttgtcaccccgactcaacgtgagacgcaccgcccggactcaccatgcgtgaatgcatctcagtccacgtggggcaggcaggtgtccagatgggcaatgcctgctgggagctctattgcttggaacatgggattcagcctgatgggcagatgcccagtgacaagaccattggtggaggggacgactccttcaccaccttcttctgtgaaactggtgctggaaaacacgtaccccgggcagtttttgtggatctggagcctacggtcattgatgagatccgaaatggcccataccgacagctcttccacccagagcagctcatcactgggaaagaggatgctgccaacaactatgcccgtggtcactataccattggcaaggagatcattgacccagtgctggatcggatccgcaagctgtctgaccagtgcacaggacttcagggcttcctggtgttccacagctttggtgggggcactggctctggcttcacctcactcctgatggagcggctctctgttgactatggcaagaaatccaagctggaattctccatctacccagccccccaggtgtctacagccgtggtcgagccctacaactctatcctgaccacccacaccaccctggagcactcagactgtgccttcatggtggacaacgaagcaatctatgacatctgccgccgcaacctagacatcgagcgcccaacctacaccaacctcaatcgcctcattagccaaattgtctcctccatcacagcttctctgcgctttgacggggccctcaatgtggacctgacagagttccagaccaacctggtgccctaccctcgcatccacttccccctggccacctatgcaccagtcatctctgcagaaaaggcataccacgagcagctgtcggtggcagagatcaccaatgcctgctttgagcctgccaaccagatggtaaagtgtgatccccggcacggcaagtacatggcctgctgcctgctgtaccgtggagatgtggtgcccaaggatgtcaacgctgccattgccgccatcaagaccaagcgcagcattcagtttgtggactggtgccccacaggcttcaaggttggtatcaactaccagcctcccactgtggtgcctgggggtgacctggccaaggtgcagcgtgccgtgtgcatgctgagcaacacgaccgccatcgccgaggcctgggcccgcctggaccacaagttcgacctgatgtatgccaagagggcgtttgtgcactggtatgtgggtgagggcatggaggagggtgagttctccgaggcccgtgaggatatggctgccctggagaaggattatgaggaggtgggcatcgactcctatgaggacgaggatgagggagaagaataaagcagctgcctggagcctattcactatgtttattgcaaaatcctttcgaaataaacagtttccttgcaaaaaaaaaa

SEQ ID NO: 59996 - DNA, 1491 bp, Homo sapiens
gcccccgggagctgtgctctatggagctattgcggccgtgggtggtcgcgggcgatgcggggctgccagctcctcgggcttcgtagctcttggcccggggacctactaagtgctcggctcttgtcccaagagaagcgggcagcggaaacgcactttgggtttgagactgtgtcggaagaggagaaggggggcaaagtctatcaggtgtttgaaagtgtggctaagaagtatgatgtgatgaatgatatgatgagtcttggtatccatcgtgtttggaaggatttgctgctctggaagatgcacccgcttcctgggacccagctgcttgatgttgctggaggcacaggtgacattgcattccggttccttaattatgttcagtcccagcatcagagaaaacagaagaggcagttaagggcccaacaaaatttatcctgggaagaaattgccaaagagtaccagaatgaagaagattccttgggcgggtctcgtgtcgtggtgtgtgacatcaacaaggagatgctaaaggttggaaagcagaaagccttggctcaaggatacagagctggacttgcatgggtattaggagatgctgaagaactgccctttgatgatgacaagtttgatatttacaccattgcctttgggatccggaatgtcacacacattgatcaggcactccaggaagctcatcgggtgctgaaaccaggaggacggtttctctgtctggaatttagccaagtgaacaatcccctcatatccaggctttatgatctatatagcttccaggtcatccctgtcctgggagaggtcatcgctggagactggaagtcctatcagtaccttgtagagagtatccgaaggtttccgtctcaggaagagttcaaggacatgatagaagatgcaggctttcacaaggtgacttacgaaagtctaacatcaggcattgtggccattcattctggcttcaaactttaattcctttcctatcatggagcatgaaccagtcatatcctgttgaaagcctggaactgaaggataatctggcaaatgagacagcagcagagcatctcctcttaaggatacgtgccttggactcatgtttgaatcgaacagtctcaaagtggaagaacaaattcttgtcacttttttacagctttctttggagctgcttcagtccatctcccagaggcatttggtctgtatctttgctcaactgctaatttctcttggctgtagggtgtgtggttaaggtacaaccacccctaaagctcagttttgaagtgagtgtatttatagcttctctgctggtgctgccttctagagggatgatagatcatttgaacccaatgacaatttttaaccagaaaatttaattgtacctgaatcaacctttcagcctaggacgaagtctaggcccaagtcagagtattaatgatcatgagaattgtgtgctgaaccagtaaacgagtttaccttttaaaaaaaaaa

SEQ ID NO: 59997 - DNA, 1651 bp, Homo sapiens
ttttttttttttccatttcaaacaataacttttattttatacttctctatactttgtagcaaatctttttttgctgaatttaatttataataaactttttaaattacatctctctctctttttttttaaaatcaaggctcttttatgtcaaaatctttttttagctatattttagattaacatttaacatcccccccttgtgatctataccgttggatattcaggtattactgtgtgtgtaacagctaaaacaagagggaggagggaaaataaaggcagtgaacttggacggatgcatcaacaacagcagataaagctaacccctcagtgaccatagcagcatgtcttctggaagcctttactcttaccccagagatttcctcagcccctttccctctctccctcctatcctcccaaacacaaaggcccaacagtctgtcctttcgcttttcttgaggagaaatgtgcagtggaaatgatcaaaacaagatactgtggaagaacgacgtgagcgtgaattattcaccgtatgtttcgtccgtggacatctctcttgaattcattcccctggccttctcctctcctcgccttcctattaggaggagcccatcatttttcatgttactagcatgattaatatagtaggtggcccagggccgttcctgagattcttttgccaacaaaaaaaattaataataataaaattaaaaaatggggtgggtttgccgttttcttatttgtgtgtgaagacggactaaagctgaggtccgattttggctgtgcttgcttgctcactgattggtaacatttggcaaataaaacacaagaaatcaaacgaaataaaaaagagaatcaggatttcccacaatcctatatgagtgttttcagcatcacagagaatcacaacgtccccaaagaactaatggatcttcctctcgatttccgggagcatggagtgagtgtgggtgggcgcgcggggggagctggccccacgctcagaaggaaagccaggtcgctaaagctgccgagagagacaccaggagcaccgggaacgccgggagcagggaccccgccgccccgttgccgctgccgcagagttcgaataagctgccttggatgttgaggtttttggattcttttctcagtttatcccacatatctttcgccccttcctggcaatccgtaagggctgtgaccgtgcagctgtggaaatcctcccagtatgtgcacacggtcttgatgttcgtcttgtcgtccaggccctgcgggtagttggccatgctgtcgcccagcttgagcaaacagtccgaaaagcccttgaagaccgcatcgcacttgcccgctgctctcacggcctgcaccagatacgctatttgcaccgcgaggatcagtgaaatatatctgccgttcaacttaagtcccatcctacgtttagtcaaaccatttgcgaccgcagacctttaaatagttagtttagagaacgcgggggaaagccaaaaaataggcattgccaacaagttccgggagcgacagagactttatgcactgggaaggcagagggaggagagaaagagagggagcgaggaagagccagaaagagagagagagagagaaagagagagagagagagaggctgaggggggggggagag

SEQ ID NO: 59998 - DNA, 1730 bp, Homo sapiens
cccatccacccgcgacccacatccgatcggtaccggagcgggaggtgaggggtcggctcgcggatccagctgcagagcgacgtggggaattggaatggtgctttggatcttatggaggccatttggattctcaggaagatttctgaaactggaaagccatagcataactgaatcaaaatcgttgattccagtagcttggacatccctgacacagatgcttttggaagcacctggtattttcttattgggtcaaagaaaaagattctcaaccatgccagaaacagaaacacatgagagagagactgaattgttttcaccaccttctgatgtccgaggcatgacaaaacttgatagaacagcttttaaaaagacagtcaacattccagtgcttaaagtgaggaaagaaatagtcagtaaattgatgcgatccctaaaaagggcagcattgcagcgcccaggcataagacgtgtgattgaagatccggaagataaagaaagtagactaatcatgttggatccctataaaatatttactcatgattcctttgagaaagcagaactcagtgttttagagcagcttaatgtcagtccacagatctctaaatacaatttggaactaacatatgaacactttaagtcagaagaaatcttgagagctgtgcttcctgaaggtcaagatgtaacttcagggtttagcaggattggacatattgcacacctaaaccttcgagatcatcagctgcctttcaaacatttaattggccaggttatgattgacaaaaatccaggaatcacctcagcagtaaataaaataaataatattgacaatatgtaccgaaatttccaaatggaagtgctatctggagagcagaacatgatgacaaaggttcgagaaaacaactacacctatgaatttgatttttcaaaagtctattggaatcctcgtctgtctacagaacacagccgtatcacagaacttctcaaacctggggatgtcctatttgatgtttttgctggggttgggccctttgccattccagtagcaaagaaaaactgcactgtatttgccaatgatctcaatcctgaatctcataaatggctgttgtacaactgtaaattaaataaagtggaccaaaaggtgaaagtcttcaacttggatgggaaagacttcctccaaggaccagtcaaagaagagttaatgcagctgctgggtctgtcaaaagaaagaaaaccctctgtgcacgttgtcatgaacttgccagcaaaagctatagagtttcttagtgctttcaagtggcttttagatgggcagccatgcagcagtgagttccttcccatagtgcattgttatagcttttccaaagatgctaaccctgctgaggatgttcggcaaagggctggagctgtgttaggcatttctctggaggcatgcagttcagttcacctggtaagaaatgtggccccaaacaaggaaatgctgtgcatcacgtttcagattcctgcctctgtcctctacaagaaccagaccagaaatccagagaatcatgaagatccacctcttaaaaggcagagggcggctgaagccttttcagacgaaaaaacccaaattgtttcaaacccttaattggaaatgttttctccatcccccccccagacttacatgtagtgaaatagaatttgtattatttaataaaattttagggtttggtttttcctattgaaaaaaaaaa

SEQ ID NO: 59999 - DNA, 1794 bp, Homo sapiens
gaaagtacgagtcggctcagcctggagggacccaaccagagcctggcctgggagccaggatggccatccacaaagccttggtgatgtgcctgggactgcctctcttcctgttcccaggggcctgggcccagggccatgtcccacccggctgcagccaaggcctcaaccccctgtactacaacctgtgtgaccgctctggggcgtggggcatcgtcctggaggccgtggctggggcgggcattgtcaccacgtttgtgctcaccatcatcctggtggccagcctcccctttgtgcaggacaccaagaaacggagcctgctggggacccaggtattcttccttctggggaccctgggcctcttctgcctcgtgtttgcctgtgtggagaagcccgacttctccacctgtgcctctcggcgcttcctctttggggttctgttcgccatctgcttctcttgtctggcggctcacgtctttgccctcaacttcctggcccggaagaaccacgggccccggggctgggtgatcttcactgtggctctgctgctgaccctggtagaggtcatcatcaatacagagtggctgatcatcaccctggttcggggcagtggcgagggcggccctcagggcaacagcagcgcaggctgggccgtggcctccccctgtgccatcgccaacatggactttgtcatggcactcatctacgtcatgctgctgctgctgggtgccttcctgggggcctggcccgccctgtgtggccgctacaagcgctggcgtaagcatggggtctttgtgctcctcaccacagccacctccgttgccatatgggtggtgtggatcgtcatgtatacttacggcaacaagcagcacaacagtcccacctgggatgaccccacgctggccatcgccctcgccgccaatgcctgggccttcgtcctcttctacgtcatccccgaggtctcccaggtgaccaagtccagcccagagcaaagctaccagggggacatgtaccccacccggggcgtgggctatgagaccatcctgaaagagcagaagggtcagagcatgttcgtggagaacaaggccttttccatggatgagccggttgcagctaagaggccggtgtcaccatacagcgggtacaatgggcagctgctgaccagtgtgtaccagcccactgagatggccctgatgcacaaagttccgtccgaaggagcttacgacatcatcctcccacgggccaccgccaacagccaggtgatgggcagtgccaactcgaccctgcgggctgaagacatgtactcggcccagagccaccaggcggccacaccgccgaaagacggcaagaactctcaggtctttagaaacccctacgtgtgggactgagtcagcggtggcgaggagaggcggtcggatttggggagggccctgaggacctggccccgggcaagggactctccaggctcctcctccccctggcaggcccagcaacatgtgccccagatgtggaagggcctccctctctgccagtgtttgggtgggtgtcatgggtgtccccacccactcctcagtgtttgtggagtcgaggagccaaccccagcctcctgccaggatcacctcggcggtcacactccagccaaatagtgttctcggggtggtggctgggcagcgcctatgtttctctggagattcctgcaacctcaagagacttcccaggcgctcaggcctggatcttgctcctctgtgaggaacaagggtgcctaataaatacatttctgctttattaaaaaaaaaa

SEQ ID NO: 60000 - DNA, 2650 bp, Homo sapiens
ccgcctccttgaagctgccgctgtcgctgctgctcgttcgagtcgcagatccttgccagcacattacagaatatttttgttgaaccttcttgagaattcagagaaactgctgagtgaccactgaacgaaaagatctaatcttaaggcttacgcgtgttccatccaccacatcagaacaatgtcgtatgtttttgtaaatgattcttctcagactaacgtgcccttgctgcaagcctgtattgatggggactttaattattccaagcggcttttggaaagtggctttgacccaaatattcgtgacagcaggggcagaacaggccttcaccttgcagcagctcgagggaatgtagacatctgccagttactgcataaattcggtgccgatcttctggccacagattatcaaggaaacacagctcttcacctctgtggccatgtggatactatccaatttttggtttccaatggactcaaaattgatatttgcaatcatcaaggtgctacccctttagttctggcaaagcgcagaggagtaaataaagatgtcatccgattgctggaatctttggaagaacaggaggtgaaaggatttaacagaggaacccactcgaaactggagaccatgcaaacagctgagagtgaaagtgccatggaaagccattcactcctcaatcccaacctgcagcaaggtgaaggagtcctctccagcttccgaaccacgtggcaggagtttgtggaggatctgggcttctggagagtattgctgttgatcttcgtcattgctttgctgtctcttggcattgcttattatgtgagtggggtgctacccttcgtggaaaaccagcctgaactggtgcattaaaggagctcatggaagatgaggcaattaattccctgtttcctggcttccaatgtttgttctcagtttctcagaatttttcttagcgcaaagcagtgagggcagtacatggtccttttggcatttttattatggtaaatccttttagataatgatgtgttcatttgaactaactacatactatgatcaagtatattgcatcctaacgctacctctgactcaacctgactttgtaggaaagcctacacgtagccttgtttgataaaaacacggaagtgactagagaatggaagataaaggaagaagctaggaagtccttgctatcaaaaccttatcctaatataggaccaattgaagtattcaaaaagaaaaacagtatcttatatgattagtttttgttggtggttttgttttcatttatttttgcaagagccactttttatttactttctctagggataagagataaaacttgaagtacttttttcaaatcttgtgtgcaaattagtattgttagcatctatttggcttattttagtatttttaagtctagtcacaaaccaaacaaaacttttgaaaatgagctatattttgttcaaagataattgatttgatcttatatttatttgtttttaggataatttttgatctttttgtaaactgctttgcttgttaatatctgtgaaaaataaatgagttcattttgttcactttccaattttcccgagtatcctagtcatcaaagataacagttcatcagaattacagtcagaaaatcctttttctactgaatagttagcagggaaaaataattctgatatttaactgtcataattctgtagtgctattatagtgaaaaactcagttctataagctagctgtgttgtcacagttttatcatagttcataattatttcacgtgcaatcctatttggaggccctgttagacttttaacaatcccatccatatctgtaattctctgatggcaagaatggatggagcatttctgagttaacagtgctggacagtatcgtactgggtgtcataaactctttatgaatggtaatattatgtaaattgaaatctggccctcaaactatattgcagctttcagcagtatgtttgaaggcctcttttgttaatgattctgtaatgtatgaattatgttcttgagtggttaaaaaagaatatgaaggcttgataattatttattgggtaaagtcaggaaattgtagtgaaagaactaatggttttgttttttggaataaaggcacctaagctattgctaattgaattgctgctagaattagaaattatgctttagaatagaattggtatttctgtgattctttttgcttcttggtattttctcttgtatctatgtatctagtattgaggcttgctctttcatgtggctttatcctctctttaatagctgttgtaaaattcctgagtaactggctgcttcaggatcagcttgcagagtcttgcttttaggttagatacaaacaaagtaaatcatagttggtgtaaatccagcaaaaaacagctggctttggaatggagaacactacaattcaaatttgaagtatattcagaagaaaactttggaattagctttacatttgtttgtaaatctaaacaaatatgccaaaattggtcaaaatgtaagtatatagcatttttaaagattaatggttcctttttatgtgctgatttcttttgtattctgttctctgcattcatcattcaggaataccaccaataaatgtatttatatatccctt

SEQ ID NO: 60001 - DNA, 2027 bp, Homo sapiens
cccacgcgtccgatagattgcttgtgctgcctgataattactcgcacttttcccaggctagtgcaaatcttcaggggccgtccaggactacagagctgtttcaccctaccttggcttcaatctcttcccccatgctcgaaggtgcggagctgtacttcaacgtggaccatggctacctggagggcctggttcgaggatgcaaggccagcctcctgacccagcaagactatatcaacctggtccagtgtgagaccctagaagacctgaaaattcatctccagactactgattatggtaactttttggctaatcacacaaatcctcttactgtttccaaaattgacactgagatgaggaaaagactatgtggagaatttgagtatttccggaatcattccctggagcccctcagcacatttctcacctatatgacgtgcagttatatgatagacaatgtgattctgctgatgaatggtgcattgcagaaaaaatctgtgaaagaaattctggggaagtgccaccccttgggccgtttcacagaaatggaagctgtcaacattgcagagacaccttcagatctctttaatgccattctgatcgaaacgccattagctccattcttccaagactgcatgtctgaaaatgctctagatgaactgaatattgaattgctacgcaataaactatacaagtcttaccttgaggcattctataaattctgtaagaatcatggtgatgtcacagcagaagttatgtgtcccattcttgagtttgaggccgacagacgtgcttttatcatcactcttaactcctttggcactgaattgagcaaagaagaccgagagaccctctatccaaccttcggcaaactctatcctgaggggttgcggctgttggctcaagcagaagactttgaccagatgaagaacgtagcggatcattacggagtatacaaacctttatttgaagctgtaggtggcagtgggggaaagacattggaggacgtgttttacgagcgtgaggtacaaatgaatgtgctggcattcaacagacagttccactacggtgtgttttatgcatatgtaaagctgaaggaacaggaaattagaaatattgtgtggatagcagaatgtatttcacagaggcatcgaactaaaatcaacagttacattccaattttataacccaagtaaggttctcaaatgtaaaaaattataaatgttaaaaggaagttattgaagaaaataaaagaaattatgttatattatctagactacacaaaagtaagccacactatatcttcatgagttgcaaatccatggaaacacagtaaaccagccctgaaacaaagcatttccttgttttcagtggtattagatcttgtttccacatgtctgtctcattcttcactgggccttacaggttagttttaattaactctatggtatttttcttattcttgtttgatcatgttaaaaattggacctaataaaagtattttattcttgcttttccatgcttctctacaggtccaaatactgaatgtctcctttactttttctcttttaaatttttttctagacagggtctcactctgtcacctaggctacagtgcagtggtgtgatcacagctcactgcagcctcgacttcccaggctcaagtgatcctcccagctctcagcctccaaagtagctggcactacaagtgtacacccccacacaaggctaagttttgtattttttgtagagacagggtttcaacatattatccaggctggtgtcgaattcctgggctccagggatccacagtcccccttggcctcccaaagtgctgggattacatgcatgagccactgtgctgggcttcatttacattttaactgtctgttccttgcctagattcacagaaatccaaagctgtatgtagtcaacatggttcacaagtggtggaaaatgtgcttttttgctttgttttggtttgtttcggtttgttttgagacagagattccctctgtcgcccaagctag

SEQ ID NO: 60002 - DNA, 1549 bp, Homo sapiens
caacatggcggccgcggtggcggcggcacctggggccttgggatccctgcatgctggcggcgcccgcctggtggccgcttgcagtgcgtggctctgcccggggttgaggctgcccggctcgttggcaggccggcgagcgggcccggcgatctgggcccagggctgggtacctgcggccgggggtcccgccccgaaaaggggctacagctctgagatgaagacggaggacgagctgcgggtgcggcacctggaggaggagaaccgaggaattgtggtgcttggaataaacagagcttatggcaaaaattcactcagtaaaaatcttataaaaatgctatcaaaagctgtggatgctttgaaatctgataagaaagtacggaccataataatcaggagtgaagtcccagggatattctgtgctggtgctgaccttaaggaaagagccaaaatgagttccagtgaagttggtccttttgtctccaaaataagagcagtgattaacgatattgctaatcttccagtaccaacaattgcagcaatagatggactcgctttaggtggtggtcttgaactggctttagcctgtgatatacgagtagcagcttcctctgcaaaaatgggcctggttgaaacaaaattggcgattattcctggtggaggggggacacagcgattgccacgcgccattggaatgtccctggccaaggagctcatattctctgcgcgagtcctcgatggcaaagaagccaaagcagtgggcttaatcagccacgttctggaacagaaccaggagggagacgcggcctacaggaaggccttggacctggcgagagagtttttacctcagggacctgttgcaatgagagtggcaaaattagcaattaatcaagggatggaggtcgatttagtaacagggttagccatagaagaagcttgttatgctcagaccattccaacaaaagacagacttgaaggtcttcttgcttttaaagagaaaaggccccctcgctataaaggagaataaaaggaacagaaattcttaagatgccaatgtaataaatgtacttcctggaagtgtctttcggatccactatatgcctcagcacatggaaccttaatgaccaaagtgaagagcagattattcatacggtgtaataagcatctggaatggacccatccgtgtacttcattcaaatgtgtaaatgtcatattcattcagatttataaagctagtagtgtatagtcagaaacagaatcaaagttagatatacatttttaaatatttactgcatatgaggctttctgttaattttttaatgtgaataatttatatattgcacattctagggaataatattgattgtatgtctactgtgctgcattaagaaaataaaatttctatataccaaaaatgtgaagttataccaaataaagtttctaagtgattaatgcatacgaacagctacatatacatatatctaaacctgaaaaatgaattgatattctgagtgaaaactacctaatataaataaaattagtgaaaagaaaa

SEQ ID NO: 60003 - DNA, 2579 bp, Homo sapiens
aattgatagctgtacgcctgcacgaatgagacccgtattcccgggccgacgatttcgtcggccaggctccctggctggccggtttgggcgtctgggccgtgaaggtgggacctcctgttccgggccgcaagtttccctctccagccgcccgccgttcgtagcatgtcccccagaactcggggagcgcaggcaggacaggcttagagaagacgcggtccccagcgcttgggccacggacgtcccaccccgctcctctgtcgctggagaaccgccgggccgagccactgggagaagcaggccagagccttccagggcctccggcccgtggacccgaggaggatgagctggctttttcccctgaccaagagcgcctcctcctccgcggctgggtcccccggtggcctcaccagcctccagcagcagaagcagcgcctgatcgagtccctccggaactcacactccagtatagccgaaatacagaaagatgtggaatacagattgccattcaccataaacaacctgacaattaacattaatatattgcttcctccacagtttcctcaggaaaaaccagtgatcagtgtttatccaccaatacgacatcacttaatggataaacaaggagtgtatgttacctctccattagtaaacaattttacaatgcactcagatcttggaaaaattattcagagtctgttggatgagttttggaagaatcctccagttttagctcctacttcaacagcatttccttatctatacagtaacccaagtgggatgtctccttatgcttctcagggttttccatttcttcctccatatcctccacaagaagcaaacaggagtatcacttctttatctgttgctgacactgtttcttcttcaacaacaagtcataccacagccaagcctgccgctccttcatttggtgtcctttcaaatctgccattacccattcccacagtggatgcttcaataccgacaagccaaaatggttttgggtacaagatgccagatgtccctgatgcatttccagaactctcagaactaagtgtgtcacaactcacagatatgaatgaacaagaggaggtattactagaacagtttctgactttgcctcaactaaaacaaattattaccgacaaagatgacttagtaaaaagtattgaggaactagcaagaaaaaatctccttttggagcccagcttggaagccaaaagacaaactgttttagataagtatgaattacttacacagatgaagtccactttcgaaaagaagatgcaaaggcagcatgaacttagtgagagctgtagtgcaagtgcccttcaggcaagattgaaagtagctgcacatgaagctgaggaagaatctgataatattgcagaagacttcttggagggaaagatggaaatagatgattttctcagtagcttcatggaaaagagaacaatttgccactgtagaagagccaaggaagagaaacttcagcaggcgatagcaatgcacagccaatttcatgctccactatagattttcctggaaacatgaactgccaagagaggaatgggacacaaaaccaaacactgttttatatttatggtttgcaaactggcatttcatcagtggctaaattcacagatatcctatatagattgtatacagaactgagactgattttgtaccgattagaatgattgctatgatctttgagaaatttttctgcactatttgcactgaaacgtttatttattgttgataaactgtatcatatttaagttccactgctgttcctcttaccttgattaaatgcctatgccatgtacttttagctaggttttaatattttataaaacttcatttaaatttgtatttttaacttgaagttccatttctttatcaaggatggtatttagatttttttcctcttaaccttttttcaaaaactattttcaactgtgaggaaacccttatttttctttctttgtggataaaactttcaaaagcaatttaagatattcatagtgttaggaaacaccaaacctgcctatgtgccatctcacaaaagaaacttttaatacctacaataaatcaaaagaataaaccagctgttcttatatattgtttcatttttaaaactaaagatgcatttaagaagcaatacaagtaaatattttacctaataggaaaaaaaaaagttgcctttcatttaaaccattccaacagaaattcttatgctaatttaaaacatatatatatctggtaggtttgtggttggataggttttctaaattcctaatgttaaaaacaatctttatgttaatatacactaaatctatacacaaaaaaagtcaatgaacttttctgacctttactgtgagttaccttttcctaagaggaaagctatagtaataagtaaaatttaatttttaggcaatcctgatttttaatgaatttaattgagtgttcttgtatactacattgagcagtttgcttctataccgtgtcacaaaattcatgtatttcttgagaagccctaaaagctcataaaggaaaatgccgtgaactatgtagctcag

SEQ ID NO: 60004 - DNA, 557 bp, Homo sapiens
aaaaaccggagctggcgcttggcatcgccactctgggcaggatccaacgtcgctccagctgctcttgacgactccacagataccccgaagccatggcaagcaagggcttgcaggacctgaagcaacaggtggaggggaccgcccaggaagccgtgtcagcggccggagcggcagctcagcaagtggtggaccaggccacagaggcggggcagaaagccatggaccagctggccaagaccacccaggaaaccatcgacaagactgctaaccaggcctctgacaccttctctgggattgggaaaaaattcggcctcctgaaatgacagcagggagacttgggtcggcctcctgaaatgacagcagggagacttgggtgaccccccttccaggcgccatctagcacagcctggccctgatctccgggcagccaccacctcctcggtctgccccctcattaaaattcacgttcccacccaaaaaaaaaaaaagggggggccgttttaaaggatcaaatttatacgccgggggcgggcaaggtattattttttttttggggc

SEQ ID NO: 60005 - DNA, 4913 bp, Homo sapiens
ttttttttttttcaaattaaaaacagcacgatgttttttttttcagttctgggtctatagaaacccaggtttattcccatttgctacaacagattcccttctaataaaatgcactggcaaggtgaccagtgagtgacccaatgtctggttgggaaatctctctctgaacttcttgctgttggacctaaaatgtggatgtaaattggatcacagctggtttggcattgaaaaaaatacatacacaacaaacaattacaacttctttatatggcagtttttactgggtgtctaatactctctttactgtctcaagtggaagtccaaacaaatttcatttttgtagtaaaaaatctttatttccaaaatgatttgttagccaaaagaactataaaccacctaacaagactttggtaagaaagagacttgatgcttcttataaattccccattgcaaacaaaaaataacaatccaacaagagtcatgttacccattcttagccattaacctggttttaagtctccaaaatcaggattttaaaatgtacccaactgggaccaaatacaaacatgagacactagggtggcttgtccttgattaggaatcaccagcttaaggaactttatcatgggctgagagttagatagatagcttagaacaacattgcaaaagtgggtgcttctacatgaggacttttttccccccaagtagaaaaataattaaatcttgtgtttctttatattgtgctttttttgggagaaagcaattcatttaaggatttaaaacatgttggatacaaaggtagttcagagatgtaataatggtccctccaagaacaagggagcaaaagccctatcttttattgaaaatgatggaggtggaggacaatataaaaaagaaccttctgaacacttacttagcttaaagacatgaaagacccagtgagtttttattgaatagtctctcttgtgttaaaagtacatattcaggactatactatgttgtatttggaaatattctgatgtgtttaatacaaattcgtagtgtattcagagcattgtatgtgtctcaccaatggtacacatttggattaagcagtaataaggcctataaaagaagaaatgaaacaatagttttcaacaataaatgcaggaagaaaaactgctgatggacccaactgagaaaatgtccttttacactatcccttggtggtcagtctccctgaatctggtgtgcttataattgctgggaaggcagtgtaaacctgtggccattcctatgcatgtctgggaggaccacagccctggtgtggagcactgacaggtttgactttccaccagaattgcttgctcagcttaatcccataatattcctttcccttagatttgttttctgtctcggtaactttttctctctgcatataaaatttcatgactaaaataactttaaagtacagagattgtattttgttgaaggaatgcattgggggggctttgggcagacttagcaaaatgtttgtatagcaaaaatgttttcttgctaaaaactgatttgcaaacttgaacgtctagatgtgtgtaggaagattttaaaatttaggcaaattggtctctaaagagaccaattttgcttcctttgtcttggttccaataaggatttagtaccaaaaagttcagaaggctggcttcccagaagaattgtacatactcctctgaacccccaaaagcaagggaaaaatacactctaagcttattatttatctcaggtgtaaaaactagctaccttatatttaaataaagcagccataatttatttatttatttttgttgggggggcatcaggaaccaatatcaggggtgagacaaatgtattccgaatttctcagtgaaagaacaaaagccacccaacatcaatgctcctcttcaagtctaccagctctgtttttccccaggaactattgatgactgaggagacttgaaaagagacctaaagttccactaagaagagatgggcaaacaatggtttcattgaacaggccaaagatgagaatgtggggaatctgctgtcttcatctgtgaatgtttcctacctgccgcaccctgggactcaggcatagtcacttccagacatggttgcctctccatgtggagtaggtcaaagtctccgtcctccctggccaggtggaagctccagagggacatgtttcagcttagtacaaggtggctgacactactcctctgcaggaagaggctggctggaggtgagggcgccccactcagcctgtacccatcaagaagtattcagaaaggatgtctctggcatccacaagactactgggcgaaccacactgcaaaaatgaaaactagcgtacacaatttaaattgtcttaaacaagcaaataatccagccattggtgactctggaatctagagtgcagccctggggaactcgtacccttgctaacaaggatgaacattgcatgctctgatctccttcttgtctttgcagctggtaaactgggagcttttgaatctcttctttacagtcatgtaacgttcctgaattccacctccgcacagtttggtgcattctgaccaggccgtccatgggcgcatcctacaacctgggaactgctccccttcagactcttccttcagctgctcactccgccggctctctcgggcctccctccagcgtagcttttggatggatggatttcgaaggcattttcggatgcggcacttttttcgctgcacagtctctgggcagggtgcacctccaaactgaggctccatttggatcatccgggttcgaatcacgtggcctttcccacatgacttgttacattccgaccactgggaccactcggtgagctcacagtcaatggggcattcagggagcatgcacttctccacctgctccagatcctcattgcagtctccaagttctgccagagacttgagcatccgctgtcgggttcgcatgcccttcccgcaggtcacgctgcagtcactccactcggaccatggggacagcaagcatgggatggtgtggcactctggcatcatgcacttctctgcctgtgatgtctcggctttgcacatggagccatctgcggggttcatcttgatcatgcggtaccgcttcttcatgcccatgccgcaggtggcgctgcactcgtcccactcgccccactcggtcatcaggcagctgctgggagagcactcctcgttgaccgtgcacttctccgtttcctcagtgggcagcgtgcacacggagccgtcctccgggaactgcttcacatacctctcccgggacctcatgcccatgccgcaggagatgctgcagggcgaccaggtgatccactcggacatggtgcaggtggagccgtcttcgtcactgcagccagggcccatgcagggctggaagtcctgggtgtcagggcaggggacgctgaggtccagctgtgctttcagcatgcgctgtcgcatcctcttgcctttgtcacaggtggaggagctgcaggcggaccatggggaccagttggagtagatgcaggtttcaggggtgtcatcttcatctttctcttctggagccaggtcagctacaatatcatcgacattgtcaggtacaatattgcattgttcacccttccgtgcgattctctcgatgacaactctggctacttgagtgatggacccaccctctgggtcatagaaaggactctgaggatggtccaggctggtcaggggccggattttctcctggggaatggtgggtttgttgggtgactcataggtcaccccgctgtcggtgccagcgtcccagggaatcaggtcttgcaccaccttctggacccagccacattccttggtgcacagatcttctgcagataagcctacgttccagtcgggactagggcccatcatggtcaggaaggacattaaatggcgcgttctgtccacggaaaattcagctgaaggtgctgctctcacgttgagaggctgccaggctggccattgggctttggctttgatgacggtgaggacctcatcactctgttgtcgaatttcttcctccattttcacgggtgagcccaattctgcaacttgtttgacgccttcgctggcatatcctccatattcccacagtacataattcttggagtgggatcctccgatgatcgcagaccagtggttggcccgacgagggtaatcctttgggtgtgtcttctcggaccaattcccataaaatgtgagtctgtacttggcagttccgcaggcacagcagtctaagatgggtttgtcagtcaccccatcaaatgtggaatcttgttcacaaagtttcttggtcagagagccctcatcttgaaaataaataatgcgtttttgtacgatgctggccttcagaatcacgcagcctgttcccgctggtggtgctatccaaaacacctggatccgggtcctcctccgtggagtgctttcagtgactgcaacagggcaattgctcataaactgagtttcttcttcgtctatgatctggaaggtcccagcatggtcttcttccttatcaccctctctgttctctctgagggcaattaatgtgaatcctctgaagtaggagggaggagcagctgaaagtgttacgcggtagctggttcccggcttgtagaagtcggggtcgccctccacgcggaggctgaactcggtgtagccctcgcgccgcgtgccctgggcgcgcaggatacggctacagtagccctctgacttgggcactttgtccagggtctcgtcggagaaggccagcgccgcggccaggggcagcgccagggccagcagtgccggagtccggctcagcttcaggggcgccggggacagcctcatcttcgcagcccccaactttgtgccgcggccgct

SEQ ID NO: 60006 - DNA, 2861 bp, Homo sapiens
ggcgctggctggcaggtgtcgctaaccggacggtggtcgccagggcgagaggcgggagccggagaggtgaggcaggacccgggctccactgccgcctctccgagctcttgtgacgcggacctcagtgccaggatggctcggggcgagcggcggcgccgcgcagtgccggcagagggagtgcggacagccgagagggcggctcggggaggccccgggcgacgggacggccggggcggcgggccgcgtagcacggctggaggagtggctctggccgtcgtggtcctgtctttggccctgggtatgtcggggcgctgggtgctggcgtggtaccgtgcgcggcgggcggtcacgctgcactccgcgcctgctgtgttgcctgccgactcctccagccccgccgtggccccggacctcttctggggaacctaccgccctcacgtctacttcggcatgaagacccgcagcccgaagcccctcctcaccggactgatgtgggcgcagcagggcaccaccccggggactcctaagctcaggcacacgtgtgagcagggggacggtgtgggtccctatggctgggagttccacgacggcctctccttcgggcgccaacacatccaggatggggccttaaggctcaccactgagttcgtcaagaggcctgggggtcagcacggaggggactggagctggagagtgactgtagagcctcaggactcaggtacttctgccctccctttggtctccctgttcttctatgtggtgacagatggcaaggaagtcctactaccagaggttggggccaaggggcagttgaagtttatcagtgggcacaccagtgaacttggtaacttccgctttacacttttgccaccaaccagtccaggggatacagcccccaagtatggcagctacaatgtcttctggacctccaacccaggactgcccctgctgacagagatggtaaagagtcgcctaaatagctggtttcagcatcggcccccaggggcctcccctgaacgctacctcggcttgccaggatccctgaagtgggaggacagaggtccaagtgggcaagggcaggggcagttcttgatacagcaggtgaccctgaaaattcccatttccatagagtttgtgtttgaatcaggcagtgcccaggcaggaggaaatcaagccctgccaagactggcaggcagtctactgacccaggccctggagagccatgctgaaggctttagagagcgctttgagaagaccttccagctgaaggagaagggcctgagctctggcgagcaggttttgggtcaggctgccctcagcggcctccttggtggaattggctacttctacggacaagggctggtattgccagacatcggggtggaagggtctgagcagaaggtggacccagccctctttccacccgtacctctttttacagcagtgccctcccggtcattcttcccacgaggcttcctttgggatgaaggctttcaccagctggtggttcagcggtgggatccctccctcacccgggaagcccttggccactggctggggctgctaaatgctgatggctggattgggagggagcagatactgggggatgaggcccgagcccgggtgcctccagaattcctagtacaacgagcagtccacgccaaccccccaaccctacttttgcctgtagcccatatgctagaggttggtgaccctgacgacttggctttcctccgaaaggccttgccccgcctgcatgcctggttttcctggctccatcagagccaggcaggcccactgccactatcttaccgctggcggggacgggaccctgccttaccaaccttactgaaccccaagaccctaccctctgggctggatgactacccccgggcttcacacccttcagtaaccgagcggcacctggacctgcgatgttgggtggcactgggtgcccgtgtgctgacgcggctggcagagcatctgggtgaggctgaggtagctgctgagctgggcccactggctgcctcactggaggcagcagagagcctggatgagctgcactgggccccagagctaggagtctttgcagactttgggaaccacacaaaagcagtacagctgaagcccaggccccctcaggggctcgttcgggtggtgggtcggccccaacctcaactgcagtatgtagatgctcttggctatgtcagtctttttcccttgctgctgcgactgctggaccccacctcatcccgccttgggcccctgctggacattctagccgacagccgccatctctggagcccctttggtttacgctcccttgcagcctccagctccttttatggccagcgcaattcagagcatgatcccccctactggcggggtgctgtgtggctcaatgtcaactacctggctttgggagcactccaccactatgggcatctggagggtcctcaccaggctcgggctgccaaactccacggtgagctccgtgccaacgtggtaggcaatgtatggcgccagtaccaggctacaggctttctttgggagcagtacagtgaccgcgatgggcgaggcatgggctgccgccctttccacggctggaccagccttgtcttactggccatggctgaagactactgaagggagggagaggaggggagccaagacactcatgccactctggctctgaagggacaaaggcttctggcttttgcccccagccccttggataccagtaattcaaaccttcctcatttcatctcaggtgtctccttgctgtcatcccacatagccctggggtgaatgtgaatccagagtctatttttctaaataaattggaaaaaacaaaaaaaaaa

SEQ ID NO: 60007 - DNA, 1756 bp, Homo sapiens
tgtgtctgtgtctgtctgtgtctcgcagcggcgcgcggccccggacaagcgctggggattcccgtttgaggcgtcactactgtcactgccatcaccccacggagccacttctagaggggagtagacccggcccttcgccgggcagagaagatgttgcccctgtccatcaaagacgatgaatacaaaccacccaagttcaatttgttcggcaagatctcgggctggtttaggtctatactgtccgacaagacttcccggaacctgtttttcttcctgtgcctgaacctctctttcgcttttgtggaactactctacggcatctggagcaactgcttaggcttgatttccgactcttttcacatgtttttcgatagcactgccattttggctggactggcagcttctgttatttcaaaatggagagataatgatgctttctcctatgggtatgttagagcggaagttctggctggctttgtcaatggcctatttttgatcttcactgctttttttattttctcagaaggagttgagagagcattagcccctccagatgtccaccatgagagactgcttcttgtttccattcttgggtttgtggtaaacctaataggaatatttgttttcaaacatggaggtcatggacattctcatggctctggccacggacacagtcattccctctttaatggtgctctagatcaggcacatggccatgtcgatcattgccatagccatgaagtgaaacatggtgctgcacatagccatgatcatgctcatggacatggacactttcattctcatgatggcccgtccttaaaagaaacaacaggacccagcagacagattttacaaggtgtatttttacatatcctagcagatacacttggaagtattggtgtaattgcttctgccatcatgatgcaaaattttggtctgatgatagcagatcctatctgttcaattcttatagccattcttatagttgtaagtgttattcctcttttaagagaatctgttggaatattaatgcagagaactcctcccctattagaaaatagtctgcctcagtgctatcagagggtacagcagttgcaaggagtttacagtttacaggaacagcacttctggactttatgttctgacgtttatgttgggaccttgaaattaatagtagcacctgatgctgatgctaggtggattttaagccaaacacataatatttttactcaggctggagtgagacagctctacgtacagattgactttgcagccatgtagtgaatggaaagaaattatgcaccttttatggaccaaatttttctggtactgtacgatccaaaacattgtacccagctttttaaaagagagaaattatcactacaactcccgagcactaagtagacggggtagagtcagccgttcatgctttgtggggagttcacagctaagggatcagatttaagaggatatctcctggacttttggtcttttcttttgtgctctttcctccaaatctttttgacttctgaggtttttagcttaggatgttaatttgtccttttgtctttctttttttgtttttgttttctgtttgtttgttttcatgttgaatgcccacaccaccatcctctcatcccagccagtaagaatttcagttgtgggcctccagtcttctggaatgtcttcactgcagctgctggaaatcactgctttcattcccacaaaaccagtattacttttttttaaaaaaaaa

SEQ ID NO: 60008 - DNA, 2041 bp, Homo sapiens
gaattcgttctcaactacgagccacgagtttgcagatggggctgctcggcggcgcctgtggctgagggagagcagcggcggcggggagcgaccgggagcggcggcagcggcggcgcggaggcggctgaggtgcgagccggcaatgcagcaagtcttggaaaaccttacggagctgccctcgtctactggagcagaagaaatagacctaattttcctcaagggaattatggagaatcctattgtaaaatcacttgctaaggctcatgagaggctagaagattccaaactagaagctgtcagtgacaataacttggaattagtcaatgaaattcttgaagacatcactcctctaataaatgtggatgaaaatgtggcagaattggttggtatactcaaagaacctcacttccagtcactgttggaggcccatgatattgtggcatcaaagtgttatgattcacctccatcaagcccagaaatgaataattcttctatcaataatcagttattaccagtagatgccattcgtattcttggtattcacaaaagagctggggaaccactgggtgtgacatttagggttgaaaataatgatctggtaattgcccgaatcctccatgggggaatgatagatcgacaaggtctacttcatgtgggagatataattaaagaagtcaatggccatgaggttggaaataatccaaaggaattacaagaattactgaaaaatattagtggaagtgtcaccctaaaaatcttaccaagttatagagataccattactcctcatcaggtatttgtgaagtgtcattttgattataatccatacaatgacaacctaataccttgcaaagaagcaggattgaagttttccaaaggagagattcttcagattgtaaatagagaagatccaaattggtggcaggctagccatgtaaaagagggaggaagcgctggtctcattccaagccagttcctggaagagaagagaaaggcatttgttagaagagactgggacaattcaggacctttttgtggaactataagtagcaaaaaaaagaaaaagatgatgtatctcacaaccagaaatgcagaatttgatcgtcatgaaatccagatatatgaggaggtagccaaaatgcctcccttccagagaaaaacattagtattgataggagctcaaggtgtaggccgaagaagcttgaaaaacaggttcatagtattgaatcccactagatttggaactacggtgccatttacttcacggaaaccaagggaagatgaaaaagatggccaggcatataagtttgtgtcacgatctgagatggaagcagatattaaagctggaaagtatttggaacatggggaatatgaaggaaatctctatggaaccaaaattgattctattcttgaggttgtccaaactggacggacttgcattctggatgtcaacccacaagcactgaaagtattgaggacatcagagtttatgccctatgtggtatttattgcggctccggagctagagacgttacgtgccatgcacaaggctgtggtggatgcaggaatcactaccaagcttctgaccgactctgacttgaagaaaacagtggatgaaagtgcacggattcagagagcatacaaccactattttgatttgatcatcataaatgataatctagacaaagcctttgaaaaactgcaaactgccatagagaaactgagaatggaaccacagtgggtcccaatcagctgggtttactgatgattcagtaaggttaacaatgaaaattaaactcttaaaaagtgactgcaacaaataaaccttctactgagaaaatacatcacagatagaagattatctgcctaagtcccaggcatttttatggtgtagattgaaataatagtacacttctgaatttttatataaaatgtggttggaaggtgtactaatatataatttatcttaatttttctaactttgtatggataatctttctattcatatcacataaagaaatgcgttgaagcaaaaaaaaaa

SEQ ID NO: 60009 - DNA, 1302 bp, Homo sapiens
cgtgcgtggaattcggcgtgcttgctgctggagggtgatggccctgcaaggctgtgggctccgacctcaccgggagtcgacagcgagaggttcgccgaacagcgaggttctgggcgagcgctgaacgccggccccaagcaccccgggtctttacacagtccgcggccacagactctgacgaagacgtggatctgctctcgctttagctgctcgcggtcctccagatcatgtccgcgactcctgcgactccgcgcggaaaaaaaagtttgccaggcgtggactcaatgacctttccaagctgtgcgcctcgctgcctggaccgggtctgagcgcggctgcccaggttgacctttctgcgggagggctttctctacgtgctgttgtctcactgggtttttgtcggagccccacgccctccggcctctgattcctggaagaaagggttggtcccctcagcacccccagcatcccggaaaatggggagcaaggctctgccagcgcccatcccgctccacccgtcgctgcagctcaccaattactccttcctgcaggccgtgaacaccttcccggccacggtggaccacctgcagggcctgtacggtctcagcgcggtacagaccatgcacatgaaccactggacgctggggtatcccaatgtgcacgagatcacccgctccaccatcacggagatggcggcggcgcagggcctcgtggacgcgcgcttccccttcccggccctgccttttaccacccacctattccaccccaagcagggggccattgcccacgtcctcccagccctgcacaaggaccggccccgttttgactttgccaatttggcggtggctgccacgcaagaggatccgcctaagatgggagacctgagcaagctgagcccaggactgggtagccccatctcgggcctcagtaaattgactccggacagaaagccctctcgaggaaggttgccctccaaaacgaaaaaagagtttatctgcaagttttgcggcagacactttaccaaatcctacaatttgctcatccatgagaggacccacacggacgagaggccgtacacgtgtgacatctgccacaaggccttccggaggcaagatcacctgcgggatcacagatacatccattccaaagaaaaacccttcaaatgtcaggagtgtgggaaaggattttgtcagtctagaactctagcagttcacaaaactttacacatgcagacatcaagccctacagctgcgagcagtgcggcaaagtgttcaggcgaaactgtgatctgcggcggcacac

SEQ ID NO: 60010 - DNA, 839 bp, Homo sapiens
tggtggaattcctgagccgttgccttggctacaccgtctgttagggccgcgcacgagatcagtaactgagacctcaccgcgttgacccagcaccagggctcgcgggggtcccgcgagggtctcggtagccgcgcgcccagagacccccgccgcggcccgattctctgagcgccagacatgaaccgcaagaaactgcagaagctgacggacaccttaaccaaaaattgcaagcatttattccgaggttttgataaagataatgatggctgtgtaaatgtattggagtggattcatggattatcactgtttcttcgaggatctttggaagaaaaaatgaaatattgctttgaagtgtttgatttgaatggtgacggattcatttcaaaggaggaaatgtttcacatgttgaagaacagccttctcaaacagccatctgaggaagaccctgatgaaggaattaaagatttggttgaaataacactgaagaaaatggatcatgaccatgatgggaagctgtcttttgcagactatgaactggctgtgagagaagagactcttctactggaggcctttgggccatgtcttcctgatccaaagagccagatggaatttgaagctcaagtattcaaagatccaaatgaattcaatgatatgtgaataactaaatgtctatattgtctcaagtgagtaaaaaaggaggcacacacatattgcttattttttctacttagttcagaaaaatgatgttgaattgtgtgtttcagggtgaagatgaggttcacttacatatatcatttaacatcagtgtaagatgcaattaaaatagatggaagacaaga

SEQ ID NO: 60011 - DNA, 2540 bp, Homo sapiens
gtcgtggaattctgcgcgcagctccaccgttgccaagacgccgcgtaaacacccgagcgcgcgcagccaggtgcgctccttggggctgctggctgctgcgtttgcggcgggaggtggtggccgcggtcccacgagagggggtatttttcgtcagccaagatgggttccaaaaggagaaatttgagctgtagtgaaaggcatcagaaattagtagatgaaaactactgcaaaaaattacatgtccaagctctaaaaaacgtcaacagtcaaatcaggaatcaaatggtgcagaatgaaaatgataaccgtgttcagcgcaagcaatttctcagattattacaaaatgaacaatttgagttggatatggaagaggccattcaaaaggcagaagaaaacaagagattgaaagaactccagctcaaacaagaagaaaaactggctatggaattggcaaaactgaaacatgaaagtctaaaggacgaaaagatgaggcaacaagtaagagaaaacagcattgagcttagagaattggagaagaaattaaaagcagcttacatgaataaagaaagggcagctcagattgctgaaaaggatgccattaaatatgaacaaatgaaacgtgatgctgaaatagccaaaaccatgatggaagaacacaagagaataataaaggaagagaatgctgcagaagacaaacgaaacaaagcgaaagcacagtactatcttgacttagagaaacaacttgaagaacaagaaaaaaaaaagcaggaagcttatgagcagctgctaaaagagaaactcatgattgatgaaattgttaggaagatctatgaagaagatcagttggaaaaacaacaaaagttagaaaaaatgaatgcaatgcgaaggtatatagaagagtttcagaaagagcaggctctctggagaaaaaagaaacgtgaggagatggaagaagaaaacagaaaaatcatagagtttgctaacatgcagcagcaaagagaagaagatcggatggcaaaagttcaagaaaatgaggagaaaaggctacagcttcagaatgcgttgacacagaaattagaagaaatgctgcggcaacgtgaagatttggaacaagtgcgacaagaattataccaggaagaacaagctgaaatatataagagcaagctaaaagaagaagcagaaaagaaattgagaaagcaaaaagagatgaagcaagattttgaagaacaaatggccttgaaggaattagtgctacaggctgcaaaagaggaagaggagaactttagaaaaactatgctagctaaatttgctgaggatgatcgaatagaattaatgaatgctcagaaacaaagaatgaagcagctggaacacaggagggctgtggaaaaacttattgaagagcgtcgccaacaattccttgcagacaaacaacgtgaactagaagagtggcagttgcagcaaaggcggcaaggatttattaatgcaattattgaagaagaaaggctaaaacttcttaaagagcatgctacaaacttactaggctatctccctaaaggagtatttaaaaaagaggatgatattgatctgcttggtgaagagttcaggaaagtatatcaacaaaggagtgaaatttgtgaagagaaatgatatcatcaaaattgggtaaagcatagattttttgtatgttaccacttagatgtcagcataacttttgttttacagttcagtggcattaggtatccattgtctgtttggattttgtaaatcatcactgaatttcataacttgtaaacaattatcagatacaaattaattttaatcaagctgttatttttgtactgataatttcaaaatccgatttctacaacactacagagcactgtttgcatccccatcctcaagacagtatatttaccttgactaatacagaactctaccccaaagtgaactgccttctgtctgtgtttacgaactttacttacttgatttagccagggaaataaatatttggaattttcttttaaagcatcttttttggtctactgtaagggaggagaattataaatgaaaagagtcaagaattttattatctgatgtgcttaattgtcatgctaagaacttaaaaaaacaactcaaaaagagctaatagctaatctcctaaatctaaaaagggaattctttgaaattattttgctttcataatcaaatatattacttatgaagaataaaaataattcaaaccactacaataagtaaaatgggtatccatcacatactgtcatagagactaactgaagtagatcacttatgaatttccccattcaagtgctttcataaattcctcctcagtgaaagatagcatcttggcagcttcaatatgcatcttttgcctttttaaaacatcaattaattttaactgtttcttgaaccctatcattaattctcctttttgtttttctagcttcttgttttctgattttaacacttcaatttttttgtgttcttcatttgctatgaccttgttattttgccttaattta

SEQ ID NO: 60012 - DNA, 3387 bp, Homo sapiens
atccagttcacgcagtcgtcattccagtatctcacctgtcaggcttccacttaattccagtctgggagctgaactcagtaggaaaaagaaggaaagagcagctgctgctgctgcagcaaagatggatggaaaggagtccagctacgaaagaagtggctcttacagcgggcgatcgcccagtccctatggtcgaaggcggtccagcagccctttcctgagcaagcggtctctgagtcggagtccactccccagtaggaaatccatgaagtccagaagtagaagtcctgcatattcaagacattcatcttctcatagtaaaaagaagagatccagttcacgcagtcgtcattccagtatctcacctgtcaggcttccacttaattccagtctgggagctgaactcagtaggaaaaagaaggaaagagcagctgctgctgctgcagcaaagatggatggaaaggagtccaagggttcacctgtatttttgcctagaaaagagaacagttcagtagaggctaaggattcaggtttggagtctaaaaagttacccagaagtgtaaaattggaaaaatctgccccagatactgaactggtgaatgtaacacatctaaacacagaggtaaaaaattcttcagatacagggaaagtaaagttggatgagaactccgagaagcatcttgttaaagatttgaaagcacagggaacaagagactctaaacccatagcactgaaagaggagattgttactccaaaggagacagaaacatcagaaaaggagacccctccacctcttcccacaattgcttctcccccaccccctctaccaactactacccctccacctcagacaccccctttgccacctttgcctccaataccagctcttccacagcaaccacctctgcctccttctcagccagcatttagtcaggttcctgcttccagtacttcaactttgcccccttctactcactcaaagacatctgctgtgtcctctcaggcaaattctcagccccctgtacaggtttctgtgaagactcaagtatctgtaacagctgctattccacacctgaaaacttcaacgttgcctcctttgcccctcccacccttattacctggagatgatgacatggatagtccaaaagaaactcttccttcaaaacctgtgaagaaagagaaggaacagaggacacgtcacttactcacagaccttcctctccctccagagctccctggtggagatctgtctcccccagactctccagaaccaaaggcaatcacaccacctcagcaaccatataaaaagagaccaaaaatttgttgtcctcgttatggagaaagaagacaaacagaaagcgactgggggaaacgctgtgtggacaagtttgacattattgggattattggagaaggaacctatggccaagtatataaagccaaggacaaagacacaggagaactagtggctctgaagaaggtgagactagacaatgagaaagagggcttcccaatcacagccattcgtgaaatcaaaatccttcgtcagttaatccaccgaagtgttgttaacatgaaggaaattgtcacagataaacaagatgcactggatttcaagaaggacaaaggtgccttttaccttgtatttgagtatatggaccatgacttaatgggactgctagaatctggtttggtgcacttttctgaggaccatatcaagtcgttcatgaaacagctaatggaaggattggaatactgtcacaaaaagaatttcctgcatcgggatattaagtgttctaacattttgctgaataacagtgggcaaatcaaactagcagattttggacttgctcggctctataactctgaagagagtcgcccttacacaaacaaagtcattactttgtggtaccgacctccaaaactactgctaggagaggaacgttacacaccagccatagatgtttggagctgtggatgtattcttggggaactattcacaaagaagcctatttttcaagccaatctggaactggctcagctagaactgatcagccgactttgtggtagcccttgtccagctgtgtggcctgatgttatcaaactgccctacttcaacaccatgaaaccgaagaagcaatatcgaaggcgtctacgagaagaattctctttcattccttctgcagcacttgatttattggaccacatgctgacactagatcctagtaagcggtgcacagctgaacagaccctacagagcgacttccttaaagatgtcgaactcagcaaaatggctcctccagacctcccccactggcaggattgccatgagttgtggagtaagaaacggcgacgtcagcgacaaagtggtgttgtagtcgaagagccacctccatccaaaacttctcgaaaagaaactacctcagggacaagtactgagcctgtgaagaacagcagcccagcaccacctcagcctgctcctggcaaggtggagtctggggctggggatgcaataggccttgctgacatcacacaacagctgaatcaaagtgaattggcagtgttattaaacctgctgcagagccaaaccgacctgagcatccctcaaatggcacagctgcttaacatccactccaacccagagatgcagcagcagctggaagccctgaaccaatccatcagtgccctgacggaagctacttcccagcagcaggactcagagaccatggccccagaggagtctttgaaggaagcaccctctgccccagtgatcctgccttcagcagaacagacgacccttgaagcttcaagcacaccagctgacatgcagaatatattggcagttctcttgagtcagctgatgaaaacccaagagccagcaggcagtctggaggaaaacaacagtgacaagaacagtgggccacaggggccccgaagaactcccacaatgccacaggaggaggcagcaggtaggagcaacggtgggaatgccctctgaggaatgcagtgatgtccatcagtcacctctcacccagagcctggcaaattcagtctctttcacagaacctaaagccaagccaggttcagtgggaaatcccacctgtccaaacactgtgtgagacaccagaattagaggcctgcaagcctgcttccttcatccccaatgcccagatgggacaggtcaccagcctcctgtgtctacccccacctttcttgcttgctggcctcctctctctgcagtgcctctctcatccctgcaatccagacagcacatgcagcagctcatatgtgaaaaacaagacccagagaggggaaatcatttgaatcctgtcctgggattgctttgtgttcctggatttggagaatttctgggaacacaggagaaggaat

SEQ ID NO: 60013 - DNA, 1084 bp, Homo sapiens
  misc_feature (1)...(1084): n = a,t,c or g
ccagcaccatcccctatacggaagggctgtgatgagcctggagcctcttgccttcacctgtctacacctatccagtgctattctctttctctgggcacagcctcccaggctgctgctcctcctcctgtaaaatgggcacagtattatgtgccttgtgttttctccgattcagcagcctttccgcagattatctgtggcccctggggaaaggtgttggggtctcaacactccattatggggactgcggctgaggcctggctgcaggtctccctacacgctccccagcggtgagcccagcgagacccagcagacggtcctgcctcccactctccagcactcccctctgcttactttgtctgcagcggtgaggcgggtccacggcttatctgccctgcggtcatagtcctgagcgtcagccacctccacgtagtcactgaagcggatgaggatctttctttcccgaagctcttccaccgtgggcctttgactgagctttcgggttagcctcctcttgatctctctcttctcctcctgttcctcttgttcattccgaggtttcaaaatgttcctctgttccagttcctctgcagttggcctctggctcagccgcctacggaaaaaatccaggaaaagtttttggaccatatcatagcctccttgggtcattaatttcctcggcccttgcagatacatgagacagtcagtggctggagttcttgttccatcctgtgctctgaaagactgactctcgccaccaccgcctcctcagttcntcaatttcaagcccaggagaggcacgtgcgtcatgtcacagccgctgacccccgccctcctccctgcagcggcccctccccagccccatctcctccagtggccccaggcaagtggactgcaactcagacgggactcttttcttcacagaagtccttttctttccttgtggcctcctaacttggggactgtggcctcttgcctctctctccctcccttgaggctaaagcctgtctcctgcctcttctgtgcagacccagttagaacataaagaggtctgtggccccggggacatgtgagagaatgtgtctgt

SEQ ID NO: 60014 - DNA, 1871 bp, Homo sapiens
gcacgagcttcgttcgggcacttccagtactctcattcacttcctgtccctttcttttacgtttccgacaaaacagtgtctgtgggcagctagaatcttcagtttctgtgagcgtccgcttcgtctgggcacttccggtactcccattcagttccggtccctgtcttttacgtttccggcaaaacatcagtgtctgtgggtagttggaatcttcagttcctgtgagcgtcggcgtcttctgggcctgtggagtttcttggacaggggccgcggggctccaggacggcgcccttagcgacaccatggcccgaaatgcagaaaaggccatgacggccttagcaagatttcgccaggctcagctggaagagggaaaagtgaaggaacgaagaccctttctggcctcagaatgtactgaactgcctaaagctgagaagtggagacgacagatcattggagagatctctaaaaaagtggctcagattcagaatgctggtttaggtgaatttcgaattcgtgacctgaatgatgaaattaacaagctgctaagggagaaaggacactgggaggtccggataaaggagctgggaggtcctgattatggaaaagttggccctaaaatgctggatcatgaaggaaaagaagtcccaggaaaccgaggttacaagtactttggagcagcaaaagatttgcctggtgttagagagctgtttgaaaaagaacctcttcctcctcccagaaagacacgtgctgagctcatgaaggcaatcgattttgagtactatggttacctagatgaagatgatggtgttattgtgcctttggaacaggaatatgaaaagaaactcagagccgagttagtggaaaagtggaaagcagagagagaggctcggctggcaagaggagaaaaggaagaggaggaggaagaggaggaagagatcaacatctatgcagtcaccgaggaggagtcggacgaggaaggcagccaggagaaaggaggggacgacagccagcagaagttcattgctcacgtccctgttccctcgcagcaagagattgaggaggcactggtgcgaaggaagaaaatggaactcctccagaagtatgcaagcgagaccctgcaggcccaaagtgaagaagccagaaggctcctggggtattaggacccagctggggctctccttggagttcttccatcccccagtggtacctcaggacccagggctgcagacacaggctggtgctgcaagggctcctgccccattctcagccttccttccctctccttgtctcatgttgaccggagggtaggggtctgtccctggtcttcctggtaggttttgtacacatattttgctactgtgtggatccatttatttttattgtggagtgtatacaacaggttgcgaactggctgcctgtgtcttattttgacttgcactgccattttgaggggagaagaatcaattagtggcaaacatttaaaaatgcaattttttgcagaccaaagtataattttaaaaaatgcaaattttctaaaagacacatctcttgaaaaatgagatgatgtggccaggcgcagtggctcacgcctgtaaccccagcactttgggaggccgaggcgggcgggtcacgaggtcaagagatggagaccatcctggccaacatggtgaaaccccatgtctactaaaaatacaaaaaaattagctgggcgtactggcatgcacctgtagtcccagctgcttgggaggctgaggcaggagaatcacttgaacccgagaggtggaggttgaagtgagcccagatcgtggccattgcactccaagccttgggacaagtgggaacctcttccccccaaaaaaaaaaaaaagttt

SEQ ID NO: 60015 - DNA, 1376 bp, Homo sapiens
  misc_feature (1)...(1376): n = a,t,c or g
cctctgtcgccccgaggcaagcaggtttacccagctgagaagaagtctgtgtcgctgagtgagacggtgtttcgtcatgttgaccaggctggtctcaaactcctgacctcgagtgatcacctgccttggcctcccaaagtggtgggattacagaggaaaagatgctagaaccacaggagaatggcgtgattgacctaccagattatgagcatgtagaagatgaaacttttcctcctttcccacctccagcctctccagagagacaagatggtgaaggaactgagcctgatgaagagtcaggaaatggagcacctgttcctgtacctccaaagagaacagttaaaagaaatatacccaagctggatgctcagagattaatttcagagagaggacttccagccttaaggcatgtatttgataaggcaaaattcaaaggtaaaggtcatgaggctgaagacttgaagatgctaatcagacacatggagcactgggcacataggctattccctaaactgcagtttgaggattttattgacagagttgaatacctgggaagtaaaaaggaagttcagacctgtttaaaacgaattcgacttgatctccctattttacatgaagattttgttagcaataatgatgaagttgcggagaataatgaacatgatgtcacttctactgaattagatccctttctgacaaacttatctgaaagtgagatgtttgcttctgagttaagtataagcctaacagaagagcaacaacaaagaattgagagaaataaacaactggccttggaaagaaggcaggcaaagctgcctnagtaatagtcagacccttgggaaatggatatggttaatgaattacacccagggcacaccacggttgaagaggttaatactgatgaggatcaaaaggaggagtcaaatggattaaacgaagacattctggacaatccatgtaatgatgctattgccaatactttaaatgaagaggaaacactgctggaccagtcttttaaaaatgtgcaacagcaacttgatgctacatccagaaatattactgaagctagataagtttccattaagagaaaatgtatctgttaagtcatcgtcctgcaagcttggcgttactatgtattttttcttcttggagtgaaaatccttagatagtaaaactgttatagattattgtttaaaatctgataatctggtatttatttataattatgcttgtcactttagttaaatctatttgttctctttagtgtttgtttttatataggtatttcttcataaaatgattaggaggtaataagcagtttctgctgctggtctgtcattgaatgccttgttttcactaagttgggaggtttggtt

SEQ ID NO: 60016 - DNA, 1464 bp, Homo sapiens
ctccgagcttcttaaacacaggccttgggcctacggctctgggggtacttgggggggcgggggcaggtctgatgagtaacccctccccccaggttccagaggaagaagcctccacatctgtctgccggcccaagagttccatggcctccacttcccgccgccaacgccgagaacgtcgctttcgtcgttacttgtctgcaggacggctggtccgggcccaggccctcctccagcgacacccaggcctcgatgtagatgctgggcagcccccaccactgcaccgggcctgtgcccgccacgatgcccctgccctgtgcctgctgcttcggctcggggctgaccctgcccaccaggaccgccatggggacacggcactgcatgctgctgcccgccagggcccagatgcctacaccgatttcttcctcccgctgctaagccgctgtccctccgccatgggaataaagaataaggatggggagacccctggccaaattttgggctggggacccccctgggattctgctgaagaggaggaagaagatgatgcctccaaggagcgggaatggagacagaagctccagggtgagctggaggacgagtggcaggaagtcatggggaggtttgaaggtgatgcctcccatgaaacccaggaacctgagtccttctcagcctggtcagatcgcctggcccgggaacatgcccagaagtgccagcagcagcagcgagaagcagagggatcctgtcgacccccacgtgctgagggctccagccagagctggcgacagcaggaggaggagcagcggctcttcagggagcgagcccgggccaaggaggaagagctgcgtgagagccgagccaggagggcgcaggaggctctaggggaccgagaacccaagccaaccagggccgggcccagggaagagcaccccagaggagcggggaggggcagcctctggcgatttggtgatgtgccctggccctgccctgggggaggggacccagaggccatggctgcagccctggtggccaggggcccccctttggaggaacagggggctctgaggaggtacttgagggtccagcaggtccgctggcaccctgaccgcttcctgcagcgattccgaagccagattgagacctgggagctgggccgtgtgatgggagcagtgacagccctttctcaggccctgaatcgccatgcagaggccctcaagtgaccctagggaagaagcaagaaacttcggggctgcagcctcaggatgaggcagaaggaagggtaagggaaaggatggggaccacaaggaagagccaggtgctgctcagcagaggatatgggtgggagcgaaagttgtaacaagtgggggtggggggtgcgggccgccaccactgctccttgactctgccgtttcctaataagacctggttccacatctcaaaaaaaaaaaaataaagtcatttaaccac

SEQ ID NO: 60017 - DNA, 2648 bp, Homo sapiens
cggtcgacgatttcgtggcccgggtccctgaggcctgagagaggcgaagtggggcccttctgggcgggcgaccagactgactcccgccccacttgctcgcgcaggacgaggcggtggcgcgcgatgtgcagcggttgctagtgcagttccaggatgagggcgggcagctgctgggttccccgttcgacgtgcccgtggacatcaccccggacaggctgcagctcgtgtgcaacgcgctactggcccaggaggatcccctgccactggctttctttgtccacgatgctgagatcgtctcctcactggggaagacgttggagtcccaggcagtggagacagagaaggtcctagacatcatctaccagccacaggctatcttcagagtccgggctgtgactcgctgcaccagctccttggagggtcacagtgaggcagtcatttctgtggccttcagccctacgggaaagtacctggccagtggctctggagacaccaccgtgcgcttctgggatctcagcacagagacaccacatttcacatgcaagggacacagacactgggtccttagtatatcctgggctccagatggcaagaagctggcctcaggctgcaagaatggccagattctcctctgggacccaagcacagggaagcaggtgggcaggaccctcgctggccacagcaagtggatcacaggcctgagctgggagcccctccatgcgaaccctgagtgccgctatgtggccagcagctccaaggatggcagtgtgcggatctgggacacaactgcaggccgctgtgagcgcatcctcaccgggcacacccagtcggtcacctgtctccggtggggaggggacgggcttctctactctgcctcccaggaccgcaccatcaaagtctggagagctcatgacggtgtgctgtgccggactctgcaaggccacggccactgggtgaacaccatggccctcagcactgactatgccctgcgcactggggcctttgaacctgctgaggcctcagttaatccccaagacctccaaggatccttgcaggagttgaaggagagggctctgagccgatacaacctcgtgcggggccagggtccagagaggctggtgtctggctccgacgacttcaccttattcctgtggtccccagcagaggacaaaaagcctctcactcggatgacaggacaccaagctctcatcaaccaggtgctcttctctcctgactcccgcatcgtggctagtgcctcctttgacaagtccatcaagctgtgggatggcaggacgggcaagtacctggcttccctacgcggccacgtggctgccgtgtaccagattgcgtggtcagctgacagtcggctcctggtcagcggcagcagtgacagcacactgaaggtgtgggatgtgaaggcccagaagctggccatggacctgcccggccacgcggatgaggtatatgctgttgactggagtccagatggccagagagtggcaagtggtgggaaggacaaatgcctccggatatggaggagatgagacggcccgaagttctctctgacccccacctcgactcggcctctgccagctgccttccctgccagagaacaaaggctgagatggcagtgcacacaccctccccaccagtggggacctgagaatgcgtgtggcctgctgtcctcgatagaccggaatggggttttcccacagatccccgcctgtggcacaccccagagccagaaatcgaaggtcacaggaagttgtcactgaacttggcccgtgtctgctactctgtaccttgctggtacagacaggggtggtgggcagccaggctctatgagtgggcccctagtgtcagctctgtacagggtcagatcccaggttctatgaccaaataagtaacttaagttttgtgtgttgggttctaattccttgtcctagaatccccatgactcaatcaaggactgtgctaaatgagattgtccagcccccgcccttgcactggactacgccaaaaccacactgaccaggcacttgccttccctctcttcccccgtgttggtaagagagaggccagttgtgatagtggccaaggagaatctagggctgtattgttgtccactgcagtaggcaccggccacatgtgactgctggcatgaaatagaagtgcagttcctccatcgcactgggtaaggcctccagtattggacagcacacagaaaggttttcatcatcaagagagttctgcttggtcaggcctggttccagggggattgccctctgccttcgcatagcacactgccttgaaggccctgcccaggcaccaagcactgccctgggcccatgggatagagcggggaaggtgatggctcttccagaggattccctcagatggggaggcagcagtatgagctctgagcagaagtgggtattgttgatacagaggaagttctttgccacgagaactttcaagcagtgaaaggaattcccatcaggactcagaccccaggccgagatcttgccctgaatgtaccctgcctctgctttctcctgcatcccatgctaagcagggtcatggtctgaactactcagattggatttccaaaccatccttgtataaactgctcagaactaaaaaaaaaa

SEQ ID NO: 60018 - DNA, 1870 bp, Homo sapiens
ccggagccccaggcgctggtggggcagaaacgcggcgccctgcgtcttctggttgcgaggctggtcctcaccgtttccgctccggcggaagtgaggaggagggtccttcgacccgtgctgagctggatggaccgcgagacgcgcgccctcgccgacagccacttccgaggcctgggggtcgatgtccccggcgtcggccaggctccgggccgggtagccttcgtctcggagccgggcgccttctcctacgccgactttgtgcggggcttcttgctgcccaacctgccctgcgtgttttccagcgccttcacgcagggctggggcagccggcggcgctgggtgacgcccgcggggaggcccgacttcgaccacctgctacggacctacggagacgtggttgtaccagttgcaaactgtggggtccaggaatacaactcgaaccccaaagagcacatgactctcagagactacatcacctactggaaagagtacatacaggcgggctactcctctcccaggggctgtctctacctcaaagactggcacttgtgcagggactttccggtggaggacgttttcaccctgcctgtgtacttctcgtccgactggctgaatgagttctgggatgcactggatgtggatgactaccgctttgtctacgcggggcctgcgggcagctggtccccgttccatgctgacatcttccgctccttcagctggtctgtcaatgtctgtgggaggaagaagtggctcctcttccccccagggcaggaagaggccctgcgggaccgccacggcaacctgccctacgacgtgacctccccagcactctgcgacacacacctgcacccacggaaccagcttgctggcccacccttggagatcacgcaggaagcgggcgagatggtgtttgtgcccagtggctggcaccaccaggtgcacaacctggtaatgtgctgcttctcctgccccctatcaggggccttcctgcaggaagacggcagcaccacctccccactctcccagccagagctgggctggaatggggtggctcatgggtgaggctgaccccttcacaaggtggtgtcgctgaggcctagcctctgtttcacccactgccggtccctgggtctacttgctctgggttcactgtggcctgaggtggtccgagcccgccacccacttccctgctgagcaagccctgctgggagacaggagggccctcttggctgcagagggctggaccccacagtgggttcctggcgcaggagatgtgggttggtcagggggcacctgccatgggctcaggcctgcctgcactgtgccccttccaggatgacaccatctccatcaaccacaactgggtcaatggcttcaacctggccaacatgtggcgcttcttgcagcaggagctatgcgccgtgcaggaggaggtcagcgagtggagggactccatgcccgactggcaccaccactgccaggtggggtggctacgcatggaggctaccctcctgggggaggcttttaggctgcatggctcagactcccttggtcaccgcgcagcttctcagtgcctctgtcttaatggtcccttcttcgtccttggggactgggcacatgtcgggtcctttgcagcttggactgtgtccatggtgttagctcactggcctcttccctctgcccaggtcatcatgaggtcctgctcgggcatcaactttgaagagttttaccacttcctcaaggtcatcgctgagaagaggctcctggtcctgagggaggcagccgctgaggacggtgctgggttgggtttcgaacaggcagcctttgatgttgggcgcatcacagaggtgctggcctccttggttgcgca

SEQ ID NO: 60019 - DNA, 1221 bp, Homo sapiens
ttccttctgcatagcgttttatggttcttcactctctcagtttcaggcaggaagactcatcctgagctgagctgcttttcttgaagttgtgcaagaacgtcctgttggctggggcaaattcagtatttcttttcctggccactgtgctggagcgtgaggaaagactctccaccctcactcccagatcctgcaggaggcgtgagagcggatggagatggtgaggatgtctattaatatggtgtttcctgcaaaacggtgcccatctcaaccatgggttgtcaaccatcctcggtgtctacaactgcaatttacctttgagggcccatgaactctgattacctgaaagtccttaggccagaaagagaaacccctgtcccccacctctcactttcacctatttctagaccttttcttacagcaatgccttggccctcaggaagcatcagatctcaaactgcagggtctggggctgaagctgatgctggcatgggtgactcagagttcctctattagttcaaatatgtaatatcttttagagcctaggactcaggctggaggcaattccttggtgccagttggttaatactttatgaatagtggtgggggagggaatgccttggactattaatgtccccatggatctggatcctggagaacttccagtgtcctggatggaatgttctgcttggctcatcttgcccagagaagagccaggatatgagaagatgggagagggaagggggaggtgtgaaacgtgctggtgcttcctgtcctcgtggtgtgatggctgcccaggctgctccttcgaggcaggacaggattcccatgggagatatgaggaccatggtgatttccaggcaccagttatgtcccagagcatcgtgtgcctgtgcagtggggttactgatagtccaggcatcagttcatattgtcctttatggcagatcctgcacaagggggttctctgtctctggacccactctgtcagcatggacatcctttttctttttccctgagcaggggcaccagtgccaggcagagaagagagtaaccagcatcaggagcagcgagacaggcaccaccaccagcagcacatctttgtaggaggccttccctggtgctgcctcatgatgacagctatcccagggcgtgactgtggccaagtcccagctgacagggttggagacaatgcaggaataggccacatctctgtctccggta

SEQ ID NO: 60020 - DNA, 5207 bp, Homo sapiens
ccggatgtccagttcgacccacgcgtccggcctgttgcctctgtgagaaagtaccactgtaagatgtctttggcatgatcattttcctctttcaccctgtctaggttgccagcaaatcccacgggcctcctgacgctgcccctggggccacaggtccctcgagtgctggaaggatgaaggattcctgcatcactgtgatggccatggcgctgctgtctgggttctttttcttcgcgccggcctcgagctacaacctggacgtgcggggcgcgcggagcttctccccaccgcgcgccgggaggcactttggataccgcgtcctgcaggtcggaaacggggtcatcgtgggagctccaggggaggggaacagcacaggaagcctctatcagtgccagtcgggcacaggacactgcctgccagtcaccctgagaggttccaactatacctccaagtacttgggaatgaccttggcaacagaccccacagatggaagcattttggcctgtgaccctgggctgtctcgaacgtgtgaccagaacacctatctgagtggcctgtgttacctcttccgccagaatctgcagggtcccatgctgcaggggcgccctggttttcaggaatgtatcaagggcaacgtagacctggtatttctgtttgatggttcgatgagcttgcagccagatgaatttcagaaaattctggacttcatgaaggatgtgatgaagaaactcagcaacacttcgtaccagtttgctgctgttcagttttccacaagctacaaaacagaatttgatttctcagattatgttaaatggaaggaccctgatgctctgctgaagcatgtaaagcacatgttgctgttgaccaatacctttggtgccatcaattatgtcgcgacagaggtgttccgggaggagctgggggcccggccagatgccaccaaagtgcttatcatcatcacggatggggaggccactgacagtggcaacatcgatgcggccaaagacatcatccgctacatcatcgggattggaaagcattttcagaccaaggagagtcaggagaccctccacaaatttgcatcaaaacccgcgagcgagtttgtgaaaattctggacacatttgagaagctgaaagatctattcactgagctgcagaagaagatctatgtcattgagggcacaagcaaacaggacctgacttccttcaacatggagctgtcctccagcggcatcagtgctgacctcagcaggggccatgcagtcgtgggggcagtaggagccaaggactgggctgggggctttcttgacctgaaggcagacctgcaggatgacacatttattgggaatgaaccattgacaccagaagtgagagcaggctatttgggttacaccgtgacctggctgccctcccggcaaaagacttcgttgctggcctcgggagcccctcgataccagcacatgggccgagtgctgctgttccaagagccacagggcggaggacactggagccaggtccagacaatccatgggacccagattggctcttatttcggtggggagctgtgtggcgtcgacgtggaccaagatggggagacagagctgctgctgattggtgccccactgttctatggggagcagagaggaggccgggtgtttatctaccagagaagacagttggggtttgaagaagtctcagagctgcagggggaccccggctacccactcgggcggtttggagaagccatcactgctctgacagacatcaacggcgatgggctggtagacgtggctgtgggggcccctctggaggagcagggggctgtgtacatcttcaatgggaggcacggggggcttagtccccagccaagtcagcggatagaagggacccaagtgctctcaggaattcagtggtttggacgctccatccatggggtgaaggaccttgaaggggatggcttggcagatgtggctgtgggggctgagagccagatgatcgtgctgagctcccggcccgtggtggatatggtcaccctgatgtccttctctccagctgagatcccagtgcatgaagtggagtgctcctattcaaccagtaacaagatgaaagaaggagttaatatcacaatctgtttccagatcaagtctctctacccccagttccaaggccgcctggttgccaatctcacttacactctgcagctggatggccaccggaccagaagacgggggttgttcccaggagggagacatgaactcagaaggaatatagctgtcaccaccagcatgtcatgcactgacttctcatttcatttcccggtatgtgttcaagacctcatctcccccatcaatgtttccctgaatttctctctttgggaggaggaagggacaccgagggaccaaagggcgcagggcaaggacataccgcccatcctgagaccctccctgcactcggaaacctgggagatcccttttgagaagaactgtggggaggacaagaagtgtgaggcaaacttgagagtgtccttctctcctgcaagatccacagccctgcgtctaactgcttttgccagcctctctgtggagctgagcctgagtaacttggaagaagatgcttactgggtccagctggacctgcacttccccccgggactctccttccgcaaggtggagatgctgaagccccatagccagatacctgtgagctgcgaggagcttcctgaagagtccaggcttctgtccagggcattatcttgcaatgtgagctctcccatcttcaaagcaggccactcggttgctctgcagatgatgtttaatacactggtaaacagctcctggggggactcggttgaattgcacgccaatgtgacctgtaacaatgaggactcagacctcctggaggacaactcagccactaccatcatccccatcctgtaccccatcaacatcctcatccaggaccaagaagactccacactctatgtcagtttcacccccaaaggccccaagatccaccaagtcaagcacatgtaccaggtgaggatccagccttccatccacgaccacaacatacccaccctggaggctgaggttggggtgccacagcctcccagcgaggggcccatcacacaccagtggagcgtgcagatggagcctcccgtgccctgccactatgaggatctggagaggctcccggatgcagctgagccttgtctccccggagccctgttccgctgccctgttgtcttcaggcaggagatcctcgtccaagtgatcgggactctggagctggtgggagagatcgaggcctcttccatgttcagcctctgcagctccctctccatctccttcaacagcagcaagcatttccacctctatggcagcaacgcctccctggcccaggttgtcatgaaggttgacgtggtgtatgagaagcagatgctctacctctacgtgctgagcggcatcggggggctgctgctgctgctgctcattttcatagtgctgtacaaggttggtttcttcaaacggaacctgaaggagaagatggaggctggcagaggtgtcccgaatggaatccctgcagaagactctgagcagctggcatctgggcaagaggctggggatcccggctgcctgaagcccctccatgagaaggactctgagagtggtggtggcaaggactgagtccaggcctgtgaggtgcagagtgcccagaactggactcaggatgcccagggccactctgcctctgcctgcattctgccgtgtgccctcgggcgagtcactgcctctccctggccctcagtttccctatctcgaacatggaactcattcctgcctgtctcctttgcaggctcatagggaagacctgctgagggaccagccaagagggctgcaaaagtgagggcttgtcattaccagacggttcaccagcctctcttggtttccttccttggaagagaatgtctgatctaaatgtggagaaactgtagtctcaggacctagggatgttctggccctcacccctgccctgggatgtccacagatgcctccaccccccagaacctgtccttgcacactcccctgcactggagtccagtctcttctgctggcagaaagcaaatgtgacctgtgtcactacgtgactgtggcacacgccttgttcttggccaaagaccaaattccttggcatgccttccagcaccctgcaaaatgagaccctcgtggccttccccagcctcttctagagccgtgatgcctccctgttgaagctctggtgacaccagcctttctcccaggccaggctccttcctgtcttcctgcattcacccagacagctccctctgcctgaaccttccatctcgcccacccctccttccttgaccagcagatcccagctcacgtcacacacttggttgggtcctcacatctttcacacttccaccaccctgcactactccctcaaagcacacgtcatgtttcttcatccggcagcctggatgttttttccctgtttaatgattgacgtacttagcagctatctctcagtgaactgtgagggtaaaggctatacttgtcttgttcaccttgggatgacgccgcatgatatgtcagggcgtgggacatctagtaggtgcttgacataatttcactgaattaatgacagagccagtgggaagatacagaaaaagagggccggggctgggcgcggtggttcacgcctgtaatcccagcactttgggaggccaaggagggtggatcacctgaggtcaggagttagaggccagcctggcgaaaccccatctctactaaaaatacaaaatccaggcgtggtggcacacacctgtagtcccagctactcaggaggttgaggtaggagaattgcttgaacctgggaggtggaggttgcagtgagccaagattgcgccattgcactccagcctgggcaacacagcgagactccgtctcaaggaaaaaataaaaataaaaagcgggcacgggcccggacatccccacccttggaggctgtcttctcaggctctgccctgccctagctccacaccctctcccaggacccatcacgcctgtgcagtggcccccacagaaagactgagctcaaggtgggaaccacgtctgctaacttggagccccagtgccaagcacagtgcctgcatgtatttatccaataaatgtgaaattctgtcc

SEQ ID NO: 60021 - DNA, 4120 bp, Homo sapiens; identical to SEQ ID NO: 58869

SEQ ID NO: 60022 - DNA, 797 bp, Homo sapiens
tttttttttttggctttgaatgctctattttgccttaaaaatttatttactagtctcagtaatacattagtaaaaatcatgtcacttaattaattgtgttagaatcaaagaaacatagagttcgggcaatatacttcatcctacccatcccacccaaatcttactctactcatctcattctcattaattttgggaaatcatcagaagatgtgttcgttgagtaagagattaaaaagaaataagctttttgacccctggccaacaccccatgcccagggtggtcaccctccaatacaataacatgccaggaagagtaagttgccctttctgatgccgtaatctgccatcatcttcccatcttccagtctctttccattgcaagtcacaatctgggtctcagggattatacccgtcttagtctcgatcattgctttcacttgtgccactgagctggaccttcgcacctggaggaggtgcctctttgcctcatcacctgactccacaagaaacaagggcagctcctcatcactgggcttcaccactttcagggtaaggtggatggtcttctctttgtcaatgccataagatgagaggcttctccgtggctttaagatcttggagcccagcaaaagaacctggtcctgcacaggaaccttggtcttagaccggacatgttctttgatttttttcacgctgtcatatgggttggcatcaaaggtcattaaatcccattcctcggaacggacatgcacacagaggcaggaagcattgggagccatctctgcagacaaggggcc

SEQ ID NO: 60023 - DNA, 1845 bp, Homo sapiens
gtttaaatgatacaacttaattttattaggacagacgctggcggccaccagaagtttgagcctctttggtagcaggaggctggaagaaaggacagaagtagctctggctgtgatggggatcttactgggcctgctactcctggggcacctaacagtggacacttatggccgtcccatcctggaagtgccagagagtgtaacaggaccttggaaaggggatgtgaatcttccctgcacctatgaccccctgcaaggctacacccaagtcttggtgaagtggctggtacaacgtggctcagaccctgtcaccatctttctacgtgactcttctggagaccatatccagcaggcaaagtaccagggccgcctgcatgtgagccacaaggttccaggagatgtatccctccaattgagcaccctggagatggatgaccggagccactacacgtgtgaagtcacctggcagactcctgatggcaaccaagtcgtgagagataagattactgagctccgtgtccagaaactctctgtctccaagcccacagtgacaactggcagcggttatggcttcacggtgccccagggaatgaggattagccttcaatgccaggctcggggttctcctcccatcagttatatttggtataagcaacagactaataaccaggaacccatcaaagtagcaaccctaagtaccttactcttcaagcctgcggtgatagccgactcaggctcctatttctgcactgccaagggccaggttggctctgagcagcacagcgacattgtgaagtttgtggtcaaagactcctcaaagctactcaagaccaagactgaggcacctacaaccatgacataccccttgaaagcaacatctacagtgaagcagtcctgggactggaccactgacatggatggctaccttggagagaccagtgctgggccaggaaagagcctgcctgtctttgccatcatcctcatcatctccttgtgctgtatggtggtttttaccatggcctatatcatgctctgtcggaagacatcccaacaagagcatgtctacgaagcagccagggcacatgccagagaggccaacgactctggagaaaccatgagggtggccatcttcgcaagtggctgctccagtgatgagccaacttcccagaatctgggcaacaactactctgatgagccctgcataggacaggagtaccagatcatcgcccagatcaatggcaactacgcccgcctgctggacacagttcctctggattatgagtttctggccactgagggcaaaagtgtctgttaaaaatgccccattaggccaggatctgctgacataattgcctagtcagtccttgccttctgcatggccttcttccctgctacctctcttcctggatagcccaaagtgtccgcctaccaacactggagccgctgggagtcactggctttgccctggaatttgccagatgcatctcaagtaagccagctgctggatttggctctgggcccttctagtatctctgccgggggcttctggtactcctctctaaataccagagggaagatgcccatagcactaggacttggtcatcatgcctacagacactattcaactttggcatcttgccaccagaagacccgagggaggctcagctctgccagctcagaggaccagctatatccaggatcatttctctttcttcagggccagacagcttttaattgaaattgttatttcacaggccagggttcagttctgctcctccactataagtctaatgttctgactctctcctggtgctcaataaatatctaatcataacagcaaaaaaaaaa

SEQ ID NO: 60024 - DNA, 2238 bp, Homo sapiens
cctgcaccttcgccccgcgtacctactcctgccccgccctgccattcctctcccctcccttctctctgcgacccctccctgttaggccccagcctcttctcccctcacaggtcttctctgtcctggcctcaccgccttatcctattcctctcccttgccctgtgtcttgtctcagagccccctcggggtgggagtaggttgtggagcagcacaactgggctcaccccaaagcagaacttctcaatccatgaggacaatggggaggcctttaggccagcccacatgtgacaatggagggctgcggcttccttgcggagagcacaagtgagctcactgccctggactccagggaatcagagttctggccgcggggtgacccagctcctctgctaccatgaatagggcccctctgaagcggtccaggatcctgcacatggcgctgaccggggcctcagacccctctgcagaggcagaggccaacggggagaagccctttctgctgcgggcattgcagatcgcgctggtggtctccctctactgggtcacctccatctccatggtgttccttaataagtacctgctggacagcccctccctgcggctggacacccccatcttcgtcaccttctaccagtgcctggtgaccacgctgctgtgcaaaggcctcagcgctctggccgcctgctgccctggtgccgtggacttccccagcttgcgcctggacctcagggtggcccgcagcgtcctgcccctgtcggtggtcttcatcggcatgatcaccttcaataacctctgcctcaagtacgtcggtgtggccttctacaatgtgggccgctcactcaccaccgtcttcaacgtgctgctctcctacctgctgctcaagcagaccacctccttctatgccctgctcacctgcggtatcatcatcgggggcttctggcttggtgtggaccaggagggggcagaaggcaccctgtcgtggctgggcaccgtcttcggcgtgctggctagcctctgtgtctcgctcaacgccatctacaccacgaaggtgctcccggcggtggacggcagcatctggcgcctgactttctacaacaacgtcaacgcctgcatcctcttcctgcccctgctcctgctgctcggggagcttcaggccctgcgtgactttgcccagctgggcagtgcccacttctgggggatgatgacgctgggcggcctgtttggctttgccatcggctacgtgacaggactgcagatcaagttcaccagtccgctgacccacaatgtgtcgggcacggccaaggcctgtgcccagacagtgctggccgtgctctactacgaggagaccaagagcttcctctggtggacgagcaacatgatggtgctgggcggctcctccgcctacacctgggtcaggggctgggagatgaagaagactccggaggagcccagccccaaagacagcgagaagagcgccatgggggtgtgagcaccacaggcaccctggatggcccggccccggggcccgtacacaggcggggccagcacagtagtgaaggcggtctcctggaccccagaagcgtgctgtggtgtggactgggtgctacttatagacccaatcagaatacggtggttgagaaggaaccagtgtttacaagtaatatcagaaagttgaaggaaccagtgtttacaagtaataccagaaagttgccaaacccttctctatcctctcgtatttctgagtttttgtccttcccgagggagcaccctagtgagagttgaaccccttccttctgcctccagggcctgtctgcctccacatcactctgaggacagggacaggcaacaaccttgaagggacagcaatggcaaagccacaaaggcttcactgtactcaggggagatggccctaccacagccacctggagagggttgggaagccttccgtctgcggtgggcaggcagcctcaccctgggcccacagaccggccttcctttggaggaaagtgtggcctggactgagggaggaaatgagcgagttccctctgacaccagcagatccccaggggctgctgggcagtggcctgggaatggggtggattgtgagaaagtgctcaccatctatacaccctgtatgtccagcttttgaacacaagggaaccatgcttctctttagaggtttaaagcagggtcatttaacatcctcccccagtccctaacatcacattgtcctgcgtg

SEQ ID NO: 60025 - DNA, 3625 bp, Homo sapiens
  misc_feature (1)...(3625): n = a,t,c or g
gcggccgccgcgagtctggtatcctgagcttcgtgagttgagcgctgctgctccgcggtggagtcaccgcaccgctcccgggatcatggtgttctacttcaccagcagcagcgttaattcatctgcctacactatttacatgggaaaagataaatatgaaaatgaagatctgatcaagcatggctggcctgaagatatctggtttcatgtggacaaactctcttcggctcatgtataccttcgattacataagggagagaatatagaagacatcccaaaggaagtgctgatggactgtgcccaccttgtgaaggccaatagcattcaaggctgcaagatgaacaacgttaatgtggtatatacgccgtggtctaacctgaagaaaacagctgacatggatgtggggcagataggctttcacaggcagaaggatgtaaaaattgtgacagtggagaagaaagtaaatgagatcctgaaccgattagaaaagaccaaagtcgagcggttcccagacctagcagcagagaaagaatgcagagatcgtgaagagaggaatgagaaaaaagcccaaattcaggaaatgaaaaagagagaaaaagaagaaatgaagaagaagagggaaatggatgaacttaggagctattcatcactaatgaaagttgaaaatatgtcttcaaatcaggatggcaatgattcagatgaattcatgtaaaaggagaaaaggagaaaaggacctttgaaagatgtgaatgtagagacaattgcagaccttttggtttcatctgtgttctgaagtataaaatacaaccaaaattctaccttcatcctacccagaaattattgattttcaagttttaaaaaaattgtaccttttttgctgacagaaaaggatcagatatgtataaaatagttgaacttgacagcatataacttaaagtgaaaatgtttttgccagaacatgtcttggtaccttgtgaaagcaggctgcccttgttcttgagatagactttaaaatgaaccagctctgaaaagtacttctgctgctctggtctatccctgaaaacagatgtcttgaaacacttttcatattcttaaaataatcttcacttctgttaagaagaacatgttggtgggtaattatgcgaatgtttccctgtccctgatttctcgattaggcgtatgggttttgaaaaagagatttttcagaagattgtcagcttcagtattcacgttccatcgtgtcatctgggtctgttagtgtagtgaccctcagtgcagtctgtcccagcgtttatgtccttgcttcctctgagcagaggcctccatcttagtatcaacatatttaaagaaattgatggtgttcatcaagctggggcctgtggcagttgttgcctgagcaccaagtaacccaagccacctatgtgacaacttctgggcccaggagtaatttctcagcattgagggtaaaataggatggagtgctctgttgatcatttgggagatgtaggttacctgatttgtgccttaggatgcagcgtgaagcagaagtccatattgcaattatgattttagaaggaactaagcattttactcacacccacagcagcaagaatgacttcctgcagcagatattccacctgtaatagcactttggaactgtgggcaaaaccaaaaggctagtgtttccatttattccatgttggtgtatggggttgaactggaaaattccctgaggcaaaactcactggccaaattttgagagggtatagaaaatgactttagagatgagtggttttgtgtatgtgtctgatgatattcagtctgatgttccgcaattttaaaagttataataaaataccatttttttaatctggaaggacattgatatatgaattcttagaatttgctattaaaaagggtagcccccattccacaagctggttttgagggtgatcttgctctaaaaaacctcattcatcataggctcagtctgacaggttctgtacggggctatcatctttctcctcctctgctaaatgcctctttcttccagctgctcactgggtcaaagggatgtcctttctcagatgtattcttgatacatctcagatgtattcgtagctgtgctccttccatacttccaaggagtccggcttctacagaattcctctgtacctcacactgcaacacatgtagatagcgcttttgaaaaatacatatatttttactatagtatgagaggtcctggggctcaaactttaaacatttcctaactcagcttacactggtttaaaatgtccaggtctctgctgaattctcttgttgaattcatagctctgtgttgattcctatgcccctaaccctgcagcctctttgttttatttttttccccatctctgttggtcccagggaaagcaaggaaattttcttttgaggacttataggttgattgcccacaggtcaaactgttggcattgaactcctctcatttcttgccattggattgtttcctaaacgttggataggagaattcgaaattgttgctatttttatgagctgtgcccttgatcaaatctgtgctgtgggtctgagtcactttgccaatgtcgtcttcagtttcaacactctgatcagcatgcaggcgaggggcatgtttaatttacttcactaactgctatattctatagctttagacttcatatttcttatccacctttgtctaggctcacgatctttgggcaagggagctttgtcaccgtggttgggctagaacaaatattgagaagtttaccaacacagatgttgagaagtttattgaaaggcactgacattagcagaataagtgatggacattagttgaaccccttcagtgtctatgtgttttattgtattgtctttaactcgttcttgaagcacagatttcagcgagcctttcagctattcagtgccagcggttttccccactcaggaaagatggtgtgagccatacacacagcaggattagacggggagagtttcagctgcagcttctagtttaagaccaaagcccttcctcccgctgctgcatctgtctgagaggggaagctcttgttttccaagctggaaccgtttatgaggaaaactgagcagggtggcaaaatggaaaaggaacaattttctagtttttcctacgcgtgatattgaggcgtgctttttctttgatttgaggtacagcatgtaaataacaaatttccatattcaaaatgatcatattagagtgactgagtgaccttttggatttttgaagcagacttaaaatctgaccagaccacaatgaaaagtataaaattagaaactttaaattccaagctaaatttcatgntcagctttgacccaccttaactccagtgaataggtggcagctcagaaacaaggacagcactgctgcttgccagagcaagcttcacatccagctgggcacttcgtgagagctccttcctgccgggcacgtgtgagttcagcgtgggcaagagacttttatgcacattctgtcattcaaaagggaaatgatgccaaccccagatgcagcatgtcctgaatgaatgatctgtaaaatacaataataaaagcttatagtttgagtaga

SEQ ID NO: 60026 - DNA, 721 bp, Homo sapiens
atcaccatgcagagcaagcgcccatccaatgctaggcggagccaccgtcttttgcagaacaattgtgcaggttccaaagcctcggaaaaccggagaggcgcatcttgccggctacggttgaaacccgttcactgggtgattctgaagctagaagggcagccgaatggccttccccccgtcctgcccctcgtccactgtaagctcaggggggagcgggacccagggaggtgaagtgcacagactcggcagaggcggcgggcagaaccgcgggggtgagagggcgcggtggctgtggggcgggagccgctgctgaaaggaggcctgggttgttgggagggtgactgtccgtggaatctttggcggagggtggtttggaagaatggcgaggggagagcagaggagaaggtggtgaccctgatcgtccgccaggggagagtaggctgtgctgtccctcctctccccttatgtggcgggggacatacagtggtcaggaagggggttctccccggaggaggctagtccaccacacttcggctccgctgacccctgcgatttctccacatgcggggccctcgtccgcggtggtgtttgcgctatccggcggctgggttcgcgcactcactctcctgacatgccttggctcaccgccgacgcggatatcgccgccagggacccttcccgccctcctacaaatcttgagtgcgcttccttggtgttctca

SEQ ID NO: 60027 - DNA, 2008 bp, Homo sapiens
  misc_feature (1)...(2008): n = a,t,c or g
cggaatttccgggtcgacgatttcgtcccggtacccggagcggctctgattcatggtttaacttgtggccctaaagaactggaaacccaaaggaacgaatattcctgccccacagagtcccgtctttggtgaggctgtttctggagtttacatgatgaccaaggtactaggcatggccccagttctgggccctaggcctccacaggagcaagtggggcctctgatggtaaaagtcgaggagaaagaagagaaaggcaagtaccttcctagcctggagatgttccgccagcgcttcaggcagtttgggtaccatgatacccctggaccccgagaggccctgagccaactccgggtgctctgctgtgagtggctgaggcccgagatccacaccaaggagcagatcctggagctactggtgctggagcagttcctgaccatcctgccccaggagctccaggcctgggtgcaggagcattgcccggagagcgctgaagaggctgtcactctcctcgaagatctggagcgggaactggatgagccaggacaccaggtctcaactcctccaaacgaacagaaaccggtgtgggagaagatatcctcctcaggaactgcaaaggaatccccgagcagcatgcagccacagcccttggagaccagtcacaaatacgagtcttgggggcccctgtacatccaagagtctggtgaggagcaggagttcgctcaagatccaagaaaggtccgagattgcagattgagtacccagcacgaggaatcagcagatgagcagaaaggttctgaagcagaggggctcaaaggggatataatttctgtgattatcgccaataaacctgaggccagcttagagaggcagtgcgtaaaccttgaaaatgaaaaaggaacaaaaccccctcttcaagaggcaggctccaagaaaggtagagaatcagttcctactaaacctaccccaggagagagacgttatatatgtgctgaatgtggcaaagcctttagtaatagctcaaatctcaccaaacacaggagaacacacactggggagaaaccttacgtgtgcaccaagtgtgggaaagctttcagccacagctcaaacctcaccctccactacagaacacacttggtggaccggccctatgactgtaagtgtggaaaagcttttgggcagagctcagaccttcttaaacatcagagaatgcacacagaagaggcgccatatcagtgcaaagattgtggcaaggctttcagcgggaaaggcagcctcattcgtcactatcggatccacactggggagaagccttatcagtgtaacgaatgtgggaagagcttcagtcagcatgcgggcctcagctcccaccagagactccacaccggagagaagccatataagtgtaaggagtgtgggaaagccttcaaccacagctccaacttcaataaacaccacagaatccacaccggggaaaagccctactggtgtcatcactgtggaaagaccttctgtagcaagtccaatctttccaaacatcagcgagtccacactggagagggagaagcaccgtaactttcaagcgctcctgttgttgtcgttgttttaaactttagaatctgaaaaccagaaagaagtcttgtcattgcagcagcatcgattccggtgatagagtttgtatcactcaacatcaggggatgcctgaggagtgcgagctccacagcaacatggcaggcaggaggtcctcagaaggtgtcaggaggttccacactcgccagttcactggagcagagtcccttcgccacacttagggtcccaggacatggccatagggtgagtctgttcccactgggcccactgagatggatttgggccaggactccatttatcagctgacctgtgtctggagggcaatggntcatcactctgctatcttctcctggagtttacacaagcccttcagagtgtaaacaccgatgtggattcaatcccactttcggagagaggatc

SEQ ID NO: 60028 - DNA, 1333 bp, Homo sapiens
ggaagagccgtcaacttagcgagcgcaacaggctgccgctgaggagctggagctggtggggactgggccgcaatggacaagctgaagaaggtgctgagcgggcaggacacggaggaccggagcggcctgtccgaggttgttgaggcatcttcattaagctggagtaccaggataaaaggcttcattgcgtgttttgctataggaattctctgctcactgctgggtactgttctgctgtgggtgcccaggaagggactacacctcttcgcagtgttttatacctttggtaatatcgcatcaattgggagtaccatcttcctcatgggaccagtgaaacagctgaagcgaatgtttgagcctactcgtttgattgcaactatcatggtgctgttgtgttttgcacttaccctgtgttctgccttttggtggcataacaagggacttgcacttatcttctgcattttgcagtctttggcattgacgtggtacagcctttccttcataccatttgcaagggatgctgtgaagaagtgttttgccgtgtgtcttgcataattcatggccagttttatgaagctttggaaggcactatggacagaagctggtggacagttttgtaactatcttcgaaacctctgtcttacagacatgtgccttttatcttgcagcaatgtgttgcttgtgattcgaacatttgagggttacttttggaagcaacaatacattctcgaacctgaatgtcagtagcacaggatgagaagtgggttctgtatcttgtggagtggaatcttcctcatgtacctgtttcctctctggatgttgtcccactgaattcccatgaatacaaacctattcagcaacagcacataagccttgggtgcaagtgattcccaggtggcaaaaggcagccccatcagagatcacgggagcaacagtaagggacagagttttggggtccacttgtccctcagcatggaagccatcaccgtggtcctgcatagagtgagtctacttctactctggcatctgagaacaagtgactctgctttagacaagcccctggagagcctggccatggagtgaggtagaaaagaagcactttttggtggtatatgctgtttctgaatttgaatctaagcattcttggtgttctgattctgcgcctgactgtggaatgtattttctgacattaggtgcagactctttttctcttgggttttatttcccatccctccctccctctccctgcatatctttctttatgacctcctggcactagatggggaaagaacagagcagcagcagcagaaaatgctgctgttttttttggaca

SEQ ID NO: 60029 - DNA, 1209 bp, Homo sapiens
tttcgtggactagtccctgggctgcagccgctgctacacatactcacaacgctgccgccgcgctccgtgggcaactcctactactgctgggctgggctgggctgggctgggctgcgccggagctcgcctgcacagatcagctccggagaggggaaaaccacgctcctcggaccaagcctcgggagctaagccagatctgccagtgagcctcaggctttaggaactgaagagtgtttctgaaagatctatccagcactccgatggccagcaacaacaccgccagcatagcacaagccaggaagctggtagagcagcttaagatggaagccaatatcgacaggataaaggtgtccaaggcagctgcagatttgatggcctactgtgaagcacatgccaaggaagaccccctcctgacccctgttccggcttcagaaaacccgtttagggagaagaagtttttctgtgccatcctttaagtctttgagaggggcctgaagagcctccgggctcctgggacattgatgtagagtttttagtgaagtgggcacctttctagtccccgggcatttgaaaagagcgaggagaaccattctggaaactttaggctatgcatgtttaaagatctggtcccctttatgagaatgcaagccgatccccatcctgacttaagagatctgattctgacgaactgcctggaggaggggaatatataaaaataaaattggtgtcacttcttttttgctatcccccagccccccccccccaaaatcctcatgtttctgcttcatattttgaaaaataacaattaaaacagacagctgtactgaggtaagatatgtgtgaccttcttggaatgaatattgtctttagaataccctttgataagctgagctgtcccgtgtagatgcaattcggtttaatggcattgatgtatagtcactgtgcctttctttttctttcttccttctcctctacccctccttccacccctccccattagagtagtgtggagataaggctggactggtctatcagattgaactccaagaatgatcacacaaaatgtttagggagatgttccccgtggtgtatcctcatggtaacaacgacaaaaaatgccggttgtctttgttctcttttcactattcctaacatgggtacatgatagctttgattctgcaagtaaaagtaaatcctgtgttgtgaaaa

SEQ ID NO: 60030 - DNA, 1699 bp, Homo sapiens
gctgcgggccggtgaagatatggcggcgtctgcgtctgcagctgcaggggaggaggactgggtccttccctctgaagttgaagtattggagtccatctatctagatgaactacaggtgattaaaggaaatggcagaacttcaccatgggagatctacatcactttgcatcctgccactgcagaggaccaggattcacagtatgtctgcttcactctggtgcttcaggtcccagcagagtatccccatgaggtgccacagatctctatccgaaatccccgaggactttcagatgaacagatccacacgatcttacaggtgctgggccacgtggccaaggctgggctgggcactgccatgctgtatgaactcattgagaaagggaaggaaattctcacagataacaacatccctcatggccagtgtgtcatctgcctctatggtttccaggagaaggaggcctttaccaaaacaccctgttaccactacttccactgccactgccttgctcggtacatccagcacatggagcaagagctgaaggcacaaggacaggagcaggaacaggaacggcagcatgctacaaccaaacagaaggcagtcggtgtgcagtgtccagtgtgcagagagcccctcgtgtatgatcttgcctcactgaaagcagcccctgaaccccaacagcccatggagctgtaccagcccagtgcagagagcttgcgccagcaagaagaacgcaagcggctctaccagaggcagcaggagcgggggggaatcattgaccttgaggctgagcgaaaccgatacttcatcagccttcagcagcctcctgcccctgcggaacctgagtcagctgtagatgtctccaaaggatcccaaccacccagcacccttgcagcagaactatccacctcaccagccgtccaatccactttgccacctcctctgcctgtggcgacccagcacatatgtgagaagattccagggaccaggtcaaatcagcaaaggttgggcgaaacccagaaagctatgctagatccccccaagcccagtcgaggtccctggcgacagcccgaacggaggcacccaaagggaggggagtgccacgcccctaaaggtacccgtgacacccaggaactgccacctcctgaggggcccctcaaggagcccatggacctaaagccagaaccccatagccaaggagttgaaggtcctccacaagagaaggggcctggcagctggcaggggcccccaccccgcaggactcgggactgtgttcgctgggagcgctctaaaggccggacacccggttcttcctaccctcgcctgcctcggggccagggagcataccggcctggtactcggagggagtccctgggcctggaatctaaggatggttcctagcaggacttggtggggggaacagggaattggggatgggagggaggcaataaagatatttggccttctttggctttctttgcttagcagcgcctagcctgtgaggaatggctctttttctcaattcctaataagattggggtgtggcagagcagcccccaactttgctctgaagtctgttctccgaagagctgggtaaagagggtctgacatctcatcagctagtatagtgagtttcagggaaaactattgggatgtctgcatgtaagcagagtccttaggacccaccgttaacaactcatt

SEQ ID NO: 60031 - DNA, 1544 bp, Homo sapiens
ggtcgacttttttctttctcctctttttgagacggtctcactctgtcacccaagctggagttgcagtggcgtgatctccactcactgtagcctctgcctcagttcaagcgattctcctgcctcagcctgagtagctgggactacagtggtgcgcctggctaatttttgtatttttagtaaagacagggtctcaccgtgttggccaggctggtctcgaactcctggcctcaagtgatccacccaccttgctcagcctcccaaagtgctgggattacaggcctgagccaccgtgcccggccatgttgcttttataattgagatatttcatttgttttgggggttaggcaaatttaatttgccattcctcaaactcagtaacttcaaatataaacaatgcctagaatgaatatggttcctcattatttctatcaaactactacaaatactgaagaatcccaaagtagttttccacagaggcagaaaagcagttcaggggttgaaaatcttcaatattaataagccctgggacattcaaatggcacttcatatttcaaggtaatgcaatatgaatcataattcattatatattgtccccaagagttacttcaattccgtattcaccagttcttacgatttggaaaaaaaaacttgaatgtttccagatgaaatgtaatccccaagccttgtgtgtcaacattctagtgaatctctatttaaatgagaggcgctccaaaacacttcctgcaccactcgacactggcacttggtggagcatcaattttctgcaacctttcaagaatctctgaagacagactattgtatgcaattccatattcattgtcaaatgcctcaatatcaatattctctcttcctagagacactaatgataagaagaggatttctctgtataaactcctttgtcttttcatgcctggcttcatttgctgtgaaagtaggttgatgggtttaagaacattattgtgctgaatactctgcctgatggtttctactaaagtgcttgtttcttgttgttcctctgacaggagagatgatttcttttcagaattaaaattcctccatgagacatacagaggttctcttggttcctgatgaaggttgatattatcccataacagctgaatatacacaagtttgctatcctgggacagagatgacagaggaagctgtacaccttcattacaatgttcagatgtgaggataagtcctggcaagttactaggaaggtccaaacgtctgaaataccaaacgagggtccagaaaatgattggatgttgattgatgaaagaagatgtatgaatcacctgatcaccttcattttctagcaaagattcaagttctttacggagtactagaggactcaagtagggcacagaaacaggggagcagtgggtctttgtcgtaaagcatcagcatcttcccgcacactacgtggtagactgacggccaggatgccatgtatcggtcgctggatagagtcaatattctgcagcgggcctgcgtcactgtgcgtacgtgttgttcag

SEQ ID NO: 60032 - DNA, 1295 bp, Homo sapiens
ggaaataccgcggcgcggacggtagttgctgtggtttccgttctgagctcgcagcttaggagctgaagatcgcggacttagcgttgccgcgtccgagtccggccatcagtggctgcagatccggaggccaggagctcaaccacccttcttcggaacagggccggcctgctgctgtgccctcgacgctcggtgcctgtatctactccggggcctaggtcggctccgggggcggcttaggagaaggccgccggcgagatgttcaaaaacacgttccagagcggcttcctctccatcctctacagcatcggcagcaagcctctgcaaatctgggacaaaaaggtacggaatggccacatcaaaagaatcactgataatgacatccagtccctggtgctagagattgaagggacaaatgtaagcaccacatatatcacatgccctgcagaccccaagaagacgctgggaattaaacttcctttccttgtcatgattatcaaaaacctgaagaagtattttaccttcgaagtgcaggtactagatgacaagaatgtgcgtcgtcgctttcgggcaagtaactaccagagcaccacccgggtcaaacccttcatctgcaccatgcccatgcggctggatgacggctggaaccagattcagttcaacttgctagacttcacacggcgagcatacggcaccaattacatcgagaccctcagagtgcagatccatgcaaattgtcgcatccgacgggtttacttctcagacagactctactcagaagatgagctgccggcagagttcaaactgtatctcccagttcagaacaaggcaaagcaataactggaattgtgactcgagggatagacccctggatgtgactcttctttttaaaaggaaactatgtggaggacgatgcaaaaacatatttatcttagtttgctctgcctgtagttctgttatttatacttggtgttgccttgtcatggacaccggtgaacatgcccgtaactctgtgactgccattgtaagtgccagtgggggtaagccagtcctgtgagtggcgcatgaaacgctggagcttattccgccgccctgccccccagtgtggggggagataccttttaccatgaacttacagaattaaagatggcccataaaggaattcccagaaccaatatttcttcctgcgggtttattctatgttttatatattatctaaatatatgtatatgctgtgtcatactcataatcgtggaaatgaataaaagtgaatatattcctggtttgtaaaaaaaaaa

SEQ ID NO: 60033 - DNA, 783 bp, Homo sapiens
tctgcctctgaccctccttctcgctgctccctttgcccatctgctcctcccacctggccatgaccaaagcccgtgctggcaccctggcccagctctgagtcctgggaccctcggtcctctctcctgggccatggccaactcaggcctccagctcctgggctacttcttggccctgggtggctgggtgggcatcattgctagcacagccctgccacagtggaagcagtcttcctacgcaggcgacgccagcatccagctgaggtccaaggtctttgtcctagaatcagagtggggaggggacagcctggggctgcccagagactgtgggtggagctgcctgctgcactcagcagtgcggtcagagaagggcttttggtcttgaagtccaggtaccatccccccttagcatacagggggaagggcctgagaggaatgtaaggaaaccagcccagatcagtcccaaggccagagtcctttgtcctacatctccctgaaccagagtgtgccctgcccctcatgctcagacctctcccaccccaaaccctctcccgggactcagtctccctggccactgcgtatcaggcttctggggaaagcatccatcacagaacctccccttccctgccacgcaccttccttggccagctccattctggcctcctccaccacctgccttgtgaccacatctcccaccacgtccccagatctcaagaacgcagctcagcttctccttcgagcttgactcttaagagggaaaagtgacggaaaccaattcagatgaag

SEQ ID NO: 60034 - DNA, 1325 bp, Homo sapiens
cgtccaaaggagttttattggggagagccacgagggttttccgatccagcccggttaaaaccccgcccccgtatttgttttgttgggccccctttaaaaaatatttacgtcgcactcccccggtttgttaactgttctccctatagccggcccccccttttttttttttgagacagggcctcactctgtcacccaggctggagtggaatggcctgatcaccgctccactgcagcctaaatcccctgggctcaagtgatcctcccacctcagtctcccgagtagctgggactacaggcacttaccaccactccacgctaatttttactgtttttatagagacgaggtctcgccatgttgcccaggatggtcttaagctcctggcctcaagtgatcctcccatcttggcttcccaaagtgctaggattacaggtgtgagccacctgtagaccccagatctgtcccccaaggacactcaacatgctggggcctgtgttatcgatttattgcagctccaatatgagtccactcctactcaaaccctgattctcaggggcctggggaaggccaccccactaggggccctgtccccaccagagcctggacatgggactctctcccaagcaggggtgttgtccttcacaggggcttccacgtctctcccgggcctgtccgcactctgggcagggctggcacctggctattccctcaatctgggccctggggccatggcaatgtggaatggtccaggtgttcatgtcagtggggcttggggacatggccatccacgtagaagttcctggtgatcttgggcagggtgaattccgctccttccagctccggtgtcagcacaatctggcagcccagccgcgagttctcctggaggaggggggccatgtctagcatgtcgtcttccctctcctcgggaggaggcaggagatccaggtggtcttcactcacatacacatggcaggtggagcaggccagggaggcttcacaggccccttccaggtccaccccgtggcgctgggccaggtgaagaacattgtccccgactctgccactcactgggatccgctggcctgagcggtctacgaacaccacgttcaccacgtccccgggccgctccgggccgcccgcgtcctcctctccagccgggcgcgagcctgtcgcttgaaactttctggttgtccccagcgccaccccctcccccgacccggaagtgcccccaggtctgttccaccaggtgcccctggcagcctgcagcagaaccctggcactcacgcctccccgggccatggaggcggccatgacatgcatcacgtga

SEQ ID NO: 60035 - DNA, 867 bp, Homo sapiens
ttttttttttttccaaatactgtttacttcactaaaacctggagtgaggcagggaaaaggtacatcaatgtctgagacaccaagcctaggagtgcacattgacaacggcgacatacagggccaaagtgctgagggccagcagccccgttaccactgctcgggccagtagagctgcccaactgcccagcgagcagaggtggacgaaggtctccataacaaaggccttgtagacactgaggaacatcagcaggaggacagctggccggaaggtgtggtacagatcatagcgtgttatcatccagacctgagcagacgcgacgatgtaatggaccagactgatgttggagtctatgctcatctggatgtacttccagtcaaactcaatgccccgggctccgacccataggggaatgcagcgggacataataagctcagcagtggcccagcccagggcagcaaccatgatcttgtactctcccttgccggcattccgggacatgacaaggtttagacctatcaggtctgccacatccacgctggccttcatgaactccccaatgaagtcatagatgccgccttcccaggtgggaaagaaagtggccaagaacagcatcttgcagagttggacaaagaggtaggtgactccagcctggacgcatttccagaaggcgttgtactcggacaggccgctgcacttgtaggtgatgaagtaggggaagtaggcaagagcgaagcagttcccgaagtgaaacagggtcatgatgccggccgcccggtcccgcccgcgcggggatcgcgaggcggcgtctccgggagcgggtctccggctccgccggctctttcgccacggccagggcctggcaccca

SEQ ID NO: 60036 - DNA, 2645 bp, Homo sapiens
  misc_feature (1)...(2645): n = a,t,c or g
ttttttttttttgactgaactaagtggcttttttattagagaaagccagaattacaaaagacttaagagttggcattggggcccttcttcttgccaaaggtgggcacaacgttgacaaagcgccggttgtactgcatccgccgcttagcccgacctgtcttcttcttcttcttctcctgtttggccaccttaggagtctgacctctcacttttccagcacgggccagggaaccatggactttacctccaagcatgcggcctgctacttccagggtagtcagggcctccaccccgcactggcccagagtggcctcatcctccaggggcgcgcctgccaggagcacgacttgatcttccggggcaatgccctccagtgaggctacatgagccttgatctgggcgaccgtttcctggccggtgctggaaaagtgacaggtcgggctaagcggcggatgcagtacaaccggcgctttgtcaacgttgtgcccacctttggcaagaagaagggcaccacgttcaccaagatcttcgtgggcggcctgccgtaccacactaccgacgcctcgctcaggaagtacttcgagggcttcggcgacatcgaggaggccgtggtcatcaccgaccgccagacgggcaagtcccgcggctacggcttcgtgaccatggccgaccgggcggcagctgagagggcttgcaaagacccgaaccccatcatcgacggccgcaaggccaacgtgaacctggcatatctgggcgccaagccgcggagcctccagacgggctttgccattggggtgcagcagctgcaccccaccttgatccagcggacttacgggctgaccccgcactacatctacccaccagccatcgtgcagcccagcgtggtgatcccagccgcccctgtcccgtcgctgtcctcgccctacattgagtacacgccggccagcccggcctacgcccagtacccaccggccacctatgaccagtacccatacgccgcctcgcctgccacggctgccagcttcgtgggctacagctaccctgccgccgtgccccaggccctctcagccgcagcacccgcgggcaccactttcgtgcagtaccaggcgccgcagctgcagcctgacaggatgcagtgaggggcgttcctgccccgaggactgtggcattgtcaccttcacagcagacagagctgccaggccatgatgggctggcgacagcccggctgagcttcagtgaggtgccaccagcacccgtgcctccgaagaccgctcgggcattccgcctgcgccctgggacagcggagagacggcttctctttaatctaggtcccattgtgtcttgagggaggactttaagaatgactgagaactatttaaagacgcaatcccaggttccttgcacaccatggcagcctctccttgcaccttctcctgcctctccacactccaggttccctcaggcttgtgtccccactgctgcatcgtggcggggtgtcacagaccctctgcagcccctggctgccctggactgtgcagagatgcctgactccagggaaacctgaaagcaagaagttaatggactgtttattgtaacttgatcctcccgagctgtgagcgcagtctgaggtgtgaggacacggcctcctgttggagtcccattttctccatcagggcacgtgggcggcttcctcaagcccggaggagctcccaggcgcacaggggccgccggtaacaggggccgccggccaaaggcccctttccagtcatagcactgaagttgcaacttttttcttgtaattgttttgctactaagataatttcagaagttcagtctattttttcagcggatactgccgccaccaagaatccaaaacctatttttgacttggagagacttgcttttgttggttccgcccgtggagacgacgatagtgtttctgtataataaagtgtctgccggctcgcgggccaggatcctctcggtgggatgggcaccacagacaggaggcccctcaggcccgtgcgggccactgtctgctgccgcctgccggggtggcagagtgagttgtctcaggaccccgtcactgcgacgttgacactcctctcccttcccttcctccccaactccccaaacactgtggaaggggagaaggaagtgatccacagcattcaggccacttggggtctagaccatggtggtgccagcctggggggggcagtggccctcagctctgcccgctggagcggttgagtgcagaagggtgcgcctcttccctctacccccgcaccacctggctgttgtgccaagcctgagacggtttccttgcctgtcttgggggttggtggagggtggaggccagtttcttcccaacccgtggcagggctgctaatggggcatcccaagggctgttgggggtctggaaggaggggacattaaaggtagagggtatccctggccgagggcggggggacagcgngggggtctccccctccggacctacctcagggagctgagcgtgcaggcgctcccagggcaggcctgggacagagtcaaggctcagagaataaaggtagctaatctcatcataatatttttattagaatgttctgatgataaaaataaaacttgttttctttaaagaa

SEQ ID NO: 60037 - DNA, 1227 bp, Homo sapiens
ttttttttttttgagcagacaaatctttattcctgaggctaaaatatgcaccagttccctccctgtaccgcgccactgccagcctgactgcatgcaggccctgtcccagacctggagcgctgaacttggagtcccaggacctccttccctgagttgtgtgtgtgtacatggaggggactcctgggtagcacctggaggcggcctaggggtgaggggcttctcaagggtgccctgcacctccagaggtgcagtcttgggcaggatgtagcatgttcagagtctggtgaccgaaacagggctgtcggggacaggcctcgggtgttggagggcaaaggtgacagcatcatggacagaggcaaagagatgcttcttggtgatggatgcatcgaagaagtgcccagcctcaagctggctgaccacagggctgtggcaggccgccatgtacacctccacctcaatctcccggaagtcatggaaaatattcttcaggctcttgaggcacacagtgtccacaaaggagagggcacccaggtccaggatgaggctgtggaagtctggctgaggcaggcccagggccttcagtgtggacccatctggggccttggagtcttcttgaccattggctgttgcatcttccatcttatctcctgagctcacctgcatcatcttgcagtcctcaacgttgttgctcctcatgtcttcaaggctggtgttgacattaatggaaactgaggcgcccttgggggaggcagcctgtttccgaagcttctcctctttctgcagttgcttcagcttcagctgctcctgcttcttgagcagtttcttcttctgggagatgaggaagtcgacatccacaccacacctctgcttcagcgcatcactgtagaactcagcattggcaaagtacacggtggccgaggagcggaagaccttcaccccccggacttccttggcctctgagtactctgccacatctctgtaaatatccgtgtctggcacctgccccaggacagagtagtggggcatctgtgtccggaccaccacgagcagcagggagaagatgaccgcaaccaccaagccaaggtccaggttcagcaagatggtggccgtgaaggtcaccagccagataagcagatccgcccgattggccttccagagggagcgcatgtcgctgagctgcctcagcatgcccttcaggttcacaatgatgatggctgccaggaccgc

SEQ ID NO: 60038 - DNA, 1788 bp, Homo sapiens
tcctcttgtcccggaatgagcatgcctgccctttgcaagcaggtttgggtctcacgcagaggaaaccaaaagcaataagagggagggaaggcagagcaaccaatcaagggcagggtgagactcaaaacgagcgggctccctggggagccagacagaggctgggggtgatggcggagctacagcagctgcaggagtttgagatccccactggccgggaggctctgaggggcaaccacagtgccctgctgcgggtcgctgactactgcgaggacaactatgtgcaggccacagacaagcggaaggcgctggaggagaccatggccttcactacccaggcactggccagcgtggcctaccaggtgggcaacctggccgggcacactctgcgcatgttggacctgcagggggccgccctgcggcaggtggaagcccgtgtaagcacgctgggccagatggtgaacatgcatatggagaaggtggcccgaagggagatcggcaccttagccactgtccagcggctgccccccggccagaaggtcatcgccccagagaacctaccccctctcacgccctactgcaggagacccctcaactttggctgcctggacgacattggccatgggatcaaggacctcagcacgcagctgtcaagaacaggcaccctgtctcgaaagagcatcaaggcccctgccacacccgcctccgccaccttggggagaccaccccggattcccgagccagtgcacctgccggtggtgcccgacggcagactctccgccgcctcctctgcgtcttccctggcctcggccggcagcgccgaaggtgtcggtggggcccccacgcccaaggggcaggcagcacctccagccccacctctccccagctccttggacccacctcctccaccagcagccgtcgaggtgttccagcggcctcccacgctggaggagttgtccccacccccaccggacgaagagctgcccctgccactggacctgcctcctcctccacccctggatggagatgaattggggctgcctccacccccaccaggatttgggcctgatgagcccagctgggtgcctgcctcatacttggagaaagtggtgacactgtacccatacaccagccagaaggacaatgagctctccttctctgagggcactgtcatctgtgtcactcgccgctactccgatggctggtgcgagggcgtcagctcagaggggactggattcttccctgggaactatgtggagcccagctgctgacagcccagggctctctgggcagctgatgtctgcactgagtgggtttcatgagccccaagccaaaaccagctccagtcacagctggactgggtctgcccacctcttgggctgtgagctgtgttctgtccttcctcccatcggagggagaaggggtcctggggagagagaatttatccagaggcctgctgcagatggggaagagctggaaaccaagaagtttgtcaacagaggacccctactccatgcaggacagggtctcctgctgcaagtcccaactttgaataaaacagatgatgtcctgtgactgccccacagagataaggggccaggagggattgaaaggcatcccagttctaaggctgctgctaattacagcccccaacctccaacccaccagctgacctagaagcagcatcttcccatttcctcagtacccacaaagtgcagcccacattggaccccagacacccctctgcagccattgactgcaacttgttcttttgcccattgaaaaaaaaaa

SEQ ID NO: 60039 - DNA, 1472 bp, Homo sapiens
ggtcgactttgtgtttttttgttttgttgttgttttttctctgtccaaccatgagacatgaggggcttcttggtgtcatttccactccccttgccaatatttatttggaaacatttcaaactacagaaaagttatgcaaattacatcaggaacaccacacatcccctgtgcggagatctgtgctttatgtctttgaaagtaagttgtcgagatcacagcactccacccctccacaccgaagcccgcagcttctcaggaaagggcagtcttgtgtgatcagtgcatatcatcacacacaggatgtctgacactgggcaccacgctgccatctcagagtccatttcaatgctgggggtcatcggttttcagcaggttcttccctgggttcaacgcgtcttcccgccagagggatggaatcttgggtgagtgttgaaatgcgtcagaaacaaaaacgcaaagtggaactggagcacgtcacagaccttggaccagaagtggcctgtgaggcactggaagagacgccaccgtgcgagctgatggtcacacagcttgaggaccacaaagcccaggcaagagagcacccccaaagctaagtaggtagccgaggtggtgctgccatagtgcctgtgggtgcgcagcgcctgccccacagcggccaccacgtgagcacccagtgcgacctcgaagccctggggatgcagcagagcgaggccataactggccagggagacgcactcaagagagaggaacagccagggccgccagccgcggtctaggtagaggcaccaggccacgggccatgcaaagatgggcagtgtgagccactggtccagcaccgcggcacggcgccactgcgtccacaggcgcagccactgcacggggccatagagcagggccatggctgcgaacacgtccttcaggtagcggggacccagccccatcgcgccgcccctgtgcagccacgacagccccagcagcgtgtaggccatgttcacgagtgagttgaacggcatggccaggaaggcagggaggccggccacgggcgcctcggcgtagtgctcatagcccacttgcacggaaacactgtcgaaaatgcccgtgaacacagccacggcacagaggccaccggccacggccacgtgcacgaaggcctgcccccactctggattcatctggaaccggcggcgtgacctggggcagggagcttcagagagcagccttcaatacgcagcctctgcagaacactctgggcctcccggctgagccagcagaaagaagccccgtgatttcgtgatttccgaggcagatgctgcgaccttgccccgaaggaaggcaggagtcctgctgattggctggcgccagcggaggaacgttctgcctttttcagtattggcgcgaaaaggccagctatcaccatacgggtatttcgcctcacttcgcctcgctgggggaaattcaaatctccgaaaagg

SEQ ID NO: 60040 - DNA, 895 bp, Homo sapiens
gggggggagcggggaaaacaaaaggagacgaaggacgcatgcgtttggtgagtcccggattctggtgggttcttccgctcaggctgggtgaagcgcttccgggtcgccgccggcagcagcctcccggcgcgatgaagacactgaggctcagagaggttaagtgactcagccaaggtcaaacagctagtaagtggtggagccaggactcaaagccagtctaggagccatgtccactttgttcccctcactcttccctcgtgtgactgagactctgtggtttaatctggatcgaccctgtgtggaagagacagagctgcagcagcaggaacagcagcatcaggcctggctccaaagcatcgcggagaaagacaacaacctggttcctattggcaagccagcctcagagcactatgatgacgaggaagaagaggatgatgaagatgatgaggatagtgaagaggactcagaggatgatgaggatatgcaggacatggacgagatgaatgactacaatgagtcaccggatgatggagaggtcaatgaggtggacatggaaggcaacgaacaggatcaggaccagtggatgatctaggtagacaaggcagggtggcctcagggagattccaggccagcccaaactaccctgcatcccaacccccaacccctgcccacagaaccagctgatggccccagtgcctgaaagtgcccttgggcacctcctcagctgctgccaggatctggtctctttggcccctcccaggccatcagtctgcacttgaaatccccagggcctgaaacctactccaccttcctggccagtacctcaccccttgattgccaggtctggtctaagtttctttaataaagacaaaggagtgattttccaaaaaaaaaa

SEQ ID NO: 60041 - DNA, 512 bp, Homo sapiens
cagccggcaggacgctgtgagttggcgtgctagtgggatggcagatgaggaagaagaccccacgtttgaggaagaaaatgaagaaattggaggaggtgcagaaggtggacagggtaaaagaaagagacttttttctaaagaattgcgatgtatgatgtatggctttggggatgaccagaatccttatactgagtcagtggatattcttgaagatcttgtcatagagtttatcactgaaatgactcacaaggcaatgtcaattggaagacaaggtcgagtacaagttgaagatatcgtcttcttgattcgaaaggacccaaggaagtttgccagggttaaagacttgcttactatgaatgaagaattgaaacgagctagaaaagcatttgatgaagcaaattatggatcttgacactttttgtagtttccgaaaattaccatctggggaaaccatatataataattgtatattttctaaagtaagattctgatatctagccatgtaaatgaaa

SEQ ID NO: 60042 - DNA, 1622 bp, Homo sapiens
cccacgcgtccggacgaaggactggaaggtggcggtggtgaaggtgcaggccgttggggcggctcaaaggcaggtgactatgaaaggcttatatttccaacagagttccacagatgaagaaataacatttgtatttcaagaaaaggaagatcttcctgttacagaggataactttgtgaaacttcaagttaaagcttgtgctctgagccagataaatacaaagcttctggcagaaatgaagatgaaaaaggatttatttcctgttgggagagaaattgctggaattgtattagatgttggaagcaaggtatcattctttcaaccagatgatgaagtagttggaattttgcccctggactctgaagaccctggactttgtgaagttgttagagtacatgagcattacttggttcataaaccagaaaaggtcacatggacggaagcagcaggaagcattcgggatggagtgcgtgcctatacagctctgcattatctttctcatctctctcctggaaaatcagtgctgataatggatggagcaagtgcatttggtacaatagctattcagttagcacatcatagaggagccaaagtgatttcaacagcatgcagccttgaagataagcagtgccttgaaagattcagacctcccatagcccgagtgattgatgtatctaatgggaaagttcatgttgctgaaagctgtttggaagaaacaggtggcctgggagtagatattgtcctagatgctggagtgagattatatagtaaagatgatgaaccagctgtaaaactacaactactaccacataaacatgatatcatcacacttcttggtgttggaggccactgggtaacaacagaagaaaaccttcagttggatcctccagatagccactgccttttcctcaagggagcaacgttagctttcctgaatgatgaagtttggaatttgtcaaatgtacaacagggaaaatatctttgtatcttaaaggatgtgatggagaagttatcaactggtgttttcagacctcagttggatgaacccattccactgtatgaggcaaaagtttccatggaagctgttcagaaaaatcaaggaagaaaaaagcaagttgttcaattttaattttcttctttctcagacctcagtcggatgaacatattccagtatttgaagccagaattttctttggaaattgttgagaaaaaccaaggaagataaaacaagttgcatttttaagcacgtttcccctgctaagacaagatgcctcagttgacacatttgaaaagtgtttgaaaaattccttgtgcaaatgatcaagataattctataattaacatcttaagggaatttttctaaaaaccttttcattgtttctatatattttgcccctgctataaaattccttccatgaagaaaactgctgctttcagcaaaagtcacactactcttgataaaagctgttgcaggcctctgctaagctatcaaagtaacgtattaattttgtattcaactcccgttctcaacaccttcattaagtctttgctgtcataatttaagcatttgagtatattttgaagtcttaaaagacttagcccataggcccttaaaaaaaaaa

SEQ ID NO: 60043 - DNA, 2309 bp, Homo sapiens; identical to SEQ ID NO: 58770

SEQ ID NO: 60044 - DNA, 1854 bp, Homo sapiens
tttttttcacgttatgaagatattttcctttaatttatcaaacatttcacattcatgaagtcatttacttcagagcaaatgtaagcttataatattaaaaattaaagtattacaatatttaccaagatggttgggcaggggacacttactagtataaaaataatacaaatattgtattttcctcttatctgccagtaaaaaatggcaaacaggttttgtctttctgaagtttctagtccaataaccaaagatgatggagcccctaataaagtgccttgccctgtatgctccactgtctatagctttagaccctcaacattcttcttcaagttcagcagctctttttcttgccttcttttctccagtttaaatgctaatttgttagctttcttctccactcttcgttccttgcgctcttcttttatagcttgctttcttgctcttttatcttctttgctttcatttttagaacgtggctgagttgatactttaggaagatcactgccattaatcatctgtattctttcagtttgctttgctgtgagtcctttctttggtaagacattgagaggtattcctgttttagaagatattcgaatttgtttgggctttggttgatacttgataagctgtggatggttatataaatttgagtatgtactacaaatagattcacaatcccacttctctttggcttcttcaaggactacagtaatcatttcttcctcctcagactcatcaagctcattcattggcaggtcttgatcctccaagggttcaagggtattcaattttacacaattctctgccttctctttatagtagtcattcaaaacttcctgtaagcgattgctgtccacttgaatagaaccttccaattctgcattatccagagctccaatttcatcatcatcatattgctcataaaacttctcaaacctctcatcatgtagggtcagctgttcatttctcctcatgactgaggaagtcatcgaatactccgtgaagcgactctttgtttcctcactccagaacaagtgatctgctatagctctgtgagtttttccgggcacagacatacagtcttcatctgacaataggcctgcagagtcatagtcatcattgctatctcccttctcatcatccacatcttcccactcgctgtcatcttcattctcagatttctgtatatccattccctcttcctctcctgttgccttattggcctgaagaataaagtcatcctcaagcagattatctggatcatcaaagtcaaaatcatcatcaagagctgcaacaatgtcaggatcaaaatccagtcgaggtcctgaaactggagctgctttatttaacaatccaacatcttcctcaaactctgaagcaaacactgatgaaggcaacttaattccagtgcttggaattactagcgtttcttctttctcctctctcctgttgtgtgcactgaaggtacttgagggaataagctctgaaggcccagatggttccttcaggtgctgcaggtagtcatagtcgtcatcaaagaacactccatacttcctctgttctgctcgcctttcttcattgtctattttttgtgtgggcaatagaaccctctggggtgcactctcatctgctgctaaaggatctcgttggctccggtggaccaagtgaaaagacacagctttcttcttctctataaagggctttttcttcctgtgaggcatgctgcagccgcgcggcgctcacccccaacaggggcggcgatgacaccctcgaagtccggcggggagaccaaggtccagctgaaggccgcttctgtaggcctcaccacacgtgcagccccaacgaaatcgg

SEQ ID NO: 60045 - DNA, 1262 bp, Homo sapiens
ctccaagctgctggaccccagggagagctgaccactgcccgagcagccggctgaatccacctccacaatgccggtctcaggaaccccggcccctaataagaagaggaaatccagcaagctgatcatggaactcactggaggtggacaggagagctcaggcttgaacctgggcaaaaagatcagtgtcccaagggatgtgatgttggaggaactgtcgctgcttaccaaccggggctccaagatgttcaaactgcggcagatgagggtggagaagtttatttatgagaaccaccctgatgttttctctgacagctcaatggatcacttccagaagttccttccaacagtggggggacagctgggcacagctggtcagggattctcatacagcaagagcaacggcagaggcggcagccaggcagggggcagtggctctgccggacagtatggctctgatcagcagcaccatctgggctctgggtctggagctgggggtacaggtggtcccgcgggccaggctggcagaggaggagctgctggcacagcaggggttggtgagacaggatcaggagaccaggcaggcggagaaggaaaacatatcactgtgttcaagacctatatttccccatgggagcgagccatgggggttgacccccagcaaaaaatggaacttggcattgacctgctggcctatggggccaaagctgaacttcccaaatataagtccttcaacaggacggcaatgccctatggtggatatgagaaggcctccaaacgcatgaccttccagatgcccaaagtttgacctggggcccctggctgagtgaaacccctgggtccttctacaaccaaaacctctccaacagggccttcttttcaatcgaaccccctattcccctggctggagctctgggggagcctgtagactacaacgtggatattggcatccccttggatggagaaacagaggagctgtgaggtgtttcctcctctgatttgcatcatttcccctctctggctccaatttggagagggaatgctgagcagatagcccccattgttaatccagtatccttatgggaatggagggaaaaaggagagatctacctttccatcctttactccaagtccccactccacgcatccttcctcaccaactcagagctccccttctacttgctccatatggaacctgctcgtttatggaatttgctctgccaccagtaacagtcaataaacttcaaggaaaatgaaaaaaaaaa

SEQ ID NO: 60046 - DNA, 1627 bp, Homo sapiens
tgccaacaattcggcacgagggctggaaaggctgtacctgcaccttcaaggaccgcagtaaacttcgagagcacctccgcagccatacccaggagaaagtggtagcctgccccacctgtgggggcatgtttgccaacaataccaagttcttagatcacatccgtcgccagacctcattggatcagcagcacttccagtgttctcactgttccaagagatttgccacagagcggctattgcgggaccacatgcgcaaccatgtgaatcactataagtgccctctgtgtgacatgacctgcccgctgccttcctccctccgcaaccacatgcgctttcgtcacagtgaggaccggccctttaaatgtgactgttgtgactacagctgcaagaatcttattgacctccagaagcacctggatacccacagcgaggagccagcctacaggtgtgattttgagaactgcaccttcagtgcccgatccctctgctctatcaagtcccattaccgcaaagtacatgaaggagactctgagccaaggtacaaatgtcatgtgtgtgacaaatgcttcacacggggcaacaacctcaccgtgcaccttcgcaagaagcaccagttcaagtggccctcagggcatccccgttttcggtacaaggaacatgaagatggctatatgcggctgcagctggttcgctacgagagtgtagagctgacacagcaactgctgcggcaaccacaagagggatcgggcctgggaacgtcgctgaacgagagcagcctgcagggcattattctagaaacagtgccaggggagccaggacgtaaggaagaggaagaggagggcaagggtagcgaagggacagccctctcagcctctcaggacaaccccagttctgtcatccacgtggtgaatcagaccaatgcccaaggccagcaagagattgtctactatgtgctgtctgaagccccaggggagcctcccccagtccctgagccaccttcagggggcatcatggaaaagcttcaaggaatagctgaggagccagagatccagatggtttgaaggccgcagagccagaccatttcttccccaggtcctgaagtttgagccaggcaagtggcagtgcccctagtgggcagccgttgccaatggatgcctttaggagtggtgccgagagcagtgtggtccactctggcctgggtttgcatcattctgcagactctaaagacttcccttttctgccagactacattttgtggggagcctgaggactctggattctttgaggggatcctggatgtgtgtgttcttgttaaagaggctgttatcaggcttaactataaccctcaagatctgcttgacagtgattaaatccttagctcacatccattcccatctttcgggctccttaggcccaaggatggcatgtgactggtccctgcaagggtcctttctttgtcaccagccaaggcattgataaccaagtagccattttcctcttaaggtttcctctacaaccccaaggactttcatgattatcctcagggacaggattggaggcattgagcgtgtttattaacaaattgtttttggtaataaaataaatgcttggactcttaaaaaaaaaa

SEQ ID NO: 60047 - DNA, 4976 bp, Homo sapiens
gactcccgggtctacccacgcgtccgggtggcttggtgagccggaggacacgatttctctctcctccttgcaattttcctttctgtctgggagcacgccaagatgtcccttgtgactgtccccttctaccagaagagacataggcacttcgaccagtcctaccgtaatattcaaacacggtacctgctggacgaatatgcgtcaaaaaagcgagcttccacccaggcatcttcccagaagtccttgagtcagcggtcgtcttcacagagagcctccagccagacgtccctgggaggaaccatctgcagggtctgtgcgaagcgagtgagcacgcaggaagatgaggagcaggagaacagaagcaggtaccagtccctggtggccgcctatggtgaggccaagcgacagcgcttcctcagcgagctggcccacttggaggaggatgtccacctggcacgctcccaggcccgcgacaagctggacaaatacgccattcagcagatgatggaggacaggctggcctgggagagacacacatttgaagagcggataagcagggctcctgagatcctggtgcggctgcgatcccacaccgtctgggagaggatgtctgtgaaactctgcttcaccgtgcaaggatttcccacgcccgtggtgcagtggtacaaagatggcagtctgatttgccaggcggctgaaccgggaaagtacaggattgagagcaactatggcgtacacacactggagatcaacagggcagactttgacgacactgcgacatactcagcagtggccaccaatgcccacggacaagtgtccaccaacgcggcggtggtggtgagaaggttccggggagacgaggaaccattccgttcggtgggactcccgattggattgcccctgtcatcgatgattccgtacacgcacttcgacgtccagtttttggagaagtttggggtcaccttcaggagggaaggcgagacggtcactctcaagtgcaccatgctggtgacgccggacctgaagcgggtgcagccgcgcgccgagtggtaccgcgatgacttgctgttgaaagagtccaagtggacgaagatgttctttggagaaggccaggcctccctgtccttcagccacctgcacaaggacgacgagggcctgtacaccctgcgcatcgtgtctcggggcggcgtcacggaccacagcgccttcctgtttgtcagagatgctgacccgctggtcacaggggcccccggtgcacccatggacttgcagtgccacgacgccaaccgggactacgtcatcgtgacctggaagccgcccaacaccaccactgagagccccgtcatgggctattttgtggaccgatgtgaagtaggaacgaataattgggtgcagtgcaatgatgcaccggtgaaaatctgcaaatacccggtcacagggctttttgaaggaaggtcttacatattccgagtgagggcagtgaacagtgcgggcatcagccgaccctccagggtctctgatgcggtggctgcacttgaccccttggacctcagaaggttacaagccgttcatttggagggagagaaggagattgccatttatcaggatgaccttgaaggtgacgcccaggttccagggcctcccaccggtgtgcacgcttccgagatcagcagaaactatgtcgtcctcagctgggagccacccactccccgtggcaaggacccgctcatgtacttcattgagaagtcggtggtggggagcggcacgtggcagagagtcaacgcccagacggctgtgagatccccgagatatgccgtgtttgacctcatggaagggaagtcttatgtgttccgagtgctgtcagcaaaccggcatggcctgagcgaaccttcggagataacgtcccccattcaggcccaggatgtgaccgttgtcccttctgctccgggtcgggttcttgcttcccgaaacaccaagacgtcggtggtggtgcagtgggaccgacctaagcatgaggaggacctgctgggctactacgtggactgctgtgtggccggaaccaacctctgggagccctgcaaccacaagcccatcggatacaacaggttcgtggtgcacggcttaaccacgggagagcagtacatcttccgagtcaaggcggtcaatgctgtggggatgagtgaaaattcccaggaatcagacgtcataaaagtgcaggccgcactcaccgtcccgtcccatccttatgggattacgctcctcaactgtgacggccactccatgaccctcggctggaaggtcccgaaattcagtggtggctcgcccatcctgggctactacctggacaagcgtgaagttcaccataaaaactggcacgaggtcaattcctcacccagcaaaccgacaatcctaacggtggacggcttgacggaaggctcactctacgagttcaaaatcgccgccgtcaacctggccggcatcggggagccctcagatcccagtgagcacttcaagtgtgaggcctggaccatgccggagcccggtcctgcctacgacttgacgttctgtgaggtcagggacacgtccttggtcatgctgtggaaggcccctgtgtactccggcagcagccctgtttctggatatttcgtggacttcagggaggaggatgctggagagtggatcactgtcgatcagacgacaacagccagccgttatttaaaggtctctgacctgcagcaaggtaagacctatgtcttcagggtccgggcagtcaatgcaaatggcgtggggaagccctcagacacgtcggagcctgtgctggtagaggcgagaccaggcaccaaggaaatcagtgctggtgtcgatgaacagggcaacatctatctgggcttcgactgccaggaaatgacagacgcgtctcagttcacctggtgtaaatcctacgaggagatttcagatgatgagaggtttaaaatcgaaaccgtgggggatcactccaagctgtacttaaagaatccggataaggaggatttagggacttactccgtgtctgtaagtgatacagacggagtgtcctccagttttgttctggacccagaagagctcgagcgtttgatggcattgagcaatgaaataaagaaccccacaattcctctgaaatcggaattagcttatgagatttttgataaggggcgggttcgcttctggctccaggctgagcacttatcaccagatgccagctaccgatttattattaatgacagagaagtctctgacagcgagatacacagaattaaatgtgacaaagctactggcattattgagatggtgatggatcgatttagtattgaaaatgaggggacctacactgtgcagattcatgatgggaaagccaaaagtcagtcttctctagttcttattggagatgcattcaagactgtgctggaagaggctgagtttcaaaggaaagaatttctcaggaaacaaggccctcattttgctgagtacttgcactgggatgtcacggaagaatgtgaagttcgacttgtttgcaaggttgcaaacaccaagaaagaaaccgttttcaaatggctcaaggatgatgctctgtatgaaacggagacactgcctaacctggagaggggaatctgtgagctcctcatcccaaagttgtcaaagaaggaccacggtgaatacaaggcaaccttgaaagatgacagaggccaagatgtgtccatccttgaaatagctggcaaagtgtatgatgatatgattttggcaatgagtagagtctgtgggaaatctgcttcgccactgaaggtactctgcaccccagaaggaatacgacttcagtgtttcatgaagtattttacagacgaaatgaaagtgaactggtgtcacaaagatgctaagatctcatccagtgagcatatgagaatcggggggagtgaagagatggcttggctgcagatatgtgagccgactgagaaggataaaggaaaatacacttttgagattttcgatggcaaagacaaccatcaacgctcccttgacctgtccggacaagcttttgatgaagcatttgcagaattccagcaattcaaagctgctgcttttgcagagaagaatcgtggcaggttgatcggcggcttgcctgacgtggtgaccatcatggaagggaagaccttgaatctgacctgcacggtgtttggaaaccctgaccccgaagtgatttggttcaagaacgaccaggacatccagctcagcgagcacttctcggtgaaggtggagcaggccaagtacgtcagcatgaccatcaaaggcgtgacctccgaggactcgggcaagtacagcatcaacatcaagaataagtatggcggggagaagatcgacgtgacggtgagcgtgtacaaacacggggagaagatcccggacatggccccgccccagcaagccaagcccaagctcatccccgcgtctgcctcagcggcaggccagtgaaggcgttttcctagcctggagatgggaaaatatgcttggcagagacaggaatgctgtgtgcttgttccaaatgagcagctggcatccgagtggtgtcctgtgtgggctgatagttgatcacacattgtgcttttgatttttgcatttggtgatgaatattttatacccgtctaagggagaaagctaatgttttccacaagactgaacaacgtgtatttacacgagggtagacggcagatgcctgacagagagtgggttggcagacaacacactagcattttcacgggtgtgggcacatgggtgtggcacctggacgtgtgcagcatgtggcggtctctgtgtgaagccaccgtgcttctctttggggggccgcgagatctagcatctctgaaatcctggctgtcgaggctttgaagcatgtgttacctggttaagcttgttttctcttgctttaggcaaataaaagtttaaaaatc

SEQ ID NO: 60048 - DNA, 2981 bp, Homo sapiens
gggctggggtgtgtttatttgggtatatacaatgagtcatggattaaaattgcttccagcggatagatacctaggtgttccacagcattactgaacaagctgtcgtcatttccccattacctcagaagacccccttaattacttacttatattaactgtagaacgtatttatgcataccaggctctacctctgggctttctattctgttccagagacccagtaccagaatatttaaatcactgtggcgttaaatacgttttaatatctgatagggccagtttctgcgcattgcacatttttttttcccctttcaggaacgtgttcaggcccgcggcagggggcgggatcgcgcctcctcctcggctctggttccagccgagcctctcggacgcagagatggaaatcccgaagctgctcccggctcgcgggacactacagggcggcggcggcggcggtatccccgcgggtggcggccgagtccaccgaggccctgactcgccggctggccaggtccccacgcgccgcctcctgctgccccggggcccccaagatggcgggcccgggcggcggcgcgaggaggccagcacggcatcacggggccctggcccaagcctgttcgcgccgaggccccatcaacctagcggcggcggcggcggcggcggcgacgacttcttcctggtgctgcttgacccggtgggtggcgacgtggagaccgcgggctccggtcaggccgcagggcctgtgttgagggaggaggccgaggagggcccggggctccaggggggcgagagcggcgcgaatcccgcggggcccactgcgctaggcccccgctgcctgtccgcggttcccactccggccccgatctccgcccccggccccgccgcggccttcgcgggcacagtcactatccacaaccaggacctgctgttgcgctttgagaacggcgtcctcaccctggccacgcccccaccacacgcctgggagccaggggccgctcctgcccagcagcccgggtgtctgatcgccccgcaagctgggttcccgcatgccgcgcacccgggtgactgcccagagctgccgccagacctcctgctagctgagccggccgaacccgcgccagctccggcgcctgaggaggaggcggagggcccggccgccgccctgggcccccgcggaccgctgggctccggcccaggcgtggtgctgtacctgtgccccgaggcgctgtgcgggcaaaccttcgccaagaagcaccagctgaagatgcacctgctgacgcacagcagcagccagggccagaggcccttcaaatgccccctgggtggctgcggctggaccttcaccacctcttacaagctcaagaggcacctgcagtcgcacgataaactgcggcccttcggctgccctgcggagggctgtggcaagagcttcaccaccgtgtacaacctcaaggcgcacatgaagggccatgagcaggagaactcgttcaaatgtgaggtgtgcgaggagagcttccccacgcaggccaaactcggcgcccaccagcgcagccacttcgaacccgagaggccttaccagtgcgcgttttctggctgcaagaagacatttatcacagtgagtgctctgttttcccataaccgtgcccatttcagggaacaggaactgttttcctgctctttccctggctgcagcaagcaatatgacaaggcttgtaggctgaaaattcacctgcggagtcacaccggtgagagacctttcctttgtgactttgatggctgtggctggaactttaccagcatgtccaaactcttaaggcacaaaaggaagcacgacgatgaccggaggttcatgtgccctgtggaaggctgtgggaaatctttcacgagggccgaacatctgaaaggccacagcattacccacctgagcacaaagcctttcgtgtgtcctgtggcaggctgctgtgccaggttctctgctcgcagtagcctctacattcactccaagaaacacctgcaggatgtggacacttggaaaagccgttgcccgatctcctcttgtaataaactcttcacatccaagcacagcatgaagacgcacatggttaaaaggcataaggtgggccaggatctcttagctcagctagaagcagcaaattctcttacacccagcagtgaacttaccagccagagacagaatgatctcagtgatgcagagatagtgtctctcttctctgatgtacctgacagtacttctgctgcattgctggacacagcattggtgaactctggaatcttgactattgatgtggcttctgtgagctcgactctggcagggcacctccctgctaataataataattccgtagggcaggctgtggaccctccgtccttgatggccaccagcgaccctcctcaaagtctggatacctctctcttttttggaacggcggccactggttttcagcagagctccttaaatatggatgaggtctcaagtgtaagtgtggggccattgggatctctggactctttggccatgaaaaactccagtccagagcctcaggctttgacacccagcagtaagctaacagtggacacagatactctgactccttcgagcaccctttgtgaaaacagtgtctcagaactactgacaccagccaaagcggagtggagcgtacatcctaactctgacttctttggacaggagggagaaacccagtttggattccccaatgcagcaggaaaccatggttctcagaaagaaagaaatcttatcactgtgactggcagctcatttttggtatgaagcaactctattcattccttgccatgtggctaacttttattacagtcaattttgaggatattctggactaaatatttaagtgcagtccatttctttttggtttgcaaaaagagcacagccctggactatgagtttggagatctaaattctgatcttgagtctggaactgaca

SEQ ID NO: 60049 - DNA, 2608 bp, Homo sapiens
cgacccacgcgtccggccgccgctgctacagccgccgccgccgctgttgccgcggcttgttattcttaaaatggcgccgctagacctggacaagtatgtggaaatagcgcggctgtgcaagtacctgccagagaacgacctgaagcggctatgtgactacgtttgtgacctcctcttagaagagtcaaatgttcagccagtatcaacaccagtaacagtgtgtggagatatccatggacagttttatgacctttgtgaactgttcagaactggaggtcaggttcctgacacaaactacatatttatgggtgattttgtagacagaggttactatagtttggagaccttcacttaccttcttgcattaaaggctaaatggcctgatcgtattacacttttgcgaggaaatcatgagagtagacagataacacaggtctatggattttatgatgagtgccaaaccaaatatggaaatgctaatgcctggagatactgtaccaaagtttttgacatgctcacagtagcagctttaatagatgagcagattttgtgtgtccatggtggtttatctcctgatatcaaaacactggatcaaattcgaaccatcgaacggaatcaggaaattcctcataaaggagcattttgtgatctggtttggtcagatcctgaagatgtggatacctgggctatcagtccccgaggagcaggttggctttttggagcaaaggtcacaaatgagtttgttcatatcaacaacttaaaactcatctgcagagcacatcaactagtgcacgaaggctataaatttatgtttgatgagaagctggtgacagtatggtctgctcctaattactgctatcgttgtggaaatattgcttcgatcatggtcttcaaagatgtaaatacaagagaaccaaagttattccgggcagttccagattcagaacgtgttattcctcccagaacgacaacgccatatttcctttgaggccttcgcccatcctgctgacccatttttctgccctcttcttaccccaattttcttgtattaccctctacaatatactttttattgagcactttgctgctgaaatgctgcctcttgccttttttttttttaaattttaaattatctaaatttattgttggtggggggtgtctatagcaaagtttttctatcaattttcccccatcccatccccaccctggactcatttgagaagacttgagaaatgtcttaatactcacactgctgcatgtagctcttgcttatttactggtctgggaaacaggatgtgtttcctttttttaaaagccaattgacagattacacctaaatactcctccttttgtatcattcagccttttgttttagtttggtaagttttaagaaatttcagcagcaaagttgttattcagtgggcacgatggactccaaatgcctcaagttatgtatacctgtcccagatgtaaacttcattgtcctttgttggatgatattttaaatggatataaaataaattggtctaaagggctgccctccttgttgtgtttttaaattttagttaaaaactgctacagcttatgactttgtactttaagataattgtattgatcttttttcagattccttgtattttttaataaagtaatcttaaataaaactcagataggttaagtgttagaaattttaaacagcttacattgttagcgtaaagttatcttttcttttttcctaatcagagttcttgaccctttggttattgagtttaaaacttcaattgaaattcaatagtatttatttttgaaaaaaatcactaaactgtgcctaaagaacataactgccatattaatgttttggtttatatcctctatagtaatagaaaaacatttaatacttgtaatgctgatgtgttaatttgataccagttgagtagaatgtgatcaatccagtttacaatctatcatgagtattattaactaaaatctatgtgcttttcaataggaatcattcttctcttgctgtaacacttgaccttaacttttagaaagtgttcatttttaaactgcaactggaaaggttgaaaagttaggactcttgtatttgtgaactgtaatctgaagcagattatttaaagtgtagaaaaagaaacaagttcttttttgcaaaggtctgtgataccatatttcagctttgtgtaagtaatttgaatatccaaagggttgtgatgatcagttctgaatatgcaactgtccacttaataaggacaagtattccagtatctcttatgactgtagtcataaatgatgttggaatgtacattttgtgaaatagttggtatccctttactatgattaatttttgttattccaggaaatacttgtgaagccagccaattaataaagcactttagcatctgttcaggtagttttgaaaaccaacttttccccttcaggataagaacttccaggttacctaaaaatgcaataaaaatctttatagtctaagcttcttggcatataatatttcatcagggttttcttttattaattgagcacaatactgtattgatttaatttttttccctcaaaccacccagctccttac

SEQ ID NO: 60050 - DNA, 3176 bp, Homo sapiens
tttcgtctcccactcgagctgcccccgccctctggacccgagtgactcaggcctttgtttgtccttcctggtagaggcgggttccctccctcggcaagatgccggagtgctgggatggggaacatgacatcgagacaccctacggccttctgcatgtagtgatccggggctcccccaaggggaaccgcccagccatcctcacctaccatgatgtgggcctcaaccacaaactatgcttcaacaccttcttcaacttcgaggacatgcaggagatcaccaagcactttgtggtgtgtcacgtggatgcccctggacaacaggtgggggcgtcgcagtttcctcaggggtaccagttcccctccatggagcagctggctgccatgctccccagcgtggtgcagcatttcgggttcaagtatgtgattggcatcggagtgggcgccggagcctatgtgctggccaagtttgcactcatcttccccgacctggtggaggggctggtgctggtgaacatcgaccccaatggcaaaggctggatagactgggctgccaccaagctctccggcctaactagcactttacccgacacggtgctctcccacctcttcagccaggaggagctggtgaacaacacagagttggtgcagagctaccggcagcagattgggaacgtagtgaaccaggccaacctgcagctcttctggaacatgtacaacagccgcagagacctggacattaaccggcctggaacggtgcccaatgccaagacgctccgctgccccgtgatgctggtggttggggataatgcacccgctgaggacggggtggtggagtgcaactccaaactggacccgaccactacgaccttcctgaagatggcagactctggagggctgccccaggtcacacagccagggaagctgactgaagccttcaaatacttcctgcaaggcatgggctacatgccctcagccagcatgacccgcctggcacgctcccgcactgcatccctcaccagtgccagctcggtggatggcagccgcccacaggcctgcacccactcagagagcagcgaggggctgggccaggtcaaccacaccatggaggtgtcctgttgaagcccttgatcccgctgacgacgcccacgtcgaggccccaccgccatccttgcgccggctcatgttccctttagtttatttttgtgagggcaaaggggaggaaatggggttctgtttgaaaaaaatgaggggatcttagatgctgcagcagaacagtctccaggtgttttaaggggctcagtcctcctcatcccatctcactctccgtggtaacttagccaacttgacccctctcatcccactcccggcggcccaggcacagaagggcagggccatagggagggagattcgctacggatccaggtcattcctgggtgagcccttgggcaggcatgtttggagatgagagaggcttcgagagggtgggtgctgggccacaggggtgcggggccagctcaggcactggcgtgggagccctgggagaccccttcccccaccctccaccaagcacacctgtttctgtctcatagcacatgtgacaatcatctggacaacagccacaagggggcgctcggaccaggcagccactttcctggtgctctctgggcccagctggtgctgtagggccacgcaggcaggggcgtcaaggggtttctctgcccaaggaagacagaacatggagaaccgtcagggcaggaaccccacagactgtcccttccagcccacactctgccacctcctggccctgtcccaattctgagccaaggcctccccgaggcagaagttgcctggtcctctgtccccacagtgacctgactgggggtgagggagaaggaggagagagcccatgtgtggtgtgtgtgcccctgagaacttcgtggtgactgcctttgggagcccgcaggtggccagaggcaggggtagctgagttcctggagaccccttttttgcccccaggttccccagagggcaacgccatcagtagcagtgtggtgtttcaggcagagctctggccaggctgtgccagtgtgtcccggacgcatcactaaggaagagagagtttatttagtcaactggcccaaggcagcgaggcttctacagtcccacaccccatagccgcctgggctggggcttactgggggctgaaggttctggacatgaacaagggtcaggtagaagagaaaggcttcccctacaccccagcctcctgctgtcccctgaagcccaggactgcgttgtatgctttccatccactcaccttaccccatagcatcttgcggcccagaaaccagagccatttgtctcagaccctaaatcaataatcacaaaccccaaaacgggagagagcagtgaaaacatgcagggctgtggacgggggaagggttgtggcgggtgttctgaggctgagaggacacctatatgcgtatttcctctacacacatcaccccccttctataatcttaagccatgactagcctggtggcgtgttagtttctgcccagttctaccccctcatgtgcttcttctgaatactgaatgtgactgtttgaaagctggtagaattcatccctcttactgtagataacactgcaaatcttggaattttgttttttgctgtttccagatgtatctataaatatctatacattatatgtgtgtgtgtgtgtgtgtgtgtgtgtgtgtacatcgggtcctcccatgtgtggtgttcttctggaggttgtctctttggtcaaggtgaacttttaatgtttattattttcttctccgcacaaagtaaagagcctaattttgtgtattctggtggctgctgtcatgagatgataaaatgtaaaacaaaactctagtcaacgtagaaagagttaactgtgctgaaaaactaataaagaacctaagaagaattccagtgtggtgatgccatgcccatcatgggaggccttttggagaaacagaatgtttgggcaggggctgctggtgctgctttgggtttttgggttgagggtgctaggagaggatggtctccacccatctttctatttccagtacacgtcacattattttaccggtgagatgagaatgtcacaaacattaaaagccttatgtgctctaaaaaaaaaa

SEQ ID NO: 60051 - DNA, 1615 bp, Homo sapiens
ctgattacgcttagcttggcacgacggggcgcgctggcccctggggacgccgagggcggctgcgacgcgccgagaggccgcggctctcccacctgtcaccctggcccttctctgcttggatggtgtcttcctctcctcagccgagaatgacttcgtccaccggatccaggaggaactggaccgctttctgctgcagaagcagctgtcaaaggttcttcttttccccccactctccagtcgcctccggtacctgatccatagaacagcagagaattttgatctcttgagcagcttctccgttggggagggctggaagaggaggacggtcatctgtcaccaggacatcagggtacccagttcggatggcctctctggcccctgccgcgctcctgcctcctgccccagcaggtaccacggtcctcggcccatctccaaccaaggagcagctgcggttccccgaggtgcccgggctggccggtggtatcgtggacgcaagcctgaccagcctttgtatgtgccccgggtgctgcgcaggcaggaagaatgggggctgacctctacctcggtgctcaagagagaggccccagctggcagggacccagaagagcctggagatgttggtgctggagaccccaactctgatcagggactccctgtgctgatgactcagggaacagaggacctaaagggcccaggacaaaggtgtgagaatgagccactgctggaccctgttggccctgagcctctggggcctgagagtcagtcagggaagggagacatggtggagatggccacacggtttgggtccaccctgcagctagacctggaaaaggggaaggagagtctgttggagaagaggctggtggcagaggaggaagaggacgaagaggaggtggaagaggatggccccagcagctgctcggaggacgattacagtgagctgctgcaggagatcacagacaacctgacgaagaaggagattcagatagagaagatccatttggacacgtcctccttcatggaggagctgcctggagagaaggaccttgcccacgtggtagagatctatgactttgaaccagcgctcaagacggaggacctgctggcaacgttttctgagttccaagagaaggggttcaggattcagtgggtggatgatactcacgcactcggcatctttccctgccgggcctcagctgcggaagccctgacccgggagttctcggtgctcaagatccggcccctcacgcagggaaccaagcagtcaaagctcaaagccttgcagaggccaaaactcctgcgtctggtgaaggagaggccacagacaaatgcgactgtggcccggcggctggtggcccgggccctgggactccaacacaaaaagaaagagcggcctgctgtccggggtccgctgccgccctgaggcctggagacccaactggcctggatctgcgtcccgacggtagctggcgcccccaacaccataagccttcacagacgccagagcagccccgcaccaccctcgagcttcaccatggggtgtggtgggctttagtttagtcccagaaatggagaaaaaataaaaactcacgttgttctaatgtgaaaaaaaaaa

SEQ ID NO: 60052 - DNA, 1143 bp, Homo sapiens
  misc_feature (1)...(1143): n = a,t,c or g
ttttttttttttagaagacaaaatgttttattttaaaacattgaaaaaacattaaaagacaaatgtccattatgtaaccaggaatgttaaatatatggaaacggtaaatctctaaaatgtggtaggtacttccagagctaaatgttgcaagttatcctacttttttctctaatatcaacaatacctgatacgatgaaaaataacaaaaagaccttactaattatccaatcaaagtcatcatctttgggtaaatttatatcaacacaacttaaagttttgtccaagatgttcctgacacatgaagcttccagttgaatttcagaaatgttaacaaaagtatcttccttttttgcctgtgaatgtttgagtattgctgtattgttggcttatatccactacagatactggttctaggccagcccaaggatcttcaagcattgaaggcttgaaataattttccaactcattagacattcttttttctctaacacgccctgatccaaatggtgtagatgtccttggagaaccctgggggtgggtctgctgctgccctggggagtagccgaattgctgctgggaccccgcgggggacctggagtaggagccagggtagccgccaggggacggagacccgaaccggccccccgggaagctgccgccgtgtcgcggagagtgactgctcccgtacggcctagaccggggcccgtacggcggcgtgtggtgcggactcccgtacccgtctcgaggggagggcggccgtggtccgcccccgcccggggttccccggaagctgcttccgctaccccaacctcctccacccggaccagggtaaggaggagttgggggccgaaaattctgtcgctgcatatcaggagccaaagccgaaaacctcgcagccgcgttctcccaccggaactgtatcaaccggccctccgcagagaactgctagtcctttaccaaaacagtcctccgaccgcagccaccctacggcacatcagttccggcgtcacaaaggttccgccaggggcggcgggattacctaaatcactgacttggcgagagactcagtggatttaagtgaaaagaggaagaaaaggagacaggaaaggacggtcncccaagcccagcatcatcctttccagt

SEQ ID NO: 60053 - DNA, 1125 bp, Homo sapiens
ctgctccatgagcaactgggaaattagttcaaagctctccagggttttcttttattcatcgaggaagaagcagggaagcaataaaatgaaaagaaacagcaaataattaagactgacaccatcccctcagtgccagccacctcactcacccaagtcttcatttaagtcaggaaataagattataaatgaagatttttttttcctctggcaacatgaatgcaaagaaacatttccatcagcacagagagatcagcaggatgcttatagaatagaagactattcagtgacagccaattcacttgcaaattaagacacattcactgaagatgccctatatgttccactaaaatgtttttttttttgatatagggttgggggcaggggtggtttgttgcaggccactgtgtacacatagcttatctgtcactcgagatgaaagagttcctgcaaactaaccagagaacgttccccaataccctgtacattattggaattcatggaggggagaattcaaaaggaagatggagtgaagactgaataacacaaaactgttctcttctactttaaggaaaacccaaaagtgacactgtggattttcactgttctaagctccccgtgacctgtggtgaggcgaaagggattttatataagaagaaaatgaaacacggtgagttccttggtcttctgctctttggaatccctagatgaaggactcactagaagggaggaaaatacccgtgtgtgtaattgatcaggaaatggaccctgctagctagactgcagaagaaacgcttcttaggaaggaatttccaaactcttccacatcatggtatttctggcaatcagaccctccactcccacctggaagtcacccatgggccctgctgtactgacagccatgtccttgctgcatgtaggcactacacgaatgcacattctgtcccacccctcaccactcagtcaggctttagggctggcttcagtccaagagaagaggcccgcagactcccctgctactccttccacctcacagaggaagtctctcttgacctggaaaggtagaaggccacaattaggatgaagaggttcacggtgaattcacagaggatgggggtagatccaaga

SEQ ID NO: 60054 - DNA, 768 bp, Homo sapiens
gattattaaagcttcgccggagccgcggctcgtccttccactccgccagcctccgggagaggagccgcacccggccggcccggccccagccccatggacctccgagcaggggactcgtgggggatgttagcgtgcctgtgcacggtgctctggcacctccctgcagtgccagctctcaatcgcacaggggacccagggcctggcccctccatccagaaaacctatgacctcacccgctacctggagcaccaactccgcagcttggctgggacctatctgaactacctgggcccccctttcaacgagccagacttcaaccctccccgcctgggggcagagactctgcccagggccactgttgacttggaggtgtggcgaagcctcaatgacaaactgcggctgacccagaactacgaggcctacagccaccttctgtgttacttgcgtggcctcaaccgtcaggctgccactgctgagctgcgccgcagcctggcccacttctgcaccagcctccagggcctgctgggcagcattgcgggcgtcatggcagctctgggctacccactgccccagccgctgcctgggactgaacccacttggactcctggccctgcccacagtgacttcctccagaagatggacgacttctggctgctgaaggagctgcagacctggctgtggcgctcggccaaggacttcaaccggctcaagaagaagatgcagcctccagcagctgcagtcaccctgcacctgggggctcatggcttc

SEQ ID NO: 60055 - DNA, 698 bp, Homo sapiens
cacagataaagataagttttactgtcatgctgcttttaacataacagagcaacatcacctaggaaaaaagtttgtaggaggatttttaatccatatatttgtcttatggctagataaagatttctctgaaaaaaagaagcatgtcaggaatctctgggtgcccctttttcctctggggacttctagcattgttgggcttggctttggttatatcactgatcttcaatatttcccactatgtggaaaagcaacgacaagataaaatgtacagctactccagtgaccacaccagggttgatgagtattatattgaagacacaccaatttatggtaacttagatgatatgatttcagaaccaatggatgaaaattgctatgaacaaatgaaagcccgaccagagaaatctgtaaataagatgcaggaagccaccccatctgcacaggcaaccaatgaaacacagatgtgctacgcctcacttgatcacagcgttaaggggaagcgtagaaagcccaggaaacagaatactcatttctcagacaaggatggagatgagcaactacatgcaatagatgccagcgtttctaagaccaccttagtagacagtttctccccagaaagccaggcagtagaggaaaacattcatgatgatcccatcagactgtttggattgatccgtgctaagagagaacctataaac

SEQ ID NO: 60056 - DNA, 1549 bp, Homo sapiens
aattcccgggtcgacgatttcgtggccgtcatggcgccccgaaccctcgtcctgctactctcgggggctctggccctgacccagacctgggcgggctctcactccatgaggtatttcttcacatccgtgtcccggcccggccgcggggagccccgcttcatcgcagtgggctacgtggacgacacgcagttcgtgcggttcgacagcgacgccgcgagccagaggatggagccgcgggcgccgtggatagagcaggagggtccggagtattgggacggggagacacggaaagtgaaggcccactcacagactcaccgagtggacctggggaccctgcgcggctactacaaccagagcgaggccggttctcacaccgtccagaggatgtatggctgcgacgtggggtcggactggcgcttcctccgcgggtaccaccagtacgcctacgacggcaaggattacatcgccctgaaagaggacctgcgctcttggaccgcggcggacatggcagctcagaccaccaagcacaagtgggaggcggcccatgtggcggagcagttgagagcctacctggagggcacgtgcgtggagtggctccgcagatacctggagaacgggaaggagacgctgcagcgcacggacgcccccaaaacgcatatgactcaccacgctgtctctgaccatgaagccaccctgagatgctgggccctgagcttctaccctgcggagatcacactgacctggcagcgggatggggaggaccagacccaggacacggagctcgtggagaccaggcctgcaggggatggaaccttccagaagtgggcggctgtggtggtgccttctggacaggagcagagatacacctgccatgtgcagcatgagggtttgcccaagcccctcaccctgagatgggagccgtcttcccagcccaccatccccatcgtgggcatcattgctggcctggttctctttggagctgtgatcactggagctgtggtcgctgctgtgatgtggaggaggaagagctcagatagaaaaggagggagctactctcaggctgcaagcagtgacagtgcccagggctctgatgtgtctctcacagcttgtaaagtgtgagacagctgccttgtgtgggactgagaggcaagagttgttcctgcccttccctttgtgacttgaagaaccctgactttgtttctgcaaaggcacctgcatgtgtctgtgttcgtgtaggcataatgtgaggaggtggggagaccaccccacccccatgtccaccatgaccctcttcccacgctgacctgtgctccctccccaatcatctttcctgttccagagaggtggggctgaggtgtctccatctctgtctcaacttcatggtgcactgagctgtaacttcttccttccctattaaaattagaaccttagtataaatttactttctcaaattcttgccatgagaggttgatgagttaattaaaggagaagattcctaaaatttgagagacaaaataaatggaagacatgagaaccttccaaaaaaaaa

SEQ ID NO: 60057 - DNA, 1906 bp, Homo sapiens
tggccgcccgcgtatgtaagattggatcctttaaaacggccgccccttttttttttttttaagtgaaataatagatttattcaaagagaaataaaatgtcctgggtaaagcttctgtaataatactatttctgatactgtatctctgaaaaatggctaactagtcaccttatcaatacatttaaggcatcaataataggtaccactgaggacatacattgtgaagaaagagaagaataagtcaaatactaaaacatacttatcatgacaactcaaggtgacatgaatatttaatgaaaatttagaatataacaacatatgactctcattctgtggacataaaaggaaaaatacagtaattcattttactcattacattttacaaaatcagcccaatgaagcagtattttttaataaaaacagtaatttaatttcaaacaaatatattaccatcctattcctttatcttgtatatatgtatctaattggcaaaacatactttactgaaatcagtaacaatccaatccatgatacttcaattgcttcgatcaataaacatcttaaatttgaaactcatttttcttatgccataagcctgattatcagttctataaaaacgctacaccctattgcttggcccattaagtgtaactagtcttctgcacaaggctaagtggctaaggtacttttgaacaaccacacacaattcatcaagcacacacactcactcctgctcctctcacacacggccaccagagcagctcccctagttctcttgttcctcatagtgagcatagccactagcataggtccttcctaaattcaaattagtaaacaaatctgatgactcagtatctgaatcctttctgccttcatcttcttcctcttcatcatcctctgcttcatactcatcctcctcctcatcgtggtagctggtatcaccatacttatcagatgaaaggttcttccaataagcatcatacccagaagctccatctccctcttcacctccagtctgcctgccaaatttcagggagcgtgttgacatgctaaggtccttagtctcctgagtttcatgcccacatttaggacaaggaggctgttttcctttttcttgcttaaacactttgctccttgtatgatcatcacagaaacaagccttacaacggagacatgagtgctgaccaagccgattgcatgaaacacatttaaatgtttctgcctctaaaacctggcagctggcttgatgctcaaattgatcatcttcacagagaaagttatggcaaaaagaacaactgaatattctgcctccatggtcccacacgcctcgttcacattcaacacactcagcatcggtaagagggcaggcacaagcatgtgtactgagacatttcctaccatggcaaacccaagcttcacagaagtcacatattgcacccaccattgcaaggccagtactgtatacaccagcatgctttatgacacagtctgaagacttcatcatgcactttgttttcccacactgtgcacaaattggtaacttctgtacagaattacaaaagtagcaaaatgctctattcttctgccgcctctgacacttgtcacattccattgaggcattacatggatgtttagctaaatctatagtgcttcttgatgctcttagttgtttttcacgttctcggcggttctcagccttcttcctcgcaccagtcttttttttaggcattttcccctcgtgcgcgctccgggcaaacctcgctcactttcgccgggagaccggactcactcagggggccgagggacagggaatggcgtgaggcccacccgcgacagcagtaaatccaactcgtggaccaggactccgggaaagaaggtactaacagccagggaggctgacagccgat

SEQ ID NO: 60058 - DNA, 1192 bp, Homo sapiens
agtttgtagcggacaacatggcggccttcatgctgggctcgctgctgcggacgttcaagcagatggttccttcatcagcttcaggccaagttcgaagtcactatgtagactggagaatgtggcgcgatgtgaagagacgaaaaatggcctatgaatacgcagatgagaggctacgtattaattcactcaggaagaataccattttgccaaaaattcttcaggatgtggctgatgaagaaattgctgccctcccccgggatagctgtcctgttagaatcagaaatcggtgtgttatgacgtcccgtccgcgtggtgtgaagcggcgctggaggcttagtcgtatagtcttccgtcacttagctgaccatgggcaactttctgggatccagcgagcgacatggtaaatgagctccagaacctattgagcttgcagggaagccaagcttgcagttccagcaagcaaagattttttttaatagaccaaaccctaatctctacaggggcccagtacagttgtttggcctacctgatgctatctctaaactacttttaaaatgaagacatttgggtgtttcgtgtcagtgaattatcttttctcttggacttaacaaacatactgttcccatacatagtacaaagagtagcataataaatattttctgtgaatgttttttataccctccttttaagtttaatcttttagtaacatataggggtttttgtattaagagcattatttcataaaatgctatcttatacataatccaactaattgacatgtagctcatgtatggcagtttgtaatcctggactagctttgctgacctgcagagctccccttaactattattgttagataaacagattggatagcaaggctgctgttctggattatctaatgctccacttcttcttgtgatggctgaacaaaagaaccactaagtgttttcttgtccatccttaagggactttaaaacaaattatgcctctttaagtccttgaaagtctccatctaaagaggaaaagtttgttggaacagtatatattccctattttbcatggttatttaatccataacagaaatgagtaagggtagcacaaagttctcattcagtaactcaacagtgtgatcatcagcccagtgataaaaatatacatactgaatggvggtacctacttaccatcaggaaat

SEQ ID NO: 60059 - DNA, 1529 bp, Homo sapiens
ccgcggggcccgtcgccgaccctgagtgcagcctgacccgccctcgcgcgcgcgccctccccggccgggcccactcgccgcgcgcccagccatgaacctggcgagccagagcggggaggccggcgccggccagctgctcttcgccaacttcaaccaggacaacacgtccctagctgttggtagtaagtccggttataaatttttctccctttcttctgtggataagctggaacagatctatgaatgcaccgatacggaagatgtgtgcattgtagagagattgttctccagcagcctagtggccatcgtgagccttaaagcaccaaggaagctaaaggtttgccactttaagaagggaactgagatctgcaactacagctactccaacacgattctggctgtgaagctcaacaggcagaggctgatagtatgcctggaggagtccctgtacatccacaacattcgggacatgaaggtgctgcatacgatcagggagacgcctccaaaccctgcaggcctgtgtgcgctgtcaatcaacaacgacaactgctacttggcgtacccagggagcgcgaccatcggagaggtgcaggtcttcgataccattaatttgagagctgcaaacatgattccggctcacgacagtcctttagcggcactggcctttgacgcaagtggaactaaacttgccacggcttcggagaaggggaccgtgattagggtattttccattccagaaggacaaaaactctttgagtttcggagaggagtaaagaggtgcgtgagcatctgctccctggccttcagcatggacggcatgttcctctccgcctccagcaacactgagaccgtgcacatcttcaaactcgagactgtgaaagaaaaacccccagaggagcccaccacctggaccgggtacttcgggaaagtgctcatggcctccaccagctacctgccttcccaagtgacagaaatgttcaaccagggcagagccttcgccacggtccgcctgccattctgcggccacaaaaacatctgctcgctagccacaattcagaagatcccgcggttgttggtgggtgccgccgacgggtacctgtacatgtacaacctggacccccaggagggcggcgagtgtgccctgatgaagcagcaccggctggacggcagtctggaaacgaccaatgagatcttggactctgcctctcacgactgccccttagtcactcagacatacggcgcagctgcaggaaaaggtacttacgtgccttcatccccaacgagacttgcctacacagacgacctgggtgctgtgggtggcgcctgcctggaggacgaggccagcgccctgcgcctggatgaggacagcgagcacccgcccatgattcttcggactgactgaacttgacctgtgacctctgacccggggagcagagaacactggcttcacagaggactttgtgcattgctgctatgaactttgacctgagtcgggggagaggatggcagagactttattaaaaaaaaaa

SEQ ID NO: 60060 - DNA, 1681 bp, Homo sapiens
atcagagcattagatcttgctggagatcctacaagctataagactttgcagaaatgtccttctacagaaccagaagaaaaaggaaatatcgtggaagaacagccccagaaaaataccacggagaaattgggtgtgtcagctcccaccatacccgttagaaggcggctggcttgggatacagagaacacaagtgaagacgtacagaaacagcccggggagaaagaggaggaggacgacaatgaagaggaaggggacaggaaaacgggcaagcaggcttttatgggagagcaagagaagttggatgtacatgagaaatctaaggcagataagatgaaagaagggtcagattcttctgtatcctcagaaaaaggaggccggcttcctactcccaagctgagagaacttggtggaatccagaggactcatcatgatctcactactccagctgttggtggtgctgttttagtgtctccatctaagatgaagcctccagccccagaacagaggaaaagaatgacctctcaggattgtttagaaacttcaaagaatgattttactaagaaagaaagtcgtgctgtatccctactgacttctccagctgctggtataaaaacagttgatcctctgcctttgcgggaagattctgaagacaatatccacaaatttgctgaggcaactcttccagtttcaaaaattccaaaatacccaacaaatccccctggacagttgccttctccaccacatgttccatcctactggcatccctctcgacgaattcagggctctcttagagatccagagtttcagcacaatgtgggaaaagcaaggatgaacaatttgcagttacctcaacatgaagcctttaatgatgaagatgaggacagattgtctgagatttctgctcgctctgcagcttctagtctccgggcttttcaaactctggcacgagctaagaaaaggaaggagaatttctggggtaaaacataaacctagctgagttgcctttatctaaggaaacattggcataatttttctttattgcttactgtgttaaaattttttgagtgaagtttttcctaacattttctactttgaaatatttaatttccaatagaacagtttacttggaaattgttaacataggcttatacaaatttaacttttaaagaattctttttacatctatcccagagtacaaagacctagattattgaattcttcacatgtaactttcgtaataggtgtcatggatagattttcacctatccagagagtattctaaaaaaataaacaaagtgaagtaaaagttaagatcccagtgtgaagtatatattcccctaagatttgatatatgtatctttataattgatgatgttgaaaatgaatttggtggtccccttaacccttgcctgtagtgtttctttttattttagttcccttcctatacatgtttgccagtgttaagataattgtactttgaaaacacccagctgtatatatttttccttatttatgtaacgaaagtttgctgaaagatatgtatatttttgatctttgagtgtattctatttgtgtaaggactttggcttacatttgaataatgtctagattttgaaaaattacctgtataatggagaattaaaactttgtagacattttgaaataaaaatggatcaagtgc

SEQ ID NO: 60061 - DNA, 1517 bp, Homo sapiens
ttttttttttttcttgtgacgtcattttattttcagctacatagacatctttctcatgtattgttactagaacaacttgtatagggttttatggtttggggaaaacatttttaaaaaatggacttatctctattatacagagttataatataaaaatgatttaaaggctatatttttcagcatgtaggtagctacactgtaatcctgttgaagaaactttcctatttaagcttataggatgaaaatatataattaaagtcttctgatcatagcttgagaccatcaagggaatgtttagtttcctccacaaagagccaccaggattttctcataatctcctttggtttcatccaggatggcttggcaaagggagataccatacatcttctgatagaatgctttgatatcattcatgtcaatttcagaacgggaaaccataatcctgatcaatgccttatggcgagttccaacacctttcatggcttgatgaagcttctctgcaaagaaagctggtttgcttgtggcgcacttcacgatagctgtgaggcatttctcaatgtcacctttcaactccaggtccagaactttgttcatgtcatgcttactgtacttggtgtatttctgaaacactctgcgaagttgtggatagcttctggtggtaaggatggtattgaacacgtttacgtctgtcccctttctcctttctcctgcttcatacaaggccctggcatctgaatcagccaagtcttcattcacaccaaagtcctcagatcggtcacccttagcaagagaaagcaaagcgttccgaaaatctccagatgtgtctgaggttatgtctttggccagatctctcttcagttcctctctgtagaccctgttaatgtctctgatttctttgttagttcttgatgccaaaatctcaattagagtatcttcatcagttccaaggcccttcatggcagcacgaagttcatcagcatcaaattgcgctggagtttttagcagagctaaaacaacctcctcaaggtgacctgtaagggctttcttcagtgtttcatccaggggctttcctgtttcctggagatatgctgctttgatctgttgacgctgtgcattgtttcgcttagttagaatgtcaatgatggttgcttcatccacacctttaaccattatggccttatgcaaggcagcgacatccgaggatggattgaaggtaggataggggctcaccgctgatccgggaccacctttggatgacttcacagtttgaacatattcctgctcttcattttcaataaaccaggcctgcttgaggaattctgataccattgccatttttgaaaaagtgtctttatctctaccttcttgcaaagaactaaagagaaattcttctctgaagatttcacactggcagtggagacttgggcttctgattttataggattttaaaggaagccacacctagcaaccagaagttagtaattggctgccttctgtttgaagtacatggctcagct

SEQ ID NO: 60062 - DNA, 1256 bp, Homo sapiens
ggtggaattccacccccagcgggcgcgggccggagcacgggcacccagcatgggggtactgctcacacagaggacgctgctcagtctggtccttgcactcctgtttccaagcatggcgagcatggcggctataggcagctgctcgaaagagtaccgcgtgctccttggccagctccagaagcagacagatctcatgcaggacaccagcagactcctggacccctatatacgtatccaaggcctggatgttcctaaactgagagagcactgcagggagcgccccggggccttccccagtgaggagaccctgagggggctgggcaggcggtgcttcctgcagaccctcaatgccacactgggctgcgtcctgcacagactggccgacttagagcagcgcctccccaaggcccaggatttggagaggtctgggctgaacatcgaggacttggagaagctgcagatggcgaggccgaacatcctcgggctcaggaacaacatctactgcatggcccagctgctggacaactcagacacggctgagcccacgaaggctggccggggggcctctcagccgcccacccccacccctgcctcggatgcttttcagcgcaagctggagggctgcaggttcctgcatggctaccatcgcttcatgcactcagtggggcgggtcttcagcaagtggggggagagcccgaaccggagccggagacacagcccccaccaggccctgaggaagggggtgcgcaggaccagaccctccaggaaaggcaagagactcatgaccaggggacagctgccccggtagcctcgagagcaccccttgccggtgaaggatgcggcaggtgctctgtggatgagaggaaccatcgcaggatgacagctcccgggtccccaaacctgttcccctctgctactagccactgagaagtgcactttaagaggtgggagctgggcagacccctctacctcctccaggctgggagacagagtcaggctgttgcgctcccacctcagccccaagttccccaggcccagtggggtggccgggcgggccacgcgggaccgactttccattgattcaggggtctgatgacacaggctgactcatggccgggctgactgcccccctgccttgctccccgaggcctgccggtccttccctctcatgacttgcagggccgttgcccccagacttcctcctttccgtgtttctgaaggggaggtcacagcctgagctggcctcctatgcctca

SEQ ID NO: 60063 - DNA, 500 bp, Homo sapiens
tttcgtggaggagtttcagcggatgcagattctttctctgtcacccaggctatagtgtgcaggggcacgatctcagctcactgcaacctccacctcccgggttcaagtgattctcctatctcagcttccctagtagctgggattacaggctcagctcctggaactccggacaaacaactaccagctttcagatgaactacgcaagaatggtgttgaactcaccagtcttcgacagaaggtcgcctacttggataaggagttcagcaaagctcagaaggcactgagcaagagcaagaaagctcaggaagtcgaggtattgctgagtgaaaatgagatgctgcaggcaaagctgcacagccaggaggaggacttccgtttgcagaacagcacactaatggccgagttcagcaagctctgcagccagatggaacagctggagcaagagaaccagcaactgaaggagggggctgcaggagcaggggttgcccaagctgggcccg

SEQ ID NO: 60064 - DNA, 2325 bp, Homo sapiens
tcccgcgtcgacgatttcgtcaccctcacctgcggtgcccagctgcccaggctgaggcaagagaaggccagaaaccatgcccatggggtctctgcaaccgctggccaccttgtacctgctggggatgctggtcgcttcctgcctcggacggctcagctggtatgacccagatttccaggcaaggctcacccgttccaactcgaagtgccagggccagctggaggtctacctcaaggacggatggcacatggtttgcagccagagctggggccggagctccaagcagtgggaggaccccagtcaagcgtcaaaagtctgccagcggctgaactgtggggtgcccttaagccttggccccttccttgtcacctacacacctcagagctcaatcatctgctacggacaactgggctccttctccaactgcagccacagcagaaatgacatgtgtcactctctgggcctgacctgcttagaaccccagaagacaacacctccaacgacaaggcccccgcccaccacaactccagagcccacagctcctcccaggctgcagctggtggcacagtctggcggccagcactgtgccggcgtggtggagttctacagcggcagcctggggggtaccatcagctatgaggcccaggacaagacccaggacctggagaacttcctctgcaacaacctccagtgtggctccttcttgaagcatctgccagagactgaggcaggcagagcccaagacccaggggagccacgggaacaccagcccttgccaatccaatggaagatccagaactcaagctgtacctccctggagcattgcttcaggaaaatcaagccccagaaaagtggccgagttcttgccctcctttgctcaggtttccagcccaaggtgcagagccgtctggtggggggcagcagcatctgtgaaggcaccgtggaggtgcgccagggggctcagtgggcagccctgtgtgacagctcttcagccaggagctcgctgcggtgggaggaggtgtgccgggagcagcagtgtggcagcgtcaactcctatcgagtgctggacgctggtgacccaacatcccgggggctcttctgtccccatcagaagctgtcccagtgccacgaactttgggagagaaattcctactgcaagaaggtgtttgtcacatgccaggatccaaaccccgcaggcctggccgcaggcacggtggcaagcatcatcctggccctggtgctcctggtggtgctgctggtcgtgtgcggcccccttgcctacaagaagctagtgaagaaattccgccagaagaagcagcgccagtggattggcccaacgggaatgaaccaaaacatgtctttccatcgcaaccacacggcaaccgtccgatcccatgctgagaaccccacagcctcccacgtggataacgaatacagccaacctcccaggaactcccgcctgtcagcttatccagctctggaaggggctctgcatcgctcctccatgcagcctgacaactcctccgacagtgactatgatctgcatggggctcagaggctgtaaagaactgggatccatgagcaaaaagccgagagccagacctgtttgtcctgagaaaactgtccgctcttcacttgaaatcatgtccctatttctaccccggccagaacatggacagaggccagaagccttccggacaggcgctgctgccccgagtggcaggccagctcacactctgctgcacaacagctcggccgcccctccacttgtggaagctgtggtgggcagagccccaaaacaagcagccttccaactagagactcgggggtgtctgaagggggccccctttccctgcccgctggggagcggcgtctcagtgaaatcggctttctcctcagactctgtccctggtaaggagtgacaaggaagctcacagctgggcgagtgcattttgaatagttttttgtaagtagtgcttttcctccttcctgacaaatcgagcgctttggcctcttctgtgcagcatccacccctgcggatccctctggggaggacaggaaggggactcccggagacctctgcagccgtggtggtcagaggctgctcacctgagcacaaagacagctctgcacattcaccgcagctgccagccaggggtctgggtgggcaccaccctgacccacagcgtcaccccactccctctgtcttatgactcccctccccaaccccctcatctaaagacaccttcctttccactggctgtcaagcccacagggcaccagtgccacccagggccctgcacaaaggggcgcctagtaaacctt

SEQ ID NO: 60065 - DNA, 1519 bp, Homo sapiens
cccgggtcgacgatttcgtgagaagtgaggctgagtgaggtggggtctgcagggatccaggtgggaggggcccagccagccaaggtcaggcccagccccccaaggtcaggcccagcccctcggcaggaggacggggaccgcggcctttgggcagggctgacttggcactgaccacaagggaggcccttttgcaataggggaaaataagccagatggataaaggaagtgctggtcaccctggaggtgcactggtttggggaaggctcctggcccccacagccctcttcggagcctgagcccggctctcctcactcacctcaacccccaggcggcccctccacagggcccctctcctgcctggacggctctgctggtctccccgtcccctggagaagaacaaggccatgggtcggcccctgctgctgcccctactgcccttgctgctgccgccagcatttctgcagcctagtggctccacaggatctggtccaagctacctttatggggtcactcaaccaaaacacctctcagcctccatgggtggctctgtggaaatccccttctccttctattacccctgggagttagccacagctcccgacgtgagaatatcctggagacggggccacttccacaggcagtccttctacagcacaaggccgccttccattcacaaggattatgtgaaccggctctttctgaactggacagagggtcagaagagcggcttcctcaggatctccaacctgcagaagcaggaccagtctgtgtatttctgccgagttgagctggacacacggagctcagggaggcagcagtggcagtccatcgaggggaccaaactctccatcacccaggctgtcacgaccaccacccagaggcccagcagcatgactaccacctggaggctcagtagcacaaccaccacaaccggcctcagggtcacacagggcaaacgacgctcagactcttggcacataagtctggagactgctgtgggggtggcagtggctgtcactgtgctcggaatcatgattttgggactgatctgcctcctcaggtggaggagaaggaaaggtcagcagcggactaaagccacaaccccagccagggaacccttccaaaacacagaggagccatatgagaatatcaggaatgaaggacaaaatacagatcccaagctaaatcccaaggatgacggcatcgtctatgcttcccttgccctctccagctccacctcacccagagcacctcccagccaccgtcccctcaagagcccccagaacgagaccctgtactctgtcttaaaggcctaaccaatggacagccctctcaagactgaatggtgaggccaggtacagtggcgcacacctgtaatcccagctactctgaagcctgaggcagaatcaagtgagcccaggagttcagggccagctttgataatggagcgagatgccatctctagttaaaaatatatattaacaataaagtaacaaatttaaaaaaaaaaaaaaggggg

SEQ ID NO: 60066 - DNA, 2195 bp, Homo sapiens
cagggcagccttcagtctgattcaggagaacgaggtcctcttcaccatgtgcttcatccccctggtctgctggatcgtgtgcactggactgaaacagcagatggagagtggcaagagccttgcccagacatccaagacctccaccgcggtgtacgtcttcttcctttccagtttgctgcagccccggggagggagccaggagcacggcctctgcgcccacctctgggggctctgctctttggctgcagatggaatctggaaccagaaaatcctgtttgaagagtccgacctcaggaatcatggactgcagaaggcggatgtgtctgctttcctgaggatgaacctgttccaaaaggaagtggactgcgagaagttctacagcttcatccacatgactttccaggagttctttgccgccatgtactacctgctggaagaggaaaaggaaggaaggacgaacgttccagggagtcgtttgaagcttcccagccgagacgtgacagtccttctggaaaactatggcaaattcgaaaaggggtatttgatttttgttgtacgtttcctctttggcctggtaaaccaggagaggacctcctacttggagaagaaattaagttgcaagatttctcagcaaatcaggctggagctgctgaaatggattgaagtgaaagccaaagctaaaaagctgcagatccagcccagccagctggaattgttctactgtttgtacgagatgcaggaggaggacttcgtgcaaagggccatggactatttccccaagattgagatcaatctctccaccagaatggaccacatggtttcttccttttgcattgagaactgtcatcgggtggagtcactgtccctggggtttctccataacatgcccaaggaggaagaggaggaggaaaaggaaggccgacaccttgatatggtgcagtgtgtcctcccaagctcctctcatgctgcctgttctcatggattggggcgctgtggcctctcgcatgagtgctgcttcgacatctccttggtcctcagcagcaaccagaagctggtggagctggacctgagtgacaacgccctcggtgacttcggaatcagacttctgtgtgtgggactgaagcacctgttgtgcaatctgaagaagctctggttggtgaattctgccttacgtcagtctgttgttcagctttgtcctcggtactcagcactaatcagaatctcacgcacctttactgcgaggcaacactctcggagacaagggatcaaactactctgtgagggactcttgcaccccgactgcaagcttcaggtgttggaattagacaactgcaacctcacgtcacactgctgctgggatctttccacacttctgacctccagccagagcctgcgaaagctgagcctgggcaacaatgacctgggcgacctgggggtcatgatgttctgtgaagtgctgaaacagcagagctgcctcctgcagaacctggggttgtctgaaatgtatttcaattatgagacaaaaagtgcgttagaaacacttcaagaagaaaagcctgagctgaccgtcgtctttgagccttcttggtaggagtggaaacggggctgccagacgccagtgttctccggtccctccagctgggggccctcaggtggagagagctgcgatccatccaggccaagaccacagctctgtgatccttccggtggagtgtcggagaagagagcttgccgacgatgccttcctgtgcagagcttgggcatctccttaacgccccgggtgaggaagacaccaggacaatggacagccatcgggtgttgttcctcatcacagcgccctcagttagaggatgttcctcttggtgacctcatgtaattagctcattcaataaagcactttctttatttttctcttctctgtctaactttctttttcctatctttttttcttctttgttctgtttacttttgctcatatcatcattcccgctatctttctattaactgaccataacacagaactagttgactatatattatgttgaaattttatggcagctatttatttatttaaattttttgtaatagttttgttttctaataagaaaaatccatgctttttgtagctggttgaaaattcaggaatatgtaaaactttttggtatttaattaaattgattccttttcttaatttt

SEQ ID NO: 60067 - DNA, 1761 bp, Homo sapiens
acgtccgtgggggtctgcaatggccacctttagccgccaggaatttttccagcagctactgcaaggctgtctcctgcctactgcccagcagggccttgaccagatctggctgctccttgccatctgcctcgcctgccgcctcctctggaggctcgggttgccatcctacctgaagcatgcaagcaccgtggcaggcgggttcttcagcctctaccacttcttccagctgcacatggtttgggtcgtgctgctcagcctcctgtgctacctcgtgctgttcctctgccgacattcctcccatcgaggcgtcttcctatccgtcaccatcctcatctacctactcatgggtgagatgcacatggtagacaccgtgacatggcacaagatgcgaggggcacagatgattgtggccatgaaggcagtgtctctgggcttcgacctggaccggggcgaggtgggtacggtgccctcgccagtggagttcatgggctacctctacttcgtgggcaccatcgtcttcgggccctggatatccttccacagctacctacaagctgtccaaggccgcccactgagctgccggtggctgcagaaggtggcccggagcctggcactggccctgctgtgccttgtgctgtccacttgcgtgggcccctacctcttcccgtacttcatccccctcaacggtgaccgcctccttcgcaacaagaaacgcaaagccaggggcaccatggtaaggtggctgcgagcctacgagagtgctgtctccttccacttcagcaactattttgtgggctttctttccgaggccacggccacgttggcgggggctggctttaccgaggagaaggatcacctggaatgggacctgacggtgtccaagccactgaatgtggagctgcctcggtcaatggtggaagttgtcacaagctggaacctgcccatgtcttattggctaaataactatgttttcaagaatgctctccgcctggggaccttctcggctgtgctggtcacctatgcagccagcgccctcctacatggcttcagtttccacctggctgcggtcctgctgtccctggcttttatcacttacgtggagcatgtcctccggaagcgcctggctcggatcctcagtgcctgtgtcttgtcaaagcggtgcccgccagactgttcgcaccagcatcgcttgggcctgggggtgcgagccttaaacttgctctttggagctctggccatcttccacctggcctacctgggctccctgtttgatgtcgatgtggatgacaccacagaggagcagggctacggcatggcatacactgtccacaagtggtcagagctcagctgggccagtcactgggtcacttttggatgctggatcttctaccgtctcataggctgaggcacatctgtggaccctcataaccctcttaagacccctctcagggtgccactgatgggggatgagggaaggccctctctctactccttgaccccctccatccttgacccccaacacctcaacacacacacacacacacacacacaaaatcacaccattttcatgcctgtcaatccccaccccaccacaaggcaggaagggggtggtgcctgctggggcctagagggggatgcttggggaaacagagaaggggagatccagggcctccccgccttccttcttcctttttatatacaatttgttattgtcaaataaaagtaggaaatattcaaaaaaaaaaaaaaggggggggccgt

SEQ ID NO: 60068 - DNA, 1803 bp, Homo sapiens
gagcccagccgagcgtccgccgctgcccgtgcgcctctgcgcctccgcgccatggccggcctcaactccctggaggcggtgaaacgcaagatccaggccctgcagcagcaggcggacgaggcggaagaccgcgcgcagggcctgcagcgggagctggacggcgagcgcgagcggcgcgagaaagctgaaggtgatgtggccgccctcaaccgacgcatccagctcgttgaggaggagttggacagggctcaggaacgactggccacggccctgcagaagctggaggaggcagaaaaagctgcagatgagagtgagagaggaatgaaggtgatagaaaaccgggccatgaaggatgaggagaagatggagattcaggagatgcagctcaaagaggccaagcacattgcggaagaggctgaccgcaaatacgaggaggtagctcgtaagctggtcatcctggagggtgagctggagagggcagaggagcgtgcggaggtgtctgaactaaaatgtggtgacctggaagaagaactcaagaatgttactaacaatctgaaatctctggaggctgcatctgaaaagtattctgaaaaggaggacaaatatgaagaagaaattaaacttctgtctgacaaactgaaagaggctgagacccgtgctgaatttgcagagagaacggttgcaaaactggaaaagacaattgatgacctggaagagaaacttgcccaggccaaagaagagaacgtgggcttacatcagacactggatcagacactaaacgaacttaactgtatataagcaaaacagaagagtcttgttccaacagaaactctggagctccgtgggtctttctcttctcttgtaagaagttccttttgttattgccatcttcgctttgctggaaatgtcaagcaaattatgaatacatgaccaaatattttgtatcggagaagctttgagcaccagttaaatctcattccttccctttttttttcaaatggcaccagctttttcagctctcttattttttccttaagtagcatttattcctaaggtaggcagggtatttcctagtaagcatactttcttaagacggaggccatttggttcctgggagaataggcagccccacactttgaagaatacagaccccagtatctagtcgtggatataattaaaacgctgaagaccataaccttttgggtcaactgttggtcaaactataggagagaccagggaccatcacatgggtagggattttccatccagagccaataaaaggactggtgggggccgggggtggctattgtgggaagtcataacccacagatagatcaacctaagaatcctggcccttctccactctccaccatgcaggacaaacatcttctcaagcagtcaacgtagaatgcttgggaaatagtcataattacccacatatagtaattaatagatggtaattaattgatccttgatgtgatgttcttttgcatatttccttcattctaaagttgttccctggccgggagcgttggctttcgcctgtaatcccaacactttgggaggccaggacagatcacttgaggtcaggagttcgagaccagcccagccaacatggcgaaaccatgtctctactaaaaatacaaaaattatggtgacgcctgcctgtagtcccagctactcgggaggctgaggcaggaggatcgcttgaacccaggaagtggagactgcagtgagccgatatcgcaccacagcgctccagcctggtcgacagagtgagactccatctcaagaaaaaaaaaa

SEQ ID NO: 60069 - DNA, 2176 bp, Homo sapiens
ccaaaaatctacttgcctaaattgtttgtatgagctttgggaatatattgatagttacagacaattcagtgaaacttagaggcaaccacacaatcacgagtatctgtaagtattcagttttcaaactgaacagggctcacacccgtcagacacccagaaagaataaggacaaatcccttgtttattattaaaaactcatataggatgctttatttatagatacacagttaactatgtacaaaataaaaaaaaggaaaaccaatctactaaaatatattaactctaagaaaatcagatcttattcctgtttctccatactaggcataattattttcaaagctatacaatacgaagtttatcagtcttatctgtttgccataacatcattatgaattttctcttttaaaaatggcaataacaagtgacttatgttctaataaaatttggatcacagctagcaaatgaaagactatgagactcaatcacttttaatcattaagtttgtgttagtctttattaaaaacaaaaaataactaaaatttcagacagcgatgtacataatatatataagaatatacccaaaaaagtaaatttctaccaccctcgcacagcagaaatttcaatgggttattctataccaaatccaagtgtttacatccaagatgtcacagaggtaacttccttttgtaccttattgagctctggaaacagttcctgtatcacaatgtccaataaaacataagtcagctgcttgttgagtactggttgctgtaagccatcaaacagaagtctgatgctttcatacttggtttcttcaccaatacacttgactaacagatctggaatgtaattcatcatttcttcaaaagtctgttttgctcctttttgcttatcttggagagagcgaggttcagtgttttcacagaatatagcatctctgagaagtgttatgagtgagaccaaacggtgctcctgaaatagctgttctagtttacactgaagatagtaatcagtatacatttccagggtgtttttaaagaggattcgagttcccattaagagatgatgaagccagtcaggaacctggaaaactacccgtcctacatacatcaggtaatcatagactccttctacagtcatcacctccataaaataattctgattttgctttctctctgtattttcagcacggtttgcattatttttaaacagatcattgaaaagcttcttgttgttttctgaagtagggctgagaatggtcagttctggtctacttggtttaggctttggagactcacaagaattaatgaaattcatgataaaaggttccaaatgctgacctttctctttcattagttttccaggaacagattttataattttcccaagatttacatctggtagtatcttatcaagaaattgtgtttccccaccattaggggaaagaaagtctgccagaagttgactattactcagttctggatgctgcagaagtttctgtagatattcttggaactcttccctctttgactttaagaattcataatttttggggccaatgatcctcttagaaggaagctgggcatcaggaaatgcaccatgaaattctgttagttttgattcaagtacatagaattcaagatatcttctatagacagaccaatgttcaggctcgtgtccaactgctcttctatcatttctttcaacatcaatacaaaacacaggaattctttcttttttctccttcctttcagaggagggatcctcaaaaaagtctacatatggaatgctaattttccatgcagcaaggtttcggggagtattaggtgtgctcacagcctccactggagaatcatcttccattacaacaataccttcttcaataaaatcatcttcaccttcagctacaccataattaggcaacatagctccctccattgtggtacttttgaatactcctttaattttgctacctattctgctgattccaaatgattctccccttttctgtgtgttccgaaaatcatccaaacttaggctacctctgttcaattttgaattgcgtgttggtgattctgcccctcttaaaagttgtctgaaatactcatccctatggcagaacataggagtaaatacattctccaaaagggaaagaacatgttcatatgctcggacg

SEQ ID NO: 60070 - DNA, 2312 bp, Homo sapiens; identical to SEQ ID NO: 58748

SEQ ID NO: 60071 - DNA, 414 bp, Homo sapiens
tttcgtgtggcggccggctcccaaggtggcagcaagacttttgttctctgacctggggttcttggcctcctggattccaaagaatggaaccttggggccatgcggtgagtgttgtggttctattagaaaccgtgggtcacggaagagaactgtggaacccagtgactagtgttcagctggattaggatgaacctgggcacttagcagtgcaggagcaatagtgagcctctagcccgatccagcaatgggtgcctcgctggatcagaagtgcagtggacaccctgcctgatccagagtggtggaagtcagtggcaggtctgtgacagcggcattcagcagtggtggacagctcgagccagaacaaacacataccagaagagtgagcagttgcaagaattaatagagtgaaaacag

SEQ ID NO: 60072 - DNA, 2840 bp, Homo sapiens
gcgaggcgttctccgcgggcagccggcggcggggccttgccttacagcgcggggtcctcggcggcctgggtggctactgcccctgctgctgtcgtaggcgaggacggctgttagtgctgctgctgttggttcgtcgcggcggcgaaggaggaggaggaagagggcgaggcgacaagagaagaaggaggcaggcgcggcggcagcggcggcgccccgagccggcggaggcgaggggggggaagatggcggacgtgcttagcgtcctgcgacagtacaacatccagaagaaggagattgtggtgaagggagacgaagtgatcttcggggagttctcctggcccaagaatgtgaagaccaactatgttgtttgggggactggaaaggaaggccaacccagagagtactacacattggattccattttatttctacttaataacgtgcacctttctcatcctgtttatgtccgacgtgcagctactgaaaatattcctgtggttagaagacctgatcgaaaagatctacttggatatctcaatggtgaagcgtcaacatcggcaagtatagacagaagcgctcccttagaaataggtcttcagcgatctactcaagtcaaacgagctgcagatgaagttttagcagaagcaaagaaaccacgaattgaggatgaagagtgtgtgcgccttgataaagagagattggctgcccgtttggagggtcacaaagaagggattgtacagactgaacagattaggtctttgtctgaagctatgtcagtggaaaaaattgctgcaatcaaagccaaaattatggctaagaaaagatctactatcaagactgatctagatgatgacataactgcccttaaacagaggagttttgtggatgctgaggtagatgtgacccgagatattgtcagcagagagagagtatggaggacacgaacaactatcttacaaagcacaggaaagaatttttccaagaacatttttgcaattcttcaatctgtaaaagccagagaagaagggcgtgcacctgaacagcgacctgccccaaatgcagcacctgtggatcccactttgcgcaccaaacagcctatcccagctgcctataacagatacgatcaggaaagattcaaaggaaaagaagaaacggaaggcttcaaaattgacactatgggaacctaccatggtatgacactgaaatctgtaacggagggtgcatctgcccggaagactcagactcctgcagcccagccagtaccaagaccagtttctcaagcaagacctcccccaaatcagaagaaaggatctcgaacacccattatcataattcctgcagctaccacctctttaataaccatgcttaatgcaaaagaccttctacaggacctgaaatttgtcccatcagatgaaaagaagaaacaaggttgtcaacgagaaaatgaaactctaatacaaagaagaaaagaccagatgcaaccagggggcactgcaattagtgttacagtaccttatagagtagtagaccagccccttaaacttatgcctcaagactgggaccgcgttgtagccgtttttgtgcagggtcctgcatggcagttcaaaggttggccatggcttttgcctgatggatcaccagttgatatatttgctaaaattaaagccttccatctgaagtatgatgaagttcgtctggatccaaatgttcagaaatgggatgtaacagtattagaactcagctatcacaaacgtcatttggatagaccagtgttcttacgggtttgggaaacattggacaggtacatggtaaagcataaatcgcacttgagattctgaattatttggctcctccatttctggaaattgagactcaagctttatgaatttatcaagaacttaaaaatgaagaaggtcacagattgatcttttataagaccttatttgatgctttgtgcttcaaggagatgatacctgtcatccatataagcaaactttttggcttacaactatttttttaatattagccttctagtctgtaatggaaattgtatattttgatagaagttttttctccattggttaaattagcattacttaaaatttgtttctttagaaaataaatgcaggttataaatgtgtgtatatttagagattataaggctctctgagcccatcttctggatttttccatggctcctataaattctttttactggaaaatactatgtttatgaatggtattaaattttagtcctctggaacatcccaaaacccaagcaaagggatgtgactattttgaatgaatcagaatgtcaacttgtatgtacactatatctacacttactcattatttaaaaagaataatgaaaaatctagatcaattcttcaatttgattgaactgttcagccttttcaagatttttttatttacaaatgattacatttaaatgaatgtacattcttctcactgactttggtgattttgaaacctagaatgatgtgtttctatctgtaatatctttccatttgaaaaaaatctcaaaacacagattaaaaccacaataggctgtagtattttttattttgggagccagagtatgatttgggggaagaatatgtatcagccctattgcagtataactttaagctccttttctctttagtccacttttgattgtaatttttatggtataggattttgaatcttctattttaggcttgtcagtcttggagttcttatcttccattatccctaaatattgataaactcccaggcaccaaagaaaacatttgcttaattgtctgaaaagaaacaagagaaaaacactggtatttttg

SEQ ID NO: 60073 - DNA, 1630 bp, Homo sapiens
gaattcccgggtcgacgatttcgtggcagtcaggcctccccgctctgtgctacctgcggcccggctctcctccgcgcccccactcgcgctgcgatgacgcgctcactgttcaagggaaacttttggagtgcagacatcctcagcaccatcggctatgacaacattatccaacatctgaacaatggccgcaagaactgcaaagagtttgaagactttctaaaagaaagggcagcaattgaagagaggtatggcaaagatctgctcaacctctctaggaagaagccgtgtggacagtctgaaatcaacaccctgaagcgggcccttgaagtcttcaagcagcaagtagacaatgtggcacaatgtcacattcagcttgcacagagtttaagagaagaggccaggaagatggaagaattcagggaaaagcaaaaactacaacgaaaaaagacagagctcataatggatgctatccataaacaaaagagcttacaattcaagaaaaccatggatgcaaagaagaactatgagcagaaatgccgggacaaagatgaggcagaacaggccgtcagccggagtgccaacctggtgaacccgaagcaacaagaaaagctttttgtgaaactggcaacttcaaagaccgcagtagaggactcagacaaagcatacatgctgcacatcggcaccctggataaggtccgagaagagtggcagagtgagcacatcaaggcctgcgaggcatttgaggctcaagaatgtgaacgaataaacttcttccggaatgcattgtggttacatgtgaatcagctgtcacaacaatgtgtcaccagtgatgaaatgtacgaacaagtccgaaagagtttagaaatgtgcagcattcagagggacattgaatactttgtgaatcaacgcaaaactggacagattccaccagcacccatcatgtatgagaatttctactcctcccagaagaatgcagtcccagcaggaaaggctacagggcctaacttggcaaggagaggacccctcccaattcctaaaagctcaccagatgatcccaattactctttggttgatgactacagtttgctctatcagtaaaatcaatgaaaccagagctttttccggctagtgcttctgtgatatggaaagggcacccagagcagcaggacctatagccacgttatgtcagcaatgaagactttgaagtgaacccttgctataattttttagagatttaaaatttatggtagacatttaggacaacataagcaagtagagttctgcagttttttgaagtttacaaattgccccattctgaagaattattctttcccagttactcaggttatgaatgaattaggttttcaacatgggaagcatgaaatccacttctggatttggagcatccacttgaggagcagaggtggcagcagaggattctgagccaccaactgcagtagtggctcctttggctttgggcagcctggctgtggagtttccacggcgacacacagcctcagtggtgcaagatttaaaattaccttcctttttggctggaagacttagaagccgcctgatcatactttctcattttacagatgaggaaataaagcctacaagtgtgaaatta

SEQ ID NO: 60074 - DNA, 1454 bp, Homo sapiens
tttcgtggcggcgctggtgagtttggtgtggtttcttcctcgcgtagctattgttgagttgtcctttgccttcagcggctggaggcaaactgttggtaccagggaagggtggtgatgaaagttgcttcagggaggcggcctccctagagttaccgttcctgtccggtaacccaaggggctggctttaaggcgaatctgtgaacccgagtgtgaaggccccgagtctgggtgtctgacggagagagggcagtttcccaccctagacgttccactttcctataatcctgaggaaagaatgacttttctttacgcctcctctcccttctgtagggggtgctggagtccgacctgccaagtgccgtgacacttctgaaaaatctccaggagcaagtgatggctgtaactgcacaagtgaaatcactgacacaaaaagttcaagctggtgcctatcctacagaaaagggtctcagcttcttggaagtgaaagaccagctgctgctcatgtaccttatggatttgacccacctcattctggacaaagcctcaggaggatctcttcagggacatgatgcagttttgagactggtagagattcgaacggttttggaaaagcttcgtcccttggaccaaaagctgaagtatcaaattgacaagctgatcaagactgcagtgacaggcagccttagtgagaatgacccacttcgttttaagcctcatcccagcaatatgatgagcaagttgagctctgaggatgaggaggaagatgaagcagaagatgaccagtctgaggcttcagggaagaaatctgtgaagggagtgtctaagaaatatgttcctccacgcttggttccagtacattatgatgaaacagaagctgagcgggagaagaagcgtctagaacgagccaagagacgggcattgagcagctctgtcattcgtgaacttaaggagcagtactcagatgctccagaggaaatccgtgatgctcggcatccccatgttacccgccagagtcaggaggaccaacacaggattaactatgaggagagcatgatggtgcgtttgagcgtcagtaagcgagagaaaggacggcgaaaacgagcaaatgtcatgagctcacaacttcattcccttacacacttcagtgacatcagtgctttgacagggggaactgttcatcttgatgaggatcagaatcctattaagaagcggaagaagatacctcagaaaggtcggaagaaaaaaggttttcggaggcggcggtgattatgggtgtacatatttgtatattttttgtcatcctgagatacttctaatttccattgtattattaggtggttttccctgggaattccatttaattgttttgctttgggacatgtgggaaagagccttactaataaaattgattttacttatgaattaaggcccctttttgcacaaaaaaaaagaag

SEQ ID NO: 60075 - DNA, 1950 bp, Homo sapiens
cgactggccttgagggagagctggggcctgctcccggagagatacggctatgtcgatcgaaatcgaatcttcggatgtgatccgccttattatgcagtacttgaaggagaacagtttacatcgggcgttagccaccttgcaggaggagactactgtgtctctgaatactgtggacagcattgagagttttgtggctgacattaacagtggccattgggatactgtgttgcaggctatacagtctctgaaattgccagacaaaaccctcattgacctctatgaacaggttgttctggaattgatagagctccgtgaattgggtgctgccaggtcacttttgagacagactgatcccatgatcatgttaaaacaaacacagccagagcgatatattcatctggagaaccttttggccaggtcttactttgatcctcgtgaggcatacccagatggaagtagcaaagaaaagagaagagcagcaattgcccaggccttagctggcgaagtcagtgtggtgcctccatctcgtctcatggcattgctgggacaggcactgaagtggcagcagcatcagggattgcttcctcctggtatgaccatagatttgtttcgaggcaaggcagctgtcaaagatgtggaagaagaaaagtttcctacacaactgagcaggcatattaagtttggtcagaaatcacatgtggagtgtgctcgattttctccagatggtcagtatttggtcactgggtctgttgatggattcattgaagtatggaactttactactggaaaaatcagaaaggatcttaagtaccaggcccaagataactttatgatgatggatgatgctgtcctctgcatgtgtttcagcagagatacagaaatgttagcaactggggcccaagatggaaaaatcaaggtgtggaagattcagagtggacaatgtttaaggagatttgagagggcacacagtaagggtgtcacctgtctaagcttttctaaggatagcagtcagatccttagtgcttcttttgaccagacaattagaattcatggtttaaaatctgggaaaaccctgaaggaatttcgtggccattcctcctttgttaacgaagcaacatttacacaagatggacattacattattagtgcatcctctgatggcactgtaaagatctggaatatgaagaccacagaatgttcaaatacctttaaatccctgggcagcaccgcagggacagatattaccgtcaacagtgtgattctacttcctaaaaaccctgagcactttgtggtgtgcaacagatcaaacacggtggtcatcatgaacatgcaggggcagattgtcagaagcttcagttctggtaaaagagaaggtggggactttgtttgctgtgccctctctccccgtggtgaatggatctactgtgtaggggaggactttgtgctctactgtttcagtacagtcactggcaaactggagagaactttgacagtgcacgagaaggatgtgattggtattgcacatcaccctcatcagaacctgattgctacctacagtgaagatggactcctaaagctctggaaaccataattcaacttttctttttaaatcagctcgaaagcatgtacttaaatgaagcatattcatgtaatgtgcttttttttttttttggccccttttttaaaaaaaaaaaaagggcgaaaatacccccaaaaaaatttgggaaaaattaaggtttaaaaacccaccccccttttttttttaaaaaattttaaggggattaatttattttttttaaagggggggcacccttaaagggttcaaaaaacccccccccgggaaggggaaaaccggattttttaaaaaaaaaattcccccccccttttatttggaaaggggggggaaaaggccccccccaaaaaaaaacttggaaaaaaggaacttttcat

SEQ ID NO: 60076 - DNA, 1535 bp, Homo sapiens
tttcgtcgcgtggacccgaaagccgctgggaaaagtttacccaaggtccagcctagcccctaggcaccatgtcggacagtgatctaggtgaggacgaaggcctcctctccctggcgggcaaaaggaagcgcagggggaacctgcccaaggagtcggtgaagatcctccgggactggctgtacttgcaccgctacaacgcctacccctcagagcaggagaagctgagcctttctggacagaccaacctgtcagtgctgcaaatatgtaactggttcatcaatgcccggcggcggcttctcccagacatgcttcggaaggatggcaaagaccctaatcagtttaccatttcccgccgcgggggtaaggcctcagatgtggccctcccccgtggcagcagcccctcagtgctggctgtgtctgtcccagcccccaccaatgtgctctccctgtctgtgtgctccatgccgcttcactcaggccagggggaaaagccagcagcccctttcccacgtggggagctggagtctcccaagcccctggtgacccctggtagcacacttactctgctgaccagggctgaggctggaagccccacaggtggactcttcaacacgccaccacccacacccccagagcaggacaaagaggacttcagcagcttccagctgctggtggaggtggcgctacagagggctgctgagatggagcttcagaagcagcaggacccatcactcccattactgcacactcccatccctttagtctctgaaaatccccagtaggcatctgccaagaagggtgctgaaggctccagccagctgtcctgggtttccgttttggttccctttcatacagagggttttctatggatcactgccaaacattgggatcatctcctctgtccagaggtcttcaacaggaagatgccagctggcaccactgcactgtgatgggggccctctcctctgctgactctgccgtttctccaggcctccgctcagtgatgagaccaagagatcggagacaagcatggtgctgctgcttctgctgcttctccagaaaatccctgggacacctttgttccagcctggtttcctgggctgggctcaggaaagctgccaaattcagtcctatgttgggtccaagctgcccctgtgctgtttctgtcaagccaggtgtggacattccaagttcatatgcgtgaacaaaagaaaagaggaacccagtggatgtaacagaaccgactccagttgaatgtttagatttttgctaaactcgttttctttttcccttttttgctgtggtttgcattcacggcagtagttagcccaggtgtggggaacgagagtgcactgcatgatagcgttctggtgagctgggaaggaccccaccactgccactgaggattgttttggaagaaaggaatatttttatcttggggaccagctaagtctctgcagtagtgtgaaattccaaatggttgttttatcattggtttggtttaccaaaaaaaaggcagggaaaaaaaaaaaaaa

SEQ ID NO: 60077 - DNA, 1120 bp, Homo sapiens
gtcgacgatttcgtgctgctggcttctgcggctgcggtgtcgatgtcgcggccagggccaagccgcttcgagttcacaggcggaacccctgcaggcggcgccccctacgcgaggtcacccctgggaaggagcgcagcccacccggcccctccgcatccgagcaggacgcccgtctcctctccctgaggatttcaggtctccctgtcccaggaggcttgtgccaagatggcatcagctggagacacccaggcaggcccacgggatgcagcagatcagaacttcgactatatgttcaaactgctactgataggcaacagcagtgtgggcaagacttccttcctgttccgatacgcggacgactccttcactcccgccttcgtcagtactgtgggcatcgatttcaaggtcaagaccgtctaccgccatgacaagaggatcaagctgcagatctgggacacagcgggccaggagcgctaccgcaccatcaccacggcctactaccggggagccatgggcttcctgctcatgtatgacatcgccaatcaggaatcctttgccgctgtgcaggactgggccacgcaaatcaagacctactcctgggacaacgcccaggtcatcctggtggggaacaagtgtgacctggaggacgaacgtgttgtgcctgctgaggatggccggaggctcgccgacgaccttggtttcgagttctttgaagccagtgccaaggagaacatcaacgtgaagcaggtcttcgagcgcctggtggatgtcatctgcgagaagatgaacgagtccctggaacccagctccagctcaggcagcaacgggaaaggcccggccgtgggggatgctccagccccccagcccagcagctgcagctgctagagatggcccccaaccccccacccacccctctcctgcctcggcagggactgtgatcgaggcgtgagccacagtggttatctccaagctcagggcaatcccttccctcctgtcaactgctccccgactcctgcatggctcattccttcacaatgtcgccgtggctgccaggttcctcaggcagccccggtgggaggctgcggaccatggggactcagctctgcatggcaggcagagg

SEQ ID NO: 60078 - DNA, 831 bp, Homo sapiens
atttcgtatccgagtgaggcgacggggtaggggttggcgctcaggcggcgaccatggcgtatcacggcctcactgtgcctctcattgtgatgagcgtgttctggggcttcgtcggcttcttggtgccttggttcatccctaagggtcctaaccggggagttatcattaccatgttggtgacctgttcagtttgctgctatctcttttggctgattgcaattctggcccaactcaaccctctctttggaccgcaattgaaaaatgaaaccatctggtatctgaagtatcattggccttgaggaagaagacatgctctacagtgctcagtctttgaggtcacgagaagagaatgccttctagatgcaaaatcacctccaaaccagaccacttttcttgacttgcctgttttggccattagctgccttaaacgttaacagcacatttgaatgccttattctacaatgcagcgtgttttcctttgccttttttgcactttggtgaattacgtgcctccataacctgaactgtgccgactccacaaaacgattatgtactcttctgagatagaagatgctgttcttctgagagatacgttactctctccttggaatctgtggatttgaagatggctcctgccttctcacgtgggaatcagtgaagtgtttagaaactgctgcaagacaaacaagactccagtggggtggtcagtaggagagcacgttcagagggaagagccatctcaacagaatcgcaccaaactatactttcaggatgaatttcttctttctgccatcttttggaataaatattttcctcctttcaaaaaaaaaa

SEQ ID NO: 60079 - DNA, 1141 bp, Homo sapiens
tttcgtaaggtggactcgcgaatgttaggcctgtgggtgccatagcgaccgggaggttgggctggccagattcagctgccgggaccggaccaggtgcttaggagaacatgcagtagaacttttcatcaaacaaatggaacacgtcacagaattttgctaacatggacaactctgcacagaaaaatgaacgcactggcaaacatcccagacgtgccagtgaagtacagaaaggttttactgctgcatatccaacacaatcctccattccttttaaatctcaagcttcagtaatcccagaatcagaaaaaaaaggattcaatagtcaagccaagagatttcctcataagaagaatgatatcccaggacctgggttctacaatgttattcaccagtcaccggtgtccaacagtgtctcattgtccaagaaaggaacttgcacgtttccctcgatgtgcgcccgattggacaccatcatttctaaataccctgcagcgaacgcatacactatcccatcggattttatttccaagagagactttagtaattcgtgttccagcatgttccagttgccaagctttatgaaagctctcaagtttgaaactcctgcaccaaactattacaatgcctctgtctcttgctgcaagcagagaaacaacgtctgtactcgagccgggtttatgtcaaaaacccaaagaggatctttcgcttttgctgataaaggacctcccccagggcattatgatatcaacgaatcccttgtgaagcagtcgccaaatacattaatgtcttgttttaaatcaaaaaccaaccgtggattaaaactgacgtcaacaggcccgggacctggttattacaaccccagtgattgcacaaaagttccaaaaaagactcttttcccgaaaaaccccatcctgaacttctctgctcagccttcgcctctgcctccgaagccacctttcccaggtcctggtcagtatgagatcgtggactacttaggcccccgcaagcatttcatctctagtgcatcattcgtgtccaataccagccggtggacagcggcgccgcctcagccaggcctgcctggcccagctacgtacaagccagagcttccaggaaagcagtccttcctctactacgagga

SEQ ID NO: 60080 - DNA, 1916 bp, Homo sapiens
accgcgccttccggttcgacgataccatggcaggcggcggctgcagggcaggtccaggggccacatggctgagggggacgcagggagcgaccagaggcagaatgaggaaattgaagcaatggcagccatttatggcgaggagtggtgtgtcattgatgactgtgccaaaatattttgtattagaattagcgacgatatagatgaccccaaatggacactttgcttgcaggtgatgctgccgaatgaatacccaggtacagctccacctatctaccagttgaatgctccttggcttaaagggcaagaacgtgcggatttatcaaatagccttgaggaaatatatattcagaatatcggtgaaagtattctttacctgtgggtggagaaaataagagatgttcttatacaaaaatctcagatgacagaaccaggcccagatgtaaagaagaaaactgaagaggaagatgttgaatgtgaagatgatctcattttagcatgtcagccggaaagttcggttaaagcattggattttgatatcagtgaaactcggacagaagtagaagtagaagaattacctccgattgatcatggcattcctattacagaccgaagaagtacttttcaggcacacttggctccagtggtttgtcccaaacaggtgaaaatggttctttccaaattgtatgagaataagaaaatagctagtgccacccacaacatctatgcctacagaatatattgtgaggataaacagaccttcttacaggattgtgaggatgatggggaaacagcagctggtgggcgtcttcttcatctcatggagattttgaatgtgaagaatgtcatggtggtagtatcacgctggtatggagggattctgctaggaccagatcgctttaaacatatcaacaactgtgccagaaacatactagtggaaaagaactacacaaattcacctgaggagtcatctaaggctttgggaaagaacaaaaaagtaagaaaagacaagaagaggaatgaacattaatacctgaaactataggaaaggttaatttgcctataattatatatacattccatagtcatcaaggaatatattgtgcagagagagtatccttgactgcttaagtcagccagttcagcatggataccaacattagcttttcttcttggttatatcatctgccaaaaatagagaacttatgatctattcatgtgtgtttcaggcttatttgggagaactaatttgaacttaatcaccacttcatctaattttagcaaggtaacagttgcccagggcagtacctggaattaactgtccatttcagtacatgtcaagtgcctttgttaggtggagaagaaatgtctctagaggaatataaatacctgatttcctggtcatcgagattcttgtactgttaaatgaatattgccttttactgctctttatggcttattggaataggagctcatttaagattgatcttggagagtttcttcttgtgattttagttcataagtatgtcacctttcattttatagtgttcatcattgagtaatggattaagtgaaaatccaggagtatccatctgcagttatgtgctgaggtgataattcatccaacatatttgttagcataaatattatgcttcagtttctgttgcaaattggtgattgtgaaattacagaaagtgattttctagtctgctttttttgtttaattcttgtaatgtaagcaataaatatggagtgtcagtagtctccttccaccccagaaatgtgttggtgtaacattctcgtttcttttaacaacctggaagtacctttcttgtgatcttcactgaggaattagaactatgatagaagttaggctgtggcaaatgggacattcgtagagtgggatagaggtggcagat

SEQ ID NO: 60081 - DNA, 3051 bp, Homo sapiens
tttcgtgcgaaggcggagggggcggcgggggcggcggcggcggcggcggcggcggcgtagccgtagaggtgcacagagaacacccctagcatgaacagtgtgaggattccaccagctttttcaccatgaaggagacagaccgggaggccgttgcgacagcagtgcaaagggttgctgggatgctccagcgcccggaccagctggacaaggtggagcagtatcgcaggagagaagcgcggaagaaggcctccgtggaggccagattgaaggccgccatccagtcacagttggacggggtgcgcacaggcctcagccagctccacaacgccctgaatgacgtcaaagacatccagcagtcgctggcagacgtcagcaaggactggaggcagagcatcaacaccattgagagcctcaaggacgtcaaagacgccgtggtgcagcacagccagctcgccgcagccgtggagaacctcaagaacatcttctcagtgcctgagattgtgagggagacccaggacctaattgaacaaggggcactcctgcaagcccaccggaagctgatggacctggaatgctcccgggacgggctgatgtacgagcagtaccgcatggacagtgggaacacgcgtgacatgaccctcatccatggctactttggcagcacgcaggggctctctgatgagctggctaagcagctgtggatggtgctgcagaggtcactggtcactgtccgccgtgaccccaccttgctggtctcagttgtcaggatcattgaaagggaagagaaaattgacaggcgcatacttgaccggaaaaagcaaactggctttgttcctcctgggaggcccaagaattggaaggagaaaatgttcaccatcttggagaggactgtgaccaccagaattgagggcacacaggcagataccagagagtctgacaagatgtggcttgtccgccacctggaaattataaggaagtacgtcctggatgacctcattgtcgccaaaaacctgatggttcagtgctttcctccccactatgagatctttaagaacctcctgaacatgtaccaccaagccctgagcacgcggatgcaggacctcgcatcggaagacctggaagccaatgagatcgtgagcctcttgacgtgggtcttaaacacctacacaagtactgagatgatgaggaacgtggagctggccccggaagtggatgtcggcaccctggagccattgctttctccacacgtggtctctgagctgcttgacacgtacatgtccacgctcacttcaaacatcatcgcctggctgcggaaagcgctggagacagacaagaaagactgggtcaaagagacagagccagaagccgaccaggacgggtactaccagaccacactccctgccattgtcttccagatgtttgaacagaatcttcaagttgctgctcagataagtgaagatttgaaaacaaaggtactagttttatgtcttcagcagatgaattctttcctaagcagatataaagatgaagcgcagctgtataaagaagagcacctgaggaatcggcagcaccctcactgctacgttcagtacatgatcgccatcatcaacaactgccagaccttcaaggaatccatagtcagtttaaaaagaaagtatttaaagaatgaagtggaagagggtgtgtctccgagccagcccagcatggacgggattttagacgccatcgcgaaggagggctgcagcggtttgctggaggaggtcttcctggacctggagcaacatctgaatgaattgatgacgaagaagtggctattagggtcaaacgctgtagacattatctgtgtcaccgtggaagactatttcaacgattttgccaaaattaaaaagccgtataagaagaggatgacggccgaggcgcaccggcgcgtggtggtggagtacctgcgggcggtcatgcagaagcgcatttccttccggagcccggaggagcgcaaggagggtgccgagaagatggttagggaggcagagcagctgcgcttcctgttccggaagctggcgtccggtttcggggaagacgtggacggatactgcgacaccatcgtggctgtggccgaagtgatcaagctgacagacccttctctgctctacctggaggtctccactctggtcagcaagtatccagacatcagggatgaccacatcggtgcgctgctggctgtgcgtggggacgccagccgtgacatgaagcagaccatcatggagaccctggagcagggcccagcacaggccagccccagctacgtgcccctcttcaaggacattgtggtgcccagcctgaacgtggccaagctgctcaagtagcctccgccggcctgccctgctcgcccctccacagcctcggtccctgcctttagaaacgcgggacagctgattgctctccttggccacacgtgctccttttagctgcacggcctgtctttaggtgccagtgtgatgcaccgggtgtgcgtcgagtgagcgtcccgaggccacgtgcggaggcccctcactgtgctgtcaaaggcctgtgggtgcagggctctgccgcacagcctctcttgggtgcttgtttgttgcagtggttgaaagtgtgtggggcacagaggacgtgcacctccctgccctcctcctccctgggccttcaccgcaccccatctgcttaagtgctcggaaccccgtcacctaattaaagtttctcggcttcctcagagaaatgaaaacgccatgcattctcttttccagttaaggttttctgactactgatctaggattgcccaggaactgttgtcaatcacagagtaaaagtctccgctcagcctggagggcgccctcctggtcccctcctgtctgacatcccctcagcctagagggtgccctcctgatcccctcatgtctgacatcccctcagcctagagggtgccctcctgatcccctcatgtctgacatcccctcagcctggagggcgccctcctgggcccctcctgtctgacatcccctcagcctagagggg

SEQ ID NO: 60082 - DNA, 1916 bp, Homo sapiens
tttcgtgaggcgcctataagggaagatgttcagtcaacttggaaaaattggaacaacccggaaagtagactcaccgtcttggtctagagactgacccctgcacagacagaccccttcccctctctgcgaaaggaccaagccccagaagtcactccatctcctacggctcgcaatttccagaggccccctggcaccttccagcctgatgtcgtgcgtcaagttatggcccagcggtgcccccgcccccttggtgtccatcgaggaactggagaaccaggagctcgtcggcaaaggcgggttcggcacagtgttccgggcgcaacataggaagtggggctacgatgtggcggtcaagatcgtaaactcgaaggcgatatccagggaggtcaaggccatggcaagtctggataacgaattcgtgctgcgcctagaaggggttatcgagaaggtgaactgggaccaagatcccaagccggctctggtgactaaattcatggagaacggctccttgtcggggctgctgcagtcccagtgccctcggccctggccgctcctttgccgcctgctgaaagaagtggtgcttgggatgttttacctgcacgaccagaacccggtgctcctgcaccgggacctcaagccatccaacgtcctgccggacccagagctgcacgtcaagctggcagattttggcctgtccacatttcagggaggctcacagtcagggacagggtccggggagccagggggcaccctgggctacttggccccagaactgtttgttaacgtaaaccggaaggcctccacagccagtgacgtctacagcttcgggatcctaatgtgggcagtgcttgctggaagagaagttgagttgccaaccgaaccatcactcgtgtacgaagcagtgtgcaacaggcagaaccggccttcattggctgagctgccccaagccgggcctgagactcccggcttagaaggactgaaggagctaatgcagctctgctggagcagtgagcccaaggacagaccctccttccaggaatgcctaccaaaaactgatgaagtcttccagatggtggagaacaatatgaatgctgctgtctccacggtaaaggatttcctgtctcagctcaagagcagcaataggagattttctatcccagagtcaggccaaggagggacagaaatggatggctttaggagaaccatagaaaaccagcactctcgtaatgatgtcatggtttctgagtggctaaacaaactgaatctagaggagcctcccagctctgttcctaaaaaatgcccgagccttaccaagaggagcagggcacaagaggagcaggttccacaagcctggacagcaggcacatcttcagattcgatggcccaacctccccagactccagagacctcaactttcagaaaccagatgcccagccctacctcaactggaacaccaagtcctggaccccgagggaatcagggggctgagagacaaggcatgaactggtcctgcaggaccccggagccaaatccagtaacagggcgaccgctcgttaacatatacaactgctctggggtgcaagttggagacaacaactacttgactatgcaacagacaactgccttgcccacatggggcttggcaccttcgggcaaggggaggggcttgcagcaccccccaccagtaggttcgcaagaaggccctaaagatcctgaagcctggagcaggccacagggttggtataatcatagcgggaaataaagcaccttccaagcttgcctccaagagttacgagttaaggaagagtgccaccccttgaggcccctgacttccttctagggcagtctggcctgcccacaaactgactttgtgacctgtcccccaggagtcaataaacatgatggaatgctaaaaa

SEQ ID NO: 60083 - DNA, 1849 bp, Homo sapiens; identical to SEQ ID NO: 59941

SEQ ID NO: 60084 - DNA, 2657 bp, Homo sapiens
gcgcacgtggtacggaaccggcgccgcgcttgctgctggtaacagggccttgcctagtgggccttccttcccaggtcgcccgtcagtctccactagagacaggactgaccagttgctcttccttccaagaaccttcgagatctgcggtctggggtctggttgaaagatggcggccctcactaccctgtttaagtacatagatgaaaatcaggatcgctacattaagaaactcgcaaaatgggtggctatccagagtgtgtctgcgtggccggagaagagaggcgaaatcaggaggatgatggaagttgctgctgcagatgttaagcagttggggggctctgtggaactggtggatatcggaaaacaaaagctccctgatggctcggagatcccgctccctcctattctgctcggcaggctgggctccgacccacagaagaagaccgtgtgcatttacgggcacctggatgtgcagcctgcagccctggaggacggctgggacagcgagcccttcaccctggtggagcgagacggcaagctgcatgggagaggttcgactgatgataagggcccggtggccggctggataaacgccctggaagcgtatcagaaaacaggccaggagattcctgtcaacgtccgattctgcctcgaaggcatggaggagtcaggctctgagggcctagacgagctgatttttgcccggaaagacacattctttaaggatgtggactatgtctgcatttctgacaattactggctgggaaagaagaagccctgcatcacctacggcctcaggggcatttgctactttttcatcgaggtggagtgcagcaacaaagacctccattctggggtgtacgggggctcggtgcatgaggccatgactgatctcattttgctgatgggctctttggtggacaagagggggaacatcctgatccccggcattaacgaggccgtggccgccgtcacggaagaggagcacaagctgtacgacgacatcgactttgacatagaggagtttgccaaggatgtgggggcgcagatcctcctgcacagccacaagaaagacatcctcatgcaccgatggcggtacccgtctctgtccctccatggcatcgaaggcgccttctctgggtctggggccaagaccgtgattcccaggaaggtggttggcaagttctccatcaggctcgtgccgaacatgactcctgaagtcgtcggcgagcaggtcacaagctacctaactaagaagtttgctgaactacgcagccccaatgagttcaaggtgtacatgggccacggtgggaagccctgggtctccgacttcagtcaccctcattacctggctgggagaagagccatgaagacagtttttggtgttgagccagacttgaccagggaaggcggcagtattcccgtgaccttgacctttcaggaggccacgggcaagaacgtcatgctgctgcctgtggggtcagcggatgacggagcccactcccagaatgaaaagctcaacaggtataactacatagagggaaccaagatgctggccgcgtacctgtatgaggtctcccagctgaaggactaggccaagccctctgtgtgccatctccaatgagaaggaatcctgccctcacctcacccttttccaacttgcccagggaagtggaggttccctctttcctttccctcttgtcaggtcatccatgactttagagaacagacacaagtgtatccagctgtccacgggtggagctacccgttgggcttatgagtgacctggagtgacagctgagtcaccctgggtaagttctcagagtggtcaggatggcttgacctgcagaagatacccaaggtccaaaagcacaaggtctgcggaaagttctggttgtcggctgggcaccacggctcacacctataatcgagcactttgggaggccaagacaggaggatcacttgaggccaggagtctgagacaagcctaggcaacaaaacaagactctgtctctacaaaaagtttaagaaatgagccagacatggtggtgtatgcctgtagtcccagccactcagaaggctgaggcaggaggatcgcttgagaccaagagtttgagcctgcggtgagctgtgaatgcaccacggcactcaagcctgggcaatgtagcaagatcctgtctctacaagaaattttttaaaaatgagccaagtgtggtggtgcatgcctgtagttccagctactcaggacactgacgtaggagggttgcttgagactgagagttggaggctgcgatgagccatgaatgccccactgcactccagcctgggcgacagaacgagaccccatctcaaaaaaaataagttctggttgtcattgaattgggataaacagagagcttgatgctttctgccttctgtctcaggtgatgcattgcacatttgggatatttggaaaggaaatgaggaaagaaattagggcctcctctgatctctcgctatctgcgggtcctgtccttttctcaagaccttcaccattactggtgttttcctgtcttctctttagtatgatccctcaaaacctcactaactggaaggatgattttgtctcagtttgtactcctaaataaaaagtaaacatgacacctctaaaaaaaaaa

SEQ ID NO: 60085 - DNA, 1244 bp, Homo sapiens
cagagactttgccaccaccagtattggggatgctgagctgcggggtacgggcctgaggagggatgggagtaagaagtgctgtggaaaccgtcaggccatgaaccaggctgaccctcggctcagagcagtgtgcttgtggactctcacatctgcagccatgagcagaggcgacaactgcacggatctactcgcactgggaatcccctccataacccaggcctggggactgtgggtcctcttaggggctgtgacgctgctatttctcatctcgctggctgcacacttgtcccagtggaccaggggccggagcaggagccatccggggcagggacgctctggagagtctgtggaagaggtcccgctgtatgggaacctgcattatctacagacaggacggctgtctcaagacccagagccagaccagcaggatccaactcttggaggccctgccagggctgcagaggaggtgatgtgctataccagcctgcagctgcggcctcctcagggtcggatccccggtcctggaacccccgtcaagtactcggaggtggtgctggactctgagccaaagtcccaggcctcgggccccgagccggagctctatgcctcagtatgtgcccagacccgcagggcccgggcctccttcccggatcaggcctatgccaacagccagcctgcagccagctgagatggagggcctggcacagcggggcgtgcactgccccagccccccgtagcaggggcatgactgtttcccaaccagcacccaaagacgggcgccattgccaagtcacaggatgtgatctaccccggacttcctatctgagcttcaagggagacatctcagggcaaagctttcgtgatggaggaggcaaagacagtagccccctccttatttcttttttctatctgttcctcttagcccccaaactcccaggttctcacttcccttttttggggggtttaaccagatcctccccacccccgctccctcatagtctacccccacgcctcagtgtctcctcaggcacaggaagtgggcggtgggggaggggtaagggcctgacagtgagtgggtgggtatattcctcaggagtccacagactggagtggacctggaacttagagacgggagggacccgagcctggcttttgacctaagaaccctagcaggagaatacagtctccatcctgctgtctctgtcctgtccccaagttttcaaataaaactttccaaaaagtga

SEQ ID NO: 60086 - DNA, 1467 bp, Homo sapiens
cggacgcgtggggtcacccagtcggctggagtcggaggcgatatttctaggggtgtacttgttggggtcagggtaagcaccagccacaaaaacctacaaaagaagggaaattactgtctttaaatattaaaaaaaaacaagatccatgagtgggcatcgatcaacaaggaaaagatgtggagattctcacccggagtccccagtgggcttcgggcatatgagtactacaggatgtgtattaaataaattgtttcagttaccaacaccaccattgtcaagacaccaactaaagcggctagaagaacacagatatcaaagtgctggacggtccctgcttgagcccttaatgcaagggtattgggaatggctcgttagaagagttccctcctggattgccccaaatctcatcaccatcattggactgtcaataaacatctgtacaactattttattagtcttctactgccctacagctacagagcaggcacctctgtgggcatatattgcttgtgcctgtggccttttcatttaccagtctttggatgctattgatgggaaacaggcaagaagaaccaatagtagttctcctctgggagaactttttgatcatggctgtgattcactatcaacagtttttgtggttcttggaacttgtattgcagtgcagctggggacaaaccctgattggatgtttttttgttgttttgcggggacatttatgttctattgtgcgcactggcaaacgtatgtttctggaacattgcgatttggaataattgatgtgactgaagtgcaaatcttcataataatcatgcatttgctggcagtgattggaggaccacctttttggcaatctatgattccagtgctgaatattcaaatgaaaatttttcctgcactttgtactgtagcagggaccatattttcctgtacaaattacttccgtgtaatcttcacaggtggtgttggcaaaaatggatcaacaatagcaggaacaagtgtcctttctccttttctccatattggatcagtgattacattagctgcaatgatctacaagaaatctgcagttcagctttttgaaaagcatccctgtctttatatactgacatttggttttgtgtctgctaaaatcactaataagcttgtggttgcacacatgacgaaaagtgaaatgcatttgcatgacacagcattcataggtccggcacttttgtttctggaccagtattttaacagctttattgatgaatatattgtactttggattgccctggttttctctttctttgatttgatccgctactgtgtcagtgtttgcaatcagattgcatctcacctgcacatacatgtcttcagaatcaaggtctctacagctcattctaatcatcattaatgatgtaaattggtatataggaacatccatggttttcctgccaggaaagaaaggtaacatattaagggagt

SEQ ID NO: 60087 - DNA, 1425 bp, Homo sapiens
cccgggtcgactatttcgtgttgctgccatggagtcagccgggctagagcagctcctacgggagctgctgctaccggacaccgagcgcatccgtcgggccacggaacagctccagatcgttcttcgggcccccgccgctttgtcggctctctgcgacctgctagcctcggcggccgacccccagatccgccagtttgcggccgtgctgacccgcagacgactgaacacccgctggcgacggctggcggcggagcaacgggagagcctcaagtccctgatcctgacggccctgcagagagaaacagagcactgtgtgagcctcagcctggcccagctctcagccaccatttttcgaaaggaaggcttggaggcctggccacagcttttgcagctgcttcagcacagtacccacagcccccacagcccagagagagagatggggcttttgctgctaagtgtggtggtgacctcccggcccgaggccttccaaccccaccaccgggagcttcttcggcttctgaatgagactcttggtgaggtgggctctcctgggctgctcttctactccctgcgcactctgaccaccatggctccctacctcagcactgaagatgtgcctctcgctcggatgttggtgcccaagctgatcatggccatgcagactctgatccccatagatgaggcaaaggcctgtgaggcccttgaggctttggatgaactgttggagtcagaggtgccggtcatcaccccctacctctctgaagtcctcacattctgcctggaggtagctagaaatgtggccctgggcaatgcgatacgcatacgtattctctgctgcctcactttcttggtcaaagtcaagagcaaggccttactgaagaatcgtctcctggcaacccttgctgcacacccttttccccattgtggctgctgagcccccaccaggccagttggatcccgaggaccaaggattcagaagaggaagagttggagattgagctgatgggggagactcccaagcatttcgctgtacaagttgtggacatgctggcactacacctgccccccgagaagctctgtccccagctgatgcccatgttggaagaggctttgcggagcgaggagcccataccagcgcaaagctggactcctggtgctggccgtgctgtctgacggagctggcgaccacatcaggcagagactgcttgcccccacttgcttgcagattgtgtgcaagggcctgggaggacccctcgcaagttgttacgcaatgcttgcgcttgttttgccctgggccagtttttcagaaaaccttacagccccatatcagcagctatttcaagggaggtaatgccactgctcctcgcctacttgaagtcggtgcctattggacacacacaccacctagccaaggcctgctgtatt

SEQ ID NO: 60088 - DNA, 4582 bp, Homo sapiens
gcggccgccgcgcgctcaggctcagcttcgctgcccgcccaggtagtgcccgctggagctcgcgcgctcatccggcaccactccagggctccaggctcctcgggcttccggagtcgagacgtggtggagttggctcgggctgaacttctttcggggggctgcctgtcctggaatcgtgcgacctttcctttgccatccttctttttgcagaagatgaatccgggctcggcgccccctccgctcccgccgcctgggcagcaagtgatccacgtcacgcaggacctagacacagacctcgaagccctcttcaactctgtcatgaatccgaagcctagctcgtggcggaagaagatcctgccggagtctttctttaaggagcctgattcgggctcgcactcgcgccagtccagcaccgactcgtcgggcggccacccggggcctcgactggctgggggtgcccagcatgtccgctcgcactcgtcgcccgcgtccctgcagctgggcaccggcgcgggtgctgcgggtagccccgcgcagcagcacgcgcacctccgccagcagtcctacgacgtgaccgacgagctgccactgcccccgggctgggagatgaccttcacggccactggccagaggtacttcctcaatcacatagaaaaaatcaccacatggcaagaccctaggaaggcgatgaatcagcctctgaatcatatgaacctccaccctgccgtcagttccacaccagtgcctcagaggtccatggcagtatcccagccaaatctcgtgatgaatcaccaacaccagcagcagatggcccccagtaccctgagccagcagaaccaccccactcagaacccacccgcagggctcatgagtatgcccaatgcgctgaccactcagcagcagcagcagcagaaactgcggcttcagagaatccagatggagagagaaaggattcgaatgcgccaagaggagctcatgaggcaggaagctgccctctgtcgacagctccccatggaagctgagactcttgccccagttcaggctgctgtcaacccacccacgatgaccccagacatgagatccatcactaataatagctcagatcctttcctcaatggagggccatatcattcgagggagcagagcactgacagtggcctggggttagggtgctacagtgtccccacaactccggaggacttcctcagcaatgtggatgagatggatacaggagaaaacgcaggacaaacacccatgaacatcaatccccaacagacccgtttccctgatttccttgactgtcttccaggaacaaacgttgacttaggaactttggaatctgaagacctgatccccctcttcaatgatgtagagtctgctctgaacaaaagtgagccctttctaacctggctgtaatcactaccattgtaacttggatgtagccatgaccttacatttcctgggcctcttggaaaaagtgatggagcaaagcaagtctgcaggtgcaccacttcccgcctccatgactcgtgctccctcctttttatgttgccagtttaatcattgcctggttttgattgagagtaacttaagttaaacataaataaatattctattttcattttctgcaagcctgcgttcttgtgacagattatacagaattgtgtctgcaggattgattatgcagaatacttttctctttcttctctgctgccccatgggctaagctttatgggtgttaattgaaatttatacaccaattgattttaaaccataaaaagctgaccacaggcagttacttctgagggcatcttggtccaggaaatgtgcacaaaattcgacctgatttacagtttcaaaaactgtattgatgacagtagtaccaaatgctttaaaaactatttaacttgagctttaaaaatcattgtatggatagtaaaattctactgtatggaatacaatgtaattttgaatccatgctggctctgatggctcttattagtctgtatttataaaggcacacagtcctattgtagcttatctttcgttattttactgcagagcatctagacaacttagtccctccagcgggaaagtagcagcagcagcattagtcacagttcttacactacagatcttgtgaaagagaccagtttggtactaattatgagcattttattcaaacaaaagtttttgaaatattacaactggggatttaaaaaattgcagcttagaatctgatggttttttttttttcttgatgttgttggttggtttttgaaatcgagttttgctcttgttgtccaggctggaatgcaagggcacaatttcggttaactgcaacctttgccttttgggttcaagcgattctcctgccttaccctcccgagtagctgggattacaggcgcctgccaccacgtccggctaattttttgtattttgagtagagacggggtttcaccataatggtcaggctgttctcaaactcctgatctcaggtgatccacccatctcggcctcccaaagtgctgggattactggcgtgagccaccgcacccggccttgatgtttattttataaagcactgtaattttgtagctgatgacaaaaggcagccaaatgtttttgataaatcagtggcaactgtatttttgtcttttgaaataactctgaaaacatcaggacaacatagatttcaacctgatagcacaccacacacagtgagctgttgctttttaaattctgaagccttgtcaggtttgcttcctagatttcaagtgtttaaaataattctatctatgaaactgaaggatgaagcagatctctgactgacatgtaaaaaaaaaatgccctttgagggtgtatggtggagataaatgtttctgaattcagtaaaattgattcctaagtatattatcctaatcctgtttgctacagttggtataaaaaggcatgaaatatgtattcaatacctcttatgtaaccaaaaccatttttaattagcttttaaggactgagagagcatcatgttcaactggcatgcagtctgcctgcattgccaatgaagtcctcaactgtttaatattttgaactaatattatttataatctatgaatttaatcttttttgaaagactttaataatttgagtctctgagaggatactttcaatttccatgggggacttatttgttggggatcttaaataagattccttttgatctaccggaatatacatgtacagagtacattggatcatgttggaaagaaggcaagtgaaaaggtcagagatgaagtagcgaagttatggaatatcgtggaaaggatactagttgtgaaatggaaagagacaagttatagtaccccaaaagcaaaacaagcaggagatgcaagagatgccccaaaaggacaaagcaacaattttctgttgccacctttataccggaagactctgttgtagaagaaaagaaggctttggtgcaccttatgtgggaggaggaggggcagggcatgctgatgctgagcgtacaggcagacaagagcgtagcctgctgttgcctccatcactatgaaatgacttattttacctgaaggacccatggtttatgttcctctaattcctttcactctccctaagccctctgagagagatgaagatagatgattttattgctactaaattgaagggagcactatttctttttgtcttttgttagcaaaaaattgcaaaaagaattgtacattcttgctaaaaataaataaataaataaaaaattaaaaacaagggacctaacaaaactcagcagtgttactgtattttttaaaaatatttttatagactcattttcaggttattaaatgtaagagaaacagatacccctcttttttaaagtaggtaaatcattgatgatttatattaccaatttttagaagtaattttctagtaagcttgtggcatcagaaaatactagaagatttttttagttaaattagttagaacatttatgaatgaatataataaatattttttcagaataaaatatggaccctttgtgtttactaatagataaagccagatataattttttgtttttaaggccacaaaatatggcctttgttaaagaacactaaagttagaaatctaaagttagagcaactttttaatggctatttcctattattgtaagtgttaaaacccctgcagaattcttgataaggtgctatttatactatatttcttattataagataactgtctttagtcttcttagtactagtctttttagtactaaatcaatcagtaaacatcatcatttcaccccaaaattttgtcacagaaaaggcgtatcaaatgaaaaataatttcagagatctttctttcaagatattttttcctgataaaatacattgtcttgaagtaaatacattgtcaaaacctaattgccaattctgttaaatctaagtaatttttagacagtgtttcaccgtattatttaggatgtgaaatgccatttctttcactggattacaccatatacagggaaacagggtaaaacagtggaaaactttattggtgctgggt

SEQ ID NO: 60089 - DNA, 6057 bp, Homo sapiens
tttcgtcggcttccccacgggaggacgcgaggccccggcccagccatggccccctggcgcaaagctgacaaggagcggcacggcgtggccatatacaacttccaaggcagcggagccccccagctctccctgcagatcggcgatgtggtgcgaatacaggagacgtgtggagactggtataggggatacctcataaagcacaaaatgttacagggcatttttcctaagtcatttatccacatcaaggaagtgacagttgagaaaagaagaaatactgagaacatcattcctgcagaaattcctctggcacaagaagtgacaacgacactttgggaatggggaagcatctggaaacaactctatgtggccagcaaaaaggagcgttttctccaggtgcagtccatgatgtacgatctgatggagtggaggtcccagcttctctcaggaaccttacccaaggatgagctgaaggaactgaagcagaaagtcacgtccaaaattgactatggcaacaaaatccttgagcttgatttgattgtcagagatgaagacggaaatatcttggaccctgataataccagtgtcatcagcttgttccatgcacatgaggaagcaactgataaaatcacagagcgtatcaaagaagaaatgtcaaaagaccagccagattatgcaatgtattcccggatctcctcatcccccacccatagcctctatgtgtttgtgagaaactttgtgtgcagaattggggaagatgctgagctcttcatgtctctctacgaccccaacaagcaaacggtcataagtgagaactacctagtgcgatggggcagccggggcttccctaaggagattgagatgctcaacaatctgaaggtggtcttcacggatcttggaaacaaagacctcaacagggataaaatttacttgatttgtcaaatagtccgggtcggcaagatggatcttaaggatactggtgcaaagaagtgcacgcagggactgaggaggccctttggggtggcagttatggatataacagacatcatcaaggggaaagcagagagtgatgaagaaaagcagcacttcattccttttcacccggttacagctgagaatgacttcctacacagcctgctgggcaaagtcatagcctccaagggggacagtggagggcaaggcctctgggtgaccatgaagatgctggtgggtgacatcattcagattcgcaaggactatccacacctggtggacaggaccaccgtggtggccaggaagctgggattcccagagatcatcatgccaggggatgtcaggaacgacatctacattactctcttacaaggtgactttgacaagtacaacaagaccacacagaggaatgtggaagtcatcatgtgtgtgtgcgcggaggatggcaaaacgctgcctaatgcaatttgcgtgggagcaggggacaagcccatgaatgagtatcgctccgttgtgtactatcaagtcaaacagccacgctggatggaaacagtcaaggtggctgtccctattgaagacatgcagaggatccatctgcgattcatgtttcgacatcggtcatctctggaatctaaagataaaggagaaaagaactttgccatgtcctatgtgaagctgatgaaagaagatgggactactctacacgatggattccatgacttagttgtcctcaagggggacagcaagaagatggaggatgccagcgcatacctgacccttccttcttatcgacaccatgtggaaaacaagggggccacgctgagcaggagctccagcagtgttggggggctttctgtcagctcccgggatgtgttctccatttccaccctggtgtgctccacaaagctcactcagaatgtgggcttgctgggtttgctgaagtggcgtatgaagcctcaactgctacaggagaatttagaaaagttgaagattgtggatggagaggaagtggtgaagtttctccaggatactctggatgccctcttcaacatcatgatggagcattctcaaagtgatgaatatgacatcctcgtctttgatgccttgatttacataataggactcattgcagaccggaaatttcagcatttcaacaccgttctggaggcttacatccaacagcatttcagtgcgaccttggcttacaagaaattgatgacagtgctgaagacttacttggatacctccagcagaggggagcaatgtgagccaatcctaagaacgctgaaggctttggaatatgtgttcaagttcattgttcggtcgaggacattattttcacagctttatgaaggcaaagaacagatggagtttgaagaatccatgagacggctctttgaatccatcaacaatctgatgaaaagtcaatacaaaactaccatccttttgcaggtggcggctttgaaatacatcccatctgtcctgcatgatgtagaaatggtctttgatgcgaagttactcagccaactcctgtatgagttctacacctgcatccctcctgtgaaactccagaagcagaaagtacagtctatgaatgagatagtccagagcaacctctttaaaaagcaagaatgccgggacattctgcttcctgtcatcaccaaagagctgaaggagctgctggagcagaaggatgacatgcaacaccaggtcctggagaggaagtactgcgttgaattgctcaacagcatcttggaagtccttagctaccaggatgcggccttcacctaccaccatatccaagagatcatggtccagctgctgcggacagtgaaccggacagtcatcaccatgggccgggatcacattctgattagtcactttgtggcatgtatgacagccatcttaaaccagatgggtgaccagcactactccttctacattgagaccttccagaccagctctgaacttgtggacttcttgatggagaccttcatcatgttcaaggacctcattggaaagaacgtgtaccctggagactggatggccatgagcatggttcaaaacagggtcttcctgagagctatcaacaagtttgcagaaaccatgaaccagaagttcctagaacacacgaactttgagttccagctgtggaacaactattttcatctggcagtggcttttatcacccaggattctctgcagctggagcagttctcacacgccaaatacaacaaaatcctgaataagtatggggacatgagacggctaattggcttctccatccgtgatatgtggtacaagcttggtcagaacaaaatctgcttcatcccaggcatggtaggacctatattagagatgacacttatccctgaggctgagctccggaaagccaccataccaatcttcttcgacatgatgctgtgtgaatatcaaagaagtggggatttcaaaaagtttgaaaacgaaatcatcctgaagctggaccacgaggtagaagggggccgaggcgacgagcagtacatgcagctgctggagtcaatcctgatggaatgtgctgcagagcacccaaccattgccaagtcggtggagaacttcgtgaacctggtcaaaggcctcctggagaagctgctggattaccggggtgtgatgacagatgagagcaaagacaaccgcatgagctgcactgtgaacctgctgaatttctacaaagataacaacagggaggagatgtacataaggtacctgtacaaactccgcgatcttcacctggactgtgacaattacacagaggctgcctacacgctccttctccacacctggcttctcaagtggtcggatgagcagtgtgcatcacaggtcatgcagacaggccagcagcacccccagacacaccggcagctcaaggagacgctctacgagaccatcataggctactttgacaaaggaaagatgtgggaagaggccataagtctgtgcaaggagctggcggaacagtacgagatggagatctttgactatgagctgctcagccagaacctgatccagcaggcaaaattctatgaaagcatcatgaaaatcctcaggcccaaaccagactactttgctgttggatactacggccagggattcccctccttcctgcggaacaaagtgttcatctaccgcgggaaggaatatgagcgaagagaagatttccagatgcagctgatgacccagttccccaatgcagagaagatgaacaccacctctgccccgggagatgatgtgaagaatgccccaggccagtatatccagtgcttcactgtccagcctgtcttggatgaacatcccaggttcaagaataagccagtgcctgaccagattataaacttctacaaatccaactacgtgcaaaggttccactactcccggcccgtgcgcagggggaccgtagacccagagaatgagtttgcttccatgtggattgagagaacctccttcgtgactgcatacaagctgccggggatcctgcgctggtttgaggtggtgcacatgtcgcagaccacaattagtcctctggagaatgccatagaaaccatgtccacggccaatgagaagatcctgatgatgataaaccagtaccagagtgatgagaccctccccatcaacccactctccatgctcctgaacgggattgtggaccctgctgtcatgggaggcttcgccaagtatgagaaggccttcttcactgaagagtatgtcagggaccaccctgaggaccaggacaagctgacccacctcaaggacctgattgcatggcagatccccttcttgggagctgggattaagatccatgagaaaagggtgtcagataacttgcgacccttccatgaccggatggaggaatgtttcaagaacctgaaaatgaaggtggagaaggagtacggtgtccgagagatgcctgactttgacgacaggagagtgggccgccccaggtctatgctgcgctcatacagacagatgtccatcatctctctggcttccatgaattctgactgcagcacccccagcaagcctacctcagagagctttgacctggaattagcatcacccaagacgccgagagtggagcaggaggaaccgatctccccggggagcaccctgcctgaggtcaagctgcggaggtccaagaagaggacaaagagaagcagcgtagtttttgcggatgagaaagcagctgcagagtcggacctgaagcggctttccaggaagcatgagttcatgagtgacaccaacctctcggagcatgcggccatccccctcaaggcgtctgtcctctctcaaatgagctttgccagccagtccatgcctaccatcccagccctggcgctctcagtggcaggcatccctgggttggatgaggccaacacatctccccgcctcagccagaccttcctccaactctcagatggtgacaagaagacactcacacggaagaaggtcaatcagttcttcaagacaatgctggccagcaaatcggctgaagaaggcaaacagatcccagactcgctgtccacggacctgtgagctgctgctgactagggctgcatgggagagccagggaggggagtttctggaagaggaaagccatgcgtggaacatcgaagcctcagagagtgggagactgtccccatcagttgtccttacttagaggagacagagaggccaatcaggtcccagagctggagtgctaacaagcccagcatcccctggggctgtgatcatggtggatgaggaagcctcaacgtagattcctgaactcaaggtaccagcaagaatgccttctcccagtgtgctctccccaacatcctaggcacagctttcataacccagtttcttaggtgtaagaaactgcttttatctcatttattaagtctcagaacttaacagaaaaggaagccttttaaatattctttttaattttattttagattaacagttttgtactttacatttttttatacaaccaaccagtttcttttctagccaatcatctctgaagagttgctgtttcttactgacaataaaaaatgttctcttggttcg

SEQ ID NO: 60090 - DNA, 1565 bp, Homo sapiens
  misc_feature (1)...(1565): n = a,t,c or g
tggacccctagtccagtgtggcggaattcccagaacgtgtgcagctcagccagccacagaactggaatttttcaggagcagggggagcatggagtttggactttgctgagcaactgaagtggagcgcagagcttgctcgcttaggagagagcatcatggatggcaaacaagggggcatggatgggagcaagcccgcggggccaagggactttcctggcatcaggcttctttcaaacccattgatgggcgatgctgtgtctgattggtctcctatgcatgaagctgcaatccacggacatcagctgtctctgaggaacctcatcagccaggggtgggctgtgaacatcatcacggcagatcatgtttccccactccatgaagcctgtcttggaggtcatctctcttgtgtgaagattttattaaagcatggagctcaggtgaatggtgtgacagcagactggcacactccactgtttaatgcttgtgtcagcggcagctgggattgtgtgaatttgcttctgcagcacggagccagcgttcaacctgagagtgatctggcatcccccatccatgaagctgctaggagaggccacgtggagtgtgtcaactctcttatagcttatgggggcaacattgaccataagatcagccacctgggcactccactctatttggcttgtgaaaaccaacagagagcctgtgtcaagaagcttctggagtcaggagcggacgtgaaccaagggaaaggtcaggattccccacttcatgcagtggccaggacagccagtgaagagctggcctgcctgctcatggattttggagcggacacccaggccaagaatgctgaaggcaaacgtcctgtggagctggtgcctccagagagccccttggcccagctcttcttggagagagaagggcccccttctttgatgcagttatgccgccttagaattcggaagtgttttggaatccagcagcatcataagataaccaaactcgtcctcccagaggatctgaaacagtttctcctacatctttaaatgcatctagggaatggattcacaaacgatgtgaaaacattattgagtgttgtagccactagaattttaaaatcaagttggatttatagagtttgactagttttttcgattagatttgtatttgttataaacttgtttatggagtttgactaattttttctattcaatttgtatttgttaaactcaagccagggtggaaagacactgcatacgtttgtattattagttagaaggcatgaagacttttttccctgcttggagagtgtcataagttattgttttgcatatctactgcatgccaagcactttttgcatcatctaatttagccctcacagccactgggtcaagatgtccaattttccagagtaaggatagaggagtcaaattcaaatacaggttttctgacattaacttatgtgatgacttgatcgaggcaggcttttccagcatcactgtcctggttccatctctgctatatggaagaaaaaaagaaacataggcatggtcaatcaaannnnacgccg

SEQ ID NO: 60091 - DNA, 1657 bp, Homo sapiens
cgtcgactttttttttttcctggacagcatttcattttattatgtaactgtagaaagccttgatcaagataaaaatagggatgacttatcagaaactgaagaattttcttaggaaagcaaagtttactgaaggataccttcattccagccatgatgaacgtctgtcttctcaggcaatcatgatgaagctccagggacagtataacccatctctcccactcatccctgagccttggtcctggactgaatgtggttagaggttgtggaaataaaaaaaagaaccaaaataagaacactctccataaaagccaagctcagagactggtcctcttttgcttaggtacaacaggagcaggaaggatcaacattcttgaaagcataccttctattcatttggcttttttgacttggggcgccagtgtagagctgagcactccactgccctttctccactcacaaatgtctgcataggtacacgtccggcacttccaagcctcctccacgtcaactccctggggctctcggtggcccatccagtaggccatataatgctgcaccttggctctcacctccttctctttgaaggctacaatctcagtacccagcacagtggcagtctcttggtggatatactcaatcttcaagatatcaataactgggaggtctgacagtgttagagacaagaagacaagttccatgaggtcacccaaagacttcacagagaagcctccctgctgggcatgcctcagcactgatggccccagtggcttttctagacacaactttgtgtggtggattaggctagcaggggtcacttttccttgtaccatggcatcaaagatatatttgtataggctgacttgaaaacagtctttcttcttctgagcttccagagggagcatagggcgcctgcgtgtcttgagttccgccagctccagttcccccttggctgtatagtgcagctcatcaatcactccaacaagaagtacaccctccacttccccaaacactggaaactctctgatgtgcccttctgactgcagggtaggaatcagcaaaagtatgttcagaaacttaattgcccaagcatcttctttagtggtgactgggacagtcacaagatcatgaagttctagttctctagctaggtgtatgctggcaccagtgttcaacacagctgccttctcaggtgccaagaaaccaggaagctccttcccatatgctgtttgcagttcacaccagttctgagtagccaggtcagtgacatataaatatttaaggtggaatctctccatgggtgataatatatccaatcctcttttccagttttgtaagcttatgggtttgtcatccttcccaagggattcagaagatgggccaggcatgttaactaaagcctttgactcttgggcatcttctaggtccagaaactccaggaactctgagtcactcaagtctgagaaccctgaggcttctgctgacactgtctcctcttctcttgtctctgccatggtacagctctggattgggctagaagggccctgtgatactcctccgaacctcggactccacctggtttcgccgcggcctcggagctgctcccggacgctcccggagaggagactgaggaagccgggcagagcgcgctgccggagcg

SEQ ID NO: 60092 - DNA, 2825 bp, Homo sapiens
ctcggcgcgcgcttggggcgaggctcggcgggcgcggacgcgcagcatggcggtggaggacgaggggctccgggtcttccagagcgtgaagatcaagatcggtgaagccaaaaaccttccctcttacccggggccgagcaagatgagggattgctactgcacggtgaacctggaccaggaggaggttttcaggaccaaaattgtggaaaagtcactctgcccgttttacggagaagacttttactgtgaaattcctcggagctttcgtcacctgtccttctacattttcgatagagacgttttccggagggattccatcatagggaaggtggccatccagaaggaggacttgcagaagtaccacaacagggacacctggttccagctgcagcacgtggacgctgactcggaagtgcagggcaaagtgcacctggagctgcggctgagcgaggtcatcacagacactggggtcgtctgccacaagctcgccacacgcatcgtcgagtgccagggcctccccatcgtgaatgggcaatgtgacccctacgccaccgtgacgctggcaggacccttcagatcagaagcaaagaagacgaaagtgaagaggaagaccaacaatccccagttcgatgaagtgttttattttgaggtgacccggccctgtagctacagcaagaagtcccactttgactttgaggaggaagacgtggacaagctcgaaatcagagttgacctctggaatgccagtaacctgaagtttggagatgaattcctgggagaactaaggatcccgttgaaagtcctgcggcagtccagctcctacgaggcgtggtacttcctccagccccgggacaatggtagcaagagcctaaagccagacgacctgggctccctgcggctgaacgtggtatacacggaagaccacgtgttttcttctgactattacagccctctgcgggacctgctgttgaagtctgcggatgtggagcccgtgtcagcgtctgcggcccacatcctgggcgaggtttgccgggagaagcaggaggcggccgtcccgctggtgcggctcttcctacactatggcagggtggtgccattcatcagtgccatcgccagcgcggaggtgaagcggacccaggaccccaacaccatcttccgaggaaactcactggcgtccaagtgcatcgacgagaccatgaagctggcggggatgctttttttgcatgtcaccctgaagcccgccatcgaggagatatgccagagccacaaaccctgtgaaatcgaccctgtgaagttgaaagacggagaaaaccttgaaaacaacatggagaacctacggcagtatgtggaccgcgtcttccacgccatcactgagtctggggtgagctgcccgaccgtcatgtgtgacatcttcttctccctccgggaggcggcggccaagcgcttccaggatgacccggacgtcaggtacactgcagtgagcagcttcatcttcctgaggttctttgcgcccgccattctctcccccaacctcttccagctcacgccgcaccacacggacccccagacgtccaggacgctgacattgatctccaagaccgttcagaccctcggcagcctgtccaagtccaaatctgcgagttttaaggagtcctacatggctacattttatgaattcttcaatgagcagaaatatgctgatgcggtgaagaacttcttggatctgatttcgtcctcggggagaagagaccccaagagtgttgagcagcccatcgtgcttaaagaagggttcatgatcaagagggcccaaggacggaagcgctttgggatgaagaattttaagaagagatggtttcgtttgaccaaccatgaatttacctaccacaaaagcaaaggggaccagcctctctacagcattcccatcgagaacatcctggcagtggagaagctggaggaggagtctttcaaaatgaaaaacatgttccaggtcatccagccagagcgtgcgctgtacatccaggccaacaactgcgtggaggccaaggactggatcgacattctcaccaaagtgagccagtgcaaccagaagcgcctcaccgtctaccacccgtccgcctacctgagcggccactggctgtgctgtagggcgccatccgactcggctccgggctgctcgccctgcactggcggcctcccagccaacatccagctggacattgatggggaccgtgagacggagcgtatctactccctcttcaacttgtacatgagcaagctggagaagatgcaggaggcctgtgggagcaaatctgtgtatgacggcccggagcaggaggagtattcgacgttcgtcattgacgacccccaggagacctacaagacgctaaagcaagtcatcgctggggttggggctttggagcaggagcacgcccagtataagagggacaagttcaagaagacgaaatatggaagccaggagcaccccatcggagacaagagcttccagaactacatccggcagcagtccgagacctccactcattccatttaaagtctgcgggacgcgcccagtggcgccagcaagctgcccatgcaaagccgcagcctttgggagggagaagagaaggaagagcgcacagccggcaaagtgagatgcacgccgtcccggcccatagacaagtggcgctggggtttccctctcccagaaccgctgccaccaccgccacgccctccgcagaaagcccacctggccctgtggaacgtgtcgtcatttgattctgtgctttttgctccttgtttgtggggatctggggatcagctgaagg

SEQ ID NO: 60093 - DNA, 725 bp, Homo sapiens
ggaaagtcagtgagcaaatcgcggaccaccggggctgccagctcgcctgactcccggcctcttgcgctcctaggggcggagaagggtgcgggctcttcgccctttgtgtcctccttctttcactaacttctggactttccagctcttccgaagttcgttcttgcgcaaagcccaaaggctggaaaaccgtccacgatgaccagcatgactcagtctctgcgggaggtgataaaggccatgaccaaggctcgcaattttgagagagttttgggaaagattactcttgtctctgctgctcctgggaaagtgatttgtgaaatgaaagtagaagaagagcataccaatgcaataggcactctccacggcggtttgacagccacgttagtagataacatatcaacaatggctctgctatgcacggaaaggggagcacccggagtcagtgtcgatatgaacataacgtacatgtcacctgcaaaattaggagaagatatagtgattacagcacatgttctgaagcaaggaaaaacacttgcatttacctctgtggatctgaccaacaaggccacaggaaaattaatagcacaaggaagacacacaaaacacctgggaaactgagagaacagcagaatgacctaaagaaacccaacaatgaatatcaagtatagatttgactcaaacaattgtaatttttgaaataaactagcaaaaccagaaaaaaaaaa

SEQ ID NO: 60094 - DNA, 660 bp, Homo sapiens
cggacgcgtgggcggagctcggcggtctgcgctcggttgctagccgtttgctcccgctttcagttgctttgctgttagcctgttggaccttcgagcctagctgctcgcacaggactcggccacctgcccttcctgcaccgactggccagctcaagaggtttggatatggaccttcttcaattcctggccttcctctttgtcctgcttttgtctgggatgggagccacaggcaccttgaggacctccctggacccaagcctggagatctacaagaagatgtttgaggtgaagcggcgggagcagctgttggcactgaagaacctggcacagctgaacgacatccaccagcagtacaagatccttgatgtcatgctcaaggggctctttaaggtgctggaggactcccggacagtgctcaccgctgctgatgtgctcccagatgggcccttcccccaggacgagaagctgaaggatgctttctcccacgtggtggagaacacggccttcttcggcgatgtggtgctgcgcttcccgaggattgtgcactattactttgaccacaactccaactggaacctcctcatccgctggggtatcagtttctgcaaccagacaggcgtcttcaaccaggggccccactcgcccatcctcagcctgatg

SEQ ID NO: 60095 - DNA, 2846 bp, Homo sapiens
  misc_feature (1)...(2846): n = a,t,c or g
ttttttttttttcattcaccagccagttttatttactcacaagaacaaatccaaagcccagtgcagcagctctgagctcaggcctgccgtgccccgttttgtgggcctgtacttgaaacactgaacgtgatgtgtccttcactcacccgcagcactttaatccccacaacagccctgtgaggtaggaatcaccaccattccccccgactcatattacagatggggaaaccgagacacacattcaacaaagcgcgcatcacatggggagttcagggttagcctggagtacgaacacacgttctccccatggcccagtcagcggcccacctggcctcttcccctccctttagtaaccccatcagcagcagcataaaaatctaacccttcattttgctgaaagcccctgcagatgacagtttccttcctatcatgtctgcagagctccaaggctgggggcgatgttgaggccgaagccagccacagtgcctcagctgtgcctttcctggagagcgggtggccgcccccagcacatccctggcacacgggcttgcataacagactcttgtaccgccatctctagcacaagaccatggccacatctccccaaccactcagcccgcacagcgtgcaaaggtggggagttcactttaatggcattcctccaacgacttattgtaaaagaaacaaggcatctcgtcctgggtcgcaacacccagcagcatccgtttagaccaccaagggtaggctgcgccgggtgcacagggatcccgctgcggctcggcgaaagccggagtcctgggatccagagcagcccggggagccctggagtctggaaaggacacagcagtgggggcggcggcggcaactccagctctgagcccgttggcaccccgcacggtggccccagccagctggaggcaggctcaggagcggctcctgtccttgtggttccccacgatcatcttgctgtacagcttctgctgctcctccttgaacgtgtccttcaccttctccctcttcaggcccccatcccacagcaggtccacaagtcctccctgcctggcaatggcagatttcaccctattcgcaaactggacagcatcttcatctgcctctctagtcatgggaggcaggtaccacacgctgcagacaatggcccagctggtcatcattcgcagcaggtacgtcaccatcccgtatttgctgctgttccagaaggcatcgccaaattgagggtcatacttgatagcaacagggtaaactgtggctccaatttcaaaacttccctttttgaacatcatcaccgatgtattattgatgcaggttccttctgggaagatgaggataggcagcttgcttttatcttgcacatgttcagtcagtctcttagccaccaggtggcgatccttcacttccgagcgctcaaaccagacgtgtgggcaggccttcaccatggctctctgaatcacacccatgagtcccccgtgcacttgacccaccatggcataatagccatcgctggccaagatgatcacatcgatcggtgaggtatgattggccacacagatgccaccatttcttggtctgttttccctgtcatggtaggtgatgatggctgtcagcgctcgcacgcagatccggtaacacattaagtgaacatgtttactcatgaactccttaaacctcccatttggcaagtatcccaccacagttgtgcccaccaccagaaggctaatccctgtgaaagccagtgctatcctgagcggcagcagaaagcagtaccgaatcagcactcctaacccccacaggaccgtgagccgaaggctgatgtactggaagttataattggttctgctcagcaggttccaggactccagttcttctgctgagaatctctttgtcacctcatcatccataatggtctccattcctttccggcaaaagtagaaaatgtcagagagctcgaactctggagtgttgtccagagccttactactaccacttcgacgaatctctttgatctcttcttctagtgaagtgggatcctttgcaatgattccgttggtgtagggcttgtaaagctggtggttcttctccttggctcctcgctccattctcaaggtagcccacgcaaagatttttaacagacttttcatgtagagtttgcggataccaaaggagactccaaaaatggctggcactatgatgaaaacgagaaggagggtgaagaggacagtcagggagatgcccagaaggttgacaatcaggctatcaaaaggcagcaacaggaacatggtggaagatccaggccaggccagcacctgcctccataagaacaaattgcagccttcagatggtccttcctgacagcaccagccagggaaaggaagcaagttcccgaagaacagcaaaccccattccaaagtccacacccttcaaccgcctgaatagaaggcctgggaacagaatgacagaaaaacacggccacaggaggcaactgcaaacgccaggtctctccagaatggatggactctaaagatgattgaagctagatgggtcttcagtaaaagcatccgagtccagatggagtttctgtgcaagtgagcagtgaggacgggggctctgctctgctgtcctgatgctgcttccagaggttttacatggttttcctgcccaagagtattcaacagataaatctgtcccccagatctgtcccccccaaaagcacgaaaaagagttaaacttggtgccagaaaaatcctgatagctcctgtggaggggaactccccgagcgcccgcctggntntnnccgggnntttgcgagttttcggaagctcaatnccgcc

SEQ ID NO: 60096 - DNA, 937 bp, Homo sapiens
tctccggaccggacttcccgggtcgacgatttcgtggtacctagtgtctgagcggcacagacgagatctcgatcgaaggcgagatggcggacgtgctagatcttcacgaggctgggggcgaagatttcgccatggatgaggatggggacgagagcattcacaaactgaaagaaaaagcgaagaaacggaagggtcgcggctttggctccgaagaggggtcccgagcgcggatgcgtgaggattatgacagcgtggagcaggatggcgatgaacccggaccacaacgctctgttgaaggctggattctctttgtaactggagtccatgaggaagccaccgaagaagacatacacgacaaattcgcagaatatggggaaattaaaaacattcatctcaacctcgacaggcgaacaggatatctgaaggggtatactctagttgaatatgaaacatacaaggaagcccaggctgctatggagggactcaatggccaggatttgatgggacagcccatcagcgttgactggtgttttgttcggggtccaccaaaaggcaagaggagaggtggccgaagacgcagcagaagtccagaccggagacgtcgctgacaggtcctctgttgtccaggtgttctcttcaagattccatttgaccatgcagccttggacaaataggactggggtggaacttgctgtgtttatatttaatctcttaccgtatatgcgtagtatttgagttgcgaataaatgtaaacacagcaagttccaccccagtcctctgttgtccaggtgttctcttcaagattccatttgaccatgcagccttggacaaataggactggggtggaacttgctgtgtttatatttaatctcttaccgtatatgcgtagtatttgagttgcgaataaatgttccatttttgttttctacaaaaaaaa

SEQ ID NO: 60097 - DNA, 417 bp, Homo sapiens
ggacttcccgggtcgacgatttcgtctcgtctggctgctcgtgctccggctgccctggcgggtgccgggccagctggaccccaccactggccggcggttctcggagcacaaactctgcgcggacgacgaatgcagcatgttaatgtaccgcggggaggctcttgaagatttcacaggcccggattgtcgttttgtgaattttaaaaaaggggatcctgtatatgtttactataaactggcacgaggatggcctgaagtttgggctggaagtgttggacgcacttttggatattttccaaaagatttaatccaggtagttcatgaatataccaaagaagagctacaagttccaacaaatgagacggattttgtttgttttgatggaggaagagatgattttcataattataatgtaga

SEQ ID NO: 60098 - DNA, 1007 bp, Homo sapiens
tcacttccacggctcagcgtcagggaggagagagaatgtcttttcgaggcggaggtcgtggaggctttaatcgaggtggtggaggtggcggcttcaaccgaggcggcagcagcaaccacttccgaggtggaggcggcggtggaggcggcggcaatttcagaggcggcggcaggggaggatttggacgagggggtggccgcggaggctttaacaaaggccaagaccaaggacctccagaacgtgtagtcttattaggagagttcctgcatccctgtgaagatgacatagtttgtaaatgtaccacagatgaaaataaggtgccttatttcaatgctcctgtttacttagaaaacaaagaacaaattggaaaagtggatgaaatatttggacaactcagagatttttatttttcagttaagttgtcagaaaacatgaaggcttcatcctttaaaaaactacagaagttttatatagacccatataagctgctgccactgcagaggtttttacctcgacctccaggtgagaaaggacctccaagaggtggtggcaggggaggccgaggaggaggaagaggaggaggtggcagaggtggtggcagaggcggtggttttagaggtggaagaggaggtggaggtgggggcttcagaggaggaagaggtggtggtttcagagggagaggacattaagtgaaacagttgacagacatcaccagttgacttctgcattaacctgcatgatctgtttctactatggattggaaacttgtttcttgaacaagtcttgaagatcttggtcattttatgacaatggatctaaaatgtcagcatcatgcaaagtgcaacggaatagtgaattttgctctaaaagagcatgaacaagtctttctaatgttttgtacagtgcctggcactctgtgggtgctcaataaatggataggagttttcatttgaagcatatttgaatttttaaaataaagtgttttattcccttaagttaaaaaaaaa

SEQ ID NO: 60099 - DNA, 1404 bp, Homo sapiens; identical to SEQ ID NO: 58848

SEQ ID NO: 60100 - DNA, 2211 bp, Homo sapiens
ggaataagctggtcgacgatttcgtgggggcgggcctatgccggggtctcacagcgactgcgcggacgggttcctgagtggaacatggcgacttgcgccgaaatcctgcggagcgagttccccgaaattgacggacaagtcttcgactacgtgaccggcgtcttgcacagcggcagcgcggacttcgagtctgtggatgacctggtggaagctgtaggggaactattgcaagaggtgtccggggacagcaaggatgacgcgggcatcagggccgtgtgccagcgcatgtacaacactctgcgtctggctgagccacaaagccagggaaatagccaggtgctactggacgcccctatccagttgtcaaagataacggagaactacgactgtggaaccaaacttccaggactgctaaagagggaacagtcctcgacagtgaatgcaaagaagttagagaaggccgaggctcgacttaaggcaaagcaggagaagcgctcagagaaggacacgctcaagaccagcaaccctctagtcttagaagaggcatcagccagccaggcaggcagcagaaaggagagtcggttggaatcatctggcaagaacaaatcctatgatgtgcgaattgagaactttgatgtgtcttttggcgatagagtactgctggctggagcggatgtgaacctggcatggggccgccgttacgggctggtggggcggaatgggttggggaagacaacgttactgaagatgctggccacccggagtctgcgggttccagcccacatttccctgctgcacgttgagcaagaggttgctggagatgacactcctgccctgcagagtgtgctggagagtgacagtgtgcgagaggatttgctacggagggagcgggagctcactgcccagattgctgctggcagggcggagggctctgaagctgcagagctggcagaaatctatgccaaactggaggagattgaggctgacaaggcacctgccagggcatcagtcattctcgctgggcttggctttacccctaaaatgcagcagcagcccacccgggagttctcaggtggctggaggatgaggctggccctggcccgggccctctttgctaggccagatcttctgctgttagatgaacctacaaacatgctggatgtcagggccatcctgtggctggagaattacctgcagacgtggccctccaccatcctagtcgtctcccacgaccgcaacttcttgaatgccatcgccacagacatcatccacctgcacagccagcggctagatggttaccggggagactttgagaccttcatcaagagtaagcaggagcggctgctcaaccagcagcgtgaatatgaggcgcagcagcagtatcgccagcacatccaggttttcattgaccggtttcgctacaatgccaacagggcctctcaagtgcagagtaaactcaagatgctggagaagctgcctgagctgaagcctgtggacaaggaatcagaggtcgtaatgaagttccctgatgggtttgagaagttctcgccgccaattctgcagctagatgaggtggatttctactacgatccgaagcacgtcatcttcagtcgcctctctgtgtctgctgatctcgagtctcgcatctgtgtggttggagagaatggggctgggaagtctaccatgctgaagctgcttttgggggacctggcacctgttcggggcatcagacacgctcacaggaatctgaagattggctatttcagccagcaccatgtggagcagctggacctaaacgtcagtgctgtggaactgctggcacgcaagtttcctgggcggcctgaggaggagtaccgtcaccagctgggtcggtatggcatctccggagaactggccatgcgtcctcttgccagcctgtctgggggccagaagagccgagtggcctttgctcagatgactatgccctgccccaacttctacattctggatgaacccacaaaccacctggacatggagaccattgaggctctgggccgtgccctcaacaatttcaggggtggtgtgattctggtgtcccacgatgagcgctttatcaggctggtgtgccgggagttgtgggtatgcgaaggaggcggcgtcacccgtgtggaaggaggatttgaccagtaccgcgccctcctccaggaacagttccgccgcgaaggcttcctt

SEQ ID NO: 60101 - DNA, 5961 bp, Homo sapiens
gaactcccgggtcgacgatttcgtgcagcgtgtagtgcgagtggggcggacgcgcgcagcccgcccgcccggcgaccagcaaggagttggcatcctttggaagagttcgtgaaagctttctgcccagagctcctggaccaatgcatcttcccaccaccttaaaccactgagcagttcagagccccagttgcagacgacttgtcctgccaccaccatgagttctgaatgtgatggtggttccaaagctgtgatgaatggcttggcacctggcagcaatgggcaagacaaagacatggatcctacaaaaatctgcactgggaagggagcggtgactctccgggcctcgtcttcctacagggaaaccccaagcagtagccctgcgagccctcaggaaacccggcaacacgaaagcaaaccaggtctggagccagagccttcttcagcagatgagtggaggctttcttccagtgctgatgccaatggaaatgcccagccctcttcactcgctgccaagggctacagaagtgtgcatcccaaccttccttctgacaagtcccaggatgccacttcctccagtgcagcccagccggaggtaatagttgtccctctctacctggttaatactgacagagggcaagaaggcactgccagacctccaacacctctggggcctcttggctgcgtccccacaatcccagcgactgcctctgccgcctcacctctgaccttcccgactctagatgatttcattccccctcatctgcagaggtggccccaccacagccagccagcccgcgcctctggctcctttgcccccattagccagacgccaccatccttctcaccaccacctccgctggtccctcctgccccggaggacctccgcagagtctcggagcctgacctcacgggagctgtttcgagtaccgattccagtcctctactaaatgaagtttcttcttcccttattggaactgattcccaagcctttccatcagttagcaagccttcatccgcctatccctccacaacgattgtcaatcctactattgtgctcttgcaacacaatcgagaacagcaaaaacgactcagtagcctttcagatcctgtctcagaaagaagagtgggagagcaggactcagcaccaacccaggaaaaacccacctcacctggcaaggctattgaaaaaagagcaaaggatgacagtaggcgggtggtgaagagcactcaggacttaagcgatgtttccatggatgaagtgggcatcccactccggaacactgagagatcaaaagactggtacaagactatgtttaaacagatccacaaactgaacagagatgatgattcagatctgtactctcccagatactcattttctgaagacacaaaatctcccctttctgtgcctcgctcaaaaagtgagatgagctgcattgatggtgagaaggtagtcaagaggtcggccacactacccctcccagcccgctcttcctcactgaagtcaagctcagaaagaaatgactgggaacccccagataagaaagtagatacaagaaaatatcgtgcagagcccaagagcatttacgaatatcagcctggcaagtcttccgttctgaccaacgaaaagatgagctcagccatcagccctactccggaaatttcttcagagactcctggatatatatattcttccaacttccatgcagtgaagagggaatcagacggggctcctggggatctcactagcttggagaatgagagacaaatttataaaagtgtcttggaaggtggtgacatccctcttcagggcctgagtgggctcaagcgaccatccagctctgcttccactaaagattcagaatcgccaagacattttataccagctgattacttggaatccacggaagaatttattcgaagacgtcatgatgataaagagatgagacctgccagagccaaatttgactttaaagctcagacactaaaggagcttcctctgcagaagggagatattgtttacatttataagcaaattgatcagaactggtatgaaggagaacaccacggccgggtgggaatcttcccacgcacctacatcgagcttcttcctcctgctgagaaggcacagcccaaaaagttgacaccagtgcaggttttggaatatggagaagctattgctaagtttaactttaatggtgatacacaagtagaaatgtccttcagaaagggtgagaggatcacactgctccggcaggtagatgagaactggtacgaagggaggatcccggggacatcccgacaaggcatcttccccatcacctacgtggatgtgatcaagcgaccactggtgaaaaaccctgtggattacatggacctgcctttctcctcctccccaagtcgcagtgccactgcaagcccacagcaacctcaagcccagcagcgaagagtcacccccgacaggagtcaaacctcacaagatttatttagctatcaagcattatatagctatataccacagaatgatgatgagttggaactccgcgatggagatatcgttgatgtcatggaaaaatgtgacgatggatggtttgttggtacttcaagaaggacaaagcagtttggtacttttccaggcaactatgtaaaacctttgtatctataagaagactgaaaaccatggagattatttttattggaggaggaagcatcattcatgaaccgatctttttagttgagtcagtaggaaaattaatacagtggataaagtaagaagcaaaagacagggacagagaagtgttgtgtttaaaacccaagcctgtctaaggttactgtgtattagacagggccgaactagtgtgctgagcaaaaagaattgaagcaaattgtatttacttagccgcttctgggagccacttcagcctttcccctcccctccacttcttgggtaatctgacctgaagcatagtccaggagcagagttagccagaaatgcctcctgctgccccagccttagagagctcccatctcaatcattgagcctgaaggcttcaagcccaagaatgcaacaagacccccagcctacatttctcagctcccctggagccagctgatcctgtaacgctgctggaggtcagtctgagctaccaagactgtccctagacaaaggtggagtcccccacactgcccaagaccaaatccctcactcaacctgctgaggtgtggatggggaaacagaggcaaaactgaggcacctgatgcattcagcctgctgtgcagcagtgccattgactgccctgatgttcagagagaaacgcacacaaggtttgcccatgagaattggggagcagatggccaagcagataggttatgtctgttttctgagtgatgaagtcaggaagccctgtggctctggaggccacttgtggttcattcttttcccatatccttggcttttagaaatggttaccttcaggacagtgcagctgcatttatcagagcactattgctaagttttcttttctggcttgtgtttttctgggacagtttagaattgggaggcctattctcatagaacaccaaaaatgatgttcagtgattcatttaacatacaccaatgtactctggctgctggggggacaaccataagcaagacatgcccagggtttgccggggctccaaatctactccctgtaggagttcaaggatcacacaaacggtagtaaccagggttgggaatctgagtacaccctggcaaggctttttttcaaactgaagcagcaattttgccactaccagcagcaaccaggacgtctgttttttgtgggggccaaatcaaaaaaaaaaggcccctgtgacgcccgggctgcttggtcacaactctgtccaattcaaggatgtttatcggcctctcttagatcctgagtgagacaaatacagaaatgacccattccctgcccaccagaaactcagaggtgattggggagactgacacaggaaaatgaacttaatcaagagagactgtgatatgtgctaaaaagggtgtgagggagggagagatgaattttccctggagggatcctagaaagcattgtcatattgccatctccattagctcacttttaaacaactagggtgctggaagaacctttgtctgagggtagttcatagctggaaatacttggaatattttccagagtctctaaactctcatcttcccccacagatacacatccaagctcacaaataggagtagcaattctaggtggtagggttgtgtacggaacccctggctgtctgcatatatctcagaattaccccaggaccattgtcccaaagtctagagtctttacaggtaggcaaaatttgttttcaatgcctgtgcctcagctgctgtcacaaatacccatcttaggatcccatcagcttcccatcccccaccagacagccacagtaccctcactttctccctattgttctttcaaatcctgttctcaggaaagaaactgccactaattcattcacactaaggtgtaaatgattgataataggaatgagttacctcttcccacagacatttgtttttaagtatgacagagcagggccttaatcccaagggaaaaggttatggaactggagggggtgagctttctgggtagaaggagacttcctgaatttccttaaaacccagtaagagtaagacctgttgttttggaaggtctgctccaccatctaagagcactgttttttttttgttgttgttgttgttgttttacggcctctgagggaatatagtaaaaatgcatatgcacgtgcaatttgcacggcagcatttcaccgattgtggactgtattggctaatgtgtttcctggtctttagatgcaaaccattaataacactatcttatctcatagttttttcaggggtgcttcttgattagtagggaattttgaacacctctttaaatacagctagaaaataaaaccaatttgtaaagccacatttgcatatgatgccagcctcacgcatttgtatatctccagaaattcaggtatgcctcaccaatttgcccgtctttaataaaatcttgtgttaaaatttgcatcacgtcgccttcctatgtatgacgaaacaagaaacagagatttccaattgctcttttgtcttcagacatttagtaatataaagtacctatttttatgctgaaatgtttatacaggtttattaatagcaagtgcaactaactggcggcatgccttgcaacacattttgatatattagccatgcttccgggtaaaggcaagccccaaactccttatcttttgcagtctctctgggatcagtaaaagaaaaaaaaaaataatgtgcttaagaagtgggactgtaaatatgtatatttaactttgtatagcccatgtacctaccttgtatagaaaaataattttaaaaatttgaatggaagggggtaaaggaagtcatgaagtttttttgcatttttatttaaatgaaggaattccaaataactcacctacagatttttagcacaaaaatagccattgtaaagtgttaaaatttacgataagtattctattggggaggaaaggtaactctgatctcagttacagtttttttttcctttttaatttcattattttgggtttttggtttttgcagtcctatttatctgcagtcgtattaagtcctattgctagaataggttactacaaaaaaggttatattctgaaagaaaaataactgacattatatataaccaattaatttaaagtattgccatttaaattacacactgagagcatgtcctatgcagacatagatttttctgttcatttatttttcttcattgcagtggattgatttgataaatagatgtgttgaattactacatttgctgtacatattatttaataaactttattcagaattgcgtggcaaaaaaaaaa

SEQ ID NO: 60102 - DNA, 1583 bp, Homo sapiens
tgtggcggtggcgctggtggctgcggcggcggcggcggcagcggcgctcgagcggttcctgtcagggtcagccggcgggccccctgggtggtccacctgcaaatcgcggagcggcgccccagggatcgatggcgatgaactataacgcgaaggatgaagtggacggtgggcccccgtgtgctccggggggcaccgcgaagactcggagaccggataacacggccttcaaacagcaacggctgccagcttggcagcccatccttacggctggcacggtgctacctattttcttcatcatcggtctcatcttcattcccatcggcattggcatttttgtcacctccaacaacatccgcgagatcgagattgattataccggaacagagccttccagtccctgtaataaatgtttatctccggatgtgacaccttgcttttgtaccattaacttcacactggaaaagtcatttgagggcaacgtgtttatgtattatggactgtctaatttctatcaaaaccatcgtcgttacgtgaaatctcgagatgatagtcaactaaatggagattctagtgctttgcttaatcccagtaaggaatgtgaaccttatcgaagaaatgaagacaaaccaattgctccttgtggagctattgccaacagcatgtttaatgatacattagaattgtttctcattggcaatgattcttatcctatacctatcgctttgaaaaagaaaggtattgcttggtggacagataaaaatgtgaaattcagaaatccccctggaggagacaacctggaagaacgatttaaaggtacaacaaagcctgtgaactggcttaaaccagtttacatgctggattctgacccagataataatggattcataaatgaggattttattgtttggatgcgtactgcagcattacctacttttcgcaagttgtatcgtcttatagaaaggaaaagtgatttacatccaacattaccagctggccgatactctttgaatgtcacatacaattaccctgtacattattttgatggacgaaaacggatgatcttgagcactatttcatggatgggaggaaaaaatccatttttggggattgcttacatcgctgttggatccatctccttccttctgggagttgtactgctagtaattaatcataaatatagaaacagtagtaatacagctgacattaccatttaattttatattatgaaagcaaatcatctgcatgtgcatcaaggccagtcctattcaacctagctttcgaatgctgatatctggttagtatgtcattttgaagggggcacataacttttctaaaaaaaagcagtctttgttgtttgcttcttccctacggatgacttctaaaaatatatgacgggtataaaaaaattagctatattgatcatatcaacactgtaactgctgaaatggcattctaatgtttgctttttattcggacaggccacatgatgcatagagcctctttcatgtgacttgtgtctactgcttaaatctttatgctgtgttgatgatattatattgacatatgaagctgtaaaaaaaaaa

SEQ ID NO: 60103 - DNA, 2799 bp, Homo sapiens
cggccgacgatctcgtgcctcgggaatccctggacggcggcggcggatcgggagggaagccgcccctggggactgagcgctgcggtcctggctatgggaggaggcaactttcagggttcacagcatgtccgcctcggcccctgctgcggagggggagggaacccccacccagcccgcgtccgagaaagaacccgaaatgcccggtcccagagaggagagcgaggaggaagaggacgaggacgacgaggaggaggaggaggaggaaaaagaaaagagtctcatcgtggaaggcaagagggaaaagaaaaaagtagagaggttgacaatgcaagtctcttccttacagagagagccatttacaattgcacaaggaaaggggcagaaactttgtgaaattgagaggatacatttttttctaagtaagaagaaaaccgatgaacttagaaatctacacaaactgctttacaacaggccaggcactgtgtcctcattaaagaagaatgtgggtcagttcagtggctttccatttgaaaaaggaagtgtccaatataaaaagaaggaagaaatgttgaaaaaatttagaaatgccatgttaaagagcatctgtgaggttcttgatttggagagatcaggtgtaaatagtgaactagtgaagaggatcttgaatttcttaatgcatccaaagccttctggcaaaccattgccgaaatctaaaaaaacttgtagcaaaggcagtaaaaaggaacggaacagttctggaatggcaaggaaggctaagcgaaccaaatgtcctgaaattctgtcagatgaatctagtagtgatgaagatgaaaagaaaaacaaggaagagtcttcagatgatgaagataaagaaagtgaagaggagccaccaaaaaagacagccaaaagagaaaaacctaaacagaaagctacttctaaaagtaaaaaatctgtgaaaagtgccaatgttaagaaagcagatagcagcaccaccaagaagaatcaaaacagttccaaaaaagaaagtgagtctgaggatagttcagatgatgaacctttaattaaaaagttgaagaaaccccctacagatgaagagttaaaggaaacaataaagaaattactggccagtgctaacttggaagaagtcacaatgaaacagatttgcaaaaaggtctatgaaaattatcctacttatgatttaactgaaagaaaagatttcataaaaacaactgtaaaagagctaatttcttgagatagaggacagagaagatgactcgttcccatagatttgaagatctgatttataccattataccagcaaagagaatgtatttccttttctaaatccttgttaagcaacgttagtagaacttactgctgacctttttatcttgagtgttatgtgaatttgagtttgctgttttaaattgcatttctatgccatttttagtttaaaatcttgcatggcattaattgttccttgcttttatagttgtattttgtacattttggatttctttatataaggtcatagattcttgagctgttgtggtttttagtgcacttaatattagcttgcttaaggcatacttttaatcaagtagaacaaaaactattatcaccaggatttatacatacagagattgtagtatttagtatatgaaatattttgaatacacatctctgtcagtgtgaaaattcagcggcagtgtgtccatcatattaaaaatatacaagctacagttgtccagatcactgaattggaacttttctcctgcatgtgtatatatgtcaaattgtcagcatgacaaaagtgacagatgttatttttgtatttttaaaaaacaattggttgtatataaagtttttttatttcttttgtgcagatcactttttaaactcacataggtaggtatctttatagttgtagactatggaatgtcagtgttcagccaaacagtatgatggaacagtgaaagtcaattcagtgatggcaacactgaaggaacagttaccctgctttgcctcaaaagtgtcatcaatttgtaattttagtattaactctgtaaaagtgtctgtaggtacgttttatattatataaggacagaccaaaaatcaacctatcaaagcttcaaaaactttgggaaagggtgggattaagtacaagcacatttggcttacagtaaatgaactgatttttattaactgcttttgcccatataaaatgctgatatttactggaaacctagccagcttcacgattatgactaaagtaccagattataatgccagaatataatgtgcaggcaatcgtggatgtctctgacaaagtgtgtctcaaaaataatatacttttacattaaagaaatttaatgtttctctggagttggggctcttggctttcagagtttggttaatcagtgttgattctagatgatcaacataatggaccactcctgaatgagacttaattttgtctttcaaatttactgtcttaaatcagtttattaaatctgaattttaaaacatgctgtttatgacacaatgacacatttgttgcaccaattaagtgttgaaaaatatctttgcatcatagaacagaaatatataaaaatatatgttgaatgttaacaggtattttcacaggtttgtttcttgatagttactcagacactagggaaaggtaaatacaagtgaacaaaataagcaactaaatgagacctaataattggccttcgattttaaatatttgttcttataaaccttgtcaataaaaataaatctaaatcaaaaaaaaaa

SEQ ID NO: 60104 - DNA, 4210 bp, Homo sapiens
cctagtccagtgcggtggaattcccgcggtgcagcgaaaatggcggcttccaggtgggcgcgcaaggccgtggtcctgctttgtgcctctgacctgctgctgctgctgctactgctaccaccgcctgggtcctgcgcggccgaaggctcgcccgggacgcccgacgagtctaccccacctccccggaagaagaagaaggatattcgcgattacaatgatgcagacatggcgcgtcttctggagcaatgggagaaagatgatgacattgaagaaggagatcttccagagcacaagagaccttcagcacctgtcgacttctcaaagatagacccaagcaagcctgaaagcatattgaaaatgacgaaaaaagggaagactctcatgatgtttgtcactgtatcaggaagccctactgagaaggagacagaggaaattacgagcctctggcagggcagccttttcaatgccaactatgacgtccagaggttcattgtgggatcagaccgtgctatcttcatgcttcgcgatgggagctacgcctgggagatcaaggactttttggtcggtcaagacaggtgtgctgatgtaactctggagggccaggtgtaccccggcaaaggaggaggaagcaaagagaaaaataaaacaaagcaagacaagggcaaaaaaaagaaggaaggagatctgaaatctcggtcttccaaggaagaaaatcgagctgggaataaaagagaagacctgtgatggggcagcagtgacgcgctgtggggggacaggtggacgtggagagctctttgcccagctcctggggtgggagtggtctcaggcaactgcacaccggatgacattctagtgtcttctagaaagggtctgccacatgaccagtttgtggtcaaagaattactgcttaataggcttcaagtaagaagacagatgttttctaattaatactggacactgacaaattcatgtttactataaaatctccttacatggaaatgtgactgtgttgctttttcccatttacacttggtgagtcatcaactctactgagattccactcccctccaagcacctgctgtgattgggtggcctgctctgatcagatagcaaattctgatcagagaagactttaaaactcttgacttaattgagtaaactcttcatgccatatacatcattttcattatgttaaaggtaaaatatgctttgtgaactcagatgtctgtagccaggaagccagggtgtgtaaatccaaaatctatgcaggaaatgcggagaatagaaaatatgtcacttgaaatcctaagtagttttgaatttctttgacttgaatcttactcatcagtaagagaactcttggtgtctgtcaggttttatgtggtctgtaaagttaggggttctgttttgtttccttatttaggaaagagtactgctggtgtcgaggggttatatgttccatttaatgtgacagttttaaaggatttaagtagggaatcagagtcctttgcagagtgtgacagacgactcaataacctcatttgtttctaaacatttttctttgataaagtgcctaaatctgtgctttcgtatagagtaacatgatgtgctactgttgatgtctgattttgccgttcatgttagagcctactgtgaataagagttagaacatttatatacagatgtcatttctaagaactaaaattctttgggaaaaaccctcaattgtgattttaataaattaaaagtagcacattacatggttagaaaatgtcagtgttaaagaatggtacaaagtgaaaagtgtatccctctcttgccgccggtggtagcttgtcccagtggaagctgctgttaacaatttgtgcccccacatccccctccctgcccatccaccaaaaaaaagtacatttacttatgtaaatgtacttatggtgatgtatgtttgttttggcctcacagcatctgtttccccttaatttggtagctgctcacatttccctcgaaagaaccacaccctctgcattctcagttctttgctttggatgggacatttgccctgcagtccccccaccctccaggccatgccctctccagggtgaggcctgtgtgatctaccgtactagggtactaggccctgaaagaggcttttcttgttcctcttgcattttgaacctggagcgggagctgttgtaggccccgcccttggagaagagaactgtctgacagtggggagagagcgccacaccctggtggcataaacgagtccctgaatcatgccgtggctgaaccaagccctgtctgtgggctttttctgttgtactcagggcagtttgatggggttactgtcctgcatagccataatggcccagtataaagcagctgttttgatgagataattgctttaattaagcaaaaggtagcaaagctttcactccgccctgtaccttctgtttccacttaggagccttcccatgtcagaatgtgcagatctgtctcattgtttcctgtgcagtgtgcccccacttcacccagtagtttctgtgtgtctgttatgtactaggtactacaaggtgccaggacggtgtagatacagcctctgctatcgtaaaactcaatgattcggtgggggaagacaaatgtcagtaatgtacaaagtaaaatggcagctgttagaagtatgaaaggggcagggtagggggaggtagaatcttccctgaccaggttaagaaaaccagaggccttctctgagggcaagaggaggagaggagaaatagagtaaggcaggcagaggaaacagtctgagctaagaccctgtggctagaagtggcagagggagaggcagcaggaaggccagcggggaggctggggcccagtgcaggcccaggttggaggagcgtagcacatggagtttggtaggagtttgggacgccctggtggatcttaattgtgatggggtgggtgtgaaaggcagtccaggttgcactggttgcacaggagaagtgatcagaagaggaccccagcaggtgtgagccgtgagctgggaggtgcttcagtagtgcaggccatagctgaaggtgtcctacatcagcagggtgatggtgaggtttgaaccactgtttcactgcatagtccctgctgatggacacttgagtgttcagattttttgctggtatattcagtgctgcagtggacattttcatacaaaatatttcggtacacttttgtttatatctgaaaggtaaattcctagcagtagaattattagagcaaacggaatttaacattttggtgtgtattgccaaattgccctcccaagtggtttagtcagcttacccttgccaacaatagatctatccttgccagccttgggcatcacatttaccagtttaatagattgtaaaaccatatcttaattggctaccctgaagccaccatactggagaggctgcgtacagtgtttcacgtagagagagggatacccaggaggcccacctgctccaaccccagctgcatgagtcttcccagcccaggcacagacatgtggataagatttaaacattttcagccccagccttcaagcaatcctagttgacactgaggggagccaacataagctgagctgagaaacagtctgcccagtctgcagattcatgagcaaaagaaatgttgggctgggtacagtggctcacgcctgtaatcccagtactttgggaggccgaggtgggtggatcagttgaggtcaggagtttgagaccagcctggccaacatggtgaagccctgtctctactaaaaattagccgagtgtggtggtgcgggcctgtaatcccagctactcaggtggctgaggcaggagaatggcttgaacccggggggcggaggttgcagtgagccaagatcaggccactgcactccagcctggatgacgggatgagactctgtctcaaaaaaacgaaacaaaaattttttaagagaaatgtcatttgtttttgtttttgagacagggtctcactctgttgccctcactggagtgcagtagggatcacggctcactgaagtctctacctaccggctcaattgatcttcccaccacagcctcccaaatagctgggagaaatgtcctgtttttaatgaatttgtcttcctttttgtcttgtttgttttaatatctagtgatctaataaatttggatgatatcttttgactatc

SEQ ID NO: 60105 - DNA, 1319 bp, Homo sapiens
ggctaaagcggcagccgccggggcgcaatgcgagcggctggcgtaggcttggtggactgtcactgccacctctccgccccggactttgaccgcgatttggatgatgtgttggagaaagccaagaaggccaatgttgtggcccttgtggcagttgccgaacattcaggagaatttgaaaagattatgcaactttcagaaaggtataatgggtttgtcctgccatgcttgggtgttcatccagttcaaggacttccaccagaagaccaaagaagtgtcacactaaaggatttggatgtagctttgcccattattgagaattataaggatcggttgttggcaattggagaggttggactagatttctcccccagatttgctggcactggtgaacagaaggaagagcaaagacaagtcctaatcagacagatccagttagccaaaagactaaatttgcctgtaaatgtgcactcacgctctgctggaagacctaccatcaaccttttacaagagcaaggtgctgagaaggtactgctgcatgcatttgatggtcggccatctgtagccatggaaggagtaagagctgggtacttcttctcaattcccccttctatcataagaagtggacagcagaaacttgtgaaacaattgcctttaacttctatatgcttagaaacagattcacctgcactaggaccagaaaaacaggtacggaatgagccctggaacatttctatttcagcagaatatattgcccaggtgaaagggatctcagtggaagaagttatagaagtgacgacacagaatgcattaaaactgtttcctaagctccgacacttgctccagaaatagcttcaaaaccatccattacaaaatcgaatcaactgcagggggcagcatttgaaaaatagaaatgttctgatgaagaatctgaactgaagaagctgttttatagggttatagaagattgtaattgtagagaaatatttctcttagaaataaaactgggcttggatcctgaaaccctgggttctgattctagccttgtgctgcttttcaattagccgagttctggcaggatattgggaaaatactgctacttcttacattgcccttttatatagaaccaccacctgaactgaaaccattgctactgggaagggtggctcccacaggaagagtataagcactactgtgatgaggatggagtaagctaaagtatactttttttttttttggagggatttcccttgttgtgcccaaggttgaagggcatgggcccaatttgggttaatggaaccctcaatttccagggttttagg

SEQ ID NO: 60106 - DNA, 841 bp, Homo sapiens
tttttttctgttttgacacatggataaacttttattgacataccaaagggaaaaaaaccaatattcactgaaggctgccgaatctatattcctaagagtaaaggtgtttaattgactctccactcttaaaacactttgtatgaaatatagctaggaatatacataaagaattcagattacaaaactctccaggaaatcgatagtgatcatataatactggaactacagttaaaaacaaaacaaaccaatctttgaggattcctaactgtagtttacttgacagtgcagatcatctgtaccaactttctatagcaagttgtaataggcaattgtaagcaaacagtatcaatctgtgtaacttgtaaaaattcatctgaagttgtttggagctgtatgacaatggatgttattcttccggttctcccagcagctctacaaaatcagtgatataccatttggcgttatccttgacttgttgcctgatcacatttcctccaaatccaatgaaagcatccgattccttcttcactgatgaccgtgctgtcaacatcaaaacacacagcatctgctgagtagaaaagcttcctcagctctgagtgggagatcatccttggaagaattttcctcccaggctcaggtgaggcgagtgcgccgccggggctgcagctggcgctggccattgagaagcttctgcgctaccttgcgatcgtgcccgccacttcccgcaggacgggaagtcgtaaagctcctcctggtagcttataggcggcggcggccaggcagaagcctgcggacacccaacagccactttagctgacgccagccagggagcctgtggctt

SEQ ID NO: 60107 - DNA, 2137 bp, Homo sapiens
cccggaatttccgggtcgacgatttcgtagattacaacggtgatggcgggcaagcggtccggctggagccgggcggctctcctccagctccttctcggcgtgaacctggtggtgatgccgcccacccgggcccggagtctgcgcttcgttaccttgctgtaccgccatggagaccgttcaccagtgaagacatatcccaaggacccctatcaggaagaagaatggccccaggggtttggtcagttaaccaaggaggggatgctacagcactgggaactgggccaggccctgcggcagcgctatcacggcttcctaaacacctcttatcaccggcaagaggtttatgtgcgaagcacagactttgaccggactctcatgagtgctgaggccaacctggctggactcttccctcccaacgggatgcagcgcttcaacccgaacatctcgtggcagcctattcctgtgcacactgtgcccatcactgaggacaggctgctgaagttcccgttgggcccatgtccccgttatgagcagctgcagaacgagacccggcagacaccagagtatcagaatgagagttctcggaatgcacaatttctggacatggtggccaacgagacagggcttacagacctgacactggagaccgtctggaatgtctatgacacactcttctgtgagcaaacgcacgggctgcgcctgccgccctgggcctcaccccaaaccatgcagcgtctcagccggctaaaggacttcagcttccgcttcctcttcggaatctaccagcaggcggagaaggcccggcttcaggggggagtcctgctggctcagataaggaagaacctgaccctaatggcgaccacctcccagctccccaagctgctggtttactctgcgcacgacactaccctggttgccctgcaaatggcactggatgtctacaatggtgaacaagccccctacgcctcctgccacatatttgaactgtaccaggaagattctgggaatttctcagtggagatgtactttcggaacgagagtgacaaggccccctggccgctcagcctgcctggctgccctcaccgctgcccactgcaggacttccttcgcctcacagagcccgtcgtgcccaaggattggcagcaggagtgccagctggcaagcggtcctgcagacacagaggtgattgtggccttggctgtatgtggctccatcctcttcctcctcatagtgctgctcctcaccgtcctcttccggatgcaggcccagcctcctggctaccgccacgtcgcagatggggaggaccacgcctgacaaccactcagcccccttccctccacctcctaggggaggtgggctgggccctcgctcctgactgttgctgctccccagcccatggacaggagatcctgggttgggcctccctctgatgaccccagccagatgagcgagtggggctcagcgtggcccatggtgcctgtcactcagcattcccatgcctgatgtttaccaagtgctgtgttggacactggctttctccaaacaggatttgcctcctccacgctccctacacacctgagatgtaaactggcagtcagtgttcactcaggacctaggattagaaaatggcagagttggtgctggatccaccttgcacttctatcaagccctgttctttttcctccagcctgaagtcttcggcaaatagctcagagggacatggtcttgcctctcagtgcttattttagtgggaaaaacagctaataccaggggtacaaacattggctcccaaggaactggatcacccaacagccagccagccacatttccctgtgtctggctagagccaccattagactcagacagaatgcttcaggaatcgttgtcaccccttcaactggagcaggacggaaggttgtctgtacttgggagggagtggggagtggtgggaagggagttgcttgtcacacgaatcaggaaactgctctccctcagctgggctggggtctccagggacctgagctacatgcaggttgtgagctggaaaagaaagttctagactgtggcccagaatagggctggggcagctcccagagaatgaatagtgctgtttcctattggactgataaaaaaaaaa

SEQ ID NO: 60108 - DNA, 2366 bp, Homo sapiens
tttcgtgagcactcgggcggcggcgtcctggagacccgcgagagatggaagcggcggcgacgccggcggctgccggggcggcgaggcgcgaggagctagatatggatgtaatgaggcccttgataaatgagcagaattttgatgggacatcagatgaagaacatgagcaagagcttctgcctgttcagaagcattaccaacttgatgatcaagagggcatttcatttgtacaaactcttatgcaccttcttaaaggaaatattggaactggccttttaggacttccattggcaataaaaaatgcaggcatagtgcttggaccaatcagccttgtgtttataggaattatttctgttcactgtatgcacatattggtacgttgcagtcactttctatgtctgaggtttaaaaagtcaacattaggttatagtgacactgtgagctttgctatggaagtgagtccttggagttgtcttcagaagcaagcagcatgggggcggagtgtggttgacttttttctggtgataacacagctgggattctgtagtgtttatattgtcttcttagctgaaaatgtgaaacaagttcatgaaggattcctggagagtaaagtgtttatttcaaatagtaccaattcatcaaacccttgtgagagaagaagtgttgacctaaggatatatatgctttgctttcttccatttataattcttttggtcttcattcgtgaactaaagaatctatttgtactttcattccttgccaacgtttccatggctgtcagtcttgtgataatttaccagtatgttgtcaggaacatgccagatccccacaaccttccaatagtggctggttggaagaaatacccactcttttttggtactgctgtatttgcttttgaaggcataggagtggtccttccactggaaaaccaaatgaaagaatcaaagcgtttccctcaagcgttgaatattggcatggggattgttacaactttgtatgtaacattagctactttaggatatatgtgtttccatgatgaaatcaaaggcagcataactttaaatcttccccaagatgtatggttatatcaatcagtgaaaattctatattcctttggcatttttgtgacatattcaattcagttctatgttccagcagagatcattatccctgggatcacatccaaatttcatactaaatggaagcaaatctgtgaatttgggataagatccttcttggttagtattacttgtgccggagcaattcttattcctcgtttagacattgtgatttccttcgttggagctgtgagcagcagcacattggccctaatcctgccacctttggttgaaattcttacattttcgaaggaacattataatatatggatggtcctgaaaaatatttctatagcattcactggagttgttggcttcttattaggtacatatataactgttgaagaaattatttatcctactcccaaagttgtagctggcactccacagagtccttttctaaatttgaattcaacatgcttaacatctggtttgaaatagtaaaagcagaatcatgagtcttctatttttgtcccatttctgaaaattatcaagataactagtaaaatacattgctatatacataaaaatggtaacaaactctgttttctttggcacgatattaatattttggaagtaatcataactctttaccagtagtggtaaacctatgaaaaatccttgcttttaagtgttagcaatagttcaaaaaattaagttctgaaaattgaaaaaattaaaatgtaaaaaaattaaagaataaaaatacttctattattcttttatctcagtaagaaataccttaaccaagatatctctcttttatgctactcttttgccactcacttgagaacagaataggatttcaacaataagagaataaaataagaacatgtataacaaaaagctctctccagatcatccctgtgaatgccaaagtaaactttatgtacagtgtaaaaaaaaaaaatctcagttatgtttttattagccaaattctaatgattggctcctggaagtatagaaaactcccattaacataatataagcatcagaaaattgcaaacactaggaattaattttacactctaaatggtagttgatcttcatagtcaagaggcactgttcaagatcatgacttagtgtttcaatgaaatttgaaaagggactttaaaacttatccagtgcaactcccttgtttttcgtcagaggaaaaggaggcctagaaaggttaagtaacttggtcgagaccactcagccttgagatcaagaaaacctaatctttctgactcccaggccagggatgtt

SEQ ID NO: 60109 - DNA, 1915 bp, Homo sapiens
tttcgtcgagatccggccgcgcgccgaggtggccaacctcagcgcgcacagcgccagccccatccaggatgcggtcctgaagcgcctgtcgctgctggaggacatcgtgtaccggcagctgaatggcttatccaaatcccttgggctcattgaaggttatggtgggcggggtaaagggggccttccggctactctttccccggctgaagaagaaaaggctaagggaccccatgagaagtatggctacaattcatacctcagtgaaaaaatttcactggaccgttccattccggattatcgtcccaccaagtgtaaggagctcaagtactccaaggacctgccccagatatccatcatattcatcttcgtgaacgaggccctgtcggtgatcctgcggtccgtgcacagtgccgtcaatcacacgcccacacacctgctgaaggaaatcattctggtggatgacaacagcgacgaagaggagctgaaggtccccctagaggagtatgtccacaaacgctaccccgggctggtgaaggtggtaagaaatcagaagagggaaggcctgatccgcgctcgcattgagggctggaaggtggctaccgggcaggtcactggcttctttgatgcccacgtggaattcaccgctggctgggctgagccggttctatcccgcatccaggaaaaccggaagcgtgtgatcctcccctccattgacaacatcaaacaggacaactttgaggtgcagcggtacgagaactcggcccacgggtacagctgggagctgtggtgcatgtacatcagccccccaaaagactggtgggacgccggagacccttctctccccatcaggaccccagccatgataggctgctcgttcgtggtcaacaggaagttcttcggtgaaattggtcttctggatcctggcatggatgtatacggaggagaaaatattgaactgggaatcaaggtatggctctgtgggggcagcatggaggtccttccttgctcacgggtggcccacattgagcggaagaagaagccatataatagcaacattggcttctacaccaagaggaatgctcttcgcgttgctgaggtctggatggacgattacaagtctcatgtgtacatagcgtggaacctgccgctggagaatccgggaattgacatcggtgatgtctccgaaagaagagcattaaggaaaagtttaaagtgtaagaatttccagtggtacctggaccatgtttacccagaaatgagaagatacaataataccgttgcttacggggagcttcgcaacaacaaggcaaaagacgtctgcttggaccaggggccgctggagaaccacacagcaatattgtatccgtgccatggctggggaccacagcttgcccgctacaccaaggaaggcttcctgcacttgggtgccctggggaccaccacactcctccctgacacccgctgcctggtggacaactccaagagtcggctgccccagctcctggactgcgacaaggtcaagagcagcctgtacaagcgctggaacttcatccagaatggagccatcatgaacaagggcacgggacgctgcctggaggtggagaaccggggcctggctggcatcgacctcatcctccgcagctgcacaggtcagaggtggaccattaagaactccatcaagtagagggagggagctggggcactggagcctggcccccaggacatggctgctccccccaacatctggaccagctgccctggcggagagacagcaaggggccggcaggtgctcgatgggccccccagggcttctccagggcagcacagggaccccggatgaagactctgtcccccctcaggcattcagctgcccacaagtttcctgcaccctggaaaagcccccccacactgtatt

SEQ ID NO: 60110 - DNA, 1816 bp, Homo sapiens
gcggccgctctggccccgtgtccagtgccaggcaggcttcagggcaccgtcctcggccctgggcgagggaaccgccgggccgggtcctcgcgcggggaagcggttccgaaggctcgcggggagcggctagccctgagtccctgcatgtgcggggctgaagaaggaagccagaagcctcctagcctcgcctccacgcttgctgaataccaagctgcaggcgagctgccgggcgcttttctctcctccaattcagagtagacaaaccacggggatttctttccagggtaggggaggggccgggcccggggtcccaactcgcactcaagtcttcgctgccatgggggccgtcatgggcaccttctcatctctgcaaaccaaacaaaggcgaccctcgaaagataagattgaagatgagctggagatgaccatggtttgccatcggcccgagggactggagcagctcgaggcccagaccaacttcaccaagagggagctgcaggtcctttatcgaggcttcaaaaatgagtgccccagtggtgtggtcaacgaagacacattcaagcagatctatgctcagtttttccctcatggagatgccagcacgtatgcccattacctcttcaatgccttcgacaccactcagacaggctccgtgaagttcgaggactttgtaaccgctctgtcgattttattgagaggaactgtccacgagaaactaaggtggacatttaatttgtatgacatcaacaaggacggatacataaaccaagaggagatgatggacattgtcaaagccatctatgacatgatggggaaatacacatatcctgtgctcaaagaggacactccaaggcagcatgtggacgtcttcttccagaaaatggacaaaaataaagatggcatcgtaactttagatgaatttcttgaatcatgtcaggaggacgacaacatcatgaggtctctccagctgtttcaaaatgtcatgtaactggtgacactcagccattcagctctcagagacattgtactaaacaaccaccttaacaccctgatctgcccttgttctgattttacacaccaactcttgggacagaaacaccttttacactttggaagaattctctgctgaagactttctatggaacccagcatcatgtggctcagtctctgattgccaactcttcctctttcttcttcttgagagagacaagatgaaatttgagtttgttttggaagcatgctcatctcctcacactgctgccctatggaaggtccctctgcttaagcttaaacagtagtgcacaaaatatgctgcttacgtgcccccagcccactgcctccaagtcaggcagaccttggtgaatctggaagcaagaggacctgagccagatgcacaccatctctgatggcctcccaaaccaatgtgcctgtttctcttcctttggtgggaagaatgagagttatccagaacaattaggatctgtcatgaccagattgggagagccagcacctaacatatgtgggataggactgaattattaagcatgacattgtctgatgacccaaactgcccatgtcatttgtttccagaaacgaggaccaataattctctcacactggcatttgtgctggtagtacaagtcctttaatatgtccaggaagggagccattgcccagtggtccatatctccaccacatcccctgcttgagcccagcgctgcatgtccctcccaagaagtccagaatgcctgcaaattgctgtaattttataccatgttgtaaccaataaacagaactatttcttacaaaaaaaccc

SEQ ID NO: 60111 - DNA, 1232 bp, Homo sapiens
agccggggactagcggttcctttccgatgctctttccatctgccctccacgtgacagggcttgcgctgcttctatttatcagtttgcttgtttcaggcatttcacgtggaccaggtggatcatctgtgcgtgcagctgccttggccctctcagttgcccccgccccgtgggagtcgggggattccatccttcgtgatggcatccataccgggttgagatttgaagaccttgcttctcatcacccactggattatgccccaggctttcctacccaatgatcctcttgcaacacgccgtgcttcctccacctaagcagccctcaccctcgcctcctatgtcagtggccaccaggtctacaggaaccttgcagcttccaccacagaagccttttgggcaggaggcttccttgcctcttgcaggggaagaagagttatcgaagggaggggagcaagactgtgccctggaggagctatgtaagcccctgtactgcaaactctgcaatgtcaccttgaactctgcacagcaagcccaggctcattatcagggtaaaaatcatggtaagaaactccgaaattactatgcagcaaatagctgtcctcctcctgctagaatgagcaatgtggtcgagcctgcagctactccagttgttccagtccctccgcagatgggctcctttaagccaggaggccgagtgatcctggccacggagaatgattactgtaagctctgtgatgcctccttcagttccccagctgtggctcaggctcactatcaagggaagaatcatgccaagaggctgcggctggcggaagctcagagtaactcattctcggaatcctcagagctgggtcaacggcgggccaggaaagaagggaatgagtttaagatgatgcctaacaggagaaatatgtatacagtacagaataattcaggtccttacttcaatccccgctctcggcagagaattccacgtgatctggccatgtgtgttactccaagtggccagttttactgctcaatgtgtaatgttggagctggcgaagagatggaattccggcagcatttagagagcaagcaacataagagcaaggtgtctgaacagcggtacaggaatgagatggagaatctgggatatgtatagtgattatcatattaagatagagcagcttttcctgcctgttgtttgccttttgtcaacttgccctgctttgtggtctttttgatatgagtac

SEQ ID NO: 60112 - DNA, 1418 bp, Homo sapiens
tttcgtcttcgctgtcggcgatttcgtgtcgcagggggtcgcctggccggagctgggctccgagaatcccgggtgccagcaccagagcagcggctctccgcactaactctcctctcctggtcagctgtaacccctgccgcagagcccggcaactttcagctgtcgcccgcggagccccgagggccactcgcctcacctgtgcgtgcagcgcctcgcgcgccctgtccggctgcggagatgagcgagcttaataccaaaacatccccagcaaccaaccaggcagctggccaagaggaaaaaggaaaagctggcaatgtcaagaaggcggaggaggaggaggagattgacattgatctgacagcaccagaaacagagaaggctgcccttgctattcagggcaagttccggcgatttcagaaaaggaaaaaggatcccagctcctgaatggccaggcttgcccttcaccttcaccttcatgctgggcccttctctccccttctccacacccatgtatctttatcccttgtccctctagcctttccttgaggcaaggtcaacctttatatactcttgtatctggccccctcaagccatcacagaagtagaggcacaagagaggtggagaagatgaagacttcaatcagcagtcactagtctaagggtggaacaatttcttcttggtataaggttctttgatcagtagctatgcctgccctgtagggctaaacaagaggcttcgaggctgagagatctccccaaagaacaatgtgggaaggaggggaaggctttcagagtagggtgcctgagggtgggacatatgcactgttctgctagttacggcattcacactttaggtaacattttttttccccttcagatccttctgcaccaactccaacttcccctcccaggatctaagccacagtggggactggagcctcgttttccccctaggcagacctaaatcaagcagcttaccacaatagtgcatgctgagtagattagttccaaggaagggagactggaatgctggtgtcaaggaaaagcctccctcatcatctagtctaagaccataacgggcagaagcataagaggttccagggccataggagaatgagaagtagggcacatatagggaggaaagaaaagtgaagaagggggaaatctctgaatttttttactgctgggaaaagtgtactacatgaaggatgcttggggctttgctaacctgctccccgctaaccctccaagtttaaccatccccagaggccacacaaaccaagtgactcctgtagttcccatttgccccactatggagtcagggcaaaagtggaaaagcccctccatgtgattttagcatgtttaatcattttaacaataaacccccccacaaatggggtcatttaacctctaaaaaa

SEQ ID NO: 60113 - DNA, 1073 bp, Homo sapiens
tttcgtgtggaaaccgctaggccagcgctcgccgggacctggaatccctgttcgccgaggtgggagccggtggaccggtcccccagccggcccccacctccgcttcccggtgtttgagggttcgggcctcccgccggggagttcacccctcgggctcgtcagtagggctgtggctgtcgcctcttcctgcagcgccaggctccgcccggtctcacagtcggcttaggggctttgcgtgcactgcggttgggtggaaaaacccactcctggttgtttagacgttggcctgcagacgatgtcatttctgtattcctctaaggcaggaagtcattatgcaacttacacatattcatcagatttcctctgacttacccggacatgtacatgggaatgatgtgcactgccaagaaatgtgggattaggtttcagcctccagctattatcttaatctatgagagtgaaatcaaggggaaaattcgccagcgcattatgccagttcgaaacttttcaaagttttcagattgcaccagagctgctgaacaattaaagaataatccgcgacacaagagttacctagaacaagtatccctgaggcagctagagaagctattcagttttttacgaggttacttgtcggggcagagtctggcagaaacaatggaacaaattcaacgggaaacaaccattgatcctgaggaagacctgaacaaactagatgacaaggagcttgccaaaagaaagagcatcatggatgaactttttgagaaaaatcagaagaagaaggatgatccaaattttgtttatgacattgaggttgaatttccacaggacgatcaactgcagtcctgtggctgggacacagagtcagctgatgagttctgataccaaacactcaaaacatgcattgggctagcagaatatccatgtttattaccagactggttctggaagaagctgtaaagaatactaaatatgttgggttataggggattgaccatgttacttttcaaaaccagcactttgggaggcttaggcgggtggatcacctaagggcaggagttcgagcccagcct

SEQ ID NO: 60114 - DNA, 1513 bp, Homo sapiens
tcccgggtcgacgatttcgtgcgaaaagccgggactggacctagcggagttgtgcttgtcgccgaagcggggtgggcttgttcgttccgcgcagccgcagccagaaccgggtgacgcttatccccgctgtctttccagtccagggccgctgagagtgggggtggctgggagcagcgcagcctccggaggaggaggcggaggccgaggaccaggaatcaccttcaagcctatgtcgtgaggctttggcagaaattaagaaggaaatatctccattgttcattggcatggaaaaatgttcagtgggaggattagagttgactgaacagactcctgctttattagggaatatggccatggcaactagtctcatggacataggggattcatttggtcatccagcttgtcctttagtcagtagatctaggaactcaccagtggaagatgatgatgatgatgatgatgttgtgtttattgaatctatacaacctccttcaatttctgctccagcaatagctgatcaaagaaacttcatatttgcatcatcaaaaaatgaaaagcctcaaggaaattattctgtaattcctccttcttcaagagatttggcatctcagaaaggaaatataagtgagacaattgttattgatgatgaagaggacatagaaacaaatggaggagcagagaaaaagtcttcctgttttatcgaatggggacttcctggaactaaaaacaaaaccaacgatttggatttctccacttccagtctttcaagaagtaagaccaagactggagtaagaccttttaaccctggtagaatgaatgtggcaggagacttatttcagaatggagaatttgcaactcatcatagtcctgattcttggatctcccagtcagcttcatttcccagtaatcagaaacagccaggggtggattctttatcaccagtggccttacttcgtaagcagaatttccagcctacagcccaacaacaacttactaaaccagctaaaatcacttgtgcaaattgcaaaaagcctttacagaagggacagacagcttatcaacgaaaaggatcagctcacctcttttgctctaccacctgcctttcttccttctctcataaacgtactcaaaacacacgaagcataatatgtaaaaaagatgcatctacaaagaaggctaatgtcattcttccagtagaatcaagcaaatccttccaagaattttatagtacatcttgtttgtctccctgtgaaaacaactggaatcttaaaaaaggagtttttaataagtcaagatgtacaatttgtagtaaattagcagaggtctggatttttatacctaagttgttgtttaggctaacagtgataattttaacttttaagtgctattatgtactctttcatctacataatgcacgtgttctggatgtataacatgaagctgaaaggaagaataaggatatgttagaactatcttatgggatattttataaataaaattccatttgcatagc

SEQ ID NO: 60115 - DNA, 3379 bp, Homo sapiens
tttcgtggtgggggcagcgggcgcggggcgggcgcggggaccgcgccagcctgtcactaatgtctccctttgtgtctcccccatctcatccttttccccggcgcgccgggcccgccgaccccacaggaaggcctggacgacggcccggacttcctctcagaagaggaccgcggacttaaagcaataaatgtagatcttcaaagtgatgctgctctgcaggtggacatttctgatgctcttagtgagcgggataaagtaaaattcactgttcacacaaagagttcattgccaaattttaaacaaaacgagttttcagttgttcggcaacatgaggaatttatctggcttcatgattcctttgttgaaaatgaagactatgcaggttatatcattccaccagcaccaccaagacctgattttgatgcttcaagggaaaaactacagaagcttggtgaaggagaagggtcaatgacgaaggaagaattcacaaagatgaaacaggaactggaagctgaatatttggcaatattcaagaagacagttgcgatgcatgaagtgttcctgtgtcgtgtggcagcacatcctattttgagaagagatttaaatttccatgtcttcttggaatataatcaagatttgagtgtgcgaggaaaaaataaaaaagagaaacttgaagacttctttaaaaacatggttaaatcagcagatggagtaatcgtttcaggagtaaaggatgtagatgatttctttgagcacgaacgaacatttcttttggaatatcataaccgagttaaggatgcatctgctaaatctgatagaatgacaagatcccacaaaagtgctgcagatgattacaatagaattggttcttcattatatgctttaggaactcaggattctacagatatatgcaagttttttctcaaagtttcagaactgttcgataaaacaagaaaaatagaagcacgagtgtctgctgatgaagacctcaaactttctgatcttttaaaatattacttaagagaatctcaagctgctaaggatctcctgtatcgaaggtctaggtcactagtggattatgaaaatgctaataaagcactggataaagcaagagcaaaaaataaagatgttctacaggccgaaacttcccaacaattatgttgtcagaaatttgaaaaaatatctgagtctgcaaaacaagaacttatagattttaagacaagaagagttgctgcattcagaaaaaatttagtggaactggcagagttagaactgaagcatgcaaagggtaatctacagttgctgcagaactgcctggcagtgttaaatggagacacataagccacactccgccttcctgttaaaaagggctgccttccttcaaattttatttttgttttcttaatgatgttaagcatttatgctcactggaaacaaacaaaaagcagctgaaaaagtgcatcaactcctctttttctgagaaacatggagcagcgcacgcccaggcgatgccagtctgtgtgccgtgatgccgcactgtgttccccatgacagtggtccatcatcgtgcactcgtcatactcagaagtccaaagttcattcttctttaaagtagcctctataactctgtttattttataaatagtattccttatggctgccactcttatttacctttaaataatttctgaaatttaaccttttcagaatgcattgttgaaacaagataaagattgccttttttgaattttttaaattttgtttttaaaagcatataccaccttagttcattcatgtatcctggtaaagcatcttaatcagacttatttttaattactgaatatttcttagacgttttgggacagattttatgtaatctttataagtatgatttctgaagaaaagcaaatgcattagtatgtttgccttaaacttgtagactaaaccaagtattgtaaaataaacagcgataacagtgatagtttttaactctatggtcattgtatcactctggaaaatgtggagtagctgtaataaatctactcctgtattatgctttacagtgcaggtcttagtttttcttttttctcatttcttttgaaatggcatctcgaacaaagtccaccaatccctttacaaaagaatgaactgctcctctgtgtgtacttcatagaaggtggaatcggacagaggcaggttagtgacagttattcctgaaatacaggagcagagtacagtctgttgtggtttcccggattccgcgcctagctcagccaattaagcatgagacataggccattgagccacttagtagttatgcgagtggatagattggtatgtagagggaaagaggtctgctgtaaagaacaacacttgtttgtctgtggggaaagaaaagcagaatacttgagatgaaagttggcatacaaataggatactatcgccagtagttatattacaaacattatcggcctttctagtgtgaatgaacattagacacattattgtcattcctagtttaaagttaaggttgcgtggttggatttttccactatctttttctaatttttctaccatttggagaccgtaggcatttgggcctgtcaccccttggatgggttcctagtttgtttacattttcctgaaccctcctgagcgcccgttcttggtctaatccccagtcgtgatgattccacacttcctcagccgcatgttgtcttgcctcattcatgagctggtcagcgtttcgtctctttaactgacatgttccccagtgctgtttgaactgttgagtttccgttgctggctgagtgcgttttgtccttcacgtaaccttcgctggtaaaaataagcccatgtgatgtccaccagtggatgaatgctggaccgagagccctagcttctggatccaggtctaggcccttcatctgctgctctgtggcccagggcaggtttgcttgacctctgcctcagttctcgactctaaaggacatactgacctacctcacaggggtgttgtgaggattaataaatgttggtactctgctttggaaatgtgaaaatgctgtgtaaatgttaagaaatactaagtatagggccagaagctatacagtgtttcacttaaccgtttgccattctgtatttaccaaggtggtcttttctgggggaaggaagtagagtggaaggtgcatcccttggcccctggtttacattattagggtgcttattgtaggaatgcactctaaaaagtgggcgtagaatgaaagcagccgtccagtggtcctcccttttctgtagtttcacttttcttgcttcaagttacagcagtcacctgaaatctgaaaatactaaatgaaaaactccagaaacaaaaaaaaaa

SEQ ID NO: 60116 - DNA, 2432 bp, Homo sapiens
gacgatttcgtgcggtgcgggcctcagtctgcggccatgggggcgtccgcgcggctgctgcgagcggtgatcatgggggccccgggctcgggcaagggcaccgtgtcgtcgcgcatcactacacacttcgagctgaagcacctctccagcggggacctgctccgggacaacatgctgcggggcacagaaattggcgtgttagccaaggctttcattgaccaagggaaactcatcccagatgatgtcatgactcggctggcccttcatgagctgaaaaatctcacccagtatagctggctgttggatggttttccaaggacacttccacaggcagaagccctagatagagcttatcagatcgacacagtgattaacctgaatgtgccctttgaggtcattaaacaacgccttactgctcgctggattcatcccgccagtggccgagtctataacattgaattcaaccctcccaaaactgtgggcattgatgacctgactggggagcctctcattcagcgtgaggatgataaaccagagacggttatcaagagactaaaggcttatgaagaccaaacaaagccagtcctggaatattaccagaaaaaaggggtgctggaaacattctccggaacagaaaccaacaagatttggccctatgtatatgctttcctacaaactaaagttccacaaagaagccagaaagcttcagttactccatgaggagaaatgtgtgtaactattaatagtaagatgggcaaacctcctagtccttgcatttagaagctgcttttcctaagacttctagtatgtatgaattctttgaaaattatattacttttatttctactgattttattttggatactaaggatgtgccaaatgattcggatactaagatgcatcgtttgaaatcatctagtgtgttgtatgcagttatcctcaaaaacatcagcgatgtctgaacctttaaaacatctgttagagcaaaattaaaagagcatttggtagtaatctaactttttgttcagttaataagtggttgataaagtttccatatttttctggaaaagttaaaaaaagttacatgtcatttggagaaaatacgtaatcagaaatttgtgcatagattgatgccaaaaaagacatttccagcattgtggaacatggtgagacactatataaaattccagaaagaaagcaactggatttacagatttattgtgagacacaaattcactgctgcctttacactaagaaatgtatatgttaaccatatatgctgtatttattttgtcgttaagcatactttcagtttactcagaattttcaatttgctataaagatgtatcaattagcatatagaaaaatattactttaagatgacttgtttcctttgaaaatacctgtgtactgagggttatgatttgtgtcaaaaattgacataagtgcttttacaagcaccaaagttgaatgaattttcaacaaaatgtaattaaagtctatgttttcagttatgactcaggttaagaaatgtgttttaggatctacttgctggtttttctttttgatccaaatgtgtgatctgccctgataaataacaagttatagtaccatctcccccgccaataaaaaagagaagaaaaaagagaaacccgtggcactatgtaaataaagtaagcatactttgttgttagtaaatagatgaggcatgcctgggaaatgctcccttggcataaatagcaatcaattataattagtaaacaggtgtaccaataaaaagaatttacatgataggttaacaaggaccaggaaagtgagtttcctgaaggagttctttgttcctgatcaaagaaattgatacctgttagcattcactgccaccatattttaaggagaaagaactctattggtgtcgtctgagcagccatttaaaaattggaatctaaaggatggttgctgatgtactgtgtggtctggtagaagtggggaaatatgagagatggaggaaaaacttgattatgtcttccatggcatatttactcttactttacttcgtgccaaatcaaatgaaacaagccgtcttacaagtcgttattgcctttaaaaatctgttccgttttttttcccaggtacttaaaatacaagtgccagtaagtggttcttatgtgttttggggggaaaattttatttcccttttcttctgatatttaaaaaattcatcgatctttcaagatgaaccaaggttttttaaaagaattataggaaacacttcattctttataaaactttctataatgcccttaatttggaatggttaaccttatgtgcctttcctaaaaaatgttgtgaaataccaaacttatggattatcactaggttatcaagcatatattagtctttatcagaataaaatgaaatttcataaaaaaaaa

SEQ ID NO: 60117 - DNA, 1095 bp, Homo sapiens
gcggccgctccaacatcagaatggaggatgaggagcatttaggtaagtagagggcctagggccgcattactgtagcttgacatatgtcttttcttctctctaggaaaatatagtgctataccaaaagggccaagcctctgttaaagtcattgactttggatcaagctgttatgaacaccagaaagtatacacgtacatccaaagccggttctaccgatccccagaagtgatcctgggccacccctacgacgtggccattgacatgtggagcctgggctgcatcacggcggagttgtacacgggctaccccctgttccccggggagaatgaggtggagcagctggcctgcatcatggaggtgctgggtctgccgccagctggcttcattcagacagcctccaggagacagacattctttgattccaaaggttttcctaaaaatataaccaacaacagggggaaaaaaagatacccagattccaaggacctcacgatggtgctgaaaacctatgacaccagcttcctggactttctcagaaggtgtttggtatgggaaccttctcttcgcatgaccccggaccaggccctcaagcatgcttggattcatcagtctcggaacctcaagccacagcccaggccccagaccctgaggaaatccaattcctttttcccctctgagacaaggaaggacaaggttcaaggctgtcatcactcgagcagaaaagatgagatcaccaaagagactacagagaaaacaaaagatagccccacgaagcatgttcagcattcaggtgatcagcaggactgtctccagcacggagctgacactgttcagctgcctcaactggtagacgctcccaagaagtcagaggcagctgtcggggcggaggtgtccatgacctccccaggacagagcaaaaacttctccctcaagaacacaaacgttttaccccctattgtatgacctttgctgagggtatgtcctgctcctttccaccagtgatttgtattaagacagcacttatattgtacaatacttcagactgttttttttaaatacataaaactttatgttaaaaaactctaaaaaaaaaa

SEQ ID NO: 60118 - DNA, 977 bp, Homo sapiens
ttttttttttttgaaaacaaaggcatctgctttatttgttttcagacagtagcgcatactttgtttcctaaacacgtggcagccccaggctcaggggcatatgcaggggcccagcaggaaacggcagggcacagtggctgtggtcccatgattggtcccttcttcagggctccaagtcactgccagggcagggaatgatgtctgctcctcagcccttgtgggcggcgctcacgcagcgctggtatgccttgaccaggtccgagcacagcagcacctcatgcgggcgatctcggtagcagtggagaatctgggcctgcaaccctgagcagacgggctccaccctgcggggctttattgtgctctccatctttgaggctgcctcatggaattgctctgaagacagtttatacatctcagcattcttcctctcaatacgctccagctgctccttgtagaaggtgtcacggcgtcttagctctgcctctctgctctccagctccctggccagccggactgacttctgctcctcatggctgatgctgccttcgcccgtgggcagggatgccttggagtgcttggtggcagcctctctttccctctttgccacctggaagagcttatcctggatagcagcatgctcctgttcatacctcttgacaccctccttcatccctgagggctgctggccaccactgctccccgacctgggcagtgtggattctttgtgaggggctctcaagttgccatcttgaaggccaaaggtagaagatgtgggagcagggggtggagagctgggctccttcatgcggttcaccacgttttcagacagccggacaccctgcagcacccggacccgctcctcctcgtccactccgaaggacaccctgcggccctcgctgctctccgtgctccccatggcgagatgccgcagggccggcagccaccagacccgagacccggctccagagcaaccgggc

SEQ ID NO: 60119 - DNA, 1723 bp, Homo sapiens
ttttttttaaaatgatagcaatttactataacaaccataaaatcatcaggctactgacagctggagaaattccacatgctaagcaactcaactccaaagaaatattagaggtttgagatgaaaaatacacttgaacctgtaattgaattagacaagcctcactgcacgtagggctacagcggtcaccaggacacaaagcaaatgtcgggttaccagaagtgcagttatcagccatcagtgatttattggagtgcctttaaataaataccaagtgtacatccaactggatccccacagtccaaaagtgggcaggtccccctaagaaatttacaagcactttaagtaaatccaaaatacatattattttgttcaatcccaacagtccttcctgcgggagggacagaaggcctagtgataaacagagtctcagtaatgcacagtgattctgattgaagcttttgtacaaaaacttgttcccagtagcatgcacccaccaataaagacttcagtacaaaaaattaaccctaagcactacatttaagtagaaacgagatataattctgaatgtgttttcccaaagatcacataaaagaaaaaaaaatcaaaatcaaataaacaacaacaaaaaaaacaaaaccacacagtaatacaaagctttgtaagaaagctcttactattacagctccaacattgtttgcactgaaaacaaaagttcccatctatgatgaggtgggaaaaaatcccaaatctttcaagttaacagaaatcaacaagggaataaaatgagagataaaagagagcgtgggagagaggaaggggggcaggaagaactgggatgggaagatggacaacataccatcacaaaatggttccaaatttaataaaaataggaaaataagaaccgaggtctggaggggtgggcagggctaccgatgcacttggtgaatgtgcttgcacaggtcccgcggggcggcaggcagcaggcccctatgtggcgtaccgcttggtccactgtctggccatccggtcatgctctgctctgttggtcatgtactgtgtggcgatgctgcccaccagagggtcagcagggttgcaatctgtaagaagtgagcagatggagaggagaactttagaaatagttaaagccggactccagttgtcctttaagatgtccagacagatcacaccttggctgttaatattacagtgatagattcttgttcggaaggtaaccttagggggtttaaacggatagtctggtgaaaaggtaatgtcaagaaagaacacccctccttcatagacagatcctgggggtcccaatatagttgacctccattcataaatgttgtctcctttgggtccagcactacagttgggaggagggtccaatgtgatttctgcaagttccttctgaattcttttagcactagttgacaatttagcagcggttttgctggatatttttccctcctttttcttgggctgaacttgttctctttctggttcttgctgaacactttcacgttgatctccatcggaacttcctccactagtgcttggactgtcatcaactctttgtgcctcagtggacattttagatccctcagcgccgccgctgccgccgcccccggccgttccagctccggctcctgaggctgctgcccgcggctgtcgctgtggctgcccctgagtcctggaaagtgcggacgcgtgggtcgacacg

SEQ ID NO: 60120 - DNA, 4928 bp, Homo sapiens
  misc_feature (1)...(4928): n = a,t,c or g
ttttttttttttagtgttctgtgtgcacatttatttctttcaaagattgtttgtgttccagccacatcttctccaaaggaacccacccaagcccgtgtgcaggcttgctgcagggctgtcttcggcgtttaaagtgctactgaggaatacaatcattgtcacgtaagttcatcaccgcactccagcgtcaggccaaacctttccgtggacctggaaaacctgccattttcttctctttttacaatgcagtttcgacataacattggtagagtaaacaacaaaccacaagcctaaatgatgaatggtgcgctgctgcccagctgctaactgagagaacgaggcagtgtattgtgtttcgaatgcaaacggtcatggacccaagttaacctgagtttgctctgcaggattccgcgggggccttgccctgtgcaggctgctttggtcttcgtgtctaggccggtttggggcagtggggagagggcctggcagcagggtttacgccagccccgaggtctgttttccgtcagacagagatacgtgtcctgccttccaccatccaccaatttgtactctgaagtttccagatcaagagccgtgagattactacccaggaaacacctgccttcggtggccagcagtgtaaattaatctttccctctctgctcaaagcaactttgcaactctcgtctatagaggtggccagtaaaacccaagcaaaaatctaaacgggcaccaggtggccactgagtggcgactggtcgagtagcagttggtcataagggatcagggctggttttgaactcagacttgaaacttgacgaaaataaagtgctctgtcaaaactctcacagcaggttttcagctggaacaaggagatggctactttttgttattgctacaataacacacgcgtgtgtgcaaacacacataacacacacacacacttaaagctccatttcactcctccacaaagaacagaggcacctccttaaacaaagcaaacggggaagggttgcaagctcattaaaaccaacatgagcacccagttccagagatacagacacaattaatcttagtgttcatgaggaattgtttttaaaacacaactgggcaaaactttcatccagacaaaagccaaaaacaaaagccctcaagccacaaaagcttgtagaagaggtgaggcgataaaggtgatttacacatcagtatttttagcatttggtggataatcttaatttatctttaaccttcacaacatttactttgtcataaataccctacaccatgaaaaaacaaacctgtataaaacagcttggaaaacaaacattcacagtatcaatacagcccatttctcacggggctacccctgaagctagccgacgtgttggcctttgcctttgcttcataaactccctcccatgttggtgttttctgtaacttcagaaaaggccattggatggagacaacgtgtgcgtgtctacaggaagcagagccctagaccttggtattcaacagtaagcagcgctcatgggattcatctggaaatggaatagttaaaacctttttttttttttgagagcaagaaggcttaatataaaatcctggggccggcctggtggctcatgcctataatcccagcacgctgggaggccaaggtgggtggatcacctgaggtcaggagttcgagaccagcctgaccaacatggtgagactccatttctactaaatagaattagccaggtgtggtggcgcgtgcctgtaatcccagctacttgggaggctgaggcaggagaatcgcttgaaccaggaggtggaggttgcagtaagctgccattgcactccagcctgggcaaccgagtgaaactccatctcgaaaaaaaaattttttaaataaaaaaaaacttctgatatccttgcacttgaatagagtgcacctgaattccaaaatcaaataaaaaagaacaattaaaaacttctcatcagtgtctgaaattctgacacataatatcctcttggaattcttaaatatgtctcagcctctttttaccacatggcaaagagcagtaaaacttcaagtaaaacattaaagtgaacatctgtcccatctgtcccaaaagactagcagtgatgcctgactttggggacagaaacttggtagtattcacatgttttgaaactccaggtgctttttttacaatgattaaaactggaatataatttttaaaaacaaagcaggttggaaaagtcattttaaagtcacttgataattcctggaacacctaagaagtttgtaatgcgcattttaaagtgaaattcctaatgtcgttttctaatctctctctctaaaaaagaagaaaaaaaaatcctataattttggtttttatacaggtttttactaaaaaagaaaaaaatcctataattttggttttcatataggtttttactaaaaaagaaaaaatcctataattttggtttttatataggtttttactaaaaaagaaaaaaatcctataattttggttttgatacaggtttttactaaaaaagaaaaaatcctataattttggtttttatataggtttttactcaccagtggctctattacccccgaaatatttaatgtttaaggattaacaagaggctacggaaggaagcttgcccatttccgtctccatgacagaagccaagctttcgtaacagccttttacatgtctttggagaaaagtgaatcatattaaactgtcaagaacacttcaccccaatgatgactgctctttgaccagcatgtctactggaagtggcacattcagaagtgagatctgtgaatgaactgaaatagaaaggcaactgatgaggaaagcgactggaatgatattagggatattcaaatggtgtgccaggtttgtgatgttttccaccaaaacaaacccaaacaagggcaccccaacctgtgtccaagaggactgttcacagcaaaattctgaagcgctcatagaaggaatgtcctgcgagtttggcccatttgttattaaacttccattcctaagactgacacctgagacacaaaataatttcctctattgccctaaaaagactttgttttggctactggcagcacttggcaaaatccatgtatgtgtttggttactgtgttctacgagcggtcacgtatggctcctgacttcatctgacaggcccgctgtgctcttgtttagcaagtatgacaggcaggaaaaaaaaccctggatgtcaactgctccactagcattattagagcttttaacacgatagagaaaaatgtaaaaaccatgtgagaatatatatatcttccacttgcaagtaggctcaaagtaaacttagaaaagtgttctgcatactatgcataggatatagttagtgttcaagttctatggctaatatcaaaggtagatgacttcctacatctgtcgtagcgtctccattcttatcaaaatttctctattaatccaaaatcctgcctatgttccacttccctgtactcagggccagctgcattttttattccaagcagcagatgaagagaggtgacccatcctttccattcacagtgacagcacaggggggcacctcctttttgtgacatggtccaggcatggacccaaaacaacacttgttagtgtagaataggtaaactaagtccctcaaacctgccctccacaatctattagagcatattatttcacttataatgttaatctccttctaatattgaaccctaacccttagctatgaggcacagcccaagctctgcagctgtcaagtcttcatttaggcatctgggtggggcaagttggggctttttttgtcctctctgggagaagcctcctggctggagactcagattttgttttccctttaaatgacgagatggttggaagaaacccagcaagacaagcggggcatctggacatccggcggacacactggctgcgtcctggtgagggtagttaacatgggtgcacgtcttctggcttggaggtgatgacctcaggccctacgtgcagggctccacgggggcaccgttcatggtgttcttgtttctgtgcctggagagcagcttcttgttcaggatcctggtgagggtgatgcctttcctccgggaaccctctggctgctccaggaacacaaggtcattgtgtgactgactcatgcctgggtctttctgttgatgccgccggcggaagaacagctttgcacctttccttagaattcctcctttatgctttttggcagtgcccggctccaagacactcatggagctctctgacagctcatcaccgtcggggtccagcaggacctggctgctccatgccgcggcctgtggctccttctccaagtcccaggagtctagctcgtcctcctggggcttgggggcaagggatgcctgggctgactcggcttcctctggcggggcagaggctgccgccctctccggatgggatggggcgtcctcctggtgggtgctgtccacagaggccgtgtagccctgcatcagggcagcgtcgtggtcctgagatagtgaggtcttggagatccctgatatgataatagtgcttttcttccgtggcgacttgagtttcagctttgaagattcactgagctgtcgaatggccacttcagccactggatccgaaccattcaacaccaacaattctgtgtctgaagaagagagtgttttgctgacgggggcgctgcggcaggcgatggctggacagagatgtcttctcgatcaccncaccttgatgggagtcttcaccggagaatcagagctcagcgggacgcctcccacgtcgacgcgaggttggtcttcaagcagtgacagtagtgaccaagtccaaggcatcacgtgcgtctttttattttgcgcagaaaggggaggatggcaggat

SEQ ID NO: 60121 - DNA, 1087 bp, Homo sapiens
tttcgtgcgctgcgcctgcctccgggaggagccgcatccacacaccctgcgctgccctgtcctgcgcgagtggagctctgaagaagctctgagcggagttgtgttcttccccaggtgcgtcctggctgagagttggagctctccagcaacatgcctgagcagagtaacgattaccgggtggccgtgtttggggctggcggtgttggcaagagctccctggtgttgaggtttgtgaaaggcacattccgggagagctacatcccgacggtggaagacacctaccggcaagtgatcagctgtgacaagagcatatgcacattgcagatcaccgacacgacggggagccaccagttcccggccatgcagcggctgtccatctccaaagggcacgccttcatcctggtgtactccattaccagccgacagtccttggaggagctcaagcccatctacgaacaaatctgcgagatcaaaggggacgtggagagcatccccatcatgctggtggggaacaagtgtgatgagagccccagccgcgaggtgcagagcagcgaggcggaggccttggcccgcacatggaagtgtgccttcatggagacctcagccaagctcaaccataacgtgaaggagcttttccaggagctgctcaacctggagaagcgcaggaccgtgagtctccagatcgacgggaaaaagagcaagcagcagaaaaggaaagagaagctcaaaggcaagtgcgtgatcatgtgaaggcccttcctgcgggaggagcagctgtgtgtccccggcacctcactcccccaaaatgacacccaccgtcgtcagggtagcatgtataatgcccacgtgttaaacattgcatttaatcgagatgcgtcctattgtccttaagagggcgtttcacaccaccaacagtaagccacccactctggagtcacagaatctgccaggcggttcaagtgaaaaccaacacactcagcatccctgggaactgagaggtgccagcaattgctgaaggtggcgatgaacacccgaaggtgggagggaggactggtacccacaaagcaacatgtaccgagaggactac

SEQ ID NO: 60122 - DNA, 886 bp, Homo sapiens
  misc_feature (1)...(886): n = a,t,c or g
tttttatttttttgctttttaaaagtttttatttcaaaaaataaagctgcagttcatttcacataaatatctggggagggaaggggagtgggatggggtgggggcttggcccctacctcctcttctctttcacactgtattgtaaaagcaaaggggatggcttgccgaaccagcgggagagccatatctgcttcattgtcatgtgatcagggagaacttcattgtcaaaaaggagctgcacatgctgagggtttagcatcaagcggtgacacaggaccctccggagatggcgtacctcagctctaacagaacatcggacatacttgttctgcaggacgcttttattcttgtctttgccagaactcagccgctccaggcacaggttcaactgctcatcatagcgatagtagtgggctttagagtggtcaaagctgctgaaggggaggccgaggttgctcagtgctggctcttccccagtgggctgggtgacccggtccaaacctcgggactggtagaattcccgaatccgtttctcttcactgtcttgcaagccaggcaccagcttatacacgatgtcctgcatgacccggtccagtttgaggttgagcagtggctgtgtctcgtggatcttaatgttgcacatggggcagtacttgctagtttggaggtacttcacaatacaactcttgcagaaagtatgaagacactctgtgatggtggtggcatccacgaagtagccggcgcataggcagcaaacaatgtgttcattcaagtctttgatcttcactcgaacctcctcctgaccctcctttcccaggggagactacacaacgtcggcgacacaacgcgcaggcggaattccaccgcntggactaatgtctacaat

SEQ ID NO: 60123 - DNA, 1939 bp, Homo sapiens
tttcgtggggaactgtacggctcagtcactcctgcctcgtcacccccgccaggtttcccccgccctctccggccggggctggtcgcgactgcgcgcgcagggcctgagcgggcgccggagggaaggggaagcggcggggtagtaacagattatgggcaacagtccttttaattaatctaccgtcatcatggctaatgaggactgtcccaaggctgctgatagtcctttttcatcagataaacatgcccaactcatcttggcccaaatcaataagatgagaaatggacagcatttctgtgatgtgcagctgcaagttggacaggaaagttttaaagctcatcggctggttttggctgccagcagtccttactttgcagctttgttcactggaggaatgaaagagtcctcaaaagatgttgtaccgattctaggaattgaagcaggaatctttcagatacttctagatttcatttacacaggtatagtgaacataggtgtgaataatgtccaggagttgattattgcagcagacatgctacagttgactgaagttgttcatctttgctgtgaatttctgaaaggacaaattgatccactgaactgcattggaatttttcagttctctgagcaaattgcctgccatgatctcttggaattctcagaaaactacattcatgtccatttcttggaggttcatagtggagaagagttcctggcacttacgaaagatcagctgatcaaaattttgcgaagtgaagagcttagcattgaggatgaataccaggtcttcttagctgcaatgcaatggattctgaaagatttgggaaaaagaagaaaacatgtggtggaagtgctagacccaattcgattccctttattacctcctcagagacttttaaagtatatagaaggagtatccgattttaatcttcgtgttgcattgcaaacacttctgaaagagtactgtgaagtatgcaaatctcccaaagagaacaagttttgtagttttctgcagacatctaaggttcgacctcggaagaaagcaagaaagtacctgtatgcagtaggtggatatactcggttgcaggggggtcgctggagtgatagcagagccctcagctgtgtagaacgttttgacacctttagccagtactggaccactgtgtcttcacttcatcaggctcgaagtgggctgggagtaacagttctgggagggatggtctacgctattggaggtgaaaaggattcaatgatttttgattgtactgaatgctatgatccagttactaaacagtggacaactgtagcttcgatgaatcatccccgctgcggcttaggagtgtgtgtgtgttatggggctatctatgctttgggtggatgggttggagctgagatagggaacaccattgaacgatttgatcctgatgaaaataaatgggaagtagttggtaacatggctgtgtcacgctactactttgggtgctgtgaaatgcaaggtttaatttatgtaattgggggcatcagcaatgaaggaatagaacttcgttcttttgaagtctatgatccactttctaagcgttggtctccacttcctccaatgggaaccaggagagcatatcttggtgtggctgcactcaatgactgcatctattctgttggaggatggaatgagacccaagatgctcttcatactgtagaaaaatattcctttgaagaggaaaagtgggttgaagttgcctcaatgaaagtgcctagagcaggcatgtgtgttgtggcagtcaatggtcttctgtatgtttctggaggtcgatcttccagccatgattttttggctccaggtaccttggactcagttgaagtttataaccctcattcagatacatggacagaaattggtaacatgatcaccagtcgttgtgaagggggcgttgctgtgcta

SEQ ID NO: 60124 - DNA, 1883 bp, Homo sapiens
attcccgggtcgacgatttcgtctcgctggctagtaggagagactggtgcttgccccgcccggtggactaactcgcttaattttaaataaaaagtcgaggacacggcggtcgttttcccgaagacatgggccctcccatgggccatttgctccctggaggccctcgcgtcttgctgagcccggggagttaggatgacgcgagcggtgagggagcccggaacgattccttcgcggaacaattgaggcgaggcctttgggagtactttgtgggacggaccctggcgggccctgccagacgcacagggatggcggcggaggcggccgatttggggctgggggccgccgtccccgtggagctgaggcgggagcgacgcatggtgtgcgtggagtacccgggagtggtgcgtgatgtggctaagatgctgccgactctgggcggcgaggaaggcgtctcccggatctacgcagaccccaccaagaggctggagctgtacttccggcccaaggacccatactgccacccagtgtgcgccaaccgcttcagtaccagcagcctgctgctccgcatcaggaagagaacgaggcggcagaaaggggtgctgggcactgaggcccactccgaggtcacatttgacatggagatccttggcatcatctccaccatttacaaatttcaggggatgtctgacttccagtacttggctgtgcatacggaagcaggcggcaagcatacgtcaatgtatgacaaggtgctcatgctccggcccgagaaggaggcctttttccaccaggagctgccgctctacatccccccacccatcttctcccggctggacgccccggtggactacttctaccgaccagagacccagcaccgggaaggctacaacaatccccccatctcaggtgagaatctgattggcctgagcagagcccggcgcccccacaatgccatctttgtcaactttgaggatgaggaggtgcccaagcagccactggaggctgcagcccagacgtggaggagagtctgcactaaccccgtggaccggaaggtggaggaggagctgaggaagctgtttgacatccgtcccatctggtcccgaaatgctgtcaaggccaacatcagcgtccacccagacaagctcaaggtcttgcttcccttcatagcctattacatgataacaggcccctggcgcagcctatggattcgatttgggtatgacccccgaaaaaacccagatgccaagatttatcaagtcctcgatttccgaatccgttgtggaatgaaacacggttacgcccccagtgacttgccggtcaaagcaaagcgcagcacctacaactacagcctccccatcaccgtcaagaagacatccagccagcttgtcaccatgcatgacctgaagcagggcctgggcccgtcggggacgagtggtgctcggaaaccagcttccagcaagtacaagctcaaggtcagccttcagacactgagggactctgtctacatcttccgggaaggggccttgccaccctatcggcagatgttctaccagttatgcgacttgaatgtggaagagttgcagaagatcattcaccgcaatgacggggcagagaattcctgcacagaacgggatgggtggtgcctccccaagaccagcgacgagctcagggacaccatgtccctcatgatccggcagaccatccgctccaagaggcctgctctcttttccagctcagccaaggctgatggcggaaaagagcagctgacgtacgagtctggggaagacgaggaggatgaggaggaggaggaagaggaggaggaggacttcaagccatccgacggcagtgaaaacgaaatggagacagagattctggactacgtg

SEQ ID NO: 60125 - DNA, 2564 bp, Homo sapiens
tttcgtgctgtcggctcggttcggtcgcgttacagggcaggcgccggggccaaggcagggagggatcttaggagagatcgtaggacatctgaagagctgccatgtctggggcatcttcctcagaacagaacaacaacagctatgaaaccaaaaccccaaatcttcgaatgtcagagaagaaatgttcatgggcctcctacatgaccaactccccgactctgatcgttatgattggtttgccagcccggggtaaaacctacgtgtccaagaaactaacacgctacctcaactggattggagtccccaccaaagtgtttaatcttggggtgtatcggcgtgaagcagtcaagtcctataagtcctacgacttctttcggcatgacaatgaggaggccatgaagatccgcaaacagtgtgctctggtggcgctggaagatgttaaggcgtatctcactgaggagaatggtcagattgcggtgtttgatgccaccaatacaacccgggagaggagggacatgattttgaactttgctgaacagaattccttcaaggtattctttgtggaatccgtctgtgatgatcctgatgtcattgctgccaatattctggaggttaaggtatcaagccctgactatcctgaaaggaacagagagaacgtgatggaggacttcctgaagagaattgaatgctacaaagttacctaccgacctcttgacccagacaactatgacaaggatctttctttcatcaaggtgataaacgtgggccagcgatttttagtcaacagagtccaggactacatccagagcaagatagtctactacctcatgaatatccacgtccagcctcgcaccatttacctttgccggcatggagaaagcgagttcaatctcttggggaagattgggggtgactctggcctctcggtgcggggaaagcagtttgcccaagctctaaggaaatttctggaggaacaggaaataacagacctcaaagtgtggacaagccatgtgaagaggaccatacagactgctgaatctctcggggtgccctatgagcagtggaagattctgaatgagattgatgctggtgtgtgtgaagagatgacctatgcagagattgagaaacggtacccagaagagtttgcacttcgagatcaagagaagtatctgtatcgatatcctggtggggagtcataccaggacctggtgcagctgctggagcctgtcatcatggagctggaacgtcagggcaatgtcctcgtcatctcccaccaggctgtcatgcactgcctcctggcctacttcttggataaggacgcagatgagctaccatacttgagatgccctctccataccatcttcaaacttactcctgtgacctatgggtgcaaagtggaaacaattaaacttaacgtggaggctgtgaacacgcaccgtgacaagccaactaacaacttccccaagaaccaaacccctgtaaggatgagaaggaacagctttacgcctctgtccagttcgaatacaataaggcgtccaagaaattacagtgttgggagccggcccctcaagcccctcagccctctccgtgcccaggacatgcaagaaggggccgactagccgaagacccaagtcagcattccggtggtgtaactgtgtgtttccctccagccctggcctcctgcccttgtcactaatcaccaaggaggtcattaacttcctccctctatgcccacccctgacacttcaccattaatcttaacacagaacatgaggttatgtgtttataggacaacttaagctgttcttcagtttgaaacatcttttcacccaggggcaagttagcaaattgagtcttttaggacagattctcagatgggatgatctggaggaggaggaaaaagatacactcccttggggctgagcatgccccacactcttggatcttctctctgttccctggtgtcttcactaatgtcctcatgttggtgaagtgttgggggatggagggcgggtgagcagtcgggggacaaaaagtctatttttccttcacttttgtctcttcaatgtgtgttttcctcacactccttacttgactgctttcttcccccactttcatgtcccctctggattgtccagtgtaatgcatggcattgtggtgtctgtctaggaaggaaggggtgattgacaagagacaagtctggcccagttaatgctttctgcagtgggtctaaatggatctggactggaggagtctttcctttcctttctcccttcctctccagccaggtcctgtaagggccagcccagactacaggacatccacagaatattctggagcttgcaagtagacatagggtgagagttcttgcctcctttcatgagaaacagttctaagtcttcgatgccctgggagaatctggctctgagcatgtgggaaatgtcttggtttttatttttaatttagagtcaggcctgggtcttttgaggtctgcagagtggggtttaggagagtaaggtgggctctagctcttgcagggctcttagagagcagtcatgtctttt

SEQ ID NO: 60126 - DNA, 2201 bp, Homo sapiens
ggaggcgaggcttgtcggctgtcaaaggggcggcccggcccggcccggaagctacagcagcggcgcggagactgcggggcgggccatggcggcgaacctgagccggaacgggccagcgctgcaagaggcctacgtgcgggtggtcaccgagaagtccccgaccgactgggctctctttacctatgaaggcaacagcaatgacatccgcgtggctggcacaggggagggtggcctggaggagatggtggaggagctcaacagcgggaaggtgatgtacgccttctgcagagtgaaggaccccaactctggactgcccaaatttgtcctcatcaactggacaggcgagggcgtgaacgatgtgcggaagggagcctgtgccagccacgtcagcaccatggccagcttcctgaagggggcccatgtgaccatcaacgcacgggccgaggaggatgtggagcctgagtgcatcatggagaaggtggccaaggcttcaggtgccaactacagctttcacaaggagagtggccgcttccaggacgtgggaccccaggccccagtgggctctgtgtaccagaagaccaatgccgtgtctgagattaaaagggttggtaaagacagcttctgggccaaagcagagaaggaggaggagaaccgtcggctggaggaaaagcggcgggccgaggaggcacagcggcagctggagcaggagcgccgggagcgtgagctgcgtgaggctgcacgccgggagcagcgctatcaggagcagggtggcgaggccagcccccagaggacgtgggagcagcagcaagaagtggtttcaaggaaccgaaatgagcaggagtctgccgtgcacccgagggagattttcaagcagaaggagagggccatgtccaccacctccatctccagtcctcagcctggcaagctgaggagccccttcctgcagaagcagctcacccaaccagagacccactttggcagagagccagctgctgccatctcaaggcccagggcagatctccctgctgaggagccggcgcccagcactcctccatgtctggtgcaggcagaagaggaggctgtgtatgaggaacctccagagcaggagaccttctacgagcagcccccactggtgcagcagcaaggtgctggctctgagcacattgaccaccacattcagggccaggggctcagtgggcaagggctctgtgcccgtgccctgtacgactaccaggcagccgacgacacagagatctcctttgaccccgagaacctcatcacgggcatcgaggtgatcgacgaaggctggtggcgtggctatgggccggatggccattttggcatgttccctgccaactacgtggagctcattgagtgaggctgagggcacatcttgcccttcccctctcagacatggcttccttattgctggaagaggaggcctgggagttgacattcagcactcttccaggaataggacccccagtgaggatgaggcctcagggctccctccggcttggcagactcagcctgtcaccccaaatgcagcaatggcctggtgattcccacacatccttcctgcatcccccgaccctcccagacagcttggctcttgcccctgacaggatactgagccaagccctgcctgtggccaagccctgagtggccactgccaagctgcggggaagggtcctgagcaggggcatctgggaggctctggctgccttctgcatttatttgccttttttctttttctcttgcttctaaggggtggtggccaccactgtttagaatgacccttgggaacagtgaacgtagagaattgtttttagcagagtttgtgaccaaagtcagagtggatcatggtggtttggcagcagggaatttgtcttgttggagcctgctctgtgctccccactccatttctctgtccctctgcctgggctatgggaagtggggatgcagatggccaagctcccaccctgggtattcaaaaacggcagacacaacatgttcctccacgcggctcactcgatgcctgcaggccccagtgtgtgcctcaactgattctgacttcaggaaaagtaacacagagtggccttggcctgttgtcttcccctattttctgtcccagctcatccgtgtctctgaagaacaaatatgcttttggaccacgaaaaaaaaaaaaaaggggcggccgt

SEQ ID NO: 60127 - DNA, 734 bp, Homo sapiens
ggcacgagggcaagcggaggaggcgtggcgagcggatcatccgcttccggagtcgaggttttcgggcttgtaccgcttggcggtgcggcctggtgtcggcttgcaggttctttctgtgtttgttctctgccctgccaaggccgtagagctggtgcgtgcgggtagcggggctctccgaggagccgcacgccggcggcaccatggtccacctcactactctcctctgcaaggcctaccgtgggggccacttaaccatccgccttgccctgggtggctgcaccaatcggccgttctaccgcattgtggctgctcacaacaagtgtcccagggatggccgtttcgtagagcagctgggctcctatgatccattgcccaacagtcatggagaaaaactcgttgccctcaacctagacaggatccgtcattggattggctgcggggcccacctctctaagcctatggaaaagcttctgggtcttgctggctttttccctctgcatcctatgatgatcacaaatgctgagagactgcgaaggaaacgggcacgtgaagtcctgttagcttctcagaaaacagatgcagaagctacagatacagaggctacagaaacataaatgagctgactttagtgagcatagcagtgggaacaaggtcaaggtccttttgaaacactgcagcgatcttaattttgttagatttggagttcaataaatggagtatcctgaaaaaaaaaa

SEQ ID NO: 60128 - DNA, 2144 bp, Homo sapiens
cgtaccggcctggagttcccgggtcgacgatttcgtgcctccggctttgaagttcctcaccgcgtctccttttctctccccaaagcctggatcaccgcccagcgtcaggcgaggggcgacgtctcgaggtaaaacggaggaggtgcgggacgcggagactgcgcgggcccggtagccctggagaggccgaggctctaggccgcgaggggcgggtgcaatggcggaggaacaggtgaaccgcagcgccggcctggcccccgactgtgaggcctcggcgactgcagaaactacggtttcctcagtggggacctgtgaagccgctggcaagtcaccagagcccaaggactacgacagcacctgcgtgttctgccggatcgcggggcggcaggacccgggcaccgaactcctgcactgcgagaatgaggacctaatttgcttcaaagatatcaaaccagcagcaactcatcattatcttgtggtgccaaagaagcatattggaaactgcagaactctaaggaaagatcaagtagaactggttgagaacatggtaactgttggaaaaaccattcttgaaagaaataatttcactgacttcacgaatgtgaggatgggttttcatatgccaccattctgttccatttcccacttgcaccttcatgttctggcaccagtggatcagcttggcttcttatccaagttggtttatagagtcaattcctattggtttatcacagctgatcacttgattgaaaaactaagaacatgaaaatgtcaagagcggaagatttttctaatcttggttcaccatgaagtggtatttaggtcccttttaagtctaattgcaattttaagatttgttgggttttatgagaggctgttacttagtgggccttaaatcttttctgaatgtctgtttcctaagatctgtgatacagttatgtgaatattttgttactgacttgtttcaatggttacttgtataaggattttatatatatgatactatagataaaatcctatttaagacaaattctgttaatcaacaagggctctgtatttttttaagttaaaatattttcatttctcagtaagtagtcagttataatagtgatttatttatgaagaataaactactatagaaagtactttgtgggaacctttattactgtgaaggagaaaaatagctatttcttgacagttctatagttttacacataaattttcaaaataaagaataccatactacacaatgatctctgattttgctgagggaaggaattatatatgtgccactttttcctcaaatttcagatgccagttttcactttttgaagcattgcatctttttaataaatctatcctgaaagctatataatatatataatttatatcaatgaatttacaataactatcaaattggctatcagaattcactgtaatggaattttgcctctaataacataaagggggaagaaacataaagtggttctcttaataaaactagcagaaaatgttgctttatggcatgtttttgtatcaaagagaaatcagaggttaaactttgcttttatcatgaaaagggcctgatttgaaggtagagataggcttagatgagaaaaattgataacgcaatgttaatactattgatatttcataggtatattttgttagaaattggttttttggtgctaatctataggcacaatagtgaatatgaatgaagagtaggtgctgcaagttaatcctacattgtgccagtgtatattagtaccatgtaaatgaatatgaataaatgaacatgaggattaacgaactgttgaaaataggctgagatactagttttctttcttttttagagggggcatgatattaaagatagttttaagtaacaaattacttattacaaagttacaacatgtggaatcaatactgttttatttgttcattaatttattcattcagcaaacatttgttgaacatttaatgtgtaccagatattgccaggatcaggaaataaagaactaaaaatggacattcagactgcaattgctagtacaggggtcaaacaaaatcagtgattagaatttagtgcgttaagttccctgatgccttcacagccttgtttttattttttaaaaaaaaaa

SEQ ID NO: 60129 - DNA, 2078 bp, Homo sapiens
tgccataaggttttcgatgtgggtaatatttaacaggaatagtcttaagagaacttcctgagatactcaaaagttcaagaagatctattctagctggagtggaaattccagaagtattgagcagtacataggtaggtattccttgcactggtctgctgactgtttttttgaagtccagggtgggctttcgagaaaagccagctcggaaatcaatagtactgaggccagtaatgcgaacagagtgccttccactgcttgaggtcttcactgtccacattccagcctctggctctttcacattcactactttggcagagttatggatatttaatagctcatgcaggccaaatcccttttttatcagcttccctcaaggattgcgatttaaaaataaactttattaaagcagttaaacttagcattaaataacactctttaaatggtacacctatgaagcaagagttaaatataaacccagtctaatcctgtacacttgtgattaattgtgacaatcttaagttgctcacttctttcccatttaccaattcagagaaagcccgtttcctgttttctcctcaccactttgccttggcatcacaccaaccctgcctcgggcttcagctgcagatcctccccagcccctcctcccagctgggctgactccagtcccagccccagtctccaccaactgagcagcgtacgcagggttgtgtctggcttccagcatctaccaccccttcagagcaacttccaacatgggacaggagaggaagctcgcattgcttggtctgaacagatttaaggaggttttatcacaaggacctgaaaacttcctaagcatgctttctccttgcacagctgaggaggggcaatggtgggagcggggcaggggggtggcaggggcggcaggggctctcaactaagggctctgaatcacagaggggacagatgctgccttagtccttcttgcctcccagggccaggcttcttgtgaggagcttccctgggctggagggggtcagtgtggagactgtgggggattccagcttcactctgtctaagagggtcttcttaagggcagctggggagatcttttcttggtcggccatggactgtagctctcgtgttcggatacaggaggcctcaactgcattgatgagcagagagcggaagcccccactctctagaaagtgcagggcgtggatggtggctcccccaggggagcagacattgtccttaagctggcatggatgctgctccgagtccagcagcatcttggcagctcccagcaaagcctgggccccgagttggattgccaggcgccgtggcaaacccatcttcaccccaccatcagccaatgcgtccagagccatgaatgcataggcaggcccgctgccactgagccccgtgacggcatcgatgaggtcctcttccacctcagtgcagaagcccacgctgctcatgagctgctccaggagctgcccatcctccaccagggcatgggtgcccgtggcgtacactgtagcgccttcctgcactaccacaggtgtgttggtcatgcagcgaatcactttgggggctggctggaatgccatcagcttcttctccacagagctgatggtgacaccagccgcacaggagaccacgatgtgtctggcttgcacgtcggccccaatctcatccaggatgaaggggatgatatgtggcttcacagccagaaacaggacgtcgctgtgcttcaccgtctccttgttgctgcgtgtcaggttcacacccatcttcctgagcgcggacaccgtgggcaggttcatttctggggagctggctattatcttgtgagccgacaggatgcctgcggccgtgaagccccgcgccagagcataggccagctggccggccccgatgaagcccacgctcatggtccgcggttcacgcctcctgggagccgcacgaaccccctcagcgagggaccggaagtaacgctaggggaagggcggacagcgcaggggcgaacgggcggcgtgccgaggaccggcgagctaacagcagcttctgggatggtgcaaccctattctcgg

SEQ ID NO: 60130 - DNA, 1255 bp, Homo sapiens
tttcgtcggcggccgaggcgatgagggtgttggtgcggcgctgttggggtcctccgctggctcatggcgccaggcgtgggaggccgagtccccagtggcgagcactggcccgactcggctgggaggactgccgggactccagagtccgcgagaagcctccctggcgggtgctcttcttcggcacggaccagttcgcccgcgaggcgctgcgggcgctgcacgccgccagggaaaacaaagaagaagagttaatcgacaaactggaggtggtcacaatgccttccccatcaccaaaaggactgccagtgaagcaatatgctgtgcagtctcagcttcccgtatatgagtggccggatgtgggatctggagaatatgatgttggagtagtggcttcgtttggccgacttttgaatgaggctcttattcttaaatttccctatggcatattgaatgttcatcccagttgcctcccgagatggcgtggcccagcccctgtaatccatacagtgcttcacggagacacagttactggagtaacaattatgcaaattagacctaaaaggtttgatgtaggcccaattctcaaacaagaaactgttcctgtgccacccaagagcactgcaaaggaattggaagcagtgttgtcaagactgggtgccaacatgctcatttcagttttgaaaaatttgcctgaaagtctgagcaatggaaggcagcagccaatggagggggcgacttacgcccctaagatttctgctggtaccagttgtataaaatgggaggaacaaacttcagaacaaatattcagactttaccgtgccattggaaatataattccgttgcagacgctctggatggcgaataccattaaacttctggatttggtagaagttaacagttcagtccttgctgatccaaaattaacgggacaggctcttattccaggatcagtaatataccacaaacagtcacaaatactattggtttattgcaaggatggttggattggtgttcgatcagtgatgctcaagaaatcactaacagctactgacttctacaatggatatttgcacccctggtaccagaaaaattcccaagctcaaccaagccaatgcagatttcagactctcagacttccaacaaagaagaagcagaaaaaaactgttgctatgcaacaatgcattgagtagttaggaagaagatggataaaaacctattacatatttgtaatttattaaaaaccttatttacaagg

SEQ ID NO: 60131 - DNA, 831 bp, Homo sapiens
ttttttttttttcttcacggcatgtgcttttattaacctgactgtttacaggagctgaagctcttgggtttgcggtgatgactcttgaacttctttttcaacgagcccaactgcttcttcccgcgcttctggaccagccctcggtacacggtcgtctctctcctgccctcatcagtggccttctctcttgggggctttgccttctcatcctctttgtctgtcaaaaagtcatcagtgccatccccatcctccgtgcttccaaggtcctttctggtgaatagctcaggtgggtacaggtctgtcatgctgtcatcacttgcagctcccccctcatcactggatgtgggctcccagaaggcttcccgcgggcgaggcccgtcaccgtccatctggtcctccctcctcctcctccggtgcaccaggcaggcaggcacgtactccaccccttgcttctgacattcttcatatttacacagagctcgctggtaccgccggccctgggtgtgcctcagcacgtgttctgggcacttgttgatgtgccgcagggtgagtttgcagaacaactggtgcgggttcttggtgctgggcacgatgtgcggctcgaactctgcatagtcgaaggccggggaggcgcggaccagccgctggtactttttgccgcgggtgtagacctggagctccggcaggcggcagggcagctcgtgacctgtcaggatgcacctcaccttgcgggcgtccgtctggagccgcaggctcgggtgctcccgcagaaacgcccgcacgtcgcccggcaactcgctcatggccgacgcgcccgcgcccacgcgtccg

SEQ ID NO: 60132 - DNA, 2716 bp, Homo sapiens
ttcgtgcgttttacgcaggctgtggcagcgacgcggtgaggagacggcccacggcgcccgcgggctggggcggtcgcttcttccttctccgtggcctacgagggtctggatccttctctgccggctcgtgggccgtgcctttgcccttctgcgaggccctgaatctgatcccttcccttcatatccggatccgggctcctccctccaagcccggggttccggacacctcccccaagacaacccctctggcctcctctccttcagtacttggaatctgatctcttctccctaattctgcggatccggcccctaatattctttatcagaccctcagacaagaggctgacttctgcccccttgtcaaggagcgaggccactttcctctccaccccatgctagcgaggataacttatttctcttctggaattgcatcttatgcgcctttccccacccatccccacagcccctgcaatacccagtttggcctcttttgcttgtaataacgcagatcccagcgccacggcaccttaggaacagacctttttctttctcgcgtgggggcctggactccttcagtggaagcctctccacgccctctatctgcaggtccccagcctgggtaaagatggccccatggcccccgaagggcctagtcccagctgtgctctggggcctcagcctcttcctcaacctcccaggacctatctggctccagccctctccacctccccagtcttctcccccgcctcagccccatccgtgtcatacctgccggggactggttgacagctttaacaagggcctggagagaaccatccgggacaactttggaggtggaaacactgcctgggaggaagagaatttgtccaaatacaaagacagtgagacccgcctggtagaggtgctggagggtgtgtgcagcaagtcagacttcgagtgccaccgcctgctggagctgagtgaggagctggtggagagctggtggtttcacaagcagcaggaggccccggacctcttccagtggctgtgctcagattccctgaagctctgctgccccgcaggcaccttcgggccctcctgccttccctgtcctgggggaacagagaggccctgcggtggctacgggcagtgtgaaggagaagggacacgagggggcagcgggcactgtgactgccaagccggctacgggggtgaggcctgtggccagtgtggccttggctactttgaggcagaacgcaacgccagccatctggtatgttcggcttgttttggcccctgtgcccgatgctcaggacctgaggaatcaaactgtttgcaatgcaagaagggctgggccctgcatcacctcaagtgtgtagacattgatgagtgtggcacagagggagccaactgtggagctgaccaattctgcgtgaacactgagggctcctatgagtgccgagactgtgccaaggcctgcctaggctgcatgggggcagggccaggtcgctgtaagaagtgtagccctggctatcagcaggtgggctccaagtgtctcgatgtggatgagtgtgagacagaggtgtgtccgggagagaacaagcagtgtgaaaacaccgagggcggttatcgctgcatctgtgccgagggctacaagcagatggaaggcatctgtgtgaaggagcagatcccagagtcagcaggcttcttctcagagatgacagaagacgagttggtggtgctgcagcagatgttctttggcatcatcatctgtgcactggccacgctggctgctaagggcgacttggtgttcaccgccatcttcattggggctgtggcggccatgactggctactggttgtcagagcgcagtgaccgtgtgctggagggcttcatcaagggcagataatcgcggccaccacctgtaggacctcctcccacccacgctgcccccagagcttgggctgccctcctgctggacactcaggacagcttggtttatttttgagagtggggtaagcacccctacctgccttacagagcagcccaggtacccaggcccgggcagacaaggcccctggggtaaaaagtagccctgaaggtggataccatgagctcttcacctggcggggactggcaggcttcacaatgtgtgaatttcaaaagtttttccttaatggtggctgctagagctttggcccctgcttaggattaggtggtcctcacaggggtggggccatcacagctccctcctgccagctgcatgctgccagttcctgttctgtgttcaccacatccccacaccccattgccacttatttattcatctcaggaaataaagaaaggtcttggaaagttaaaaggcatcagtcttactacctgtcccaccacccccaccttagggaaatgtcctagaatcctgggaaattgagggcttctttgatggtgagtggagaaaagatagaggagaaggttgcccctgaagtgctgttaggagaaggaggatagaggaatcagccttaggagggttccatgccagctgtcatttggcaaaggaccctggacagatgacttttgcctctgaacttcactcttctctttcctcaaatgggcttcataatgctttccactcaggcttaacatgagaattaaatgaggtgacaaatgtgaagacctggacagtacacaacagatattcaataaaagtgtggtcgcccttatgccccgaaaaaaaaaa

SEQ ID NO: 60133 - DNA, 1102 bp, Homo sapiens
tttcgtgctgcggagccaggcgcggcgcaggatggtggacagcgtgtaccggacccgctccctgggggtggcggccgaagggctcccggaccagtacgcggacggggaggcggcgcgcgtgtggcagctgtatatcggagacacccgcagccgcaccgccgagtacaaggcatggctgcttgggctgctgcgccagcacggctgccagcgggtgctcgacgtagcctgtggcactggggtggactccattatgctggtggaagagggcttcagtgtgacgagtgtggatgccagtgacaagatgctgaagtatgcacttaaggagcgctggaaccggcggcacgagcccgccttcgacaagtgggtcatcgaagaagccaactggatgactctggacaaagatgtgccccagtcagcagagggtggctttgatgctgtcatctgccttggaaacagtttcgctcacttgccagactgcaaaggggaccagagtgagcaccggctggcgctgaaaaacattgcgagcatggtgcgggcagggggcctactggtcattgatcatcgcaactacgaccacatcctcagtacaggctgtgcacccccagggaagaacatctactataagagtgacttgaccaaggacgtcacaacatcagtgctgatagtgaacaacaaggcccacatggtgaccctggactatacggtgcaggtgccgggggctggccaggatggctctcctggcttgagtaagttccggctctcctactacccacactgtctggcatccttcacggagctgctccaagcagccttcggaggtaagtgccagcacagcgtcctgggcgacttcaagccttacaagccaggccaaacctacattccctgctacttcatccacgtgctcaagaggacagactgagtgtggcctcagctcccacaagcctctgcccaggcactgctaggctctgtctggaagatggggaccagcagccccacaccagggccagcctctagagcagactacagctggggtgcagggatgtgggttccacagacggaagggtaaacaatatagtctttttcagttcctgcaaaaaaaaaa

SEQ ID NO: 60134 - DNA, 1031 bp, Homo sapiens
ttcctttcaaatacacaccccaacccgccccggcatacacagaaatggggactgcgagcagaagcaacatcgctcgccatctgcaaaccaatctcattctattttgtgtcggtgctgtgggcgcctgtactctctctgtcacacaaccgtggtacctagaagtggactacactcatgaggccgtcaccataaagtgtaccttctccgcaaccggatgcccttctgagcaaccaacatgcctgtggtttcgctacggtgctcaccagcctgagaacctgtgcttggacgggtgcaaaagtgaggcagacaagttcacagtgagggaggccctcaaagaaaaccaagtttccctcactgtaaacagagtgacttcaaatgacagtgcaatttacatctgtggaatagcattccccagtgtgccggaagcgagagctaaacagacaggaggagggaccacactggtggtaagagaaattaagctgctcagcaaggaactgcggagcttcctgacagctcttgtatcactgctctctgtctatgtgaccggtgtgtgcgtggccttcatactcctctccaaatcaaaatccaaccctctaagaaacaaagaaataaaagaagactcccaaaagaagaagagtgctcggcgtatttttcaggaaattgctcaagaactataccataagagacatgtggaaacaaatcagcaatctgagaaagataacaacacttatgaaaacagaagagtactttccaactatgaaaggccatagaaacgttttaattttcaatgaagtcactgaaaaatccaactccaacgagctatggcagtgttaatgaacataaatcatcaggtcttaaaaaaaaaataaaggtaaactgaaaaagacaactggctacaaagaaggatgccagaatgtaaggaaactataactaatagtcattaccaaaatactaaaacccaacaaaatgcaactgaaaaataccttccaaatttgccaagaaaaaaaattctattttaaaaaaaaaaaaaa

SEQ ID NO: 60135 - DNA, 3758 bp, Homo sapiens
ttttttttttttccagttcattgaggctttactgtaggcaagctggagaacccccagctctgtgaacatgcagtctgcaatctggataccttttatttaatgtcaagaattccctttgcacggcaaaaaggggtctgaggaaagcggagcagcgtagatgagggcgagggcggaagcaggacgctcgccaaagtggtgccgggtgccggctgcccactgtgatcccggctgggaggaacgccggacccacggcaagggcagggaaagtcatttttgacacaaacaagggtcctggggcataccaccccacccggtgccaggccatgcaagacgctgaaatggagactgtggcccctcgggacgcagcgcccggagctatggagcaggtgcaccaacgtgaaggggaatcctttgggcgcttcccgaggcgcctgcagggtgtggagcacagcagggtctgtatccatgtccgtgagcacgggcagtaacagatagcaccaattgggaggcccagggcaggagagcctgaggctcagactctagcacccacttgcccggcgctgctgggaagagacacgtgacggctactctcacagcaaaagcctctccctcgcccctctgccctgggagaactggaacaaatcatcatggtgaggtctgacctggggccctaactgcctgtgggggaccaggccactgttgtgcagtgacaagatgctgctgcaccagattgaggggctggggacaggctggggccgaggcggcaccaggagctcccatggagaaagagccctctgaatgtacaacctggggcgttccgtagccaatctgttcccggctcccaggaaccccaggagctggcctcctgtcgcttctggttttatccgtgggtgagagcaaggaaaggaagagagaccaggaaaggaagagagaccaggagggccaggccagcagcttcccgagcagcggaggtaggcggagagcgcggttgggcagcgcgcgccccttcccgtgtgattgggtgaaccgtctcacctgcctctcactttactcggtcaccaggaaaatcctaccccacctatctgagagggataggccaagggtgaaatggataacggatagaaaacacttaaaaaagtataaagcgctattgaaacgcgaggcagtgttgtcatcatgaaggtgttacccttagcacatccctcggccttcgctttttttcagggcgtctcctaaccttgggacctgatttcctgatctcagaagggcttcgggactccctggtggcttcccctgatgaccatctgtggcccagtggtcccagggcactcgaggaggtgtgagggcggtgcccgaggacgctcggctcctcgcggtccccctggctcttccccagcagctgggtccaccctagatgagctgggcgtccattcagaccagacagatctgggggatccctgccccaccctgggggacccccaaccggagtgcaatgcctgttgccgatttccagacggtggctgaggacacccggcaaggtggttggtgctcaggccgcccccgatccactccgtccggccctgccctcccccagcccagccctagtctcgctcaggaggcggcgggagctgccgtggggcgccggggcccgggccgccgctgtgcacgcgcaggtggtccttgagcgactccttgtagcggaagctcttgccgcactcgccgcacgtgtaggggcgctcgcccgtgtggatgcgctggtgcttgagcaggttctgcttgcggatgaagctcttgccgcacagtgcacattggaaaggccgctcgcccgtgtgcagccgctggtggttctgcaggtgctccttacggctgtaggtcttctcgcactccgagcacttgtagggccgctcgccgcggtgcgtcatctggtggcggatgaggcccgagtggcagttgaagctcttctcgcactcagcgcactcgtagggccgctccttggtgtggctgcggtggtggatgatgaggctcttgcgcacgccgaagctcttgccgcactcggggcacgagtagggcttgctgcgggcgccgtgcaggaggaggctccgccgcagcccgccagggcagcagctgccacagccgccgcctgcccccgtccccgcctccgcgccgccgcccccaccgcccccatcgcccccgccgcccccggtgctgcggtccccacccggcggcgcctcgccggagccacgctccccgggcagcacctggaaaccgtcgtccagcagccctcggctcggggggccgcccgggttctcggccaccgcgatggggggcaggctctggggctggggctgcgactgcagctgcggctgcggtggctggcgctggggctggggctgtggcggggccgggggtgggttcttcaccatcagcaggctgtcactagggccagagtctaatccaagctctccgtccattgagtcgcgtggtccccatgggtatggctgctcctcctgcttgatccatgacaaaatgtcatgtgctgagatgagagactctgaattgggatccgtgggaatatctctgtctgccaaatcctgctgatcccacacgcactgatgctcctcctgtttaatccgggacaagaggtcctgggcagaaattggggagtcggtaatggattccgtagggatggctctttcctccaggccccgctgaccccggacacacagggtgtcctcacgcttcacctgggaggacgcatcctgcgcaggcaccaggggctctgctcctgcttcgggatccattgggatttctctctcttcggggtggcgctgctcccacacacaaggttcttccctgggctcagcctggactggagcatctggcttggggactgagccctccgcgtccagggacatgagggttttgtagttctccttaacaaggttgttataaagctccttctgccattcgtccaagttcttccactcgtcttcggagaagtacacagcaatgtcgacaaaagtcactggaaccttgggggcctcccccttgctgcccgggggcagccgcaggacccagaagttcctgttgcgcagcaagttctccaagttctccagccgcctctgcagcagcccgtactcctgcagcagggtccccagcacggcccacttgctctccatgtggttcccaaattccacggccgtcttttcacagtcggccagcttcttctcggctgtccccgtgcgcccctccaggttcagcagctggctggcctgggcatccaccttcctctccacagcctgaatggcagccaccacagtccagagtgagatctctgctgtgggcaactggggctctcgcatcatgcggtcggggaagacaggtgccctatctggaaagggtgggaactgaaaaggcattggccgccgggcgtccatgtcccattcttgagcctgcatgggcggcattccctcggccatttccccgcgcagcgccggctcctggtggcagacctcctccgggggcagagcctgggcccagctccagctcccgctgtccagccccaggccctggatgcccagctgctgaggctgcggccgtgttgacacaaactgcatcctgggagtgctgttccccgctcgggtcggccagggagaagaagaacgttttccaggcgccttccccctctccggggccggacagctccatctacagcccgtaggagcaaacagtccccttcggcggccggacgcgtgggt

SEQ ID NO: 60136 - DNA, 597 bp, Homo sapiens
cgtagtaactgtggtggtattccgcccatgcggctgtagacgccatgatggatgtttttggtgtgggtttcccaagcaaggttccttggaagaagatgtctgcagaggagctggagaatcagtactgtcccagccgatgggttgtccgactgggagcagaggaagccttgaggacctactcacagataggaattgaagccaccacaagggcccgggccaccaggaagagcctgctgcatgtcccctatggagacggcgaaggggagaaagtggacatttacttccccgacgagtcgtctgaagccaccacaagggcccgggccaccaggaagagcctgctgcatgtcccctatggagacggcgaaggggagaaagtggacatttacttccccgacgagtcgtctgaagccttgcctttcttcctgttctttcacggaggatactggcagagcggaaggcaccctggaccacatggtagaccaggtgacccgcagcgttgcgtttgtccagaagcggtatccaagcaacaagctttttcctggtgagtggggtctttgacctggagcccatcgtgtatacttcacagaacgttgctcc

SEQ ID NO: 60137 - DNA, 1163 bp, Homo sapiens
ccgagtcgacgatttcgtggcaggcgccagtcgcaggtgtgctgctgaggcgtgagaatggcgtcccgcggccggcgtccggagcatggcggacccccagagctgttttatgacgagacagaagcccggaaatacgttcgcaactcacggatgattgatatccagaccaggatggctgggcgagcattggagcttctttatctgccagagaataagccctgttacctgctggatattggctgtggcactgggctgagtggaagttatctgtcagatgaagggcactattgggtgggcctggatatcagccctgccatgctggatgaggctgtggaccgagagatagagggagacctgctgctgggggatatgggccagggcatcccattcaagccaggcacatttgatggttgcatcagcatttctgctgtgcagtggctctgtaatgctaacaagaagtctgaaaaccctgccaagcgcctgtactgcttttttgcttctcttttttctgttctcgtccggggatcccgagctgtcctgcagctgtaccctgagaactcagagcagttggagctgatcacaacccaggccacaaaggcaggcttctccggtggcatggtggtagactaccctaacagtgccaaagcaaagaaattctacctctgcttgttttctgggccttcgacctttataccagaggggctgagtgaaaatcaggatgaagttgaacccagggagtctgtgttcaccaatgagaggttcccattaaggatgtcgaggcggggaatggtgaggaagagtcgggcatgggtgctggagaagaaggagcggcacaggcgccagggcagggaagtcagacctgacacccagtacaccggccgcaagcgcaagccccgcttctaagtcaccacgcggttctggaaaggcacttgcctctgcacttttctatattgttcagctgacaaagtagtattttagaaaagttctaaagttataaaaatgttttctgcagtaaaaaaaaagttctctgggccgggcgtggtggctcacacctgtaatcccagcaccttgggaggctgaggtgggaggatcatttgaggccaggagtttgagacctgcctgggcaacataatgaaacttcctttccagggagaaaaaaaaaa

SEQ ID NO: 60138 - DNA, 3220 bp, Homo sapiens
tttcgtctgagaggtaagagagggcggggggaaggaagaggaggcgggatccgggcgctgcgttggctgcggcctggcaccaaaggggcggccccggcggagagcggacccagtggcctcggcgattatggacccggtcgaggcggtgctgcaagagaaggcactcaagtttatgaattcctcagagagagaagactgtaataatggcgaaccccctaggaagataataccagagaagaattcgcttagacagacatacaacagctgtgccagactctgcttaaaccaagaaacagtatgtttagcaagcactgctatgaagactgagaattgtgtggccaaaacaaaacttgccaatggcacttccagtatgattgtgcccaagcaacggaaactctcagcaagctatgaaaaggaaaaggaactgtgtgtcaaatactttgagcagtggtcagagtcagatcaagtggaatttgtggaacatcttatatcccaaatgtgtcattaccaacatgggcacataaactcgtatcttaaacctatgttgcagagagatttcataactgctctgccagctcggggattggatcatattgctgagaacattctgtcatacctggatgccaaatcactatgtgctgctgaacttgtgtgcaaggaatggtaccgagtgacctctgatggcatgctgtggaagaagcttatcgagagaatggtcaggacagattctctgtggagaggcctggcagaacgaagaggatggggacagtatttattcaaaaacaaacctcctgacgggaatgctcctcccaactctttttatagagcactttatcctaaaattatacaagacattgagacaatagaatctaattggagatgtggaagacatagtttacagagaattcactgccgaagtgaaacaagcaaaggagtttactgtttacagtatgatgatcagaaaatagtaagcggccttcgagacaacacaatcaagatctgggataaaaacacattggaatgcaagcgaattctcacaggccatacaggttcagtcctctgtctccagtatgatgagagagtgatcataacaggatcatcggattccacggtcagagtgtgggatgtaaatacaggtgaaatgctaaacacgttgattcaccattgtgaagcagttctgcacttgcgtttcaataatggcatgatggtgacctgctccaaagatcgttccattgctgtatgggatatggcctccccaactgacattaccctccggagggtgctggtcggacaccgagctgctgtcaatgttgtagactttgatgacaagtacattgtttctgcatctggggatagaactataaaggtatggaacacaagtacttgtgaatttgtaaggaccttaaatggacacaaacgaggcattgcctgtttgcagtacagggacaggctggtagtgagtggctcatctgacaacactatcagattatgggacatagaatgtggtgcatgtttacgagtgttagaaggccatgaggaattggtgcgttgtattcgatttgataacaagaggatagtcagtggggcctatgatggaaaaattaaagtgtgggatcttgtggctgctttggacccccgtgctcctgcagggacactctgtctacggacccttgtggagcattccggaagagtttttcgactacagtttgatgaattccagattgtcagtagttcacatgatgacacaatcctcatctgggacttcctaaatgatccagctgcccaagctgaacccccccgttccccttctcgaacatacacctacatctccagataaataaccatacactgacctcatacttgcccaggacccattaaagtttgcggtatttaacgtatctgccaataccaggatgagcaacaacagtaacaatcaaactactgcccagtttccctggactagccgaggagcagggctttgagactcctgttgggacacagttggtctgcagtcggcccaggacggtctactcagcacaactgactgcttcagtgctgctatcaaaagatgtcttctatcttttgtgaatgattggaacttttaaacctcccctcctctcctcctttcacctctgcacctagttttttcccattggttccagacaaaggtgacttataaatatatttagtgttttgccagaatctctcttgctttgccattaagcagaagaactagtttccctgtatagcctgctgggagagacccacttctagggtatgggggatgcagcttcaagcccagtgcccagtgtctccctgttaactgcaggaatgccaagcacctggccagagcagcccagccccaatatgcttaggaggagacagagttccctctgtatagcctctgggacaagaaaaagaaaacacaagaatgtatacactggaagatttgggcctcctgcctgccttctctttgtttctgttcctcttcccatctactcccctacgccccttcaaccttttttctctgtctgcttcacctgagaagaaagtgtatgaagagagtgtcctcctctcgcatgagcccagatcagcccagaaaatgccaacacttggaagagttaaatgcctgttcagtgaagatttccagccccaggcctttgcctgcaaagtgacccctgtggcaaacaagtggattcctcagacatgatactctcatcatatttgcaactcttctctctctttccttcccccacaccccaagaggaggattggtggtagggggcaggcagagggggtggggagaagtttcctgggctccatcaatggctgcatcttttctggactcagcagtctccttgattccatgtagagtgttggaaaggagttgctgattgcatttcctctcattaacaattgggtgtgtaataaaaagcattggtacttcatcttaaatcactggtaaggctcagcctacagaaagataaaaaatggccagagccaatcgcttggtgcattctgcgtaatggtttccatctccgatttcctcatcagggcctgtgaatacccaggtgcctgtatctttgccaagaccgtgatcaaggtagctttaagagagatggtcaggagaaaacactgtttttgttttttttgttgttttgttttgttttggccagttaaatatcatctctcaaaatattgatctcaaccgtgtcaacct

SEQ ID NO: 60139 - DNA, 1066 bp, Homo sapiens
  misc_feature (1)...(1066): n = a,t,c or g
cggacgcgtgggctctgtgcctgctgtttcctgctgggaagaaggaaagccagtgatgctggcttgaggctgtagtgggaggcccagcggattgtgagaagccagcccgggcagtgagtgtggatggcttggcaggtgagcctgctggagctggaggaccggcttcagtgtcccatctgcctggaggtcttcaaggagtccctaatgctacagtgcggccactcctactgcaagggctgcctggtttccctgtcctaccacctggacaccaaggtgcgctgccccatgtgctggcaggcggtggacggcagcagctccttgcccaacgtctccctggcctgggtgatcgaagccctgaggctccctggggacccggagcccaaggtctgcgtgcaccaccggaacccgctcagccttttctgcgagaaggaccaggagctcatctgtggcctctgcggtctgctgggctcccaccaacaccacccggtcacgcccgtntccaccgtctgcagccgcatgaaggaggagctcgcagccctcttctctgagctgaagcaggagcagaagaaggtggatgagctcatcgccaaactggtgaaaaaccggacccgaatcgacgggagtgccccttccctctgcccctgcctgggaccggccaccttcactttcctgtagagctcagttctcattggtcctttacagaaaaccatgccttccatataaagccagaactcaaagcattccggggcggggtggggaaagcgcaaatcctctcaggggaattcaacccagttgtcgttaggactggctccaagttggcttttgccctctgtgtccttgagactgagataacccaggacttgagtctcgggggtaaacagctgaaagcatgggcgtgactcctccgcccctgtgccacctgtgtctgcttgaccttgccagcctgtcatggtgccctcccagtacctgggtgcgcaggcgtggagaggctggcagccctgggccctggctgatctcctgaactgagaggcacatggggctgggacgcatagtgccccggccctgg

SEQ ID NO: 60140 - DNA, 623 bp, Homo sapiens
ttttttttttttaatgagaacaggatatgatttatttatgacgaccatatgtgtttgatgcccaattgcagcaggttgtggcttctcttgcatatcttggtctgggatgacctatctactcagtgtgtcccatttcaggtaccgtatttccatgcttctttattaagcctcataacctccctgctttttccaccctcttttccagcctcttctaaatctacattgtcggagcagtgtaatttggcggcgtcgatccaggaggaccagggtttgcccagaaacgcctccggactgggcactttgcgatccagtgtcgccattgctcttccttcttgttgctttttccctgttccttcggcagctgcagccgagagacacgggattcgagaacgctccgacgtcatcttcggaacgttccgacattgagtgttctggaggactttggaccatggagattctgcagttgttgctctaggagctgaaaccagtgggtagatgtcgttctgaaacgcaggtgagtttggagcgcgacgagctaccttcccatctcaggctgcggggcgtgcaaaactcaaaagttagggcccccggacccccgggttccccgcgcagagcgtatctcc

SEQ ID NO: 60141 - DNA, 966 bp, Homo sapiens
gtccgcaattcccgtgtcgacgatttcgtggtaaaggctgatacttcccaggacgcggaggtaacgggccagggccaaagcgactttcgctacttggattggtcggcgtagctttgggcggccggaccttataaagtcacacatctgcgcgcctgtgcggcccctgcttctgcggatgctgaggcacgtaaaaaaatttgaagaagggaatttcgcggcattcttggcctggcttcctggcgtagccagcaagttcggaggtgttaaccgctgctgtcatgtttcttttgctaaactgcatcgtcgctgtgtcccaaaacatgggcatcggcaagaacggggacctgcccaggccgccgctcaggaatgaattcaggtatttccagagaatgaccacaacttcttcagtagagggtaaacagaatctggtgattatgggtaggaagacctggttctccattcctgagaagaatcgacctttaaaggatagaattaatttagttctcagcagagaactcaaggaacctccacaaggagctcattttcttgccagaagtttggatgatgccttaaaacttactgaacgaccagaattagcaaataaagtagacatgatttggatagttggtggcagttctgtttataaggaagccatgaatcacctaggccatcttaaactatttgtgacaaggatcatgcaggactttgaaagtgacacgtttttttcagaaattgacttggagaaatataaacttctgcctgaatacccaggtattctctctgatgtccaggaggggaaacacatcaagtacaaatttgaagtatgtgagaaggatgattaatatgaaggtgttttctggtttaagttgttccccctccctctgagaaaagtatgcatttttacattagaaaagggactgtattgcggccgctgtagaggatacaaacagtcgtacgggtgcatcg

SEQ ID NO: 60142 - DNA, 812 bp, Homo sapiens
gtcttgggattagatgctgacgtgtggtgaaatgttacagagagcccagaggaaggaggagttcagaggttcccagggaagaggccgggggcttgcactgcacccccagacagtgtccctgtgaacgctctcatcaaaggttctgttccctcgtgccgaattcggcacgagcaaggttttgtttgtttgacagcaggaatgggctggggagggtcccccgcaagctggaccccttgttccgttcggcccgtgaggagaacggaactggcggccaaggggaaccggcggaacgagatcagctggagcgcactgatttcgaggctttgtgttcatttcgccctaggccccttctcgatgggctttccaatgtcctttccccggagcttgaggccaatggcccgctcgattttgccaagcacctggttattgggtatggcccgtccgctctcatagtccgcgatcacctgtggcttctcattgattttcgtggccaggtccttctgcgtaagccccttgctctgccgaccttgctggatcaccttgcccacctccagggtcaccctgtcatggtgcagctcctctgtctcccggtccagcttggccgtgttcttggtaatagaatgttgtttgttctggccagcagcccatttcttggaagtctccacatcttctcctcgtctctgtgccgctaagatagcctgcttggatttggcctgggcggccgtagggcccttcttgcgcagcaccgtcaccgtgtcccagtcgctctcggccatggcgggcgaagacgagcgtccgtccggcggctcagc

SEQ ID NO: 60143 - DNA, 3026 bp, Homo sapiens
ggaattctcgggtcgacgatttcgtggcgcgggcgaggatggcggcggagaacgaggccagccaggagagcgccctgggcgcctactcgccagtggactacatgagcatcaccagcttcccgcggctgcccgaggacgagccggcgcccgcggccccgctgaggggccgcaaggacgaggacgcctttctgggagaccccgacaccgacccggactccttcctgaagtctgcacggctgcagcggctgccatcgtcgtcgtcggagatgggcagccaagacgggtcgccgctacgcgagacgcgcaaagacccgttctccgccgcagcggccgagtgctcctgccgccaggatgggctcacggtcatcgtcacggcctgtctcaccttcgctaccggtgtcaccgtggcgctggtcatgcagatctacttcggggacccccagatcttccagcagggtgccgtggtgaccgatgctgcccgctgcacttcactgggcatcgaggtgctcagtaaacagggatcttctgtggacgcagcggtggcagcagccttgtgtttgggtatcgtggctccacacagttctggcctgggcggtgggggcgtgatgctggtacatgacatccgacgaaatgagagccacctaattgatttccgggagtccgcaccaggggccctcagggaagagaccctgcaaagatcctgggagaccaagcctgggctcttggtgggggttcccggaatggtgaaggggctacatgaagctcaccagctctatggcaggctgccatggtcccaagtcctggcctttgcagcagctgtggcccaagatggcttcaacgtgactcatgatctagcccgtgccctggctgaacagctgccacccaacatgtccgagcgcttccgggagacgttcctgccatcgggccgcccgccactacctggctcgttgctgcatcggcccgacctggctgaggtgctggatgtacttggcacctccggcccggctgccttctacgcaggtggcaacctcacactggagatggtggccgaggctcagcacgcagggggtgtcataaccgaagaggacttcagcaattacagcgcccttgtggagaagcctgtgtgtggcgtgtacagaggccacctggttcttagtcccccacctccgcacacgggccctgccctcatcagtgctctcaacatcctggagggcttcaatctcaccagcctggtatcccgagaacaggctcttcactgggtggcagagaccctgaagattgcattagccctggccagcagactgggagatcccgtctatgattctaccatcactgagagcatggatgacatgctcagcaaggtggaggccgcctacctccggggccatatcaatgactcccaggcagcccctgccccactcctgcctgtctatgaactagacggagctcccacggctgcccaggtgctgatcatgggacctgatgacttcattgtggccatggttagctccctgaaccagccctttggcagcggccttatcaccccctcggggatcctgctcaacagccagatgctggacttctcctggcccaaccggacagctaaccactctgcacccagcctggagaattcagtgcagccagggaagcggccactctctttcctgctgcccacagtggtccgacccgcggaggggctctgtggaacctacctcgctctgggggccaatggagctgcgcggggcctcagcggcctgacacaggtgaggtttacgccatggttggcctttttcagccgggagccaagctgtggcctagactgcagatgcctgtcatatctgtggcttgtttccattcctcatgcggcaaacatgggctgaggctgttttgtgccaggcgcatcctgggcaatgtggacatgggctgcgctgagtttcttagtgaaaatggagccctgatgctccctgtcttttccggttgcaggggaaatggcagggtcagtagattgaaaagtggggttagcatctgggtggcctgggttctgttaacctcaagtcccattatacctctacccagcatctgaatagacaaccagccctctttagggtgggatttgaaaggaagggcctgcttttctccagaacacctcagaatggctccatgaatgtcttgagaacctgatatatatgccaggcacctattttggcaggtggtgagttaacgatcttaagttctggaatcagacactcctgggttccggcccaagtgctaccaatttgtaactgtgtgatgctggagcattcacttaacagctctgaacctcagtctcttcatctttaaaatggaaataataacaatagctaacatttaaagagttcgtactaagtgctgggcactgtgttatgtgtgttaaccattttaaccttcccagttctggagagaatccttatttctattttatagataaggaaaccgaagcccagagaggttaagactttaggtcaagtaccttcagcttagaaagagcagggaggcagtttggttccaagaagcctacgcacactcctaaccactaagttaaaagcacccaacattgtgcccctaagaccaactccctagctattaaccttgcccctatcccagagagaaaagaagggagccccgggctagattaaagagacttggttcctagtggtgtatcttcccctggcttcctctaaactctggagtaagtcattttccttgctggacttcactttccctctctgtgaaatggaaacagtcatgcacaggcctgcctgttctttccaggggctgttaggaggctcagatgacacccggtgtaaggaattcttcaagacttaagggagcctgggaccaagggtggaggagcttgagggattcctgggaccattcacccctggggacagccctggattttttttgttaccttgggttaccacaggttctgctgaatgtcctgaccttgaaccggaacctgagtgacagcctggcccgcggccgct

SEQ ID NO: 60144 - DNA, 1061 bp, Homo sapiens
gtccagggcatcacctcctaccagcagcgtttacaagcattgagaaaggagaaatcccgagatgctgctcgctcccgccggggaaaagaaaactttgagttctatgaattggccaagttgttgcctcttcctgcagccattaccagccagctcgacaaggcatccatcattcgacttacaattagctatctgaaaatgagggactttgctaaccagggggaccctccgtggaacttgcgaatggaaggccctccacctaacacatcagtaaaagttataggtgcacagcgaaggagaagccccagtgcactagccattgaagtatttgaagcacatttgggaagccacattttgcagtccctggatggctatgtatttgcactaaatcaggaaggaaaatttttgtacatttccgaaacagtctccatctacctaggcctctcacaagtggagctgacaggcagcagtgtctttgactatgtccaccccggagatcacgtggagatggctgagcagctgggcatgaagctcccccctgggcggggtctcctgtcacagggcactgctgaggacggagccagctcagcatcttcctcctctcagtcggagacccccgagccagtggtttgcttcccaccagcgagtgatcagtttcttctgtaggacccctgtcaggaagaacatgcctggatcctacttcagagagaactcagccagggcaaggggctcctgtggctttttgggtgggtgtgagttcatagaggggaaaatcaatactgtaccaggatttagacaatttagcaaaatgcacgaggcagtactttggatgatgaataactacagctgcatggctaacccattggttgtgtaaagtatgggttatcatgttttgtctaaattttcaggcaaaatctagcctgttttgtggcattaggatcatcattatagtagtatgatttttatgctattatacttacgctatgtcccgaatgtttttaaggccagcaaaatggaaacagtagagtacttgcctgaatgcaaataaacttcagtttcaactt

SEQ ID NO: 60145 - DNA, 952 bp, Homo sapiens
gggcccgggtgtggtatttttggagttaatggagtcagaaggacctccagagtcagagaggtcagaatttttctcacagcgggaagaggaaaatgaagaagaagaagcccaagaaccagaggaaacaggccctaagaacccccttttacaacctgctctcacaggggatgtagagggtttgcagaaaatatttgaggatcctgagaatcctcatcatgaacaggccatgcagcttctcttagaagaagacatcgttgggagaaatttgttgtatgcagcttgcatggctgggcaaagtgacgtgattagagctttggcaaaatatggtgtgaatctgaatgaaaaaaccaccagagggtacacactcttacattgtgctgcagcctggggtcgtttggaaactttgaaagcactggtagaactggatgttgatatagaagctttgaacttccgggaagaaagggctcgagatgttgctgctagatattctcagactgagtgtgttgaattcctggactgggcagatgcaaggctgactctgaaaaaatatattgcaaaagtctctttagctgttactgacacagaaaagggatcagggaaactccttaaggaagacaagaataccatcctcagtgcatgccgtgcaaaaaatgagtggttggaaacccatacagaagcttccattaatgagctttttgagcagagacaacaactggaagatattgtgactcctatcttcacaaaaatgactacaccatgtcaagtgaaaagtgccaaatctgtaacaagccatgaccagaagagaagtcaagatgatacctccaactgaacatacgttctgtaaaaggccacattttcttttagtatctgaaaggcaaacctattcatgccatttgaaatcgagaaaacagatgtggggttctttaagtatttaagtacaacattacatcgc

SEQ ID NO: 60146 - DNA, 591 bp, Homo sapiens
gggacgggccagcggtgcacaagaagagaccgaggcgggtggccccgagagagccagggccatggaggccaacatgccgaagcggaaggagcctggcaggtctctccgcatcaaagtcatctccatgggcaacgccgaagtggggaaaagctgtattataaagcgatactgtgagaaaagatttgtgtctaaatacctggcaacaattggaattgactatggagtcacaaaggtacacgtcagagacagagaaatcaaagttaacatctttgatatggctggacatcccttcttctatgaggtaagaaagcctttttgacaaaacctatatccagtattgttggtggtttggggagagatccagaattatatgaaacaaccaatattgatatcatgtgtaaaattgcataattttagcttgatcgtggcttgccttcagagccttgagttaatagacaactgttgattttttaggttatcctgttaaatagtggtaggaaatttcattgccaatatttcaaacatttcaataagacattttgactttcagaggacttttgctttttacctcatactttagcctaaaatgtg

SEQ ID NO: 60147 - DNA, 1947 bp, Homo sapiens
ggcacgagggcacccctgcagcatggcctggaacaccaacctccgctggcggctgccgctcacctgcctgctcctgcaggtgattatggtgattctcttcggggtgttcgtgcgctacgacttcgaggccgacgcccactggtggtcagagaggacgcacaagaacttgagcgacatggagaacgaattctactatcgctacccaagcttccaggacgtgcacgtgatggtcttcgtgggcttcggcttcctcatgactttcctgcagcgctacggcttcagcgccgtgggcttcaacttcctgttggcagccttcggcatccagtgggcgctgctcatgcagggctggttccacttcttacaagaccgctacatcgtcgtgggcgtggagaacctcatcaacgctgacttctgcgtggcctctgtctgcgtggcctttggggcagttctgggtaaagtcagccccattcagctgctcatcatgactttcttccaagtgaccctcttcgctgtgaatgagttcattctccttaacctgctaaaggtgaaggatgcaggaggctccatgaccatccacacatttggcgcctactttgggctcacagtgacccggatcctctaccgacgcaacctagagcagagcaaggagagacagaattctgtgtaccagtcggacctctttgccatgattggcaccctcttcctgtggatgtactggcccagcttcaactcagccatatcctaccatggggacagccagcaccgagccgccatcaacacctactgctccttggcagcctgcgtgcttacctcggtggcaatatccagtgccctgcacaagaagggcaagctggacatggtgcacatccagaatgccacgctcgcaggaggggtggccgtgggtaccgctgctgagatgatgctcatgccttacggtgccctcatcatcggcttcgtctgcggcatcatctccaccctgggttttgtatacctgaccccattcctggagtcccggctgcacatccaggacacatgtggcattaacaatctgcatggcattcctggcatcataggcggcatcgtgggtgctgtgacagcggcctccgccagccttgaagtctatggaaaagaagggcttgtccattcctttgactttcaaggtttcaacggggactggaccgcaagaacacagggaaagttccagatttatggtctcttggtgaccctggccatggccctgatgggtggcatcattgtggggctcattttgagattaccattctggggacaaccttcagatgagaactgctttgaggatgcggtctactgggagatgcctgaagggaacagcactgtctacatccctgaggaccccaccttcaagccctcaggaccctcagtaccctcagtacccatggtgtccccactacccatggcttcctcggtacccttggtaccctaagctcccagggcaggtgaggagcaggctccacagactgtcctggggcccagaggagctggtgctgacctagctagggatgcaagagtgagcaagcagcacccccacctgctggcttggcctcaaggtgcctccacccctgccctccccttcatcccagggggtctgactgagaatggagaaggagaagctacaaagtgggcatccaagccgggttctggctgcagaagttctgcctctgcctggggtcttggccacattggagaaaaacaggctcaaagtggggctgggacctggtgggtgaacctgagctctcccaggagacaacttagctgccagtcaccacctatgaggctcttctaccccgtgcctgcacctcggccagcatctcctatgctccctgggtcccccagacctctctgtgttgtgtgcgtggcagcctccaggaataaacattcttgttgtcctttgtaaaaaaaaaaaaaagg

SEQ ID NO: 60148 - DNA, 998 bp, Homo sapiens
ttttttttttttgctttttaatgttcttatttatttaaatatgaaaaaacatttcatctcttcccagttcatctgaaaggaggtcccctgggtaaacataggaaagcagttctgcaggctcatgaaggatgctcggctggaggtcggggggagcatggctgctttccccagcatagcccccatgttccccaccctctttgtgccccggatctgcgatcctgagtccagaagagctcagcaggaagtgggaactgagaagctgttgggagccaggagggccctggaccctctgttctctgccccagggcttcagccaccctgcaagcccctccggacaaggcaacgtcagcccaggtagaaaacttaagagtccctcctagaaaaccagtgatgtgctggccctttcagggacacaggccccttcagcttcaccggagatgagaaggtgccacccgcaacagggctgctggtcacagctcagtgcgcgatgccttggccacaatcaccagcttggacagctcagctttgaatgccccgggcctgtgagccactgctgttttggtcacttcaaattcctcagttttcagagggacatcactttccctttcaaatgcggctttagagtaggccatggcgtactcaatctcagcgccccgcacctctgccttgaactgtgtgaagtacagataggacttcccctggggcctccagatggtgcaggtgaagtgctggtggtcttcgctggtccccagactcatctgccattgctcattggtccctccttgagaggcgtaagtgaacatacacgtatatttgtcccccgggcccacgttatgggagaaggaatgcacgacgccgccgggccgcacgtcaaacgccaccgtcgtgggctcggacaccgcctccgccggcctcagcgccacggcccctaggagcagcgcggcccacaagctcgcgccgacgccgttccaccctccgctgggcgccgccatgttgga

SEQ ID NO: 60149 - DNA, 2428 bp, Homo sapiens
tttatttccatacatgtttattatatacacactgcctatagattctgtttaaataatctctaagaaaaaaatcaaacttttctgagcaggtgattaagctgaaaacaaccaattaaaaccaccactttttaagtgacctttggtcacaaatgtcaaaatgtttccacaccctttccaccctcaaacaagagacaaactgtttttgataaactctagtatttattaaattataaattttgtaatcaaaaagaaaaatgcagaccaaaaaaacctcaaactataagactagacagcaaagcctatgggaacaccatgaagtgtgttacaaacattctgaaacataagttactggctgttttcatttccatttcaataactttactataaaatagttgttattcatctattttgaaatcccaaattcacatctattcatacattaaattatgtttcctgttcataatatcaaacatctcacaggtgccaaattttagtaatggtcttatgccaatccatgcagaaaaataagacacaatgcaggagtcagatgaggaccattaatgcacagataatacaaacacactggccaaaagaactacagaagtttttaaaaagtataaagtaaacagacctcaagaaaactgggttattactaaacagctctcaactattaacacccaagttccttacattaaataaatttctcaacagagacatgttagacattttaattatgagtctatccttcccataccccttcccaccccaactcccaaaatgcactactagggatgagtataatgttatgtgggcagaaatttacaggtaaccctttcaaccttgagcatggagctgaagacatttttatttaaacttcagttactgtgcactgtccatcaggccttctagatctgacactgacactcactgttccaccccctgctactgatcgatcagttcccgatcgatctgatcgatcgggtactgtctggtttgcattagaaaccaaaagtctctgttgggtcaaggagtgctgtgcaacaactgcagatacatcctcactatcactactggcatctgattcagtttcttcaatggaggtgtctggtgctggtaccctgcctgaagatggtgattcatgatcttcttctccttctcccctatgactcctttcagctgtgttgtctccactgagttgtaaatgagcaaaagagtcttccagagaagtgcttgcatcaggggatggtgttgcagggcttgttaactgaccatctactgatgttaggggccttacagaagacactaggggctgaacagaagctccactctgtgctgatacactgtccgctccgtcagcagagctctctcttgctaggtttacggtattagcatcacagtctagcctaagtccagctactcccttctttggtatatctattatatctcgcttaatcttcctgcgacgtccatgttcatttctcctatattgaaccatgttttcaagatcagcgacatacagaaagccagcaattaacatttcagtgttctttttacctttggaaaaagcatcttccagctctctactagtgcgctcatcgtactgccaccacccatttcttccttcataataccatgcatattcaccatttcctctacttgctgccttgagttcttctggtgacaacaaggttggcttgtcaaggaaatcctcgggaatttcttgtcgacaaagagcacaccgctttccaagccatgaagctccttttacacatagatagcagaaaacgtgcttacagggcagactgactggatgaacacatgtttgcagacaaatggcacattcagggacggttaaagaaggtgcagtattagaacaggactcgttcgctttcctgtttgtaggaagcatgtttattgaatgatcaatttcaccacagccagccatcctgcaaatcagagtttacaaagctcaggtaaaaatggacaaaaaaagtgctttgtaatcactaaagcttcataaaggtaacaatcatataagaccaaaggagaaaataacatgaatattgaagatcccatttctattacagatcccacagatgcctgccacaaaaataaagcattttcttcaccagcagtcagccagcttacagtattttctcttccactgctggttcattctttgtgcggcccctgaccccgccgccgcccctctcaggccccgagcgcaaggccgacccggagtacgttgcggctggaggtgacaccgcgagctatgcctcctctccccgagtgaggatcctagagtggccggcgttcaccctgctcccccgagagggcctcgctccgactcccacctctccggccacagctgcggccacctcgcagtcttttctctctggcctcggagcccgcagctgccgggaacgcg

SEQ ID NO: 60150 - DNA, 1884 bp, Homo sapiens
ttttttttttttaatattgaaaaaatacaattaaatttttattaaaaatacatactccttacgcgatctttgtgtacattttgtgtgaaaaggaaaaaaaaataggaaaggcattaagactacctaattatttatactgtatttggtagaagcgtgtttcagtcaaactttaacgaaaaataagttattctgttttcatttgctcccggacgtcagaaggcagagtttcaaacagagcatcttctacaactaaaccagctcgcttcagagcccgacagtcacccagttcaggagggaggatttcaaagtgattaccttttccatctaagtaggaaagaaatagcaaatttccaattttcggtgaaagtacagataggctgttttttccaatcttcagagttttaagtttcttgcagaagtagagttcatctggaaggctttccactttgttacatgtgatggaaaaatactgtaaactttgtagaactccaatttcaggggggataaatcgaatgtcattgtacgataagtccaagtatcggatcttgttgcataggaagaggtgggaaggcagcacctctattttattgtgactaaaggacaggcgttccaggctggtgagtttctttatatgctctgggatgtaggtgatgctgttatgccacagttttagcactgtcaactttcttaagtgctgaaagctaacgatttcttctatagatttcagattgttttccttcaggtccaattcctggaggctgagtaggctgaacacagcatgaggaatacgctccaggtcacagtggaccagctccagctctgtcagattggtcatcttctttaagttgttgagcatcaccagcttggtgccatcattatgtatgcacatcttctggagatggctggaaacatcaaccactgcctgagggattttggaaacgttgcttttgatagagagaattttaaggcttttgagatcccgcagagactcaagggtgacatttctggaaatatcatgacttagagagccaactaggtacagctcttccagatttcggagcccatacatccagggggggagttccctcatgtcatcaaacttgacgctcaagaccttgaggttttccttcaggaaagagagcgccgcactgtggattttgacagaacactggtgcagagagagctcttgaagattgtctagctgtgcaatggtggctggtatcattacgttcttaatgatttcaagttttagagattgcaactctgtgatttcaaaaacagtgtctggaaggccagagagcatgataagaggcaattccagtcgattatgggcatttgtctgtagcttctgcctcagtttatcaggagtccattcgttatttaagttcagctgctttaatttgttttcactgacttcagacaggaacactgcaaatctcttggaatagagagggtcatactgatctatcatatgaagcataaaagcaaagtcatttttcacatctggaatatcatcaaatccagtctcctgacggacatactcaaaggaatattcccgtagagaacggtagaacagccagtataaggtataaaggcacgtcaatccatagatactaacaaagcacagatagcaaaaggacagttttgagaacaagtgtgccatggtatgattgcaagaaaagtttttatatccagtcatgtcctgaatgtccacattacagtccactgtaaactggaccttggaaaccagagcactattatatgcaatgatgattaggaatttgataactttaagtacagtctggcgaacatacatggcatatagaatatcaccttcttccacatgcagcctgaacttcttcaccttctcaaataaggccttag

SEQ ID NO: 60151 - DNA, 2718 bp, Homo sapiens
tttcgtgttctgcgcgtactggctgtacggagcaggagcaagaggtcgccgccagcctccgccgccgagcctcgttcgtgtccccgcccctcgctcctgcagctactgctcagaaacgctggggcgcccaccctggcagactaacgaagcagctcccttcccaccccaactgcaggtctaattttggacgctttgcctgccatttcttccaggttgagggagccgcagaggcggaggctcgcgtattcctgcagtcagcacccacgtcgcccccggacgctcggtgctcaggcccttcgcgagcggggctctccgtctgcggtcccttgtgaaggctctgggcggctgcagaggccggccgtccggtttggctcacctctcccaggaaacttcacactggagagccaaaaggagtggaagagcctgtcttggagattttcctggggaaatcctgaggtcattcattatgaagtgtaccgcgcgggagtggctcagagtaaccacagtgctgttcatggctagagcaattccagccatggtggttcccaatgccactttattggagaaacttttggaaaaatacatggatgaggatggtgagtggtggatagccaaacaacgagggaaaagggccatcacagacaatgacatgcagagtattttggaccttcataataaattacgaagtcaggtgtatccaacagcctctaatatggagtatatgacatgggatgtagagctggaaagatctgcagaatcctgggctgaaagttgcttgtgggaacatggacctgcaagcttgcttccatcaattggacagaatttgggagcacactggggaagatataggcccccgacgtttcatgtacaatcgtggtatgatgaagtgaaagactttagctacccatatgaacatgaatgcaacccatattgtccattcaggtgttctggccctgtatgtacacattatacacaggtcgtgtgggcaactagtaacagaatcggttgtgccattaatttgtgtcataacatgaacatctgggggcagatatggcccaaagctgtctacctggtgtgcaattactccccaaagggaaactggtggggccatgccccttacaaacatgggcggccctgttctgcttgcccacctagttttggagggggctgtagagaaaatctgtgctacaaagaagggtcagacaggtattatccccctcgagaagaggaaacaaatgaaatagaacgacagcagtcacaagtccatgacacccatgtccggacaagatcagatgatagtagcagaaatgaagtcataagcgcacagcaaatgtcccaaattgtttcttgtgaagtaagattaagagatcagtgcaaaggaacaacctgcaataggtacgaatgtcctgctggctgtttggatagtaaagctaaagttattggcagtgtacattatgaaatgcaatccagcatctgtagagctgcaattcattatggtataatagacaatgatggtggctgggtagatatcactagacaaggaagaaagcattatttcatcaagtccaatagaaatggtattcaaacaattggcaaatatcagtctgctaattccttcacagtctctaaagtaacagttcaggctgtgacttgtgaaacaactgtggaacagctctgtccatttcataagcctgcttcacattgcccaagagtatactgtcctcgtaaactgtatgcaagcaaatccacattatgctcgtgtaattggaactcgagtttattctgatctgtccagtatctgcagagcagcagtacatgctggagtggttcgaaatcacggtggttatgttgatgtaatgcctgtggacaaaagaaagacctacattgcttcttttcagaatggaatcttctcagaaagtttacagaatcctccaggaggaaaggcattcagagtgtttgctgttgtgtgaaactgaatacttggaagaggaccataaagactattccaaatgcaatatttctgaattttgtataaaactgtaacattactgtacagagtacatcaactattttcagcccaaaaaggtgccaaatgcatataaatcttgataaacaaagtctataaaataaaacatgggacattagctttgggaaaagtaatgaaaatataatggttttagaaatcctgtgttaaatattgctatattttcttagcagttatttctacagttaattacatagtcatgattgttctacgtttcatatattatatggtgctttgtatatgccactaataaaatgaatctaaacattgaatgtgaatggccctcagaaaatcatctagtgcatttaaaaataatcgactctaaaactgaaagaaaccttatcacattttccccagttcaatgctatgccattaccaactccaaataatctcaaatgaattttccacttaataactgtaaagtttttttctgttaatttaggcatatagaatattaaattctgatattgcacttcttattttatataaaataatcctttaatatccaaatgaatctgttaaaatgtttgattccttgggaatggccttaaaaataaatgtaataaagtcagagtggtggtatgaaaacattcctagtgatcatgtagtaaatgtagggttaagcatggacagccagagctttctatgtacctcggccgcgaccacgctaaggg

SEQ ID NO: 60152 - DNA, 640 bp, Homo sapiens
cgttgctgtcggtagatagccggcgccttcctcttcccatcgcgcgggtcctagccaccggtgtctccttctacatccgcctctgcgccggctgccacccgcgctccctccgccgccgccgccttgctgctgctcaaagctgctgccgccccttgggctaaaaggttttcaaatggaacattttgatgcatcacttagtacctatttcaaggcattgctaggccctcgaggtatcagcagctctgtcctcagaatgggtcccccacttcacacagttgtaggatggctacagcagctccaagcagcacattcagaggaagaagaaaaaatgtttcatttgtgtggttttaagcataaagaagttgtttcccagagctctttgccagctgtcatccctcaaaactcactggccacaattgcttcacatgcacctgcctgaaccagccaccagagggggttaggaccaccacagattgactagatcctaaggattctctacctggggctggagttcgggtcaggtgcccgggaagcactgtgcggtgtgggaggatgaatatgtgccaatttggaaagatgagtatttgtgggaaaatgaataaagcaaagtgtaaatcagaggtttaagttaaaaaaaaaa

SEQ ID NO: 60153 - DNA, 1810 bp, Homo sapiens
gatatttaaactacataaacttgaagtctgagaataagctcagtgggaaagaggacctttgggaaaaattacagtatttgtggaagtctactctgaatctcccagaagatcttttgagggttcctgatgagtcactcttcttaaatagtggtggagattccttaaagtccatccggctcctcagtgagattgaaaaacttgttggtacatcagtacctgggcttctggaaattattctcagcagttccattttagagatttataatcacatccttcaaacagtggttccagatgaagatgtgacattcaggaagagttgtgccacaaaaaggaaactcagcaacattaatcaagaggaagccagtggaacatctttacatcagaaagccatcatgactttcacttgccacaatgagattaatgcttttgttgtactgagcagagggagtcaaattttgtctctgaattccactaggtttttaacaaagttaggacattgctcttcagcctgtccttctgactcagtttcacagaccaacattcaaaatttgaaaggcttaaattctccagttcttattgggaagtcaaaagatccatcctgtgttgcaaaagtttctgaagaggggaaacctgcgatagggactcagaaaatggagttacatgtgaggtggaggtcagacacaggcaaatgtgtagatgcttcaccgctggttgtaatacccacttttgataagtcatctacaactgtgtacattggttcccattctcatagaatgaaggcagttgacttttactctgggaaggtaaaatgggaacagattttgggagatcgaattgaatcctcagcatgtgtatctaagtgtggaaactttattgtggtgggctgttataatggattagtttatgttctgaaaagtaatagtggagaaaaatactggatgtttactactgaagatgctgtcaaaagctcggcaaccatggatccaaccacaggactcatttacattggatctcatgaccagcacgcatatgctttagatatttatagaaagaagtgtgtttggaagtcaaaatgtggaggaactgtcttttcctctccgtgtttgaacctgattccacatcatttgtattttgctacattgggaggacttttactggctgtaaatcctgctactgggaacgttatttggaaacattcctgtggaaaaccactcttctcttccccacaatgttgctcacagtatatttgtattggctgtgtagatgggaatttactctgctttactcactttggagaacaggtttggcagttctctaccagtggaccaatcttttcatccccgtgtacctcaccatcagagcaaaaaatattttttggttcccatgattgctttatctactgttgtaacatgaaaggtcacctgcagtggaaatttgaaactacttcaagggtctatgcaacaccgtttgctttccataactacaatggcagcaatgaaatgttgctggcagcagcatctactgatgggaaagtgtggatcttggaatctcagagtggacaattgcaaagtgtttatgaacttcctggagaagtcttctcttctcctgtggtcctggaatcaatgctcattattgggtgtagagataattatgtttattgtctggatttattgggtggcaatcaaaaataatcaaatacagtccttatttgtataacaaatgtgagatatttgaaaatattttaccattatacatcatgtggacttattttatattaaagaagattatattttggctaagaaaaaaaaaa

SEQ ID NO: 60154 - DNA, 1521 bp, Homo sapiens
ttcagtttctcaacttaactttatttcaataatttaatagaaaattaaaataataaataatatgaaacagactgataacgctgagctgggcaggcccaggccagtctagtacaaagttaaggaggtagggaggatggtggggaggagggggcggactaccctgcaggacgcgggaggctgctcagactgtggtgatgtcaggaagggccgcacactttggcatggacgatgcactaaaaaaagagaaagggaattctaaatccctcttaaccagctggagagggaaggacgcagggccagggtggggacaagtgttggcttcggaaggctctgagtggtggggccggaatgtaccatgttgttagcaatggggttgggatgggtggagaagggccaaagtgagctgtgccatgcaatgaagggacagaggaggacccacgacttggccagcagagccggggcaaaagtctgggaaggggagggaaagagagagggactgggtcccaaggcaagaggaaggcagggggagggtcagaggtcagtccttgaagacaatttgttggccatgaggacgctcgtcgtgggtgatatggcgccggacatggatcctgcggacacggtgctctcggttctcttcatcctccccgcggccagccccaccagctccagctgctccccctgtggcctccaggagggctgggtctgggccccggggagtctcgtagatgaggatgttcagggtctcctcgaagatccgggcctctggaaattccaccttggtctgcttcttctccgtagcatagacaatggaggtgcagcacacctcggcgattttgcggccctgcccgtagaaagaccagcagcagatctcgtcccccaggacatccttgaggaagagtagccgcccgtggaagcgcagggccagcttgtcgaacagctcgatgttcttaagtaggttgtcatctgaagtgctggggaccaggggaccaggaggcctcagcgcagttggcacccctccctctgtacccccagaagacgggcctggatgcattcccagtcctctgctcctgcccagggctttggtgctcaacagagagcctcctccacccctggggccaggctaaacgggtctcagaagggaagccacatgcgctgagcaaatcccagcacagcacagcacagcagctccagtgagggaccgggagccaggccacctccccgggggtcctgggtgtccccattttttaactgggtgacactaggcaagttacttcacctcttggtgtcccgacctcctcatctgtaaaatggagctcacaacagtactgacctcaagggggaggactctgccagttcctagaatgagagcacttgggataggctcgccactatcactttgtcctcacccaaacccatttactgatgactgagctgaagctgagaagcagaaaggacctgcctagagcgtcaggggtaagaggcgaagccgaatctgcgagcaggcacagatgttcttgtagg

SEQ ID NO: 60155 - DNA, 1655 bp, Homo sapiens
ccagtgcggtggaattcgtctacactgatagattccatcttattttaggaatcagcgtggaatttctatgttctttacggtcagatgcaaccatggaaagcataactgcttgcttacatgcattgcaagcacttctagatgtaccttggcccagatcaaaaattggcagtgatcaggactcgggtatagaattgctgaatgttctacatcgagtaattttaaccagagaatcaccttccattcagttggcttcacttgaagtggtaaggcagattatctgtgctgctcaagaacatgtgaaggaaaaaagacgaagtgcagaagttgatgatggggctgctgaaaaggaaactctgccagagtttggagagggaaaggacaccggaggacttgtgcctggaaagtctttggtctttgcaacactggaattgtgtgtatgcattctagttagacagctcccagaattaaaccctaaattgacaggtagcccaggagtaaaagctacgaagccacagatactattagaagatggaagtagattggtttcagctgcattggttatcctttccgaacttcctgcagtgtgctctcctgaaggaagcatctcaattctccctactatattgtacctcacaatcggggtcctcagagagactgctgtgaagttacctgggggccagttatcttcgacagttgcagcttccctacaggctctaaaaggaatattatcttctcccatggcccgggcagaaaagagccgtactgcttggactgaccttctccgaagtgccttaacaacaattcttgactgttgggatccagttgatgaaacacaccaagaacttgatgaagtcagtctacttactgctatcacagtgtttattttgtctaccagtccagaagtaactaccatcccatgccttcagaagcgctgtattgataaatttaaagctactcttgagataaaagatcctgtggtacaaatcaagacctaccagctcctacattccatctttcagtatccaaatccagctgtttcctacccatacatttactctttagcatcctgtatcatggaaaaactgcaggaaatagacaagagaaaacctgaaaacactgctgagcttgagatcttccaagaaggcataaaggtcttagaaacactggttactgttgctgaagaacaccatcgcgctcagctggtggcctgtcttttgcccatcctcatttccttccttttggatgaaaattctctgggatcagcaacttccataatgagaaatttacatgactttgctctacaaaatctcatgcaaattggacctcagtattcatctgtttttaaaagtttagtggcttcttctccagccctaaaagcccgccttgaggctgctataaagggcaatcaggaaagtgtcaaagtcaagataccaacatctaaatatactaagagtcctggaaaaaactcaagcatccaattaaagaccagtttcctctgattttttttttggaatagtaagcaccttaatataataaatacttgatcattgcctttggtgacaaaagggacattgtaaacacaagtgcccttagaggtctagttgattgttttaccttaaatagctgtgactcttcaaagtaacagcatacttaaa

SEQ ID NO: 60156 - DNA, 2323 bp, Homo sapiens
  misc_feature (1)...(2323): n = a,t,c or g
ggaattcctcacctctcgtccagggacatgacgggcacgccaggcgccgttgccacccgggatggcgaggcccccgagcgctccccgccctgcagtccgagctacgacctcacgggcaaggtgatgcttctgggagacacaggcgtcggcaaaacatgtttcctgatccaattcaaagacggggccttcctgtccggaaccttcatagccaccgtcggcatagacttcaggaacaaggtggtgactgtggatggcgtgagagtgaagctgcagatctgggacaccgctgggcaggaacggttccgaagcgtcacccatgcttattacagagatgctcaggccttgcttctgctgtatgacatcaccaacaaatcttctttcgacaacatcagggcctggctcactgagattcatgagtatgcccagagggacgtggtgatcatgctgctaggcaacaaggcggatatgagcagcgaaagagtgatccgttccgaagacggagagaccttggccagggagtacggtgttcccttcctggagaccagcgccaagactggcatgaatgtggagttagcctttctggccatcgccaaggaactgaaataccgggccgggcatcaggcggatgagcccagcttccagatccgagactatgtagagtcccagaagaagcgctccagctgctgctccttcatgtgaatcccagggggcagagaggaggctctggaggcacacaggatgcagccttccccctcccaggcctggcttattccaagaggctgagccaatggggagaaagatggaggactcactgcacagccgcttcctagcagggagctatactccaactcctacttgagttcctgcggtctccccgcatccacagggagggtaaaacacttagcttttattttaatagtacataatttaataccaaaaaaggcgcctggatccccaaaaaaccgaggctgggagctagtggcccttttgctttctaggacttggggggccggccctccctcctaagcataacaaaggtggtgttgctccagctcagccccaggggacacagatgcactttgggggtgagggcaggtaatgactccatcgcaccctcagttcagctggacagaggctcaggtgaccccagccttcactgtctcccgctctccaggagcttatcttcgccccatctcccaaataagtgggcccttgtgctgtgaggaagaccaaagcctcagggaagataagagatatggagatgggagggggaggacaaggggcagagagtagggtctagctggctatctctggccttactaacacccccctggaggcatgccccttttctccagcacacaagcacattggggcacctggaaatattggttccaggctcctgttctctggacttcagatcctgggggagcccctcccccccctgaatccctggcttagctaccttcctgcctgtgcacctaaaaacctcaggtcagaactaggaaaagagttttgtttttatttttttgaaatggagtctcgttctgtcgcccaggctgaggtgcagtagtgcaatctccgctcactacaacctccactccctggggctcaagcgatcctcccacctcagcccccgaagtagctgggactataggtgtgtaccatcacacctggctaatttttgtattttttgtagacacagggtttcgccatgttgcccaggctggtcttgaattcctgagctcaagcaacctgccggcctcggcctcccaaagtactgggattacacgcagaaggcaccatgcccaggctagatgtgtcttatcccaatcctttggcaggcatgcagctccacaggcgatttcttcaagcagctgaagtgtttagccctcctgggttaagagccagataaggagaaatccctttcctaggtttggaatgtgttgtgaaaaaaaagagaaatccctggctcctggagctggtgggagacaagattaagcaaacctcccctgacatgtatccctttgaccccaagctctgcctcctccctgaccacccatgccctttcctttaacttctcaaacagataccagggcctaaactgctttacctcccctcctactgagtcaggttaggtggtggggaggttcaacccatttccgagtttaaacccaatgcaatattgagtaaaacaaagttcatgtggggtattgtctggggtagagagaggggtagcaagttcatgtgtcctccttggtcacatatctcccaaagctctgatccctnccatgggaagtggacaggaaacatgaggtcatgacct

SEQ ID NO: 60157 - DNA, 2794 bp, Homo sapiens
cagtgcgcggaattcggcggcggcagtggcggcggcggtggcagtggcggcggcggtagcggcggtggacgtggtgccggaggggaagaaaataaagaaaacgaacgcccttcggccggatcgaaggcaaacaaagaatttggggatagcctgagtttggagattcttcagattattaaggaatcccagcagcagcatggtttacggcatggagattttcagaggtacaggggctactgttcccgtagacaaagacgtcttcgaaaaacactcaacttcaagatgggtaacagacacaaattcacagggaagaaagtgactgaagagcttctgaccgataatagatacttgcttctggttctgatggatgctgaaagagcctggagctacgccatgcagctgaaacaggaagccaacactgaaccccgaaaacggtttcacttgttatctcgcctacgcaaagccgtgaagcatgcagaggaattggaacgcttgtgtgagagcaatcgcgtggatgccaagaccaaattagaggctcaggcttacacagcttacctctcaggaatgctacgttttgaacatcaagaatggaaagctgccattgaggcttttaacaaatgcaaaactatctatgagaagctagccagtgctttcacagaggagcaggctgtgctgtataaccaacgtgtggaagagatttcacccaacatccgctattgtgcatataatattggggaccagtcagccatcaatgaactcatgcagatgagattgaggtctgggggcactgagggtctcttggctgaaaaattggaggctttgatcactcagactcgagccaaacaggcagctaccatgagtgaagtggagtggagagggagaacggttccagtgaagattgacaaagtgcgcattttcttattaggactggctgataacgaagcagctattgtccaggctgaaagcgaagaaactaaggagcgcctgtttgaatcaatgctcagcgagtgtcgggacgccatccaggtggttcgggaggagctcaagccagatcagaaacagagagattatatccttgaaggagagccagggaaggtgtctaatcttcaatacttgcatagctacctgacttacatcaagctatcaacggcaatcaagcgtaatgagaacatggccaaaggtctgcagagggctctgctgcagcagcagccagaggatgacagcaagcgctcaccccggccccaggacctgatccgactctatgacatcatcttacagaatctggtggaattgctccagcttcctggtttagaggaagacaaagccttccagaaagagataggcctcaagactctggtgttcaaagcttacaggtgttttttcattgctcagtcctatgtgctggtgaagaagtggagcgaagcccttgtcctgtatgacagagtcctgaaatatgcaaatgaagtaaattctgatgctggcgccttcaagaacagcctaaaggacctgcctgatgtgcaagagctcatcactcaagtgcggtcagagaagtgctccctgcaggccgcagccatccttgatgcaaacgacgctcatcaaacagagacctcctcctcccaagtcaaggacaataagcctctggttgaacggtttgagacattctgcctggacccttcccttgtcaccaagcaagccaaccttgtgcacttcccaccaggcttccagcccattccctgcaagcctttgttctttgacctggccctcaaccatgtggctttcccaccccttgaggacaagttggaacagaagaccaagagtggcctcactggatacatcaagggcatctttggattcaggagctaaccaggctcttcctcgggggcgggggagattctgactcttaatctgtattgtgagaaaatcccagcaagttccatgatattaaatccaggtctgcattggcccggggcaagagtttaacatcttcggccctgcattcctacatcttgtgtctgtacacgttcttaagcagcgtgtcaggagagcaccctgttgtcttctggtaaatgtgtgcagggtcatcctgtctcctgtacctcctgggaagggggccgctgctgtctggtgccctgtgagctgtgattgattgcctttggtcagtaatgcgttcaggagtccacaccaggcacagatggggccttgaaacgctttgtcatgcttcttcagtaccatggatttgaaatgaactcatccttgctgtgagcatccaggagcccttgagaagtttatctatgactatgaaactggcaacgtcaccccagaattacggtcagccttattccccttcacctcccagtgaacgctaagaagtttcagacaagcagagagctctatttttagaagaaatatgttacactcagaaatgatgaaaccaaatcttatattaaaaggcaaagatgacggagactgtgcccatttcttatatgcccttccctcatggtccagtccccgttctctccttcgggagccttagttgcgtgaagccggtgaggtcaagtgtaacctgacttaccggcaactaggtgaggctgatgccagatacacatgttagaggcactatttttcaggacttcccaatgtgtaatttttaaatgccattatattttaatccccttcgttaccccccgtttttccttagtcatcccttttcacttctattataacatcaataatagaagtcacaaaatcaatgtaagaaagcaaggaataaaagtgatttaaacatgaaaaaaaa

SEQ ID NO: 60158 - DNA, 2055 bp, Homo sapiens
attaatcccccctccttcccggtcggctcagtggccctgagaccctagctctgctctcggtccgctcgctgtccgctagcccgctgcgatgttgcgcgctgccgcccgcttcgggccccgcctgggccgccgcctcttgtcagccgccgccacccaggccgtgcctgcccccaaccagcagcccgaggtcttctgcaaccagattttcataaacaatgaatggcacgatgccgtcagcaggaaaacattccccaccgtcaatccgtccactggagaggtcatctgtcaggtagctgaaggggacaaggaagatgtggacaaggcagtgaaggccgcccgggccgccttccagctgggctcaccttggcgccgcatggacgcatcacacaggggccggctgctgaaccgcctggccgatctgatcgagcgggaccggacctacctggcggccttggagaccctggacaatggcaagccctatgtcatctcctacctggtggatttggacatggtcctcaaatgtctccggtattatgccggctgggctgataagtaccacgggaaaaccatccccattgacggagacttcttcagctacacacgccatgaacctgtgggggtgtgcgggcagatcattccgtggaatttcccgctcctgatgcaagcatggaagctgggcccagccttggcaactggaaacgtggttgtgatgaaggtagctgagcagacacccctcaccgccctctatgtggccaacctgatcaaggaggctggctttccccctggtgtggtcaacattgtgcctggatttggccccacggctggggccgccattgcctcccatgaggatgtggacaaagtggcattcacaggctccactgagattggccgcgtaatccaggttgctgctgggagcagcaacctcaagagagtgaccttggagctgggggggaagagccccaacatcatcatgtcagatgccgatatggattgggccgtggaacaggcccacttcgccctgttcttcaaccagggccagtgctgctgtgccggctcccggaccttcgtgcaggaggacatctatgatgagtttgtggagcggagcgttgcccgggccaagtctcgggtggtcgggaacccctttgatagcaagaccgagcaggggccgcaggtggatgaaactcagtttaagaagatcctcggctacatcaacacggggaagcaagagggggcgaagctgctgtgtggtgggggcattgctgctgaccgtggttacttcatccagcccactgtgtttggagatgtgcaggatggcatgaccatcgccaaggaggagatcttcgggccagtgatgcagatcctgaagttcaagaccatagaggaggttgttgggagagccaacaattccacgtacgggctggccgcagctgtcttcacaaaggatttggacaaggccaattacctgtcccaggccctccaggcgggcactgtgtgggtcaactgctatgatgtgtttggagcccagtcaccctttggtggctacaagatgtcggggagtggccgggagttgggcgagtacgggctgcaggcatacactgaagtgaaaactgtcacagtcaaagtgcctcagaagaactcataagaatcatgcaagcttcctccctcagccattgatggaaagttcagcaagatcagcaacaaaaccaagaaaaatgatccttgcgtgctgaatatctgaaaagagaaatttttcctacaaaatctcttgggtcaagaaagttctagaatttgaattgataaacatggtgggttggctgagggtaagagtatatgaggaaccttttaaacgacaacaatactgctagctttcaggatgatttttaaaaaatagattcaaatgtgttatcctctctctgaaacgcttcctataactcgagtttataggggaagaaaaagctattgtttacaattatatcaccattaaggcaactgctacaccctgctttgtattctgggctaagattcattaaaaactagctgctcttaaaaaaaaaa

SEQ ID NO: 60159 - DNA, 2795 bp, Homo sapiens
tggtgcaactcctaagacaaagcacatgacatgccattggttggttgctgttgttgtttttctttccctaggatgtgcttttttgtctacttctttcactggatccttaacagcaaattgtggttcggattgctctgtcttgtatcacaatcttaatgtttacacacctttcaaagtgtcaattttagaatcttgtgcttagcccttggctcattcatacctccttggtcccttggggtcggagtgtttggaatatggcagggctgatgggcattgagtccctgcacagtccacccacaagcccctggggcctaagggataaatcctcgctctcctctgtctcctgggttaggtgatctttgacgagactctacagaagtgcctggactcctacctgcgctatgtcccccgcaaattcgacgagggggtggcctcagcccctgaggttgttgacatgcagaagcgcctccatcgaagtgtttttctcaccttcctccgcatgtccactcacaaggaatccaaagatcacttcatttccccttctgcgtttggagaaatcctctacaataacttcctctttgacattccaaagatcctggacctctgcgtgctctttggaaaaggcaactcaccactgctccagaagatgataggaaacatctttacacagcagccaagttactacagtgacctggatgaaaccctgcctaccatccttcaggtcttcagcaatatcctccagcactgtggtttgcaaggggacggggccaataccacaccccagaagcttgaggagaggggccgattgacccccagtgacatgcctctcctggaattaaaggacattgttctctacctttgtgatacctgcaccacactttgggcctttctggatatcttccctttggcttgccagaccttccagaagcacgacttttgttacagactagcttccttctacgaagcagcaattcccgaaatggagtctgcaattaagaagaggaggcttgaagatagcaagcttcttggtgacctgtggcagaggctctcccattccaggaagaagctaatggagattttccacatcatcctgaaccagatctgcctccttcccatcctagaaagcagctgtgacaacattcagggcttcatcgaagagttccttcagatcttcagctccttgctgcaggagaagaggttcctccgggactatgatgcactcttccccgtggccgaagacatcagcttgctgcagcaggcctcatcagtcttggacgagacgcggactgcctacatcctccaggcagtcgagagtgcatgggaaggggtggacagacggaaagccacagatgctaaagacccatcggtgattgaggagcctaatggggagcctaacggggtcacggtgacagcagaggcagtcagtcaagcatcatcacatccggagaactcggaggaagaggagtgcatgggagcagccgcggctgtgggccctgccatgtgtggggtggaactggactctctcatctcccaagtgaaggacctgctgccagaccttggtgagggcttcatcctggcctgcctggagtactaccactacgacccagagcaggtgatcaacaatatcctggaggagcggctggcccccaccctcagccagctggaccgcaacctagacagagaaatgaaaccagaccctacacccctgctgacgtctcgccacaacgtcttccagaatgacgagtttgatgtgttcagcagggactcagtagacctgagccgggtgcacaagggcaagagcaccaggaaggaggaaaacacgcggagtttgctgaacgacaagcgtgcagtggcggcacagcggcagcgctacgagcagtacagcgtggtggtggaggaggtgccactgcagccaggcgagagcctgccctaccacagtgtctactacgaggatgagtacgatgacacatacgatggcaaccaggtgggcgccaatgatgcagactctgatgacgagctcatcagccgcaggccattcaccatccctcaggtgctgagaaccaaagtgcctagagaagggcaggaggaggatgacgacgatgaggaagacgatgctgacgaggaggctcccaagcccgaccattttgttcaggaccctgcagtgctgagagagaaggcagaagccaggcgcatggcctttctcgccaagaaagggtaccggcatgacagctcaacagcagtggccggcagcccccgaggccatgggcagagccgcgagacaacccaggaacgcaggaagaaggaagccaacaaggcgacaagagccaaccacaaccggagaaccatggccgaccgcaagaggagcaaaggcatgatcccatcctgagacctggtgcagggccagtggggaggcagcggcaccagactcaccaggccgcgctcccatcgcctggggcctcctcactaggggccccaagttcaactcaacccctcaacagcctcagctttgcagcccctgagaaggccgcctctcatctaccagccagccatgagcgccttcctgcagaacacacagtgccttatgccacagccgaagaatccgtggggccggcaagcaggcaccttcccccagctgcgctagcgggaaagagatggggatggagtcccaaggcaagcgccccaaacctcgggccacaagacaccacttcccctttaccctggacagcaggaaacctgtatattcaaaaacacaaaaagtcctgctaataaaatttttgaccctttcaaaaaaaaaa

SEQ ID NO: 60160 - DNA, 2350 bp, Homo sapiens
gtggaattcgtttaagatggcgtcccccgtagcagcgcaggccgggaagcttctgcgagccctagcgctgcggccccgcttcctggcggccgggtcccaggcagttcaattaacctccagaagatggctgaacctgcaggaataccagagcaagaaactgatgtctgacaacggagtgagagttcaaagattctttgtagcagacactgcaaatgaagctctcgaggctgctaagagactaaatgcaaaagaaattgttttaaaagcccagatcttagctggaggaagaggaaaaggtgtcttcaatagtggtttgaaaggaggtgttcatttaacaaaagaccctaatgttgtgggacagctggctaaacagatgattgggtacaatctagcgacaaaacaaactccaaaagaaggtgtgaaagttaacaaggtgatggttgctgaagccttggatatttccagagaaacctacctggcaattctgatggaccggtcctgcaatggccccgtgctggtgggcagcccccaggggggcgtcgacattgaagaggtggctgcttcaaacccggagctcatttttaaggagcaaattgacatttttgaaggaataaaggacagccaagctcagcggatggccgaaaatctaggcttcgttgggcctttgaaaagccaggctgcagatcaaattacgaagctgtataatctcttcctgaaaattgatgctactcaggtggaagtgaatccctttggtgaaactccagaaggacaagttgtctgttttgatgccaagataaactttgatgacaacgcagaattccgacaaaaagacatatttgctatggacgacaaatcagagaatgagcccattgaaaatgaagctgccaaatatgatctaaaatacataggactagatgggaacattgcctgctttgtgaatggtgctgggctcgccatggctacttgtgatatcattttccttaatggtgggaagccagccaacttcttggatcttggaggtggtgtaaaggaagctcaagtatatcaagcattcaaattgctcacagctgatcctaaggttgaagccatccttgtcaatatatttggtggtatcgtcaactgtgccatcattgccaatgggatcaccaaagcctgccgggagctagaactcaaggtgcccctggtggtccggcttgaaggaaccaacgtccaagaggcccagaagatactcaacaacagcggactccccattacttcagccattgacctggaggatgcagccaagaaggctgtggccagtgtggccaagaagtgatgtctttgtcctgatccaatggagaaagaaagccatttttccataaaaagggatggttcatcattgtgaaagaaatggttatctcattggggaagaaaaggggagggggaaggcaagaatcactgaaaaatcttaaatctgtgttttctggaataagatatctagacagcctaaatctgattttagtctttataaaaataatatcttgtgttctcatacttttctgtcactgtaagcctgcccagtaggcagtgttttgcagactttggggagtggtctatgtggccaaatattgtgtgtatagacagaatttgaaatcaagtcctgcttcatttacaagaattttggtgggcatcgaatcctacataatgaaaaagaaaaacagaccatttaaaaactcagacaagattatatttaatatattaattactaaaaaggcacaagattacactgaacatattagctactaaaaaggcactgctaagacattcaagcaaatagctattacacactactgcagattttacaggtttctaattctaacatatgtttgaaaaatccgtgagtattccaaaatatatttaataatggaatatctgcattaatataccatccatgtgtttttaccatttgccttaatattgaatatactgtttacctcacactaaaaagaaaaccagaagccttatttgtgattttgggagtggaagcttccatttttgtgtcaaaaatgaatcctgattcttatggaaatctctgttattaagatatttcaagatgagacaacactgaagatcaaattgtgtttagtatcactatcttctctcctcgtttctctcttactcctcatcctcccagaatctaccagtttatggtagaaagatgggaaccttatttgaatgtgtttttttttttccatgatgtccaattttgttgtgggaaaggatttggataaaatttttgtttaaattttggtagatttttatctatacaaatttaaataaaatccatgttttgtaagctgtaaaaaaaaaa

SEQ ID NO: 60161 - DNA, 2992 bp, Homo sapiens
cgacgccgcttgtgggcccgactccgctctgtctgcttcgccaccttctccccgagcactgcccggccggccgccatggctaacgtggctgacacgaagctgtacgacatcctgggcgtcccgcccggcgccagcgagaacgagctgaagaaggcatacagaaagttagccaaggaatatcatcctgataagaatccaaatgcaggagacaaatttaaagaaataagttttgcatatgaagtactatcaaatcctgagaagcgtgagttatatgacagatacggagagcaaggtcttcgggaaggcagcggcggaggtggtggcatggatgatattttctctcacatttttggtgggggattgttcggcttcatgggcaatcagagtagaagtcgaaatggcagaagaagaggagaggacatgatgcatccactcaaagtatctttagaagatctgtataatggcaagacaaccaaactacaacttagcaagaatgtgctctgtagtgcatgcagtggccaaggcggaaagtctggagctgtccaaaagtgtagtgcttgtcgaggtcgaggtgtgcgcatcatgatcagacagctggctccagggatggtacaacagatgcagtctgtgtgctctgattgtaatggagaaggagaggtaattaatgaaaaagaccgctgtaaaaaatgtgaagggaagaaggtgattaaagaagtcaagattcttgaagtccacgtagacaaaggcatgaaacatggacagagaattacattcactggggaagcagaccaggccccaggagtggaacccggagacattgttcttttgctacaggagaaagaacatgaggtatttcagagagatgggaatgatttgcacatgacatataaaataggacttgttgaagctctatgtggatttcagttcacatttaagcaccttgatggacgtcagattgtggtgaaatacccccctggcaaagtaattgaaccagggtgtgttcgtgtagttcgaggtgaagggatgccgcagtatcgtaatccctttgaaaaaggtgatctttacataaagtttgatgtgcagtttcctgaaaacaactggatcaacccagacaagctttctgaactagaagatcttctgccatctagaccggaagttcctaacataattggagaaacagaggaggtagagcttcaggaatttgatagcactcgaggctcaggaggtggtcagaggcgtgaagcctataatgatagctctgatgaagaaagcagcagccatcatggacctggagtgcagtgtgcccatcagtaaactctgcaaacaaattgcacaggtggattttctttccacatttgcctgatttgttctcagcaatccagctggagtgtcttatcaatccagatgaactgagggacatctgttggtctatgtataacttttaaaattggtatagtatctacagagtgtataatttaaactaaccacaaagctttacatcttcattttgactgttccatagcagaataaagcacttgaaaggaaacaagactccctttcacacatggattattataagtttcaatcctggtatctgtgcttgatttttatcagttttgtgtagatttttatgtttcatattttaaatttaaatcccacattgtaaagtttgtacaatttgtcctgaagctttgtgtttggctgcacctgcataagctgctacaaatagaataaagaatttcatagcctgtatctatcatttagatgcatggaaaaaaatgggctttgcacacaatgggtttggagctgactgggaacaatggaaaaaattacattagctgtggttgtaaagtttttttgtttttggttttgttttttttttcttttttctttttttttttttaccattttgggaaagggtttttaaacctcgataataaaaagcggttggtgtaaattattcttttgtgtcacatttttagaaggaaaaacataaaagaatgtatccttagtactggttcttaaacagcccataaaaacccattggcctgaagcttatatctcaggcctatgcccatcttatagtcttggaagacaaaaggctggtagagacagtcttcagtggcttcagtgatgctctgtagaggccagggtgtcttgagtgctgtaactcccaagcactgggctagcctgacttctgtatctccctaccaccacccccttaaaaaaataaggtaacagcaaatctatagtaaaaccatgtctgcatagaacgtgttcaaatcctctgttttcattaaatgtaaaagatgctgtctccattaagttgaatatttggaattggagaagccattgattattattttgagtttctgtaatgttttatagaaaagtaagatgcttattcagaatttaagaatgaaggcaactgaaatatgcattgttgtagttatttatatttcaaactaaaaataagcaaaaaaaaaaggctggtttgagaaaaatcaggtaaaattgatgaaacggagggggggtttctctttccatcatctggtttttaccatttcactcagtaggtatttttaaaacacacttatttgaggaaagagacatcagatgcacaattttacatttataaaggaacaaatggggaaaactgaaaactaaaaattttaaatgtattaaatgccatccctgagcctaaatctagtatttgtagtttatttctaggtctgctagaacctgaaaacctgaatgaaaaaaggtgtgctgacactaatcaagtcctgtgaggtttaaattattgacctatccactctacctccattgtacaaaaaatattttacaacaagcctgggtaagattcaacagcatagtagttttgtatccaaggttacttccccacaaccactttaaacataagaaatgtggtggcaatataaagtttgtagcctttccaataaaggtttataaaacagttaaaaaaaaaaaa

SEQ ID NO: 60162 - DNA, 1592 bp, Homo sapiens
ttttttttttttggcagtgattcacagtgcactgattttaatttacagatcaaaagccacttatatatatctgcagacacacgtgctgtcccagggcagaagcctggggtccaaaatcagccttaatccctcctcatgcccacagtcagcctcaatgctgtctccgttcccatgggccagcaacaggcaggcgccactctgctgacatgaagaccttggggtagcctaaacatttgactacccaagcccagaaaggagcttgggtccagcccttacggggaattcctttaattcccccagggccagggtgagtgctgacttcagtgatgacaacagctgtaggaagtaggggtttggctttctgggcccagatccacgcccttgtcctctgttcattcacctgggaagggcaggccacactgacgtaatcctctggccactttctggaagaagctcgttccacactctggcctgtcttggctggatgtttcaaagagctgagctttgatatctgtaaagagaagtgactaaagcctcatacctgagaattagataaacagacaaaagggagggctagcagttcagggagtctcctggaccccacagttcaaggaggccaggaagacctcctagagcaccttgccctggcagccaaggcagtccctattttctttgatccacccagacagccacacacccccaccccccaaagggctgaggagcagctactgtctgcatagtcctggacgtcgtggaagtccacacgtcgacgcctccggtcttcttccagcaggtcactcttggtgccacataagtagatttggcagccctcctctaggctgcgcagttccttcacccagaactttgctcgctcaaagctgctgctgtctgtgaggtcatagcagacgatggcagccttggcaccccgatagtagattctactcatggcctcatagcgctcagagcctgctgtgtcccaaatacctaatgtcacagtccggtctccgaccgacatcaccttggccacgaaggcggccccgatggtgttctgataaggccccaccagaaagcggtcgtgcacgtagcgctccaccaggctagtcttgcccacgtactccttgcccagcatcaccaccttgacgtccacgcgctgcccgctcatgctcccggggccgcttcagccacgtcagggtcctgagcggggacgggaggcaaaccccgatctccgctcggcccaggcagcgcccaagcctcagaccccgaccccaaacggcgccaacctacgactccagacagcgcgtcgggctcgagctctggccgtggccttgcacttcggcagcgccccgtgtgcccccgctgttcggccccgggcgccgattatccttcgaagaccccaagcctcggggcggcctgggagcgcgcgggacagcgtcctcaacagcgcagcacgccgccgtgcagctcgctactccgtcattcgctcgcctgcccggcttaagctccgttctggctgggaatcccaaccgaacctggggtctcccgcaacccggctcctacccgcagcgccgcgactcccgcggcccacgcgtccg

SEQ ID NO: 60163 - DNA, 983 bp, Homo sapiens
attagtacagtgcggtggaattcgacggcggtcggcgtggggcgctatgccggggcggcacgtttctcgagtccgggcattgtacaagcgcgtcttgcagctgcaccgtgttctgcccccggacctcaaatccctgggcgaccagtacgtgaaagacgaatttaggagacataagaccgttggttctgacgaggcacagcgtttcttgcaagaatgggaggtgtatgcaacagcgttattgcaacaggctaacgaaaacagacaaaattcaactggaaaagcatgttttggcaccttcctcccagaagaaaaacttaatgactttcgtgatgaacaaattggacagttgcaggagctgatgcaagaagccacaaaacccaataggcaatttagtatttctgagtctatgaaaccaaaattttagtctatacaacaaagcttaataagacatgcaaaaatttagaacccctactttaactgtcattggtttttgaaatatatttaagctttgaaaacacctgttattaatgaaatactcttttattttggatattatgattgcagtatatggatcaagatcactagtgacaattgaaaaaaactattggaataatagcacttgtataaaattcagttttggaactaaacagcaaatttctagaattttgctgaaaatgttttaaaatgctattctcatccagccatattagtcttctggcttttctttagcttcatcaaataagcatgttgtgataatgatagatgtacaattccaacaaggttattattttttaaatacattgtcattctgaacattttatcacttctagtttaataatacatacatgatttttcttctgaatgtctcttctccctgcatcactgttcattcacaatgaaaggttaggaagaagctttaaaattcactattttactatcaatcatttgtataataaactatacaaagtataaaaaaaaaaaaa

SEQ ID NO: 60164 - DNA, 1942 bp, Homo sapiens
gaaggattaaaaatatataatcaaattttttttttatttttctacagcaaaataaaaacattattttaaaaaagcaatattctacattaaatacattaagatattgacaattttataaatacaatcattttaaacagtaaacatgataaatttctgatacaaggttttacatacgttaattgtgaaaatataaaaactttacacacttctcttaaaaagcattcaacggtaatcaattttacaaaattatcaatttaaaaagtgttaggatatgcttctattttgttcccattattagggccaatggataggcatatcagatcttaaaaaagaaatggtgaattagggcctaagacatccctatattgcctaaaaacgaacatttcagagactttcttaggcactgagttcaaaaccagtgaaggttgccttctccctaggcaccactacccctcatggttgtccgaatcaggagacttcttcctggctacccttagggagagtcttctacacctattatttcctagtttctaggagaaagggtttcagaaagaattttgacatttaaattctatgccagtactgaaactctcccaaagattgaggcattctgcatttgaattttatacagaaagtcatgaatctaattccaaaagaaaagagtgcacttcatttggtcacttaatttcataccacttggcgaggtaggataactttcttctttgacaactgtctcgactatataaatggtgattataccggaaagggttctaatgccttttccacattcttccagttgtgaaaattctctctgtaccattcaattgttttctttattccttctttccaaggcactttaggtctccatcctaagccatgtattttttctgacttcattgggtatctcatgtcattggtgggtctatcattaacataatcaacccaattttccatttcagactctgaattggtctctttgatcagttgtattagttctttggcaagctggacaactgacatttcaaaattggttccgatgttataaatttcacctggtttcccttttttgaggacagtgagaaatgcttctacaacatcagtagcataaaggaagtttcttgtttgaagccctgacccatgaatgcaacatttcctgttgtgctgtagcaaagatataaattttggaataaccttttctggatattgatgtggtccataaacattactgcttcttgtgatgacaactggaaacttatattgttcccagtaagactgtacaaaacattcagcagctgctttagatgatgcataaggatttgtaggttgtttgggtgaagattcatcaaattccttatcaagactgccaccatatacttcatctgtgctgacataaataaacttctccactctggcttcatgagcagcacttaccaaaacgtgagtgccataaacattaacataggtaaactcaaaggcacgtacgaatgaaagatctacatgtgtttgtgcggcaaaatgtagtactatatctattttctctgtttcaaaaagcagtttcacaaagtgagaatcacatatgtcaccctgtataaatttgtagttctgtttgttagaaatggtttcaagattcttcaagcttgcacagtaatccagcttgtctagatttatgatcatatagtttggataatcttccactaaagagacaatcatatgtgatgcaatgaaaccagcaccgccggtcaccaggacccgcttcgcaaagccgccgggaagaccccacggttcctcccaacacgccgccgacatctcccagctcagcagtgcctagtaccgtaaagagtatggtctgaaaagcgcagggaagttccgccgcgaccttttgcgacgcgcctcgctcgcgggacacgttaacagagcagccagaggcagcttccctcgtgcc

SEQ ID NO: 60165 - DNA, 425 bp, Homo sapiens
  misc_feature (1)...(425): n = a,t,c or g
ccacaacgctatcctcgagaacttcggcatttaacaggagnccagcgngaggtgcagctggtggagtccgggggaggcttatttcatccgggggggtccctgagactctcctgtgcagcctctggattcaccttcagcaactactggatgcactgggtccgccaagctccagggagggggctgatgtgggtctcacgtattaataataatggggataccacaaattacgcggactccgtgaagggtcgattcaccatctccagagacaacgccaagaacacactgtatctccagttggacagtctgagggtcgaggacacggctgtgtattactgtgcaagagagggcccggtctactatcatagtagtggttattactctgtaataggccagggaaccctggtcaccgtctcctcagcatcccc

SEQ ID NO: 60166 - DNA, 1458 bp, Homo sapiens
  misc_feature (1)...(1458): n = a,t,c or g
ttttttttttttccaggacgctcacacttagtttttattagccacagtttcccacagttttctacctcctaggaaatacacagctcaccaagggcacccagtcaccattctgtcctgcttgcatggctgacactgttgctcaccgagggtgagcagatctgcaaagtcacccagggcctggtttcctcaggtacagagaaccccaaagaaagaagagccagaacttagagcccctttcttctccatatgggataggacacccaagacaaatgacccatgcatcatgaaacagaggcagggccctaagctgcccaagaggcctgggcacttggagttcctgccaacagccaggccactgaaccattgcctgtccaccctcccacagtggctaatccctggcctagttgtaaatgtcttttcagcgctgcacacttaatgcagtcggatgccttctgattactggtctctgagaccttcagctgctgaggtgcaagaatcaagcatgggcatgaaaggcaaagggctaccacagcagcatcgttctgcctccaccctgggctacgcgacccagcccagcaggctgtgacctaggagagctgctccagcctggggcatgaggggccctagagcaggatgccggggctaggagtggactgccctgctgatgggtcgtttttctgtgaagaagcttttcaacagtagcacctgactgaagctgaccacgaacagggcaatcgtctcgccaacagaccagtaagagactcggctattaaggtcttccgctcgggcccggtcctgggcctcccgcagccggtaatgcgtctgggagtcaatcaccgttttcagagcctcatggatggtcacgcaggcggactccatctgggtgagagctgtgaccctgttccccatgtctgggagaatgggaggctcatcgcccacttgaaagtcaaagtagacggtcttgtgagagaaggtggaaaactcattactgaagcaaaactgataaacgcccttgacttcagcccggtacgtgaagctgtcgtactgcttcttcgtttctctgtagatggtgttcccctgggggtcctctacatagcagtcaacatcgtagtggcctccagtgatgacctggtaatccagggagaacttcacgccctgctccacctcctcgtggaagcactgcttggcgttgtccggcagctcgaaggtgagctcggccccgcagggctgctcggcccggcgcaggagcagcagcagaagcagcacggaggcggagcgcgggacagtgctgcccatgatgctctcggtcccgtctcgagggccgcggctcgggcgctgcgcccccggcgggctggggcgacgactaccgaccgggtcctaggaggatgtaaggggataaacgtggcaccagcggagctctgcgccggacgcgtggctcgaccggaanttgcggagcgg

SEQ ID NO: 60167 - DNA, 1271 bp, Homo sapiens
ttttttttttttgataataaagtggtttgttgagatttaggattttattattatttatttttagaaaaaagagaaaatttacaagatgcaaaggtctcacacaatacattatcattgatgattgctctcttgacacttcaacacgggccctggcaataaaaagaacatggacagtgtgagtgtattggagaacccccgccatggacacgcagaatacaccacagtggacttgatgacaaatgatgctgggccagcctgttccaaaagcaagccaagatgtggtagaaaccaacaaagcctttctgtgggggaggcacgagcgcacaccttctaccacatgcgcacccgccccctggcccaccggcagtgcccactgcatcactccaccacagcaacaacagaaaacgataaaacggtcctttggtgttttttgcagagctattcaggttcccaaattcttatttctgtcttcctcttcatgtttcagttccaaattcttaaagtagtgtaggtgcttagcatcttgaatttttcaggatccagttctgcccaatgataacacactgaattctgcctcctgagctacggctcccgttcagaggacacgtcgccctcagccccgctgctggcactgcggtcttcttttcggggagtgtttctttccttgcttgattcagaaggtcccttagctctggtcttttctttcctctgctgctgtttttcgagctttgacagctgctttgggtcagaggtagcagtgccgggagctggcgattccagctctatggtcacaggcccatcattctgaatgtgcacctgcatgtaggccccaaacttgccatctttgataagctccggcctgtatgttttacgcagctgctccaggaagctgttgtagaagccctctgcctgctccgtgggcattgctaggtggaaatcaggcttgtttcccttcaggacacactggagggtaaactggctgacacacagaatctcgtactgtttgtccatcacactcttcgaccagtgcttcccactctcatcctcaaatacacgcaggtttagaatctttcggaccatgtgttccagttccttctgcgtatcctccagggaaatacccagcaacacacatatgccccttccaatggcactaatctgctctcctccaactgtgacgctggcccgggtgacgcgctgcaccacggccttcatggcggcggctggggcgagtggggcggcgccgcgctgcgtccggcctcgcgaattccacc

SEQ ID NO: 60168 - DNA, 1316 bp, Homo sapiens
ttttttttttttcaaatggccaaaagcaatttaatttttggaggaaaaactgcatacccagtacaacttatatctcaggcgaaatgtctcaaaatcttcctgctcattggacaaaaactcagcttcaccacattgccagccgggagaccatgaaagggaactggcgccactgcccccagctgcccttcccaggggcgaacttcaccaagatgtggaaatcctgggcccaccccacagtcagtcatcgctccatttcttcctggcaccaccacctccatctggcctgctccccaaccccccagaagcaggtgggcccaggctccaggccagtgcccccatcaagatcagacgtaaggcatcttcccaccgtcgctgtgctgcggggacttttccaatccttccttcctctctgtccagaggctgccaggctgagggggccaccgtccaggtggaacaggcacaggcatcggggaatcagatggtatcagtggggatagggcacagcactttcctgggagccatgtgacgccagatcttcctctggcagttcccactggctgtgggaagtggttttcataaagggggccaacttccaggaacatctagggctcgggagcaacccagcattgacagtgaatcagaatccacctagagctggccatggcccaggcagggggtgtcttccccacagcccccaggagtggctgcacctagtgggcgcagcatttggcctgcctcgcgggccccttgttcagagccacagctgcatccccccgtagagcctggccctcctcgtcgcttctctgcagtagctcttgggccactgtattgaacacctccgacacctggtggttcagtttggccgaagtttccatgaacagcaacttctggctgtcggcaaactccttcccttcctggaaggtcacctcccgctcctggctgaggtccgtcttgttgcccaccagcatcaccaggacttctcctgggtgcagctcctcctccaggtccttcagccactgctgagccttgaggaaggaatccttcctggtgatgtcgtacaccagaagcgcagcgttggcacccctgaagtagaggtggcagacgctgtggtacttctcctggccagctgtgtcccagatctcaagcttcagagaggtggcacccacatccaccacctttgtgaagaacgcacccacggagccacttcccaggagaaccagcttgaacacacggggctggctgggggcagccctgggctggggggtcctgtgtgcctgtgccatgccctgttccccaggcccggtcactctcgtgcc

SEQ ID NO: 60169 - DNA, 1805 bp, Homo sapiens
gcggccgcggcgggaacatggaggagctgctgaggcgcgagctgggctgcagctctgtcagggccacgggccactcggggggcgggtgcatcagccagggccggagctacgacacggatcaaggacgagtgttcgtgaaagtgaaccccaaggcggaggccagaagaatgtttgaaggtgagatggcaagtttaactgccatcctgaaaacaaacacggtgaaagtgcccaagcccatcaaggttctggatgccccaggcggcgggagcgtgctggtgatggagcacatggacatgaggcatctgagcagtcatgctgcaaagcttggagcccagctggccgatttacaccttgataacaagaagcttggagagatgcgcctgaaggaggcgggcacagtggggagaggaggtgggcaggaggaacggccctttgtggcccggtttggatttgacgtggtgacgtgctgtggatacctcccccaggtgaatgactggcaggaggactgggtcgtgttctatgcccggcagcgcattcagccccagatggacatggtggagaaggagtctggggacagggaggccctccagctttggtctgctctgcagttaaagatccctgacctgttccgtgacctggagatcatcccagccttactccacggggacctctggggtggaaacgtagcagaggattcctctgggccggtgatttttgacccagcttctttctacggccactcggaatatgagctggcaatagctggcatgtttgggggctttagcagctccttttactccgcctaccacggcaaaatccccaaggccccaggattcgagaagcgccttcagttgtatcagctctttcactacttgaaccactggaatcattttggatcggggtacagaggatcctccctgaacatcatgaggaatctggtcaagtgagcgggccttactctggaaggaggcctcagaggtttctccacagtcctcttctgggcaaattcttgtttcttcacatgccggactagcttaagaccaatgcagtagcttatttccaagccttgcaaagtatataatatctaagaggaaaggttttgtcatcccagcgttgtccactttgtggggctttgtaggtagacggagccacactacaggcagggtatgagcagagggatgtatggagtgtgggtgactctgagcctcactgctgctgcaaggtggggaaactgtaagtgaacccctgtgggtgcgggggagggtatccggtgcgcagggaggtggccagcgcccccgggcactgctgctcataggtacctttccgctgcctcctccctgctctcctgtgcaggaatgtctctgagctgttcacgttgatgcttcttggttggcaagacttgggtgtagacatgaaaccatcttactaaaagcgtcttaaaatgaccaattccagaatcaagcgtattccgttttcttcctgcatgatccctgggccctcccgcaggctgagcaagtctgtaaactgattctgggagaaaccaagctgctggccgtagggtgtccttgggtacatccaggagtcttcattgcttctgttattaccccgtctcctctgccattttctacagcttgctgagttgtcattcctttgcaacattaaaatacatgctgaactcatatttttccttccttcactgttgtagtaaagagacatatttcatgaatggcattgatgctaataaatcctttgcacaaaaatttgaataaacttccagtggtttcgataatgtaaaaaaaaaaaaa

SEQ ID NO: 60170 - DNA, 1390 bp, Homo sapiens
  misc_feature (1)...(1390): n = a,t,c or g
ttttttttttttctctttgtaagtagtgtattttaaatagctttcaagatacacatattttttcctttaaaaaagtctgttggagcagttttgttcttgaattttgctggtcatcctcatggtcccgagcccccctactccgggtcgtggaggcggccgagggggaggctgggggcccacgtggcccgtcctggcggcacctgcagcactgggggagccgctgaaccccgtgcttcagcgctgggggagccgctgggccccgtcttccgccacaaaccatgcatggccgccacgtgagctcaaacgtccgtttatttcaaagcagtaataatttaaaattataaaaatctttccaccgctgaacgtttagagggtgaggttagacagaggacggggaggctggggacgccccagaggggaccatgtggcccacgccttcccaagccagggggccggtgggccgggcccgggtcctgccctggaacaggcgggacctgcagcgctgaccagccaagcgtggcgccgccggggcacccagtctgtgggtgccgtgtggcgctggctgagggtgggtgggaaaggccccgtgctttcccgacggccgacgtgggctcacgagttgcttgtggcgttctcgttgctgggcgagctggaggaggacgatgacgacgaggaggagaagctcaccccagtgaggccaggggggttcgtggccgtgttctgtcccgtgaggctttttcggcagacggggcagctgtcgtgctgctccagccagggcacgatgcagccgtcgtggaacaggtggttgcagggcagctgccgcacacgctcacccagcgcgtagtcgtccttgcacacagggcactcgagcccggagcctacgtgctcctcagtgacggggacggtggggagggcctggattttctctttatctgccggtggggggcctgtgttttcaaactgattgaggagctgtgtgatgatggcatccaggccgttggccccccaggcgtagtccatagggtttgagtgcaggactccccaggggcccaggctggggatggtggcgggcgtgatgatgccgttgacgagctgctggatgatcccttccagcgtggggacgccttcgtgccggccggtggcccnccgcgtggtgaggcgggcgcggggctgtcgggcgccgtaccggtgccgggacggatggtctctctcccgccggctctcagggtccctgccgtcgtcagcctgcgccccaggagggaacgtggggatctcgaagctgtcctcgaagatgccgaaagcaaactgtccgtagccctgcggcagcgtgaacaggtgctggtccatgtgctccaacggtggccggctcgaattccaccgcactggacta

SEQ ID NO: 60171 - DNA, 1959 bp, Homo sapiens
ttttttttttttggggtctcagttcactctttccttgtttattaaatatcaacttttcctgcctaatgggctgaggttcattttcccattcctcaaggtaagggtagactacctaggaacttattgcatctttaggccagctggcttagtgctacccatctgaacccccagattactacccaagtcttccttttgccccttcctgccctaacagcaagtaccaggccagtcccttccccagcaaatgccaggggcttcatgtgaagaggaactggccacaaggctgaggggaggaggagaaactgtttctgcaggaaggacagcagtgcctccaggctcttgggcatcttcacatgtttctagataaggacaagctcaactctggagcctctggtaggcagaagaaaggaggcagggagtatggcctgggcttcagataccgctgttctggatggatccacagatgacgaaggcaaggttcctgggacctggagtcacacagggccatagccaagccttttcactagaagggcaggcagtgcccattcatcttgtcagaggcaacctcagctgtggacccgaatggagtgagcaaagggagtccaggcctccactctgctctagagatggcagtgtccaggctcctgattcccaggaagcagggaagctaaaggaaacctggaaaggcactctggagcagcaggatggtcacaataataagcccgacacacagcaggagcaggagccacacaggaacactccgccgtgagggcaacagatgcagctggcaacgactgtccacagccacagagaacagggcagtttcatgggacccaaggagctctggaccacgacccttctcaggtagaaaggccacatccgtcaccacaatgccatgggcctccctcacgtagtagaggcactggagagagaaagctatgtagatggcaacagagccagtgactgtgcccaggcctaggaaggtgccggattcactgacatcgaggcaggagacgacttcatggccacaggacttggtccgaaggggcaagaagttggagccatcccaggctgtgaggtagcagggagggggctggcgcaggcgcttgtggggaatttgcactgtgaagagtcgcaggccagcaggctggtctggaacctgcccaaacctgcaggcctggtagcggtaaggtgtgctggaaaaggtgggtccattttcttgccagtgcagctgtgtcaccagctgatccttctgccacacagaggccttaaggtcccggcccacggttaccaacttgccatcaggccctaaagccaggtcttcaatctccccttcgtgggctttgaactccagaaccttctccaggctgggcaccttccagacacggacgtagccatctgttcctccagtggcaagcagggtattatcgtggttgaagcacacaactttctgcagtggatcggagctaaagtctgtctgcaccgcctgcaaattctctaccctgagttctagcccctcgtgctgggtttccgctccacatttcttctctgctggggctgctcccttcctttgtcgaggcccctgctccttggaaccggccttctctgccttgttgccctgctgttgatgtgcctggaagcgcaggagctgacagtgggcatcctgccctgcagcaaggatgtcaccagccagtgccaagttcatggtggcccgtgtctctgtgtcatgggagtgcagcaaggaggcactcaagcgcccattaatcagctctagctgcagaaagtgcacgccattctttatgcctgtcttggcggcgcctcctccgcccgcagcgatgagcagcccagtgctggggtcgacctgaagcgcgtacaacgggaacggagcacggaacagctctggcgcccggcgccggcccatcccgaccggcgcgcgttctcgaattccgccgctctctc

SEQ ID NO: 60172 - DNA, 1145 bp, Homo sapiens
tgtggtggaattcgccaccctgccgccctgccgccctgccgccctgccgccctgccgccggtggtcgctgcccgtggtgctccgtcgcccccgccacctcacgtcctcccgtgcgtcgggagcgtctcggctacaacatgttgggcatgatcaagaactcgctgttcggaagcgtagagacgtggccttggcaggtcctaagcaaaggggacaaggaagaagttgcctatgaagaaagggcctgtgaaggcggcaaatttgccacagtagaagtgacagataagcctgtggatgaggctctacgggaagcaatgcccaaggtcgcaaagtatgcggggggcaccaatgacaagggaattgggatggggatgacagtccctatttcctttgctgtgttccccaatgaagatggctctctgcagaagaaattaaaagtctggttccggattccaaaccaatttcaaagcgacccaccagctcccagtgacaaaagcgttaagattgaggaacgggaaggcatcactgtctattccatgcagtttggtggttatgccaaggaagcagactacgtagcacaagccacccgtctgcgtgctgccctggagggcacagccacctaccggggggacatctacttctgcacgggttatgaccctcccatgaagccctacggacggcgcaatgagatctggctgttgaagacatgagtgacccactgaaccaagaacttactggaagtgtgcctctgtgtctccttcctcgggggtaaggaggggacagtgcttcccaagttccagctgcaagtccaacttaaccaactttccttcaaagtcagttactgccaattttctgaaaaaagcatgttccatatactaagtctcttttctcacggtaggaaataatacagccaagatatgcagcatccttctcattgatgtagaaaattctgcgatagaccagaaaaatcctggcagcttttctccaggcatctgggtcactaaaaactgattttctaaaattattggatttgtattttgttattaagggggaaaatgtgatttgtgcctgatctttcatctgtgattcttataagagctttgtcttcagaaaaactaaaaataaaaggcattgacttaaaaaaaaaa

SEQ ID NO: 60173 - DNA, 2018 bp, Homo sapiens
gaagctcatgtatgtttgcatttcagtgattcgggttctgacctgccgccacccatcacggtcagcgtggtgcatctcaccgaggaggcgcaggcctggattcttttgagtggtgctactgcctaggaagtaacacgtggagaatttccatcttgggaccatgcacacagtgccttggggagtagattttgccctaatagcgatgaagaattttatcagtcagtggagttcctttttcagatcagggatgggaaagagccaaactgggtacctcccacgtgtgccccgtgaacagccctttgcagctgggctgtggggcttggctgctgccctgtcccatctggcagttaacgccttctccctgctctgccccccactccccaaaaccagttgcagcctcaacccacatggggatgtagaaagccgtaaagtccacgctactgttgaaaatgtttacatctccgctctcaacctgccttgggttcgtgttaaatggtgttaaattctgcaaatggaggggaaaaaaatcaaattctaaatttcaaagtagaatttaaagcaaatttgtaaaaaaattatcctaccaccccttttggtccacttaagatatgccacgctgaagcaaggtatttcctactggattttgctttcactggtgtttagaaaataaacttgatttctctaggagcactcctttggttagagggatgcaagaaggagaggtgaaggtggcgtgtggtggctcatgcctgtaatcccagcactttggggaggccgaggcaggcggatcacttgaggccagcagtttgagaccagcctggccaacatgatgaaaccccatctctactaaaaatacaaaaaattagctgggcatggtggcaggcacctgtaatcccagttacttgggaggctgaggcaggagaattgcttgaacccaggaggtggaggttgcagtgagctgagattgtgccactgcacttcagcctgggcgacagagtgactctgtcaaaaaggaaaggcaaaaaccggaccctggagctctgtgggccctgattgcaggcccctccctgtgtgatgagggatgagtcagcttggggagccacttggccagcctgcatgcctggtcatcaggaggttgagaaaagccttgaaagttgtgaagcactgagcagatacaagtgtttgttaattttgtagaaattaactttcccatctggcctttatctccaaagttggtattgttgctccacgcagactgcagtccggtttcttattgtgactttgacaatgcaaagtgcaaaataggaagaggcctccccaccccactatcccaccctggtgaccaattcagtgtaaccattgcacgtactcagtcattggtgtctttggagtgacatctgcagccagttagtgccacctgagtacagcactcgtacttttacatgatgtgtgtgtgagtagctcttctgtccaaaccatgatttgaggttcaactacctgtagatcaaagctttattttagaacgataaactgattttttccaaatgggggaaatcttctccccatgactatgttttcttaactttgcattgaatctatttactgggttacattctatgtgtagttggctttcttcatttttttttcttttaaaaagctcatgtcttattccaagcaccttcctccaaagtccccataaagctgcatctccaacacattgttatgcccaataaggttttatttaactttatttaaggatgattgtgtctttgaatgacaaatgtactgctgcttcctacctgcaagacgcacaatgtatgtttcaagggtgagcaagtgttatttcttaaatttctcaaatgcctgtagtaactattgtttctgcctctcaattgttgccagctctttgaagaaggggagaattgtgtgtttttgtgtggggatgtttctgatatgctgctacagttgcaaaacactggagctagagaaaataaagtactgatcttcgaaaaaaaaaa

SEQ ID NO: 60174 - DNA, 1467 bp, Homo sapiens
tgtggtggaattccgaggaagggcagtgggccccgccgccgcctcccaatggcgaggctgcgggattgcctgccccgcctgatgctcacgctccggtccctgctcttctggtccctggtctactgctactgcgggctctgcgcctccatccacctgctcaaacttttgtggagcctcggcaaggggccggcgcagaccttccggcggcccgcccgggagcaccctcccgcgtgcctgagcgacccctccttgggcacccactgctacgtgcggatcaaggattcagggttaagatttcactatgttgctgctggagaaagaggcaaaccacttatgctgctgcttcatggatttccagaattctggtattcttggcgttaccaactgagagaatttaaaagtgaatatcgagttgtagcactggatttgagaggttatggagaaacagatgctcccattcatcgacagaattataaattggattgtctaattacagatataaaggatattttagattctttagggtatagcaaatgtgttcttattggccatgactgggggggcatgattgcttggctaattgccatctgttatcctgaaatggtgatgaagcttattgttattaacttccctcatccaaatgtatttacagaatatattttacgacaccctgctcagctgttgaaatccagttattattacttcttccaaataccatggttcccagaatttatgttctcaataaatgatttcaaggttttgaaacatctgtttaccagtcacagcactggcattggaagaaaaggatgccaattaacaacagaggatcttgaagcttatatttatgtcttttctcagcctggagcattaagtggcccaattaaccattaccgaaatatcttcagctgcctgcctctcaaacatcacatggtgaccactccaacactactactgtggggagagaatgacgcattcatggaggttgagatggctgaagtcacaagattttatgttaaaaactatttcaggctaactattttgtcagaagccagtcattggcttcagcaagaccaacctgacatagtgaacaaattgatatggacatttctaaaagaagaaacaagaaaaaaagattgacttttctttatcttctatgaagggtctgtaatgaaatctctaaataatttttaaaaattgttcatcaacttctttatgttttattagaaaaaaaactgttttaatgtgctttatcataaataaatatcctgacaaatggtattgaaaaaaatctgagatcatgtgaacatataatacaatgttgattttcttctggtgtattttgcacagacaagcatctgccttaaaatatatacacttgtacaaaaaggaagtttggagtaagtgcttccattttggtttcttgctcctctttactctgttaacatatggtgccttttacaaatgtat

SEQ ID NO: 60175 - DNA, 4120 bp, Homo sapiens; identical to SEQ ID NO: 58869

SEQ ID NO: 60176 - DNA, 1419 bp, Homo sapiens
ttgggagtagtgtctttattcattaaaagcctgaggtctgaccacccctgtaaaacctcgtgccccacacagtgcctgtctgaagtccttctgtgcccaaatgtggagcaggctgcagagacttgaagcctggggttttgtgcctcctttttgttttgttttttttgagacagagtcttgctctgttgcctaggctggagtgtagtggtgtgatctcggctcattgcaacctctgcctccagggttcaagtgattctcctgcctcagcctcccgagtagctgggattacaggtgtgcaccaccacgccaggctaatttttgtatttttagtagagacagggtttcaccatgttggccaggctggtctccaactcctggcctcaagtcatcctcccgccttagcctcccaaagtgctggaattacaggcatgagccaccacgcccggccatcttcttgccagcaactcttagaccaggaagcctcggatggcagctatgaagtcctgtgggcggtcagcgtggatccagtggccagcgttcggcaccgtctgcatctgggcccgagggaagagccgcataatctcagggtggtggctgggatgcacgaactgggagtttccaccaaggagaaagagtgttggcccgaggtaggactcctgcctctgtgggaaagccaagatcttgtctaggtgctgggtcagggcatccaagttcaccctccacacgaagcgcccgtctacctctaccaggttagtgagcaggtgctgccgcacggccatgtcctggatgacagaactgagctgttcatccgccagttttcgggcacgggagcggggcagctcatctgcgatgttgatggccctcatggctgccacgtaggttgcaaagtgggagacacctgtgctttccactgggctgatatctacagcaatgagacgttccaccagctctggcctctgtagtgccagcagcatggctgtctttcctcccatgctgtggccaacgacgacgcagggcaccaggcccagctggggcagaaggtcctgcaggtcctggctcatgatctcgtagctcatgtctgggctgtgggggctgtcaccgtggttacgagcatccaccgtcagcaccctacggcctgtctgctgggccaagatcttggcgatggagttgaagttagttttgctgccgaagagcccgtgcaaaaagacgacggccgggagggctgcctccccgtccagaagcctgtaggaaagcggaagcggcctcggctcggcgccccctcggccgccgctgctgctgctgggtgcgacaggcaccctcgcgaagctagggccgtgggggccgagtccctcacgcgggagcctccaggctcgggtccagcggagcatgcttgcaagctgttggccggctcgcatctca

SEQ ID NO: 60177 - DNA, 2531 bp, Homo sapiens
  misc_feature (1)...(2531): n = a,t,c or g
ctccccagggccgagtcttccggagtcagcagagagcctggatggatcacaggaggataagcctcggggctcatgtgcggagcccacttttactgatacgggaatggtggctcacataaacaacagccggctcaaggccaagggcgtgggccagcacgacaacgcccagaactttggtaaccagagctttgaggagctgcgagcagcctgtctaagaaagggggagctcttcgaggaccccttattccctgctgaacccagctcactgggcttcaaggacctgggccccaactccaaaaatgtgcagaacatctcctggcagcggcccaaggatatcataaacaaccctctattcatcatggatgggatttctccaacagacatctgccaggggatcctcggggactgctggctgctggctgccatcggctcccttaccacctgccccaaactgctataccgcgtggtgcccagaggacagagcttcaagaaaaactatgctggcatcttccattttcagatttggcagtttggacagtgggtgaacgtggtggtagatgaccggctgcccacaaagaatgacaagctggtgtttgtgcactcaaccgaacgcagtgagttctggagtgccctgctggagaaggcgtatgccaagctgagtgggtcctatgaagcattgtcagggggcagtaccatggagggccttgaggacttcacaggaggcgtggcccagagcttccaactccagaggccccctcagaacctgctcaggctccttaggaaggccgtggagcgatcctccctcatgggttgctccattgaagtcaccagtgatagtgaactggaatccatgactgacaagatgctggtgagagggcacgcttactctgtgactggccttcaggatgtccactacagaggcaaaatggaaacactgattcgggtccggaatccctggggccggattgagtggaatggagcttggagtgacagtgccagggagtgggaagaggtggcctcagacatccagatgcagctgctgcacaagacggaggacggggagttctggatgtcctaccaagatttcctgaacaacttcacgctcctggagatctgcaacctcacgcctgatacactctctggggactacaagagctactggcacaccaccttctacgagggcagctggcgcacaggcagctccgcagggggctgcaggaaccaccctggcacgttctggaccaacccccagtttaagatctctcttcctgagggggatgacccagaggatgacgcagagggcaatgttgtggtctgcacctgcctggtggccctaatgcagaagaactggcggcatgcacggcagcagggagcccagctgcagaccattggctttgtcctctacgcggtcccaaaagagtttcagaacattcaggatgtccacttgaagaaggaattcttcacgaagtatcaggaccacggcttctcagagatcttcaccaactcacgggaggtgagcagccaactccggctgcctccgggggaatatatcattattccctccacctttgagccacacagagatgctgacttcctgcttcgggtcttcaccgagaagcacagcgagtcatgggaattggatgaagtcaactatgctgagcaactccaagaggaaaaggtctctgaggatgacatggaccaggacttcctacatttgtttaagatagtggcaggagagggcaaggagataggggtgtatgagctccagaggctgctcaacaggatggccatcaaattcaaaagcttcaagaccaagggctttggcctggatgcttgccgctgcatgatcaacctcatggataaagatggctctggcaagctggggcttctagagttcaagatcctgtggaaaaaactcaagaaatggatggacatcttcagagagtgtgaccaggaccattcaggcaccttgaactcctatgagatgcgcctggttattgagaaagcaggcatcaagctgaacaacaaggtaatgcaggtcctggtggccaggtatgcagatgatgacctgatcatagactttgacagcttcatcagctgtttcctgaggctaaagaccatgttcacattctttctaaccatggaccccaagaatactggccatatttgcttgagcctggaacaggtacttggagaagggtgggaaggaatctgcaggattgcacctgcctgcccctcaaccccacccccacccagctctgatgtccccgggccagcatcctgcccccgtctcttcccaccctgggatctgcttcctgtctccacagtggctgcagatgaccatgtggggatagaggcgctgtaggagcctggtcatctctaccagcagcagcagcagcgaggttctagcccaggagggtggggtgcttcttgtagccctcagctctccagtctctgctgatgaaatgggctccaagtggcagtgccccggtcccaggtgccgngttactgcagcagtgggaccttcctgc

SEQ ID NO: 60178 - DNA, 2103 bp, Homo sapiens
  misc_feature (1)...(2103): n = a,t,c or g
tttttttcaatgtgaaaacacttggaagatggtttaatgatgttttacaacagaaatgaactgtacagttacagtaagtttaatatatatataaaaaattacagcagacaaatgcatctacacaaaatctaccacttcattctgattcactgtcacctacacaatctttcccaagcctacagcccctgcaggcagccctaggagggggaatcatctaaagggcacttttgagagagacagcaccgctcatattccccgccacctcctcaggcttcaggaggcatcagctaattccccaaaatgtaaagttgcctgtgtttcaggttttcaaaaccaagaaaacgtgtgtctcccaggggcacagataacaaggtccagcacgcaagttatcagctgattcttagaaaatattcctatcagaggggaaatatttggctaacaggcactctggggcagtaaggctacacaatagccacccagagtgcagagttatctaagagaaatgtagaaggactcccaataaaccacctcagaattgtcactgcctcattcaagctgctggacaattttggaaagaatcatttacaccacatcttaagtttccacaaagaagaactcaaactcacattttaaagtacataaaacaaaaagttctaggaggccgggggccaattccccttgtgcccctcctttgacaacagtggacaaacacccctgaattaataattaagacaaaaaaggaagaaaaaaaaagtgagttaagatattgaaagagagaaagaaaacatctttagaaaaacacgatcactgtctctttaaaagaaaacaaaatcccagttgggaacagtaatgaggaatatgcaatctaaattgacacctggtgggagattattattgaatattatgtacactcagaacttttttcattttcttttttattatgaacacctaggcagtgaaaactgttatgttaatacatacatagacacacccaaaacatacaaaaatactattatttcaaactactaagaataggacagttcaattattttcatgctatgactttaagagcattacactgaaacaaacaagaagttaaacgacattttttttaatatcccagaaatataccaaaatatacatctaagctttggaattactgaggttagactaatgcaagtgctgggtaatcgtacttaatacacgagtctaaggttctgcaggaaagaaattatctttggtatctgcatcaggctaatattattaacatttggattttgctttgggatagagcttgtgtgacccaagaaccaagtacccccctcccccaaccaactgagattaaaaagatccatgtaaaaagttccttcatttgcaatccccccaccccccaagttaaaaagtcacaggcatctacctagcacaaaaggttgtgaagtacaatgcatagttgcacagtggtgctgcaaaaaggaaagaaaactacaataaagagaaatgaaaagcttgataatctttctgcatgttttctcacaaacaggacagccacttccaagcagttccagtacaggaaaagaaaaaaaggctcagaagggcaccgtggcgtgcattcgcccagccccagaggttaaagcacccagcagagcagccaatcgtgcgccagtgtcttcaacgtcccccactctgtggagtcctcgggccagtccagcagcagctcccaccctccctaggccctgtgctaagtccccatagtgaccctggttggtgtagggtggatgatggtggtgatggggttttttgacttttgttttggaaaatctgaaatgccaatttgtttcagggcatgctcacaagtttgtgagggccaaagctaggggcatgcacctgtgctggaccctggaaggtggtaagcagcttgcctgccctttctgatccagtcagagggtccccccgccccaccttccctggcctcactcttttaagtgccaggacaccacagactggactgatgctgaagacttcccttttcttaagtttgtaaaaaagttgtgagtaaaatacaatcattaagaaatctttggtttcgggtagntctctcgcaat

SEQ ID NO: 60179 - DNA, 2040 bp, Homo sapiens
atgctcctcatccccttgtttccatgacggcacgtgcgtccttgacaaggctggatcttacaagtgtgcctgcttggcaggctatactgggcagcgctgtgaaaatcttctggaggctgggaagtccaagatcaaggcgtcagaagattcattgtctgtccttgaagaaagaaactgctcagaccctgggggcccagtcaatgggtaccagaaaataacagggggccctgggcttatcaacggacgccatgctaaaattggcaccgtggtgtctttcttttgtaacaactcctatgttcttagtggcaatgagaaaagaacttgccagcagaatggagagtggtcagggaaacagcccatctgcataaaagcctgccgagaaccaaagatttcagacctggtgagaaggagagttcttccgatgcaggttcagtcaagggagacaccattacaccagctatactcagcggccttcagcaagcagaaactgcagagtgcccctaccaagaagccagcccttccctttggagatctgcccatgggataccaacatctgcatacccagctccagtatgagtgcatctcacccttctaccgccgcctgggcagcagcaggaggacatgtctgaggactgggaagtggagtgggcgggcaccatcctgcatccctatctgcgggaaaattgagaacatcactgctccaaagacccaagggttgcgctggccgtggcaggcagccatctacaggaggaccagcggggtgcatgacggcagcctacacaagggagcgtggttcctagtctgcagcggtgccctggtgaatgagcgcactgtggtggtggctgcccactgtgttactgacctggggaaggtcaccatgatcaagacagcagacctgaaagttgttttggggaaattctaccgggatgatgaccgggatgagaagaccatccagagcctacagatttctgctatcattctgcatcccaactatgaccccatcctgcttgatgctgacatcgccatcctgaagctcctagacaaggcccgtatcagcacccgagtccagcccatctgcctcgctgccagtcgggatctcagcacttccttccaggagtcccacatcactgtggctggctggaatgtcctggcagacgtgaggagccctggcttcaagaacgacacactgcgctctggggtggtcagtgtggtggactcgctgctgtgtgaggagcagcatgaggaccatggcatcccagtgagtgtcactgataacatgttctgtgccagctgggaacccactgccccttctgatatctgcactgcagagacaggaggcatcgcggctgtgtccttcccgggacgagcatctcctgagccacgctggcatctgatgggactggtcagctggagctatgataaaacatgcagccacaggctctccactgccttcaccaaggtgctgccttttaaagactggattgaaagaaatatgaaatgaaccatgctcatgcactccttgagaagtgtttctgtatatccgtctgtacgtgtgtcattgcgtgaagcagtgtgggcctgaagtgtgatttggcctgtgaacttggctgtgccagggcttctgacttcagggacaaaactcagtgaagggtgagtagacctccattgctggtaggctgatgccgcgtccactactaggacagccaattggaagatgccagggcttgcaagaagtaagtttcttcaaagaagaccatatacaaaacctctccactccactgacctggtggtcttccccaactttcagttatacgaatgccatcagcttgaccagggaagatctgggcttcatgaggccccttttgaggctctcaagttctagagagctgcctgtgggacagcccagggcagcagagctgggatgtggtgcatgcctttgtgtacatggccacagtacagtctggtccttttccttccccatctcttgtacacattttaataaaataagggttggcttctgaactacaaaaaaaaaaaaaa

SEQ ID NO: 60180 - DNA, 1193 bp, Homo sapiens
  misc_feature (1)...(1193): n = a,t,c or g
ttttttttttttttaaaattaatcaaccaacacccattctatttaaggttccaaaaggaagtagctggacccggctgcagagcacactcccaccttgcgttttgtcccaaaagtacatcccctacggggggttctccttaaacaattttaatgtctgggttggggaagcaggtagagcgcgtagaggcagctgctagaggctggttgttgactccaggccgcgttccaggaaatatcggtgggaagaacggggacgggcttgggacccttcattgaggaagtaggatgtgatcttcctgagtccctcctgattctcggatgctgagtcctcccatataacatcttccgcctctttctccaggatggtctgggccgtgcgccagctgaaccggacaaactgggggaagccgaacacaggctccacgtgctccttcaaccacgcttttgtcttgggatcattggggtagcctgagccataatcagtatccaagtcctgcagtttctccacgaactgccatttcttcacggcctggtcccgggccaccttggcacagatgctggcagcactaaccaccgggtagagggcatctgctttggccttgaccgtcacctcaatcccgggaaaactttgctgcagccgcgcctggtatgtctctggcatccctacggtgtccacgaatacctgggtgacgttcacgccctggtccaatgcatactgtataagcccagtggctgtatcatgtgacagggagttcaggttgtatttgacccgcccaagcatgctggtagagatgaggtttggagacagcacatccagcgcccagccgacaaagtccgtgtcctccattttcgcaaacagcctttcccgctcgctctccaatagggtctttgagtctgccactttcagcgcctccagatctgccaggcgaggcaggggacaataacagatggcgtagaccatggggcccagcacggggcccctgcccgcctcatcgacgcccaggacgcaaggctccttgcggcacaccgcgggcacaggcgaactcaggcgacagcggcctgtattgtctctctccagctcgctgagatccatgccgcctcagccgccaccaccagctgcaagaactaatactgcaggagcgggtctcggcgcgcgttttccgcgggcctcgaagcggcgcctgctntcggcc

SEQ ID NO: 60181 - DNA, 1390 bp, Homo sapiens
ttttttttttttgcccggcaagaaatcatgtttattcacattccccaccccaccacctgagagtcactttcactccaagccctgggcctgacgggagggggccaaagaggggggctgcctaaggcagggcccagaccccacagtgtgggcctctggagctgtgtctttactcttgctgccgatcaatcccatgctctgaaatgcgcacactctggctccttagtagatgccataggtgggctcatgactgtccctgtaccggtccaggtagcgcaggggctgccggtgggggaagcgcttctgcttggggtggtaagggggcggccgcacgaactcaaacaccggctcccgcatgtccagaagctggtggaagatgtaggtgacggagtcatcccagcggcactggaagaaggacaagccggctggagtcatggtttcttggtgtttcttgtagaaatcaaaagtgcggaaggtccgctgggccagctgatagcagggtgaggggcgtgcgtcctcagagaagtcaatcggctggtcctgcttgaagagcaggaaggcaagacggtggatgccggagcctcgggcagggaagggggggaggtagggacacgtcacctgtccttcagccacccggttacccgggatgttggttagcagccagtggaggtactcagcatctggctccagcaggtgcccatccaagctagtgagtagcaacgtccacaaggagccctcttctgcctcataggtcacctctggcgcttgggcagcctcggttggagtcacctcattgccacagtacacaggcatcaggtcatcctcacccacagcgtaggccacgtgcagggggactcggggcacaaaggtggcaccgtggaacaggtctcggtagaggccgtaatactcagccagacgctgcttgtggtaggggccacaggtcctctcccactcggcccgcacggcatccagcgggacactggctgtgcggaggcgggcagcccgctcctcttccacattggcccgaagctcctggatggcctgtttccgttccagtagctgttgggtccgggagactttgggtggaggcagcccaatatcaatcttctctttgggatctgtcttctccccgaaatactctcggtaggtccgccaccagtgcggggcctgcgcctcctgctctgcccggcgccggtagcggtcgaagctccggtacttctccagccgctccaggttgctcaagtcgatgtcactgttgggcatcggccccagcgggggtgtccggcggcccaggacggccgaggtgctgaagccccgccatctccgacactcgcacagcgcggctcgccaccagggcgccgccatcttccctccggcctgcggaattccacca

SEQ ID NO: 60182 - DNA, 1378 bp, Homo sapiens
ttttttttttttcaaaacatagttatttttactttttaagttatataaataatatacattttcaatataggaaaatgggaagatacagataagcagtggtcttatatatatccttgcagctttttcccttcggacatacatattttgttacagtaattcctgcatctcaaaaataatacaaaaagtgaaaataagtttagaccagccttaaccttagctcaggtgctaatttatatataaatctatgtgcattcatttcaattttgacttacaaaatctaaagtgatgctgttataatactaaaagattccactttaaacagcagcagtttcagaataattaaaaatttgattcaggcatgaggctgataaagaacgaagttttactttttttcattaaaataagtagctttctactattgcatcctttgaagagaagaatgttctgctggtttggccacaagctctttagatggttacttttagtaaactcttcattcatcctggcattcttgaaaatattcgtcaaacatagaggaagactcatcttcacgttcctttggttctttaaattctaggtcttctccatattgaatggcaaaatcaatatgctgcaatacaatgttcatgctttcttcatctgactgatcgtaaggtaaaaatcgaaccatgctgtagtcatcaatcagtccacatatagctttagtcagtttcttgaattttttgcttcttaagtcacttgtagaatcttctaataaagaatacatgtctggatctaaaaatttctcaatttccttttttgcttttttactcagcagatccatttttgtcatgatgttgacttgcggaatttctagagagatcatggcactcagggctgccaagatgccagaaataaacttgaatgactccaccatgaactgagaatcaacaagaaaaactccacagactcggaactcccactgctcgagctgctggaccagctgtttcatcacaggcaggtgagtgtacaactcaatctgacctggacaatcaaaaaggatatagtcgtcctctacatggccaagacagttctccagccagtcaaaattattggcaaagtactccatgcaaaataccaatcctccgttgggaccgaatcgcagagaatcatcctccattacatcatccacctcgatcagttcccggatgtcagccatcacggagtagttgaagtgttctgctgctggatccaggtttacaacttggacagaccggttgagggcttcacagtgctggaccatggtggcacagtaggtgctcttcccgctgcccgcggggcccatgaccagctgcgcataccgaggcatgttggctcccggagccgcccgccacactcc

SEQ ID NO: 60183 - DNA, 3039 bp, Homo sapiens
ttttttttttttgagacgaggtggaggggcgggggttctcgctatcttgctcaagctgatctcgaactcctgggttcgatcaatactcagacaatcttggcaggcgcaggaggaccaaattctagtgaatgagatcgagtctctcggctctttcccttccatgttttctttttgattggccctcgacgatcctcagtgacgcctcccgcaccgcctcacccgagagtcagccgccctcgcttttccgtgcgcacgcgcagtatcccgattggctctgccctagcggattgacgggcaggttagccaatggtctcgtaatataggtggagcgagccctcgaggatgtccacgacccggcctctcgctgaatattcatgagggaggcgggtcgaccccgctgcacagtccggccggcgccatgaagtgagaagggggctgggggtcgcgctcgctagcgggcgcggggggtcttgaagatggggtcatcggtgggcgcgcctgggtccccaagggggcgaggggagggtgaaggggtgggacgggggcagccgcagggagcagcagtgatagcgaggagacactgagggggccccgaggctcctgaggacctgagggttaccgggggcgccgggcccgtcacccttctctgggctcgacgaccgggcactgtggaggcgggagaggggctgaggggacgggaactgacccagcagcccctgccgccaggctcaacgtggacgggctcctggtctacttcccgtacgactacatctaccccgagcagttctcctacatgcgggagctcaaacgcacgctggacgccaagggtcatggagtcctggagatgccctcaggcaccgggaagacagtatccctgttggccctgatcatggcataccagagagcatatccgctggaggtgaccaaactcatctactgctcaagaactgtgccagagattgagaaggtgattgaagagcttcgaaagttgctcaacttctatgagaagcaggagggcgagaagctgccgtttctgggactggctctgagctcccgcaaaaacttgtgtattcaccctgaggtgacacccctgcgctttgggaaggacgtcgatgggaaatgccacagcctcacagcctcctatgtgcgggcgcagtaccagcatgacaccagcctgccccactgccgattctatgaggaatttgatgcccatgggcgtgaggtgcccctccccgctggcatctacaacctggatgacctgaaggccctggggcggcgccagggctggtgcccatacttccttgctcgatactcaatcctgcatgccaatgtggtggtttatagctaccactacctcctggaccccaagattgcagacctggtgtccaaggaactggcccgcaaggccgtcgtggtcttcgacgaggcccacaacattgacaacgtctgcatcgactccatgagcgtcaacctcacccgccggacccttgaccggtgccagggcaacctggagaccctgcagaagacggtgctcaggatcaaagagacagacgagcagcgcctgcgggacgagtaccggcgtctggtggaggggctgcgggaggccagcgccgcccgggagacggacgcccacctggccaaccccgtgctgcccgacgaagtgctgcaggaggcagtgcctggctccatccgcacggccgagcatttcctgggcttcctgaggcggctgctggagtacgtgaagtggcggctgcgtgtgcagcatgtggtgcaggagagcccgcccgccttcctgagcggcctggcccagcgcgtgtgcatccagcgcaagcccctcagattctgtgctgaacgcctccggtccctgctgcatactctggagatcaccgaccttgctgacttctccccgctcaccctccttgctaactttgccacccttgtcagcacctacgccaaaggcttcaccatcatcatcgagccctttgacgacagaaccccgaccattgccaaccccatcctgcacttcagctgcatggacgcctcgctggccatcaaacccgtatttgagcgtttccagtctgtcatcatcacatctgggacactgtccccgctggacatctaccccaagatcctggacttccaccccgtcaccatggcaaccttcaccatgacgctggcacgggtctgcctctgccctatgatcatcggccgtggcaatgaccaggtggccatcagctccaaatttgagacccgggaggatattgctgtgatccggaactatgggaacctcctgctggagatgtccgctgtggtccctgatggcatcgtggccttcttcaccagctaccagtacatggagagcaccgtggcctcctggtatgagcaggggatccttgagaacatccagaggaacaagctgctctttattgagacccaggatggtgccgaaaccagtgtcgccctggagaagtaccaggaggcctgcgagaatggccgcggggccatcctgctgtcagtggcccggggcaaagtgtccgagggaatcgactttgtgcaccactacgggcgggccgtcatcatgtttggcgtcccctacgtctacacacagagccgcattctcaaggcgcggctggaatacctgcgggaccagttccagattcgtgagaatgactttcttaccttcgatgccatgcgccacgcggcccagtgtgtgggtcgggccatcaggggcaagacggactacggcctcatggtctttgccgacaagcggtttgcccgtggggacaagcgggggaagctgccccgctggatccaggagcacctcacagatgccaacctcaacctgaccgtggacgagggtgtccaggtggccaagtacttcctgcggcagatggcacagcccttccaccgggaggatcagctgggcctgtccctgctcagcctggagcagctagaatcagaggagacgctgaagaggatagagcagattgctcagcagctctgagtggggcgggtggggccataaacggttcctggtga

SEQ ID NO: 60184 - DNA, 2181 bp, Homo sapiens
cagggccctgagcgggtgatccctgggctggacaccaaggttgagaagttaggccggcagcgtggaggggccagcactgtggggggtggcccggtgtggggagggaacatggggttttgggacggtcacaccacttcatctagacaccacagccaggcacatctgtcaggcttagttctcccatgcgccatcctcaagaggcaccagcactttatctgttgagcctttatgtggcaccaactgtgtgcactattacccggttttacagatgatggaggcccagaagcaggaggtggctggtgttaggtcacacagctaggaggcagcagaacggtggggcgctgcctgtgctcttaacccccaggccaagtcaccccatcaggcagtcaggagggctggcggcagggggtgatgtgggtgggaggtagtgccttcttggcattctcaccgcagcctgggtgccgggtgccactctgacctcagccatggcagggtcgggggatgccgatgggcgctgcacgggctctcagaggcccctcacctatggccatggccttgactgtgggggcctctgtccaccgatgatctcccttcatcccctacaggtggggcggtccagggtggtgggggcacagtggccccgggcagtgaccacagggtcctgacccgcggcccccgcaggcgggctgcatgctgttcccccacatctccccctgtgaggtgcgcgtgctcatgctcctgtactcgtccaagaagaagatcttcatgggcctcatcccctacgaccagagcggcttcgtcagtgccatccggcaggtcatcaccacccgcaagcaggtgtgccagccaagcacagcccctctggggacagagggggattagaccccactgccctggttgggcagccagacttggtgtgggcggagtgtgatgcgatggctggagcaaggagctgcaggggagcccggaggatgccgggcgggttcccacccagggctccatggaaaagcggccactgggcggctctgcagggcaggagggtgggtcttggcgcggcggcagggaagccagcggagcggggagctgggcaggggttgggattgtcctgcggctggaaggccctgcctggtaaccatgtgtcctggtcatgccttgccagttgaggcagactctgcaggtcctgtgcaccaggtgagggccgggacctgtctcaggccactggggagccatggggggctgtgagcagatgaggggcagggcctgttcccctgggactagagaatggacccagctggggctaacaggccaaggctcggagggagggatggcaggccccaggacagacagacaggtttcccaggagcctgggcccctcttcccaccccgttcccttccaacaggcagtgggacctggtggtgtcaactcaggcccagtccagatcgtcaacaacaagtttctggcatggagtggtgtcatggagtggcaggaggtgagcactcggcagcccagggacttgggacccccagatcctcacggactgtggctgggaggggacactggcattgggggtctccagccctgagggctcctctttgcctctcccccaaaagcccaggcctgagcccaacagtcggtccaagaggtggctgccatcccacgtctacgtgaaccagggggagatcctgtgagtgctgggctggggggtggaggcagcatccaggggagctggggcttcctgaccctcgtccctttgtgccccacaggaggaccgagcagtggccaaggaagctgtacatgcagctcatcccgcagcagctgctggtgaggggctggggccgggtgctggagcctgcacgcagtagctcttccagagggcggggctgggggcaagagcgcctccccaggtggcctgagctggctgtgagggagcggagctgagggtgctgaagcaggtgtggtgggtagctcctcaggcttggcttcaaggggtcccaggcagccagctggtggctgtgcagggactgagcggggcaggggcagccacgacctgcacctggggggctgccaagggatctgagagcggcttccacagcactccagggttgggctggttgagcggtggagatgacgtttcctgaggtagggaggacaggggagtctcagtttggtcctgggcccgg

SEQ ID NO: 60185 - DNA, 2242 bp, Homo sapiens
ttttttttttttaaaagaaaaaatttcactttaatccagcctcacccccacatgtgtgtttcacacagaccttattttttaaacagagtttattgtatttaatacattataaaatttgaaaaattgtaggaaagcagcagacttgaactggagcaattctaacaaggaataattctggccccttggcaaaactgatcagttttaaaacaaagtaaagttcacatctgtgaggtggacaaaaaagtgtgacttctgtacaaactacatttaaaatttcatgtctaacatctttgcaatgtgctcatgagggtttttctgaagtcctgcctggtccctgcctaaagaaagacgtggaacctccatatacaaacaaacttgattcaaggtgttttgtttgttttgtttttttaaaaaaaaaggaaaaagaaagacaaaggaaaaaagaaatatggatggctgttgttggcaatggaaactgtaaggagactggtgtcctcaccactcatggcttgtttatttgtcagaggcctcgggaggcccaggacacttcacggccatcacagcaccaactgcggctgtccccttttttttttttcttttttgcatttcctaccttttgacatatatatatatatttatatattttttacaccttgaggatatcactattccaattgttcccatatgaatacaggtgtggtctctattggatataaatgtgtcttttattcgattttacgtccaggacttggtttgctgtcccaactgcacataaatgtcccttttttgtttgagttattggttgtgtgtgttttcctttttgcataagaaatatgtccatttagtccagaggctcttgctttatccggatgacggagggtacacggggcgtccgcctcagttcccgccgaaggacgtattcgctgaactgggacgagtctactcctcccccacaggagcccacgatttcaaatcctctttgctgcaacctctcgaggacctggactgagttgaggtgacagtagccatttagtggaaacctgatgacgtgcgtcgagtcgtgattccagcctgcattgacagagttacacatcacgtcgccgatctctggaaatacttcttctatcaaggatttgtcaccgcttagcgtgatcctttctccgaggtctggggccacacgcacgacgaggcactcacagggccttgaaaatcgaccagtttctctgtcctgcttccatctttccatctccaacaacatgggctgaagctgaaaatattttgcctcttcatataacaaagtgtagtccttgaaatcatcaggaatgaggagtttggatgttcgtagaaaattcaagatatatctgaacatctgtccatctctgtcaatgaaatagtgctgtttgagactgtccaaaacaatgggctctgtaccatcaaaaagtcttccgattctggattcagggtatttggtgagggtggccaggctgctggtgtacatgtggccgcccacatcaatgtggacaggcgcattggattttgtgagttgtgctggagtagggatgccttggttgttcagtggagatgcaggggatctagtgatcagaggtcttgacatattgggccgactgtcctgggtgggggaaacaatagcaggtgaaactattgtgggagaattggtgcttctgtgcccattggcttctggaagaagaggcagggggtcgtgtttcacggaaaccaccaccaccgcatccacaggctccgaggggcggatacaaagtcttttgggggaagtggggccgcagatttcccccgacccgaacacagactcgtacagggcgcgcttgggcgcagcctcggatttcacgtcgggcccgacctggctgtctttggggaggatgaaaatcgcttgaacctgggaggcgaagtttgcaatgagccgagattgcgccactgcactccagcctgggcaacaagagagaaactccgtctcaaaaatgaaaataaaataaataaaaatgaaacagccttttaagaatgcaattattaggcaacgtcttcaaaagccatgaaaatgttcatatgctttgatgcacaaattgcttctagaagttcatcttaggaaatatcctgctttacttgtagtttggtaaagtttggtttattgcatccaggccacttggacaaatgaattttgtggtatatgtcacaaactatgctgtagaactgcattttatactgtctt

SEQ ID NO: 60186 - DNA, 1034 bp, Homo sapiens
ttttttttttttaaatattttaaaattttctttatttcagaactgcctttatgtacagacatcatttaaaaaatgcacatacaatggagattttccaaggaacaggagctggaaataaaatttaaggacattattagaactgaaattgtcccagagaagttctgaggatcaggattccttaaatgtccttgataacctcttcaagttcttcctttgtgaacatgtggaaattctggccaggctgcactgtggctagctcaatgtttgttgcattcagcttctcctccattacttgtttgaggatgatgagtgaagacttgatggcttctttcaaagtcatagacttgtggtaaacttcttgcaaggagctctgggcaccctctgaagcagagccaattgctcgagcatcacactgtacaaaggtcccagatgggtccatatgaaacagctggggtcctttctcatcaactcctccaaataataatgctactccaaagggacgagacatggcacctggatctgcatcttcttctccaaactgcaaagccagattggacacagcttgggtcacactctccactgtcattgtctcattgtaggtgaaccagtggttctgtgtctccactctggctttatcaattaaagtcttagcatcagcaattagcccactcatggcacaacctatgtgagcatcaatctctacaattttctcaatgctgctgggctccatcagtggggaagtaattctcttctccacagctaggcacacaccctctgatgtctggatcccaatggctgtagaaccaagcttgatagcctcaatggcatattccacttgaaataatcttccttcgggagaaaaagtattcacgcccctgtcgtactcagaccgggtaagaaacatggcgagggtaggaggaggcagcggctacgcggggattctgaggaccaacacgactccaccggcacccaactcaccggcagccaactcacccacacggccgcgaattccaccacgctggactagaggtcgt

SEQ ID NO: 60187 - DNA, 1458 bp, Homo sapiens
cggccctcccatgtgcagcccggccagccgggctctcctcctcgcggcggatgggtgaccttttcctggcacgggcaggctgtgggaggcagcggagcaggcgatgaagaagaagcagcagcatcccggcggcggcgcggatccctggccccatggggcccctatggggggcgcccctccgggcctgggcagctggaagcgtcgggtgcccctgctgcctttcctgcgcttctccctccgggactacggcttctgcatggccaccctgctggtcttctgcctgggctccctcctctatcagctcagcgggggaccccctcgcttcctgctcgacctgcggcagtacttgggaaattccacttacttggatgaccatggaccacctcctagtaaggtactacctttcccaagccaggtggtgtacaacagggtaggcaagtgtgggagccgtactgtggtcttgcttctgagaatcttgtcggagaagcacggatttaatttggtcacatcagacattcacaacaaaaccaggcttactaaaaatgaacaaatggaactgattaaaaatataagtactgccgaacaaccctatttattcactcgacatgttcatttcctcaacttctcaaggtttggaggagaccagcctgtctacatcaacatcattagagaccccgtcaaccggttcttatccaactattttttccgtcgctttggagactggagaggggaacaaaatcacatgatccgcacccccagcatgaggcaggaggagcgctacctggatatcaatgagtgtattcttgaaaactatcccgagtgctccaaccccaggttattttacatcattccgtacttttgtggacagcatcccagatgcagggagcctggtgaatgggcccttgagagagcaaagctgaacgtgaatgaaaacttcctgctcgtggggattcttgaagagttggaagatgtgctgctgttactggaaagatttttacctcattacttcaagggcgtgctcagtatctacaaagacccagagcacaggaagcttggaaacatgactgtgacggtgaagaagactgtcccctctcctgaggctgtgcagatcctctaccagcggatgagatacgagtacgagttttaccactacgtcaaagagcagttccacctgctgaagcgcaagtttggacttaagtctcacgtcagcaagccccccctgaggccacacttctttatcccaactccactggaaaccgaggagccaatcgacgatgaagaacaggatgatgaaaagtggctggaagatatttataagaggtgatgtgactgtgttgcctctatggctttatctcccttttccagaaagttctttgtttggggaagtaaaatccttaagggactaaattaatgcttgggtgcattaaaaagaacaaaacattcccacatgttggggtc

SEQ ID NO: 60188 - DNA, 795 bp, Homo sapiens
agcccagcgtggtggaattcgcagcaaagagtagtcagtcccttcttggctctgctgacactcgagcccacattccatcacctgctcccaatcatgcaggtctccactgctgcccttgccgtcctcctctgcaccatggctctctgcaaccaggtcctctctgcaccacttgctgctgacacgccgaccgcctgctgcttcagctacacctcccgacagattccacagaatttcatagctgactactttgagacgagcagccagtgctccaagcccagtgtcatcttcctaaccaagagaggccggcaggtctgtgctgaccccagtgaggagtgggtccagaaatacgtcagtgacctggagctgagtgcctgaggggtccagaagcttcgaggcccagcgacctcagtgggcccagtggggaggagcaggagcctgagccttgggaacatgcgtgtgacctctacagctacctcttctatggactggttattgccaaacaggccacactgtgggactcttcttaacttaaattttaatttatttatactatttagtttttgtaatttattttcgatttcacagtgtgtttgtgattgtttgctctgagagttccccctgtcccctcccccttccctcacagtgtgtctggtgacaaccgagtggctgtcatcggcctgtgtaggcagtcatggcaccaaagccaccagactgacaaatgtgtatcggatgcttttgttcagggctgtgatcggcctggggaaataataaagatgctcttttaaaaggtaaacc

SEQ ID NO: 60189 - DNA, 1363 bp, Homo sapiens
gcgtggtggaattcgtggagtatacagctactgatgcaaatgtgaagaatgaaagtctttcatctgtgcagcagcttggcattaaaatgactgtcaggtatggcaaattcctcagtctcttaaaagatggtgcagaaaatgatcttacctgggttttaaagcattgtgagagattcctgaaacagcagcaaacttccataaaatcttctcttctctgcctgcaagggaattatgctggccatgactggtttgtatcttctctgttcatgataatgttgggagacaaagaaaaaacattccaatttcttcatcaattctccaggcttctgacttctgcttttctttggttgccaaggctacatatttctagttaccttcctaatgacactgtagaatctggcatccatccagtatatttttgcagcacccattatattgaaatgctactgaaggctgagttgcctcttgtgttttcagcttttcacatgtctggttttgcaccatcacagatttgcctgcaatggataacccagtgtttttggaattacttagattggatagaaatctgccattatattgctacttgtgttttccttggtcctgattatcaagtgtatatctgtatagctgtattcaaacatttacagcaagacattctacagcacactcagactcaagatctgcaagttttcctaaaagaagaagcactgcatgggtttcgagtgagtgattattttgaatacatggaaattttggaacaaaactaccgaacagtgctgctgagagacatgcggaacattagactgcagagcacatagatcatgagacacacggtttaaatttaggttttatttatttttaaacacagcaggggggcttgatgtttttctgtgtctgtaacaacatttactttgtgaatatacatattgtaaatactgagaagtataacgatatatttaagtaggtatgagctcaatttgtgaattcatttttgtaaatttgttgttttgtaaggttattatagaatcagatctagcttacttttagttcttattcatgtttaagagttagtcctggccaggcgcggtggctcatgcctgtaatcccagcactttgggagtctgaggtgggcggatcacgaggtcaagagatcgagaccatcctggccaaaatggtgaaacctcgtctctgctaacaatactgaaattagctgggtgcagtgatgcgcctgtagtccctgctacttgggaggctgaggcaggagaatcgcttgaacccgggaggcggaggttgcagtgagccaagattgtgccactgtactccaggctgggccacagagtgagactctgtctcaaaaaaaaaa

SEQ ID NO: 60190 - DNA, 1449 bp, Homo sapiens
  misc_feature (1)...(1449): n = a,t,c or g
ttttgcgggtgtgagcctgcagtgtgtgcgtggcagtttggtttattggtagtgtcgtctcagcagcgtgccacatggccaccatctgcgggctgcctgctgccctcccaattgtccttggccctctccctgcccagggagcctgcagggaccctcggtgccaggctcggctgctgagccagcttgggtgtgaagcctgggctggcagctgaatgatggagagagggtcaagaaggtgagagacccccaccatggagacccagcagagccttctcaaatgctgataagccaaatgtcacaaggtgacaagtccaaggagtgagaccaggcccatgagtgcagcacaccctgctcttccagagatgccacaaagccccttcagggagagaggggcccaggagggcagaatgcctgagaaggtcgctgagccaggcagaggtgagcacagggcggggccgggcgtgctctttctccatgggcgggtggaggaaagacagtccgggtggtctgctcaggaagcactgcctggggctgggccactctgcccgctcttcctgggaggaaacatgggcagaggggcccatggtgggaggggagagagtctctggctgcagttgtcccaccactcagagaaaagaagtggctgaagctggtcctgactagtgggaggcctgggagcagacacggtggcatttccatggaaacacaggtgtgcaggccgtgtggagctggggatgtaggagtggccagtgcccggtgtccacggggtgcgagcggggacccgccatctggggaggcaaaccacagagctgctcacagggcgaagagggcatcctctgaccgctctggcttcttccggccagaagggtttgaggctggggcaggagcctccatggggggcgaggggaggtcgggaaccatttcagcagctttggctctttcttcaaggaatttatcaaactcttcacttgtgacaccctcctccagatcatcacccttcaggtcggtcctgagccacacctcaatgtcgtccatgacagatggctgcgcaacggggatcattccttgggttataagccagctgtctatgggctccaggtcagactccccacctctacctctcttctgggccgaggacagaaaagtctcagaaagaaaagtcacagcaagacccatgagaaagaagtcaatagcacatattgtggaaacagaaaagtcactcttcagacgtgatcctttgccacgtaaggaaatgtgatgccctgctcccaacctccaccccagcacgtcccccttacctgcctggaaaaaagaagaaaagtttagtaaccaagaatcccaacaggataacacatactcatgccaaccactaccgtgccctggaaatctccaggagatcacagaaggttgaccagacgaaatcgtcgncccgggaattcgggccagtca

SEQ ID NO: 60191 - DNA, 1120 bp, Homo sapiens
ttttttttttttgtagagatggggctttgtcatgtgacccagcctggtctggaactcctgggctcacgcgattctcccacctttgcctcccaaattgctgggggattacaggcgtgagtcaccatgcccagcctaggatgagtttagtaagatttggttatgctggggagatgggaaaagccagggttaggggcacgcaggctggaaggaaacggggtctgtgggggtggatggaataacccatggaggcaagaaaggagcctctgcaggaacaagtctggaagagcgaggaggaagcggtgaggcaggggagcactgtgtgaactgccctgaggccaggcaggggctcaggatgaccaggcagaaacagagcgggtccagggtggaggggaggcccgtgcagcatgagcaggaggctagaggagacagaccatgaggcccagggagacccctcactggagactctcccgtagccttcttttcagaagtcgaaagttggtttttaatcccttccaaggcttgaatggctcattatcattgtacacaaagttttcccaacaatatttaaaatcttcatagtccatgatctccacagcgaccccttcctgactcaggctgcggagcccctcctggtaacatggatactggaagtagtagaggcgggcggtgaagatggtgagattcacgttgctgtgcctggccaggaactcggccacctcccctgcacagtctgggcaagggctccaagatgtgtaccaggtgacctggtactttgtgttaggagacagtatgtcgtcgcagaaccaagagaggaagcacctttctgcatgacaatgggtctcagaatccacctggtttcggaagacgcccgtcttccaggagacaactgagcggcgctttataccttccacggtgaagcacagccaagtttcgttccgatcgttggcttcccataggtttttaaattggaagtagaatgtgcctggatacattgccttcatcgggtttctgatctgtggattcatgttcagcctcttagatatgcttgtccctgtcccactcttttctgaagcgctgtggcttctcttcctgcttacagcgtccttggtcgacgcggccg

SEQ ID NO: 60192 - DNA, 888 bp, Homo sapiens
gtttgtgctggaattcgcgacccttgttcaacgccgttggcgaagccagctgctggaggtgccgagaatctgagtttcggtaagcagccaggtctggaaactaatattttaaaaatgactacaccaaacaagacacctcctggtgctgaccccaagcagttggaaaggactggaacagtacgggaaattgggtcacaagctgtttggtcactctcatcttgcaaaccaggatttggagtggatcagttacgagatgacaatctagaaacttattggcaatcagatggttcccagcctcatttagtgaacatccaattcagaagaaaaacaacagtgaagacattatgtatttatgcagactacaaatctgatgaaagctatactccaagcaagatctcagtcagagtaggaaataattttcacaaccttcaagaaattcggcaacttgagttggtggaaccaagtggctggattcatgttcccttaactgacaatcataagaagccaactcgtacattcatgatacagattgctgttctagccaatcaccagaatggaagagacacccatatgagacaaattaaaatatacacaccagtagaagagagctccattggtaaatttcctagatgtacaactatagatttcatgatgtatcgttcaataaggtgactttaaaatgagacgaaaatcattaaacgtatctttgttttatcctgtatttaaataatatatcatgtacctttattgaacaaggcatccgttatatctaattttgtatatgtttaaaaatattttattgtaactttgacaaataaatttggggtcatattatctttattttctttaacatgtaataaagctcacatattttacattaccaaaaaa

SEQ ID NO: 60193 - DNA, 2081 bp, Homo sapiens
  misc_feature (1)...(2081): n = a,t,c or g
aggcgcccgcccgccgcgcgtgattctcgcctcgccgcagcccagccctgcgcgccttgcccggcggcccccgcccggccgctccgggcccctggccccgcggagcgatgctgctgctggctgccgccttcctcgtggccttcgtgctgctgctgtacatggtgtctccgctcatcagccccaagcccctcgccctgcccggggcgcatgtggtggttacaggaggttccagtggcatcgggaagtgcattgctatcgagtgctataaacaaggagcttttataactctggttgcacgaaatgaggataagctgctgcaggcaaagaaagaaattgaaatgcactctattaatgacaaacaggtggtgctttgcatatcagttgatgtatctcaagactataaccaagtagagaatgtcataaaacaagcacaggagaaactgggtccagtggacatgctggtaaattgtgcaggaatggcagtgtcaggaaaatttgaagatcttgaagttagtacctttgaaaggttaatgagcatcaattacctgggcagcgtgtaccccagccgggccgtgatcaccaccatgaaggagcgccgggtgggcaggatcgtgtttgtgtcctcccaggcaggacagttgggattattcggtttcacagcctactctgcatccaagtttgccataaggggattggcagaagctttgcagatggaggtgaagccatataatgtctacatcacagttgcttacccaccagacacagacacacctggctttgccgaagaaaacagaacaaagcctttggagactcgacttatttcagagaccacatctgtgtgcaaaccagaacaggtggccaaacaaattgttaaagatgccatacaaggaaatttcaacagttcccttggctcagatgggtacatgctctcggccctgacctgtgggatggctccagtaacttctattactgaggggctccagcaggtggtcaccatgggccttttccgcactattgctttgttttaccttggaagttttgacagcatagttcgtcgctgcatgatgcagagagaaaaatctgaaaatgcagacaaaactgcctaatcttcttaccccttggaagaagactgtttccaaataatttgaacagcttgctgctaaatgggacccaatttttggcctatagacacttatgtattgttttcgaatacgtcagattggaccagtgctcttcaggaatgtggctgcaagcaaggggctagaagttcacctcctgacagtattattaatactatgcaaatatggaataggagaccatttgattttctaggctttgtggtagagaggtgaaggtatgagaattaatagcgtgtgaacaaagtaaagaacaggattccagaatgatcattaaatttgtttctatttattcttttttgcccccctagagattaagtccagaaatgtactttctggcacataaagaaatcttgaggactttgtttaaaccttccataaaaaaacaattttcggtttctcgggttctctctctctctctctctctctctctgtctctctgtctctctgtctctctgtctctctgtctctctctctctctctctttctttctttgtgtattttattcaagatgagttggacccattgccagtgagtctgaatgtcactgacagccctgtgttgtgctcaggactcactctgccgctgggggaaactcatggcttctctctctctttgatcccataaagctacgagggggacgggagaggggcagtgcaatgggaaataaagagatattttcccngtagggaaaaggcaatgctttccttgtctttacactcaaatgcttaggggaacgttttcatttcctcattcatggggaaaggcagcctccttaaatgttttctgaagagcggtaaaatctagaagcttaagaatttacagttccttcaataaccatgatgacctgaagttcacctatcccattttagcatctacttgtttttcccatctcttcctttccaattttgcttatactgctgtaatatttttgtaaaaaaaaaa

SEQ ID NO: 60194 - DNA, 1077 bp, Homo sapiens
gcttgtggctgggcactcgcgcagaggccggcccgacgagccatggttgctgggagcgacgcggggcgggccctgggggtcctcagcgtggtctgcctgctgcactgctttggtttcatcagctgtttttcccaacaaatatatggtgttgtgtatgggaatgtaactttccatgtaccaagcaatgtgcctttaaaagaggtcctatggaaaaaacaaaaggataaagttgcagaactggaaaattctgaattcagagctttctcatcttttaaaaatagggtttatttagacactgtgtcaggtagcctcactatctacaacttaacatcatcagatgaagatgagtatgaaatggaatcgccaaatattactgataccatgaagttctttctttatgtgcttgagtctcttccatctcccacactaacttgtgcattgactaatggaagcattgaagtccaatgcatgataccagagcattacaacagccatcgaggacttataatgtactcatgggattgtcctatggagcaatgtaaacgtaactcaaccagtatatattttaagatggaaaatgatcttccacaaaaaatacagtgtactcttagcaatccattatttaatacaacatcatcaatcattttgacaacctgtatcccaagcagcggtcattcaagacacagatatgcacttatacccataccattagcagtaattacaacatgtattgtgctgtatatgaatggtattctgaaatgtgacagaaaaccagacagaaccaactccaattgattggtaacagaagatgaagacaacagcataactaaattattttaaaaactaaaaagccatctgatttctcatttgagtattacaatttttgaacaactgttggaaatgtaacttgaagcagctgctttaagaagaaatacccactaacaaagaacaagcattagttttggctgtcaccaacttattatatgacggggtgcttgctttttttgccagtaaattgtttttactgatgatgtagatacttttgtaaataaatgtaaatatgtacacaagtgaaaa

SEQ ID NO: 60195 - DNA, 2323 bp, Homo sapiens
ggcacgagacaggaagccctgaagggtcaaaagaaatacaaaagcaaaggctattttcttttttttttctttctttcattccttccttcctcggtttctttctttcttcctttcatttttttttcttttttaaaagcgagcggttttgcgggggcggtttggggggggcgccgccgaggggaggccgtctcgcctcccgcgcgccggtagactggacttgaacactaagtcttcaatagctgagattctccatcttaatctacttggaggcaagagcagattggttgtttcattatggatggaggggatgatggtaaccttattatcaaaaagaggtttgtgtctgaggcagaactagatgaacggcgcaaaaggaggcaagaagaatgggagaaagttcgaaaacctgaagatccagaagaatgtccagaggaggtttatgaccctcgatctctatatgaaaggctacaggaacagaaggacaggaagcagcaggagtacgaggaacagttcaaattcaaaaacatggtaagaggcttagatgaagatgagaccaacttccttgatgaggtttctcgacagcaggaactaatagaaaagcaacgaagagaagaagaactgaaagaactgaaggaatacagaaataacctcaagaaggttggaatttctcaagagaacaagaaggaagtggaaaagaaactgactgtgaagcctatagaaaccaagaacaagttctcccaggcgaagctgttggcaggagctgtgaagcataagagctcagagagtggcaacagtgtgaaaagactgaaaccggaccctgagccagatgacaagaatcaagagccctcatcctgcaagtctctcggaaacacctccctgagtggcccctccatccactgcccctctgctgcagtatgtatcggcatcctcccaggcctgggtgcctactctgggagcagcgactccgagtccagctcagacagcgaaggcaccatcaatgccaccggaaagattgtctcctccatcttccgaaccaacaccttcctcgaggccccctagtttctccgtccctacacagggagctcctccccaagggtagatcggaccgttcatgctgcctataggcattatgtccctcaaaaaaaaactcctttgcctgcatcctgtgtacaacatgacatttttaaccaatccaatctaaaaatgtgccagaatccacctgtggcccgaatcgtgtttggttcctctttctactccactgcagatgaccaaacctgtcccgctgccactttcctcactgatattgggaggagggcaaggcccagccgaagttccactaaaaatgccccaggagaataggcaccggctggcttgccaaagggtttgggttttattgctttctgttttttcttttcccgacagcacaaagaagtaagggcagttattggacaggtgttatttaaacattctattgtaaatgaatgtgttgtttggttctactgcattgtggagcatgcgggggaagagaactgacccaggtaatgaaatggagcccttccctggaactaaccagtccttgatgttgtgtgactaagtaaagatgataaaccccatctgctgggggtgtcacttcacactcggcatgcattgtgaaagctttccatacccttggccattccctctctcctctctctccaaccccatttatgcaggaagggactgctaacaagaacgcttccatctcaaaccttttctctgcctgggaaattattttatgtttgtttttgaaataaaggatttagtttaagattctaaattttagagaaacaaacgtaggccttgtttactaatagccagacatcagaactgcaggtaggtatgttaatgagatgacttatttctggcagctcctggaatcctaatattgtaaatgagtgggacacacttgcatattgtgaccattctattgaggcccttctctgtttaatgcatattatacttgtgcttttaactgtggaatctatttctaacctaaaggtgctgccctagtacttttctttgctgcctctgctgctctttttcctttccaaacagcaactctgaggccatgagcagccaaaaactagaggtactgctccacctcgtctcataaagggaaacgggctcatcccttggattctggaggagggagagggagatggtgtggaggcctcgaggacagagatagacatgagctttgacaacaatctgtaggctctcctgctttagaataagcatgtaccattctttatccattccccttattcctacatcaattgttttt

SEQ ID NO: 60196 - DNA, 1530 bp, Homo sapiens
gcggccgcgaagcgactccgagcgtccctctgagccttgctcatctctgccccgcgcctcccgggctccggtccgcgcggcggggtccctgctcctgcgccccgggcgcgcttcccggacaccccggtccccgcagccaggacaaagccatgaagccagcgctgctggaagtgatgaggatgaacagaatctgccggatggtgctggccacttgcttgggatcctttatcctggtcatcttctatttccaaagtatgttgcacccagtcatgcggaggaatccctttggtgtggacatctgctgccggaaggggtcccgaagccccctgcaggaactctacaacccaatccagctggagctctcaaacactgctgtcctgcaccagatgcggcgggaccaggtgacagacacgtgccgagccaacagcgccacaagccgtaagcggagggtgctgacccccaacgacctgaagcacttggtggtggatgaggaccacgagctcatctactgctacgtgcccaaggtggcctgcaccaactggaagcggctcatgatggtcctgaccgggcgggggaagtacagcgaccccatggagatcccggccaacgaggcacacgtctccgccaacctgaagaccctgaaccagtacagcatcccagaaatcaaccaccgcttgaaaagctacatgaagttcctgtttgtccgggagcccttcgagaggctagtgtccgcctaccgcaacaagttcacccagaagtacaacatctccttccacaagcggtacggcaccaagatcatcaaacgccagcggaagaacgccacccaggaggccctgcgcaaaggggacgatgtcaaattcgaggagtttgtggcctatctcatcgacccacacacccagcgggaggagcctttcaacgaacactggcaaaccgtctactcactctgccatccctgccacatccactatgacctcgtgggcaagtacgagacactggaagaggattctaattacgtcctgcagctggcaggagtgggcagctacctgaagttccccacctatgcaaagtctacgagaactactgatgaaatgaccacagaattcttccagaacatcagctcagagcaccaaacgcagctgtacgaagtctacaaactcgattttttaatgttcaattactcagtgccaagctacctgaaattggaataaagggggtggggagagggagagaatcatgctttttaatttaagatttttatttgtcaaaagaattatatggatattgggttattttgtaaattaatatttctttggggatgatgctgcgagcagcatagtgagaattatttaaaatccttcgtagggaaggacagctgtctttgcaggggaaataggatgggtcgtccttgtctgtagaagtgaatactgcaacactgtctcaaaggtttcttgtgttctggtgaattccatgaattgtgcattccataaattctaattaatattatttatagttatttaaaaaaaaaaaaaa

SEQ ID NO: 60197 - DNA, 2815 bp, Homo sapiens
atttcctcccgttctttatcagagcccccaaaataagtaggaatgggcagtggctattcacattcactacaccttttccatttgctaataaggccctgccaggctgggagggaattgtccctgcctgcttctggagaaagaagatattgacaccatctacgggcaccatggaactgcttcaagtgaccattctttttcttctgcccagtatttgcagcagtaacagcacaggtgttttagaggcagctaataattcacttgttgttactacaacaaaaccatctataacaacaccaaacacagaatcattacagaaaaatgttgtcacaccaacaactggaacaactcctaaaggaacaatcaccaatgaattacttaaaatgtctctgatgtcaacagctacttttttaacaagtaaagatgaaggattgaaagccacaaccactgatgtcaggaagaatgactccatcatttcaaacgtaacagtaacaagtgttacacttccaaatgctgtttcaacattacaaagttccaaacccaagactgaaactcagagttcaattaaaacaacagaaataccaggtagtgttctacaaccagatgcatcaccttctaaaactggtacattaacctcaataccagttacaattccagaaaacacctcacagtctcaagtaataggcactgagggtggaaaaaatgcaagcacttcagcaaccagccggtcttattccagtattattttgccggtggttattgctttgattgtaataacactttcagtatttgttctggtgggtttgtaccgaatgtgctggaaggcagatccgggcacaccagaaaatggaaatgatcaacctcagtctgataaagagagcgtgaagcttcttaccgttaagacaatttctcatgagtctggtgagcactctgcacaaggaaaaaccaagaactgacagcttgaggaattctctccacacctaggcaataattacgcttaatcttcagcttctatgcaccaagcgtggaaaaggagaaagtcctgcagaatcaatcccgacttccatacctgctgctggactgtaccagacgtctgtcccagtaaagtgatgtccagctgacatgcaataatttgatggaatcaaaaagaaccccggggctctcctgttctctcacatttaaaaattccattactccatttacaggagcgttcctaggaaaaggaattttaggaggagaatttgtgagcagtgaatctgacagcccaggaggtgggctcgctgataggcatgactttccttaatgtttaaagttttccgggccaagaatttttatccatgaagactttcctacttttctcggtgttcttatattacctactgttagtatttattgtttaccactatgttaatgcagggaaaagttgcacgtgtattattaaatattaggtagaaatcataccatgctactttgtacatataagtattttattcctgctttcgtgttacttttaataaataactactgtactcaatactctaaaaatactataacatgactgtgaaaatggcaatgttattgtcttcctataattatgaatatttttggatggattattagaatacatgaactcactaatgaaaggcatttgtaataagtcagaaagggacatacgattcacatatcagactgttagggggagagtaatttatcagttctttggtctttctatttgtcattcatactatgtgatgaagatgtaagtgcaagggcatttataacactatactgcattcattaagataataggatcatgatttttcattaactcatttgattgatattatctccatgcattttttatttcttttagaaatgtaattatttgctctagcaatcattgctaacctctagtttgtagaaaatcaacactttataaatacataattatgatattatttttcattgtatcactgttctaaaaataccatatgattatagctgccactccatcaggagcaaattcttctgttaaaagctaactgatcaaccttgaccacttttttgacatgtgagatcaaagtgtcaagttggctgaggttttttggaaagctttagaactaataagctgctggtggcagctttgtaacgtatgattatctaagctgattttgatgctaaattatcttagtgatctaaggggcagtttagtgaagatggaatcttgtatttaaaatagccttttaaaatttgttttgtggtgatgtattttgacaacttccatctttaggagttatataatcaccttgattttagtttcctgatgtttggactatttataatcaaggacaccaagcaagcataagcatatctatatttctgactggtgtctctttgagaaggatgggaagtagaaaaaaaaaaaagaaagaaaggaaaggaagagaggagagaagaaggcagggatctccactatgtatgttttcactttagaactgttgagcccatgcttaattttaatctagaagtctttaaatggtgagacagtgactggagcatgccaatcagagagcatttgtcttcagaaaaaaaaaaaatctgagtttgagactagcctggccaacatgttgaaaccccatatctactaaaaatacaaaaattagcctggtgtggtggcgcacgcctgtagtcccagctactctggagcctgaggaacgtgaatcgcttgaacccaaaaaacagaggttgcagtgagctgagatggcactattgcactccagcctgggtgacacagcaagactctgtctcaaaaaaaaaa

SEQ ID NO: 60198 - DNA, 977 bp, Homo sapiens
ttttcttgagttacctcccgcagccgcagccgccgtgctcagcgcgagccccggagcccttgagcgcgaggcgcggagcccccggagcccccaaaccgcagacacatccccgcgccccagagccccggcctgcgcgcccagccgggcccgcgcgatgccctcagaccggcctttcaagcagcggcggagcttcgccgaccgctgtaaggaggtacagcagatccgcgaccagcaccccagcaaaatcccggtgatcatcgagcgctacaagggtgagaagcagctgcccgtcctggacaagaccaagtttttggtcccggaccatgtcaacatgagcgagttggtcaagatcatccggcgccgcctgcagctgaaccccacgcaggccttcttcctgctggtgaaccagcacagcatggtgagtgtgtccacgcccatcgcggacatctacgagcaggagaaagacgaggacggcttcctctatatggtctacgcctcccaggaaaccttcggcttctgagccagcagtaggggggctcggcctgggagtcggggggccccggtcaggccctgcccagagagctcctggttcctgaactgagctgcctctaccgtggtgggctgggcaggcatgtgcccccctagtcagagggcaccaacccacctactctgcccctgggtggatcctgggccggtcgtgttagggttgtccctctgggtgctggctggtgggatgggggagggtggggagcagctcccagcacccctgctgtgtggttcatcttttttttaggcccctgcctgtctgcccatctgcccctcacccacccgaggctctgcccaccgcctggacctgcccacccctgaaagactggcccctggctccccgcccctcggtctccacgtggtgtatggatctgtggtcattgtccctctgcagaataaagattgctcaggcctgcctggcaaaaaaaaaa

SEQ ID NO: 60199 - DNA, 2231 bp, Homo sapiens
gccccccaattcccgtgtcgacgatctcgtcgatcgcggcctgaggctgctcccggacaagggcaacgagcgtttcgtttggacttctcgacttgagtgcccgcctccttcgccgccgcctctgcagtcctcagcgcagtctttccacaggagccagcatacttcctgaacatggagagtgttgttcgccgctgcccattcttatcccgagtcccccaggcctttctgcagaaagcaggcaaatctctgttgttctatgcccaaaactgccccaagatgatggaagttggggccaagccagcccctcgggcattgtccactgcagcagtacactaccaacagatcaaagaaacccctccggccagtgagaaagacaaaactgctaaggccaaggtccaacagactcctgatggatcccagcagagtccagatggcacacagcttccgtctggacaccccttgcctgccacaagccagggcactgcaagcaaatgccctttcctggcagcacagatgaatcagagaggcagcagtgtcttctgcaaagccagtcttgagcttcaggaggatgtgcaggaaatgaatgccgtgaggaaagaggttgctgaaacctcagcaggccccagtgtggttagtgtgaaaaccgatggaggggatcccagtggactgctgaagaacttccaggacatcatgcaaaagcaaagaccagaaagagtgtctcatcttcttcaagataacttgccaaaatctgtttccacttttcagtatgatcgtttctttgagaaaaaaattgatgagaaaaagaatgaccacacctatcgagtttttaaaactgtgaaccggcgagcacacatcttccccatggcagatgactattcagactccctcatcaccaaaaagcaagtgtcagtctggtgcagtaatgactacctaggaatgagtcgccacccacgggtgtgtggggcagttatggacactttgaaacaacatggtgctggggcaggtggtactagaaatatttctggaactagtaaattccatgtggacttagagcgggagctggcagacctccatgggaaagatgccgcactcttgttttcctcgtgctttgtggccaatgactcaaccctcttcaccctggctaagatgatgccaggctgtgagatttactctgattctgggaaccatgcctccatgatccaagggattcgaaacagccgagtgccaaagtacatcttccgccacaatgatgtcagccacctcagagaactgctgcaaagatctgacccctcagtccccaagattgtggcatttgaaactgtccattcaatggatggggcggtgtgcccactggaagagctgtgtgatgtggcccatgagtttggagcaatcaccttcgtggatgaggtccacgcagtggggctttatggggctcgaggcggagggattggggatcgggatggagtcatgccaaaaatggacatcatttctggaacacttggcaaagcctttggttgtgttggagggtacatcgccagcacgagttctctgattgacaccgtacggtcctatgctgctggcttcatcttcaccacctctctgccacccatgctgctggctggagccctggagtctgtgcggatcctgaagagcgctgagggacgggtgcttcgccgccagcaccagcgcaacgtcaaactcatgagacagatgctaatggatgccggcctccctgttgtccactgccccagccacatcatccctgtgcgggttgcagatgctgctaaaaacacagaagtctgtgatgaactaatgagcagacataacatctacgtgcaagcaatcaattaccctacggtgccccggggagaagagctcctacggattgcccccacccctcaccacacaccccagatgatgaactacttccttgagaatctgctagtcacatggaagcaagtggggctggaactgaagcctcattcctcagctgagtgcaacttctgcaggaggccactgcattttgaagtgatgagtgaaagagagaagtcctatttctcaggcttgagcaagttggtatctgctcaggcctgagcatgacctcaattatttcacttaaccccaggccattatcatatccagatggtcttcagagttgtctttatatgtgaattaagttatattaaattttaatctatagtaaaaacatagtcctggaaataaaaaaaaaa

SEQ ID NO: 60200 - DNA, 1151 bp, Homo sapiens
  misc_feature (1)...(1151): n = a,t,c or g
gtttaattttctagtttttctttttttttcaaattctcccagatcctgatcaggtacttctttatagcaacacaagaacagcctaacacacaggattaagttgattccaggtaaataaattaagagaagcaatgactcgctggagacagcagcaaattcagcccagttttattgcaaataaaacaagtcattcaagtgaattgtggaaattgagggtgcacgtgaaggggtggcaagggaacgggactcttgaagatggtcagtgtttccttggtttgaacttcaaagccacactgttgatgcaaaacctctgaccattgggcccaggtccatcaggaaacacgtgacctagatgagcttcacactgcttgcagacaacctctgtgcgagctgatcctaacgaggtatccagacgtctcaggatccctgtgtggctttcatcagagccagacgtaccatgagcctcggaaaacgaaggccacccagtgccagagcagtactttttctcagaactgaagagtggactgtcgcagcacacgcaatgatacattcctgcttccttgttattcaggtagatcccactgaaaggcggttccgttcccttttctcttgtgacgtagaactgctccggggttagtttcttttgccactcactcttggcaagaggcagctcacacgttgcaagagacccagggggatccggatgaggggtcttgagaactcgtacctgtctttataacttgtctataaatctaaaattattccaaaataaaaaagcttatttaaaaaactttcttctccatggctacccgtgtaccatcaagcactactggagaaaaatccccacctggggagagggttgtccttataaactcaaagttactcatctcactggggtttcagtgaaccatggaaccatctttccccagtcagctctcttcccatttctctgcaatgagtgttttaaaccttttccactctcaggaatgtaaactagtacaaccactatggaaaacagtgtggagattctttaaagaactaaaagtagaataccatttaatccagcaatcccactactgggtatctacccagaggcaaagaagtcattacatanaaagatacctgccaccggacgcgtgggtcgacacggg

SEQ ID NO: 60201 - DNA, 1154 bp, Homo sapiens
gtcatcttcttctcttcgtatacaatgttttcccctaattcatttctcacgtgcattaccgtaacagtagcttctttggtctccctgtgtccaatttcttccatttcaaaacatcctggttattgatgcaagactaatcttcaaaatgtcatttttgaccgggcgtcgccgctgccgccggcgcccttccccagtaccacggcccggcgcctgcactcgtttcctgcaggagagagctaagcttgtctgctggatccctgcagctggagcgcaaaaggagagatttcacctcttctgggagcaggaaactctacttcgacactcatgccttagtgtgcttactggaagacaatgggtttgctactcaacaagcagaaatcattgtgtctgcattggtcaagatcctggaggccaacatggacatcgtctacaaagatatggtcaccaagatgcagcaggaaatcacttttcagcaagtaatgtctcagattgcgaatgtgaaaaaggatatgattattttggagaagagtgaattttcagccctcagagcagaaaatgagaaaataaaactcgaactacatcagttaaaacaacaagtaatggatgaagtgatcaaagtccgaacagataccaaattagacttcaacctagaaaagagcagagtaaaagaattgtattcattgaacgaaaagaagctgctggaattgagaacagaaatagtggcattgcatgcccagcaagatcgggcccttacccagacagacaggaagatcgaaactgaggttgctggcctcaaaaccatgcttgagtcacacaagcttgataatattaaatatttagcagggtctatatttacgtgcctaacagtagctctgggattttatcgcctgtggatctaataaagtgtctatttaaagtgatttctactgttttgccttaagaataccagattgttggctgggtgcggtggtctctaactcctgacctcgtgattcacccgccttggtctcccaaagtggtgggattacaggcgtgagccgctgcgcctggcccattctcatcttattcaaattactggcacatgggcaagagagacaatgacatggatagaagcttttctgcctttctctgcacacacatacagtgaaggaacc

SEQ ID NO: 60202 - DNA, 2216 bp, Homo sapiens
ttttttttttttcatttcttaactgaaaatatattttcacagaaacaacaaagcaaaggggataaaaacaatagcgaccagaaaagctaacttaggtgaatggtgccactcaaaggtctttccgagggaagctcagtcctggcttgcgagagtcagccttggctcacctcataacggggctccaagctaaggcgtcaaggaagcagtcccactgcttctcgctgtcagcaagaccacaaggcagatgcccactgctgtcctctttccttgtctactttctcatctaagtgtcgtaagacagccctgcactggtccctgagtaacagagcagctgtcatgagcacaggctcattttatccgagagcattcttatctttgagagaaatgagaatatgacaaggagaactaaacagcagcaggcctagcctcagcagcctttctgagtgatgtctagtcctgacgactttgtgatttccaaagtcgtgaacacctccccacatgtggggtgaattccaatggtgtcatcaagtagctgttttgtgagcccacatttcattgcagctgcaaatccttgggtaacctcaccggcgtttggtccaagaatatgaaatcctatcacccgatcatggtcgaatttattgcagattatctttgcgtaacaagtgttgttctctctgccagctactgtccattcaagaggccagaacaaagtatgatatatttctagattctcttttttatatacttcaatagctttctcttcagataatccacagcaaccatactccagaggagtaaacactgtagtcggaacattaatataatcacacttttctaaagaggccccaaaaagtctctgagctagcagcttgcctgactgtatggcgacagaagtgagctcaaacttatcctccaaaatatcaccaacagcatagacatatggcacattggtctgttccacatcatttacaggtatttttccactcttctcattaattttgacaccaatcttctccaagcctattttccttgtacaggagtcacgaccaatagctaacaaaactgtgttatagactccttcaattgtttctgttccttcagtggatttagccaacactttcagctttccaggtgaacctttctccaactgttgaaccatcacaggtatgaatttccgtaggaacttcacaccatgctgctccatgtaggaacccactttttctgccatttcttggtcgaagccacggagaaggattgagcgtaccataactgtgacatctaggccaaagccagccagaaaccctgcacactccagggcaacataagaggcacccaccactaatgttttgccagggcaataaggcagagaaaaaaggtcatcactagtaatacagtattctttatctccttggattcctaaataccgtggcctttcacccgttgctatgacaaactgtgcagcagtataataagtctcctgtccttttttattggttgcctttattttatgatgttcaacaaattctccataggaattgacataggccacagccttttccctcagagacaacctgtagccccagtttagagagctgatgtggttctgaatcgcttttgtcattgtctcccagttgtgcctcacttgttgattatattcccagccaaatttccttgagtcacataatgcctgccccaaaagggcagcctgatgcatcaatttcttaggaatacaacctacatttacacaagtgccaccaagaccccaggatgtgccctgaggtgacgggacaacaaagtctagcaccataactttctttcccaaaatggcagcttccttcgcacatgaaaggcctccagaaccaccaccgatgatgatgagatcataatcatatgccaaatcttcctgaaggagcttctgtaacaaaccactctgatatgcctggaaagtttggtcacatccacctacatgcactttattcacgaaaatattgggcacagttttctgattagtgatttctgacagcacttcttgaaccctggccccatcatcaacttgatcaagttccaagacattacattcgactcccaaagaagaaaagagttctttcaccttgctgggctccagcgtcctcgagcagcaggagcaggacaagtaagagcaggaggaacagaggcatggagaaggaggaggagttggagcagggagggagggagcg

SEQ ID NO: 60203 - DNA, 658 bp, Homo sapiens
cctttttttttttttataaatatatgtatatattttatttacattatatacatggcatatctatacagttacatttacacttgacttagagtcaaagtcatatacacacacacaggacttggactcaaagcttttaatgacaagcatgcaaaatttcttagtatagaccctaagagtacccttaatataagtatgtttatttaaaaattctatgtatctactactgttaccagggggtccttgctcccagagctcccaagatggtggtgggccacttccaagatggtggcaggccacttccaaaatggtggcaagcctcatgttctctgacctggggttcttggcctcacagattccaaggaatggaatcttgggccatgcggtgagtgttatagctctattagaagtcgtgggtcacggaagagaaccgtggaacccagtgactagtgttcagctcgattaggacaaacccaggcacttagccgtaccggaacaatggcaagcctttagcccgatcgggagtggcaatgggcgcatggctgcatcaggagcacagcggacaccctgccagatctggagggatggaagtcagtggtaggtctgcaatggtggcaaacagcagtggtggatggcgagcgaaagctcagctcgagctgta

SEQ ID NO: 60204 - DNA, 3884 bp, Homo sapiens
cagggtggtgaactaaaaaagctggttcctgtgaaccttgggaaaatggtcctcaaccccctcctgaagcccctggaagatgaacctgatggggccagctaggaggtccaaatggaaggactgcaaataaaaggcactgggaactctcaggggccacacacatgtgagatcttcccaataaaatcagccttagctttaaaaccaggaaattgttagcaacaggctctcaccttcctccaacacccacagcattgcctatctccctgtgatagcttgattctaaagataacagcctgcctttactcagaaaccaggactgtgacgtgttttgcacacattctcttttcactttcacagtgtgtgaatatggcatgcaacttatgttctctgtgcctcagtttactcaagtgttaaacaggaatactcacatgaggattacatgagttaaaatggataaaatggataaaagtagagagtaaattatttaaactttatcaaatccttggtacatgaccttaatacaattaagtatttgttaaatacatacattttaaagaaacgtcatcatatccacacacctatgaggcacctgcccaggaccacagagccaatcaatcaggtgatgagtgattccaggccagcaggaaaccaccgcccactgacacagggactgcaccatccatccttggtttgcatggtgcctgccatgcttcctgtattactgttaaatacatggggcaggcctttggaggatcccaatgttttaaaagggcaatacgaatatgattctaatacataaaaagtatgagggcagcaagaatttagttacaaaacccaaaaatcctcaaagagaagccacatagcactgtgcagtgttaccactgcctcgagtctggacagggcacaggtgaccgagacaagtcttatttaactgatttcacaagaagggtccgagttttattagacaacccatgtcaaggtacaaaatgattaatgacaatatcagccatattctattagccaagtgccacctgtcactatgaaactatcctgtaggacatccctgggctctcagttgctaatgggctgctgaagaaatgaatgtcctcaaatcgagaccctaacacaaagagattccagagagtggcttagaaaacccagctactcttaccaatgtggggaaagggtcaggggaatgaacctctgcaggacaatttgaattcccaaactgagtaagagcgaaacaaatatgcaggcaaggcaaagcctcaggggggctcctgggtctggggcagggggtgggagacaggagaggcaaaatggcagggacttgacagcaggttcctcttgtctacttcttcctcccgcctctctccttgagggccaggtggatgactgcgccattggccatgttgtagtaagccagtgagttggaatctttgatgaagataccctcatactgtagcttctgtttccctgcaggcatgcctgtggcttcatgaatcttcaccttaatgacagagacctggtccgtgagtgggagggtgaagaccagcacctgcccattcagtttccattccgtcttatcctgcatgttgggcacctggactttgatggacactggacccttgtttctgcgcaggaactcctcctctggcatgaggctgtcctctgtcttcagttttttggaggtgggctcatcttccatgggaggtgggggatgcacagggggcattggggctggagctgggacaggtgccacaggtggagcaggcacaaaggctgttggcacaatcatggggggtgggcggggggccataataggaggggccgagggaggcatgggcaccacgttgattctgggcgcgtggatgatgggcggcatgggggcgatcactgagcctgggggcagccggaccacagatgccattgggggccggggcatgacgggtactgcggagacaactgtagtacgaactggaggtggcattgtgggtggtcggggcactgaagtgatgggtggagccgagctggggatgttggtggctgaagatggtggcggtggctgttgagggatttcattgggcttgctggggccaatcttctctttagtgtcatcctctggcaccaggcctttggccttgtgaatggcctcaatctgctcctggagggtgatgttggcctgggcagcctgctgggtccgggccatgctgcctgagtggccatcccaggtcaccttttcctctggcttctggatctcctcctcaccgatcttcttaccaatggctgtttcctctacaccgaagatgtcagtacgccgctcagccaactgcttcaagctgctctcaatatccagacctggtgcgtacacctcatcatcgctctgcttctcacggatggagcgatcccgctgctccagccagcgagggtcaagaagtccaatgcgcatgtgttcctgcattttgctggcggggatcttctccccagtaatgggggacacaagatactcatctggagcaggggctggaggcaagggcttggaggctttgggatcataatccttgcggacaatgacttggtctggagttgggggcagaggtggaggcatgggtgtctctgggggtgggggcactttctgcccttcttcttcatcatctgaaccctcatccatatcttgtacttgggtgtcctggtccagctgggaaggaggctcctccgccttctcctgtttgtcatcctcctcatcagactcgacctccatctcaacttcctcactctccccaaacttttcatagcgctcctgaatgaggattcgggcccccagctcctctggcgtggtggggggagggaagttcccttgctcattgggttggaagtccactgtttccaccaccacaaaatcatgccagtcgatctgagcataggccacccgctccttctccttctcctcttcttccttcttcctctcacgttcctggaatttggcccattccactcggtaacacacctgatccaaaacttctcgggggttttcagcctctttcttgagctttgaaaataaacctttgggtggaatcaagatcttggtgtactgttccactagcttcgtgaagtagttgaagaggctgtgctgtgggcggagaaagtcaaactggtagttgcgctgctctttctgcatcagctgggtcagaaactggcgcccattcctggccacaaattgagccgtcagcttcaccacatccaagtcgaaggctgagatagagggaggatcagcaatgaactcaaactcaggaggaggctctttgggcacgatggtctcttggattacttgggcttggaccttctggggcagctgctgctgggtggtctgctgctgctgctgcatgaccttggggatggcggcggacggctcctgagccttcccttccttgaactcgctgaccttgtggcggtagtaggcatggtaagggtcattggggttcagaaagttgaacttggggttgttgatctcgttctgtcggatcctagcttcaaattcaggcccgtttctggccacaaagctggcagtcttgtcaacaatatttctgacctctggaggagggtaaataatccccacaactggcttagaaggtgcagaatcctcctttgaagatgcttcttcttctgtgggctgtttgggctccgtgggcacgggcggcggcgggggcaccgcctgcacgggtccggccggcatgactgcgacgctcagggctgccagtccgcctcggtgtcggtgagcggtgccgcctcaagacagcctccccgctcggtcagtacgacgagctcgcaagatggcggcggccgagcgagttgccggggggggggggattaatttaattaaggat

SEQ ID NO: 60205 - DNA, 1260 bp, Homo sapiens
gtggcggtacagacacttttaactcacagtaaaagcaaaagcaacagctcaagcagcctccttggagaaaacctgaaaattcaacttgttcaagagaaggtcttgtacgtgcctaagttctagagcctcctgacgtgagcatggctgagagtgaggaccgctccctgaggatcgttctggtagggaaaactggaagtgggaaaagtgcaacagcgaacaccatccttggagaggaaatctttgattctagaattgctgcccaagctgttaccaagaactgtcaaaaagcatcccgggaatggcaggggagagaccttcttgttgtggacactccagggctctttgacaccaaggagagcctggacaccacctgcaaggaaatcagccgctgcatcatctcctcctgcccagggccccatgctattgtcctagttctgctgctgggccgctacacagaggaggagcagaaaaccgttgcattgatcaaggctgtctttgggaagtcagccatgaagcacatggtcatcttgttcactcgcaaagaagagttggagggccagagcttccatgacttcatagcagatgcggatgtgggcctaaaaagcatcgtcaaggagtgcgggaaccgctgctgtgcctttagcaacagcaagaaaaccagtaaggcagagaaggaaagtcaagtgcaggagttggtggagctgatagagaaaatggtgcagtgcaacgaaggggcttacttttctgatgacatatacaaggacacagaggaaaggctgaaacaacgggaagaggttttgaggaaaatctacactgaccaattaaatgaagaaattaaactagtagaagaggataagcataaatcagaggaaaaaaaggagaaagaaattaaattgctaaaattaaaatatgatgaaaaaataaaaaatataagggaagaagctgagagaaatatatttaaagatgtttttaataggatttggaagatgctttcagaaatatggcataggtttttgtcgaaatgtaagttttattcttcctaatttactgtgatttgttaatggatgaattgtattttgcaaagatagttagagaaatacctccttccccttagctttattaaggtatcattgataaataaaaataaaatatgtttaatgtatataatgtgatttttaaatatatatatatatatatatatacacacacattgtgaaataatgaaataaaggtaattaacacatctaaaaaaaaaaaaaa

SEQ ID NO: 60206 - DNA, 2405 bp, Homo sapiens
tcccgggtcgacgtttcgttggcgatggcggagggcgagaggactgagtgtgctgagcccccccgggacgaacccccggctgatggagctctgaagcgggcagaggagctcaagactcaggccaatgactacttcaaagccaaggactacgagaacgccatcaagttctacagccaggccatcgagctgaaccccagcaatgccatctactatggcaaccgcagcctggcctacctgcgcactgagtgctatggctacgcgctgggagacgccacgcgggccattgagctggacaagaagtacatcaagggttattaccgccgggctgccagcaacatggcactgggcaagttccgggccgcgctgcgagactacgagacggtggtcaaggtgaagccccatgacaaggatgccaaaatgaaataccaggagtgcaacaagatcgtgaagcagaaggcctttgagcgggccatcgcgggcgacgagcacaagcgctccgtggtggactcgctggacatcgagagcatgaccattgaggatgagtacagcggacccaagcttgaagacggcaaagtgacaatcagtttcatgaaggagctcatgcagtggtacaaggaccagaagaaactgcaccggaaatgtgcctaccagattctggtacaggtcaaagaggtcctctccaagctgagcacgctcgtggaaaccacactcaaagagacagagaagattacagtatgtggggacacccatggccagttctatgacctcctcaacatattcgagctcaacggtttaccctcggagaccaacccctatatatttaatggtgactttgtggaccgaggctccttctctgtagaagtgatcctcacccttttcggcttcaagctcctgtacccagatcactttcacctccttcgaggcaaccacgagacagacaacatgaaccagatctacggtttcgagggtgaggtgaaggccaagtacacagcccagatgtacgagctctttagcgaggtgttcgagtggctcccgttggcccagtgcatcaacggcaaagtgctgatcatgcacggaggcctgttcagtgaagacggtgtcaccctggatgacatccggaaaattgagcggaatcgacaacccccagattcagggcccatgtgtgacctgctctggtcagatccacagccacagaacgggcgctcgatcagcaagcggggcgtgagctgtcagtttgggcctgacgtcaccaaggccttcttggaagagaacaacctggactatatcatccgcagccacgaagtcaaggccgagggctacgaggtggctcacggaggccgctgtgtcaccgtcttctctgcccccaactactgcgaccagatggggaacaaagcctcctacatccacctccagggctctgacctacggcctcagttccaccagttcacagcagtgcctcatcccaacgtcaagcccatggcctatgccaacacgctgctgcagctaggaatgatgtgaggtgacgggcggggcggcctgcatcccagggcccctccaatcccaccggacccaggccctgggctaggggcagagcaggccccgccccagggcaatgttggacccccttttactttgtaaagtttgtatttattcccctttaggtttgcagagggggtaggggcagagtcaggggctggccagagggtctgctccctggacagagaggaaggaggtggagcagctggggctgggggcacagcctgggcattctgtggggaggccgtcctcggggtggggtggggccgagtggctgccctgcccccctcatttgcatggctcctcccccactcaagcaatagggccccgccataggaagacccccagagagagggtcagcaggggggccccgcctgcgcctcccctcctatagccccatggtggggctaggctggggctcacccccctccccagctattttatgtctgtaattaaatatgttaaaataaagtcattatcggaagtcagcttgtctctggatggtggagccgaaggagctgcccgggttgggttacgcctgctcaggagatccggagggtggggaggccgcaaagtcccgctggccgggcccacccagctctgggctgaccgcccaagtggcctctgcctctgcccagcaccgtgggctcctggggagagttctgccccctgggtggggcgatgaggccagcactgagtggagcggagcggaagctgaggcatagcctcatcctttgctggctccagcaacaagcatgacagtgccgctccctgctccctgctcagggtaggcccagcagtggttcttgacatcacacgatgaggcgcgcatctcccggaattccaccacgtggtctagggtcgtcaat

SEQ ID NO: 60207 - DNA, 2182 bp, Homo sapiens
  misc_feature (1)...(2182): n = a,t,c or g
agcccacctcaggtgccttctcgccggccttcctcacccaccatgtctcggcagtcctccatcaccttccagtctggcagccgcaggggcttcagcaccacctcggccatcaccccggcagctggccgctcccgcttcagctctgtctctgtggcccgctctgcagcagggagtgggggcctgggaaggatcagcagtgctggggccagctttggaagccgcagcctctacaacctggggggtgccaagcgggtctccatcaatgggtgtggcagcagctgccgaagtggctttggtggcagggccagcaacgggtttggagtcaacagtggatttggctatgggggtggagttggaggaggcttcagtggccccagcttccccgtgtgtccccctggaggcatccaagaggtcactgtcaaccagagtctcctgactcctcttcacctgcaaatcgaccccaccatccagcgggtgcgggccgaggagcgcgagcagatcaagaccctcaacaataagttcgcctccttcatcgacaaggtgaggttcttggagcagcagaacaaggtcctggagaccaagtgggccctcctgcaggagcagggctccaggactgtgaggcagaacctagagcccctctttgattcctataccagtgagctccgacggcagctggaaagcatcaccaccgagaggggcaggcttgaagctgaactgaggaacatgcaggatgttgtggaagatttcaaagtcaggtacgaagatgaaattaacaagcgcacagctgctgagaatgaatttgtagccctgaaaaaggacgtagatgctgcctatatgaacaaggtggagctggaagccaaggtcaaatctctgcccgaggagatcaacttcatccactcagtctttgatgcagagctgtcccagttgcagacccaggtcggtgacacatccgtggtgctgtccatggacaacaaccgcaacctggacctggatagtatcatcgccgaggtcaaagcacaatacgaggacattgccaaccgcagccgggccgaggctgagtcctggtaccagaccaagtacgaggagctgcaggtcaccgcaggcagacatggggatgaccttcgaaacaccaaacaagagatctctgaaatgaaccgcatgatccagaggctgagagctgagattgacagcgtcaagaagcagtgttccagcttgcaaacggccattgctgatgcagagcagcggggagaactggctctcaaggatgcacgggccaagctggtggaccttgaggaggccctgcagaaggccaagcaggacatggctcggctcctgcgtgagtaccaggagctgatgaacatcaagctggccctggacgtggagatcgccacctaccgcaagctgctggaaggcgaggagtgcaggttgagtggagagggagtttctccagttaacatttctgtggtcacctctactctttccagtggctatggtcgcggcagcagcattggaggtggaaacctgggcctcggtgggggcagcggctactccttcaccaccagtggtgggcatagcctgggtgcaggcctgggaggttctggattcagtgccaccagcaaccggggcttagggggcagtggttctagcgtcaagtttgtctccaccacatcctccagccagaagagctacacgcactaagagagccccatggctccctctaccctgccttgaggcctgtttgcagtcacacctggacaccagggtcctcctccttcctctctccttgtaaggtgcacctgtgctgctgggagcctggagtactggctatacccattcccaggcctaagccagcctctccctcctgacagtgcccagactgccagcagcacccgtctgttacacatgtgaaaccaaagcctgctctctcccaaggctctcattcagcctatcttgcgaggcccgggcagctggaaagtcctcctccagctccacctccctccctccctccagatgcagaggctggggagtctctcaatgccaggttgtcacccacctgtctcatagtgtttataagtggcctgctgggagtgagtgctccctctgttccctccctggaatgtgtctattaaatgcatgtgtcacctgtttggtgtctggcccttccnnnanaanaaaaaaaaaa

SEQ ID NO: 60208 - DNA, 582 bp, Homo sapiens
tttcgtgcggcggcgagagcgacggtcccatctttcccaccctcttggttgccgctggccacacgccctccgctggcggcgacttctcagctccgtgcgcccgggctggacagtgagcctcgagaggagacgcgggcggctagagccggagtggggcgagccgcggaacccggccgggagccgcgcgaggcgtgatcggagggtatggttggcatggaattgaatttcatctgtctgtgggaattgtaagcaagattgccatcacgaaagccaaagtggatttctccagtgtggtgtgcctgcccccttccgtcattgctgtgaatgggctggacggaggaggggccggcgaaaatgatgatgaaccagtgctcgtgtccttatctgcggcacccagtccccagagtgaagctgttgccaatgaactgcaggagctctccttgcagcccgagctgaccctaggcctccaccctggcaggaatcccaatttgcctccacttagtgagcggaagaatgtgctacagttgaaactccagcagcgccggacccgggaagaactggtgagccaagggatcatgccgc

SEQ ID NO: 60209 - DNA, 1272 bp, Homo sapiens
agcgctgccgtcgggaggcgctccgaggttcgaggctgtgccccgcgaccccgccttcggcgctcggctcgcaggatggatcccgtacccgggacagactcggcgccgctggctggcctggcctggtcgtcggcctctgcacccccgccgcgggggttcagcgcgatctcctgcaccgtcgagggggcacccgccagctttggcaagagcttcgcgcagaaatctggctacttcctgtgccttagttctctgggcagcctagagaacccgcaggagaacgtggtggccgatatccagatcgtggtggacaagagccccctgccgctgggcttctcccccgtctgcgaccccatggattccaaggcctctgtgtccaagaagaaacgcatgtgtgtgaagctgttgcccctgggagccacggacacggctgtgtttgatgtccggctgagtgggaagaccaagacagtgcctggataccttcgaataggggacatgggcggctttgccatctggtgcaagaaggccaaggccccgaggccagtgcccaagccccgaggtctcagccgggacatgcagggcctctctctggatgcagccagccagccaagtaagggcggcctcctggagcggacagcgtcaaggctgggctctcgggcatccactctgcggaggaatgactccatctacgaggcctccagcctctatggcatctcagccatggatggggttcccttcacactccacccacgatttgagggcaagagctgcagccccctggccttctctgcttttggggacctgaccatcaagtctctggcggacattgaggaggagtataactacggcttcgtggtggagaagaccgcggctgcccgcctgccccccagcgtctcatagtccctcacccttccgcggaaagagcccccttactccacctccccgccagcctggggccaccccccctcactgcatcctggggggccaccccccctcactgcatcctggggccaccccccctcactgcatcctgggaaccttcgccctgcaaggcgtttgctatcttcaagccactgggcggagctgcagccctggaggagggggcgggtcgaggctgcgtggtgatggggtctccgcccccacgccctgccgggcagggctggagctggacagaagccagtgcctttaagtcatttgtgtcaaaaccctctggggtccggaggctgtgcgggtgtcctcctggcaataaacactacccggttctcaaaaaaaaaa

SEQ ID NO: 60210 - DNA, 805 bp, Homo sapiens
ttttatttttagattttttaattttcaacaaattgaacatttacaacattgttacaactgagaacattgacaacacagggattttcaacagagtacatttagcaaggatttttttcagaagaaaacaaaatgtcagtacattttgtattccatagcattgctctgtggaaaattagctggcatccattttaaatgaaccctgctgaccttcttccattccgtggcctgaataaaaaatatcctcgactttgacttgcaaagggactttggaattcttcgtccactctgaatctcttcattcttctctcatgcaggtgaggaacgagctgcagcaacggatgcacaactgacgacacaacatttgacttgcccaacttctgtgtcttcgaataatgaaataagaaccttttagtattatctttttcatcttgttcctgaggctttggtagcattcccataatcataaagcaaagctcctccagtgcgttggatgcctgaggctgagaatcaatggacagaaaagacgaacaagtatcatctatctcattccacaactgtagctgttgttcaggctgtaatccttgaggtaatattggagcacctcggcaggcgcccgcgcaccaggcgagcagcagcagcagcagcaggagcggggacgccgcggccacctgtccggcgggcgacctggggcggcagctctctgttcgcagcatctcggcggctgcgggaggctcggtgctagggacgctgcgctgcgccacgcgtagctggtgctccacctggtgccctggctgtgcctcggggc

SEQ ID NO: 60211 - DNA, 5616 bp, Homo sapiens
gcccccgcccggcccgccccgctctcctagtcccttgcaacctggcgctgcatccgggccactgtcccaggtcccaggtcccggcccggagctatggagcggcgctggcccctggggctagggctggtgctgctgctctgcgccccgctgcccccgggggcgcgcgccaaggaagttactctgatggacacaagcaaggcacagggagagctgggctggctgctggatcccccaaaagatgggtggagtgaacagcaacagatactgaatgggacacccctctacatgtaccaggactgcccaatgcaaggacgcagagacactgaccactggcttcgctccaattggatctaccgcggggaggaggcttcccgcgtccacgtggagctgcagttcaccgtgcgggactgcaagagtttccctgggggagccgggcctctgggctgcaaggagaccttcaaccttctgtacatggagagtgaccaggatgtgggcattcagctccgacggcccttgttccagaaggtaaccacggtggctgcagacccagagcttcaccattcgagaccttgcgtctggctccgtgaagctgaatgtggagcgctgctctctgggccgcctgacccgccgtggcctctacttcgcttttccacaacccgggtgcctgtgtggccctggtgtctgtccgggtcttctaccagcgctgtcctgagaccctgaatggcttggcccaattcccagacactctgcctggccccgctgggttggtggaagtggcggtgacctgcttgccccacgcgcgggccagccccaggccctcaggtgcaccccgcatgcactgcagccctgatggcgagtggctggtgcctgtaggacggtgccactgtgagcctggctatgaggaaggtggcagtggcgaagcatgtgttgcctgccctagcggctcctaccggatggacatggacacaccccattgtctcacgtgcccccagcagagcactgctgagtctgagggggccaccatctgtacctgtgagagcggccattacagagctcccggggagggcccccaggtggcatgcacaggtcccccctcggccccccgaaacctgagcttctctgcctcagggactcagctctccctgcgttgggaacccccagcagatacggggggacgccaggatgtcagatacagtgtgaggtgttcccagtgtcagggcacagcacaggacggggggccctgccagccctgtggggtgggcgtgcacttctcgccgggggcccgggcgctcaccacacctgcagtgcatgtcaatggccttgaaccttatgccaactacacctttaatgtggaagcccaaaatggagtgtcagggctgggcagctctggccatgccagcacctcagtcagcatcagcatggggcatgcagagtcactgtcaggcctgtctctgagactggtgaagaaagaaccgaggcaactagagctgacctgggcggggtcccggccccgaagccctggggcgaacctgacctatgagctgcacgtgctgaaccaggatgaagaacggtaccagatggttctagaacccagggtcttgctgacagagctgcagcctgacaccacatacatcgtcagagtccgaatgctgaccccactgggtcctggccctttctcccctgatcatgagtttcggaccagcccaccagtgtccaggggcctgactggaggagagattgtagccgtcatctttgggctgctgcttggtgcagccttgctgcttgggattctcgttttccggtccaggagagcccagcggcagaggcagcagaggcagcgtgaccgcgccaccgatgtggatcgagaggacaagctgtggctgaagccttatgtggtacctccaggcatacgaggaccctgcacagggagccttggactttacccggaggctggtctaattttccttcccgggagcttgatccagcgtggctgatggtggacactgtcataggagaaggagagtttggggaagtgtatcgagggaccctcaggctccccagccaggactgcaagactgtggccattaagaccttaaaagacacatccccaggtggccagtggtggaacttccttcgagaggcaactatcatgggccagtttagccacccgcatattctgcatctggaaggcgtcgtcacaaagcgaaagccgatcatgatcatcacagaatttatggagaatggagccctggatgccttcctgagggagcgggaggaccagctggtccctgggcagctagtggccatgctgcagggcatagcatctggcatgaactacctcagtaatcacaattatgtccaccgggacctggctgccagaaacatcttggtgaatcaaaacctgtgctgcaaggtgtctgactttggcctgactcgcctcctggatgactttgatggcacatacgaaacccagggaggaaagatccctatccgttggacagcccctgaagccattgcccatcggatcttcaccacagccagcgatgtgtggagctttgggattgtgatgtgggaggtgctgagctttggggacaagccttatggggagatgagcaatcaggaggttatgaagagcattgaggatgggtaccggttgccccctcctgtggactgccctgcccctctgtatgagctcatgaagaactgctgggcatatgaccgtgcccgccggccacacttccagaagcttcaggcacatctggagcaactgcttgccaacccccactccctgcggaccattgccaactttgaccccagggtgactcttcgcctgcccagcctgagtggctcagatgggatcccgtatcgaaccgtctctgagtggctcgagtccatacgcatgaaacgctacatcctgcacttccactcggctgggctggacaccatggagtgtgtgctggagctgaccgctgaggacctgacgcagatgggaatcacactgcccgggcaccagaagcgcattctttgcagtattcagggattcaaggactgatccctcctctcaccccatacccaatcagggtgcaaggagcaaggacggggccaaggtcgctcatggtcactccctgcgccccttcccacaacctgccagactaggctatcggtgctgcttctgcccactttcaggagaaccctgctctgcaccccagaaaacctctttgttttaaaagggaggtgggggtagaagtaaaaggatgatcatgggagggagctgaggggttaatatatatacatacatacacatatatatatttttgtaaataaacaggaactgattttctgcctccatcccacccatgagggctgcaggcactacaaaagagctgactactgagaattctggaaaacaaggtttttttttatttgtagctatagctacaacttggcagcatgggggagggtgggaatgtcctggagggtctcccagccctccgcaagcagagtacaaaggctgctcggggggccagccgagggcgcgggtgcagcagtgaaagcagcagcactaaacctggtgcccccctcaggtggggtgtctggaagacggtgggcaatccctgcaggatgggcgaggaccagaccccagggcggggatcctgcatccctagaccatgttgggtcctgggtcagggcacctgggatgctagggaggggttggaaatgggaggggctagacatcaaaacaataactgaggtgggggcaggtggtctcagtgtgggtggtccacaatggggcatggactgcggtctgaagagggcctgtcctcactcaggtctgggctctagcagtgtggcacttccgacagagcacgtgaccgtccagggggaagcagccattgtcatctgcctcaatcgacaggggcttcccgcagtcctcacacttgtaacacttcatgtggaagttcttgtccagggcgaccactcgcacagtctcatctcggccaggctcaggcatgatgggctcagagcagacggagcacctcggggcgtactgcttgtggtagtcggggacacagtggggccggttggcctggtccacgatgaaggaggtgccctccagggggcgggcgcagaccacacaggtgaagcagtgcgggtgataggccttgcccgtggccctcagcatgcggtcagtgatgggctccccgcaggtgttacacttctccagggtgtcagtgtaacagccctcgcagtacggcgccccctccagactgtagaactgctggccctggagctgctgcgcacactggtggcaggtgaagcaggcgatgtggaacagctgccctagagcgcggacggctggctgcgcccgggccaggggttgatggcatcggccgcagagttcgttgacagccacattctgcctctgaggatgctccatgtcctgcattagctgctgggtcagctgctccagctcctccacctccttcagagtcaggggccctggggccccaggggagcgcacctggttttggttctgagccggtgggggcacggggtgctgcttctcctgcactcggggcttctccctctgctgggcataggtgaagctgggaggttgaggggagcctgtgccagcagaaagagcttcggggtgccccaatttttgatttggttgtgacccagatccacctggggctccaggactgaacttggaagccacaggagtaaacttaggagtcactggagaaaacttaggggctggagccggagatgaggctgggggccctcggggctgggtgttagccaaagacacaggctgggtctgggactggacatggagttggacctgaggcttgggctggggctggggctgaacatggaactgtgtctggctctgagccggagccggaacctggggcagaggctgggagctggaaggggacttccaaggaggcaggggtgctgtgcccccggctgcaggcttggtactggacttggaactgaatggagtggccactggtgggggcacatatccagatgacacccgggctttgaaaggatcattcttggtcatgtcatccagcagtgaggacagagagtcgatctccaaatcaatactgctcaccttctccctgggctgtggtgggggcggtatgggggcctcaggccctccctcctcctccggaggaggcggcggggaagggaagatctcctcctccagaggcgcagggagaaatgattcctcgatcgggggagggggcggcgggaaggcacctcccagagcaccctctgcatcgtcgccatccccagcaaggggaggtggaggcaggggaaagtcttccgggggcggcgggggaatctcgcccacccggcccatctgtgcgcgctgggccccgggtgccgggggaggctcgctgtccccgggccggaagggattcactttgggctttggggccaccacagggccgaacttcttctgcggggcgtaaaaagccggagccgagaccgaaacggagatcgcgggagacgggcggggggccgccatggccgggccgggctgcgcaggccggagcgtgcgcgccgcgtctcgggtggccgcctcggcgccgggtccgc

SEQ ID NO: 60212 - DNA, 371 bp, Homo sapiens
agagcgaacagggagcggagcttttgtctgtcggactccctggactgaagagagggagaatagaagcccaagactaatattctcaagacggtttattacccacaactctttgtctgggtcagtcaagaaccatttccaaacaaggacatggagggaaggcttcctaagggaaaacttcctgacccaaaggaagggaaccgcaagaaaaacgatgagacaaacgctgcctccctgactccactttttttaatcggaacacctccatttgtattacatatggtgtatgggtattgatgaggtcatggtatcatatatgggattttttcttgtgtaaatcatcaagtataatgaagaaactatgggactcttgg

SEQ ID NO: 60213 - DNA, 2059 bp, Homo sapiens
acgatcccgagctcggcagcagcgcagcgggccggcccacctgctggtgccctggaggctctgagccccggcggcgcccgggcccacgcggaacgacggggcgagatgcgagccacccctctggctgctcctgcgggttccctgtccaggaagaagcggttggagttggatgacaacttagataccgagcgtcccgtccagaaacgagctcgaagtgggccccagcccagactgcccccctgcctgttgcccctgagcccacctactgctccagatcgtgcaactgctgtggccactgcctcccgtcttgggccctatgtcctcctggagcccgaggagggcgggcgggcctaccaggccctgcactgccctacaggcactgagtatacctgcagggtgtaccccgtccaggaagccctggccgtgctggagccctatgcgcggctgcccccgcacaagcatgtggctcggcccactgaggtcctggctggtacccagctcctctacgcctttttcactcggacccatggggacatgcacagcctggtgcgaagccgccaccgtatccctgagcctgaggctgccgtgctcttccgccagatggccaccgccctggcgcactgtcaccagcacggtctggtcctgcgtgatctcaagctgtgtcgctttgtcttcgctgaccgtgagaggaagaagctggtgctggagaacctggaggactcctgcgtgctgactgggccagatgattccctgtgggacaagcacgcgtgcccagcctacgtgggacctgagatactcagctcacgggcctcatactcgggcaaggcagccgatgtctggagcctgggcgtggcgctcttcaccatgctggccggccactaccccttccaggactcggagcctgtcctgctcttcggcaagatccgccgcggggcctacgccttgcctgcaggcctctcggcccctgcccgctgtctggttcgctgcctccttcgtcgggagccagctgaacggctcacagccacaggcatcctcctgcacccctggctgcgacaggacccgatgcccttagccccaacccgatcccatctctgggaggctgcccaggtggtccctgatggactggggctggacgaagccagggaagaggagggagacagagaagtggttctgtatggctaggaccaccctactacacgctcagctgccaacagtggattgagtttgggggtagctccaagccttctcctgcctctgaactgagccaaaccttcagtgccttccagaagggagaaaggcagaagcctgtgtggagtgtgctgtgtacacatctgctttgttccacacacatgcagttcctgcttgggtgcttatcaggtgccaagccctgttctcggtgctgggagtacagcagtgagcaaaggagacaatattccctgctcacagagatgacaaactggcatccttgagctgacaacacttttccatgaccataggtcactgtctacactgggtacactttgtaccagtgtcggcctccactgatgctggtgctcaggcacctctgtccaaggacaatccctttcacaaacaaaccagctgcctttgtatcttgtaccttttcagagaaagggaggtatccctgtgccaaaggctccaggcctctcccctgcaactcaggacccaagcccagctcactctgggaactgtgttcccagcatctctgtcctcttgattaagagattctccttccaggcctaagcctgggatttgggccagagataagaatccaaactatgaggctagttcttgtctaactcaagactgttctggaatgagggtccaggcctgtcaaccatggggcttctgacctgagcaccaaggttgagggacaggattaggcagggtctgtcctgtggccacctggaaagtcccaggtgggactcttctggggacacttggggtccacaatcccaggtccatactctaggttttggataccatgagtatgtatgtttacctgtgcctaataaaggagaattatgaaataaaaaaaaaa

SEQ ID NO: 60214 - DNA, 2652 bp, Homo sapiens
ccttcaagtcctaacctttaacctctggaagaaaggatgatgaccaagatggaccccaatgaccaggctcaaagggacatcatatttgaactgaggaggattgcatttgacgcagagtctgatcctagcaatgcccctgggagtgggaccgaaaaacgcaaagccatgtacacaaaggactacaaaatgctgggatttaccaaccacatcaatccagccatggactttacccagactcctcctggaatgctggccttggacaacatgctgtacttggctaaagtccaccaggacacctacatccggattgtcttggagaacagtagccgggaagacaaacatgaatgcccctttggccgcagtgccattgagctcaccaaaatgctctgtgaaatcctgcaggttggggaactaccaaatgaaggacgcaatgactaccacccgatgttctttacccatgaccgagcctttgaagagctctttggaatctgcatccagctgttgaacaagacctggaaggagatgagggcaacagcagaggacttcaacaaggttatgcaagtcgtccgagagcaaatcactcgagctttgccctccaaacccaactctttggatcagttcaagagcaaattgcgtagcctgagttactctgagattctacgactgcgccagtctgagaggatgagtcaggatgacttccagtccccgccaattgtggagctgagggagaagatccagcccgagatccttgagctgatcaagcagcagcgcctgaaccggctctgtgagggcagcagcttccgaaagattgggaaccgccgaaggcaagaacggttctggtactgccggttggcactgaaccacaaggtccttcactatggtgacttggatgacaacccacaaggggaggtgacatttgaatccctgcaggagaaaattcctgttgcagacattaaggccattgtcactgggaaagattgtccccacatgaaagagaaaagtgctctgaaacagaacaaggaggtgttggaattggccttctccatcctgtatgaccctgatgagaccttaaacttcatcgcacctaataaatatgagtactgcatctggattgacggcctcagtgcccttctggggaaggacatgtccagtgagctgaccaagagtgacctggacaccctgctgagcatggagatgaagctgcggctcctggacctggagaacatccagattcccgaagccccaccccccatccccaaggagcccagcagctatgactttgtctatcactatggctgagcctggagccagaaacgacggtacccaggagaagggattttgggcccaggagaaacacttacattctggtgccttgtcttttgcttgtacagaatctgtagtgattttggtggccagtaaatgccagccatttctcaaacccacctcggaccacccagagtttcctcttggtccctgtctactaagagtcatgaaggcagggtgctctgcccactccatcaccatgaagcctgggattgggccacgaggaacaaacagcagatgcccttgccttccagtccaagaaactgcttcttgaaatggatttaacaacagccactcaccttttcctcctgagcctgctctctgatcagctggatccccacgtgagcaacagttggcccaggaaaggctgcctgcagaggacaggtgtgttgggcgtgttgagagccttgaagtgactacctgtatcttagatctgagtacaagcctgaggcttttgcttttgtcttttttgatgagggctcactccagcttcatatggtgccaagacgttgctgcttctgaggttggctctaacatctctggtctttagagccaccagatctctctggcccatacagatatcagagcagacggaaatttctccctgcaagcgctcagtctcatcccagcaagtcaaagacctcctggccaagtcctgccctcttaagtctccaggaacgctgcagggaaaacccagctgaggcctgggcctagactgtggtgaggtcactagattctactgctcttcccccacattaataccttttccttcctcagagagaaatctcccctaacctgaattgcagccccctccagtttgctttcctttggccttccagaccccaggaagttggccttcccttcctagtgctatggtttctgccattggccatgatttcagggagctggctgaggccggctgaggccacacctgtgccagtggggcttccctggtgctgcagcacttgtaaaccacacacacagcctctctccctggacatacgttagcacattggcattcagtattggtggcctggcatggtaggtactacccaatgaagagtgtactatatattttcattactataggccatacttatacagacgtgtatatatatttatataagatctacctatcttaggatggaaccttggggaaaaataaaattgaggggaagtaaaaagtatgtaacacttccagttgtgagccaagattgtaaccagagagcagccaggagcttcctgtcagtaaccatgttttcaataaatactctttcatgtacaaaaaaaaaaaagggggggccgttttaaaggacccagccttacccc

SEQ ID NO: 60215 - DNA, 3234 bp, Homo sapiens
caaagggttctttaaaaagggcgccccttttttttttttttgattgtaaatgttttaatagaaatacacaatctttcactttctcagacagcaataaaggggtttgtaacaatcactaagaatacagaattttgccacgaggatgcagcataatctactgcaaagctgatctgcccaattacacgtagtcagctgcaagaatatcagaaatcaatacaaacaagtattgacaggtgttacagacatgcaaaatatccttcaatgcaacgaatttttaagaaatcagctagcctatattaatcagatgttttaggtcaaaccaagtttccatcttgggctcagtgaaatagtattaactcattgagtctcctttcccccaggaatgttgggaatggcagaacagaaagagctatcactccttaaattcttttatgcaagtgttactccaacacttattttacttggtttacttggaatgtatgagaggaaactgatgttttttacaatggccaactgtatgtctaaattttcagttctcctttttgtgagtttcctgccagaaatccttgttaaaggatcagcgggtgttcaccccgaagttcttgctgttttcagtgtcctactgcagacaggtttaaaaagccaactgaacagcagcagaatgaagtatttttgaggtctattcaaaaatgtacagtcccaccactcactagaacaagtacacaagtaaatggactcagccagtgcaggagatggaaggctgccattttttatgtttgtgcacagccttacagtttggaggtgtgtttggcctactctaatatttctagtttgtcaaaggctgtacactgttactgccagtttgacctacatactgtgttccctttggatccctgctaccatttggacctcgtgtgtgtgtgtgtgtatgtgtgtttgtgtgtgtgtggtttggtttggtttgagacagggtcttgcactgtcaccccagctgcagtgcagtggcacaatctcggctcactgcagccttgacctcctgagctcaggatcctcccatctcagcttcttgagtagctgggacaacaggtgtgtgccatcacacccagctaatttttttattttttgtagagataggggtctcactacgttgcccaagctggtcttgaactcctggcttcaagcgatgctcccacctaggtgtcccaaagtgctgggattacaggtgtgagccacattcctggctgagtttggaacttgtaatctcattgttttctaaataatgtttcatttttcttcagtgttgaaaatagttgatttacttaagaatggcatgatcatgatgttccaagattctgattagtttctttcaaagcattctgcgcctcttcaatgcccacactgctgagcactataataatagatgttgttaggccaaaggatgtcagatgtaaaatatgttctctagccccactcttagaaatgttttatcaatgactcagtccacttgattttcaaaaagtcaatgccatcccattaaacaagtaaccccttaggtacagaataattaattcctgcctgagtcactttaacagccttctatagagtgacatagtcttgctttttttcacaagcaatagctgaaaagaacaaatctcaactgtaagaactgtcagtacattgtagggataaagcactttttgaaaaaaaaatctctggcatgtattagacagactgaacatgagatagggttggggtgggctgagccttttggtgtcattaactgaatacacaagaatgaacctctcatcagatatcaggaatccatgtcatgcaagtactacaataagataacagtaaattcaggaatgttactggggaaaaggaagatagcctcactgagaatttaatcatttaacattaaaaaaacttttacattggttcaagaaggtaaaactgtaagaatcagattaggctcaaactggcaagaagccatctaaatctttctttttagtggatctttttctttttttgtccatagcgccgtctgcgctgtttataaaggtgacgaaaatttatgtataaacctaaaaatatcattataagataaatctgaagaaaaaaggaaaatctaactttgattttcactggatatggcaatgtgaaactgaatcgtccggtctcattgaatattggaatggactgaatcactgagacagcttccgccaaacatcccagtggatataagggaatccacagagtgtaacgaagccatgtgagcaccttccaatccatgtcaatgcacgtcagcatgtagaaagagtacctgaaaatttcaattgcactccacaaataaaacacaaagaaaaccacagctttgttctgcatttcttccatggtgccaaagatgataaacaaaataaaatttcttccaagaagctggatcagagaaggcagcaccggtgacgtagtgactccaattgctgcattgatagtttccacaactgccagcatctggcagaaatacatcatgtcagccacagtatggaatgtgtcataaaaggactcttttcccaagatacagaatcgcacagtcaggttgacaaagatccaggagaatcccaagaattgcacaagattatacataaacaggtatcctttccttaagtttgtaagagtttcaggagagccttcgctttccagtcggagtttatttaggcgctcttcttccttagctctgagctccatttccgcatcagattcatccagccaacgatcaaagtcaggagccaaaaacagtggtcgcttttcctgctttgtgagtctctcccaccactgactcactttcttctgtactgtaatgtttacctgcctctgggtcagtttgtaaacaggctctggtttcacaaggtctaagaactccaggtgaaattcatagacattgtctcctttggcaccatgtccttgagctttgaaatgcagcacgttttcagtgatgctgatggcagggttctgtacgtcactcagctccacgcgcagatatagctcgcggtgtcgctgagcccagtagacatgcggcgtcaacacctgattctccatggccacactgcccagggcgcggggaggctaggctcgctgcgcctcgctgcctcaggtagtgctctgctggcgcgagcagaaagcaggcctcaaaccctagcgctcctgagcgcctgcaacccggcacctcgagccggg

SEQ ID NO: 60216 - DNA, 3326 bp, Homo sapiens
gctccagcctccaacgactaaggctgcaaggtcagacgagaggcagaggccccagggccgagtcctgtagtgaagactgtctgcacgatgaactcctagaaaaatagggacttctgctgctgaggttttgtcaggttaacgcggttacaaaagcagggtcaccactggctgaagacatcgacacgggcgccactcgcccgtgtgtgtatttaaatctatcagcttagcaccattgcaaagtcaagtgatttcaaagatagctacaaagttacaaatatatattatgagattattacaatgatattcagtttcatctgaactgtgatttaattttatttgaatttggaggcttgtaactgtttaatcctttcttattccgccacacaggaaaatgcctaagttctaacgttacacttaaaactgcactgtgataacacacggttgtacagaatgcttcagcagtatgtgtattttgaggtagacaggtaatatttattcatacacagctactcatagacccttatacagtgactctagaaaatgatttggatgaatagcaagcttaggtaactgagtaactcaaaccgtcctgggagttgatgggcttaaagaaagagatgaattttgaccaattcctaacaaagaacttgcttttgttttaaaaggccttacactgacaatcactcagatggaattaatatgcatgtttttctcatccctaagataaggtctcttgagctgctttttatctaaagaaagcagaagaaaacagcgaaattcaagaaaaaaaatctccaaggtggttggcttcttggaaagcctgaatggtggccaaggaccacctgggctcccaaggagtggagggaggagggattcagttccacaggaaataaatgggaacagcccggtggagaagacaatgacaactgcaggacaacacctcaaccactccagaaaacagcccttgctcctccttctggccttttcatatttccaagttactgttttaaaggaaaaaaaaaaatgtgtgtgtggctgtttattctctaatgtgacaaaaacatgaccatccgggaggagaggggctaacggtgcaaccaactgaggctgaaacacagattcagctgaaatgcagcttctgcagagcgggggccggcttccctcctagcccttcagctgctcaccctgtccctgcagctctgaaaaacgcccttccagtaagcggccaaggagcacacgagctcctcccaccagcaaaggggaaggggaggccttggacagacggggcagtgagtgtgtctgggcataagcccgaagccaccaccagcaaatcctccccacggatgccaggagagctctgatcctaaccaccaccacctctcccttcagcaaaatcaaaacagggaaagaaaacataggaaaccaaacggcggcactcaacaatttgggggaacaagtaatttttaaaagtaagagttgttccgtaaaccagcactgagctggtcacacggcctctggtctacctgctgagcatgtcagaaatcccgacgtggcgtctggggccccgtttccagggctgggtgtgtcagccacaggtgagcgacagttctgagtgagtccaagtgccgacctcacacaatgaaaggcgaaccagtcagggagctgctgttgtgtttcataaggtgggaaattaaatacaatggttaaatcataatgttaatggaaacctcttttggtttgcttttaaattaattttttatataacttctaaatcttcaagaagctaaaggcaacataaatattgtcattcaccatgaaaagacattttttcaataacttaggaaggattcaataaaagtccaactacacttgaggcttatcatgaaacctaaaattcataaactaaactgaagtgaattcagattttcaagacctggaaagcaagcagagggagctcgtgtcagaaggtgactcagaaccgtgttgcctggagcatcactctccctgcaaggctgaagcacggggtggggcgggggagaggacgatcggctctgggagactgtgaagtgttttcatcctctgtaaacgtggtgctggtagtgtcttgttgagtgtgaattctctctcatacaaaagttataaatattctctattcagaagtctggtccacatgacacccagaggcaatgttcttaagcgcggcggccgggagcacccaagggtgcgagggcccagtctgtgggcgctgtgtggcaccattcacagcaagtccatcttgggtctgtagtgcagcaggagcggcgccttcttgaatctccacctagtgacaaccacgaacttgagtgtgtggtccttgcccaggatctcctcgttgcataaaatgtccagctcgttaaaggatgaaaggttgagttttttggcgatgaacttcttcagatgcaagacggtcgcctgggctgagcagcggatccacttccgcttcagcccgcgcagtttgctgctgttacactccaggcagatgctcacctgctcgtcgctgcggtggtagtcgttgtcctcctccggcttctcctccgcggcctctttgtttgaactgtcgtctgctttggtttcaccattccgatgggaatctaagtgctgttttgcagagcaggtctcccccttgatgtctcccggcacctccatgcccaatttgtgatagaactccctctgctttctcatttccgcttcttggaggcctggtaccaatttgtaaacaatatcttgcatggttctgtcatgaccgatgtactgcagggggtggctctggtggatcacaatcctgcaggtggggcaggtgttgttctcctccaggtacttcaccaggcagctcctgcagaaggtgtgcagacactcggtcaccgtggtggcgtcgatgaggtacccgctgcacaggcggcaggtgatgtgggcgttgatgtcccacagcttgatcttcctggtcaacatctttggcttctccgctagacgtccgcgtgtccgtccctctgccggggcatggaggcttcaggccagcactcccacgcgacgctgcctcctggctccgcacgcggactcgcttctgcaccctccttccggccctggctctttttccattttctgagcacgacgcctggggtccctgctacattgtgacgcctgcggtctcggggctgcgggcgagcaaggcgcacgcggggtccgcgccggaggggggagggggcgccgctccctctgggtcccccccaagaggaggagaaaaaagcccgtccggcctcgtgccaagctggcgtggtcatggtcatgcc

SEQ ID NO: 60217 - DNA, 1486 bp, Homo sapiens
ccgggtcgacccacgcgtccggcagagcggagcgtggagagcggagcgaagctggataacaggggaccgatgatgtggcgaccatcagttctgctgcttctgttgctactgaggcacggggcccaggggaagccatccccagacgcaggccctcatggccaggggagggtgcaccaggcggcccccctgagcgacgctccccatgatgacgcccacgggaacttccagtacgaccatgaggctttcctgggacgggaagtggccaaggaattcgaccaactcaccccagaggaaagccaggcccgtctggggcggatcgtggaccgcatggaccgcgcgggggacggcgacggctgggtgtcgctggccgagcttcgcgcgtggatcgcgcacacgcagcagcggcacatacgggactcggtgagcgcggcctgggacacgtacgacacggaccgcgacgggcgtgtgggttgggaggagctgcgcaacgccacctatggccactacgcgcccggtgaagaatttcatgacgtggaggatgcagagacctacaaaaagatgctggctcgggacgagcggcgtttccgggtggccgaccaggatggggactcgatggccactcgagaggagctgacagccttcctgcaccccgaggagttccctcacatgcgggacatcgtgattgctgaaaccctggaggacctggacagaaacaaagatggctatgtccaggtggaggagtacatcgcggatctgtactcagccgagcctggggaggaggagccggcgtgggtgcagacggagaggcagcagttccgggacttccgggatctgaacaaggatgggcacctggatgggagtgaggtgggccactgggtgctgccccctgcccaagaccagcccctgggggaagccaaccacctgctgcacgagagcgacacggacaaggatgggcggctgagcaaagcggaaatcctgggtaattggaacatgtttgggggcagtcaggccaccaactatggcgaggacctgacccggcaccacgatgagctgtgagcaccgcgcacctgccacagcctcagaggcccgcacaatgaccggaggaggggccgctgtggtctggccccctccctgtccaggccccgcaggaggcagatgcagtcccaggcatcctcctgcccctgggctctcagggaccccctgggtcgggcttctgtccctgtcacacccccaaccccagggaggggctgtcatagtcccagaggataagcaatacctatttctgactgagtctcccagcccagacccagggacccttggccccaagctcagctctaagaaccgccccaacccctccagctccaaatctgagcctccaccacatagactgaaactcccctggccccagccctctcctgcctggcctggcctgggacacctcctctctgccaggaggcaataaaagccagcgccgggaaaaaaaaaa

SEQ ID NO: 60218 - DNA, 449 bp, Homo sapiens
tcccgggggccccacgcgtccgcttggaaacccacccagaacctttaccctctgacaccatggtcagctcctgttgtggttccgtctgctctgaccagggctgtggcctggagacctgctgccgccccagctgctgtcagaccacctgctgcaggaccacctgctgccgccccagctgctgtgtgtccagctgctgcagaccccagtgctgccagtctgtgtgctgccagcccacctgctgccgtcccagctgctgtcccagctgctgtcagaccacctgctgcaggaccacctgctgccgccctagctgctgtgtatccagctgctgcagaccccagtgctgccagtctgtgtgctgccagcccacttgctgccgtcccagctgcagcatctccagctgctgtcgccccagctgctgtgtgtccaggtgctgcaggtcccagcgctgc

SEQ ID NO: 60219 - DNA, 409 bp, Homo sapiens
ctccaccctctgacgccatggtcagctcctgctgtggctctgtctgctctgaccagagctgtggtcaaggtctcggccaggagagctgctgccgccccagctgctgccagaccacctgctgcaggaccacctgctgccgccccagctgctgcatttccagttgctgcaggccttcctgctgtatctccagctgctgcaaacccagctgctgcctgaccacctgctgcaggaccacctgctgccgccccagctgctgcatttccagttgctgcaggccttcctgctgtatctccagctgctgcaaacccagctgctgcaggaccacctgctgccgccccagctgctgcatttccagttgctgcaggccttcctgctgtatctccagctgctgcaaacccagctgctgcag

SEQ ID NO: 60220 - DNA, 2466 bp, Homo sapiens
atcagagagagcagaaggatcctgagcctcgcactctgccgcccgcaccaccttccgctgcctctcagactctgctcagcctcacacgatgtcgtgccgctcctacaggatcagctcaggatgcggggtcaccaggaacttcagctcctgctcagctgtggcccccaaaactggcaaccgctgctgcatcagcgccgccccctaccgaggggtgtcctgctaccgagggctgacgggcttcggcagccgcagcctctgcaacctgggctcctgcgggccccggatagctgtaggtggcttccgagccggctcctgcggacgcagcttcggctaccgctccgggggcgtgtgcggacccagccccccatgcatcactaccgtgtcggtcaacgagagcctcctcacgcccctcaacctggagatcgaccccaacgcacagtgcgtgaagcaggaggagaaggagcagatcaagtccctcaacagcaggttcgcggccttcatcgacaaggtgcgcttcctggagcagcagaacaagctgctggagaccaagtggcagttctaccagaaccagcgctgctgcgagagcaacctggagccactgttcagtggctacatcgagactctgcggcgggaggccgagtgcgtggaggccgacagcgggaggctggcctcagagctcaaccatgtgcaggaggtgctggagggctacaagaagaagtatgaagaggaggtggccctgagagccacagcagagaatgagtttgtcgttctaaagaaggacgtggactgtgcctacctgcggaaatcagacctggaggccaatgtggaggccctggtggaggagtctagcttcctgaggcgcctctatgaagaggagatccgcgttctccaagcccacatctcagacacctcggtcatagtcaagatggacaacagccgagacctgaacatggactgcatcatcgctgagatcaaggctcagtatgacgatgttgccagccgcagccgggccgaggctgagtcctggtaccgtagcaagtgtgaggagatgaaggccacggtgatcaggcatggggagaccctgcgccgcaccaaggaggagatcaacgagctgaaccgcatgatccagaggctgacggccgagattgagaatgccaagtgccagcgtgccaagctggaggctgctgtggctgaggcagagcagcagggtgaggcggccctcagcgatgcccgctgcaagctggctgagctggagggcgccctgcagaaggccaagcaggacatggcctgcctgctcaaggagtaccaggaggtgatgaactccaagctgggcctggacatcgagatcgccacctacaggcgcctgctggagggcgaggaacacaggctgtgtgaaggtgtgggctctgtgaatgtctgtgtcagcagctcccgtggtggagtctcctgtgggggcctctcctacagcaccaccccagggcgccagatcacttctggcccctcagccataggcggcagcatcacggtggtggcccctgactcctgtgccccctgccagcctcgttcctccagcttcagctgcgggagtagccggtcggtccgctttgcctagtagagtcatggagccagggcttcctgccaagcacctgcctgcctgcatcactgcactgaatggcatgtgaatggaaaatgtgtgcttgcttccagaatcttctggatgttcctacagaggggaagacctacagagggaaagaccctcgggccgctcccctgcgccttttcatgctagggagatgcatcctagttgtcctcctggcagctgttttcagaggcattcccagcccttcacttaactcctacttagctccaaaatacctgtatccaatttgtattattcccccagctctcagggataagaccagtcccccagcgtggtggtcagcacggaagctccaccttctgggtggaggcgccatcctaaccatccagccaggccacccacaacccgagaatcagggagaaagtccctccccagcagccccctcctcctggctgggaagaatggtcccccagcaagcacttgcctgttcattcccgttcatgttttgcttctctctcagactgccttcctgcttctgggctaacctgttccagccaggctcctcatgtgacctcgcagttgagaagcccattatcgtggggcatccttttgcctacagcccctggttagggcactttggacaggtcttgctattcagtgaacctttgtacatttcaaagaagactccatggctgctccagatgcccccttgctgggtgcaggtggggactgtccaatgcagagctggcgggacagagagttaagccacttcctgggtctccttcttatgactgtctatgggtgcattgccttctgggttgtctcgatctgtgtttcaataaatgccgctgcaatgcaaaaaaaaa

SEQ ID NO: 60221 - DNA, 1810 bp, Homo sapiens
cagtcgtaccggttcggatttagcggaccgacccacgcgtccgctggcctcagagacctatcaattgcatctgagttgcaggggccatggcttccaaatgcctcaaggccggcttctcttctgggtctctcaagagcccaggaggggccagtgggggctccactcgtgtgtccgcaatgtactccagcagcccttgcaagcttccaagtctctcccctgtggccagaagtttctctgcctgctcagtgggtctgggcagaagcagctacagggccaccagctgcctccctgctctctgcctccctgctggaggcttcgctaccagctacagtgggggtgggggctggtttggggagggcatcctcactggcaatgagaaggagaccatgcaatccctgaacgaccgcctggccggctacctggagaaggtgcgtcagctggagcaggagaacgccagcctggagagccgcatccgtgagtggtgtgagcagcaggtcccctacatgtgccctgactaccagtcctacttccggaccatcgaggagctccagaagaagactctatgcagcaaggctgagaatgccaggctggtggtggagattgacaatgccaaattggctgcagatgacttcaggaccaagtatgagacggaggtgtccctgcggcagctggtggagtcagacatcaacggcctgcgcaggatcctggatgacctgaccctgtgcaagtctgacctggaggcccaggtggagtccctgaaggaggagctgctctgcctgaagaagaaccatgaggaggaagtgaactcactgcgctgccaacttggtgaccgcctcaatgttgaggtggatgctgccccacctgttgacctgaaccgagttctggaggagatgaggtgccagtatgaaaccctggtggagaataaccgccgggatgctgaagactggttggacacccagagtgaggagctgaaccagcaggtggtgtccagctcagagcagttgcagtcctgccaggcagagatcatcgagctgagacgcacggtcaacgccctggagattgagctgcaggcccagcacagcatgagagatgctttggaatccaccctggcagagacggaggcccgctatagctcccagctggcccagatgcagtgcatgatcaccaacgtggaggcccagctggccgagatccgggctgacctggagcggcagaaccaggagtaccaggtgctgctggacgtccgggcccggctggagtgtgagatcaacacgtaccggggcctgctggagagtgaggacagcaagctcccctgtaacccatgtgcacctgactactcaccctccaagtcatgccttccctgtcttcctgcggcctcctgcggtcctagtgcagcccgcacaaactgcagcgcccgccccatttgtgtgccctgcccagggggtcggttctgagagcgggtgacccagatggccatggctattgtctccagggcttgaacttggcctctacccaaacttaacccttgtagcccaatcccctctcttcgcgcagagcccaggcccagggtctggctgaaaaggctttctgcaaatacatgccctaaagtttctcagagcctgtcacaaaggccggctgcccccaaaggtctcaactcctcatcatttcaatgggtgccagggtctctgttctcaggctgcctcctgggtcaggttttccttctaggtgctgttccggtggattctgaaatgcagtagagggcttttgttggcagaacaataaagtgcatttgctcaggccaaaaaaaaaa

SEQ ID NO: 60222 - DNA, 2314 bp, Homo sapiens
gtcctgctcagtcgtcagggcccggccaatccggagggcgctcggcgcgtggtcgggggccaggagcgcgtctggcctgcagtgcgcagaggacgcggcgggagcatgttccggctcctgagctggagcctgggccgaggcttcctgcgggccgcggggcggcggtgccggggctgctccgcgcgcctgctcccggggctggcaggagggttcggggcccgaggtgcaggtgccgccatcccgagtcgcgccgcacggccggggcccaggcctgctgccgctgctggcagcgctcgcctggttctcgaggcccgctgcggcagaggaggaggagcagcagggagccgacggggccgctgccgaggacggggcggacgaggccgaggcagagatcatccagctgctgaagcgagccaagttgagcattatgaaagatgagccagaagaggctgagttaattttgcatgacgctcttcgtctcgcctatcagactgataacaagaaggccatcacttacacttatgatttgatggccaacttagcatttatacggggtcagcttgaaaatgctgaacaactttttaaagcaacaatgagttacctccttggagggggcatgaagcaggaggacaatgcaataattgaaatttccctaaagctggccagtatctatgctgcgcagaacagacaggaatttgctgttgctggctatgaattctgcatttcaactctagaggaaaaaattgaaagagaaaaggaattagcagaagacattatgtcagtggaagagaaagccaatacccacctcctcttgggcatgtgcttagacgcctgtgctcgctaccttctgttctccaagcagccgtcacaggcacaaaggatgtatgaaaaagctctgcagatttctgaagaaatacaaggagaaagacacccacagaccattgtgctgatgagtgacctggctactaccctggatgcacagggccgctttgatgaggcctatatttatatgcaaagggcatcagatctggcaagacagataaatcatcctgagctacacatggtactcagtaatctagctgcagttttgatgcacagagaacgatatacacaagcaaaagagatctaccaggaagcactgaagcaagcaaagctgaaaaaagatgaaatttctgtacaacacatcagggaagagttggctgagctgtcaaagaaaagtagacctttgacaaattctgtcaagctctaaatccatttttgtgtagggagaataatgtctagtaatgtggaagaatagctatcattcctgtctctgtggcacccgatcaatggcttaaatctgtcgtttttgatattcaggtttcctcaatttagccttagtgaaggaggggttgtacacactgccatttttgtattttaaaggaaaaatgactttcattcccaactgattatgacctttcaggatgtcgtcaagtgatgctttcagttgtaacacgtgacttggtgctgtccctgctggtctaagtagaactgtagattcatatgggctggtgttcctgtgcgctgtgggtgtggtgattcagcctggcatttctaccataagtttttggtctgctgatttgctgccctgtcttctcttactttactttatcaatacctggcaaactgaccagaattaccttcctcatggcaaagggggattatggtgaattgttgttcttatagtctgtttcatgaagcacaagtggaatttaatacataaaagagaaaaatatcttagtttgctaccagcatccagcatgaagttgtaaagtggggattaggcacgtgacagtatagcacccatttgaatttaaataaaagtgaaccatatttatctggttatataaaactaaaaatgggggtgtttatataaaactaaaaactaagaatgatgtaaccttttgtctgtgttatctgaacactctacttcctttgcagccttagtcacacaactgagtcatctcaagtactctttaaggacacacagcccaggctgttctgagtcagaataggcccctacaggtatattttaaaactcttcgtaattctaatgtgtactgctggtatagctgaactactgacctggatcttagtcctagcctttttgcttttgcaatttcagtatcttcatctctaaactagggaaacactgggattctttcttagctgtgggggaaagtatttggttagatgactttgaatgaatagactgctgtgctgaaagagctttatcacactgtctcaaagtatgtaaagatacataggtggatgc

SEQ ID NO: 60223 - DNA, 2117 bp, Homo sapiens
cggccgcccgcgatccagctccgacaacaggaattttctccgagagcgggccgggctcagttcagctgctgtccagacccggatcggcaacagtgccgcctccagacgttctcctgccgctcgcccgcccgtcccagcgcccccagccctcccgcgagggcgccccgggacggaaggatccaccagtctgtcggcgcccgccgttctcgtggtcgccgtcgccgtcgtcgtggtggtagtctccgccgtcgcctgggccatggccaattacatccacgtccctcccggctccccggaggtgcccaagctgaacgtcaccgttcaggatcaggaggagcatcgctgccgggagggggccctgagcctcctgcaacacctgcggcctcactgggacccccaggaggtgaccctgcagctcttcacagatggaatcacaaataaacttattggctgttacgtgggaaacaccatggaggatgtagtcctggtgagaatttatggcaataagactgagttattagtcgatcgagatgaggaagtaaagagttttcgagtgttgcaggctcatgggtgtgcaccacaactctactgtaccttcaataatggactatgctatgaatttatacaaggagaagcactggatccaaagcatgtctgcaacccagccattttcaggctaatagctcgtcagcttgctaaaatccatgctattcatgcacacaatggctggatccccaaatctaatctttggctaaagatgggaaagtatttctctctcattcccacaggatttgcagatgaagacattaataaaaggttcctaagtgatatcccaagctctcagattctccaggaagagatgacttggatgaaggagattctttccaacctgggctcacctgttgtgctttgccataatgacctattgtgtaagaatataatctacaatgagaaacaaggtgatgtacagttcattgattatgaatattctggatacaactacctggcatatgatattggaaatcatttcaatgaatttgcaggtgtgagtgatgtagactatagtctgtatccagatagagaactacagagtcagtggctgcgtgcttaccttgaagcctacaaagaatttaagggctttgggactgaagttactgaaaaggaggtagaaatactcttcattcaagtcaatcagtttgcattggcttctcatttcttttggggattgtgggctttgattcaagccaaatactccactattgagtttgatttccttgggtatgcaattgttcgttttaaccagtactttaaaatgaagcctgaggttactgcattaaaagtgcctgagtaaagaagagatttaattattctccagtagctgagcaatgcttgtgaatcttttcttaagaaatcccaaaaagccaatattagttaaaattctgttgtttaatttggttatcttgctttataaattatgcctctaaacaatcaaatctatttttgaaatagactgaatgatgtcaagaaatatacctactgctatccgtatgtggtggattagaaatgtgttaaatctgcaaaaggtataaagatgtcagtttaatttctttgataatttaacctatgttgtatgtgaattatttattataaacttagcacgattctgtgactgtttttctctgtttcacgttcgttgagtgtaagcaatgaaaatgtcccaaataagttttttaagttttactttaataagattaatttcagtaaacattctagttgttcagtgtaacctttttatcttgatgcattgtaagtaaaatgaatcatttactcttgaaatgccagtcattgactgatgtagataatttaggattttcatataaaaataggctgtttaggaaggtgaaatacattcactgtctctgttggtggtacatcttgttgaattcaatattagaaagtatttctttttggggtaatataacttagaattaaatccctgtttctctatgtagtctggcagtataaatataaatatttaccatataatcttggaataagtattagttaatgttaccaaaatctgtattaaataatgttttcaaatgctaaaaaaaaaa

SEQ ID NO: 60224 - DNA, 1488 bp, Homo sapiens
ggccggggacgtaaaacttggtcctctaaaacggcccccccttttttttttttttcaagtttaaaagtcagaatatatttcactgaaaatatgtgtatgtgtgtgccttcaagagtgagtgctcctcaagggagactcacacagttccttacaacataaataagaaatagacgtaatggcttcactcagtagaaaactagcagcatcattctgggccatggggcattccccaggggtcaccatccagcagcctctccctgggggcagaggacgcctggtcagaacagctataactcatccatcatggcgagcaaatcgtcccctttgctggtgctcagccttggctgctccgtgatctcaaactcccccatgattcgagccagctcctcgctccgttgctggtcctgggtggcttgtatgttgataacttcataggataactcttctggcctggttagcgctgcttgttcctcttcttcatcggtggtaaagagattcaaccggaatccgggctcagggccactgggtttcttaatctccatccctcccatcagcctggccaagaaattcagctcttctttagcaagagggtttggagcaatgctttcctgggtccatgaggctaagttctttgatgatccagacacatgagtttccacaggctgattcacgctgtacatgttagttcccagtttcaggactcggtctccataaaattcaaaagaaccttctttgggtgcagggacatagtttcccccatgcttgaattctatcctcttcacttcttcacctttgttgttgaacattctgatgagtcctggaacttcagttccccaaggaacaggcccggacaccggcaacacaaagcgaccgttattattctgaactttgtcctttagaaacatggatactcggatgtgcaggtcttggaagaagatgaggagtgtctgccggatcagctggaactcccctgcagagagaccaccatatatttctgtcagctgccgcaaagtctcgtccacttgctgcaggatggttggggagtctcggatgaatcccttgatggtatccaagtgattgaaagtgaccagcagcacatccttgggtcggggacacagcaatacttgatatttgaaagccatggtcatcaggtcatagagcttatccatgctggcctggttcagtttcataatggaggcatgagccaggcgctcatagacagtcctcagggccttcttggagtagagctcttgaggcttgaataattcctccataaactttctattgaacatggtggagatgatgtcattcagaactttgcgggccttgtctcccgggatgttctgggcccgcagccgttggtcgaggatgtaaagcatctccccgcccaagttcaagaagagcagcggtagcgtccgcaccgacatggtgctggaaacgagctggactggtgaagagccccggggttcggtagccagtggcctgaag

SEQ ID NO: 60225 - DNA, 4501 bp, Homo sapiens
agtaccgctcgacccacgcgtgcgatagcccttgctatttgcaagctcattcatataactattgagcctctctaccgaagagttggagttcctaaaggtgctaaaggctcacctgttaatgctttgcaaaacaagagagcaccaaaacaagctgagagctttgaagatttgaggagagacgtgttcaatatgttctgttaccttggtcctcacctttctcacgatcccattttatttgcaaaagtggtgcgcataggcaagtcatttatgaaggagtttcagtctgatggaagcaaacaagaagataaagaaaaaacggaagttatccttagctgtttgcttagcattactgaccaggtactacttccatctctttctttgatggactgcaatgcttgtatgtctgaggaactatggggaatgtttaaaacatttccatatcagcatagatatcgtctgtatggccagtggaagaatgaaacttataacagtcacccacttttagtaaaagttaaagctcaaacaatagacagagccaaatatatcatgaagcgcctaaccaaggaaaatgtgaagccttctggaagacaaattgggaagttgagccacagcaatccaaccattttgtttgattatgtatgttttgagatcttgtcacaaatacagaagtatgataacttaataacacctgtagtagattcattgaaatacctcacttcactgaattatgatgtcttggcctgtatcctttcaaattgtatcattgaagctttagctaatccagaaaaggaaagaatgaaacatgatgacacaaccatctcaagctggcttcagagtctggctagtttctgtggtgcagtttttcgtaaatatccaattgatcttgctggtcttcttcagtatgttgccaatcagctaaaggcgggcaaaagttttgacctgcttatattgaaagaagtggtacaaaaaatggcaggaatagaaattacagaggaaatgacaatggagcaactagaggctatgactggtggagagcagctaaaagctgagggtggttattttggtcagatcagaaacactaaaaaatcctctcagagattaaaggatgctctattggaccatgatcttgcccttcctctctgtctgcttatggctcagcagagaaatggggtaatctttcaggaaggtggagagaaacatttgaaacttgtgggaaagctctatgaccagtgtcatgataccctggtgcagtttggtgggtttttagcatctaatctgagcacagaagattatataaagcgagtgccttcaattgatgtactctgtaatgaatttcatacaccccatgatgcagcatttttcctgtctaggccaatgtatgcccatcatatttcgtcaaagtatgatgaacttaaaaaatcagaaaagggaagtaaacagcaacataaagttcataagtacattacatcatgtgagatggtgatggcgcctgtccatgaagcagtggtctccttacatgtttccaaagtctgggatgacatcagccctcaattctatgctacattctggtcattgacaatgtatgaccttgcagttccacacaccagctatgaacgagaagtcaataaacttaaagtccagatgaaagcaattgatgacaatcaggaaatgcccccaaataaaaagaaaaaagagaaggagcgctgtactgcccttcaggacaagcttcttgaagaagaaaagaaacagatggaacatgtacagagagttctacagagattgaaactggaaaaggacaactggcttttagcaaaatctaccaaaaatgagaccatcacaaaatttctacagctgtgtatatttcctcgatgtattttttcagcaattgatgctgtttactgtgctcgttttgttgaattggtacatcaacagaaaactccaaatttttccacacttctttgctatgatcgagttttctctgacataatttacacagttgcaagctgtactgaaaatgaagccagtcgatacggaaggtttctttgctgcatgttagagactgtgaccaggtggcatagtgatagagccacatatgaaaaggaatgtggaaactatccaggattccttaccatattacgggcaactggatttgatggtggaaataaggctgatcaattagactatgaaaattttcgacatgttgtacataaatggcattacaaactaaccaaggcatcggtacattgccttgaaacaggcgaatatactcacatcaggaatatcttgattgtgctaacaaaaatacttccttggtacccaaaagttttgaatctgggtcaagctttggaaagaagagtacacaaaatctgccaagaagaaaaagagaagaggccagatctatatgcattggctatgggctactctgggcagttgaaaagtagaaagtcatacatgatacctgaaaatgagtttcatcacaaagacccccctccgaggaatgcagttgccagtgtgcaaaatgggcctggtggtgggccttcttcatcatcaataggaagtgcatctaaatcggatgaaagcagtactgaggagactgataaatcaagggagagatctcagtgtggtgtgaaagctgttaataaagcttctagtaccacacctaaagggaattcaagcaatggaaatagtggctctaacagcaacaaagctgttaaagaaaatgacaaagaaaaagggaaagagaaagaaaaagagaaaaaagaaaagactccagctactactccagaggccagggtacttggtaaagatggtaaagaaaaaccaaaggaagagcggccaaataaagatgaaaaagcaagagagaccaaggaaagaacgccgaagtctgacaaagagaaagaaaaattcaagaaggaagaaaaagctaaagatgagaaatttaagaccactgtccccaacgcagaatcaaaatcaactcaagaaagggaaagagagaaggagccatccagagaaagagatatagcaaaggaaatgaaatcaaaggaaaatgttaaaggaggagaaaaaacaccagtttctgggtccttgaaatcacctgttcccagatcagatattccagagcctgaaagggaacaaaaacgccgcaaaattgatactcacccttctccatcacattcctccacagtaaaggacagtctcatcgaactcaaggaatcttcagcaaagctctacattaatcatactcctccaccactgtccaagagtaaggagagagaaatggacaagaaagatttggacaagtcaagggaaagatccagagaaagagagaaaaaagatgaaaaggacaggaaagagcggaaaagggatcactcaaacaacgaccgtgaagtgccaccggacttaaccaagagacgtaaagaggagaatggaacaatgggggtttcaaaacataaaagtgaaagtccttgtgaatctccttatccaaatgagaaagacaaggaaaaaaataagtcaaaatcttcaggcaaagaaaaaggcagtgattcatttaaatctgagaagatggataaaatctcctccggtggcaaaaaggagtccaggcatgataaagaaaagatagaaaagaaagagaaacgggacagttcaggaggaaaggaagagaagaaacatcataagtcctcggacaagcacagataatgaagactttccatcaaggtgagatcggactggaactgttcggctgcgaccagaaatttattttcctgagtaaattgccgagaattaagaatgaagagggccatttgcatctccttaaattattcagttacctgctttattgctccatgtggaaaacttaaaattgttaagttgtgcattactgtattttaacttgttgcttagtttctacatgtttattttcagtaatggctgaaagtgttaactgttccatacttttagcacaatgtgctgcataaggttacctgtgtacagagttttactttagattaactaaatattgcctgggttcagtttttatttccattctgaaatgcttcctttttattgtttgaaactgaaaataaacaattgttgaacccttttgattttacctcattttaaaactgttttaatttattatttggcttgttcttaatattagtcactaaaagcagtgggagcattgtcttatgaaatgcttaggaatcattttatatagtacatgtacaacattaaacgtgtttaaaaaagaaaaaggtaccagcgatcacttgtcccttgccattttttcttgtaattatgttagacaaatcttggcggcggggggatcaaaacataattgttttaattctacagctgtaggagctttgtattgctgaactttcatctggaaaagtttcacagtgacatttttaaaagagaatttttttatctgccgaattctaccagtgtaaccttttttctaaataaacaatagttttctcaaatggttgtaaaaaaaaaa

SEQ ID NO: 60226 - DNA, 1349 bp, Homo sapiens
ggcctcgtgccaccctgtgaaggagagggtggggagggaggcatctagggagaggggtcccccatggtggctcccctccctggccattgttatcccaggaggagacactgtgggcacagggctaagtccaggtgtttgtattcgggctagaaaaggcaatgtcccaagtctctgctgcctgtcacagtccttcagccagggctggacctcaaccctgaggagtcacactgagttccagtgaccaccgtggtggtggccatgccactcatggttgctatggccggaaggcctggggcagcctcctccaagccgctcgcaccccgtaggtgcccatccgctgctggcgcaagtgctggccgaagatgaagcagagcaggacagatgtcacgaacagggacagcaacaccgacaccaccgtgactatgatgaccatctggctgtccgacacaggctcatagatctccaacatcttcggggctgagtgtttgtgaaagatgttgccaccgcgagacatcaagtccagcacagccaggcaggagaagttgcggtggccatcctctctgtcagccgtgctgttgaatgtggctgtggcctcctgcggagcaggggctgccttcccgaaggtctcatagtgcagagtctcattgccacggaacaggaagagggtgaggctgtccaggggctccacggtgggcaccctgcactcaatggtgaaggacttgcccacagccaccaaagtgggttgcagtgtcaggatgacctgccttggaggctggtacacgctgacgttggaattcattgactcctgcttcccggagcaggtgaagtggcattggaggaccgtgtcatgggagatgtttgagaccaagtaatgtttccactgagcctgttcgtccagcagaatcttatctagagaggtctccagaccacccacttcaggctggttacaggtggtgctgcagttgacctcgagggaccctttgggctcaaccgccagcttctttggcctcacgtgtacctcgaataccttctcatccgatcctggacagcagatcagggtgaagagggccacagtcagggtcctgtaaccgaaagaggacatctctggcagtctccacgggctcgcagggaccagccaagggctgcctggagggagatggtgggcgcaggtctgagctatggcccagaatccctagccttctgcaaactgatgactgcatttcctctcattatctgagagatctttgggaagccacgtgcaccagctcgttctaggaccccaggcctctaagaatccaggcagaggaagctgggaagctgctgataagcagggcataacccagtcctcc

SEQ ID NO: 60227 - DNA, 6523 bp, Homo sapiens
ttttttttttttagtttttttcaaacatttactgaacacaaacaccattttttccttttacacagcaagattgttagtttcaaattagctgagttattaggactgtcaattgccatgaaactaaaaatgactctacatgtcaaactcaaatagaaaatgtcatgcaatatataaatcactaatggacctctggtgcagtcagcaagtttactatgtttattaaagtcacataaatggtttgacaaaagtgcacaatagaatgacatcaccggtttgttataaatcacagtgaattactagaatacaacagtgtagttcctctgcacggaggattgcaggatggggtgaaaaggacagggtcttttccatcgattaggccagtcagattttactccccaactgtgtacctttgaaaagactgtgaggaaagctgagtttctttcctcatcttttctcctctaccagttactaagcaacaacaacaaaaagccatgcacaaattttacaacgcctgataaaaaatagatacaaaatcttgttcatttcatcatttggcaagcttgcatcttcgctccttcacttttctgattaggccattcatcacatgactcaccctgaataaaagctgtaaataatttagcaatacttacccctatacacacatcaagatacactccccataaccatcaagtcactgtctcttccctacacattaacacaaaggtacacaccacaaacctagagaccacatttactttacagttttaaaaattaatatatctccactatcaatagtgtagtatttatttcagatcccttatttgggggagggcatgctgtataacccagcccatctaaagatttgggcaagtctgccagaaatacataagaaagccctgcaatgtgataaacacataggagttttctactttcaagagatgacatccagaacaaagctatgcattttcagagtaggaatggacacacagcttaaaacctctggactaaaaatatttcatagcacaaaaggcagagttttgttttctttaacccctttttaatgttatatagtcagtgagaaaaacagaatagtcatgtgtgcatcaacacatctaatttgaaaaggaacatttaagattcttacagaaaatctatcataaaaaacaagtcctttatactttcattcatttactcactaattcagccactggctgtttctaaaccagcaaactaatcaaaggtctggcaactccctttcccatcccccccctttcaaaaaaaaaaaagaaacgcttctgcttaaataacccaaagtggtcttattcataaagtagctgcctcaactatagtgaaaactcttaacagggtgttgctcacttgaaattttaattttcaaaacatttgtcaaacagagttggtatttagaaagctgctgcccccaaatcatattttacttcaaacaatgttatcatacctaagttctcacaattaccaattattagtccactattagtataatgaaataaaacccttctcagaaacaagcagaccaaagcttacagatggtctgctttggggtttggtttatttaaaattcccacagcaaagaaccttaacgtgattgggctgtgggctactagagcaaccagggtggactgaaaaagctatgttttcagtgtcagttctaatgtaaaaatgttccccttctttatcaatcgaggggatgggtttgccgcccattccttgagttaaatagttaacttcatagttcaattttgccaactctatcaagtgcataaaacccacttaagtttctcatgatttgcgaatgaaaacatccacctgggcctccctagctcatccagatttatataacaattactgaacaggacagagaagttttggttgaatctgtaataccatcaatgaagatttacaattcaaagcataagtataccaatagtaaacatcaaatgaccaaagtggctgcaaaatggagacagcctagagttcacagagggctgagatatacaactatcattttcttacctattttccttttttaaaaaaaaattaagttggggaagggtctggctaaacatattttcaaacaattctaccaaaaacattttaaaaaaacaggcatgtagatcacttatttcaaaaatgattttatacaggtgtttcacaatacacatttggattgattttacaagatagaattagattctcagcaagatactacacaatttaccactatactaaacaaacaaaaaatctaattaccattagcatagttcatagtttattccactgtcttcaaattcgttctccaccctgtcagcatttcaatcaacagttttactttcttcagcattgtcttcccttctcaaaatagaatgtcattaaattttgatgtctgaatatgtacatataatcattattctcattttataaataagcagtgtcttaaatagtgctggtcctgggtagccaaagggatgaaatgtgtttttaaaacatgcaacattatctgatattttaagttttgatgtttaaataaaaataatatacattaataatggaaccaactgaataccaagtatcaaagctattccttagactgtccaataagcaggccttgtagtttgaaaaataaagggtctgatctgaactgtggaaaaagcatgattcactcaccttgaagaagtgcattttctctttcaggccactgagagttgctaagagcaaggtacagtatttccttgattcataccaggaggatcaagtctggtaattttcaaattagggctcactcaaataaatacctccatttaagccaacctaaaaaccttccttgtaaaatctcaggttaggaaaataggtatctattaccatgacagaatttaccatcaaaaccttcctaactgaagcaagaagacaaagtataatgatagcaactgtaaaaagtatcttgcatccttgggggatagtccccccttctgtcccctcccatccttcaaaatatttcattttgtggggtatctctattttatttaaggccctagggtgctgattttggcttggtcattgttttatactgatccaactgcaacctttctcttacactttacaaagcattatccatatataaaatgttaattgaaacctttttttttaagtttatatctgatgctgctacatcattataatgcttttcattaaagaaaaaaaaaaaagctacaggtcttcacttacagtaccatgcactatgagtagctaaggcattcatttggcactagagagaaaattacagatacagctaattttgctttcattatcatttttaacatcaatagaaataagcatataactttcacttgaatttctgtaatgcttaaaagataatcacagaatacccttttagtttgacagttacaatgttgccattaaaacaaaacaaaaaaaccataaagacctctgtatagcctgtaggaataagtgacattttgtggttgaaaaatttgcagctctcagacacaattacctttcaagtggcattgagaattattttcatcataaaaaaccatgaagttcctataccacactagtgatatttctacttcttgtcacagactaagaaagtgaaaaaattcaaacatatcctggttccttttcatctgtcataagtaaaataccttattagggaggcataaataatgccttctggaaaagtagtttccaaattttaaaagatacaggagaaaaagggaaaaggggacaaaaatagaatgtataactacactgtgacaatttgtttcataagaaaacagcattcataatttttacatgtctatgagctgaatcaaatagactgctgcaatttagataaatttcattaaaatagactttgaagaattcaagcctaaaggcagagtccatcaagattctctgaaaagttggtttaagatgataaccattttgtatatactacccagcataatgcaacaatttcaaatggatttaaatttataaatttgtaactattattaaattagcacattttccagattaatctgcagctattttttaaaaatcctcctgaatgctaaaatgtgctgcatcactccgtataaataatggaagagtgtaaactatctacagcagtttggcatgtgcagaacacctggatatcccattcctcttaatgttcctttttagctctttttcttcataaaatcctcaaaactgctgcatggataacatgctgacataggcttaacagaaatacttttgtaagcagctgtttaaaacattatcaacttgaaattataaatgtcccttgttacataaacaaaacattttatatctgttcctttaaaaaaaagaaagacaaataggtaaccaatatgcaaataccttatagttacaccaaaacaatgtggttttgttaaagtctgtctgaaatcaattaccatgaggcaagaaaaacaaatacagaactaaggaaggatgggatgggaggaagggtagtggaaagaaaagcagaatttatgaacacataattctactgtctgtgattaaaagtcctttactttttagcaccacattaaacgactttacatatccagtcacttaatgaaatccaacaaactcttcaagagttctggggatctggtcttggtagttaatgtcattagcccgaactgctcgggcagccaggcacttgagactcatcttcatttgagttttaagcagtatttcagataccccagttgtacttttgtctagcggagtcttattctgtttattcgtcatgtcagtgtgagctccggcttcaactaggctaatgatgatggagtgcaaggtcaaaaaatcactgatgggcctgttgtactgaacgataatatgaagggcactgtttccctcattgtccacggcattcacctcagcaccacagtccagcaggagctttgtgacaagtgcatttggaaagctgcagacgtcattggtgtggaaatcatcaactggagtattggagttgacagccagatgcagcaaggtgaaaccttcacgagttctgggatcaaggtgaatcaggttgtagatctgcttgttaattttgcactgatcttcttcgctgcactgtgttttggtagagatgcacactaaatacagaaaggtatagagattacattcataattgtccatagcattgtggacatcagcatctgaaatatttttcactctgttcatactttgttctatttccaaaacactgcatctcaaaacacattctatgtctggggccttcacagtttcattcaaatgtatcatttgtgagaaaacttgagcaaatcgaagaagatccttgtgggtgttcctgttacctttttgtctgaggtgcagggcatgaagccacaacttgatacactgctcaaattccatattatccgcataaacagctcctctgtaaatgatgggatgagaaacatcaatattgtcagcacctaaaatccgttcccgaactataaggccttccatatgaagagcatctctgtcttgccgaatggactccagttcctgaggatttctacattcagttctattcccataagcatggattggtggaagaacctctttttcgagaatgttatcaccatcttggaacctctctaacatggctaaatatagatagtggtatgtctttatgatgtcatagttctcacggtcatttgcaaaggaggcacccaagagttccaaagcttcaatccgacttcttcggtcgcaatcagcatgagagagtaacagttctacgacatcagctttacagctttcggcagctactttcaatggcgtcatcccatggccattcactactatagcagcacgccattttatcagctctttcacaatatctatgtgcccagcttcagctgcaaagtgcaatgctgtggctccacaatgtgctttggcattgggatcagcacgttgttctaaaaggtatctgaccacatcagtgtgtcccttatatgccgcaatcattaggcaggtgttgtcatatttgttggcaatgctgatgttggcattattttcaaccaagtatttcacaatgtccagtctgccatcaaagcatgctgcccgcaggggggttgaattagttactgtggtatggttcacgttggctccatggctgactagaagtttaacaacttcaaaatgtcctgctccagctgcacaccaaagagcagtggcaccatcaatgacatacccgtcgaagcggacggtgccagtctgctgagtctgcacccggtaatgttctaagagcaagcgtaccacctttgcgtgtccattgcgggctgcgatgatgaggggcgtggagcgctgccctccctgctggctgacatagccaagcagatagcggatgtcgctttcagaccggttgagaagcaaggcggccagagtcagcaccttgccctcgctggccgccttgtatacatagccagccaggccctccacgaaa

SEQ ID NO: 60228 - DNA, 1200 bp, Homo sapiens
ttttttttttttcaacaggagtttgaagtttatttagtaataaacataagtcatggctgacaactgagaaaatcctattcacataaaccatcatagattaaaaatacatagtatttgtactttaatgcaatagggtcccaggattcaaacaaggaaatttgattccagagttggcattatgtagttatgtactctgctacaaagaactagtggaggtaaacttcggcagtaaaattctcaacagtcaaatattaatgcatttcatatacatggctttgcatccgtagaggaagatacagttccttcagcacacgtgccaatttctgagtcttccactagagaatcctcaacagtttcttcttcagaatcaaattcctgattatccagtgattcaaaattatccagaggttcaccattcagtctctctattagctctgccatatactgtacatgttctgctacttctgccagttctttattctcctttttcaggcgggcaatttcattgtccttttgttcaatttctttatgaagtttctcattttccttaagtgcttcatacagcgcctttctccgtttttctgccacttccttccaatactgagaggatggattttctttaatcataagatcaaatgactcctgggtgactcctccaagatttttattttcactagattctgggacaataaccccagggctggaagttgtagatgttaagtggtcattccgatgtttccttttggacaagcctgcggacagctcattttctcttccaacaagagatccagatgcagaaggctgaatcatcttcagagttcttcttgggacagaactattctttatattctctttgatttcttcttgtttctgcttcatactgggattcattatgtagatggtgaagcacagaagaccaggccgcggccctgcagctgtcaaagtaggacgcggcttcagaggttggccggagggaaagcgagtcgtctagaggctgtgcgccttgcgcccctgcgtacccacttcctgccgcctcttgcccacttactgggtggagacgctcaatcctcgtagcgaacgcacgtagctatggctgcagcacctcgcaaaaggccacagctcacctacgctgatccccacggtcgctggagtgcccggcgcgctctgcagtaaagccctgctaactccgctcctcgtgcc

SEQ ID NO: 60229 - DNA, 906 bp, Homo sapiens
ggccacatggactggggtgcaatgggacagctgctgccagcgagagggaccagggcaccactctctagggagcccacactgcaagtcaggccacaaggacctctgaccctgagggccgatgaggccagggacaggccaggggggccttgaggcccctggtgagccaggccccaacctcaggcagcgctggcccctgctgctgctgggtctggccatggtaacccatggcctgctgcgcccaacagctgcatcgcagagcagggccctgggccctggagcccctggaggaagcagccggtccagcctgaggagccggtggggcaggttcctgctccagcgcggctcctggactggccccgggtgctggccccgggggtttcaatccaagcataactcagtgacgcatgtgtttggcagcgggacccagctcaccgttttaagtcagcccaaggccaccccctcggtcactctgttcccgccgtcctctgaggagctccaagccaacaaggctacactggtgtgtctcatgaatgacttctatctgggaatcttgacggtgacctggaaggcagatggtacccccatcacccaggcggtggagatgaccacgccctccaaacagagcaacagcaagtacatggccagcagctacctgagcctgacgcccgagcagtggaggtcccgcagaagctacagctgccaggtcatgcatgaagggagcactgcagagaagacggtggcccctgcagaatgttcataggttcccagccccgaccccacccaaaggggcctggagctgcaggatcccaggggaagggtctctctctgcatcccaagccatccagcccttctccctgtacccagtaaaccctaaataaataccctctttgtcaaccaaaaaaaaaa

SEQ ID NO: 60230 - DNA, 7439 bp, Homo sapiens
tttcgtgttaatcatttcagagaagaacactgaactttgaaaaaaatgttggaagccattgacaaaaatcgggccctgcatgcagcagagcgcttgcaaaccaagctgcgagaacgtggggatgtagcaaatgaagacaaactgagccttctgaagtcagtcctgcagagccctctcttcagtcagattctgagccttcagacttctgtacagcagctgaaagaccaggtaaatattgcaacttcagcaacttcaaatattgaatatgcccacgttcctcatctcagcccagctgtgattcctactctgcaaaatgaatcgtttttattatccccaaacaatgggaatctggaagcacttacaggacctggtattccacacattaatgggaaacctgcttgtgatgaatttgatcagcttatcaaaaatatggcccagggtcgccatgtagaagtttttgagctcctcaaacctccatctggaggccttgggtttagtgttgtgggactaagaagtgaaaacagaggagagctgggaatatttgttcaagagatacaagagggcagtgtggcccatagagatggaagattgaaagaaactgatcaaattcttgctatcaatggacaggctcttgatcagacaattacacatcagcaggctatcagcatcctgcagaaagccaaagatactgtccagctagttattgccagaggctcattgcctcagcttgtcagccccatagtttcccgttctccatctgcagccagcacaatttcagctcactctaatccggttcactggcaacacatggaaacgattgaattggtgaatgatggatctggtttgggatttggcatcataggaggaaaagcaactggtgtgatagtaaaaaccattctgcctggaggagtagctgatcagcatgggcgtttatgcagtggagaccacattctaaagattggtgacacagatctagcaggaatgagcagtgagcaagtagcacaagtccttaggcaatgtggaaatagagttaagttgatgattgcaagaggtgccatagaagaacgtacagcacccactgctttgggcatcaccctctcctcatccccaacttcaacaccagagttgcgggttgatgcttctactcagaaaggtgaagaaagtgagacatttgatgtagaactcactaaaaatgtccaaggattaggaattaccattgctggctacattggagataaaaaattggaaccttcaggaatctttgtaaagagcattacaaaaagcagtgccgttgagcatgatggaagaatccaaattggagaccaaattatagcagtagatggcacaaaccttcagggttttactaatcagcaagcagtagaggtattgcgacatacaggacaaactgtgctcctgacactaatgaggagaggaatgaagcaggaagccgagctcatgtcaagggaagacgtcacaaaagatgcagatttgtctcctgttaatgccagcataatcaaagaaaattatgaaaaagatgaagattttttatcttcgacgagaaacaccaacatattaccaactgaagaagaagggtatccattactgtcagctgagatagaagaaatagaagatgcacaaaaacaagaagctgctctgctgacaaaatggcaaaggattatgggaattaactatgaaatagtggtggcccatgtgagcaagtttagtgagaacagtggattggggataagcctggaagcgacagtgggacatcattttatccgatctgttctaccagagggtcctgttggacacagcgggaagctcttcagtggagacgagctattggaagtaaatggcataactttacttggggaaaatcaccaagatgtggtgaatatcttaaaagaactgcctatagaagtgacaatggtgtgctgtcgtcgaactgtgccacccaccacccaatcagaattggatagcctggacttatgtgatattgagctaacagaaaagcctcacgtagatctaggtgagttcatcgggtcatcagagacagaggatccagtgctggcgatgactgatgcgggtcagagtacagaagaggttcaagcacctttggccatgtgggaggctggcattcagcacatagagctggagaaagggagcaaaggacttggttttagcattttagattatcaggatccaattgatccagcaagcactgtgattataattcgttctttggtgcctggcggcattgctgaaaaggatggacgacttcttcctggtgaccgactcatgtttgtaaacgatgttaacttggaaaacagcagtcttgaggaagctgtagaagcactgaagggagcaccgtcagggactgtgagaataggagttgctaagcctttacccctttcaccagaagaaggttatgtttctgctaaggaggattcctttctctacccaccacactcctgtgaggaagcagggctggctgacaaacccctcttcagggctgacttggctctggtgggcacaaatgatgctgacttagtagatgaatccacatttgagtctccatactctcctgaaaatgacagcatctactctactcaagcctctattttatctcttcatggcagttcttgtggtgatggcctgaactatggttcttcccttccatcatctcctcctaaggatgttattgaaaattcttgtgatccagtacttgatctgcatatgtctctggaggaactatatacccagaatctcctgcaaagacaggatgagaatacaccttcggtggacataagtatggggcctgcttctggctttactataaatgactacacacctgcaaatgctattgaacaacaatatgaatgtgaaaacacaatagtgtggactgaatctcatttaccaagtgaagttatatcaagtgcagaacttccttctgtgctacccgattcagctggaaagggctctgagtacctgcttgaacagagctccctggcctgtaatgctgagtgtgtcatgcttcaaaatgtatctaaagaatcttttgaaaggactattaatatagcaaaaggcaattctagcctaggaatgacagttagtgctaataaagatggcttggggatgatcgttcgaagcattattcatggaggtgccattagtcgagatggccggattgccattggggactgcatcttgtccattaatgaagagtctaccatcagtgtaaccaatgcccaggcacgagctatgttgagaagacattctctcattggccctgacataaaaattacttatgtgcctgcagaacatttggaagagttcaaaataagcttgggacaacaatctggaagagtaatggcactggatattttttcttcatacactggcagagacattccagaattaccagagcgagaagagggagagggtgaagaaagcgaacttcaaaacacagcatatagcaattggaatcagcccaggcgggtggaactctggagagaaccaagcaaatccttaggcatcagcattgttggtggacgagggatggggagtcggctaagcaatggagaagtgatgaggggcattttcatcaaacatgttctggaagatagtccagctggcaaaaatggaaccttgaaacctggagatagaatcgtagaggtggatggaatggacctcagagatgcaagccatgaacaagctgtggaagccattcggaaagcaggcaaccctgtagtctttatggtacagagcattataaacagaccaaggaaatcccctttgccttccttgctgcacaacctttaccctaagtacaacttcagcagcactaacccatttgctgactctctacaaatcaacgccgacaaggcacccagtcagtcagagtcagagccagagaaggctccattgtgcagtgtgcccccaccccctccttcagcctttgccgaaatgggtagtgatcacacacagtcatctgcaagcaaaatctcacaagatgtggacaaagaggatgagtttggttacagctggaaaaatatcagagagcgttatggaaccctaacaggcgagctgcatatgattgaactggagaaaggtcatagtggtttgggcctaagtcttgctgggaacaaagaccgatccaggatgagtgtcttcatagtggggattgatccaaatggagctgcaggaaaagatggtcgattgcaaattgcagatgagcttctagagatcaatggtcagattttatatggaagaagtcatcagaatgcctcatcaatcattaaatgtgccccttctaaagtgaaaataatttttatcagaaataaagatgcagtgaatcagatggccgtatgtcctggaaatgcagtagaacctttgccttctaactcagaaaatcttcaaaataaggagacagagccaactgttactacttctgatgcagctgtggacctcagttcatttaaaaatgtgcaacatctggagcttcccaaggatcaggggggtttgggtattgctatcagcgaagaagatacactcagtggagtcatcataaagagcttaacagagcatggggtagcagccacggatggacgactcaaagtcggagatcagatactggctgtagatgatgaaattgttgttggttaccctattgaaaagtttattagccttctgaagacagcaaagatgacagtaaaacttaccatccatgctgagaatccagattcccaggctgttccttcagcagctggtgcagccagtggagaaaaaaagaacagctcccagtctctgatggtcccacagtctggctccccagaaccggagtccatccgaaatacaagcagatcatcaacaccagcaatttttgcttctgatcctgcaacctgccccattatccctggctgcgaaacaaccatcgagatttccaaagggcgaacagggctgggcctgagcatcgttgggggttcagacacgctgctgggtgccattattatccatgaagtttatgaagaaggagcagcatgtaaagatggaagactctgggctggagatcagatcttagaggtgaatggaattgacttgagaaaggccacacatgatgaagcaatcaatgtcctgagacagacgccacagagagtgcgcctgacactctacagagatgaggccccatacaaagaggaggaagtgtgtgacaccctcactattgagctgcagaagaagccgggaaaaggcctaggattaagtattgttggtaaaagaaacgatactggagtatttgtgtcagacattgtcaaaggaggaattgcagatgccgatggaagactgatgcagggagaccagatattaatggtgaatggggaagacgttcgtaatgccacccaagaagcggttgccgctttgctaaagtgttccctaggcacagtaaccttggaagttggaagaatcaaagctggatccagtacatctgagtcactggaaagtagctcaaagaagaatgcattggcatctgaaatacagggattaagaacagtcgaaatgaaaaagggccctactgactcactgggaatcagcatcgctggaggagtaggcagcccacttggtgatgtgcctatatttattgcaatgatgcacccaactggagttgcagcacagacccaaaaactcagagttggggataggattgtcaccatctgtggcacatccactgagggcatgactcacacccaagcagttaacctactgaaaaatgcatctggctccattgaaatgcaggtggttgctggaggagacgtgagtgtggtcacaggtcatcagcaggagcctgcaagttccagtctttctttcactgggctgacgtcaagcagtatatttcaggatgatttaggacctcctcaatgtaagtctattacactagagcgaggaccagatggcttaggcttcagtatagttggaggatatggcagccctcatggagacttacccatttatgttaaaacagtgtttgcaaagggagcagcctctgaagacggacgtctgaaaaggggcgatcagatcattgctgtcaatgggcagagtctagaaggagtcacccatgaagaagctgttgccatccttaaacggacaaaaggcactgtcactttgatggttctctcttgaattggctgccagaattgaaccaacccaacccctagctcacctcctactgtaaagagaatgcactggtcctgacaatttttatgctgtgttcagccgggtcttcaaaactgtaggggggaaataacacttaagtttctttttctcatctagaaatgctttccttactgacaacctaacatcatttttcttttcttcttgcattttgtgaacttaaagagaaggaatatttgtgtaggtgaatctcgtttttatttgtggagatatctaatgttttgtagtcacatgggcaagaattattacatgctaagctggttagtataaagaaagataattctaaagctaaccaaagaaaatggcttcagtaaattaggatgaaaaatgaaaatataaaataaagaagaaaatctcggggagtttaaaaaaaatgcctcaatttggcaatctacctcctctccccaccccaaactaaaaaaagaaaaaaaggttttctaatgaaaatctttaaaaatactgtcagtattttaaaattttcaacagtattataaaaacattgcatctccccacctctaatatgcatatatatttttcctgctaaaattggtttctacaattgagtaaatggcaaatacatgaagcaatgtccctaaattttataaagaaattatatttaatgcacatttcaattttcattcttatttttgaccttttataaaatattttcatgttgctataagtaaatgatgatgccaccccatgttgactatggtttttctagaaagcaactatgctgctaaccatagaggaacatagaagggttccagaatctttagtgctggttttaacaaccgatgcaacattaaaaatgtgttagtgtgctgtgcaattggttttcaattcatattaatcttaatgacagagaacaatgtgttactaattattttggttgtatgccattagtaaattgatagaaaaattaaggggattaacataacttcatttcattgccttatattaacatcttataatacaatagtttaagactaagggaaacagatggagctgtttattgagacaactggtgaggaattatcatgtgttcattcccattttagagcgtgaaactcctacattagaatatataaagtcactttaaatatctatatttgtaacagaagtagtgtacagatattttattacagcatttttgtgtaaatgcagaattaaagtgaataaataagaattttcagtggtgcccaaaaaaaaaa

SEQ ID NO: 60231 - DNA, 2269 bp, Homo sapiens
gagagagctagcaccatgagcttcaaaccctgttccttcagttcccgggtacacactttgtcccaggcctgaattccacccccgagctccccttcctcaccggccgctgcccctcgggctcagctggggaaggacgccctgagtcccttggccctactcctccgcccacggcgcgcatatccccgccccctcccaacttcagaaagtttggcctggggctccccacctccgagcaggttcgggcccagccccgcctcccagccccgctcgccgcgcctgtccttccttgtactgggagtggcctgcagtgccatcctcatgtacatattctgcactgattgctggctcatcgctgtgctctacttcacttggctggtgtttgactggaacacacccaagaaaggtggcaggaggtcacagtgggtccgaaactgggctgtgtggcgctactttcgagactactttcccatccagctggtgaagacacacaacctgctgaccaccaggaactatatctttggataccacccccatggtatcatgggcctgggtgccttctgcaacttcagcacagaggccacagaagtgagcaagaagttcccaggcatacggccttacctggctacactggcaggcaacttccgaatgcctgtgttgagggagtacctgatgtctggaggtatctgccctgtcagccgggacaccatagactatttgctttcaaagaatgggagtggcaatgctatcatcatcgtggtcgggggtgcggctgagtctctgagctccatgcctggcaagaatgcagtcaccctgcggaaccgcaagggctttgtgaaactggccctgcgtcatggagctgacctggttcccatctactcctttggagagaatgaagtgtacaagcaggtgatcttcgaggagggctcctggggccgatgggtccagaagaagttccagaaatacattggtttcgccccatgcatcttccatggtcgaggcctcttctcctccgacacctgggggctggtgccctactccaagcccatcaccactgttgtgggagagcccatcaccatccccaagctggagcacccaacccagcaagacatcgacctgtaccacaccatgtacatggaggccctggtgaagctcttcgacaagcacaagaccaagttcggcctcccggagactgaggtcctggaggtgaactgagccagccttcggggccaattccctggaggaaccagctgcaaatcacttttttgctctgtaaatttggaagtgtcatgggtgtctgtgggttatttaaaagaaattataacaattttgctaaaccattacaatgttaggtcttttttaagaaggaaaaagtcagtatttcaagttctttcacttccagcttgccctgttctaggtggtggctaaatctgggcctaatctgggtggctcagctaacctctcttcttcccttcctgaagtgacaaaggaaactcagtcttcttggggaagaaggattgccattagtgacttggaccagttagatgattcactttttgcccctagggatgagaggcgaaagccacttctcatacaagcccctttattgccactaccccacgctcgtctagtcctgaaactgcaggaccagtttctctgccaaggggaggagttggagagcacagttgccccgttgtgtgagggcagtagtaggcatctggaatgctccagtttgatctcccttctgccacccctacctcacccctagtcactcatatcggagcctggactggcctccaggatgaggatgggggtggcaatgacaccctgcaggggaaaggactgccccccatgcaccattgcagggaggatgccgccaccatgagctaggtggagtaactggtttttcttgggtggctgatgacatggatgcagcacagactcagccttggcctggagcacatgcttactggtggcctcagtttaccttccccagatcctagattctggatgtgaggaagagatccctcttcagaaggggcctggccttctgagcagcagattagttccaaagcaggtggcccccgaacccaagcctcacttttctgtgccttcctgagggggttgggccggggaggaaacccaaccctctcctgtgtgttctgttatctcttgatgagatcattgcaccatgtcagacttttgtatatgccttgaaaataaatgaaagtgagaatcctcaaaaaaaaaaagggggggccctttttaaggt

SEQ ID NO: 60232 - DNA, 2836 bp, Homo sapiens
atggcggctcctcccactggggggggggtggcgcggcggcggtggcatctgcggccatggcggcgactactgccaaccccgaaatgacatcagatgtaccatcactgggtccagccattgcctctggaaactctggacctggaattcaaggtggaggagccattgtccagagggctattaagcggcgaccagggctggattttgatgatgatggagaagggaacagtaaatttttgaggtgtgatgatgatcagatgtctaacgataaggagcggtttgccaggtcggatgatgagcagagctctgcggataaagagagacttgccagggaaaatcacagtgaaattgaacggcggcgacggaacaagatgacagcctacatcacagaactgtcagatatggtacccacctgtagtgccctggctcgaaaaccagacaagctaaccatcttacgcatggcagtttctcacatgaagtccttgcggggaactggcaacacatccactgatggctcctataagccgtctttcctcactgatcaggaactgaaacatttgatcttggaggcagcagatggctttctgtttattgtctcatgtgagacaggcagggtggtgtatgtgtctgactccgtgactcctgttttgaaccagccacagtctgaatggtttggcagcacactctatgatcaggtgcacccagatgatgtggataaacttcgtgagcagctttccacttcagaaaatgccctgacagggcgtatcctggatctaaagactggaacagtgaaaaaggaaggtcagcagtcttccatgagaatgtgtatgggctcaaggagatcgtttatttgccgaatgaggtgtggcagtagctctgtggacccagtttctgtgaataggctgagctttgtgaggaacagatgcaggaatggacttggctctgtaaaggatggggaacctcacttcgtggtggtccactgcacaggctacatcaaggcctggcccccagcaggtgtttccctcccagatgatgacccagaggctggccagggaagcaagttttgcctagtggccattggcagattgcaggtaactagttctcccaactgtacagacatgagtaatgtttgtcaaccaacagagttcatctcccgacacaacattgagggtatcttcacttttgtggatcaccgctgtgtggctactgttggctaccagccacaggaactcttaggaaagaatattgtagaattctgtcatcctgaagaccagcagcttctaagagacagcttccaacaggtagtgaaattaaaaggccaagtgctgtctgtcatgttccggttccggtctaagaaccaagaatggctctggatgagaaccagctcctttactttccagaacccttactcagatgaaattgagtacatcatctgtaccaacaccaatgtgaagaactctagccaagaaccacggcctacactctccaacacaatccagaggccacaactaggtcccacagctaatttacccctggagatgggctcaggacagctggcacccaggcagcagcaacagcaaacagaattggacatggtaccaggaagagatggactggccagctacaatcattcccaggtggttcagcctgtgacaaccacaggaccagaacacagcaagccccttgagaagtcagatggtttatttgcccaggatagagatccaagattttcagaaatctatcacaacatcaatgcggatcagagtaaaggcatctcctccagcactgtccctgccacccaacagctattctcccagggcaacacattccctcctaccccccggccggcagagaatttcaggaatagtggcctagcccctcctgtaaccattgtccagccatcagcttctgcaggacagatgttggcccagatttcccgccactccaaccccacccaaggagcaaccccaacttggacccctactacccgctcaggcttttctgcccagcaggtggctacccaggctactgctaagactcgtacttcccagtttggtgtgggcagctttcagactccatcctccttcagctccatgtccctccctggtgccccaactgcatcgcctggtgctgctgcctaccctagtctcaccaatcgtggatctaactttgctcctgagactggacagactgcaggacaattccagacacggacagcagagggtgtgggtgtctggccacagtggcagggccagcagcctcatcatcgttcaagttctagtgagcaacatgttcaacaaccgccagcacagcaacctggccagcctgaggtcttccaggagatgctgtccatgctgggagatcagagcaacagctacaacaatgaagaattccctgatctaactatgtttccccccttttcagaatagaactattggggtgaggataaggggtgggggagaaaaaatcactgtttgtttttaaaaagcaaatctttctgtaaacagaataaaagttcctctcccttcccttccctcacccctgacatgtaccccctttcccttctggctgttcccctgctctgttgcctctctaaggtaacatttatagaagaaatggaatgaatctccaaggcttttaggactgtctgaaaatttgaggctgggtgaagttaaaacacctttccttatgtctcctgacctgaaattgtatagtgttgattttgtgctgagatcaagaggcaggttagaagaacctgacatccactgtttgcccttggatagtatggcttgtttttggaaagaaattctgaagagagtggaggagaggagaaatgtcc

SEQ ID NO: 60233 - DNA, 2565 bp, Homo sapiens
ccgggcgacgatttcgtggcgggagctgcactggccaggggttccggctgtatatccatgagcgccgctggcagccggggagctgcaggaaccagactgggggcgagctgagcacctgtagtcaatcacacgcagcttttaggtttgtttgaataagagatctgacctgaccggcccaactgtacaactcttcaaggaaaattcgtatttgcagtgggaagaataagtaacattgatcaagatgaatgccatgctggagactcccgaactcccagccgtgtttgatggagtgaagctggctgcagtggctgctgtgctgtacgtgatcgtccggtgtttgaacctgaagagccccacagccccacctgacctctacttccaggactcggggctctcacgctttctgctcaagtcctgtcctcttctgaccaaagaatacattccaccgttgatctgggggaaaagtggacacatccagacagccttgtatgggaagatgggaagggtgaggtcgccacatccttatgggcaccggaagttcatcactatgtctgatggagccacttctacattcgacctcttcgagcccttggctgagcactgtgttggagatgatatcaccatggtcatctgccctggaattgccaatcacagcgagaagcaatacatccgcactttcgttgactacgcccagaaaaatggctatcggtgcgccgtgctgaaccacctgggtgccctgcccaacattgaattgacctcgccacgcatgttcacctatggctgcacgtgggaatttggagccatggtgaactacatcaagaagacatatcccctgacccagctggtcgtcgtgggcttcagcctgggtggtaacattgtgtgcaaatacttgggggagactcaggcaaaccaggagaaggtcctgtgctgcgtcagcgtgtgccaggggtacagtgcactgagggcccaggaaaccttcatgcaatgggatcagtgccggcggttctacaacttcctcatggctgacaacatgaagaagatcatcctctcgcacaggcaagctctttttggagaccatgttaagaaaccccagagcctggaagacacggacttgagccggctctacacagcaacatccctgatgcagattgatgacaatgtgatgaggaagtttcacggctataactccctgaaggaatactatgaggaagaaagttgcatgcggtacctgcacaggatttatgttcctctcatgctggttaatgcagctgacgatccgttggtgcatgaaagtcttctaaccattccaaaatctctttcagagaaacgagagaacgtcatgtttgtgctgcctctgcatgggggccacttgggcttctttgagggctctgtgctgttccccgagcccctgacatggatggataagctggtggtggagtacgccaacgccatttgccaatgggagcgtaacaagttgcagtgctctgacacggagcaggtggaggccgacctggagtgaggcctccggactctggcacgctccagcagccctcctctggaagctgcgtgcccctcaccccctgtttaaggtctcccatctccctcagtgacctggatctgacctcacaccatcagcagggggcacccaccatgcacacctgtctcggagtaggcagctcttcctgggagctccaggctatttttgtgcttagttactggttttctccattgcattgttaggcatggtgacaagtgacagagttcttgccctctgtccagtttcagcatctggttgcttttaagccaagtacatctagtttccctattaaaaatgtgtctgaatagcgattttgctttgccaccaaaaggcttttccctgagaacagtgaaggatgtatgtcattttgtggtggttgtatgtgtccttacatagaccttaaaaagagctcacccttccaggccaatgctgaagacacagctccgcttgggagcctgagaacccaggcttcccaggccagagtgtggcttcttaaacggcaaaggaaattcctttgagtcacaagccaagttttcgccctgtctcctgagaccatttccctacgctttgctgctgctgagagttacctgaggcacttgttaaaaattcagcctcccaggtccctcccctcggagaggctgattcactgggtctgggaaggagcctggggattttaatttttcacaagtgccccagatgattctcatcaccaagcaaattttggaaatgctgttcaacagcgcccttaaattggaaacatctttgcagctcgttttattgaaattcataatcaggggtgtcctctagctcccacggtctccagagcagcaaggccggctatggagctgccgtcgtgtgaccacagtgtgatgtctcagaagggctctgggtgggctgagcatctgggctgtgccctggctctgcttttcaccctggacaaagtcgctgtggacttcaatttcttcacctctaaaatgggggacttggaccaggtagattgctgagctcactaccaggttcaaagttcg

SEQ ID NO: 60234 - DNA, 3260 bp, Homo sapiens
ttttttttttctagctagaaaaggtgtttcctcccattttatttcataatacattttcacagaaacatgatatatttacaaatatacaggtaagagactgctggtcagaaatcttaaaactcaaaatgtcatcaaaaattaatttacaaaagccaccaagggtccatggaggcggccaggtggatggtgtggccggcgtctgcgtgagcctgcccagaagcccacgcagcctcccggctctgcctccgctggccccgtctcaggaagcgctggtttgcaggtttttggaagctgcaagcatcgctctgactttggccatgagatcctgagtgattttgctctgcacggaagaaacgattgctgaagagatctgggcttctttttcctgagagactcccctggagcgctcctggctggagccccgactctccacaggggagacgctggctgagtgcgccgagtgggccgcgggggccgcgggccggggcgctgcctgcttgctgggtgacaccgactgagacctggccttggacttggtccgcgaccgggaccgcctcttcttcttcttctcgtggggacttctggagcgggtccgcttcctgctggccccagggctgcggctcacgcggtaggcagtgggcacactcctctcttccctccgtctctcaggggagtgggctctcctccgaggggaccgggagcgggacctcgaccgccgcactgtccgataggcactgggaagagaatgctttgcttttgagtgtgatctagacctggacttggatgacgaatggtacttgggagaacgtgatcttgttcgagatctttttttgtgctttttctttttcttttctttctcttcttctctcggtggatctttgcttttgctcgaaggcctatcgggtggtttaacttctaaagtaggcagaggcctgcctccagtcagtagagggcagggcgtagtgctggattcctcgacactgaaaggactctcctcaattttcccagcttctgcttccggcagaggatttttgagggtctgtaaaaataacgccgctttccttttacgttctgcttgaagctgtttctcttttgactccttagacgcctgggccagcttttcccgggcagcagctgcgaggcgatcttccagcttttgctttgcttgctttgcttctagctcctcctgggtaagttgaggcttcttctcctcaacaactacacagggtggggcaactgctgggttagtgtttgcagcactactagaactttcttggccttctttgctttcttcatcatcatcactgtcatcatctagcttaacacgatttttttccaggggaagcagatcattttctttggccttgattgcaaagcttattggagcaaaggaagctttcaccagcttcccgtccgggacggtcttactggacgatgcctccttcttcccgcctgagcctgcccgtgctcccacctcggctgcgtcttcaggcgcgccatcctccccagcatcacttggcttctcgggagcagagtctgtgggagcctcttctggtgcagacacagcctgcatgctatcgcccccttctttctggaggaagaactgcttcttaaactcataataagcattatactggtgccacggctgcaggaactcaaatctttgatcattcttggcacgaacactggtctcgaacttcaggccgttcctggcgacatactcggccagcttgtcaatcacgggctggacgtcggggggcggggggatgatggcggccacgggggcaagtgcacttgtggtggtggttgtggaggtggccccgctgctagtctctgctgtggttgggggcggtggtggtgtggtcccaggaggtggtggggcggtggtcgtcactccaggggagttagacacggtcacgccagcaggaagggtgctgtagtaagtagtcacgtcgattccgggagggggcggcgccaggcagtaagtgccgtccggtagcatgtagtagctgtaatacatggctgccacggtcgagtctgccgtgtactccacctgggagggctgcacaggcgcaccgtctgcgttgtgtggggtgggagtggaactgtcagcctgtgccttacgaacaagtgctgcgaggggatgatctgggtccactaccttcaagggcttcatcagctcttcaaggcggttacacttcttggaggcaaagagagagggatgaaggtaattcccatcttcttcatcatcatcatcttcattgtcagagctgactcctgatttttttttctcgtcacttttgttttctgccaggacagtgtagcgtccctctttcatggctttctggatgaacttatagtaggggttgaggtagtggtcgaagcgcagaaagtcaaactgggagttccgggcctgcttggccttcagcatgatctcaaactgtgctccctgcctgcacacgaagctggccgtgcgctcgatgatggcgtgcattttagcggttggtggcaactccacgtcagacgggacgctcaatcctaagggggcaacgaagggctcttcattttcctctaaattttcggcctcatttttttctctctgtttggaaggctcctcctcctccgtcggctctgacgggtcgtaatagtcgctaccgtaagtgaaccccacggcattgtagctcccatcctctgctagtgcttcactcaatcgcttgtattcttcctcttgccttgcctcctcctcaagcaagtccgtatgcaaggctaaatacctctcttcatcacacagggcctctattcgcgcctcctcttcagacagctgataatctctgttccacgtggaatactcagcatcgtactcagaaaggtcatgcaggtgaccacgtccatcatatctgtcgatgaggatcttgtggtcccccatccaggggatgaggtgctgtccctgttcctgagccagggcccgctcgtcgtcccggaacagcttgcaggcatagccgaaaaccaagagctccactcggctgcccccaccgccggcaccgcctggcccggcctcctccttcgcgccgcttttcctctcgggtttggcgcggcccccgctcgcgccgtacatgacagcgtccccggcgtccaggctggtcctcttctgtgccgcgcgacgtccctgatacctccacttggcctaccccttcagtcaaagaccccgcatcccggacccaacctcaacaccgccgccatagcgggcctcaaaaacgaaa

SEQ ID NO: 60235 - DNA, 5002 bp, Homo sapiens
aagttttggagcgccggacaagctgaggtccgcgactcgtcgctaagattccccaaaactgagatttcaagaaaattcaccctttccgctttctttggcgcccttcaaccgtgaaggaaatgaaggttgagaacctggaacccgcttccaaagaccaagccctttctctgtgcctcacaacagtcttgcgctgtagctgtttttattacccctattttactactggggaggagatttgaggtcctgaaagtgaagtgacttgctggacgtcacttagcagaggagatggcgaaacctggattagaggcgatgccttctaactcccagcgtggacttgcctcctttcctgggggtgactgaatgcccagccagggacgcgacgtctctggccagcagaaatacggcctcctccccgccgactgggcaaagggggaccttgcggccaaggagggattcgcaggcgggccgggggtgggagcgggggccggagccggagccttggcccgcccccgggcggcgctgtgattggccggccgctccggcgggcgtcgcgattggccgtcctgcagccgttgagatttgaactcggtatttgtggctttgcccgcgcgttgccagactcagaggcggccctttgcctctgcctgccggggattggccggattctccgccgacttgaaaactgccttgctaattggtgcgtgttgtgcacgcgtgttttttccttttcatttcagcctgactgccggaatcagagccgcgggtgagatccccagccctgtgagcctgtaggagtagaatggctccccaaatgtatgagttccatctgccattatccccagaggagttgttgaaaagtggaggggtgaatcagtatgttgtgcaagaggtactgtccatcaaacatcttccaccacagcttagagcttttcaggctgcctttcgagctcaggggcccctggctatgctgcagcactttgatactatctacagcattttgcatcactttcgaagtatagatcctggcctcaaagaagatactctggaattcctgataaaagtggtatcccgccactcccaggagcttccagctatcctggatgatacaactttgagtggatcagatagaaacgcccatctaaatgccctcaaaatgaactgttatgctctgatacgtctcctggaatcctttgagaccatggccagccagacaaaccttgtggacctggaccttggtgggaagggtaagaaagctcggaccaaggcagcccatggctttgactgggaagaagagaggcaaccaattcttcagcttttaacacagctacttcagttggacatccgtcacctgtggaaccactcaataattgaagaagaatttgtcagtttggttactggctgttgctaccgccttctggagaatcccaccattaatcaccagaagaaccgccccactcgggaagccataacacacctgcttggtgtagccttgacccgttataaccatatgctcagtgctacagtgaagatcatccagatgctgcagcactttgaacacctggcacctgtactggttgcagccgtgagtctatgggcaactgactatggaatgaagagcatagtgggagagattgtaagagagattggacaaaagtgtccccaagagctgagtcgagacccttcagggacaaagggctttgcagcattcctgacagaactagcagaacgtgtcccagctatcctgatgtccagcatgtgcattttgctagatcacctggatggagaaaattacatgatgcgtaatgctgtgctggcagccatggcggagatggtgctgcaggttctcagtggcgatcaactggaagcagcagcccgagacaccagagaccagttcttggatactttacaagcccatggccatgatgtcaactcctttgtgcggagccgtgttttgcagctcttcacccgaattgtccagcagaaggctctccccctgacacgtttccaggcagtggtggctttagctgtgggacgtctggcagacaagtcagtgctagtatgtaaaaatgccatccagctgctggccagttttctagccaataatcctttctcctgcaagcttagtgatgctgaccttgccggaccactgcagaaggagacccagaaattacaagagatgagggcccagaggcgaactgcagcagcttctgcagtgctggacccagaggaggagtgggaagccatgctgccagagttgaagtctaccctgcagcagcttctacagcttccccagggagaggaggagattcctgagcaaattgccaatacagagacaactgaagatgtgaaaggacgcatctatcaactgcttgccaaagctagttacaaaaaggccatcattctcactcgagaagccacaggccacttccaggagtccgaacccttcagtcatatagacccagaggagtcagaggagaccaggctcttgaatatcttaggacttatcttcaaaggcccagcagcttccacacaagaaaagaatccccgggagtctacaggaaacatggtcacaggacagactgtctgtaaaaaaaaacccaatatgtcggatcctgaggaatccaggggaaatgatgaactagtgaagcaggagatgctggtacagtatctgcaggatgcctacagcttctcccggaagattacagaggccattggcatcatcagcaagatgatgtatgaaaacacaactacagtggtgcaggaggtgattgaattctttgtgatggtcttccaatttggggtaccccaggccctgtttggggtgcgccgtatgctgcctctcatctggtctaaggagcctggtgtccgggaagccgtgcttaatgcctaccgccaactctacctcaaccccaaaggggactctgccagagccaaggcccaggctttgattcagaatctctctctgctgctagtggatgcctcggttgggaccattcagtgtcttgaggaaattctctgtgagtttgtgcagaaggatgagttgaaaccagcagtgacccagctgctgtgggagcgggccaccgagaaggtcgcctgctgtcctctggagcgctgttcctctgtcatgcttcttggcatgatggcacgaggaaagccagaaattgtgggaagcaatttagacacactggtgagcatagggctggatgagaagtttccacaggactacaggctggcccagcaggtgtgccatgccattgccaacatctcggacaggagaaagccttctctgggcaaacgtcacccccccttccggctgcctcaggaacacaggttgtttgagcgactgcgggagacagtcacaaaaggctttgtccacccagacccactctggatcccattcaaagaggtggcagtgaccctcatttaccaactggcagagggccccgaagtgatctgtgcccagatattgcagggctgtgcaaaacaggccctggagaagctagaagagaagagaaccagtcaggaggacccgaaggagtcccccgcaatgctccccactttcctgttgatgaacctgctgtccctggctggggatgtggctctgcagcagctggtccacttggagcaggcagtgagtggagagctctgccggcgccgagttctccgggaagaacaggagcacaagaccaaagatcccaaggagaagaatacgagctctgagaccaccatggaggaggagctggggctggttggggcaacagcagatgacacagaggcagaactaatccgtggcatctgcgagatggaactgttggatggcaaacagacactggctgcctttgttccactcttgcttaaagtctgtaacaacccaggcctctatagcaacccagacctctctgcagctgcttcacttgcccttggcaagttctgcatgatcagtgccactttctgcgactcccagcttcgtcttctgttcaccatcctggaaaagtctccacttcccattgtccggtctaacctcatggttgccactggggatctggccatccgctttcccaatctggtggacccctggactcctcatctgtatgctcgcctccgggaccctgctcagcaagtgcggaaaacagcggggctggtgatgacccacctgatcctcaaggacatggtgaaggtgaaggggcaggtcagcgagatggcggtgctgctcatcgaccccgagcctcagattgctgccctggccaagaacttcttcaatgagctctcccacaagggcaacgcaatctataatctccttccagatatcatcagccgcctgtcagaccccgagctgggggtggaggaagagcctttccacaccatcatgaaacagctcctctcctacatcaccaaggacaagcagacagagagcctggtggaaaagctgtgtcagcggttccgcacatccctaactgagcggcagcagcgagacctggcctactgtgtgtcacagctgcccctcacagagcgaggcctccgtaagatgcttgacaattttgactgttttggagacaaactgtcagatgagtccatcttcagtgcttttttgtcagttgtaggcaagctgcgacgtggggccaagcctgagggcaaggctataatagatgaatttgagcagaagcttcgggcctgtcataccagaggtttggatggaatcaaggagcttgagattggccaagcaggtagccagagagcgccatcagccaagaaaccatccactggttctaggtaccagcctctggcttctacagcctcagacaatgactttgtcacaccagagccccgccgtactacccgtcggcatccaaacacccagcagcgagcttccaaaaagaaacccaaagttgtcttctcaagtgatgagtccagtgaggaagatctttcagcagagatgacagaagacgagacacccaagaaaacaactcccattctcagagcatcggctcgcaggcacagatcc

SEQ ID NO: 60236 - DNA, 1707 bp, Homo sapiens
cgacccacgcgtccgtacacaccactgcctgataaccatgctggctgccacagtcctgaccctggccctgctgggcaatgcccatgcctgctccaaaggcacctcgcacgaggcaggcatcgtgtgccgcatcaccaagcctgccctcctggtgttgaaccacgagactgccaaggtgatccagaccgccttccagcgagccagctacccagatatcacgggcgagaaggccatgatgctccttggccaagtcaagtatgggttgcacaacatccagatcagccacttgtccatcgccagcagccaggtggagctggtggaagccaagtccattgatgtctccattcagaacgtgtctgtggtcttcaaggggaccctgaagtatggctacaccactgcctggtggctgggtattgatcagtccattgacttcgagatcgactctgccattgacctccagatcaacacacagctgacctgtgactctggtagagtgcggaccgatgcccctgactgctacctgtctttccataagctgctcctgcatctccaaggggagcgagagcctgggtggatcaagcagctgttcacaaatttcatctccttcaccctgaagctggtcctgaagggacagatctgcaaagagatcaacgtcatctctaacatcatggccgattttgtccagacaagggctgccagcatcctttcagatggagacattggggtggacatttccctgacaggtgatcccgtcatcacagcctcctacctggagtcccatcacaagggtcatttcatctacaagaatgtctcagaggacctccccctccccaccttctcgcccacactgctgggggactcccgcatgctgtacttctggttctctgagcgagtcttccactcgctggccaaggtagctttccaggatggccgcctcatgctcagcctgatgggagacgagttcaaggcagtgctggagacctggggcttcaacaccaaccaggaaatcttccaagaggttgtcggcggcttccccagccaggcccaagtcaccgtccactgcctcaagatgcccaagatctcctgccaaaacaagggagtcgtggtcaattcttcagtgatggtgaaattcctctttccacgcccagaccagcaacattctgtagcttacacatttgaagaggatatcgtgactaccgtccaggcctcctattctaagaaaaagctcttcttaagcctcttggatttccagattacaccaaagactgtttccaacttgactgagagcagctccgagtccatccagagcttcctgcagtcaatgatcaccgctgtgggcatccctgaggtcatgtctcggctcgaggtagtgtttacagccctcatgaacagcaaaggcgtgagcctcttcgacatcatcaaccctgagattatcactcgagatggcttcctgctgctgcagatggactttggcttccctgagcacctgctggtggatttcctccagagcttgagctagaagtctccaaggaggtcgggatggggcttgtagcagaaggcaagcaccaggctcacagctggaaccctggtgtctcctccagcgtggtggaagttgggttaggagtacggagatggagattggctcccaactcctccctatcctaaaggcccactggcattaaagtgctgtatccaagaaaaaaaaaa

SEQ ID NO: 60237 - DNA, 4391 bp, Homo sapiens
ggttctgaggactgggtttgggtgcagacgttgttgcttgggcgcttctccgctgcgtgtaggtgaagggggcttcctgaccgagacatggatttaggtgctattacaaaatactcagcattacacgccaagcccaatggactgatccttcaatacgggactgctggatttcgaacgaaggcagaacatcttgatcatgtcatgtttcgcatgggattattagctgtcctgaggtcaaaacagacaaaatccactataggagtcatggtaacagcgtcccacaatcctgaggaagacaatggtgtaaaattggttgatcctttgggtgaaatgttggcaccatcctgggaggaacatgccacctgtttagcaaatgctgaggaacaagatatgcagagagtgcttattgacatcagcgagaaagaagctgtgaatctgcaacaagatgcctttgtagttattggtagagataccaggcccagcagtgagaaactttcacaatctgtaatagatggtgtgactgttctaggaggtcaattccatgattatggcttgttaacaacaccccagctgcactacatggtgtattgtcgaaacacgggtggccgatatggaaaggcaactatagaaggttactaccagaaactctctaaggcttttgtggaactcaccaaacaggcttcttgcagtggagatgaatacagatcacttaaggttgactgtgcaaatggcataggggccctgaagctaagggaaatggaacactacttctcacagggcctgtcagttcagctgtttaatgatgggtccaagggcaaactcaatcatttatgtggagctgactttgtgaaaagtcatcagaaacctccacagggaatggaaattaagtccaatgaaagatgctgttcttttgatggagatgcagacagaattgtttattactaccatgatgcagatggccactttcatctcatagatggagacaagatagcaacgttaattagcagtttccttaaagagctcctggtggagattggagaaagtttgaatattggtgttgtacaaactgcatatgcaaatggaagttcaacacggtatcttgaagaagttatgaaggtacctgtctattgcactaagactggtgtaaaacatttgcaccacaaggctcaagagtttgacattggagtttattttgaagcaaatgggcatggcactgcactgtttagtacagctgttgaaatgaagataaaacaatcagcagaacaactggaagataagaaaagaaaagctgctaagatgcttgaaaacattattgacttgtttaaccaggcagctggtgatgctatttctgacatgctggtgattgaggcaatcttggctctgaagggcttgactgtacaacagtgggatgctctctatacagatcttccaaacagacaacttaaagttcaggttgcagacaggagagttattagcactaccgatgctgaaagacaagcagttacacccccaggattacaggaggcaatcaatgacctggtgaagaagtacaagctttctcgagcttttgtccggccctctggtacagaagatgtcgtccgagtatatgcagaagcagactcacaagaaagtgcagatcaccttgcacatgaagtgagcttggcagtatttcagctggctggaggaattggagaaaggccccaaccaggtttctgaagataattttcatattcctgagaaactggactttttacaagtctttacaaaactgtcaataataatggcagtactaagagatttataatcataatgtttacaatgcagcctactggattgtctctagatctgtttttcttaaacactaacagaataattctttataaataggtaagccttacacttgttaaagaaatttacctctaatttcagtctcactaatgtaaaatactgggacttaagtatacaattcagtcactaactgtacagttttatgtggggaacaattcatgcaggctactggaaaattaaatcttattaccaactccttgtgatatctttgccatcaccatcacatgagcaagatgatgttttgcagcattccccattgctgatacaaatggagagggcagagaagactttatacaaccagtttttccattgcagagtcttaagaaagattattagatgacttacctatatggactaatgccatccaggaactccagaggtatgaataggggggtggtccatccctcttcccatactgaggtggagatgctcatgcaatacttttaaggatgcatggtccagccttcagttattcttcactgctcttggtgaagggtatgtgggagaaaaacctaattataatacgtttccccagccctctgatggagaaggaacacccattctgatacccagaacatggttaataaggaaaagagaaaaatccccaaccaatcttaattgaaccaagtctgaaaccaatggaaaaaaaaaaatgggtagtgtatatttttgcaggtttaaggacaacttcagggacaataaaaacaatgggactttacatgtgtatatatatagctctcttaggcaccataatcagtatgagccaacaatatttaaacttgattcaggccacattcagacatttgctcttatatacaaatatttaaattaaatacaatctgaaatgtgttctgttacatacaaaaaaggaaaaactatacaacgcagagcgagtgtggtgtgttttaaataattacatttacatgtaagctaaatggaaccagcaatggtgctcaagtttttatcatcccttccagaaaatctttttctaccatctcttctattttttgcctggctttgctggaacatggtttgtggttctccagtttcatgtccttattagggaaggcatttgagtagaggataggactccctgagtgtcctccacatcggcttgtgactttgctgttgaagacttgactgagcacattgaagaacggcaggagctgctccatactgcgcacggtgcagatggtgagcagcaagtgccctggctcccaacccaatgttctccctgagttgtcttcctctggatttttctgcagaaaacaaaaagtgaactggtattaatacaacagacaatgtggtatgttagaaaaattaaaaatatataaactttggcaattggtcaagaaatgaatacaaatgacattaagtttctaactcctgacctgatcaaaacccttggtgcttctgagaccttttactgccatttattagttttacatggagcagtctaacattgtagtaatagttcccaactagaatgcgcagataagcttagttaacagaaatagctttgaacaggaatagagtcaaacataaaagttttatgttgtgctttgtatttactcaaaaagctcccaggtttctgaaccctcactactgtaaccaaggactaggtcacaaaattactacagaaaaaaggaacaaagtgctttatacatttcataatatatccccttttattataattagttaattcccttttatctaaatggcctaaatttgccatgatggtagcagtgtccaaagtgaataattactgtcagtactgcatcacagagaaaggaagggatccctcaggagacactgctgtctccttctgggttgtgctaaacaacatagggaggaaagctggacctggagtcaaaggaattgagttagtgtgctggctctgccatacttacggcacccttgggcaggatatacaaaggttcctcacttataaaatgggacagtctaaaactaccttttagtagagaagtcaaatgagaaggtatgtgaaaactctgtcaactaaatataaagactaataatttgggtattaagaggctagtttgagaagccacctgaattacacaaacacagctacagacatcattctgtgtagagaaagataagagagaacaggttggttgaacttgggcagaatcacagatacctttccacactaaagaatgaaaataagctatgaactttacagaaggaagaaatcatgaagacttaggaagcagaattacaatctgtcatattaacaaatggagtttgccttctaagatcagatgttgctcagaaactttcattgtttacctaataatttaatatcactagtttcctagtgggtcaagcagatgcaaaatccagcttattttcttctatgtgctctcaagcttattgcttattttaaagtaaaatcctgaaaaaggaaaatattaggttggtgcaaacgtaattgcggtttttgcattgttgaaatttgccgttttatattggagtacattcttaaataaatgtggttatgttatacatcaaaaaaaaaa

SEQ ID NO: 60238 - DNA, 3230 bp, Homo sapiens
gagctgacaatatcaggtgagctgtggaggtggggtccttggaagctggatgacagcagctggcaaggggataagagagcagtgagcccctccctcaaggaggtctggctttatccatagacagggccctctgaggtggggctgaggtacaaagggggattgagcagcccaggagaagagagatgggggttcccttcttctcttctctcagatgcatggtggacttaggaccttgctgggctgggggtctcactgcagagatgaagctgcttctggccctagcagggctcctggccattctggccacgccccagccctctgaaggtgctgctccagctgtcctgggggaggtggacacctcgttggtgctgagctccatggaggaggccaagcagctggtggacaaggcctacaaggagcggcgggaaagcatcaagcagcggcttcgcagcggctcagccagccccatggaactcctatcctacttcaagcagccggtggcagccaccaggacggcggtgtgggccgctgactacctgcacgtggctctagacctgctggagaggaagctgcggtccctgtggcgaaggccattcaatgtcactgatgtgctgacgcccgcccagctgaatgtgttgtccaagtcaagcggctgcgcctaccaggacgtgggggtgacttgcccggagcaggacaaataccgcaccatcaccgggatgtgcaacaacagacgcagccccacgctgggggcctccaaccgtgcctttgtgcgctggctgccggcggagtatgaggacggcttctctcttccctacggctggacgcccggggtcaagcgcaacggcttcccggtggctctggctcgcgcggtctccaacgagatcgtgcgcttccccactgatcagctgactccggaccaggagcgctcactcatgttcatgcaatggggccagctgttggaccacgacctcgacttcacccctgagccggccgcccgggcctccttcgtcactggcgtcaactgcgagaccagctgcgttcagcagccgccctgcttcccgctcaagatcccgcccaatgacccccgcatcaagaaccaagccgactgcatcccgttcttccgctcctgcccggcttgcaccgggagcaacatcaccatccgcaaccagatcaacgcgctcacttccttcgtggacgccagcatggtgtacggcagcgaggagcccctggccaggaacctgcgcaacatgtccaaccagctggggctgctggccgtcaaccagcgcttccaagacaacggccgggccctgctgccctttgacaacctgcacgatgacccctgtctcctcaccaaccgctcagcgcgcatcccctgcttcctggcaggggacacccgttccagtgagatgcccgagctcacctccatgcacaccctcttacttcgggagcacaaccggctggccacagagctcaagagcctgaaccctaggtgggatggggagaggctctaccaggaagcccggaagatcgtgggggccatggtccagatcatcacttaccgggactacctgcccctggtgctggggccaacggccatgaggaagtacctgcccacgtaccgttcctacaatgactcagtggacccacgcatcgccaacgtcttcaccaatgccttccgctacggccacaccctcatccaacccttcatgttccgcctggacaatcggtaccagcccatggaacccaacccccgtgtccccctcagcagggtcttttttgcctcctggagggtcgtgctggaaggtggcattgaccccatcctccggggcctcatggccacccctgccaagctgaatcgtcagaaccaaattgcagtggatgagatccgggagcgattgtttgagcaggtcatgaggattgggctggacctgcctgctctgaacatgcagcgcagcagggaccacggcctcccaggatacaatgcctggaggcgcttctgtgggctcccgcagcctgaaactgtgggccagctgggcacggtgctgaggaacctgaaattggcgaggaaactgatggagcagtatggcacgcccaacaacatcgacatctggatgggcggcgtgtccgagcctctgaagcgcaaaggccgcgtgggcccactcctcgcctgcatcatcggtacccagttcaggaagctccgggatggtgatcggttttggtgggagaacgagggtgtgttcagcatgcagcagcgacaggccctggcccagatctcattgccccggatcatctgcgacaacacaggcatcaccaccgtgtctaagaacaacatcttcatgtccaactcatatccccgggactttgtcaactgcagtacacttcctgcattgaacctggcttcctggagggaagcctcctagaggccaggtaagggggtgcagcagtgaggggtatatctgggctggccagttggaaccacggagatctccttgccctagatgagcccagccctgttctgggtgcagctgagaaaatgagtgactagacgttcatttgtgtgctcatgtatgtgcgaagtatataaattggcttttcatgcgtgtgtgttgtctgaacatggggagtgtttcatgggttatgtgtatgtgccatttatgtgagtgtgtgtttgtgctgatgagaatactgagtatgtggaaggcagcagagcggactggtgaggagcacagctcaggaactagactgcctgggttccaatcctggctctggggcttgctagctatgtgaccttgagcaaattaccctccttaaacaagagttttcttccttgtaaattacatctgtcatggtttcttggagggcccacttgtatcctctggttcttcatttattgagcacctactacatgcaaggcactgtactaggcgtgagaagcatatagaggcaagaaagagataccaagatgccatctgtgtcctggttagcagagctggaccagtggtgccttggagggataagccagctgcagctgggctgtgtggttgacttatgggcccagccagccaggctcaggccatggctcccctttttcttcctcaccctgatttcttgcttattcactgaagttctcctgaagaggaactgggcctgttgccctttctgtaccatttatttgctcccaatgtttatgataataaaggcaccgctgatggggacctccaaaaaaaaaa

SEQ ID NO: 60239 - DNA, 2987 bp, Homo sapiens
  misc_feature (1)...(2987): n = a,t,c or g
tttcgtcggggccccgcccctcctcggactctacccagtactgaactaggggcagctgggctccagagtccctcgggtctcaggtcatggcggtcgcggggcccgcgcccggagctggcgccaggcccaggttagatctgcaatttctccagcggttcctgcagatactgaaggttttgtttccttcttggtcatcacaaaatgccttgatgttcctgacccttttgtgcctgaccctactggagcaatttgtgatctaccaggttggcttgatccccagtcagtactatggggtcctgggaaacaaagacttggaagggtttaagactctgacattcctggctgtcatgctcattgttctgaactccacgctgaagagctttgatcagttcacctgcaacctgctgtatgtgagctggaggaaggacctcactgagcaccttcaccgcctctacttccggggccgtgcgtactacaccctcaacgtgctgcgggatgacatcgataacccggaccagcgcatcagccaggacgtggagcgattctgccggcagctcagcagcatggccagcaagctcatcatctccccgttcaccctcgtctactacacttaccagtgcttccaaagcacaggctggctcgggcctgtgagcatcttcgggtatttcatcctggggaccgtggtgaacaaaactttgatgggccccattgtgatgaagctggtgcatcaggagaagctggagggagattttaggttcaagcacatgcagattcgggtgaatgcggagcctgctgctttctacagagctgggcatgtggagcacatgaggacagaccgcaggctgcagagactccttcagacccagagggagctgatgtccaaggagctctggctgtacatcggcatcaacacctttgactatctgggcagcatcctgagttacgttgtcatcgcaatccccattttcagcggggtctatggagacctgagtcccgcagagcttagcaccctggtcagcaagaatgcctttgtgtgcatctacctcatcagctgcttcacccagctcatcgacctgtccacgacgctctcagatgtggctggctacacgcacagaattgggcagcttcgggagacgcttctggacatgtccctgaagtcacaggactgcgagatcctgggcgagagcgagtggggcttggacacacccccagggtggccagcggcagagccagcagacacagcatttctccttgagcgggtctccatctctgccccctcctctgacaaacccctaatcaaggatctgagcctaaagatctccgagggacagagcctgctcatcacaggcaacacgggcactggcaagacctccttgctccgggttctgggtggcctctggacgagtacacggggctcagtgcagatgctgacggactttgggccccatggggtgctattcctgccacaaaagccattcttcactgacgggacccttcgggagcaggtgatatatcccctgaaggaggtctaccccgactcaggttctgccgatgatgagaggatcttgaggttcttggaattggcaggcctgtccaacttggtggcaaggacagagggtctggaccagcaggtggactggaactggtatgatgttctgtccccgggggagatgcaacggctctcctttgcccgactcttctacctgcagccgaagtacgcagtgcttgatgaagccaccagtgccctgacagaggaagtggagagcgagctctatcgcatcggccagcagctggggatgacgttcatcagtgtgggacatcggcagagccttgagaagtttcattccttggttctgaaactctgtggaggaggaagatgggagctgatgagaatcaaagtggaatgaagctctggcttttggaaggagaacccacactgtggcgggtcggcggccctcaagagacaccaggaggactgacagcctgatctccatgtggtggttcggcccacatagatccccgtgcaggagcccgccaatggtcctgtgcagggacccccctagcaagtgggtggctgagccccaggcctaggtttctgtgggggacattgaatctccccagtgttcagtctccccaggactctgctgcctcagccagagcctccatatgcttgaagtgctgattacctacaaatgatttcagatcatgtttgctaaagagaaatctggaagtgtgagatctgtaagaaatgaaagaaatggantttgggagtcaagagatctggaaatcttttaatcagttaaattgtgccagccaataggatttttaaactttaactggaccatttaagttttttaataagttttttacaaaggaaagttaaaacattaaaaaggaattacagctttctgtcttctctatcatggaatgattttttttattgaatctccagatttgtatttgacagcttggtgggaagggaagcacactctgctgttctggaatcttatgcccagggtttttcacttctccccacatctccctttccacttgccagtgttgtgtagttagaacctgaaccactaacttctaggggcctttggtctgccccctaccctaacccccaaatgaaagtaaatcccctttcccccctagcccaaaataaggttgggttttcctaaaaaaatagtcctatattagggaacaacaacagcaaattagacaaaaccccagaaagcacaaagcatgaggtggagttactgtgcccaaagtcctcactcagaccagtgcccctaccagttcagttgtctatgtattaccttccttaccttcataatgtttgccaggcttctgtacttctagtacttgagttacttaatatttttaaaaacaaaccttttaagtttaaatggatttttaagtgaaattttacacttaacatagatggaaagtaactaaaaataaatacaagaaaaacaaaaaaaaaa

SEQ ID NO: 60240 - DNA, 2560 bp, Homo sapiens
ttttttttttttttacaaatccaagtaacaactttattgtagtatacagcacaatttttacatacatattagtggttttgacagtgttacttttgagtagaccttaaatgaatccacaaagttaatatattaaaaataaaatatacacagtaaaacaacaggcatccagatgttcagaatcatgcagataggagtggtttggttggtgttatcactgggtaccttgcctatttaactcgccagcaaataccacttcttctgtttctcattcccatataattcatcaaaatcagagagttctaaacatatacaaaataaacctcttttaaagccacatcagtaaaaaatttcaattaataaggttatcatcaaaccaagaattccactgatcatttgatcagcccattactaggaaacaggcaatatcagcacccgatctaaaggcaagcctatttcatttattaaaacaccaacaagagagattaatcaacaaagcaactattaacaacatgttaatcttaatataagacactgagagaaaagtaaaaataatacataaatatcactccactgagccaggatataactcatggactacagatacatgagtttctacctgtcaaacaatgctttaaatattttttctaggaaaaaaaaaaaaaacacaatatatgagaagatgcaaaggaaaggcagaaatgtgaatttatgcatctagttccacaatttaaaataaatatcaaactgacaatataaagctaagtgacaatgacttaaccattgggcaccaaacaggcaatacaactgctcactgtaatacataatgctcttcaggagtttccagcagatggccatcacaacaatactgtcataatacagaaaaaacatttatccactgtggaaagagaccctgaagagaatgtggcaaaggcatagagaaaaagttggatcttttgaaaaagttaatgatatcaaaatacttttccatcactggtaaaccaagctaggtcaagtatatgtcccaaagcagcactgaattcagagtaagaggttggcagaaaagtttggaaaactgcagtttttaaaaattggcaatttctccatgcttaataaaactatcagaagaggtataatgtttgtgcgtttgtggaatgttgactgcttgctgcaaaaatttacaacatgaatgaggacctgcagagatgcatatcaatgaaatatttttttaaaaatttacaaaaaactaaagtttctatttaaaaaagaaccatgttatgccaagatgaaacatggtaaaaagtagtgtaagttctgtccatgattctttacctagtgaatgggaaagtaatagaaacaattttcttcttaaaaaggaaggtttgttattgcactgacttttacaacctgacatagtaatttagaaaaatcatgtagtaaaatctgtaaaattaaaatataaaagtctggtttgtaaacatcagttggccaagtctattcagagtccttcatgatagtggaatggaatgaataattaattcactaccttatttatttgctgtgaggcagaaaattccagaacacagcctttatactttcacagtaattatattcaaaagatataaagtcagtgcagttattttttttctttccctgtgcaatgtttagctctcaccccactcccaagtgccataattgaaataatactggtttggagaattagtacagattggtcataaatgccgcataaagtccgtaggacttcggtaaaggtatttccaaatggcgtagtaatgcactgcagctgccgtggccacaaacaggtgccagatggcgtgggcaaatggaatgatgccatcactcttgaagaacacaactcccaagcaataaattaagcccccacaggcaagttcctgaagtccatcggtgttgttcattgatgtcaccaccaaggctggagagaatcccattgtgagatagaaaaagagttcaacccccttatatttttcatggtagagaaatacataaatggttcctccagctgccatgagccagataaaccaacgcatatgagatgccaggggtccaagttcacgaagatttaaccatggagcataagaagcagcaatgaagaaatagataaccattctatcacacatgtgaaaacaatgctccactgtccttaagtggctctttttccatgatacaatgtgaaatactgtagaaacgatgaagagggcacagagtcccattccataaatccatgctgttatcttttcccagcagtcatcagacagccgatggaggagggcactgcccacgatggccggaacaatgaggaatgcgtgtgtgtaacagttagcagcatgttcatagcaagttggcttgtagcggccattggctggagctcgatggttcatgaaccgctggaatcgattcttgaaccgcattgatcctctgctcctcctcgggggccaggagctccgtctcgtcagcaccggcggccgggcgcgcggccctcatgggcttgggctgctccggaggccgcctgcgtgtccagcgg

SEQ ID NO: 60241 - DNA, 841 bp, Homo sapiens
tgttcagccttcaggaagaactcatttctgttgttgacaactgaagttgtctgtcagaaagcaatgttgtaaggtgacgtacagctacatatttttcctcaaaattgaggtgaaaggaatttctaaagtaggcattatgttcttaatttttatctgtgaattaagccacccagctcctcagctctttctctgttggccctctacttcagattactttctatgaagacaaaaattttcaaggccgtcgctatgactgtgattgcgactgtgcagatttccacacatacctaagtcgctgcaactccattaaagtggaaggaggcacctgggctgtttatgaaaggcccaactttgctgggtacatgtacatcttaccacagggagagtaccctgaataccagcgttggatgggcctcaacgaccgcctcagctcctgcagagctgttcatctgcctagtggaggccagtataagattcagatctttgagaaaggggattttagtggtcagatgtatgaaaccaccgaagattgcccttccatcatggagcaatttcacatgcgagagatccactcctgtaaggtgctggagggtgtctggattttctatgagctacccaactaccgtggcaggcagtacctcctggacaagaaggagtaccggaagcccatcgattggggtgcagcctccccagctgtccagtctttccgccgcattgtggagtaatgacatgaatggggccatattcttcctggggcccaaatgctggctggccttgtggtccaaataggcatcatctaataaaacagttgtcatgcatccctattttaattatgtcgcac

SEQ ID NO: 60242 - DNA, 5273 bp, Homo sapiens
cagtgcgcccatcgcgcggctcctcggggcacctgctgccttggcgcctttccccttggccttcgcctcgcccgcagcgccctccgcagagggccccgcccgctgcgcgcgcatccccgcccccggggcgatctgtcagagcacctcgcgagcgtacgtgcctcaggaagtgacgcacagcccccctgggggccgggggcggggccaggctataaaccgccggttaggggccgccatcccctcagagcgtcgggatatcgggtggcggctcgggacggaggacgcgctagtgtgagtgcgggcttctagaactacaccgaccctcgtgtcctcccttcatcctgcggggctggctggagcggccgctccggtgctgtccagcagccatagggagccgcacggggagcgggaaagcggtcgcggccccaggcggggcggccgggatggagcggggccgcgagcctgtggggaaggggctgtggcggcgcctcgagcggctgcaggttcttctgtgtggcagttcagaatgatggatcaagctagatcagcattctctaacttgtttggtggagaaccattgtcatatacccggttcagcctggctcggcaagtagatggcgataacagtcatgtggagatgaaacttgctgtagatgaagaagaaaatgctgacaataacacaaaggccaatgtcacaaaaccaaaaaggtgtagtggaagtatctgctatgggactattgctgtgatcgtctttttcttgattggatttatgattggctacttgggctattgtaaaggggtagaaccaaaaactgagtgtgagagactggcaggaaccgagtctccagtgagggaggagccaggagaggacttccctgcagcacgtcgcttatattgggatgacctgaagagaaagttgtcggagaaactggacagcacagacttcaccggcaccatcaagctgctgaatgaaaattcatatgtccctcgtgaggctggatctcaaaaagatgaaaatcttgcgttgtatgttgaaaatcaatttcgtgaatttaaactcagcaaagtctggcgtgatcaacattttgttaagattcaggtcaaagacagcgctcaaaactcggtgatcatagttgataagaacggtagacttgtttacctggtggagaatcctgggggttatgtggcgtatagtaaggctgcaacagttactggtaaactggtccatgctaattttggtactaaaaaagattttgaggatttatacactcctgtgaatggatctatagtgattgtcagagcagggaaaatcacctttgcagaaaaggttgcaaatgctgaaagcttaaatgcaattggtgtgttgatatacatggaccagactaaatttcccattgttaacgcagaactttcattctttggacatgctcatctggggacaggtgacccttacacacctggattccctttcttcaatcacactcagtttccaccatctcggtcatcaggattgcctaatatacctgtccagacaatctccagagctgctgcagaaaagctgtttgggaatatggaaggagactgtccctctgactggaaaacagactctacatgtaggatggtaacctcagaaagcaagaatgtgaagctcactgtgagcaatgtgctgaaagagataaaaattcttaacatctttggagttattaaaggctttgtagaaccagatcactatgttgtagttggggcccagagagatgcatggggccctggagctgcaaaatccagtgtaggcacagctctcctattgaaacttgcccagatgttctcagatatggtcttaaaagatgggtttcagcccagcagaagcattatctttgccagttggagtgctggagactttggatcggttggtgccactgaatggctagagggatacctttcgtccctgcatttaaaggctttcacttatattaatctggataaagcggttcttggtaccagcaacttcaaggtttctgccagcccactgttgtatacgcttattgagaaaacaatgcaaaatgtgaagcatccggttactgggcaatttctatatcaggacagcaactgggccagcaaagttgagaaactcactttagacaatgctgctttccctttccttgcatattctggaatcccagcagtttctttctgtttttgcgaggacacagattatccttatttgggtaccaccatggacacctataaggaactgattgagaggattcctgagttgaacaaagtggcacgagcagctgcagaggtcgctggtcagttcgtgattaaactaacccatgatgttgaattgaacctggactatgagaggtacaacagccaactgctttcatttgtgagggatctgaaccaatacagagcagacataaaggaaatgggcctgagtttacagtggctgtattctgctcgtggagacttcttccgtgctacttccagactaacaacagatttcgggaatgctgagaaaacagacagatttgtcatgaagaaactcaatgatcgtgtcatgagagtggagtatcacttcctctctccctacgtatctccaaaagagtctcctttccgacatgtcttctggggctccggctctcacacgctgccagctttactggagaacttgaaactgcgtaaacaaaataacggtgcttttaatgaaacgctgttcagaaaccagttggctctagctacttggactattcagggagctgcaaatgccctctctggtgacgtttgggacattgacaatgagttttaaatgtgatacccatagcttccatgagaacagcagggtagtctggtttctagacttgtgctgatcgtgctaaattttcagtagggctacaaaacctgatgttaaaattccatcccatcatcttggtactactagatgtctttaggcagcagcttttaatacagggtagataacctgtacttcaagttaaagtgaataaccacttaaaaaatgtccatgatggaatattcccctatctctagaattttaagtgctttgtaatgggaactgcctctttcctgttgttgttaatgaaaatgtcagaaaccagttatgtgaatgatctctctgaatcctaagggctggtctctgctgaaggttgtaagtggtcgcttactttgagtgatcctccaacttcatttgatgctaaataggagataccaggttgaaagaccttctccaaatgagatctaagcctttccataaggaatgtagctggtttcctcattcctgaaagaaacagttaactttcagaagagatgggcttgttttcttgccaatgaggtctgaaatggaggtccttctgctggataaaatgaggttcaactgttgattgcaggaataaggccttaatatgttaacctcagtgtcatttatgaaaagaggggaccagaagccaaagacttagtatattttcttttcctctgtcccttcccccataagcctccatttagttctttgttatttttgtttcttccaaagcacattgaaagagaaccagtttcaggtgtttagttgcagactcagtttgtcagactttaaagaataatatgctgccaaattttggccaaagtgttaatcttaggggagagctttctgtccttttggcactgagatatttattgtttatttatcagtgacagagttcactataaatggtgtttttttaatagaatataattatcggaagcagtgccttccataattatgacagttatactgtcggttttttttaaataaaagcagcatctgctaataaaacccaacagatactggaagttttgcatttatggtcaacacttaagggttttagaaaacagccgtcagccaaatgtaattgaataaagttgaagctaagatttagagatgaattaaatttaattaggggttgctaagaagcgagcactgaccagataagaatgctggttttcctaaatgcagtgaattgtgaccaagttataaatcaatgtcacttaaaggctgtggtagtactcctgcaaaattttatagctcagtttatccaaggtgtaactctaattcccatttgcaaaatttccagtacctttgtcacaatcctaacacattatcgggagcagtgtcttccataatgtataaagaacaaggtagtttttacctaccacagtgtctgtatcggagacagtgatctccatatgttacactaagggtgtaagtaattatcgggaacagtgtttcccataattttcttcatgcaatgacatcttcaaagcttgaagatcgttagtatctaacatgtatcccaactcctataattccctatcttttagttttagttgcagaaacattttgtggtcattaagcattgggtgggtaaattcaaccactgtaaaatgaaattactacaaaatttgaaatttagcttgggtttttgttacctttatggtttctccaggtcctctacttaatgagatagcagcatacatttataatgtttgctattgacaagtcattttaatttatcacattatttgcatgttacctcctataaacttagtgcggacaagttttaatccagaattgaccttttgacttaaagcagagggactttgtatagaaggtttgggggctgtggggaaggagagtcccctgaaggtctgacacgtctgcctacccattcgtggtgatcaattaaatgtaggtatgaataagttcgaagctccgtgagtgaaccatcatataaacgtgtagtacagctgtttgtcatagggcagttggaaacggcctcctagggaaaagttcatagggtctcttcaggttcttagtgtcacttacctagatttacagcctcacttgaatgtgtcactactcacagtctctttaatcttcagttttatctttaatctcctcttttatcttggactgacatttagcgtagctaagtgaaaaggtcatagctgagattcctggttcgggtgttacgcacacgtacttaaatgaaagcatgtggcatgttcatcgtataacacaatatgaatacagggcatgcattttgcagcagtgagtctcttcagaaaacccttttctacagttagggttgagttacttcctatcaagccagtacgtgctaacaggctcaatattcctgaatgaaatatcagactagtgacaagctcctggtcttgagatgtcttctcgttaaggagtagggccttttggaggtaaaggtata

SEQ ID NO: 60243 - DNA, 1652 bp, Homo sapiens
ggctgaatcactcagcagtatagaaacagtgtggtttctcttctgcagatgaaaatgaatgtgagcaaaacaacggtggctgcagtgagatctgtgtgaacctcaaaaactcctaccgctgtgagtgtggggttggccgtgtgctaagaagtgatggcaagacttgtgaagacgttgaaggatgccacaataacaatggtggctgcagccactcttgccttggatctgagaaaggctaccagtgtgaatgtccccggggcctggtgctgtctgaggataaccacacttgccaagtccctgtgttgtgcaaatcaaatgccattgaagtgaacatccccagggagctggttggtggcctggagctcttcctgaccaacacctcctgccgaggagtgtccaacggcacccatgtcaacatcctcttctctctcaagacatgtggtacagtggtcgatgtggtgaatgacaagattgtggccagcaacctcgtgacaggtctacccaagcagaccccggggagcagcggggacttcatcatccgaaccagcaagctgctgatcccggtgacctgcgagtttccacgcctgtacaccatttctgaaggatacgttcccaaccttcgaaactccccactggaaatcatgagccgaaatcatgggatcttcccattcactctggagatcttcaaggacaatgagtttgaagagccttaccgggaagctctgcccaccctcaagcttcgtgactccctctactttggcattgagcccgtggtgcacgtgagcggcttggaaagcttggtggagagctgctttgccacccccacctccaagatcgacgaggtcctgaaatactacctcatccgggatggctgtgtttcagatgactcggtaaagcagtacacatcccgggatcacctagcaaagcacttccaggtccctgtcttcaagtttgtgggcaaagaccacaaggaagtgtttctgcactgccgggttcttgtctgtggagtgttggacgagcgttcccgctgtgcccagggttgccaccggcgaatgcgtcgtggggcaggaggagaggactcagccggtctacagggccagacgctaacaggcggcccgatccgcatcgactgggaggactagttcgtagccatacctcgagtccctgcattggacggctctgctctttggagcttctccccccaccgccctctaagaacatctgcccaacagctgggttcagacttcacactgtgagttcagactcccagcaccaactcactctgattctggtccattcagtgggcacaggtcacagcactgctgaacaatgtggcctgggtggggtttcatctttctagggttgaaaactaaactgtccacccagaaagacactcaccccatttccctcatttctttcctacacttaaatacctcgtgtatggtgcaatcagaccacaaaatcagaagctgggtataatatttcaagttacaaaccctagaaaaattaaacagttactgaaattatgacttaaatacccaatgactccttaaatatgtaaattatagttataccttgaaatttcaattcaaatgcagactaattatagggaatttggaagtgtatcaataaaacagtatataattttaaaa

SEQ ID NO: 60244 - DNA, 1498 bp, Homo sapiens
ggcacgaggggcggccggggcgtgttgcgcctgcggctgcttctctcagcgctgaagcccgggatccacgtcccacgggccggacccgcggccgcgttcggcacctcggtaacctctgccaaagtggctgtgaatggcgttcagctgcattaccagcagactggagagggagatcacgcagtcctgctacttcctgggatgttaggaagtggagagactgattttggacctcagctcaagaacctcaataagaagctcttcacggtggtcgcctgggatcctcgaggctatggacattccaggcccccagatcgcgatttcccagcagacttttttgaaagggatgcaaaagatgctgttgatttgatgaaggcgctgaagtttaagaaggtttctctgctggggtggagtgatgggggcataaccgcactcattgctgctgcaaaatatccatcttacatccacaagatggtgatctggggcgccaacgcctacgtcactgacgaagacagcatgatatatgagggcatccgagatgtttccaaatggagtgagagaacaagaaagcctctagaagccctctatgggtatgactactttgccagaacctgtgaaaagtgggtggatggcataagacagtttaaacatctcccagatggtaacatctgccggcacctgctgccccgggtccagtgccccgccttgattgtgcacggtgagaaggatcctctggtcccacggtttcatgccgacttcattcataagcacgtgaaaggctcacggctgcatttgatgccagaaggcaaacacaacctgcatttgcgttttgcagatgaattcaacaagttagcagaagacttcctacaatgagaatgcacactccagtcttggtggttccttcgtgtggggcttgatcgtgttgctgcctgttaacatgatgcctttgaaactctccgcctttgaaactttctacccctcccttcaatcttatcctaaccaaatgagaataatgacatattgaaaacagcctctagcttcaggctgggcacggtggctcacagctataatctcagcactttgggaggctgaggtgggagaattgcctgagcccaggagttcaagaccagcttgtgcaatatagggagactccggctctacaaaaaagagtttttcaaaattagccaggcgaagtggcacacatctgtggtcccaggtgctcaggaagctgaggtgggaggatcacttgagcccaattcaaagctgcagtgagctgtaattgcatcactgcactccaacctgggcaacagagtaagaccttgtcttaaaaaaaaataaaaacatataaaaaaaaaaaaaaggaataaagcctctaacttcaatagctatgaaaattaaatccgattttctaagatgaagttgtgacaagttataccattgtcttaacaggtgaattcctgccataatttattttcaaataaattttaggtggagaaaaaaa

SEQ ID NO: 60245 - DNA, 2051 bp, Homo sapiens
ctcgttccctaacattaaagagaaaatgctgctatccgtgacttccaggcccgggatttcgacttttggctacaatagaaacaacaagaagccatatgtgtcactggctcagcagatggcaccacctagcccaagcaacagtacacctaacagcagtagtggaagcaatggaaatgaccagctgagcaaaaccaacctatacatccgaggattgcaaccaggcactactgaccaagatcttgtcaagctgtgtcagccatatggcaagattgtttccactaaggccatactggacaagaccacaaacaaatgtaaaggctatggctttgtagattttgacagcccttcagcagcacagaaagctgtaacagcactgaaggccagcggtgtacaggcacagatggcaaagcaacaggaacaggaccccacaaatttatacatctcaaacctcccactgtcaatggatgagcaggaactggaggggatgctgaagccctttggccagggtatctccacccgtatccttcgagataccactgggaccagcagaggtgttggctttgcaaggatggagttcacagagaagtgtgaagccatcatcacccactttaatggaaaatatattaagacaccccctggagtaccagccccatccgatcccttgctttgcaaatttgctgatggcgggccaaagaaacgacagaaccaaggaaaatttgtgcaaaatggacgggcttggccaaggaatgcagacatgggcgtcatggccttgacctatgaccccaccacagctcttcagaatgggttttacccagccccctataacatcacccccaacaggatgcttgctcagtctgcactctccccatacctttcctctcctgtgtcttcgtatcagagagtgactcagacatctcctctacaagtacctaacccatcctggatgcaccaccattcatacctcatgcagccttcaggttcagttctgacaccagggatggaccatcccatttctctccagcctgcctccatgatgggaccccttacccagcaactgggccatctctccctcagcagcacaggcacgtatatgccgacggctgcagctatgcaaggagcttacatctcccagtacacccctgtgccttcttccagtgtttcagtcgaggagagcagcggccaacagaaccaagtggcagtggacgcaccctcagagcatggggtctattctttccagttcaacaagtaacagtgggattcccctccccatctttactgaatagaaatgaattcttggagatactcatgctcccagattccagagggttaaccaggaatggagaccatccgtcggccctgctaaggactaacacttagccatcgtttttcacaggcctgggcctggaaaaagaaatctctacgttcctgccctttactattgctgatggagcctgggggaaccatcactttttttgtgtgctacattcaaggagatcaaaaaaacttttcttcttttgcaaagaaagctttttgtttttaactgcaacgtacttttcccctaccttgaagagacatggtggtcgtagcttctcatctatatgaaaaagttttcgatgtattggaattatttgggaatgcttttaaaacaatttgtaattatttctttacaaaccaaaacagaacagaaaggtgtggtgctggaacatcgatgaaggagccctacttactgagcttagttatggacttttttgatgcgtgtgtgtatgtgttttaaaaagtatgcaggctctaaaaatgttattttgtaaagctctcagctcatgcaccccatctcctcttcacccatattatgccttctttctcttgtccagattcttctttttctcttttctaaacagctgagcctgcctactttgcccttttacagcttttaattttatggatttttaaaatgaaatttcatgtggaatttggggctggggggctcgctctgcaccgccctttttggtttttttttagacaaactccccccccccggatttttagtcccg

SEQ ID NO: 60246 - DNA, 563 bp, Homo sapiens
cggacgcgtggggcaatatatacactattatatacccacaaaaaataaaaataaaggctgggtgccatggctcacacctgtaatcccaccacttcaggaggcctgaggtcgggagtttgagaccaacctggccaacatggagaaaccacgtctctactgaaaatacaaaatcagctgggcatggtggtacatgcctataatcccagctactcgggaggctgaggcaggacaatcgcctgaaccctggaggtggaggctacggtgagccgagatcgtgctgagagcaagatgggtcaccagcagctgtactggagccacccgcgaaaattcggccagggttctcgctcttgtcgtgtctgttcaaaccggcacggtctgatccggaaatatggcctcaatatgtgccgccagtgtttccgtcagtacgcgaaggatatcggtttcattaagttggactaaatgctcttccttcagaggattatccggggcatctactcaatgaaaaaccatgataattctttgtatataaaataaacatttgaaaaaacccttcaaaaaaaaaa

SEQ ID NO: 60247 - DNA, 2618 bp, Homo sapiens
tcagtgcgctggaattcccgcgcggagacgcggagctcgcccaccgcccgccccagcagtggctgcaccatgcacgtgaacggcaaagtggcgctggtgaccggcgcggctcagggcataggcagagcctttgcagaggcgctgctgcttaagggcgccaaggtagcgctggtggattggaatcttgaagcaggtgtacagtgtaaagctgccctggatgagcagtttgaacctcagaagactctgttcatccagtgcgatgtggctgaccagcaacaactgagagacacttttagaaaagttgtagaccactttggaagactggacattttggtcaataatgctggagtgaataatgagaaaaactgggaaaaaactctgcaaattaatttggtttctgttatcagtggaacctatcttggtttggattacatgagtaagcaaaatggaggtgaaggcggcatcattatcaatatgtcatctttagcaggactcatgcccgttgcacagcagccggtttattgtgcttcaaagcatggcatagttggattcacacgctcagcagcgttggctgctaatcttatgaacagtggtgtgagactgaatgccatttgtccaggctttgttaacacagccatccttgaatcaattgaaaaagaagaaaacatgggacaatatatagaatataaggatcatatcaaggatatgattaaatactatggaattttggacccaccattgattgccaatggattgataacactcattgaagatgatgctttaaatggtgctattatgaagatcacaacttctaagggaattcattttcaagactatgatacaactccatttcaagcaaaaacccaatgaacagcttatgtgttagccatagctgaaaataagcacaaatagcttatattcagatcctatcttcatttgaatatagcttttaaatgaaatgttacagtttgaagttttccttcatgcacttggtgataaacgttttctaaatttttagttaagtatatggataaaaagttatgaactattaaaaatgtgatgtggaccaaaggctaggttgtaatcttgatagtctaaaaaatgatcaaaacaaatgattttcaaggaatattcaatattctgcctttcagaaagtgtatttatatctgtgcttcataaatattaatgttcttcagaacatcattttaaaggagatacttgaattgttatttaaatcaaaccagatgtaaaacactcacatacaagttcatactttaaaagaggaaagctacttaacaatgacaaatatttcacaataataatttttacttatataccatctttcaactgaacatttcagttcttccaagagcttcttagagtagtatattttgggggcagtcaaggaataaactacagtgtaaacatatcccagatgaaaactgctgtatggaaaaatgacagaaagtaactgattgacactgttgattcacagttcagcctcctatctgggaaagacatttctttcctctgctcactttaagaacttttaccgactccaaaaatctcaggaattaaacttttaacagttacagcaataaagaatagttagtactccaaaaatattatatttaagatgctcaacaagaaaaaaatgcaaatgtaatatttttttcaaattacttctttattgacttgtccaaatttcaaaagtgcctacccttcaataaaacttttttattctgatctccataaattacttagtcttctatgtatagctatcaaggaaataaaaccaattttgccacagccacaactgtaaatgtttttgtacccatgctgaaactcataacaacacagacataaaaatagctgtgaggttttgctttttttgttgtcagctatcttaagaatcattaaatacacctgctttgggtaaaactctttgcaagcagtaattaacactagtaacagtgaaagcacaagatttccaaatcagtcgttttctcaaaaaaatatccgtataagtgacctcatcctggtcctgcctaactcccagaccctccccagcttgaagcccaaatctttcccctgtgagattgatatggatttccctagaagtactggcaatgttgtcatatcttgccctattttaattctgctatagaaaacaattgccttcactttcaaggagtaatttgaatattaataactctggtctagattttcatataatgtattaaagacaaagtagtgaacatcaatgaacatctgatagagataaactgtaatcaggcataagcttgtttgtatgttctggcagtgactaatcagtaaatgatgtcggtttgcccagtatcacttatcttctgtatttttcctctgtcgtgtaaatagtataaccttttcatttatggacaattttttggactagtagccttcaatatacattctgctttgaattaattttttcaaatcaataaattatgtagacatttaaaatcaaatatcaagtagaattgaaaaatgtgagttacataagttaaaaacttactttaaatcttaccttctataggtagctctaaataaattcatatggttatatgataaaaaaaaaa

SEQ ID NO: 60248 - DNA, 1663 bp, Homo sapiens
gggcgcgttgtccgctggactgggtcccggtcacgccccgccaagccccgcccctcaggccggggcgcgaccggggatccgcagttcccgggccagcctggggcggccggccaggaaccacccgttaaggtgtcttctctttagggatggtgaggttggaaaaaggctcctgtaaccctcctccaggatgaaccacctgccagaagacatggagaacgctctcaccgggagccagagctcccatgcttctctgcgcaatatccattccatcaaccccacacaactcatggccaggattgagtcctatgaaggaagggaaaagaaaggcatatctgatgtcaggaggactttctgtttgtttgtcacctttgacctcttattcgtaacattactgtggataatagagttaaatgtgaatggaggcattgagaacacattagagaaggaggtgatgcagtatgactactattcttcatattttgatatatttcttctggcagtttttcgatttaaagtgttaatacttgcatatgctgtgtgcagactgcgccattggtgggcaatagcgttgacaacggcagtgaccagtgcctttttactagcaaaagtgatcctttcgaagcttttctctcaaggggcttttggctatgtgctgcccatcatttcattcatccttgcctggattgagacgtggttcctggatttcaaagtgttacctcaagaagcagaagaagaaaacagactcctgatagttcaggatgcttcagagagggcagcacttatacctggtggtctttctgatggtcagttttattcccctcctgaatccgaagcaggatctgaagaagctgaagaaaaacaggacagtgagaaaccacttttagaactatgagtactacttttgttaaatgtgaaaaaccctcacagaaagtcatcgaggcaaaaagaggcaggcagtggagtctccctgtcgacagtaaagttgaaatggtgacgtccactgctggctttattgaacagctaataaagatttatttattgtaatacctcacagacgttgtaccatatccatgcacatttagttgcctgcctgtggctggtaaggtaatgtcatgattcatcctctcttcagtgagactgagcctgatgtgttaacaaataggtgaagaaagtcttgtgctgtattcctaatcaaaagacttaatatattgaagtaacacttttttagtaagcaagatacctttttatttcaattcacagaatggaatttttttgtttcatgtctcagatttattttgtatttcttttttaacactctacatttcccttgttttttaactcatgcacatgtgctctttgtacagttttaaaaagtgtaataaaatctgacatgtcaatgtggctagttttatttttcttgttttgcattatgtgtatggcctgaagtgttggacttgcaaaaggggaagaaaggaattgcgaatacatgtaaaatgtcaccagacatttgtattatttttatcatgaaatcatgtttttctctgattgttctgaaatgttctaaatactcttattttgaatgcacaaaatgacttaaaccattcatatcatgtttcctttgcgttcagccaatttcaattaaaatgaactaaattataaaaaa

SEQ ID NO: 60249 - DNA, 2977 bp, Homo sapiens
ttttttttttttcatttcattcaagagaattaaatcgtttattgattacacatgataatggatacacaagcttcattcccatctataattttatctggtaccattattcaatttagatatattgcataggatgtgccaacaatcacttttataaccattccatgattttgcttgggtaatcccttttaatggtgaacttcaggtcacaacagtaactatcagttcaactacaccaaggtttccgaagacaatggcttctccacccaagcaggttgtatataaattccaaatagaacctggcatcaccctgaaggaattctaacttcacactgttggggaaatttaccaagatggcttaagagtagactaactttacacagcacattaaaaaaaagacatttattcagcgtcacgatcagactgttacatttagcaatcaacagcatggggtgcaaaaaaaaaaaatctacattaaaaccctttgttggaatgctttacactttccacagaacagaaactaaaataacctgttatacaattagtcacaaatacagtcctcgagttttttgcccatacacatgagtatttgtctaaaacatgtcttctttgtagcagctaggccctgccaccactgtgcttggctgagttcacaaatctgttgtaacctgtagcttccctgtcacttctctggctctcctctcctgctaagctttgtttcctaattaaaatcttctgccactgccatagctactgctgctgctggaaccgccatagccaccttggtttcgtggttttgcaaagtattggcctccaccgccataggggccagagcttctgcctccaaaatttcctcccttcatgggtccaaaatttgaagactgattgttgtaattcccaaaatcattgtagcttccaccacctccaaaattgcttccatcattaccaaatccattatagccatccccactgccaccatatccaccaccaccacggctgccaccaaagccaccacgaccactgaagtttcctccacgaccgaagttgtcattcccaccgaaaccacctccacgaccaccaccaaagtttccagaaccacttcgacctctttggctggatgaagcactagccatctcttgctttgacagggcttttctaacttcacagttgtggccattcacagtatggtatttctgaatgacaatcttatccacggagtcatggtcgtcaaaggttacaaaggcaaagccccttttcttgccactgcctcggtcagtcatgatttcaatcacttcaatttttccatactgttcaaaataatctcttaggtgatgttcttcagtgtcttctttaatgccaccaacaaatatctttttcacagttaagtgggcacctggtctttgagaatcttctctggagacagctctctttggttccacaactcttccatccaccttgtgtggccttgcattcatagctgcatccacctcctccacagtggcatatgtgacaaacccaaagcccctggagcgcttggtgtttggatctctcattaccacacagtccgtgagcgttccccattgctcaaaatggctcctcaggctctcatcagttgtttcaaagctcaaccctccaatgaagagcttcctcagctgttcgggctctttaggagactctgcccgtggacgccgccgaagaagcatcgttaaagtctctcttcaccctgccgtcatgtctaagtcagagtctcctaaagagcccgaacagctgaggaagctcttcattggagggttgagctttgaaacaactgatgagagcctgaggagccattttgagcaatggggaacgctcacggactgtgtggtaatgagagatccaaacaccaagcgctccaggggctttgggtttgtcacatatgccactgtggaggaggtggatgcagctatgaatgcaaggccacacaaggtggatggaagagttgtggaaccaaagagagctgtctccagagaagattctcaaagaccaggtgcccacttaactgtgaaaaagatatttggcggtggtagtggaagcaattttggaggtggtggaagctacaatgattttgggaattacaacaatcagtcttcaaattttggacccatgaagggaggaaattttggaggcagaagctctggcccctatggcggtggaggccaatactttgcaaaaccacgaaaccaaggtggctatggcggttccagcagcagcagtagctatggcagtggcagaagattttaattaggaaacaaagcttagcaggagaggagagccagagaagtgacagggaagctacaggttacaacagatttgtgaactcagccaagcacagtggtggcagggcctagctgctacaaagaagacatgttttagacaaatactcatgtgtatgggcaaaaaactcgaggactgtatttgtgactagctgtataacaggttattttaatttctattctgcggaaagtgtaaagcattccaacaaagggttttaatgtagatttttttttttgcacccaatgctgttgattgctaaatgtaacagtctgatcgtgacgctgaataaatgtcttttttttaatgtgctgtgtaaagttagtctactcttaagccatcttggtaaatttccccaacagtgtgaagttagaattccttcagggtgatgccaggttctatttggaatttatatacaacctgcttgggtggagaagccattgtcttcggaacccttggtgtagttgaactgatagttactgttgtgacctgaagttcaccattaaaagggattacccaagcaaaatcatggaatggttataaaagtgattgttggcacatcctatgcaatatatctaaattgaataatggtaccagataaaattatagatgggaatgaagcttgtgtatccattatcatgtgtaatcaataaacgatttaattctcttg

SEQ ID NO: 60250 - DNA, 591 bp, Homo sapiens; identical to SEQ ID NO: 60146

SEQ ID NO: 60251 - DNA, 664 bp, Homo sapiens
ttttttttttttggaggagggggtaatttatttaatttgttgactctggcttacaattttgtcttctgtttccatatctgggtcattagaagccccttcaatcccatcatcccttttcccttcaaatcagggcaactcagagatagctttcttggctggggggcctgttggcttttccttttctctcgctttttcctcatacatcaggatcatttttaggatggcagatctcttgcccagcatcatcctgagaaagtcagggtagctgaacgtctccccggagccactggacacctctccaattaatttctttagctctaggtgagtcttggggactccaagtttctccagcattcgtttcagggacatgatatcaatatcgccatttccattaaggtcaaactccatgtatttctctttgaagccttccagtttggagggcagatcctcatcactgctatatttgggatcgtctaggaattgcttgttgatctcatccagcctctcttcctgctgggccttcagcagtccgaaagcttttcctccctgtaaatccctggtttggctcatagctcagcagatgctggtagaggtggggagacagaccaagctggaggcctctgtctgcaggctctccttctctcccaccagtcttctcagaagc

SEQ ID NO: 60252 - DNA, 834 bp, Homo sapiens
gggagcgcagcggcttctaggggtgagtgggacccacgcggccccacctgctcctcccgcgcgcggccccacccccctgccccgccccgcctggtttataggtcccggcccgagcctccggccgcccgccgggtttgtcccgcgatccccgaccatgcccgccgacctcagcggtacttggaccctgctcagcagcgacaacttcgagggctacatgctggccctaggtattgactttgccactcgtaaaatagccaagttgctgaagccacagaaagtgattgagcagaatggggattcttttaccatccacacgaacagcagcctaaggaactactttgtgaaatttaaagttggagaagaatttgatgaagataacagaggcctggacaacagaaaatgcaagagtttggttatctgggacaatgacaggctcacctgtatccagaagggagaaaagaagaacagaggctggacccattggatcgaaggagacaaactccacctggaaatgttctgtgaaggtcaagtgtgcaaacagacattccagagagcctgatccacatccagcagcagagcccacttgtggctgcagctttatgccaaattatattgcagactgaacagacgtttatctatcccatttggcgacgaggactcgtggctggagagagccacacagcgtgtaacctgaagtcatctagattatggggaaactgctcagcttcaataaacctgtccaaatgaaaaaaaaaaaaaagggggggccgttttaaaggatccttggaggggcccaagtttacgcgggcttgcaaggttatagttttttcctta

SEQ ID NO: 60253 - DNA, 1640 bp, Homo sapiens
tttcgtggcggggccaggagagaaagctttgtggtttggtctcagggaagtagcaggcgccggttgagagaactacggccctgtcggaaggtaacctccggtgcaaacgaccatcggcggcaggcgagcggtacgcttggcgtccgggccttcctgggcccgtctgaggaaacttgctgctcgaggccaggctgcctaggacctgtcccttttttctatactggctcccacatccgggttttttctccgggacggcccttcggatgcttgggccaatgggaatcgccatttagggtgctccgcccaccgggtcgcgtagagcatcctggaagtcgtagtaaatctctcgagagttctctccgcacgcgggctggagaagcgggtcctacgcacgctttgttgtcgcgctttgcctccgtccttccccctactcccgccttacctgacttccttttcggaggaagatccttgagcagccgacgttgggacaaaggatttggagaaacccagggctaaagtcacgtttttcctcctttaagacttacctcaacacttcactccatggcagttcccgagacccgccctaaccacactatttatatcaacaacctcaatgagaagatcaagaaggatgagctaaaaaagtccctgtacgccatcttctcccagtttggccagatcctggatatcctggtatcacggagcctgaagatgaggggccaggcctttgtcatcttcaaggaggtcagcagcgccaccaacgccctgcgctccatgcagggtttccctttctatgacaaacctatgcgtatccagtatgccaagaccgactcagatatcattgccaagatgaaaggcaccttcgtggagcgggaccgcaagcgggagaagaggaagcccaagagccaggagaccccggccaccaagaaggctgtgcaaggcgggggagccacccccgtggtgggggctgtccaggggcctgtcccgggcatgccgccgatgactcaggcgccccgcattatgcaccacatgccgggccagccgccctacatgccgccccctggtatgatccccccgccaggccttgcacctggccagatcccaccaggggccatgcccccgcagcagcttatgccaggacagatgccccctgcccagcctctttctgagaatccaccgaatcacatcttgttcctcaccaacctgccagaggagaccaacgagctcatgctgtccatgcttttcaatcagttccctggcttcaaggaggtccgtctggtacccgggcggcatgacatcgccttcgtggagtttgacaatgaggtacaggcaggggcagctcgcgatgccctgcagggctttaagatcacgcagaacaacgccatgaagatctcctttgccaagaagtagcaccttttccccccatgcctgccccttcccctgttctggggccacccctttcccccttggctcagccccctgaaggtaagtccccccttgggggccttcttggagccgtgtgtgagtgagtggtcgccacacagcattgtacccagagtctgtccccagacattgcacctggcgctgttaggccggaattaaagtggctttttgaggtttggtttttcacaaaaaaaaaa

SEQ ID NO: 60254 - DNA, 3271 bp, Homo sapiens
cgatttcgtctgcaaggccccgggtctcccctgcgcctgcgcggcgagcagctggcggaaccggcatcttctggcgccagcttccggcttagcggctgagcttcaggcttgacgtcaggaaaccatcaagatctcattttacagctgggattctctggttcacagaggtaacggagcttgcccgaggccagttaaacgagaagattcatcaccgctttgatggctgcctcacaaacttcacaaactgttgcatctcacgttccttttgcagatttgtgttcaactttagaacgaatacagaaaagtaaaggacgtgcagaaaaaatcagacacttcagggaatttttagattcttggagaaaatttcatgatgctcttcataagaaccacaaagatgtcacagactctttttatccagcaatgagactaattcttcctcagctagaaagagagagaatggcctatggaattaaagaaactatgcttgctaagctttatattgagttgcttaatttacctagagatggaaaagatgccctcaaacttttaaactacagaacacccactggaactcatggagatgctggagactttgcaatgattgcatattttgtgttgaagccaagatgtttacagaaaggaagtttaaccatacagcaagtaaacgaccttttagactcaattgccagcaataattctgctaaaagaaaagacctaataaaaaagagccttcttcaacttataactcagagttcagcacttgagcaaaagtggcttatacggatgatcataaaggatttaaagcttggtgttaatcagcaaactatcttttctgtttttcataatgatgctgctgagttgcataatgtcactacagatctggaaaaagtctgtaggcaactgcatgatccttctgtaggactcagggatatttctatcactttattttctgcatttaaaccaatgctagctgctattgcagatattgagcacattgagaaggatatgaaacatcagagtttctacatagaaaccaagctagatggtgaacgtatgcaaatgcacaaagatggagatgtatataaatacttctctcgaaatggatataactacactgatcagtttggtgcttctcctactgaaggttctcttaccccattcattcataatgcattcaaagcagatatacaaatctgtattcttgatggtgagatgatggcctataatcctaatacacaaactttcatgcaaaagggaactaagtttgatattaaaagaatggtagaggattctgatctgcaaacttgttattgtgtttttgatgtattgatggttaataataaaaagctagggcatgagactctgagaaagaggtatgagattcttagtagtatttttacaccaattccaggtagaatagaaatagtgcagaaaacacaagctcatactaagaatgaagtaattgatgcattgaatgaagcaatagataaaagagaagagggaattatggtaaaacaacctctatccatctacaagccagacaaaagaggtgaagggtggttaaaaattaaaccagagtatgtcagtggactaatggatgaattggacattttaattgttggaggatattggggtaaaggatcacggggtggaatgatgtctcattttctgtgtgcagtagcagagaagccccctcctggtgagaagccatcggtgtttcatactctctctcgtgttggggctggctgcaccatgaaagaactgtatgatctgggtttgaaattggccaagtattggaagccttttcatagaaaagctccaccaagcagcattttacgtggaacagagaagccagaagtatacattgaaccttgtaattctgtcattgttcagattaaagcagcagagatcgtacccagtgatatgtataaaactggctgcaccttgcgttttccacgaattgaaaagataagagatgacaaggagtggcatgagtgcatgaccctggacgacctagaacaacttagggggaaggcatctggtaagctcgcatctaaacacctttatataggtggtgatgatgaaccacaagaaaaaaagcggaaagctgccccaaagatgaagaaagttattggaattattgagcacttaaaagcacctaaccttactaacgttaacaaaatttctaatatatttgaagatgtagagttttgtgttatgagtggaacagatagccagccaaagcctgacctggagaacagaattgcagaatttggtggttatatagtacaaaatccaggcccagacacgtactgtgtaattgcagggtctgagaacatcagagtgaaaaacataattttgtcaaataaacatgatgttgtcaagcctgcatggcttttagaatgttttaagaccaaaagctttgtaccatggcagcctcgctttatgattcatatgtgcccatcaaccaaagaacattttgcccgtgaatatgattgctatggtgatagttatttcattgatacagacttgaaccaactgaaggaagtattctcaggaattaaaaattctaacgagcagactcctgaagaaatggcttctctgattgctgatttagaatatcggtattcctgggattgctctcctctcagtatgtttcgacgccacaccgtttatttggactcgtatgctgttattaatgacctgagtaccaaaaatgaggggacaaggttagctattaaagccttggagcttcggtttcatggagcaaaagtagtttcttgtttagctgagggagtgtctcatgtaataattggggaagatcatagtcgtgttgcagattttaaagcttttagaagaacttttaagagaaagtttaaaatcctaaaagaaagttgggtaactgattcaatagacaagtgtgaattacaagaagaaaaccagtatttgatttaaagctaggtttcctagtgaggaaagcctctgatctggcagactcattgcagcaggtggtaatgataaaatactaaactacattttatttttgtatcttaaaaatctatgcctaaaaagtatcattacatataggaaaacaataattttaacttttaaggttgaaaagacaatagcccaaagccaagaaagaaaaattatcttgaatgtagtattcaatgattttttatgatcaaggtgaaataaacagtctaaagaagaggtgtttttataatatccatatagaaatctagaatttttacttagatactaataaaat

SEQ ID NO: 60255 - DNA, 2730 bp, Homo sapiens
tttcgtacgaaatcgtcctctgtaaccgttcgtcacttaggccttgatgggtgacatggatggggatgacttcctgggctaactcttctcttgctaaaggatgatttttcaccaccttgaatgcccatgattaaaacataaacaagaaaatagatatctgaggagaatgcagttgaaactaattttgtggatagagaaactgttggaactgctttacaaagtattttaacagcccacctgaggatattgaccataaggactcatatctcattacaagaagcatcatggccgagccagactacatagaagatgacaatcctgaactcattaggcctcagaaactgatcaatcctgtaaaaacctcccggaaccatcaagatcttcacagagaacttcttatgaatcaaaaaaggggtcttgctcctcagaacaaaccagaattgcagaaggtgatggaaaaaagaaaacgagaccaagtaataaagcagaaggaagaagaagcacagaagaagaaatctgacttggaaatagagctattaaaacggcagcagaagttggagcagcttgaacttgagaagcagaaattgcaagaagagcaagaaaatgcccccgagtttgtgaaggtgaaaggcaatctcaggagaacaggccaagaagtcgcccaagcccaggagtcctaggctgaggctgcaccaagacctcgtgtgtcaccccacagagctgtctgtgggtgccttctcaatctcagggcaaaagcccctggagaatattccagccagcagagaattttgacttgcagtaggatttggtttgattttcctacgatctgggtggatgccttgcctgtgacagttgcagttcctattcgccaaatgaagggcagtgccccgcacgtaagttggaatgatggacctgtgttcagagacttaacagaaccaacaagcaaaacaagtgagaacaggaaaaaggaagaggacactggaatcaattcttgagagttgcactacttggtttttcttccattccaagtttcgtgggacccagagccttttttcttttaaaagctaaaaaacaagtgtttaattcctctttttgttatctgttagataattgagatcacctagaaatgcgtttaatctgttcactcactgtaaattttgaggacccagaattgtcttgtttaatttatactttcacccctgttgcagttaacaccagagaaggaacgtgaatgtcgagcacagccactacccttgttggcacttaatttagaaatagggtgagaagtttaaaagcccatcttgattttattttcattccttttggttctctgtgtaataatagcaggctacatagtgacattccagttccaagaaggtacatcctgtccattcattaattgctttgattactaggagggtttctgttcagttttgtttttaaatgtcttgctgatctagttctttcagatggaataaccttccagtcccttagagagtggaactagtccatataacccagcttcagtagcaaaagtagaagccgccacatcttttcatttctccaagaggagagtggggaaggttcccatgaccagctgggcagtcaggatttctctaggcattctaatgtgaaataagtgtagactgctgtcaaggaggcttcatcagaagatgtatagcatttgaatgtctaatgataatgcatatcattagaatccaagctttgaaaatttctgattaatgctcatgtatttctttatctttgtttttccttgtgaagaaagactttcaccactgtctgagtgatgatgctgttgataaggatgatgtcgatgactactatattgcatctctcaggaacagctgatgggaagggaggggctgctgagttcccttgttctagctagcagcacgctcctcagagagggggccgagttacagacagcagccgcattctcatgcaaaattagttttaaactgctagtgtgggcatcggtaccttttgcctgggtgataccgaagaattgttgaggatttagtatgctccgtagagacagttcagccagtcatttctgcattggagagacttctcatactttctttgagtcttcaaagaaagtatgagaagactcatagaaagctggatctagagcttttgaatccttaattagcacagtagaaattagctttctatgggaatgctttagtgttagcagttgacaattaggcccatattcaatctgaatgggaacaaaagtaaatgcaatgataatatactgctagttagagaaacatgttagttgattatacctgaaatggattatttatctcatcagcaagtattatttgaataaaatgagaaatgcttaagaaaaattgttgctctatagtaatttggtttcgaagaatggaatggtaactattttttcccatcgttcttttgagagaaggaagtgtgatgactgatgatcttgaaaagcccatttctgattgcacgttgactggaattctttctttgtgtctgtggactagcgatgctgtttgtaaaatgaagattcgggactggctcatatctttttatctaactagatgtcagatcttgaaatctgtattctcgaagcaattctgccacttgatcgtattcacaggggccctggtaggctcctttagaaggaccatttctgttcctagagcttaactagaattcattcttcactgaaaaaaaaaa

SEQ ID NO: 60256 - DNA, 2469 bp, Homo sapiens; identical to SEQ ID NO: 58891

SEQ ID NO: 60257 - DNA, 1477 bp, Homo sapiens
gcggccgccattggctgggttcggcgcagctaacagacggcggcagtgcgagaaagccgaagatggcggtccccgcggcgctgatcctacgggagagccccagcatgaagaaagcagtgtcactgataaatgcaatagatacaggaagatttccacggttgctcactcggattcttcaaaaacttcacctgaaggctgagagcagtttcagtgaagaagaggaagaaaaacttcaagcggcattttctctagagaaacaagatcttcacctagttcttgaaacaatatcatttattttagaacaggcagtgtatcacaatgtgaagccagcagctttgcagcagcaattagagaacattcatcttagacaagacaaagctgaagcatttgtcaatacttggtcttctatgggtcaagaaacagttgaaaagttccggcagagaattctggctccctgtaagctagagactgttggatggcagcttaaccttcagatggctcactctgctcaagcaaaactaaaatctcctcaagctgtgttacaactcggagtgaacaatgaagattcaaagagcctggagaaagttcttgtggaattcagtcacaaggagttgtttgatttctataacaagctagagactatacaagcacagctggattcccttacatgatgttttcgaagactgtttttttcatcacgctcctgccacctcattattttgcattgaagatacattgccaggttgtgttttctgaaggattcagtgacttgctttctgtaaattatatggcttatcacttcttagacaaataacaaccaatagagatcattgttaagaatactgaggttctaatatactttctttagttctgtgagccaacagtaattattaagaacactttccctttaaaggaaacaaaagtgaataccatattgtttttactgtcatagtgttgctttcttgcctgtcctgcttagtttttacttgctggatgataccataatgtatcaaggagcgtccatggatacaagataagatgtgtaccttagtagaatacagagctttggtaattacatgaataaaattaagaaaatagccatatacaatcaaatacactatggcatttttatttgaatatgatgagtatattttgcttcggaaataatataggaaggaaatgtaaaatagtgagtagtatggtatcagttaattccagtctgagcttctctgtcaacttcagtttctctctcagtttaatgatttaataatagtccaggtttttgtgtgtttttctttatactgcaagttaataatgattcactttatagtttgggagacagaatcaggtcttgaataaaataattgtaatgagtgctaaatgggcaccattattcgaatcaaataccttttatattctctttccataaatacgttgatttctgtcaataaaatttttgtgtcttagaaaaaaaaaa

SEQ ID NO: 60258 - DNA, 1231 bp, Homo sapiens
ttttttttttttagcacttggttattttatttcctcaaaaataaaacagaaaggaggcggggccccagctcagcaccaggtgggcagctcggagttgtggcctccctcctccagggctcgcctccgcctttcctcccgcccctactggcagccaacaagtcaacggaattcctggcctttgagatgtcaccccaaatgccacctgagttgagtgaagaaacactctcttggtgaaagcagaagcggagctaccaggccaggcattgctggtggccggcatcacctgagctcgcctgtgtcctgcccagcttcagtgggtcttcccccggccctctgagatgacatcctcgggccgggcgcgcatgtaccactccacccaggagccatcgtagatgggcacgtctggcttgccgcagaggtaggcccctagtgccacgtggcaggctgtgacgccagagccacacgtggccaccagtggcttagacaggtccactttcttctcctggaacagatggcggatctcctcagggctcttctccagcccctcctggctcaggaagtctgtgaaggggatgttcacggtacctgggatgtggccaggttcaatgccgtctcggggctcgggctcggtgccgcggaacctgccagtggctcgggagtccaccacctggaagcgccgggattccaggttctccttgatgtcctcgtaggtcttgatgaaggcggggtcgagctgagcgcggaactcggcgggagcaggttggctcttgccggagctgagcgggaggttctggcgcagccagtggcggaggccgccatcaagcagtgacacggcgtggtggccgaaggcgcggaacatccaccagacgcgcggggcggagtagaggccctggtcgctggcgtcgtagatcacgacgtgggtggccgcgcccacgcccaggcggcctgcgtactccgcgaaatgctcggccccgggcagcatgtggtcgtagggcgaggtgcggtcgctgcactggtcgatgtcgaagaaagcggcgcccgggatgtggcgctcctcgaactcgcgtcgcgcgtcgcgccccagcttcggcaggtaccaggaggcgtccagcagctgcagaggctgcccagcgcgcggggcccgcagcgcctccgccacccattgcgccgacaccagcgcgcggcagagctgcggcgaagccatggcggcgacactcgggctgcgggcctg

SEQ ID NO: 60259 - DNA, 1697 bp, Homo sapiens
ctttaaagagaccaaaactttcaaccaaaaaaaacacatatttttataaagaaagataaaagaaagtctcataatcatgattctgtatgctactcaggcattgaaaaggtaccctcaatgaaattacttttcaccattggtttcaggatataaaacaattaaaattagaacacactaaacgctgcactatagttcatgacatctgcatgccacacaaaaaatcaaaatgtagtctcacataggctgatcatactagagtatatttattaaatttcaccattatgatcactttgttataactaaattaaccctgacataaactttgacattttaaaaacagagaacatactgatttttcaactattttacttacatgtgttttttaattctcatgcagtgctcataattaggagatactacatattcaccctcacattatgcttattaagaaccaagctcagagggtagaaaagtgccaacttcattttccataaacttcccatacatatattaagccactgttcttctaattatatacttatggtacattcttctgtaaaatgtataactgtagtcacataaccattgttatgacaaggcggcaacatcatttcagattacaacaaatgagaccaaaagttgaagagaccacagcatataaaagtcatgagaacaccacacacatttcaatattttccactttccagtcaaaaaaacatgcacaaagttttcttagcagatagttgtcagaagtgcataaaaaaactggctttcaggtcatatatgttgagtgaggatcaatgccattgaggaaagagagctgtgttcattatcttttaggtctgtctatatcatctatagctgctagaagtttttgtcttgctttcttattgatatgggatcccaggcaaacattcaccagattggtcagctgcttcgttgaatattccctgtgctctttgatccaccgttccatgtcattctcagttaggtaataagctttaatataagtttctacaaattctttatcaggaatgggtctaatatctgttagtttttcaagtttcattaaaaactgttgaaaatccaattgcatcagggcacgaccctcattactgcatttcttgacattggcatatccttctacaatagttcgattagccaatcgtatacaatgttcccaaagtatattagacacaggcaagggtatgcgaactctcttagaaacttcatttagcctcctgttaaactgctcaaattcctttaatagtgcatctacatatatgttgtgctgtgacataatttcttttacatcccatttcacattagccatgagaagcagcatctgttcataatcaagggctttaccagctacaatccagtaaattggtttccgtagttcactggcggttgagactgtctgaaataaatttcacaaaaatgaaaacaattattttctaaaagtatcatattgataaagaatacttgcccctgtttccagtatatatcatatctgaaaataaaacactatatatttggagatttaaattatgatgaaaataatttgaatatttgagtgaaggcaaaggccttactcaaaacataattttgagacattcaataaacttgaagccattgacactgcaactgtcaaagaactagagctcttccccttctgtcgtcttctcgcagccgta

SEQ ID NO: 60260 - DNA, 5323 bp, Homo sapiens
tactcctagcttggcacgaggagactgtatttccgtgagggtggaagaaaatcataccatatcagatgcctcgcagagcaccaggcccaccgtgaaaggctggtccctgcagacggcttcccatttttatgaccggatgctgggaagcctgctggtccacaggtccatacatgaagtcaccataagagggtggttcccacttcatcaacacctcatcgccgcgaggtgaggctaagatgagcataaccagtgacgaggtgaactttctggtgtatcggtatctccaggagtcaggtttttcccactcggctttcacgtttgggattgagagccacatcagccagtccaacatcaatgggacgctagtgccaccggccgccctcatctccattctccagaagggcctgcagtatgtagaggccgagatcagtatcaacgaggatggcacagtgttcgacggccgccccatagagtccctgtcactgatagacgccgtgatgcccgacgtggtgcagacgcggcacgaggcattccgagagaagctcgctcagcagcaagccagtgcggcggcggcggcggctgcggccacggcagcagcgacagcagccaccacgacctcagccggcgtttcccaccaaaatccatcgaagaacagagaggccacggtgaatggggaagagaacagagcacattcagtcaataatcacgcgaagccaatggaaatagatggagaggttgagattccatccagcaaagccacagtccttcggggccatgagtctgaggtgttcatttgtgcctggaatcctgtcagtgatttgctagcctccggatctggagactcaactgcaaggatatggaacctgaatgagaatagcaacgggggctccacccagctcgtgttgaggcactgtatacgagaggggggccatgacgtcccgagtaacaaagacgtcacctcactggactggaataccaatggaacactcttggctacgggttcatatgacggttttgcaagaatatggacggaagatggtaacctggccagcaccttaggccaacataaaggccccatctttgccttgaaatggaaccgaaaggggaattacattttgagtgctggtgtagacaaaacaacaataatttgggatgcccacacaggagaagccaaacagcagtttccttttcattcagcccctgcccttgatgtggactggcagaacaacacgacctttgcctcctgtagcacagacatgtgtatccatgtgtgcaggctcggctgtgaccgcccagtcaaaaccttccagggacacacaaacgaggtcaacgccatcaaatgggatccgtctggaatgttgctggcatcctgctcggatgacatgacattgaagatctggagcatgaaacaggaggtgtgcatccatgatcttcaggctcacaataaagagatctacaccatcaagtggagccccactgggcccgccaccagcaacccaaactccaacatcatgttggcaagtgcttcgtttgattctacggtgcgactgtgggacatagaacgaggcgtctgcacccacacgctcacgaagcatcaggagcctgtctatagcgtagctttcagccctgatgggaagtacttggccagtggatccttcgacaagtgcgtccatatctggaatactcagagtggaaatcttgtccacagctaccgaggcactggcggcatcttcgaggtgtgctggaacgcccgaggagacaaagtgggtgccagcgcgtccgacggctctgtgtgtgttttggatctgcggaagtaaccacaaaatattatcgaaaaaagaaaagaattctaatgaccagccgtgaatgtgtagggttgcagctctattctccaaaactgtaggaacttgacttgcgttagagtgtactctgaaaccaactcgtctctggccgcaggagtctatatgttttcgtaatcttcatcaagaagtttttaaaaggcaagcaaaaacagaagcaaatcatatcaaacggggatagaatggtttccactgaggacattcagcctgggaaggaggaagtcaccagctcgaggcgtgtggattggtttccacccggaacaggctctgtgatggctgaatggaaagaaacgtaaaaagctgtgccaaaaaaaaagcaaaatgctgtgataaaccaaacagggaagggggaaaaaccctcctccttgggatttttttttttttgttttccctaacaatttggacactacgattgctctcacaaaggaggttcaaagaccagtttgtaccgatgaaacgcgcaactttgtaatcccaacactttctattttctagaatcttctttgttcattgggtggtttttcagtcggctggaattctatcttctgggggccttccgtctgagatggaagctgtcttgggcttgttgtctcttccttctgttgctccctgcccctccccctgcctttccactctgtctggtgagctctgctttttcagtgcaccatcaagagatgcagccccgtggacatgaagacacaatctcccacggacagctttcccccttccgccctctcccaccctctcctccccttgcgctcgcgctcgcgctcgctttctcactggcgtgctctctttctctctctctctccctctgtacctttctcatagttgcttcagatcttaggtctcaagggcactttggcgcgtagtaagtgctttatgtaagaaggcagggcaggggggctttttacaggagaaaaaaaatgacttataagagaaagagcctggagtatttttggaaaaaaaaataatatttttatgttaaaacaattttaaaatcttaaaatggccatcaaacatagagagctttgtgtgattcatgttttaaaaagaaccgaagaagccacaggcagggcctgagggagcccctggctttcccctcagcctcaggaaaggtggtcaggaaaactctggctggacaagggtcagtcttcggggtcagcagcgagattgctctgcagccagtgagggaggtccccgccatgccggctggaagaagaacctcgcatcttttggtgtgtatgcaccttggcagccagcaggaaagcagcgaagagccgcgcgccctctggcctcaagggagcattggcagaaccataaggtactgcagaagccgtcgaaaccgactgctcggctggattaggcgtgttggctacatctttcccacaaccgtataacgaccgatggtcatttctccaagagcaggcttggcgagtccttgcagagctgacatagaggcgcccgcatgtcacttagtctaacgctgacagaaatgaatgcagaaggaagattttcagtcctgaacgtgaattatagaggtagaacgtcgctaataatttctgccatctttataatttctttgtctcacagaagactaggagaaagatcttttttaaataatctttttgctgtttttaaaaaattaaacaaggctttgtgttcctagaagagcttcatttcagtgaatctggtgacctccatctgcttgctgtcataacccgacacggacttatttttgtcattagcaagggggaaaaggccaaaggacaagggcctcttctcccattggttttcctgtgggcagaagggctgaggaagatggcccagcccgtgggggctgctgggtcaccagcagtgggtagggtgcaatctggtgtgtgttccagcagtgagacggtgttattgtgaaggtggcattcatctgcggagccaaaacccagccatcggggaagggtcagggcttctgtggaacttggaacgtgccaggaccacctgcaaaagccagggtgcgtttgatcatttctcagatcatttgattgggcctccactttggggtatgtgaattattcatgtcccagaagaccaaaaagtgctctggttctgagatgagtattttattcgtgttctgtttccgaaacacttagcaaagaaggtcacagtgatgtggagtcgccgcacccatctttgaagatagccagtgtccctggatgaggtgatgatttcccgtcccaaggactctgtgaagtttaaagtacagtttgttggggtccaaaagacaccatctctaccccacccaaataaaaatgcactcatctctgtagaacatctgctgtcaaaggccagcctgtcgttagggcatggcttatgcttgacaaaccagtaacaactgtgggatggcgatggtgggatgtgtcgcaagcaattcactagacaatcttcacatgaatgtcggtagccagggtctctcccgagggatggctttagtcttgatgaatgtgaaccatgtcggaattgttaggtagaaacctgggctgggaggcctcggaccccaggctccatccctggcttccccagcctgcggccgcaagcaaaaccaagcgcgagatgcagctagcacccttcatatccatccccgttctcagcgggacaacaccatggacagccgttttcagagcctccagcatttgcacaccactactcaccctctctgctgctggcatgttggtagagtcatccctgtaatcaagaaatggcctgtggaatgttattgttcaacgttgtttacagctcttaaaacatggtgaggaatgcctaagtcttagtgaccaaacgtgaccttgaaagcagacatagcatgacagaccttcctagagtgtttggtcgggttcacagtgaccgagagtcaggtccagcacacacctgggaaagggatgctgccccaagggggaccaaaagggccggacgttacagggtgaaaccctctgacccctcgcgacaccgtaggacttgacttttgtttagtctttctaagaaatagatcatggagccaagtgaagtgcactttgtcaaatgtaagggtctgctttgttcttgatgcttttctgtttttttaaccttttgttccgccatttataaaaagaaaaaaaaaaagcttatgtttccttgtcaaaatgcagaaatgttcccttcccgcccactcactgaagttttgcattctggcttgtgcagtttttattgtctgtgtcagacgtacagccagacatgttctctattggcatttttccgattctgttcagatgacagcgaccgccttttcattccccccgccacctgtactcaccctcacgctctttgaagaaaaaaaaaaaaaatcaccttgtgtgttgtagctcatttgtttcaagagagaatcaacagatcgatattcagtgtcttgaataaattgctctattttgatatta

SEQ ID NO: 60261 - DNA, 1160 bp, Homo sapiens
agtcttttgtgcagcaccctttaaagggtgactcgtcccacttgtgttctctctcctggtgcagagttgcaagcaagtttatcggagtatcgccatgaagttcgtcccctgcctcctgctggtgaccttgtcctgcctggggactttgggtcaggccccgaggcaaaagcaaggaagcactggggaggaattccatttccagactggagggagagattcctgcactatgcgtcccagcagcttggggcaaggtgctggagaagtctggcttcgcgtcgactgccgcaacacagaccagacctactggtgtgagtacagggggcagcccagcatgtgccaggcttttgctgctgaccccaaatcttactggaatcaagccctgcaggagctgaggcgccttcaccatgcgtgccagggggccccggtgcttaggccatccgtgtgcagggaggctggaccccaggcccatatgcagcaggtgacttccagcctcaagggcagcccagagcccaaccagcagcctgaggctgggacgccatctctgaggcccaaggccacagtgaaactcacagaagcaacacagctgggaaaggactcgatggaagagctgggaaaagccaaacccaccacccgacccacagccaaacctacccagcctggacccaggcccggagggaatgaggaagcaaagaagaaggcctgggaacattgttggaaacccttccaggccctgtgcgcctttctcatcagcttcttccgagggtgacaggtgaaagacccctacagatctgacctctccctgacagacaaccatctctttttatattatgccgctttcaatccaacgttctcacactggaagaagagagtttctaatcagatgcaacggcccaaattcttgatctgcagcttctctgaagtttggaaaagaaaccttcctttctggagtttgcagagttcagcaatatgatagggaacaggtgctgatgggcccaagagtgacaagcatacacaactacttattatctgtagaagttttgctttgttgatctgagccttctatgaaagtttaaatatgtaacgcattcatgaatttccagtgttcagtaaatagcagctatgtgtgtgcaaaataaaagaatgatttcagaaaaaaaaaa

SEQ ID NO: 60262 - DNA, 1962 bp, Homo sapiens
aaggagttgagaatctcctgatccacaccctatccttacttcaccaccaggcctcttggctccaggcaagagcttagaggatgtcaggagaggtgggggtaagaatcttcagcaaaactgtcactctaagtagagccagcagttacgggtctgataaaaacagtactgaactaaagtaaagcccaagctggtgagcaaaactggatggctcattcttcccaagagcatgactctcccccttggccagttggtggaaggggcaaaggtatgtgaccacccttgagaaggtgatgttggtgagctttaacatcttattcctattcttatagtgagaaagtgaaacaagatctttcagtagaggaatgggcagggctgttaggctcttcagcttgccttcacccatatagcagctatgctaaccccaagcctctctggccctgttcttcatccttccttctgccccaatcctgaaggacaagacacacccggccatcaacaccactcacatttccttggtggaaggaaaggaacagagaagtgaagaacagatacctccctccaaggtcaaatgcctcgtgatcttggcagagtagggattgggcaataagcatcaggtatcttccctctacagattctagagagctggggcattaaatatgggggacacttagaatacagctccttaaataccaccaaataaagacctttgtgtgtgtgtggtgggtggggggggggcaggggtctttctcttatgaacataaatctgtgagctgaagtctcattcccctgttcctccctacccccaaagaggcacagagtgaagggacttggggggcacagctcagcaacccagtgggagttagcaccccctcccaccttatgatgtgtgtggacctggccagtgcccctctgaacatatcattattagtgtaattatcatttattttgtgtatttgtcacattgtgtgcatgacagcctttgttaagggtgtctgaggagtatggagctgacaggggcattggaatgccaggaaagaacttcttcaactgagatcaaggcttcctggagggaaccactgcaaaaaggccatcaggcagttttcaagttatgtgacagagggcaaagacggccatagggtgctctgagttttgggatggtcacatgacacaatccagcacttgaacctggggtacatgctccctcattgcgaggcaggacgtaggcacatgactgtgcatttaggcatatatgtgaccaagaagaaggagagaaatggaaaacactggagaacagaaagtatcaggaacttttcatcaggcaatcccaaagcgctctgctcttttcctcttctttgcctctgtatcctctgtggttccagttccagctgaacttgtgacaatcccaaatcgctccttcctctttttcagtttctcatcatcttcagactttctggagattgaagagacattcaaaccaaatctttgagctctttccttcagcttatccaagttaaccataggtttgttatcagatgacagaccttttgttggaactgaagaaatcccaaacctagctgcccgagcagctttcttactctccaagctcacaggtacattgaatcgttcagccctcttctgcattctctcagtctgtggtatttcagatgtaattttcaccactttcttctctgctgccacatcaacagttttttcagggggttcttcctctttgacagggagctcaatgggctttgtttcttcttcctctgtttcatctcccagtacatcttcttcatttgcctcctcttcagcatgttcttcaagatatgcctggagtctgtggataagatcttgctttattcccttggtctccaaaccacgagcaagacattcttgctttagttcggcaagctttagcttatggagctccaccgtctcggtcgccatcttcggacgcgtggg

SEQ ID NO: 60263 - DNA, 1796 bp, Homo sapiens
aattgggcccaggagtgaaggccaagaagcccatccagactaagttccgaatgccactcttgaactgggtggcactgaaacccagccagatcaccggcactgtcttcacagagctcaatgatgagaaggtgctgcaggagctagacatgagtgattttgaggaacagttcaagaccaagtcccaaggccccagcctggacctcagcgctctcaagagtaaggcagcccagaaggcccccagcaaggcgacactcattgaggccaaccgggccaagaacttggccatcaccctgcggaagggcaacctgggggccgagcgcatctgccaagccattgaggcgtacgacctgcaggctctgggcctggacttcctggagctgctgatgcgcttcctgcccacagagtatgagcgcagcctcatcacccgctttgagcgggagcagcggccaatggaggagctgtcagaggaggaccgcttcatgctatgcttcagccgcatcccgcgcctgccggagcgcatgaccacactcaccttcctgggcaacttcccggacacagcccagctgctcatgccgcaactgaatgccatcattgcagcctcaatgtccatcaagtcctctgacaaactccgccagatcctggagattgtcctggcctttggcaactacatgaacagtagcaagcgtggggcagcctatggcttccggctccagagcctggatgcgctgttggagatgaagtcgactgatcgcaagcagacgctgctgcactacctggtgaaggtcattgctgagaagtacccgcaactcacaggcttccacagcgacctgcacttcctggacaaggcgggctcagtgtccctggacagtgtcctggcggacgtgcgctccctgcagcgaggcctagagttgacacagagagagtttgtgcggcaggatgactgcatggtgctcaaggagttcctgagggccaactcgcccaccatggacaagctgctggcagacagcaagacggctcaggaggcctttgagtctgtggtggagtacttcggagagaaccccaagaccacatccccaggcctgttcttctccctctttagccgcttcattaaggcctacaagaaagctgagcaggaggtggaacagtggaaaaaagaagccgctgcccaggaggcaggcgctgataccccgggcaaaggggagcccccagcacccaagtcaccgccaaaggcccggcggccacagatggacctcatctctgagctgaaacggaggcagcagaaggagccactcatttatgagagcgaccgtgatggggccattgaagacatcatcacagatctgcggaaccagccctacatccgcgcagacacaggccgccgcagtgcccgtcggcgtcccccgggccccccactgcaggtcacctccgacctctcgctgtagccgctatttctgcaggtggattctgcaggggtgtggggccgtggacaggctgaggctcaaggaaggtggtcctcagctcggctggccgggcagcccctcctccgctgtggcccgcctcaaacgggctggtgcatcctcctcttggccacagagggcagcatcgcccgccccttcccccaaatgctgcttgcagcacccaccctaaagccccctccaaatagccatacttagcctcagcaggagcctggcctgtaacttataaagtgcacctcgcccccgcaagccccagccccgaggaccgtccatggaccttatttttatatgagattaataaagatgtttgcaaaaaaaaaa

SEQ ID NO: 60264 - DNA, 3348 bp, Homo sapiens
  misc_feature (1)...(3348): n = a,t,c or g
attctggtggacttcggggcttaggccgcggccgcctctgcgagggccttggggcgtcaagcatcggttttccggtgctcgagcccggaggcatgagcaggggccatggccgatagcatcataattcgtgtccagtccccagatggagggaagcggatcacagcaacaaagagagaaacagcagcaacatttttgaaaaaggttgcaaaggagtttggcttccaaaataatggcttctcggtttacatcaatagaaacaagactggagagataacagcctcctccaacaaatccctcaacttgctaaaaatcaagcatggcgatttgttgttcctgtttccctcgagccttgctgggccctcatctgaaatggagacgtcagttccaccgggcttcaaagtctttggcgctcccaacgtggtggaggatgagattgatcagtacctcagcaaacaggacgggaagatttacagaagccgagacccacagctatgccgccacggccctttggggaaatgcgtgcactgcgtccctctagagccattcgatgaggactatctaaaccatctcgagcctcccgtgaagcacatgtccttccacgcctacatccggaagctgactggaggggctgacaaggggaagtttgttgccctggagaacatcagctgcaagattaagtcagggtgcgaggggcacctcccgtggccgaatggcatctgtactaagtgccagccgagcgccatcacgctgaacagacagaagtacaggcatgtggacaatatcatgtttgagaatcacaccgtcgctgaccgctttcttgacttctggagaaagacagggaaccagcattttgggtacttatacggacggtacacggagcacaaagacattccccttggcatcagggctgaagtggctgcgatttatgagccacctcagattggtacacagaacagcttggagcttcttgaggatccaaaagctgaagtggtcgatgaaattgctgccaaacttggcctgcggaaggttggctggatatttacagacctcgtctcagaagatacccgaaagggtaccgtccgctacagtcgaaataaggacacctatttcctaagttcagaagagtgcatcactgcaggagacttccagaacaagcatcccaacatgtgccggctctctccagacggacattttggatccaagtttgttactgcagtggctacaggtggtcctgacaaccaagtccactttgaagggtaccaggtgtccaatcagtgtatggcactggtccgtgatgagtgtttgctgccatgcaaggacgccccggagcttggctacgccaaggagtctagcagtgagcagtacgtgcctgatgtgttttataaggacgtagacaagtttggcaacgagatcacccagctggcccggcccctgcctgtggagtatctcatcatagacatcacaacaactttccccaaggatccagtttacactttttctatttcgcanaatccatttcctattgaaaaccgggatgtattgggtgagacacaggacttccatagcttggccacctatttgtctcagaatacctcatctgtgttcttggataccatctcagatttccacctcttgctgttcctggtcaccaatgaagttatgcctctgcaggacagcatcagcttgctgctggaggccgtgcggaccagaaatgaggagctcgcccagacatggaagaggtctgagcagtgggccaccatcgagcagctgtgcagcacagttggcgggcagctcccaggtctccatgagtacggcgccgtcgggggctccacacacacggccactgcagccatgtgggcctgtcagcactgcacgttcatgaaccagccaggcacaggccactgcgagatgtgcagcctccccaggacctagggcgcctgccctctgctggctaggaccgggcccagcccagcccttcctgaagccagaagcgttgctgagtgtgttccctgtaactgccccatagtgggcagccctggaggaacaaggggctggctgtcctgggctccctgacccactgaagcttctcagcacgttcctccctggagagcgggcgccacggctggtattctgcaggctgaatgcagtctccagactggaaacgcagagcggctcctcacgcctaatcctgttgacaagtcccccgccgtgttggaaagacctctcgcctctacgtggcacctggaattggggcgcacagggaggggccgatgctgccaccacccagccttctctttattttcagtgctttttgtttggcctccctgcccccatgtttttctggctgggagctcctggttacccccttgtctgactgcttggtggcaggcaccctgcctgtgagggccactttcctcttctagtagctgttgtctggtggggacgcagtggccctggacacggctcccctctgcaggtctgcaggtcggtttgctgcctgccctcctcctctcacccgatgtccaggtgggattttaaagtctgcattggttataataacagttatcagtaattcctgcccagaagacttttatttatttttttttaagataaaaactgcacaaaaggggagtgagagagactagtttccacatccttccctcctttagtgaagcccccgaggttgtgtccagggtgatgagtgtggacgggggcaccagtcagttctcccttgaagtaaacctcagtgcctgagacttttctaccaagccacacagctgcagcaactgcagatactgcgggctgagcaggagcagtggtggcgcctgccctgaggctgccctgcgatggcctgggtgggagagctgggtcaccggtgccgatgctctggccctccccaatacgctgcttcgtcccactggcaccgcctggctgagggcgttaggggctgtgccctcttgtgagggccatttgggacctccctggggcactgcacaattgatagtgtaccaatagagggagactgggcgatctggaacagcacgtggtggggtcctgcttgtgtgctctgcgttcctctgtggcgtggcaggccggggctgcntgntacccggggagtggtgggcatctcgatgcttctttgccttaatgatggccacatctgggctgctctgcacccacgggagaggctggcccagctgcagactgcttagggacttctgtgtccatcctggggggtaagccacgtgacccacattcttggcactatgaacagagaacatttgcctgttggcttctgaagtggtcagggccatggctgacacctccaggtccgcctggcatgggaca

SEQ ID NO: 60265 - DNA, 4527 bp, Homo sapiens
ttggacatttttgagcgccgtggcttgaacggtgctttttgttcattcctgggttttaatattattttccttcttcatccctctctggccactatggaattctaatttgaaccatgtttggattgaagccgcctctgtatttcttaccagggtcctcactgagcagcgagtcgtcccccgtgtcctctccggccaccaaccacagctcccccgccagcacacccaagcgcgtgcccatgggccctatcatcgtcccccctgggggccacagcgtgcccagcaccccccccgtggtgaccatcgctccaaccaaaaccgtgaatggtgtctggaggagtgagagccggcaggatgccggtcccaggagcagcagtggaggtcgggaacgcctcattgtggagcccccgctccctcaggagaaggcagggggaccagccatcccctcgcacctgctcagcaccccctaccccttcggcctctcccccagctcagttgtgcaggattcccgcttcccgccactcaacctccagcggcccgtgcaccacgtggtgccccccagtaccgtgaccgaggactacctgagaagcttccggccctaccacaccaccgacgacctccgcatgtcctcactgcctcccctcggcctggacccggccactgctgcagcctactaccaccccagctacctggccccacaccccttcccccacccggccttcaggatggacgactcctactgcctgtctgccctgaggtccccgttctaccccatccccacccccggctccctgcccccactgcacccatcagcgatgcacctgcacctctctggggtccgctaccctcccgagctctcccactcatccctggcagcgctgcactcggagcgcatgtctggcctcagcgcggagaggctgcagatggacgaggagctaaggcgggagagggagcgcgagcgcgagcgcgagcgtgagcgtgaggctgaccgcgagcgggagaaggaacgtgagcgcgaacgcgagaaggagcgcgagcaagagaaggagcgtgagcgtgagaaggagcgcgagcgcgagctggagcgccagcgggagcagcgggcccgggagaaggagctgctggccgccaaggccctggagcccagcttcctgcccgtggccgagctgcatgggctgcgtggccatgccactgaggagcggggcaagccctcggagcagctgaccccaacccgagcagagaagctgaaggatgccagcctgcaggcgcccaagcccgtccaacaccccttgcatccggtgcccaccccacaccacacggtgcccagcctcatctccaaccatggcatcttctctctgcctagcagcagtgctgccacagccctgctgatccagcgcaccaatgaggaggagaagtggctggcgcggcagcggcggctgcggcaggagaaggaggaccggcagtctcaggtgtccgagttccggcagcaggtgctggagcagcacctggatatgggccggcccccggtgccggcggaggcagagcacaggccggagagcaccaccaggccaggaccaaaccgtcacgagccaggtggccgtgaccctccgcagcactttggggggccaccacctctgatttcgcccaagccccagctccatgctgcacccacggccctctggaaccccgtgtccctgatggacaacaccttggagacgcggcgggccgaaagccactctctgcacagccacccggctgcatttgagcccagccgccaggcagccgtgccgctggtgaaggtggagcgggtcttctgcccggagaaagcagaggaggggccacggaagcgtgagcctgcccctctggacaagtaccagccacctccgccgccaccacgagagggagggagcctggagcaccagcccttcctgcccgggcccgggcccttcctggctgagctcgagaagtccacccagaccatcctgggccagcagcgggcctccctcccacaggcggccaccttcggggagctcagcggacccctgaagcctggctcgccctaccggcccccagtgccacgggcccccgaccctgcctacatctatgatgagtttctgcagcagcgccggaggctggtcagcaagctggacctggaggagcgcaggcggcgggaggcccaggagaaagggtactactacgacctcgatgactcttacgacgagagcgatgaggaggaggtcagggcccacctccgttgcgtggccgagcagccgcccctcaaactggacacgtcctctgagaagctagagtttttgcaactttttggcttgaccacccaacagcagaaggaggaattggtggcccagaagcggaggaagcggcggaggatgctgcgagagagaagcccgtcgcccccaacaattcagagcaagcggcagacgccttcaccgagactggcgctgtctacccgctacagccctgatgagatgaacaacagtcccaacttcgaagaaaagaagaagttcctgaccatcttcaacctgacccacatcagcgctgagaagaggaaagacaaagagagacttgttgaaatgctccgtgccatgaagcagaaggcactgtcagcagcagtggccgactccttgacaaactctccgagggacagtcctgccgtctccctgagtgaaccagccacgcagcaagcctctctggatgtggagaagccggttggtgttgctgcttccttgtctgacatcccaaaggccgcggagcctgggaagctggaacaggtccggccccaggagctgtcgagagtccaggagctagctcctgccagcggggagaaggccaggctgagcgaggcccctggaggcaaaaagagtctgagcatgcttcactatatccggggcgctgcacccaaggacattcctgtgccgctgtcccacagcaccaatgggaagagcaagccgtgggagccctttgtggcagaagagtttgcacatcagttccacgagtcagtgctgcagtccacccagaaggccctgcagaagcataaagggagcgtggctgtgctgtctgcagagcagaaccacaaggttgacacgtccgtccactacaacattcctgagctgcagtcctccagccgcgcccctccaccccagcacaatgggcagcaggagccccccactgcaaggaagggccccccaacccaggagttggaccgggactcggaggaggaggaagaggaggatgatgaagatggagaagatgaggaggaagtccccaagcgcaagtggcaagggatcgaggccgtttttgaagcttaccaggaacacatagaagagcaaaatctggagcggcaggtgttacagacacaatgtagacgactggaggcccggcactacagcctcagcctgacggcagagcagctctcccacagcgtggcggagttgaggagccagaaacagaagatggtctcagaacgggagcggctccaggcagaactggaccacttacgaaagtgccttgccttgcctgcaatgcactggcctaggggctacctgaagggatatcccaggtgacggtttcccttgcactaggccgaacctatagtatagaaatattatctattttattaccttgaatatttaatatttttcactgggaggtttgaagcttacaaaatgagaatgtgccatgcatgaagcaaaggattccaggctccagaaaaaatgaatgaactcaccttgacgtcaatgcaattgaatcaccgttgtcattcagcgagcaaccaatgtaggattgcccacagtttttctttttaaaggtggttttcgcccttcctctcccacattatttcttaatctgaacatgaaggctccattagcaacactaaaacttgatcattaacagccccctgtgcatatgagtggatcaaaccggttctgttctttcttgtgttgccatgttactatgcctcaagcccagtttgcttttgccgcagcaatggggccagtctcattcctccccaggagtgaaacttgcttcagctgaaaaggttgggtgcattgtcagtaaaaagggcttatttgtttcattttactttcctgcaaaattttcttcaaagcaacaagtcctaggagcacacaaagcaacccaaaggcttttccctggaaaagctctttcttacctaaagataaaaccaattcacaaactgaaggtagctttttattactccgtggggagcatgtacagagctctgtgtatacacagcttcacacccaccagattgttactacagtgggttgggttttcatacagacgtaaattttgagagaaaagtcaaaggtgcttcagccttgtactgtgtatatatattaaaaaaaaaacaaagttttgtatgtttttattactttaactattgttataaaaagcctgccatttttaatatgtggtttgggggatttttgtttgtttttcctgttagggggttttgtttgttgttttggttttttttgggcaaaaaaaaaa

SEQ ID NO: 60266 - DNA, 2030 bp, Homo sapiens
ttttttttttttgacagaagtaaaaatatttattttatcttaaaaatctggtcccgcaaaaaggccaacacttttttcagttcacggtcttgacctttcaaagaagaaatctttcaactgagaggtgagttaataaaaggaatgtcagaggtgctttcagatttcttataaaccagtaaaccaagcaaccctggacttctagtttactgagctccttcttctagccattcacagttcctgaaggagaaaagaagttgtttgcagataaggcactttagaaaccaccaaagagaaaacccaagtctgccaggagctgcactgtgaacatgtgagccgagagggccaccagcagacagagtgccaactcccacagctccatgacaacagcatccaccttcctgccccaacactgttccgtctggcttccagcacccgccttggctctgtgttgcctacctggcctagaatacatggaaaccagacaactggccagagatgaacactgctgcctgaagctcagggcagctgcccacagtgaggaatcccttcagaggccccagctggggcacgccgagggagcagttccttttgcaaagatgagttagtgcggatcagcacattagcaaagcaaaatatttaaacatttttaaaagctgctaatccttccaatttccctcctgattgtagctcaagctgcagcctctaaacctgctaaaaatcaggaagaaacccctcctctggagggcagatggactgaagtggctacagccagtgtgggtacggaaagcctcccgctgaactgtgatcatgtgacacctgcagaccctgggaagggctgatctgaatcctggcagcaaactcaacctcttcttttgcttggggggcttgtgtttaatacaggtcattgcgatggaagaagtctcagagtctctctcacatcaagaggacagatggggacagggatcctggagcttttcttctcctgtgttctggttgcatacttgaatcccaggaaacagtgtgacacggtgccaatttactgccaaacatgcccggtttgtcaacagagccagacaaggaggagaggagagattcatgccccaaacacaggccagctgaggagggcttcgtcctccttcctttggcccagatgagggagcgccttcccagaagtcacatgaggaaaaaccgtgctcaggtcagaactggacccagcctgtgcctggctgggtctggctggaagttgatcctgtagatttggtaaagtctccccagatgtcagcagtggcaggattgggctgtggccagggtacaggagcacctcctgaactgggagcaactgctggctggacgagggatccccccacagccaactgctccccagggggagggatcagggtggaggttttcccccctgggggagggggaagcaggctcagccctcctgtgctggcaggccggactcggggattcccagctgctccttccttcttcttcatgtttgcgatgttgagcttgatggtctggccctccttgaagcccaggtccagtttagggccttggtctgggttctgggcttgttttgcaaattcacactgctgtttcacccacttgaaatggtcctgcaatgcaacattgaagtcaaaggcatcacctcggtccccgaagccaattccaataaacgcccgtcgcccatttccatcttcgatgcggatcacgaagtacctgctggaatccgtcacactctccacagctgtgccaggaaactgatccaccggggcctgagcaaagagctcccctgacgtcctgtcctccagcttgatgtaggccatctgtccctttgcagtgatcctcagccggccactccatgatggctggtccagctgccactccgcagccctgtagccacggttggtagcccgcggagggatgcggtagacgtggacgtcaggcttgacacagagcaccgactcgtacccgctctcctccatcgcgacgcctggagcccaccgaacttccggcgacttcca

SEQ ID NO: 60267 - DNA, 3423 bp, Homo sapiens
gttactgggataactcagtttggtgaacacatgatgtggtttggttattagtagagttacagaaaaggtagcatggaaactgagatggcctcgtgggtgttggaaggcttttcagcaaggggaggtgaatgttattaggtccaacctgaaaggtgcatatttcaggcagatagataggtgtttggcatcttataactgctcactttccttttccttagtaatctgaaagtaattcactgtactgaatagttaatggttcccttaatagactcttgtccttggaaaaataaaatgaaatgactggggttctattagtaactgaaaaattgtcaacaattaaaactctaaaacctactcatgagaaaataaagctcttttgtttaggaataataaaagccgacttaatgacttctgaaagaagtaagtgtccctgtaaaggccaggtgaaactgccattctttaacctgttactcggtgtacttgactgcggaaagaacccagaaacagaaaaggccaggcccaaaggatagaagtgtaggtttcctctggaagcttactgttctgctaaatgacctaaaaattgcctagaacactcccagataagtcaatttctgcttataaaaatccattgccagaaagagattatttttagttgtctttatttaaaaaatgaaacacattagttacaaaaaccgttgctccaaatagataccgtgtatcttacaaatgttttttgcttggttttgagtgtttactgtagaaattttcaatatcataaataaatgattatttctttctcagaaagctgatttttgtagtgtagtatttacaaataccgtaagtgaaaaatgatagtttataaatttgtaccatttaggaaaaaatgttttatgtagtgttgtttgtgtaacagcaaataaaaccatttaagattatagtttttacaagggtggtaaaacctttaaaacagcataatgtgcatcgtatgcctttctgacattagcatgcaaaaacaaagctatttgttaaaatagacttatttttgctccaactaagtaaacatgtaaaattatttttaataagctcaatagcttagaaggcatcttgtttaaaatgaaaataatttaaaacaatatctagcactgcaacccaaagctaacagacaactgcaatgccactgtgacatatttcagcaaaatataaaaaatgaaaactttccaagttgtagaacattggtttttcaaatgtaagactgttcacatgtgtattcacatgttcacaagttttccaaagggaaaatactaattttttattggcatcatccatatccaggcaggctgtagttgagtcaccaatagctactcctaaatggagctgctattttttctatgttttctataaagttatttacatctgtaacaaggattccattattttcaaagacttctctggggatagtaggcttgcctgttaggaggacagcaaacctggcatcaatatgctgaatttgcaggtttagcaaacatttcagaatttctgcttttgttgatgatcgagagtcacactggtgataatgaagcaattcaatgatatttgcactctgaaatgacttcaacattatgttcttcttatgtgcagttgaatccactctttcatcttcttttagctttttattttccctgtagtgaagcaaccacttccatcttccatttccatttagtttttccaggattttgataatttccttcagttgaactaatgttacagcttctagtatcttgtcatctgatatcacaaagcctcctgcacgaaacagttcttggtaggtgtgatcaagaacatctccagggctgtctactccagcaaagatgacactggggaaatgcttcagcttcagcaaagaaggaatctgatgcaaatgtgatgatatatcttcatttctgatgatgatgattagtgtatcattctctctgtggaaagcttgacagaagtgctgaggttcaatttctgtatggcctcctttcctcagaaggttctttgttcttacaaagaatgatttgtcttctgtttcgacaaggtagaacaggaaggtacttttacaagcctctttcacaacacttcttagtttgacgtgcaaattggtgcacacgtctatgattatgtcttcataggaggctgaccgtcctgggaaaggcagatacatctcttgagcagtggcttctccagaaacatcatttagctctttgtcttggaaaatgaattggttgctattcttcatcaccttgttgaattcagcatactcattgagaataagtgaaatatcattccgagattccttcacagtactgttgtatttcagtttgttgaggtggaatgaaacagtgtgatttctttgagaatttctaagatctctattatgactacatctctctctccaagaggaagagctgtccagactgctggctgtgtagcctctcctgggctgcccctgtggtctgggatctgactccacaactgttaccagaagggggcttctgctcctaggtgcaggatgcagaaatggggcctcagagatttttgtcgaagggaaagcaccaatggagatctgggttggtgactcctttggaaagacattggcagaggaggcagaatgctgagaatccccattctttatggtctgttttagtttatgtgcaaaacgcagatactccaggtctaaagtgttctgggtgaggtcgtctgccacctgccaagtgcttgtccaggagctgggcaggccacagtttgcactgaaactcgggtgcctcctcaggccgtgtgaagttctcatggtatctttgagttcttttgttatagagaagttggcgtaagtcctgaggatcccgtggagatctcggatttggacgtaaggcggcacacacttctcttctttctttaccgcagcagtccagtgcccgggagggaggctcgtctccatgcctggaacccagctagagcagccccagtcctcttggttgttgttgtggaagttcaacgacgactcatagccatctgtgggaacatcttttttcctggtgtaactacctcttaaagtataagaatcctccaaatccagtctgggatttctacaatcaccaagcaggtctagatcagaatctccagagagttcatagtgcatgtcggaattcacaccgacctctccatctctgcttagggtttcagaaccagcctcagccgtgagcccctccccactgttatcaatttttacgtgctctgtggctattccacaagcagaaatatcaaaggattctgaaacaaaggaggccaaaggctctttactgaggttttccatggtgtctgctgtattttggtagggcccagcacaaagggagaaatctccgaccttcaatagctcctttgcga

SEQ ID NO: 60268 - DNA, 873 bp, Homo sapiens
ttttttttttttctgattgacaatgagaaatatttattgagggtttattgagtgcagggagaagggccggcatgacttgggatggggagagaaacccctcccctgggattctggaagtctaagtttcccgtggtggggggtgagggttgagaacctatgaacattctgtaggggccactgtcttctccacggtgctcccttcatgcgtgacctggcagctgtagcttctgtgggacttccactgctcaggcgtcaggctcaggtagctgctggccgcgtacttgttgttgctttgtttggagggtgtggtggtctccactcccgccttgacggggctgctatctgccttccaggccactgtcacggctcccgggtagaagtcacttatgagacacaccagtgtggccttgttggcttgaagctcctcagaggagggcgggaacagagtgaccgagggggcagccttgggctgacctaggacggtcagtttggtccccccgccgaagacataagtgctgctgtcccacgcctgacagtaatagtcagcctcatccatagcctgggtcccgctgatggtcagagtggctgtgttcccagagttggagccagagaatcgctcagagatccctgagggccgcttgctatcttgatagatgaccagcacaggggactggcctggcttctgctgataccagcaagcatatttatcccccaatttatctccagagcaggtgatgctggctgtctgtcctggggacacggacactgagggtggctgagtcagctcataggaggccacggatcctgtgcagtaagcaaggacgccgaggaagagagggatccatgccatggctgaggcacctccgatgctgc

SEQ ID NO: 60269 - DNA, 2629 bp, Homo sapiens
tttcgtgatgggcggagccccagccgctagtgctggtggccgccgctgctgccccagctggagcccgagccgccgcctctgcgtccgcgcgtcgctgcttcccagggcggcggtatgctggggaaaggagtagtcggcggtggcggcggcaccaaggcccccaagccctccttcgtgtcgtacgtacgccctgaggaaattcacacaaacgaaaaggaagtaacagagaaggaagtaactcttcacttgttgccaggtgaacagctgctttgtgaagccagcacagtactgaagtatgtccaggaagattcctgtcagcatggggtctatgggaggcttgtctgcacagacttcaagattgccttcttgggtgatgatgaatctgcattggataatgatgaaactcaatttaagaataaggttataggagaaaatgacattacactccactgtgttgatcagatttatggagtgtttgatgagaaaaagaaaactctctttggacaactgaagaaataccctgagaagctcatcatccactgcaaagaccttcgagtgttccagttttgtctgaggtacacaaaggaagaggaagtcaaaaggattgtcagtggcataattcatcatacccaggctcctaaactgcttaaacgattatttctgttttcctatgcgactgctgcacaaaacaatacagtcactgatcccaagaaccataccgtaatgtttgacacacttaaggactggtgttgggaactggaacggaccaaaggcaacatgaagtacaaagcagtgagtgtcaacgaaggctataaagtctgtgagagattgccagcatactttgttgtccccacccctcttcctgaagagaatgtgcagcgctttcagggtcatggcataccaatatggtgttggtcctgccacaatggaagtgcccttttgaaaatgtcagcactgcccaaagaacaggatgacggcattttacaaatccaaaagagcttcttagatggaatttacaagaccatccacaggccaccctatgaaattgttaaaacggaagacctgtcaagcaacttcctgtccctgcaggaaatccagactgcatactctaaatttaaacagctatttctgatagataacagtactgaattttgggacacagatataaaatggttttctctgttggaaagtagcagctggcttgacataatcagacgttgcctgaaaaaagcaatagagattacagaatgtatggaagcacaaaacatgaatgttcttcttttagaggagaatgcatccgacctctgctgtctcatttcctctctggtgcaactgatgatggacccccactgcagaaccagaattggtttccagagcctcatccaaaaggagtgggtcatgggtggccactgtttcttggatcgctgcaaccatctccgccagaacgacaaagaggagcatcaacgacaactttctttgccacttacacaatctaagtcatctcccaaaagaggatttttcagggaagaaacagatcatttaattaaaaaccttctgggcaagagaattagcaaacttattaattcttctgatgagctccaagacaactttcgagagttctatgacagctggcatagcaagtccactgactaccatggtttgttgttaccgcatatcgaggggcccgaaatcaaagtctgggcccagcgctacctacgttggattccagaagcccaaatcctaggtggtggccaagtggccactctgagcaaactcttggaaatgatggaggaagtccagagtttacaagagaagatcgacgagagacaccacagccagcaggccccccaggctgaggccccctgcctgctgaggaactctgcccgcctctcgtctttgtttcctttcgctctgctccagcgacattcctctaagcccgtcttacccaccagtggctggaaagctttgggagatgaagacgatttggccaaacgagaagatgagttcgtggacctaggggatgtgtgacctgtttgttgagtgattgtgaaagaggaatgtgggagattgggacagctgatccctggatttgtgtcacgctacagctcatgctggctgggtccttagcccggcactccgttagaataaacctgggccttcgggaaaagaggtggctctcattatttttcatgattctaaaagactatgcaattaaaaccgcatctgtagtattattaattggaaggaattattacttgacccgtaatagggttgtggccgttttctgatgcctaagtattatacagagcccacaatggccagtttactaccagaaagggcttcagtaagatattcttggacttgatactttcttcagatcctctttgtgccaagataatttatccagtcattgggaatagtaagtttctgtgtaacccatctcaattatagaagcaagttcagctttatgtatttgtatggggagttgaagattcagatagaggtattaagatgtgtggcatttacttaaaccatcacatttttttctttctacgcccccttgcctgtaaaacacctgggaagttccactggtgtcatccatcctgatgcttcagaccacccgagccct

SEQ ID NO: 60270 - DNA, 1156 bp, Homo sapiens
caattttcttgaaattgcaataattttaaaatccgagttccaaaataggtccttaatttttggaaaaattgtttaggggggtttaaggccccaaggaaggccacccttcccatttattaattatatccagaattgagttctttcaaggtagaaaaaatttatattaaccaatttttagtaatgttcaaagactagttttttgagtataaaattgagttattataatcccctttagtattgtaaaccctttaatagctttctaaaatgaagtagtatttttctatgtgagtgaaatatcagtttacatttataatacttgatacttaaatctgaattcctcatttcacttaatcttttttcaaatgatcatacacatatactaaaagaggggtgtttaggaaaagttgaaatgatggaatgttttggtcttaggaccttttctcaaaaaaaataaggaaatctaaaaagcattttttcaaatgccaacacaaaaacattccttcttatattttctattctggcatgtacagggatagggaggctgtgtggtccactggttagagccaaggactgggagccaggaggatcctgggttccaatgcggggctaaccactgacttactgtgtgaccttgggcaagtcacttgacctccttgttcctcagtcaaccatctggaaaattggttaaaaagcaggacctcgctgacaaccagatgctgcatctgagctgagctttcttgggcaccggcttttccgtgaacattgtgtttgtgtacaaggaaactatataaaggacttaaatattcttggaagagatctttcaaaaactataataattgacaactcaccacaagcctttgcatatcagctttctaatggaatccctatagaaagttggtttatggataaaaatgacaatgaactcctaaaattgattccattcctggagaagcttgtagaactgaatgaagatgttcgaccacacatcagagacagatttcgcttgcatgatttgctgcccccagattaagtacaaagacttgtcaaatcactgaagggggagagaatgcaggacccttttggactaagacaaaaacattgccattactgttgaaattttgcatttttgtaccccgtcttgcttttcttatctttg

SEQ ID NO: 60271 - DNA, 670 bp, Homo sapiens
cggccgcgtcgacttttttttttcgagtttttgcattttaaaatttatttaaagtcttggttgttcaggtcctaggggttccaagtccccagtcaccttgaggactcagacatcaggaattcagtccccagcccagagatcaacgaaagaaagacaacttttcttggagccaggcctcagtgaggtcatcagtggtgcggatttcgaacacctttgtgagctctgctgtctgcaccagcctgtttttactccctgcatacatcatctgttgttccggcttgcagcccacagggctggagaagatgaaacacaaagggtaggacactcggccatcgtcatgcacgtacttgtagctgtaaaccacgaacctgggctgtctctccggcaactccattttgagctcctctggggaaatgttctgaaattcttcctccagcaccaccatctgccggtctttgtccaccttcattatgatggctgcattgtctgtctcttttcggaagcggaatttcctcagcttttctgttagctctgggtctacctcgcacaccaccagggagtcagacatgattgttctgtccacaggcctcttcttttcttagttccgctgtcttctaggcgtggggaccggggctgtaggggggcgggctgtgcagtaggaggaaggttt

SEQ ID NO: 60272 - DNA, 2362 bp, Homo sapiens
ttttttttttttacattttttaaaagttttttatttttcagtttttgtagagatgaggtctcaccatgttgccctggctggtcttgaactcctggcctcaagccttccttccgcctcggcctcccaaagtgctgagattacaggcctgagctgctgtatggctatgattttgttaaaggccgacacagaggtgaagtcaactgctagaaatcacggcttttaagaggtggagtcacatttgaactctggcctctgatgccagatctgcaggtcacatgttcaccatggtccaggtgaccctgactgcggtccccacctcttctgtgaggcacagggcaggattccacctgaggcgcgaggagcctgggacgactcctttggtctcttctggggttcgcaaaaacctgggggtcccgggtgtgaagaagggtgtctgcgctctcagcggtcaggctccaggcgctgcgacaggacgccgaggacgcgctggaacttctcaaagcgttcagcgcgcggagctcccgcgccccggctaccccagagcagcctccgcacgaagccggtggtcagggcctccctcagctccgggttaggccggaatcctcgcaggcgctgggctgccaccttgcggaatttgggtgcgtcccggaccatgtgacgcgccccgtgcagggtgcgcaacagccgctcacagctctcgtccagcggccccgcgacttcctcgccctccagtaggcgaaccatgggtgccacgtgcggcagcgccacctcgccggggtcgcagggtccagcgccctcatccagagcccgcatcagcggcttcagctcctgctcaaaggccagcgcagcctccgtgtggctccttcggagctggcgccacgtgtgctccaaccgggacacctggggcatgagcagggcgcccatgactgcagccagcccgggcaggtcccccgccgcccctggccgcagcgccagcgccagctctaccagtcccctcagtgcggctgcgcgctcctccagcggccccgagcagcccagcaccgccagcgccccggccagcgccagtgtctgatgcctctccagcagttccaacctcaagtggtgtccatggggaagagtgagcagctccaggccagatgagactcccatgttgccccgctgatctctggtcactcccaggaggcctgtggcctggcagtctaccaatagcaggtgaagggcggtgctcccaggatggtgctccaggaacaggccacggagggtatgcaggacttggggttccaggggccgattctgggggcccagcaggcaggagggggcatcatgggggcagaaagagatctcagcctgtggtcttgtaaaacatctattctcttcctcctcatcctcctcggcctcccaccatggggcctctggctctgggcagctttggctcggggatgttccctggacactgggcactcggggcaccagctcgcagtacgtcgggggacgttcagaggcatcaggcagttcgaaggagggtgtccgggggggcttcgttggtgccttggcttgaagctgcccatcggaggccctgagactgtcggcaacagttcccaggggagcaggggccttcagcaacaccgggtcactgctcgttcggggcaaggcagatatgggcatggtggaggcttccatcccagcggggtcttctcttgaccgccccatatgtgccaaatctgcaggctgactgttgctccacttccttgccctgagaggctctatccgagctgggccatccatcagggtgtcctcgctaaagctgcgtcgcagaggcccctgccaagtcacaggcctggagaccacagcccctgtggcctgggacagtgggcgcctgcctgtcatataactgtgaaccagagccggtatgctggggaattgctcatcctccagttgaaagagggctgtgggtcggcctggccggggacgcagggccacacggaacacctcaaaatggagggctgagccccgccagcggcaggagatcacggggttgcccccacgggacccagaggcgcgaaccaggaagtcgccattttgctgaagaagagcttcagccttctggcgggacaggaggccgtggtaccaaggttggccagcaaggtcttctccatcctgtggcacctgcatggagctcttgggaacagagggtgccagggctgagctctgcactttcaacaggcctcagtcttccacatctgggcaggacccgcggggctcccacgaggctgggtccaggcggaagctgaggctccgcggctccgggctgctgtcacccccgccctccaccttgccaccgccccagccttcccagacgaaa

SEQ ID NO: 60273 - DNA, 5088 bp, Homo sapiens
tttcgttgaaaaggaaaaaccagcgttatccaggattgttaaattaattcttatctgtttccacatcttggaccgtgatctctgtggttttaaaatcccatattttgagtgggttccgctgttgtttaagaaaagttgctttaaacctttgctctgcaagcacccgaagagaactcataaaaaggaagacaacagcagatgcaatcgcggatgtggcttagtccttgcagctgccccagagtgctgtttggagtgtaccgtcctcagtaatgaatccagaagaacaaatcgtgacatggcttatatctttgggagttttagagtcccctaaaaagaccatctgtgatccggaggagtttttaaagtcctcgctgaaaaatggggtagttctgtgcaaactgatcaacagactcatgcctggctctgtggaaaagttttgtctggatccccaaactgaagctgactgcatcaacaacatcaatgacttcctgaaaggatgtgcaaccctccaagtggaaatatttgatcctgatgacctttattcaggggtcaatttctccaaggtactgagtactcttttagctgtcaacaaagcaacagaagatcagctatcagaaagaccatgtggacgttcctcttctcttagtgctgctaatacttctcagacaaacccacagggagcagtttctagcacagtttcagggctgcaaaggcagtcaaagacagtggagatgacggaaaatggaagtcatcagttgatagtaaaagcaagattcaactttaagcagactaatgaggatgaactgtcagtttgtaagggggacatcatttacgtcacacgagttgaagaaggaggctggtgggaaggcacattaaatgggagaacaggctggttccccagtaattatgtccgtgaaattaaatccagtgagagacctctctccccaaaagccgtcaaaggatttgaaactgctccacttaccaagaattattatactgtggtgttacagaacatcctggacactgaaaaagaatatgctaaagaacttcagtctcttcttgttacttacttaagacccctgcagtccaataacaatctgagtactgtggaggttacatctttactgggaaacttcgaggaagtatgcacatttcaacagacactctgccaagccttggaagaatgttcaaagtttccagaaaaccagcacaaagtaggaggttgtctactgagtctcatgcctcattttaaatctatgtatctggcttactgtgcaaaccatccttcagctgtaaatgtgctcactcagcacagtgatgagttggaacaattcatggaaaatcaaggtgcatcgagcccaggtatcctcattttaacaacaaacctcagcaaaccattcatgcgactggagaaatatgttactctcttgcaagagttagaacggcatatggaggatactcatccagatcatcaggatattctgaaagcaatcgtagcattcaaaactctcatggggcaatgtcaagatctgaggaagagaaaacagctggagttacagatactgtccgaacctattcaggcatgggaaggagaagatattaaaaacttgggaaatgtgatttttatgtcacaagtaatggtgcagtatggagcatgtgaggaaaaagaggagcggtaccttatgttattttcaaatgtcctgataatgttatctgcaagtcctcggatgagtggctttatctatcagggaaaaataccaatagcaggaacggtggtgactagattagatgaaattgaagggaatgactgcacatttgaaatcactggtaacacagtggagagaattgtggtccattgtaacaacaaccaggacttccaggaatggttggagcagctgaacagactgatcagaggacctgcctcttgcagttcattatccaaaacctcatcgtcatcatgtagtgctcattcttcttttagctctaccggacagccccgaggacccttggagcctcctcaaattataaaaccgtggagtttaagttgtctacgacctgcacctccacttagaccatcagcagcactaggttataaagagaggatgtcttatatcttaaaggagtctagtaaaagccctaaaacgatgaagaaatttcttcataaaaggaagactgagagaaaaccatcggaggaggaatatgtgattaggaaaagtacagctgctctggaagaggatgctcaaatccttaaagtgatcgaagcctactgcaccagcgcaaattttcaacaaggccatggctcaagtactcgaaaagattccattccacaagtcctactccctgaggaagagaaactcatcattgaagaaaccagaagcaacggccagaccatcatggaagaaaagagccttgttgatactgtttacgccttgaaggacgaggtcagagaactgaagcaggaaaataaaagaatgaagcaatgcctggaagaagaactgaaatcaagaagggacctagaaaagctggtgcggaggcttttgaagcaaacagatgagtgtattcgaggcgagtccagtagcaagacctcaattcttccataaccatcactgtgccactgggtggagtgtgccttcagggcatcttgaaatgtcccgctgaatgatttgactcagtttgctcacttctttggcttttgttttgtgtttgagtctctctctctctctccctctctcttctctttctctccccgctgtgtgcatatgtgtgtgcgtgcacgtgcgcgcttgggcatttgctgttgtttggttattggttggttgttcattttttttttcaacaggtgaaaaagcaggaagtggtggtagagatggcctcagagtcttttccattcagtaagaaagagaaagggaatgcaggccagttacttaaaaggtcttcagattgccttcagttcacagtgcctctgcaacagccattgccctcaggtcacattctttgggctggctgcccttgcaaagcagctggccaaggcttattaaatgtgaacccaacttttccccagggctttcctgtacctgcaagcctcttagtacttaatttaccgaaggcaaatcttccagactatggcttgagtaggatgaaagacaaacacatctgcccaatgatccagctgcccttccttagaccatcacatgcctcccctcaatcacaggttttaaaattactgccctatgttgtctataagaccaagaaaactgtagtacccttattccttttgtgtcatgtaaattgtaactcaggggggcagaagctctggtcacccacaccaacaccaaatccatcagcaaattctactggacaatcctcccttttagtagcagagttgaccgccttttcccattgcatgatagggttctttccctcattctgcctagtgtgtaagttttctatttccccagtacttttagccaaccttaccaagtggtgtgtaaactagtatgtatgtgctttgcttactttttaaaaaaatgtagttagactgtgaggagttactttatgtacgttgcatattcaaactgtgatgttttatccttcaaaacaatctgcattaagaagatattgtgccctactagacagctttccattcactttattactctctcatatatgctgtgagaagttgtaatattaattggcctctttgggtgggactctaagcagtatttgcagaaatatgcttctggtccaacttgtacatccagaacaaaagggcccctctagtagctgtgtgctggattattcaggactgattaactcaagttgctcattgaatcacatcatccactttatcccagaaactagaactgtgagaaaccaggtttagaagacagtcacagaacagcacacatccaaattcagcgccattgaaagttggcctaaggctcagtgccactcacccctccctccccaaaagacaagagaaatttggccagatggggaaggtcactggaaattgaggccaaagggctgatcagaattgcctttataatatatttgatggatgcctataaatgtgggttttgcaaatattgtttaaaaaccaaacttgaagccaggcatggtggcccacacctgtggtcccagctactcaggaggctgaggtgggaggatcatttgagcccaggaggtcaaggctgcagtgagctgtgatgacaccactgcactccaacctaggtaacagagagacacctctgtctctgaaaaaacaaaacttgaagtttgaaacccccagcttgctgaggagccctttttatttttggtactgagagtctcaaggtcccatagctacatggtacagggctgttgtctgcttgctgcacagcagaaattacaccatccacaggaaatggactatttttgcagtccaacatcagccaaccacacacagccgtgtttggaagctgaagagtaaagaaatttctaggaatggctgttgttctgttttttagcacagccatttagatataacatccttcacttaaaaattaaaaacatcagtactaccaccaccaccaacaacatcaacacagatcttcacatctgcccattctgtggttagtcaatggcttgcaataaatgtgcaaactgcatctataggaaacatttttgtgattacggaatactttagttgattgctgaaaatattgaaagggcttcattttacagtgatgagtacatatgcatgtttcggggacttggcccttctgatgaggggccctcggtactctggataacgaagcttgtgcagagtggtaaccatgcttacacactaaactataatataaaggaaatgaagccatgttaatctgagagcagtgtcgccatagttgtgttgtttacaatactctataaatgggttcctgttgccctgtaattaaactgctgcccgtagaggcctttcagttccttttctgtccttccccttcttaacacaagctcaaattttctaacttgtttttattttgaagacttttaaaatggacattttcaatacataaaaataaacagtgctttataaaaaaaaaaaaa

SEQ ID NO: 60274 - DNA, 845 bp, Homo sapiens
cagactcttggaaggggctatactagacacacaaagacagccccaagaaggacggtggagtagtgtcctcgctaaaagacagtagatatgcaacgcctcttgctcctgccctttctcctgctgggaacagtttctgctcttcatctggagaatgatgccccccatctggagagcctagagacacaggcagacctaggccaggatctggatagttcaaaggagcaggagagagacttggctctgacggaggaggtgattcaggcagagggagaggaggtcaaggcttctgcctgtcaagacaactttgaggatgaggaagccatggagtcggacccagctgccttagacaaggacttccagtgccccagggaagaagacattgttgaagtgcagggaagtccaaggtgcaagacctgccgctacctattggtgcggactcctaaaacttttgcagaagctcagaatgtctgcagcagatgctacggaggcaaccttgtctctatccatgacttcaacttcaactatcgcattcagtgctgcactagtacagtcaaccaagcccaggtctggattggaggcaacctcaggggctggttcctgtggaagcggttttgctggactgatgggagccactggaattttgcttactggtccccagggcaacctgggaatgggcaaggctcctgtgtggccctatgcaccaaaggaggttattggcgacgagctcaatgcgacaagcaactgcccttcgtctgctccttctaagccagcggcacggagaccctgccagcagctccctcccgtcccccaacctctcctgctcataaatccagacttcccacagc

SEQ ID NO: 60275 - DNA, 2086 bp, Homo sapiens
tttcgtccgggattcggccagtggtgctgagcgagtgctggaccagcggccgtcctgtgcacctggcctgtgcgcgtgcccgctgctcggcttcacccagactaaggcgcgggcagctgcgggaacaggcggggtgggcggagggagaccgggaggcacgggcgccctgtgcgcggaggaggtgaaggcggccggggccgggacgccatgtccatggaggaccccttctttgtggtgaaaggagaggtacagaaagcagtcaacactgcccagggattgtttcagagatggacagagctcctccaggacccctccacagcaacaagggaagaaatcgactggaccaccaacgagctgagaaataacctccggagcatagagtgggatctagaggaccttgatgaaaccatcagcatagttgaagcaaatcctagaaaatttaaccttgatgcaactgaattgagtataagaaaagccttcattacaagtactcggcaagttgtcagggacatgaaagatcagatgtcaacttcatctgtgcaggcattagctgaaagaaaaaatagacaggcactgctgggagacagtggcagccagaactggagcactggaacaacagataaatatgggcgtctggaccgagagctccagagagccaattctcatttcattgaggagcagcaggcacagcagcagttgatcgtggaacagcaggatgagcagttggagctggtctctggcagcatcggggtgctgaagaacatgtcccagcgcatcggaggggagctggaggaacaggcagttatgttggaagatttctctcacgaattggagagcactcagtcccggctggacaacgtgatgaagaaacttgcaaaagtatctcatatgaccagtgatcggcgccaatggtgtgccatagccatcctctttgcagtcctgttggttgtgctcatcctcttcttagtgctgtgacggcggggcctctgggtgcgagttcctcctgcatatgaaccgaggggaggaggagaagctgagcacgtgtgacattgccgtctactcacattcctatcctggaaacatactgctgcactgacttttctccgtgtgaccccacaattgacatggctcctccatcccagcgctggaagggccagtgggaagaggaaatagatgtctgcactcctggctgcagctggacaacagaagccccatgccgcctgtccagttcggaggagaactagctgctgccttgccttccgggacctcgtttgctgaggagggacttacagactccactggtgttttgctgttgctcattccatgcatctttggcagctcttttcttctgctcagacccttccccgtgctcagacagtgcaccgctgtcccatctaaagaaacctgtcaggaatacgagcttctgggtatgtttcgtttcccattgctgtagcatttcttatcccctgagagctgatgattattgaggacagaaggctcagaaacagtttgtgacagaaaatgcagtgtttcatttttcagggataaatgctaagataaaattgcttttccaggtcatttttttttgtggcaagaataactaatggaaaataatgaaacaccctggggtttgggggtgctaacaacttgtggctttaactgacaggagcaattaaaaagagcaagagggttctgcattggcatagcttaaggaagggttaatgatgtcgccacaggtcagctcctgatccttgccgacttgatgttgctgtaccagggcttcctccccaatactgcggctcctgctgggcccacgccagcaccagcgctatggcggatcggatcaacatcaagaggaagggagcgtggccctccaccctcctgtccgtgcagaacgtcatcgactgcggtaacgctggctcctgtgaagggggtaatgacctgtccgtgtgggactacgcccaccagcacggcatccctgacgagacctgcaacaactaccaggccaaggaccaggagtgtgacaagtttaaccaatgtgggacatgcaatgaattcaaagagtgccacgccatccggaactaca

SEQ ID NO: 60276 - DNA, 1052 bp, Homo sapiens
ttttttttttttttggatttgcaaatacagtttattttacagaaattcaacattataaacagcaggcacgtgccagcccgctcgcccccctccccccggccaactcccaggtgcagaccatgctatgcagagagtgagcagcaacgcgcccctactgctttggagtgagagtcgaaagccgagggaacctgcctgcaccacatcctgcctgccccacacacgcacacgcctgctcgctgcgcaggccaccaacagtctgtctgggcccagccagcgctggaccccattacatggatccagcccagttctccaattccttcatgtcgtcgtcctcctcttcttttttcttggcgggttttgatggtagggctatagagggaacatttggtagagggactgtttcgggtccactgatttccagcaaattcttgtctagttcctcctgttctagttcttctaattccgccatgagctcatcctcgtcaaactcttctccaaaccctacaggtttcgaaattgctgttgaaatctcctctgcaagttcttgctggtcagcaatgtcctgcattaactcatcaactttatcgatgtccatgttgtcatgggccgccttcatggccttggcggcatagcccatgttcttgagcacctcggtgttggtgttggcattctccagggcctcccgctggaactcgatggttgataatgtgccgtcgatctgcgccagctgcttctcatacctcttcttacgcttcagtgcctggagggccgcgcgcttgtttttggtgccgtgcttcttggcggccgtcagctcctgctcgattttcttctccaggaactcctgtttcttgcttaacatctcttccgtgtcccgcagccgctggatggcctcctggggggtcgggccgcccttgccggccttaccccctccagccccgaacagcttcccgaacaccgacatggttgctgctcgccgcgccggccttcgccgcccgctccggctcggctcggctcggctcggctcgggtcggacgaaatcgtcgacccgggaa

SEQ ID NO: 60277 - DNA, 1496 bp, Homo sapiens
gaattcccgggtcgacgatttcgttgtcaccccgactcaacgtgagacgcaccgcccggactcaccatgcgtgaatgcatctcagtccacgtggggcaggcaggtgtccagatgggcaatgcctgctgggagctctattgcttggaacatgggattcagcctgatgggcagatgcccagtgacaagaccattggtggaggggacgactccttcaccaccttcttctgtgaaactggtgctggaaaacacgtaccccgggcagtttttgtggatctggagcctacggtcattgatgagatccgaaatggcccataccgacagctcttccacccagagcagctcatcactgggaaagaggatgctgccaacaactatgcccgtggtcactataccattggcaaggagatcattgacccagtgctggatcggatccgcaagctgtctgaccagtgcacaggacttcagggcttcctggtgttccacagctttggtgggggcactggctctggcttcacctcactcctgatggagcggctctctgttgactatggcaagaaatccaagctggaattctccatctacccagccccccaggtgtctacagccgtggtcgagccctacaactctatcctgaccacccacaccaccctggagcactcagactgtgccttcatggtggacaacgaagcaatctatgacatctgccgccgcaacctagacatcgagcgcccaacctacaccaacctcaatcgcctcattagccaaattgtctcctccatcacagcttctctgcgctttgacggggccctcaatgtggacctgacagagttccagaccaacctggtgccctaccctcgcatccacttccccctggccacctatgcaccagtcatctctgcagaaaaggcataccacgagcagctgtcggtggcagagatcaccaatgcctgctttgagcctgccaaccagatggtaaagtgtgatccccggcacggcaagtacatggcctgctgcctgctgtaccgtggagatgtggtgcccaaggatgtcaacgctgccattgccgccatcaagaccaagcgcagcattcagtttgtggactggtgccccacaggcttcaaggttggtatcaactaccagcctcccactgtggtgcctgggggtgacctggccaaggtgcagcgtgccgtgtgcatgctgagcaacacgaccgccatcgccgaggcctgggcccgcctggaccacaagttcgacctgatgtatgccaagagggcgtttgtgcactggtatgtgggtgagggcatggaggagggtgagttctccgaggcccgtgaggatatggctgccctggagaaggattatgaggaggtgggcatcgactcctatgaggacgaggatgagggagaagaataaagcagctgcctggagcctattcactatgtttattgcaaaatcctttccaaaataaacagtttccttgcacggttaaaaaaaaa

SEQ ID NO: 60278 - DNA, 2976 bp, Homo sapiens
ttaacaaaaacggaggtaattaggtaaaacaaaaacgcccaggaaaagatcgcacttaaaggaacaaaagcacccaaggaggaaaaagaggcctgagatttccacggaattacaagtgaacttcctgtcctgggtaaacttccggaatcaacaacaggaagacccaatcagaatcttctccgggagccaatgggagagcacattacaaagagccaatccccagcgccgctgtcactgttatggtcctgtcagggtgccggcgtcgtggtgcttgggtggtcgccaccaagaagactttggtggggtagtctcggggcagctcagcggcccgctgtgcccgtttctggcctcgctcgcagcttgcacgtcgagactcgtaggccgcaccgtagggcgagcgtgcgggtcgcccgcggccgcctcggggtctgggcccagccgcagcctcttctaccgcggccggttgggagtcgccgcgagatgcagcctccgggcccgcccccggcctatgcccccactaacggggacttcacctttgtctcctcagcagacgcggaagatctcagtggttcaatagcatccccagatgtcaaattaaatcttggtggagattttatcaaagaatctacagctactacatttctgagacaaagaggttatggctggcttctggaagttgaagatgatgatcctgaagataacaagccactcttggaagaattggacattgatctaaaggatatttactacaaaatccgatgtgttttgatgccaatgccatcacttggttttaatagacaagtggtgagagacaatcctgacttttggggtcctctggctgttgttcttttcttttccatgatatcattatatggacagtttagggtggtctcatggattataaccatttggatatttggttcactaacaattttcttactggccagagttcttggtggagaagttgcatatggccaagtccttggagttataggatattcattacttcctctcattgtaatagcccctgtacttttggtggttggatcatttgaagtggtgtctacacttataaaactgtttggtgtgttttgggctgcctacagtgctgcttcattgttagtgggtgaagaattcaagaccaaaaagcctcttctgatttatccaatctttttattatacatttattttttgtcgttatatactggtgtgtgatccaagttatacatgaatagaaaaagatggtgttaaatttgtgtgtaggctgggaattcttgctgaaggaattggagaaaacctgttgctgcaaaattttacatgttccagatggaaagggaagtctaagcgctttttaaaacaatttttttttgtatttaattaagcaattgcagttatctgggatttttgggtcagaattttaaattctgtttgattctccatattccagtgaataaaatacaaaagcattgtgtttttaagattgtgtcgatattcacctaaaaacttgtgccaaaagcacctggattggtaattatatttcacttaaagggtaaatttgacaatatcttgataatcaaaagtgcaatttttttcttcaaaatgttttctccagcatcacagatcctgcagatatatatttatatttatacatatatatttatgaaataattcttactcacaaaatatatttctgataaacattaagatattaaatctgatgcacaaactttaatttggccattaatcttttttatttaaaaatttaaatttgtttttaaaattgtatatagtttttaaaatctcacacatgcttcgatacttccttgttaagaattcttaataactactaaaactgatttttaatagttgctgatatatatttggtttgtttgggtatacttttcaaaaccatttttgaatgtccaaacatctgatttaaagtttctgtttatctttctgaccaaaggagcaagaggtataatggatatggcattcattaaaatctttactatgtacaaaaacagtaatatttacagcatcagtaaatatttttaagtggtacttctaaatcataaaagttggggaaagagacctttaaaatcttgtggtgttgaacaatgttatatgaagtagaaaaaataaaatacttcccagttgtgtgttttgttttacagcaccatgtcctgtattacttgatattttaacaagtatcaggtactctctaacaaatgtacagtttttgctaagggaaatattaagaaatttttatcagtgaaatatttgttgcaaataatttcataggtttttagatacacctgtagttaatattactttgtaaagtaggtaaatcattttatttatgtccataaaatatcaaatgtctgttaactattagcaaattattgtattatcctttctggtctcacctggaagagtttcctgctgtcctcagtatgataacatggcgacctcttggtatgtatttctttagcaaacttacccatcaggaaatatccagcacctctgaagcaaacctacaaatgagtgtgttatcaagcccagccgtcttcctttcccctaatcccaaaaggaaagaaagaaaaacttattttaagctgcagaaaaagtgtggagcacttttgagctagaataatgtagaaaattacatgtactgatttttttaaaaacaggtgagaagcaccagagggacaggacttctagaagttagaataatatgaagtaatcaggaaatatctatgcctacagaagcagcaaccgtaagataaacatttgttacacttaagaaattgctgaggttaatactttgttataatggattataatatttgacattcatagtgttgaccctggaatctttcacagaaagcttgggggtcaggaccaggaggtagaattttacaaggcaataaatgaaggtattttaagatcacctctattaaaaaatggtttaatttt

SEQ ID NO: 60279 - DNA, 1877 bp, Homo sapiens
  misc_feature (1)...(1877): n = a,t,c or g
ttttttcaaaattctgcacgaggggccggggctgggtggcagcggccatggaccgcttcctttggaccagcggcctcctggagatcaacgagaccctggtgatccagcagcgcggggtgcgaatctacgatggcgaggagaagataaaatttgatgctgggactctccttcttagtacacaccgactgatttggagagatcagaaaaatcatgagtgttgcatggccattctcctttcccaaattgtgttcattgaagaacaggcggctggaattgggaagagtgccaaaatagtggttcatcttcacccagctcctcctaacaaagaacctggcccattccagagtagtaagaactcctacatcaaactctccttcaaagaacatggccagattgagttttacaggcgtttatcagaggaaatgacacaaagaagatgggagaatatgccagtttcccagtcattacaaacaaatagaggaccccagccaggaagaataagggctgtaggaattgtaggtattgaaaggaaactggaagaaaaaagaaaagaaactgacaaaaacatttctgaggcctttgaagacctcagcaaactaatgatcaaggctaaggaaatggtggaattatcaaaatcaattgctaataaaattaaagacaaacaaggtgacatcacagaagatgagaccatcaggtttaaatcctacttgctgagcatgggaatagctaacccagttaccagagaaacctacggctcaggcacacagtaccacatgcagctggccaaacaactggctggaatattgcaggtgcctttagaggaacgagggggaataatgtcactcacggaggtgtactgcttagtaaaccgagctcgaggaatggaattgctctcaccagaagatttagtgaatgcgtgcaagatgctggaagcactgaaattacctctcaggctccgtgtgtttgacagtggcgtcatggtaattgagcttcagtctcacaaggaagaggaaatggtggcctcggccctggagacagtttcagaaaagggatccctaacatcagaagagtttgctaagcttgtgggaatgtctgtcctcctagccaaagaaaggttgctgcttgcagagaagatgggccatctttgccgtgatgactcagtggaaggcctgcgtttttacccaaatttatttatgacacagagctaagggttttgtatttaaaatcctttttgtccatatgcttgcgtcatgtagaggttgtatgacattgagctaagagataaaccccgatcaattgagaatttattggaacttcacagtgcaatgtaaatctcttttaatttctcactaaatatggtccaggaaatttatttagtatacgcataggaaaattcagaaaagtgaatgccaatatgaatttaaaatcatgctatagtgcagaaccctcagagtttaacttggaatatagtggattttaacttgatcctcaaatctaatcattttataaagaagggaatttagttttgcagagaataaaaagagaagttgcatgttcagacaggttagattattattttggtgtaactgaaattcactgattgcacatgacaatgttgggacaaaatatactgcagcatgctatatgaggctcctccccagggcttttagaagcagtcatagacatgtcttcaacataccaaataaaatacctttaaaaatgaaataattttatttgacacatatatttatatatattctatctaggtttctctttngttttttttaaagtgatgatttcatggactgggcatttaaaagaaatggcaactngtggtccatttttggtttttccaaatgctgtggaatttttggaaa

SEQ ID NO: 60280 - DNA, 1821 bp, Homo sapiens
gcacgagcggcacgagtgagtgctgagcgcgaacccgaggagatgaaccctttaactaaggtgaagctgatcaacgagctgaatgaacgagaggtccagcttggggtggccgataaggtgtcctggcactccgagtacaaggacagcgcctggatcttcctgggagggcttccttatgaactgactgaaggggacatcatctgtgtgttctcacaatatggggagattgttaacattaatctcgtgcgggacaagaaaactgggaaatccaaaggattctgtttcctctgctatgaagaccagaggagcacaattctggccgtcgacaattttaatgggatcaagatcaaaggaagaactatccgagtggatcatgtgtctaactatcgggctcctaaggactcagaagaaatagatgatgtgaccagacaactccaggagaagggctgtggggctcgtaccccctcaccaagtttgtctgagagctctgaagatgaaaaaccaacaaaaaagcacaaaaaagacaaaaaggaaaaaaagaaaaaaaagaaagaaaaagagaaagccgaccgggaggtacaggcagagcaaccatcctcttcgtcacccagacgcaagacagtaaaggaaaaggatgacactggccctaagaagcacagcagcaagaactcagagagagctcagaagtcagagcccagggaggggcagaagctccccaaatccaggacggcctactctggtggagcagaggacctagagagggagctgaagaaggagaaacccaagcacgagcacaagtcctcaagcaggagggaggcaagagaagaaaagaccaggattagggacagagggcggagctcagatgcacattctagctggtataatgggcgttctgaagggcgtagttatagaagtagaagtaggagccgagataaatcccataggcataaaagggcccgacgctcccgggagcgggagtcttcgaatcccagtgaccgttggcgtcactgaagacttcagctgcacagtagatttggaaataattatgttttttaaatgcagtcaaattcagttgggtggttactatttttgtatctaaaacttctggggctggattcttttaatcccttgactatttagagtcattgggagggctgcagtttcaacagctagatatcctggatattgtttgcaccatccattgtccctgtaccagagtatgtatcctgaactttggttcataaatatggctcttgaacccatagaccccagttgaagatggaattttcaggaaagggaaaatactagataattctagaattctagtcttcgtgttagatgtttatagcccagcatcttgggacctttccagttactaggtttggacagcttgatgtgaacgaatgggataggatttttaaaatcagccagctccatgcccaaaccttcctgtttgcagaactttttaatgtcttttctttttcattaaaacttttttgttcgatatgcctctttccacattttttccttgcaatgtatttattatttatttgtatttaggtgaaattcacataacataaagttaaccattttaaagggaacaattcagtggcatttggtactgaacatccacagtgttgtgtaaccattgcctctgtctagttccaaaacatttttttatcatcccaaaatgaaaccctgtagccattaaacaagagctccccgtttcctccctcctccctgtccctagcaaccaccagtggacttcctgtttatgggtttgcctattctggatctttcataaaaatggaattacacaaa

SEQ ID NO: 60281 - DNA, 2896 bp, Homo sapiens
aattcccgggtcgacgatttcgtgctcctgccacagccgtcgccttcgcggcggctctccagccccgcgcctcagcctcggcgccgcatcaccgcgtcccaggcctccttccctccctctgccactccccctccctttcccgctcttcttgcccacccggccggcagagagagcctggatacgaagcaggcgggcttcagagtgggttggaaaaatggaggtgccgcgcctggatcatgccctcaacagccccaccagcccctgtgaggaggtgatcaaaaacctcagcctggaggccattcagctgtgcgaccgggacgggaacaaatcacaagacagtggcatagcagagatggaagaacttcctgtaccacataacatcaaaataagcaatataacgtgtgactcattcaagatttcatgggaaatggattcaaaatcaaaggatcgcattacacactattttattgacctcaacaagaaagagaacaagaactccaataaatttaaacacaaggatgttcccacaaaattggtggcaaaagctgttcccttgcctatgactgtccgtggacactggtttttaagcccaagaactgaatatacagtagcagtgcagactgcctcaaaacaagttgatggtgattatgttgtgtctgaatggagtgaaattatagaattctgcaccgcagactattcaaaagttcatctaacacaattgttggagaaggctgaagtgattgcaggacgcatgcttaagttttctgttttttatcgtaatcagcacaaagaatattttgactatgttcgagaacatcatgggaatgctatgcagccatctgtcaaggataacagtggtagccatggctctcctatcagtggaaaattagaaggcatcttcttcagctgcagcactgaattcaatactggaaagccaccccaggattcaccttatggaagatacaggtttgagattgccgcagaaaaactttttaaccccaatactaacttatactttggggacttctactgtatgtacactgcttatcattatgtgattcttgttattgctcctgtgggatcaccaggagatgaattttgtaagcagcgccttcctcaactaaattctaaggataataaatttttgacctgtacagaagaagatggggtgctggtttaccaccatgcccaggatgtcattttagaagtcatttacactgaccctgtggatctttctctgggcaccgtggcagaaatcactggtcatcagctcatgagtttgtctactgcaaatgcaaagaaagatcccagctgcaaaacctgtaatatcagtgttggacgttaatgcccacttttcttattcttactcagccccttttcctcccttaggagcattggtcctctgttgtccatttttatcaccagatgttttccactgaagcatgcacatgccactgtcaccaaaacaaacaactaccactttccaaatttcattcagaaccattttagtgttttcctattccctacccctcccactactttcaatgatgaaataccctaagttaagttctccttttgacactttattgcctagatgctgcaatgtttttatgtttcctttatgccaaacataacaaaacagttatatagactgctttagcaaagtacacaataatggcttataaatggtgtttaaatatgcattcattttaatctactgaacaaatattgggataactccaaaccgcatgaaagggtgtaattgcagcatgagttaaatcttgaagcctagaattgtcagcacttccaacttcttgtttgacagtgttatttatgttatttatattagctaacaggaaacaactactgtgtttcaacataataaatataatagaaaaatattttatttgtattgttgtataaaatatttacaatcatatagaatatatagagttacattttaatagcaactgtgtacatgtcacgaaaccatttcccttatcaaagatgtaatttgtaaacctcaaatagttgtgtatctgtcctgttagaagtagatgacttcaattaaacaaatttatgaaggacattattctgattcataaaagttataaaatattaggtaaatacagagaaaacaataagcctctgaaataagtctgtttctgaaatagtcaatagtcttcccatccaaactataagagaatgtgaatttcttcaacatcatacttaaacattacagaaaatagaaatacaaacaaggttggtacatgagagaaaatgttgaccttttacttccttttacaaaaatgaaaataataaacatgttttcgtataaaataacacaaaatgatatacactgaagttgatgaagcaaataaatattctgggcttctttttcaaggtatcaggggcaaacaatttccaaacttttgcattttgtacagaaggatgaataactacagctcatgggaaatgttttgactttacaaagtatagatgttggaacattaagaaaaatgtatattcccaatgaaaaaatagttatatcatcttatagtaaaccaaaagattagcaataatactatggacacattagattatatactacagacacatatctatccaaaatacctattttaaatttttaatacaatattttattttaatataaacatctgtcagttatagacaaagataataattcacaaagtacatgctatcagaatgaactttggtaaccagaaatgtaaaatttcaaataacggataaaataatgtgttatttttatagagaaagaaaaaaaatagcaacacaatctagtttattttagggtactgagagcctagcagacttaaaggacaaggtagtaaatgttttatcactcaaaaatcct

SEQ ID NO: 60282 - DNA, 942 bp, Homo sapiens
atttttaggtaagatgagggttcatccatggtgggtccaggccggtctcaaacccccgacctcaagtgatcccgcccgcctcggcctcccaaagtgctgggaccgtgggcataagccaccgcacctggccctttaacttgatttcaaagcaaaattatacaaatggaccctaacttctattatatatttaagtttacttcaaagatctattttatccttatccttagaaactgtgaggaaaaaaaaactatgttaacaaagctgatgacaaagattctttattatataagagatcctattatctgatcatattacctaataaattatatatgaatgttcaataataaaaataatgttcaccaatatgtcacatgcatggttagtgttttattctttgaagactgcttctaaaacatcgcactaagtaaagctgaaaggataaagtttaaaatagtttttaaaggataagttataacatatgtaatgactgtccactctacaaaatcttgatcttagagcttatgatacacccagttggcagtagcacccaggttttccaaatagccagtcatcacttttctcttgtctgcatagacttcttctcattagctgccttctgcttttcttgcatgatctcagagtccctctgctttctctgagaggcagtcaagctatcctctttcctctttcccttgctaatttcctgggttttcttcatgtttttctggcgggcaagttctcgttgatttccacgggccatgccgaccaccaacggagcctggaagaagagcaactcggaaaagcaacggttctctggcactctgggataccgtcaccaccgctgaccgggaaggctgagccctcgtgggccctccgcccggctgcgcctccgctctgctccgcgaattccaccacacggatagtggtctacgagggtttcaa

SEQ ID NO: 60283 - DNA, 2827 bp, Homo sapiens
ttttttttttttggccatagaaacgtctttattgaagaggacaggagtcatgctgagtttggggacatgcagtgaaggggcagtcgtgagctgtccttggtggtcggggccccaggtccgccctggaccccctgggccttcaggttctccctcgagctgttggtctggcccaggtgctgtggggtcctttgaggccagtgactagaacgtagattgaaatcggggttccaggatttgagatcccctcagggccttggggccttccatttattagagatggaggctttaggatttggggttcccttagggctggggctcttggaatttggtgtcttgaaacccatggactcggggcattgaaattctccagtttccagggatgggaattcctgtgtggggtttcctggtgcctgtgaatagggcttgaggtgtctgggagcctggaatgcatatcctgactgcagtctcctccataccaggcacaaggacctcatgattgggtttcctggggacttgggattggattttcaaatttgggattccctggggatttgggattccatgatttgggggtcctaggagttacggcattggggtcttctaggggctgtaggacttgagggcacaggggagtttgggacgtgtgtactctagggtttgggatccccagagtcctagaatggggcctccaaattttggggtcccccaaagggggaagtcgttacttaaaaaatagagaattttctgggagtctggccagcacaggagctgtgggccatgtggggtgggcttcatacaaggcactgggggtttcttgagggtgcagagggtaggaagacttggggggtcctgtaattagcacttccaggactgttttggtgtctgtaaattaggggtgacagtgggctggttatggtgggtttcttcttgagggataagaacaagggtctttgttaatgaaggaagtctctgattgaggggttggaatctaagggcttcagggtgaccatggggtcacgacatcttgagaggactgatgttaaatggggaacaatgacatgaatgtctgttactcttttgctttgggggtgtgacctatgtttatttcaagaggacttaaggggcagtgtttgttaatggggaggtttctgatccagggttgggtgattcaagaatgttctgttgtaatgcattatgtggagagggtcaccatcatttggggtgatatggaaatctgttaatctgggaatctgctctgaggggttggggatagggactagcctgaaggtgctactcagggaatctctttctgggtgacatggggtctgtatttgggggttattatgggagtatctgttaataatggggcctcaatgatcgagggctggctaacaggggtctctactctggatgtgttactgggaatctctatctcagggtgactcagggctcctcgggtgtcaggagatgctagtggggactctgtctctttgtcaggtgtccagggcctctaagactgcatctccgccctcagcatccaggggaaccagcagcagaacagcaacctggaaatggagttctctgatgcaatgtcctttggggtccggactgtggtgaaggtgcgtttgggctgcgtcattgtcacttgatgcacttttttggctccaacgctgtccccgggggaatcagtggatccgccaatcctctgaatacgggatgctggtgcgaagaccccatgcctcggggggcaagtgaagtaccggacaccgaagacagagccatcatgcttgcctgtgggctggtccagctcaatgccataccagtaacctggggcaaagtctgtcttcccgtagaagcgcacgatcccctgcttctggcccgcgacaaggacctggtctccaacctcagccttggccccgtcacgctgctgcaagctgcccagagatggggatgatggggtcttcttcttgcctttgtgttccctgcggcctttgccggtgacacgggagaagtccatccggggggtccggggtgtggaggtgacagaggaggggggtgcgtccactgccttggagatcttggacacggaggcaaagagaccctgcttgggagggcagatgaagtaccgaacgcccccaacgctgccatcgttcttgccctcaggttcgtccagctccacgcccacccactggccgctggcaaactccgtggtcccacagaaccgcagtgtgcccgtcttctggccatccagcagcacgcggtctcccaggcgcaagcccagtgcgctaagcatgagattgcctgggacgttgtcatagttgggtagcgtgaccttggggagggcgcaagatagtggcactgcctcttccagaagcgtccgcagctccttggccaccagtgccgcctctgccttgtccagggacatgtccataggatctgggaccacctccgccggcacctgtccttttcgattcctcagcgcagggttggcgccgtgctccagcaaacatttggcggcgcccaggcacaggctggaagcagcgatgtgcagggctgagccgtggttgaagtcactgcacgtggagttcaccactcgcggcctcgcacccttcagcagcacacgcacgaggtcgggcacatcaaaataggccgcgtagtgaagcgcgttcatgttggtccagcggatgcgcagcgtcacatgctgcgcccagcgccagcagctgctgcgagaggcgcacggctgccgcggggtccccgactccgtgggccccagctttgcactgcatagtggagcagtgtcatgtcggtcagcccgtcacgatcgttc

SEQ ID NO: 60284 - DNA, 2346 bp, Homo sapiens
tggttcaggcgggtgtcttcggccgggcttgggaacataaaagtttgtttcaccacgtaagccggacctcgcactccggtcccggtctcgtcgccaagatggtgaagcccaagtacaaaggacggagcaccatcaacccgtccaaggccagcacaaacccagatcgagtgcagggagcaggaggccaaaacatgagggaccgggccaccatccggcgcctgaatatgtataggcaaaaggagcgcaggaacagtcgtggtaaaataattaaacccctgcaatatcaatcaacggtggcttctggcacagtggcaagagtagagccaaatattaaatggtttggaaacacacgtgtgattaagcagtcatcattacaaaaatttcaagaggaaatggatacagttatgaaggatccatacaaagttgtcatgaagcaaagcaagttaccaatgtctcttctccatgatcgaatccggcctcataacttgaaggtgcacattcttgatactgaaagttttgaaactacatttggccctaagtcacagaggaaacgaccaaacttatttgcaagtgatatgcagtctcttatcgaaaatgctgaaatgtccactgagagctatgaccagggcaaggatcgtgatttggtaactgaagacactggtgtgagaaatgaagctcaagaagagatctataaaaagggacagtccaaaagaatatggggtgagctctacaaggtgatagattcatcagatgttgtagttcaagttcttgatgctagagatccaatgggtactcgttcccctcacattgaaacttacctgaagaaggaaaaaccttggaaacacctcatttttgtacttaacaaatgtgaccttgttccaacctgggcaacaaaacggtgggttgctgtcctctcccaggattatccaacacttgctttccatgcaagccttactaacccgtttggcaagggagcattcattcagcttctgcggcagtttggaaagttgcacactgacaagaaacagatcagtgttgggttcattggctatccaaatgttggcaagagctctgtgataaatacattgcgttctaagaaagtttgcaacgtggctcccattgcaggtgaaacaaaggtctggcagtatattactttgatgcgtcggatattcctgattgactgtccaggtgtggtttacccctctgaggactccgagacagacattgtgctaaaaggagttgttcaagtagaaaaaattaagagtcctgaagaccacattggtgctgtacttgaacgagcaaagccagaatatatcagcaaaacatacaagattgattcttgggagaatgctgaggactttcttgagaagctcgctttccggactgggaagttactaaagggtggagagcccgacttgcagactgtgggtaagatggtcctcaatgactggcagaggggccggattcctttctttgtcaagccacccaatgcagagccacttgtggccccccagcttctaccctcctcatctttggaagttgtcccagaagcagcccagaacaatccaggggaggaagtcacagaaactgcaggtgaagggtcagaatccatcattaaggaagaaacagaagagaacagtcactgtgatgctaacacagagatgcagcagattctcacacgagttcggcagaactttggtaaaatcaacgtggtgcctcagttttctggggatgacctggttcctgtggaggtgtcagatcttgaggaagagcttgagagcttttctgatgaagaggaggaggaacaggagcaacaaagagatgatgcggaagagtcttcctcggagcctgaggaggaaaatgtgggaaacgacaccaaagccgttattaaagcactggatgagaagattgccaaatatcagaagtttctagacaaagccaaagccaaaaagttttcagcagtcagaatatccaagggactgagtgaaaagatatttgcaaaacctgaagaacaaagaaaaacactggaagaagatgtagatgacagagcaccttccaaaaagggaaagaagcggaaggcacaaagggaagaggaacaggaacattcaaataaagctcccagggcgcttacatcaaaagaacggaggcgagcagtacgacagcaacggccgaaaaaagttggtgtgcgctactatgaaacacacaacgtgaaaaataggaacaggaacaaaaagaagaccaatgactcagagggacagaaacacaaacgcaaaaaattcagacaaaagcagtaatgtttaaaaggtttttattaaattatacaaaaacaggcagttaaaaaaaaaa

SEQ ID NO: 60285 - DNA, 2338 bp, Homo sapiens
cctgcacgaattcggcacgagcggtggcgggattctgccgcgtgcgctttcccgccccgcctcgcctagcctcgtcctgcgctcgccacgcctcgggctgtccgttgggccacgcagaccgcgctgcgctcgctccgtcgcggctccgcgtgccccaccttctggctagttttttctagagcccaggctccgcccgtttcccgcttccagggcccggttcgttcccgcccgcacccgtccctctcctctgcacccctgctgcttctgctttgaaggcggaggctccatgttgtcccctcagcgagtggcagcagctgcctcaagaggagcagatgatgccatggagagcagcaagcctggtccagtgcaggttgttttggttcagaaagatcaacattcctttgagctagatgagaaagccttggccagcatcctcttgcaggaccacatccgagatcttgatgtggtggtggtttcagtggctggtgccttccgaaagggcaagtccttcattctggattttatgctacgatacttatattctcagaaggaaagtggccattcaaattggttgggtgacccagaagaaccgttaacaggattttcctggagagggggatctgatccagaaaccactgggattcaaatctggagtgaagttttcactgtggagaagccaggtgggaagaaggttgcagttgttctgatggatacccagggggcatttgacagccagtcaactgtgaaagactgtgctaccatctttgctctaagcactatgactagttctgttcagatttataatttatctcagaacattcaagaagatgatcttcaacagctgcagctcttcacagaatacggtcgtctggcaatggatgaaattttccaaaagcctttccagacactgatgtttttggttagagattggagtttcccttatgaatatagctatggactccaaggaggaatggcatttttggataagcgtttacaggtgaaggaacatcaacatgaagaaattcagaatgttcgaaatcacattcactcatgtttctccgatgtcacctgctttctcttaccacatccaggactccaggtggccacaagccctgactttgatgggaaattaaaagatattgctggtgaattcaaagagcagttacaggcactgataccgtatgtattaaacccatctaagttaatggaaaaggagatcaatggctcaaaggtcacctgtcggggactactggagtattttaaggcatatattaaaatttatcaaggagaagatctgcctcaccccaagtccatgcttcaggccactgctgaagcctacaacttagcagctgcagcctctgccaaggacatttattataacaacatggaagaggtttgtgggggagagaaaccttatttgtctccagacattctagaggagaagcactgtgaattcaaacaacttgctctggaccattttaagaagaccaagaagatgggtgggaaggatttcagctttcgttaccagcaggagctggaggaggaaatcaaggaattatatgagaacttctgcaagcacaatggtagcaagaacgtcttcagcaccttccgaacccctgcagtgctgttcacgggcattgtagctttgtacatagcctcaggcctcactggcttcataggtcttgaggttgtagcccagttgttcaactgtatggttggactactgttaatagcactcctcacctggggctacatcaggtattctggtcaatatcgtgagctgggcggagctattgattttggtgccgcatatgtgttggagcaggcttcttctcatatcggtaattccactcaggccactgtgagggatgcagttgttggaagaccatccatggataaaaaagctcaatagcatcttaacgtgaagatcaaacaagaacacaacaagcccctactgatttctgggtttctgccacggccacaggttcatatccagaggaatggcagatctgagacgatccaggaagagctaaaacatggccctgtaataaatgagcagacctctcctgtggtttcaaattattaaacacacttccatttctcttggaagcatttcttttccttgctgttataaatgcaagcctgtgtctattttcatattactctgctttgtgcactttatggaggaggaagctagaggaaaaatggaaatgcggcttttaagttctttatgtgccacttagtgccttttaagaaagattccatggttttgcacacacgatggggaggggatggaggataacctcatgaaaggtgccgttttcgggtgaaacttgac

SEQ ID NO: 60286 - DNA, 2274 bp, Homo sapiens
ttttttttttttacgattaggttttggcctttagtctgaaaaagtgttgattgaaagtgtacaacagagagcgggtgcaagcggccgagggccatggagccgccaataaaaaagaatgtccttaaataaagttcacagagtaaaaaccagaaccgccagtccttccctccaacacaacagagcacaggcacagaaccggtgatgagcccgaggagcagaggcggctgggaaggacagcagaggctcccggctgcagtgtggagggagagccctctttggaatgggcggagtgaagccacccagctccccctgcacacctcatacccactgctaaggctaaaggaaaaagacaaaactcagtctcaggtccggagggctcagaaaacagtctaggtgggcaggggtctggatgactgctagtctcgcttggccttcttcttcttgtcgctgttgccattttcttcagccccctcagtagagagcacctcctctagttttcgcttgccactctctggctggagctctgctgtgtttcggggcttgaagcaaatgatgatgcaggtcatgttgtcacaccctgtaccatccccagaagtgtctggtgccaggcactgatccagcagctcttccacaatggatgacaataaccgaagctccccattttcatcacgctggctgatctttgattgaatgaaatctacaacttcctggctgctcatcacattccagatgccatcacaggcaatgaccatgaattcatggtcgtcagtgagagtcagcaccttgatgtcaggaagggctgaaatcatctgttcctcaggtggcaggttcttgtttctcttatagaagtggtccccaatggctctggagaggttgaggcccccgttgactcgcccatccatggtgaccttgccaccagcattcttgatgcgtgctagttctacttcatcctctggtttgtgatcataggacatgtctaaagctttgccagcctcagataccacacagcgagagtctcctgcgttggctacaatcaactgcttccctcgtatcagggccaccaccgctgttgtaccactgtcagagccaggctcctctttgccttccatccctggcaccatcatctcttcttcttcttcttcatcgtcctcttcagcctcctcggtgtcatcctcatcttcctcattctctgcctcctcactgctgtagccatcctcttcctcgctgcattcctcactgtcttcctcttcttcctccgcctcatctgactcatcctcactgtcctcaaagaacttggacttagcaactcgaggcagcttgtcagaggctgaagagcaggaaggcccagcctcaccagtgggaatgccaggctcaccaacttggcctgcctcagtcccacgttccgagttggaggaaaagcctgtgtaggccttggctgtggggccattttcttgtgaaggagtttccctagttgagtcctcaggtcctgcctccccattgaggccctgggaccctggttcctcgcctgtcccacctccagatttgctgtggggagggcccttgtgacagttctgcccgtagcgtgtcagcagctcttcaatagtcatggtagcctcttcatgcagcagtgcagcctcctcattgtccacatcatcttcatcagctactttttctttttcatcttcatcctcagtgggtcgccctgcaatctgtgccagctctttaatgacttcttcagtggtcaatttggcgtcaatagccaagaaggcatcttctaaagccttctgtagcttgccttccttgtaggccttctgatctttgatgatatcaggaagatatttggcacagtacaaggcaacttcctcccctccatgtccatcgtagacagaaaacatggctgtctcactgtccagctcaggaatacagttgtgagcatcctccatggagacgcgccagccttgcatggcggagaagccgtagggcagcggcaggcgcggggcgccgaccccgtccccggagcacttcaccgtgttgggctgggagaggtaggcacccatggcggcggctggccggcggcctcaggtgcaggaaagctgggcgcgacccgtgctcgtgccgaagccccgggggtgcgcgcggcaggagcaggccccgcggcgcgaccgacgcaaggtgccggtgaaaggcgcgaggccggccaggaggcggtaacgggacgggagctgtgagggagcggaagcgcggggggggaagaataatttaattaaggatcct

SEQ ID NO: 60287 - DNA, 705 bp, Homo sapiens
cgcacgagcttatctccttcgcagtgcagctccttcaacctcgccatggcctctgccggaatgcagatcctgggagtcgtcctgacactgctgggctgggtgaatggcctggtctcctgtgccctgcccatgtggaaggtgaccgctttcatcggcaacagcatcgtggtggcccaggtggtgtgggagggcctgtggatgtcctgcgtggtgcagagcaccggccagatgcagtgcaaggtgtacgactcactgctggcgctgccacaggacctgcaggctgcacgtgccctctgtgtcatcgccctccttgtggccctgttcggcttgctggtctaccttgctggggccaagtgtaccacctgtgtggaggagaaggattccaaggcccgcctggtgctcacctctgggattgtctttgtcatctcaggggtcctgacgctaatccccgtgtgctggacggcgcatgccgtcatccgggacttctataaccccctggtggctgaggcccaaaagcgggagctgggggcctccctctacttgggctgggcggcctcaggccttttgttgctgggtggggggttgctgtgctgcacttgcccctcgggggggtcccagggccccagccattacatggcccgctactcaacatctgcccctgccatctctcgggggccctctgagtaccctaccaagaattacgtc

SEQ ID NO: 60288 - DNA, 2708 bp, Homo sapiens
gcggccgcgctctgactcgctgtgcgccccgcttccgtcgggcggcgggaggcggcggaccgagagccggagaccggcgccgcgggacggaagcgagcgggcgcgggcgccgcgcagatggcctgggcgagccaggtctgaggccccgctccccgaaacgtgaccatgtggattcaacagcttttaggactcagctccatgtccatccgctggccgggccgccccctcggaagccatgcctggatactgatagccatgtttcagctcgccgtggacctgcccgcctgtgaggccctgggcccggggccggagttctggctcctgccgcggtcgccgccccggccgccccggctgtggagttttaggagtggacagccagcgcgggtcccggccccggtgtggagcccccggccgccccgagtggagcggatccacgggcagatgcagatgcctcgagccagacgggcccacaggccccgggaccaggcggccgccctcgtgcccaaggcaggactggccaagcccccagctgctgccaaatccagcccttccctcgcctcttcgtcctcgtcctcgtcctccgcggtggccggtggggccccggagcagcaggccctcctgaggaggggcaagaggcacctgcagggggacggtctcagcagcttcgactccagaggcagccggcccaccacagagactgagttcatcgcctgggggcccacgggggacgaggaggccctggagtccaacacatttccgggcgtttacggccccaccacggtctccatcctacaaacacggaagacaactgtggccgccaccaccaccaccaccaccacggccacccccatgacgctgcagactaaggggttcaccgagtccttggatccccggagaaggatcccaggtggggttagcacaacggagccttccaccagtcccagcaacaacagggaagtcacccagcccccaaggattctgggggaggcctcaggtctggctgtccatcagatcatcaccatcaccgtctccctcatcatggtcatagctgctctcatcacaactcttgtcttaaaaaattgctgtgcccaaagcgggaacactcgtcggaacagccaccagcggaagaccaaccagcaggaggagagctgccagaacctcacggacttcccctcggcccgggtgcccagcagcctggacatattcacggcctataacgagaccctgcagtgttctcacgagtgcgtcagggcatctgtgcccgtgtacaccgatgagacgctgcactcgacgacgggggagtacaaatccacatttaatggaaaccgaccctcctcttctgatcggcatcttattcctgtggccttcgtgtctgagaaatggtttgaaatctcctgctgactggccgaagtcttttttacctcctgggggcagggcagacgccgtgtgtctgtttcacggattccgttggtgaacctgtaaaaacaaaacaaacaaaacaaaacaaaaaagacaaaacctaaaactgagctatctaagggggagggtccccgcacctaccacttctgtttgccggtgggaaactcacagagcaggacgctctaggccaaatctatttttgtaaaaatgctcatgcctatgggtgactgccttctcccagagttttctttggagaacagaaagaagaaaggaaagaaaggaaccagaggcagagagacgaggatacccagcgaaagggacgggaggaagcatccgaaacctaggattcgtcctacgattctgaacctgtgccaataataccattatgtgccatgtactgacccgaaaggctcggccgcagagccggggcccagcgaatcacgcagagaaatcttacagaaaacaggggtgggaatctcttccgatagagtcgctatttctggttaatatacatatataaatatataaatacaaacacacacacacactttttttgtactgtagcaatttttgaagatcttaaatgttcctttttaaaaaaaagaattgtgttataggttacaaaatctgatttatttaacatgcttagtatgagcagaataaaccagtgttttctactttggcaactcacgtcacacacatattacacacatgtgcgcatacacacacacaatacacatacatgcatatagacgcatctattggaaatgcagttccacaggtgagcatgttctttctggtgacctggtattccatcaccattcaccccaggggacagcctcgaccgagacaaggaggcccttaaatgacagcctgcatttgctagacggttggtgagtggcatcaaatgtgtgacttactatcttgggccagaactaagaatgccaaggttttatatatgtgtgtatatatatatatatatatatatatatatatatatatatatatgtttgtgtgtgtatatatatatatatatatatatgtttgtgtgtgtatatatatgtttgtgtatatatatacacatatgcatacatatgattttttttttttcatttaagtgttggaagatgctacctaacagccacgttcacatttacgtagctggttgcttacaaacgggcctgagcccctggttgggtgggtggtggattcttggacgtgtgtgtcatacaagcatagactggattaaagaagttttccagttccaaaaattaaaggaatatatcctt

SEQ ID NO: 60289 - DNA, 917 bp, Homo sapiens
ttttttttccacagagcaaaaattagattgaattagctttgatgtagtacttgtttaagcacagatttacgttgtcttagagagtaggagattgtatagaatctatgctcgtagtggactatatagaaactagaaatgcagttatactgatgtagtgcagtttgtgggaaatcaggaatggtgttctccagaatacatgaagattctcattgattgttgcaaggaatcacgaaagagatctttggtccaaagaaaacgtcttttgggcagcagagcaattcgctgaagttgcagtaacagatcatctcacatcccttcccatcccagaaatgatcctggacattgacatcaatctgtgtcaggtcagctactccttccggaaggttgtgacagttgtgatcttttagtatctttctgtagcaagagaggcgatttgcaggcatggcttgaactcctagcagcaaagttagcccaatggtgaaaacaagtaccatcagtttcattttggcttttggccctttttcttctttccttttggtcttggcagaggatgcttcttaaatgctcacactcactgggtgagtttgggcaaaaggagaagagaggaggtgctggaaggagcttctttacaaatgaacctttgtctgccttgtctctggcctgggatcgacagactcgctgctccagcccaggactgtggggaggaggggagtggaaggagacaaggctgcaaggactgcctcctttggaagtgttcagtttgttccaaaccaggcgagaacgaatagaacagcttctttacagagggaaataactagcctatacaagaacctcagggaggcagactctggtagcaataaaacataaaacctgagggattttaaaagaacacagcgtgatttttcccttaagaaaag

SEQ ID NO: 60290 - DNA, 2404 bp, Homo sapiens
ttttttttttttgtagaaagagacatttaatacttctgtttacaaaattcaggcgtacatttcagtttgccctggaccgtgcccaaagctgtgtgctcatctctgcgcccctcatgtacttctgacgaggggggtgcagggcagggcagagcagagcctggggtccggaggcttcactggaccacagggggaggggaatgtgaatgtggcctggcccagagaactccccatttcatcgattttgcattgggcgatagaggaagcagatgtcggggctgcctgccttggtctagaggagatggctggggccacttcccacagggtgaagtggcagcggctcagcaaggggagcctggccaccaggggctgggacatgcgctcactggaacctttgtgcttggccctcggcagcgcggctgtggtcccgtgtgaggtgtgctggggtgggtgtgggtggctggtggtggcagcttgtgccagagtgacacaggcctccctgggttgggatgggggcagttaaaaagctgaaaaggtacttggctttctgagggcggggcttgggaggcagggccctgcaggagaccatgttctctgtcctcaggcagatcccagctggcctctgtccccgggctgcaagctgacagcaggcccgggaggcggtgaggccctctgccctggccttgaggagaaggagtgcgtgtgtgaggcgggggtgcattggccctggagtagggccagggcccatcaccagcaccaggctgggagggatttaaaaccagggtcctatctctgagccaccccatggggaccctcgatcccatcctgttaaggctgcgggactcgagggtaggcagtgggccgggcccccgtcgggtcaggacggaggtgggggctgccccagaggaacattagtgtttctaagagcaccttagtgttgccccgcctcggccagctgggcgagaagttggggagcgggggatgtaagtggcgcccatggagtggggaagggagccgtcaccgttgggagtcagcgctagtgtaaacaggcatccccacccacccagataagcccccccacccaagtgtggggtcctgctcagggagtacctcaagggccggggcccaggtggcgccggcaggctcagacaccgccctggcagcaggggctccgtggaatgcaggagacccagcagggggtgccggccagtgtggacggaggggcggggcggggacacgggtgagtcactgcggcaggggcacaagcacctccacgtagctgagcgggaagaagcccgactggccgtccagcatgccctcgtaccagttctcatcgatctggttggtcagcgtgatgacgtcgccctcatggaagcccagctccccgtcgttctcgggctcgaagtcgtacagcgccttgcagctcggctggtccaggggcggcatgctccggctaggggtccggatgggcttgtcggaagatcggaaagacgatgaagctgcgatcttgggggctgtggtgcaggggaagcccccgttggactgctcaggctctccaaggtcaaagggctcccggggcttcggcttatactcccgcttagggcgtgaggaagcttcccgcatcctgcgcttgagcttctccgccagctcgtccaggatctgcacggcctgccggtggtagtccagctgtgcatccaccagggccgagagctgactcacctgctcgatgtcagtctccaggaggttgtgcatgctggtttctgccacctccttggactcctcgaacttctccagcgcctggcgtagctcctcatcggggatcttgccctgccgcttcttcttgtagtcaaagtccaggcggcggccctccagtttcttcaggtggtgctggatctccttcaggtctttctcgcacaggttctggagggggtcaatgaagttctgcttgacctcgatgtccagggagtccttcacctctgccaggcgcttcatggactcgccggcatccagcaatgcgtcaccaaagttggactcgccgcccagctccttcccgtggcggatcatgcactcgcccagaagcccctccgactgcgggtagccggggttcttcacctggccccggatcttggacaccgtgttgagcatggtcagcttagcccgcgaggctgggttgggctgcaggtactcgatggtcctggccagcacttctgtcaccgccttgctggtgacatccaccttcttctccatctctttgaagtcatcatccagcttggtcccctcggcccctccgaccttctcactgaccagctggctcgccttgtagaactgcttcttcagccccgccaccgacatgctgccgcccgccgcagagcctcccgcccggaccgcgccagcgacaggcacgaaa

SEQ ID NO: 60291 - DNA, 694 bp, Homo sapiens
  misc_feature (1)...(694): n = a,t,c or g
tgaggtcagcgcgtagagttcgaaatcactaacggtgccaaggcccttctgctgcaaacgtaatcgctctgtaagatacgtcagcaagaattcaaaacccgcttaatcagcgggttttttttggtctttagtgtgcggntgaggccgaaaacagccagaatgccagtgcggtcatggcaaaagaccccagaaggttgacgaaaacgttcagtaatgcccagccaaagcggccctcttgtaacaaaaacaccacttctgccgaaaatgttgagaaggttgttagaccgccacaaaatccggtggtgattaatactttccacactggatcaatgttcgtcatcctgctgaaccatgcgaatcctattcctatgatgaatgccccaatcaggtttgctgtcagcgtccccaacggaatcgcctgatgcagtgggttaaatcgcatacttagcagccatctcgccacgcttgcggtccccccgccaataaaaactgctaaaagaagttgtaacgctgcaaaatcctgctatttgatttgtatgagtgataagtgtaacgccgaataatcgtcgttggcgaattttgcgcctctgacaggaggtggcaatgctggttgccgcaggacagtttgctgttacatctgtgtgggaaaagaacgctgagatttgtgcctcgttgatggcgcaggcggctgtaa

SEQ ID NO: 60292 - DNA, 668 bp, Homo sapiens
tctgcaggaattctttaacctttgaccttcggcattgcgatgtctttcaggccaccggcgttctcaacgtgggtatatcccatctcgctaaggatctcttttgcttgccctgactggcgtccggcattgcaatacactttcacggtgtcgtttttatccggaacggcggtggcaatgcgctctttcacttccttcaggggaatattgatggccccctgaacgtgctcttgctgatactgctctggaacacgaacatcgatccagtgttcagcggcgaaaacgggcagtgaaaacaccagtgccagagcaagtaagccttttttaaacatgtaagcgtccttctatggatgaaaattgccatccattatacgcctgagatttaacaatttttgcgaaactcccctcaccttttataacgctgtgccagtttattagcagcccgacttaacagcggttccagcgccacagccagcaacattttcagcggtcggcgagcaactgattttatcgcccagcccgccacacccgccgggccatagcgcagtgcggtaagaagtaccagcttgcctgctaatttgaaaccaggctttaccttttgcccggcctgttgccagcgagtatccataactttcctcacagttgacggaaacggctacgaaacgggaaag

SEQ ID NO: 60293 - DNA, 1988 bp, Homo sapiens
  misc_feature (1)...(1988): n = a,t,c or g
ttttttttttttagatttgcattcccgatcttgggtttattcaacacaattcttccactctacacaacaaagtacaaacacaatgtcatctaaaatgctacaaaggtataaaactcaaaagagaaattttatagtactgactgtacaatgaaagcaaaaaagaaaaaaaataaaagcaatgtacatgttgccaagataacctgaaagaccaccatgaacggcaggcacaaccatggctgcgtgatgaccccgcagagctggctctcaactcactcgccaatttcagagtacagtggtggggtgcggtgtgtgcatcggtgcacggacagacagaaccacgagcagcaactaccatgggtgagaggatctttgagggggtgtgacccttgaggtcagaagaggcctcgagaggccaggcctaacagggttggcagctgcactaaagcctggggcagctccctttccaaaaggacactgcccagcaacagcaagggcacggcctggccaccatcccaggtcatcggggaagggaaaagtgtgctcccaggtaagcagggtcaaaccacccccaagagcctcacttttccctggtggctctgccactgaactgactcttagaaaccggaaacggatgagctttctagccagaaaaccggagggaatcttgacaggcacacagcatccaaaccaacagcacttctgcagccggggcccggctggcagaggggtgctgcctgctgcctgcaaatcctgccagagtcaagggtttgctttcctactggtcttcctttggctagaaaagtgacaaaactgagctgggtggggtataagttacaggggcgagagcttcagtggcctgtttatcgggaggagttggagctggagcggctcctgtggcggcggcggcccggggaccgtgatctccggcgcacgggggacctgcgcctcggggagcgggaccttctcctcatccgtgggggagacctgcgccacataggcggtggtggcaacattctcctgggagggctgaatctcctggggggtggcctaggccagggggccagcacggcggtggcagtgatctcctggccatcaatttgtcctccatccatgtgcttcagcgccttctcggcttcatctggattctcaaactctacgtacgcatagcctttggacagatggggatgcatcctttccacgggcatgtcaatcattttaattttcccataggtggaaaatatctccatgatgtgatcctttgtcacattccgggtgagtctcccaatgtgcactttggtgggcttaggagatgggctccgccttttcctctccttttcatctcttttaggtggtttggatttggagcgggagcgcctcctgttgtcgtgtctgcgccgagaaggacttggagagccagaagagctgctagagctggagctgcgggaggtgctggagcttcctgagcggctggatgctgaggaagagctggagccactgcttgagccagtgctggtgctggagcctgagctggaagtcgagctggaccgagacctggtactgctgctaccactggaagcgctgcgcctctttcgggttttgtcccggccgcgatccttctcactcgactccttggtggcccctttatcttttgagcgatccttggacttctcatctgagcggtctttgcgtttggtaggtgaaggagccctagtgctggactttttattattttctttgactcctagcaagctcttctttttcactcctgataaatccattctccccttctgaggtgttcaaagcagcaatggcggcctcacttatctgaactctcacttctaacttgattctgagaaacgatccctaatcgattgcaatttacgccaaagagcagcatcttcccgccgccgccacctcctcctgctttcctcagccgccgaggccccccttctgtcgtcttctagcaggatagtagtatagcnacgtat

SEQ ID NO: 60294 - DNA, 704 bp, Homo sapiens
atccttaattaaattaattcctccccccccccccccggcaggctccaggggcggggcgtggccggggcgcaacgacgggcgcggaggtccggccgggcgcgcgcgcccccgccacacgcacgccgggcgtgccagtttataaagggagagagcaagcagcgagtcttgaagctctgtttggtgctttggatccatttccatcggtccttacagccgctcgtcagactccagcagccaagatggtgaagcagatcgagagcaagactgcttttcaggaagccttggacgctgcaggtgataaacttgtagtagttgacttctcagccacgtggtgtgggccttgcaaaatgatcaagcctttctttcattccctctctgaaaagtattccaacgtgatattccttgaagtagatgtggatgactgtcaggatgttgcttcagagtgtgaagtcaaatgcatgccaacattccagttttttaagaagggacaaaaggtgggtgaattttctggagccaataaggaaaagcttgaagccaccattaatgaattagtctaatcatgttttctgaaaatataaccagccattggctatttaaaacttgtaatttttttaatttacaaaaatataaaatatgaagacataaacccagttgccatctgcgtgacaataaaacattaatgctaacactttttaaaaaaaaaa

SEQ ID NO: 60295 - DNA, 1748 bp, Homo sapiens
cacagagctccctcccaggcccgcgaacttggccattcagccgccgctgtccccgctgcgcgccctcgcgcctctgcctgagaagccaggcgctgttcccccaccccagaagaggatggcaaaggtggctaaggacctcaacccaggagttaaaaagatgtccctgggccagctgcagtcagcaagaggtgtggcatgtttgggatgcaaggggacgtgttcgggcttcgagccacattcatggaggaaaatatgcaagtcttgcaaatgcagccaagaggaccactgcctaacatctgacctagaagacgatcggaaaattggccgcttgctgatggactccaagtattccaccctcactgctcgggtgaaaggcggggacggcatccggatttacaagaggaaccggatgatcatgaccaaccctattgctactgggaaagatcccacttttgacaccatcacctacgagtgggctccccctggagtcacccagaaactgggactgcagtacatggagctcatccccaaggagaagcagccagtgacaggcacagagggtgccttttaccgccgccgccagctcatgcaccagctccccatctatgaccaggatccctcgcgctgccgtggacttttggagaatgagttgaaactgatggaagaatttgtcaagcaatataagagcgaggccctcggcgtgggagaagtggccctcccggggcagggtggcttgcccaaggaggaggggaagcagcaggaaaagccagagggggcagagaccactgctgctaccaccaacggcagtctcagtgacccgtccaaagaagtggaatacgtctgcgagctctgcaagggagcggcccctcctgacagccccgtggtctactcggacagggcaggctacaacaagcagtggcaccccacctgctttgtgtgtgccaagtgctccgagccgctggtggacctcatctacttctggaaggatggtgcaccctggtgcggccgccattactgcgagagtctgcggccccggtgctccggctgcgatgagataatattcgctgaggactaccagcgtgtggaagatctggcctggcaccgaaagcactttgtctgtgagggttgtgagcagctgctgagcggccgggcgtacatcgtcaccaagggtcagcttctgtgcccaacttgcagcaagtccaaacgctcctgaagggctgcccacccacagccagaatccacaggatcccaccgagaaggagagccaggtgtgccgagaccatcctaagggtccgatgtgacagcaagcaagtgaaataaacaatgatttgcttttcagtgagaatatatatatgagatatatatagatatatattctaggttgggtggtggtagatccttgagggtcagtagtttcaaaaccaaaaatattctaagaagtcttaggatggagttccttttctttctgttgttgtttcccagctacaaccaactaaagacacaaatggcgttctgcaaggggactctgggaggagttttccagaatgcaattccgagtgagcaaatcgcatagctgtagaatgtgcgtgcttttttgtggacacaggagctcctccaggagcaggctgggatcccaactatcgcttgttgcctctttttcaagtggaatttgaattttaaataaacaactttttttggcatgataaacagatcaataaaagttttgtgaattccacataaaaaaaaaa

SEQ ID NO: 60296 - DNA, 1453 bp, Homo sapiens
ttttttttttttcattttgcccaaatctgagttttatttttgctggaatcaggtcatctggcctggctgtcccaccaacccagctgggagcctctgagtggcctgccagcagcatctcattacaaaacagccccctggaaccaggtagccaaggaagcggcccacctgaaaggcatttagattgagaagaaaaactgcaccttcctgacaaaggtcaggggtcacggtgaagggagggctgctgggatcacagggacagcagcatcttctagcagcttggccataccagccactgaggtcctaactgcagccaaggggccgttctgcacatgtcgctcaccctctgtgctctgttccccacagagcaaacgcacatggcaacgttggtccgctcagccactggttctgtggtggaacggtggatgtctgcactgtgacatcagctgagtaagtaacaacgactgaggatgccgctgacccagggctggggaaggggactcccagctcagacaggcttggctgtggtttgctttgggaggagagtgaacatcacagggaatggctcatgtcagccccaggagggtgggctggcccctggtccccgggctccttctggccctgcaggcgatagagagcctcaacctgctgccgcttctccttggcccgggtgatggccgtctggaagagcctgcagtagaggtgcacagccagcggagagtcgtcattgccgggtacagggtaggtgatgaggcaggggttgcagttggtgtccacgatgcccactgtggggatgttcatcttggctgcgtctctcacggccacgtgtggctcaaagatgttgttgagcgtgtgcaggaagatgatgaggtccggcaggcggaccgtggggccaaagaggaggcgcgcgttggtcagcatgccgcccctgaagtagcgagtgtgggcgtactcgccacagtcacgggccatgttctcaatcaggtacgagaactgccggttgcggcttataaacaagatgatgcccttgcggtaggccatgtgggcggtgaagttcaaggccagctggaggtgcgtggctgtctgttccaggtcgatgatgtcgtggtccaggcggctcccaaagatgtacggctccataaacctgtgccgacagccagctttgtgtcccagatggactcgggcatcgaagaggcttctcacggaaaacagttccttgacattgaagaagtcagagtgcttgaggggctcattcaaaatcttgtcgttgaaatcggtgctgtcctccgactcgcggatcataagggccgtcgcgcttccaagcgtcctgcggctcggccgagcaggccggggggtcgccttcccgagaaagcccaaccagcgcgacggggcccgggcacccgcgccgagtattcggggcagcgcggccgaggatgtcgccatggctgggacgcgg

SEQ ID NO: 60297 - DNA, 7135 bp, Homo sapiens
atcgtagactctagtccctgtggaggaattcgtgccgatccctagtgtcgactatgcgagatctgattccggagctgccatgattgaagtggtagcagagctcagccggggtcctgtatttttggctggggaggcgctggagtgtgtagtgaccgtcaccaacccccttccgcccacggccacttctgcatccagtgaggccctggcctgggccagtgcccaaatccactgccagttccatgccagtgagagtcgagtagcactgcctcctcctgactctagtcagccagatgtccagcccgacagccagactgtctttctgccacaccgaggtgagaggggccagtgtatcctttctactccaccgaaaattctattctgtgacctgaggcttgatcctggagagtccaaatcatactcctacagtgaagtgctgcccatagagggaccaccctcctttcggggtcagtcagtcaagtacgtctacaaactgaccattggctgccagcgtgtcaactcccctatcactttactcagagtccctctgagggttcttgtgctgactggccttcaggatgtccggtttccccaggatgaggctgtagccccatccagtccattcttggaggaggatgaaggtgggaagaaagattcatggctagctgagctggctggggaacgcctaatggctgccacatcctgccgcagcctccatctatacaatatcagtgatggccgagggaaagttgggacgtttggcatcttcaaatctgtgtacagacttggcgaggacgtggtggggaccttaaacttaggggaaggaaccgtagcttgtttgcagttttcagtcagcttacagaccgaggagcgtgtacagcctgagtaccagcggcgacgtggggcagggggtgtcccctctgtgtcacatgtgactcacgcccggcaccaggaatcctgcctacatacaactagaaccagcttctccctcccaatccctctcagctccaccccaggcttctgtacagccattgtgtccttgaagtggagattgcattttgaatttgtaacgtcccgagaaccaggattggtactcctaccccctgtggaacagcccgaacctaccacctggacaggacctgagcaagtacctgtagacaccttcagctgggacctgcccatcaaggtgctgcctactagccccaccctggcctcatatgctgccccaggccccagcaccagcaccataaccatctgaaactggcccaccctggtgctagttccttccggatactgagaactcagcacctggactctaatgggacccactttttccacctggggtccaatgtcgtggacagtgagagtcgggctttcagctatagcattaatttatttgttcagaatacattggcagctgctagtggtttccctggaagtggcagcagcagtgagcagtcagcagatggatgatcagttgagtttagctggagtggggagcaggagccccaggaacaggggtgttggctgagccccattctgggtcaggccctccccctttgcagggcagccgagggtcagatttttgcaccaaggagaactggcaggttcctgcctcctgacgtacctcacacccagccgggaagtcgatgggatgctgggacctggggaaccaaggataggggaaggagtcagcacagtgaaaggctgcctttatccctgcccacatgttccctctctcacagttttccccccacagagcccctttcagtggccccttggtcctcctaactaagctgtcacctaccatatgtgggcctttttgttttataacaggagtattttctctccaggtccaccccaacctcccctgatttatagcctgaagccttatctttcacactagtgttggtcccttcaggtttggcccatcttgtattgctcttctgttcattcttacatcacagcaatctagtcactccctggtcatccctcagtcactcatatcagagtcattctctctggccatctttggtcactcacgtgtcacagcagcccacgccaacaggatgcagacaggtgcaatggaaacagtccttgcggagccaagactcacccagggtaaaatatttcccctcatagtgacagggggctagggaagaacgggaaatgttagtaggtgtaggagtgctgatgagaggcagaggctcttctggtctggggtggagacagtaagtacgcactatccccgtatttagtttgtctttcctgtttcacagctggaggaagcctgggtattttgacacgggatcatctgtaaggccccatcctccctgtgccctctctgctgctcctccattcctaacgcttcaccccactttaccttgagcttggaagtagcacttgctgtagactcctgggtgctggaggagtagagacatcaccaagcagatgatcccccagcctcctaggatccccttggcctgtccagcccagagcatccttagggccattgctgctgcacagccctctcagacccttcttggcctctgctcagctactctggtcttgactccttgactttgctttgcgttgctccttgagtcttagtttctgtctttctcccctgggctcctgtctcacactatctccctgccctctgctctcacaggctggggatgtttataaagtgaggaccctggccccctgctgagtagagctggaaaagttgtaactctgtttcctgaggtgagggcatgaaaacaagaggtctagctttaacaagctgtgagagctgattcatgccccggcacagctagagggagggaggtggccatggagggggcactggactgggcacttccccagcaaggaggcaggaggggcgagggcccccaggtggtccccagatctcttccctgacctggagagaaggaagcattccaccttccccctttctcccccactgccaccaccaggggtgtgtatgctgggatccctgcctggaccggagggaggcatttcctggggatggttaatcctgtgccccagccaaacccaggagctgcaatagggtgcgacggccagaagctccaggagagtgagcaggcacctggagtggagactgtgtttccctcagatcctagggcagggtttccctaatgtatccaagaaatagggctgcccctcagagatggtggggagggtctcttttcctcaggcattccagaggtgaactgtccattgcttatcaccttcaaacatacagcagatgtgggatcaccccacatctggggatggttctttcccctttcaaagaggagcatctctaagtgccctgatgggatgaatcactccaggttcacagaggtgtcctctctttcctcccatatataatggagtgaggtttttaggaatttatcatttggcatcctctgagtttcccacaggttctggaggagcccaggatggattattgagagcatgggctgtagagacagtcttcttggattcagatcctgactccacttaactatgtaacctggtcagattacttcacctctctgagcctgtttcctcatctataaattggggatagtaatgccaactcattgggctgttatgaggattactgagataatgcgtgcagtgctcttatcaccatctctggtgcgtaagcgtcaggaaatagcagttgctgtgattggggctaaagctctgaggcaaaatgggcgacattattttctttgaatgacattaagcagtttgtgcatagctgagggcttctattggggatggctgtctcctgggcatagacctctgcacctttcacactcatactccttgtcagcagtccccaacctttttggtaccagggaccggttttgtggaaaacaatttttccaccagtggatggagggggatagcagcggggagatgattttgggatgaaactgtttcatctcagatcatcaggcattagattctcataaggagtgtgcaatctagatcccttgcatgcggagttcacagtggggtttgcactcctgtgagaatctaatgcctctgctgatctgccaggaggaggagctcaggcggtaatgctcactcgcctgccgcccacctcctgctttgtgctcccgcttcctaacaggccacagactggtactggcctgtggcctgggggatggagacccctaatccatgtcacctttcccacctctttcaaaaacaggtacctccaggaacattttggttttggcccttgtattgacttctgaatgtctagtttgagaaactgttcccaaataagccttcttcccccagatctgcaccctcgcctctaccctaggacaagatgtccttttctcatcatcctgccaggctaactttaagtctcctgctttttctcacttggatttggatccatttcttcctatttccgctcatgtgaactctccagttctcctttctcaccactctcctgctagccatctctttggcactaaaggccctggtcaaattggatttctttcatttttccacacttcaaagacccatgttctaggtattctccatagggatagtctctttggcatttatttggtttttctacgttttcagtcccatttactccaagactcactccctgccacctagtgcatcagatacagctacttctggctgacttttcaagggggaccaccctacctgtcatctcttcactgttcagaaatgactgtgtcagtgcacctcaaactcccttgctgtccttttccaaggagacagctaaggtggatggagatgcagaatggacctcacgttcgccctagtcaggactgataccctttccgtttcagaggattgccaagaaaaaactcacagttgaggcagggtgctctgaggtcggctgcggtgtgggaggcacggcctgggcctgctctctgggctggagcaggtggattcgaaggcctgtctagcacgagggcccaaaggtcttgtcagtggccagtagctctgccgcctttcccagagagggggtccaggggacatcctggaaggctgggccctgggccaccttctgctcttgcaagctagagccagcccaatagggggcggatgtgagtggggagctggggcgcatgaaggtgggggtgatgccgaaggggaagggatcgccagtggggattggtgcgtgtgcggaaacggggacagaagtgaaggttcatcgcctataacgaagatgaggtaggcatataggggcttctggaaagctagaggctgggctgagccaggagtcctctcccagaagttggggggcggtgcagaggtgtgggtcgagcccgcatgcgtgcctgctggggagggggtgagtggtgaggaccaggcccgctgggtcctgggggcgcggtggctggcgcgcaggtcccggagggggcggctggcgcgcactacacgcttggggacaaggaaaacatccgccggaggcccggccgggcggcgctccagcctcggggcaggtgcgcggagaggaagtgagagcattccggcccccccaccccaaccccggccgctggccctccggtgagtcacagccgacccccgccgccggagggagaggggagctgcgggccagagccccggagggtctggaggagccaggagggtttctgggagcagagggtcacttagtgggcttctgtcgtggtgtcgctacgggcgcgaaacggacactgaacacagtctgactgaatggaggcaggtggggagggatcccctgggagaacttggcgggccgagagcagaccccagggcaaggaggggcccccgagggggaaaccgggagtcgggcaggtggcgtaacccagaaagggaaggagagccggattgattggggtgagagaggaaggaagcacgccaagttaggcctgggagaactgagggacctgaggagggaggagggagaccaacacagggtgggaaggcggaaatggccaaaccccaggcatcaggtctgtccagaggctgacgtagacagtgaagggtgaagggtaggttttaggagtagggggagttatgattatttggttacattttgggattatttggtctcacaggtagaagggagcctgctggtctctgtgtaacggatggcttaaaagcaaggttgtctgcgtcttggattactgtctgccattcagcctttgccaaaaaatttggcactgatctgcacatttttatagtcatttaaaattgtatgactctgtcaaatgatttaagtaattttggtggatttttaaaaataaaaaaataaaaatagaaaagttgcacaatctaattcaatatttgacttaaaaccaaaagtgaggctctcagattggtaatatggtattcagcctttttcttgtttggcttttgtgccatttgcccctcactgacttgattgaattctttgtggctgatgcctcagtttttctggatcagtagtgctgcacttccacttttcctctccctcattttactgtctttatttttagccttttttctgtgtagccctctaacctgccctttatattttgaaccaaataaaacatttcttggaatcggagctttggactacagtatacagacaaacaactcacaattttagcatatgaggctactatcttctgtggatgtgtatgtaattatacagtttctgtatttatcctgtggctgatagaaaaagttaaagctgtttaattcaccatagtatttctacaacacagcaatttattagtctgacttctcttctaaaatcaactctaaaatggtattttgtacttgtctcagagacgaattctgccatgatccttatgatctgtgttatgttgggccaaaggtgattactttataaattataaagatccctaaactctgcattgcctttggtcccaaacaagcaaatctgggtcaattaatgaaaaaaaaaagaaaggaaaagaaaatgtcttactttgggccctgttgcactctcccgtgctgttttagccccagccctactctattcccaggggcctttgccttcattccttctttgctctgctgggcatcttgagaggaaaacttcacaccgacttcctctactataaattctctg

SEQ ID NO: 60298 - DNA, 828 bp, Homo sapiens
agtccgtgtgctggaattcgccagtgtggaggtgaggtgcagatctgacatcctcacatgactgcagttgtaatcattactgtggagccactagggggtaatacacacacacatctaagacacagaggctcttgcctgggtttgcttaaggtcttgggccctagtcttcctcaggagattagaatcccttcaggaaacacctctaacatactaggaggctcatctattatatacctgctacatgtcagccaccattctgggttcaatatgcattctctcatttaatctttgcagtatctctgcaaggtaagtattattatcccagttttgctgatgtggaaatggagttgcagagaaattaagagatatactcaagatcacagtgttcatgtgtcatggagccatattttgaatcctgtgagagacttcagtgctgatgatcggatgaccagaccatcaaaccatgctggagccccagggccgatggcctgagagtagaagaaggagtaggctttgatagctgagcccccaaaggtaaatcaaatttaactttgttatgctaaggctataaaaaaaaatggacatgaagaagttgaagcagagcatgtagagtttgctgacagagttctcgaacaagcagttacagaggcaaaccacagtgaaacaacagaagaagggaacctggtggagatggctgctgagaagttgctccatgaactcagaggacctatagaagggcctacctacactcattgtcttagagcagccttgctaacccacgggcagcgagctgcatgtggcccaggacagctttgaatgcagcccaac

SEQ ID NO: 60299 - DNA, 4119 bp, Homo sapiens
attaaacctctcgccgagcccctccgcagactctgcgccggaaagtttcatttgctgtatgccatcctcgagagctgtctaggttaacgttcgcactctgtgtatataacctcgacagtcttggcacctaacgtgctgtgcgtagctgctcctttggttgaatccccaggcccttgttggggcacaaggtggcaggatgtctcagtggtacgaacttcagcagcttgactcaaaattcctggagcaggttcaccagctttatgatgacagttttcccatggaaatcagacagtacctggcacagtggttagaaaagcaagactgggagcacgctgccaatgatgtttcatttgccaccatccgttttcatgacctcctgtcacagctggatgatcaatatagtcgcttttctttggagaataacttcttgctacagcataacataaggaaaagcaagcgtaatcttcaggataattttcaggaagacccaatccagatgtctatgatcatttacagctgtctgaaggaagaaaggaaaattctggaaaacgcccagagatttaatcaggctcagtcggggaatattcagagcacagtgatgttagacaaacagaaagagcttgacagtaaagtcagaaatgtgaaggacaaggttatgtgtatagagcatgaaatcaagagcctggaagatttacaagatgaatatgacttcaaatgcaaaaccttgcagaacagagaacacgagaccaatggtgtggcaaagagtgatcagaaacaagaacagctgttactcaagaagatgtatttaatgcttgacaataagagaaaggaagtagttcacaaaataatagagttgctgaatgtcactgaacttacccagaatgccctgattaatgatgaactagtggagtggaagcggagacagcagagcgcctgtattggggggccgcccaatgcttgcttggatcagctgcagaactggttcactatagttgcggagagtctgcagcaagttcggcagcagcttaaaaagttggaggaattggaacagaaatacacctacgaacatgaccctatcacaaaaaacaaacaagtgttatgggaccgcaccttcagtcttttccagcagctcattcagagctcgtttgtggtggaaagacagccctgcatgccaacgcaccctcagaggccgctggtcttgaagacaggggtccagttcactgtgaagttgagactgttggtgaaattgcaagagctgaattataatttgaaagtcaaagtcttatttgataaagatgtgaatgagagaaatacagtaaaaggatttaggaagttcaacattttgggcacgcacacaaaagtgatgaacatggaggagtccaccaatggcagtctggcggctgaatttcggcacctgcaattgaaagaacagaaaaatgctggcaccagaacgaatgagggtcctctcatcgttactgaagagcttcactcccttagttttgaaacccaattgtgccagcctggtttggtaattgacctcgagacgacctctctgcccgttgtggtgatctccaacgtcagccagctcccgagcggttgggcctccatcctttggtacaacatgctggtggcggaacccaggaatctgtccttcttcctgactccaccatgtgcacgatgggctcagctttcagaagtgctgagttggcagttttcttctgtcaccaaaagaggtctcaatgtggaccagctgaacatgttgggagagaagcttcttggtcctaacgccagccccgatggtctcattccgtggacgaggttttgtaaggaaaatataaatgataaaaattttcccttctggctttggattgaaagcatcctagaactcattaaaaaacacctgctccctctctggaatgatgggtgcatcatgggcttcatcagcaaggagcgagagcgtgccctgttgaaggaccagcagccggggaccttcctgctgcggttcagtgagagctcccgggaaggggccatcacattcacatgggtggagcggtcccagaacggaggcgaacctgacttccatgcggttgaaccctacacgaagaaagaactttctgctgttactttccctgacatcattcgcaattacaaagtcatggctgctgagaatattcctgagaatcccctgaagtatctgtatccaaatattgacaaagaccatgcctttggaaagtattactccaggccaaaggaagcaccagagccaatggaacttgatggccctaaaggaactggatatatcaagactgagttgatttctgtgtctgaagttcacccttctagacttcagaccacagacaacctgctccccatgtctcctgaggagtttgacgaggtgtctcggatagtgggctctgtagaattcgacagtatgatgaacacagtatagagcatgaatttttttcatcttctctggcgacagttttccttctcatctgtgattccctcctgctactctgttccttcacatcctgtgtttctagggaaatgaaagaaaggccagcaaattcgctgcaacctgttgatagcaagtgaatttttctctaactcagaaacatcagttactctgaagggcatcatgcatcttactgaaggtaaaattgaaaggcattctctgaagagtgggtttcacaagtgaaaaacatccagatacacccaaagtatcaggacgagaatgagggtcctttgggaaaggagaagttaagcaacatctagcaaatgttatgcataaagtcagtgcccaactgttataggttgttggataaatcagtggttatttagggaactgcttgacgtaggaacggtaaatttctgtgggagaattcttacatgttttctttgctttaagtgtaactggcagttttccattggtttacctgtgaaatagttcaaagccaagtttatatacaattatatcagtcctctttcaaaggtagccatcatggatctggtagggggaaaatgtgtattttattacatctttcacattggctatttaaagacaaagacaaattctgtttcttgagaagagaatattagctttactgtttgttatggcttaatgacactagctaatatcaatagaaggatgtacatttccaaattcacaagttgtgtttgatatccaaagctgaatacattctgctttcatcttggtcacatacaattatttttacagttctcccaagggagttaggctattcacaaccactcattcaaaagttgaaattaaccatagatgtagataaactcagaaatttaattcatgtttcttaaatgggctactttgtcctttttgttattagggtggtatttagtctattagccacaaaattgggaaaggagtagaaaaagcagtaactgacaacttgaataatacaccagagataatatgagaatcagatcatttcaaaactcatttcctatgtaactgcattgagaactgcatatgtttcgctgatatatgtgtttttcacatttgcgaatggttccattctctctcctgtactttttccagacacttttttgagtggatgatgtttcgtgaagtatactgtatttttacctttttccttccttatcactgacacaaaaagtagattaagagatgggtttgacaaggttcttcccttttacatactgctgtctatgtggctgtatcttgtttttccactactgctaccacaactatattatcatgcaaatgctgtattcttctttggtggagataaagatttcttgagttttgttttaaaattaaagctaaagtatctgtattgcattaaatataatatgcacacagtgctttccgtggcactgcatacaatctgaggcctcctctctcagtttttatatagatggcgagaacctaagtttcagttgattttacaattgaaatgactaaaaaacaaagaagacaacattaaaacaatattgtttctaattgctgaggtttagctgtcagttctttttgccctttgggaattcggcatggtttcattttactgcactagccaagagactttacttttaagaagtattaaaattctaaaattctaa

SEQ ID NO: 60300 - DNA, 8866 bp, Homo sapiens
gagcagattcctactgttcttaaaggacagtaatgccttttgagtctggtctgaagaacataacaggtctgtgatcagaagtaggttgcatctctctcaactttaatttccttagctatacctgtagggatgacttaagcctaggggagctcctatatttgggaagcttgtgcacagggaagccttaaatgatggtgcctgcagattggatctagtagaaattaggtccttgggcatggatgcttggggaacctctcagtgacctcaggtgaacttgttgctcgtagagccaagaggcgaagttaattcaggccttccttttgaccactgccccctcttcctaggccttggcccctccaccagaggaaggtgctgccacgtgtctgctccttctgaacctccaggtttctgctacgttgccccatggaggacacacccccctcactcagctgctccgactgtcagcgccactttcccagcctcccagagctctctcggcaccgagaactgctccatccatctcccaaccaggacagtgaggaggctgacagcatccctcggccctaccgttgtcagcagtgtgggcggggctaccgtcaccccgggagcctggttaaccatcgtcggacccacgagactggccttttcccctgtaccacctgtggcaaggacttctccaatcccatggctctcaagagccatatgaggacacatgctcctgagggccgccgcaggcacaggcccccacgccccaaggaagccactccacacctccagggtgagacggtgtccactgactcctggggccaaaggcttggctctagtgaaggctgggaaaaccagacaaaacatacagaagagacacctgactgtgaatctgtacctgaccccagggcagcttcgggtacgtgggaagatctgcccaccagacaaagagaaggcttggcaagccacccaggtcctgaggatggtgcagacggctggggaccctccactaactctgccagagcccctcctctccccatcccagccagcagccttcttagcaacttggaacagtatctggctgaatcagtagtgaacttcacagggggccaggagcccacccagtcccctcctgctgaggaggagcggcggtacaaatgtagtcagtgtggcaagacctacaagcacgccgggagcctcaccaaccaccgccagagccacacgctgggcatctacccctgtgccatctgtttcaaggagttctctaacctcatggctctgaagaaccactctcgactgcatgcccagtatcggccttaccactgtccccactgcccccgtgtcttccggctcccccgggagctgctggaacaccagcagtcccatgagggtgaaaggcaggagccacgctgggaggagaaagggatgcccaccaccaatgggcacacagatgagagcagccaggaccagctccccagtgcacagatgctgaatggctctgcggagctcagcacctctggggagctggaggacagtggcctggaggaataccggcctttccgctgtggggactgtggccgtacttaccgccatgctgggagcctcatcaaccatcgaaagagccaccagacaggtgtctacccctgctcactctgttctaagcagctgttcaatgcggctgccctcaaaaaccatgtgcgggctcatcacaggcccaggcaaggagttggggaaaatgggcagccatcagtcccaccagctcccctgctgctggctgagaccacccacaaagaggaagaggaccccaccaccaccctggaccatcggccctataagtgcagtgagtgtggtcgtgcttaccgccaccgggggagcctggtgaaccatcgccacagccatcggactggagagtaccagtgctcactctgtccccgcaagtaccccaatctcatggccctgcgcaaccacgtgcgggtacattgcaaggctgctcgccgaagtgcagacatcggggctgagggtgcccccagccacctcaaggtagaactcccgcctgacccagtggaggcagaggcagccccgcacacagatcaggaccatgtgtgcaaacatgaagaagaggccacggacatcaccccagcagcagacaagacagcagcacatatctgtagcatctgtgggctgctctttgaagacgctgagagccttgaacgtcatggcctgactcatggggcaggggaaaaggaaaatagcagaacagagaccacaatgtcacctcctagggcctttgcctgccgagactgtggaaagagctatcgccactcaggcagccttatcaaccacaggcagacccaccagacaggagacttcagttgtggggcctgtgccaagcacttccgcaccatggctgccatgaagaaccacttgcgccggcacagtcggcggcggagcaggcggcatcggaagcgggctggcggtgccagcggtgggagagaagccaaactcctggcagcggagagctggacccgggagctagaagacaatgaaggcctggagtctccccaagacccttcaggggaaagtcctcatggggctgaaggcaacctggaaagtgatggggactgtttgcaggctgaatctgaaggggacaaatgtgggcttgagagggatgagacccatttccagggtgataaagagagcggaggcactggggaaggactggaaaggaaggatgccagtttacttgacaacttggacatcccaggtgaggaaggtggtggcactcacttctgcgatagcctcactggggtggatgaagaccagaagccagccactggccaacccaactcctcttcccactctgccaatgctgtcactggctggcaggctggggccgctcacacatgctctgactgtgggcattctttcccccatgccactggcctgctgagccacaggccctgccacccaccaggcatctatcagtgctccctctgcccgaaggagtttgactctctgcctgccctccgcagccacttccagaaccataggcctggggaggcgacctcagcacagcctttcctctgctgcctctgtggcatgatcttccctgggcgggctggctacaggcttcaccggcgccaggcccacagctcctctggcatgactgagggctcagaggaggagggggaagaggaagcagtggcagaggcagcccctgcacgcagtccaccactgcagctctcggaagcagagctgctgaatcagctgcagcgggaggtggaagcgctggacagtgcagggtatgggcacatctgtggctgctgtggtcagacctacgatgacctggggagcctggagcgtcaccaccaaagtcagagttctgggactactgcagacaaggctcccagccccttgggagtggcaggtgatgccatggagatggtcgtggacagtgtcttggaggacatagtgaattctgtctctggagagggtggagatgccaagtctcaagagggagcaggcacccccttgggagacagcctctgcatccagggtggggaaagtttgttggaggctcagccccgccccttccgctgcaaccagtgtggcaagacctatcgccatgggggcagcctggtgaaccaccgcaagatccaccagactggagactttctctgccctgtctgctcccgctgctaccccaacctggctgcctaccgtaatcatctgcggaaccaccctcgctgcaaaggctctgagccccaggttgggcccatcccagaggcagcaggtagcagtgagctgcaggttgggcccatcccagaaggaggcagcaacaagccccagcacatggcagaggaggggccggggcaagcagaagtcgagaagctccaggaagaacttaaagtggagcccctggaggaagtggccagggtgaaagaagaggtgtgggaggagaccactgtgaagggggaggagatagagcccaggctggagactgccgagaagggctgccagactgaagccagctctgagcggcccttcagctgcgaggtgtgtggccgatcctacaagcacgccggcagcctcatcaaccaccggcagagccaccagaccggccactttggctgtcaggcctgctccaagggcttctcaaacctcatgtccctcaagaaccaccggcgcatccatgcagatccccgacgtttccgctgcagcgagtgtgggaaggccttccgcctgcggaaacagctggccagccaccagcgggtccacatggaacggcgtgggggtgggggcacccgaaaggcgactcgggaagatcggcccttccgctgtgggcagtgcgggcggacctatcgccacgccggcagcctcctgaaccaccggcgcagccacgagacgggccagtacagctgccccacctgccccaagacctactccaaccgcatggccctgaaggaccaccagaggctgcactcagagaatcggcggcgacgggctggacggtccaggcgcacagctgtgcgttgcgccctctgtggccgcagcttccctggccggggatctttggagcggcacctgcgggagcatgaggagacagaaagggagccagccaatggccagggaggcctggatggcacagcggccagtgaggcgaacctgactggcagccagggactagagacccaattgggtggtgctgagccagtaccccacttggaggatggagtcccaaggccaggggagcgcagtcagagccccatcagggcagcaagctcagaagccccagagccactgtcctggggtgcagggaaggcaggtgggtggccggtaggtgggggactggggaatcatagtggaggctgggttcctcagttcctaactaggtcagaggagccagaggacagtgtccacaggagtccttgccacgctggtgactgccagctcaatggacctactctgagtcacatggatagctgggacaacagagacaacagctctcagctgcagccagggagccactcctcttgcagccagtgtggcaagacttactgccagtcaggcagcctcttgaaccacaacaccaacaagacagaccgacactattgcctgctctgctccaaggagttcttaaatcctgtggccacaaagagccacagccacaaccacatagacgcccagacctttgcctgtcctgactgtggcaaagcctttgagtcccaccaggaactggccagccacctgcaggctcatgcccggggccacagccaggtgccagcccagatggaggaggccagagatcccaaagccgggactggggaggaccaggtggttctccctggtcaagggaaagcccaggaggccccatcagaaacccccagaggcccaggagagagtgtggagagagccaggggaggacaagcggtgacgtccatggcggctgaggacaaggagcggcccttccgctgcacccagtgcgggcgctcctaccgccatgctggcagcctgctgaaccaccagaaggcccacaccacagggttgtacccgtgctccctctgtcccaaacttctccctaacctgctgtctcttaagaaccacagcaggacccacacggaccccaagcgccactgctgcagcatctgtggcaaggcctttcggacagctgcccggctggagggccacgggcgggtccatgcaccccgggaggggcctttcacctgcccccattgtccccgccacttccgccgccgaatcagcttcgtgcagcaccagcagcagcaccaggaggagtggacggtggccggctccggtagggggcatgaagggtcccaggaggaggtgggcacacagtggagggggaagtccagccccaaagtcggtgggggagcaaggagtgagaggagagagccccggggattctaagaggtgggtgggggcttggctatggggtgagagaagtagcttgaggatgtgctgagctgagcacccgcaagtcaggtataacaaatagcagggtgggttgggcagcacgtgggggcgtggtcaggccgaggctgctacctgggctcctccattacactgtagccagaatggaatggtctttctgttcaggggaaggtcactgggtaccccctggctgctgtgtctggaaaccctcctgagtcagccagtaaagtaatgacttccagagaaaaagaggaagccattggtttggtctaggttccattctttcctggagcaggccgggtgccagggaacaagggatggggcatgggctccacggcttccctgctgacttggccacggaaactggttcactggttggcaccctactccctgtccctctttccctgcgccttgtctctgctgctcctctccttggaaactagacctctggtccttccctgtcagtgttgctcccatctcttctctaacctttattcagccccttttccctctgctgccaacggcctttttaggatccaaccaaaccaccctttctacctgcgcaccctgccaccctctgcacacctttaactggaggactgagtcacagataattgtttccttgaagtccaggcccagctgcagcaacaacagtcattagcccgtgtcacatccctgatcagagggcatctccgtggggaatcgcctccacccagcactgctggaagccgcggctgccagggagtggggcggccggttccctcagcaggacctgggctggcctctccacctcccctagtagaggcggacccattccatctagtggccaccgagggtgggtggccctgagatggtgggcccttgacaggccttgtcagagcagagggcaggtgggagtcacctgaaagctgaaggaatggctttaaggatagaagatttctcatgacctcaagggatatgagggaggagccagtttgccagggctgggaaaataattaggaggcctagaatccctgttctcatctgggcctccggggccaggggcaggggaatggcctgcagggctgggagggggtacacgctgtgcggggtctgcccctcagttggtgacctcctctctctctccccccaggagccccagtggcaccagtgacgggcagaggggacttgccattgccccctccacccacccccacgaccccactcctggatccttcaccccagtggcctgcagacctcagcttctccctctgaacttcaagtctccaaagatcagaatctgggggagggagcgcgtgcagggaggggcttgatctccacattttctcaggagtagttcgggcatccccatatcttctcctctccccttgtgaagaggacccagatctggcttctttcccaaggaggggggggggtgttcctcgcgtccctgtccttgaaggacctccttcccccagcctcatcaccgtgctcttctcagcgccaccctcagcagccagattgcaacaccagggagaggcggatgcagagccccaccggtgggaaagttgcctgtggaagggagccttttgctacaatttgtaacttattttctaaagtctattttgtaacaatttatttaagtttaaaaaaaggaaaactgctgccccccaaaaaaaagaaattttcaaaacaacgtggctggcgtgattgtatctgaaagggtaaaggaggaggaaagctgagacgcctgcttggtagcagagttgggtgtgggagtgtccacagacacccctgtcctgcagggtggggagtgggcacctgtggccccaggcaggttccttcccacagctgctgggcttctgggcctgccctggtgcctggaatcacacatgacagggtggggaggacaggggcagtaatgccatttgcctgcctgcattctcttgtcctgagaatggccaggtcccctgtcagcagctggttggttggcctgtggggaaggaaggagggtggagttgtcctcatcctcatggctttggtccctccctccctccccattcctccaaggaacagggtctgtcttggccgccatgacagatgagaatactgaggctcaaagcggttgagcagcctgctccaagtcacacgatgacaaagaaccagaatctgaatcaaatgggtctgcctgttgctccaccctacccaaggcagctggagtgggttagaacggcacgttctcactggagagagaagggtcctggagaggcagggtttggcaggaggccccggggccacatacttatgttggccaggcagcttccaggctcagcctcgggctctggttcctcggcgaagtagacctgccagtccaaactgctgacccagtcctcataggcagggagcgcggtgaagaccgccggcctggcggggcctttggcaagcatctccgaagctgtgcagcccggccaggaaccatgtgcccctcacctcatgcaccagtggtgccccagacaggccctgtcaggggtcaggtgacactgggtgactttttataggcagctgtgcaggacggtagagcaggctagggaacctctggctgtttgggggctaattggcaaaaaggcttagtttcaggtgggaggtgggtccagaggccaagcctggaaggtccgttcttgagctattgggtgaggggatgccaggggcctgttaggtaaggtgtgggggcctggggctcacctcacagctgggcagctcacccacagcactggtacacaccatccccggcagaatagggctgccatcacccccaggagctgcatgcagccggctgcaggccctaggccccaggagggtcacgggcactgtctggagggagctgatgcctgtggagcaagggaaagctggctgccccggcctgcaggttggatggacagcagccctggcc

SEQ ID NO: 60301 - DNA, 912 bp, Homo sapiens
tccagcgtggcggaattcgttgcaggaaccttccctctacaccatcaaggctgttttcatcctagataatgacgggcgccggctgctggccaagtattatgatgacacattcccctccatgaaggagcagatggttttcgagaaaaatgtcttcaacaagaccagccggactgagagtgagattgcattttttgggggtatgaccatcgtctacaagaacagcattgacctcttcctatacgtggtgggctcatcctacgagaatgagctgatgctcatgtctgttctcacctgcctgtttgagtctctgaaccacatgttaaggaagaacgtggagaagcgctggttgctggagaacatggacggagccttcttggtgctggacgagattgtggatggcgggtgaggaggggacagtcagggacactcacagcaggagtgcctttgataatcatcagccccagatggcacccagcatggctagaactctgaccaacttctcactcccttcccccagcatattcccagggatcccattcccctagcccttcctcttactagcgccccactcatgaagatagaagttgatttcaatgttagccaaagtcaagccaaacaagagactaacctgatgtcaaactatgggagactgttgaataggcagggtttggggaaaatccagtttggtctccaatgcccaggggaagcactggcacagatgctggccctctctggaaggacttcagacagtcccaccagccccacatgtcctgctcttagggctcaattccaacacaagctagatgcgtgacctgggtcaattactgaccctccccgaggcttactttctccatctttaggatggaggtaataagggattgtggggattaaatacatgtgtgagaagataaa

SEQ ID NO: 60302 - DNA, 1671 bp, Homo sapiens
cggacgcgtggggtcaagatggcgggagcagctacccaggcttccctggagtcggccccacggatcatgcggctggtggccgaatgcagccgctccagggcccgggcaggcgagctgtggctgccgcatgggacagtggccactcctgtgttcatgccagtgggcacgcaggccaccatgaagggcatcacgaccgaacagctggacgctctgggttgccgcatctgcctgggcaatacctaccatctgggtctaaggccgggacccgagctgatccagaaagccaacggtctccacggcttcatgaattggcctcataatctgctaacggacagcggcggtttccagatggtgtcgctggtgtctctgtccgaggtgacggaggagggcgtccgcttccgctccccctacgacggcaatgagaccctgctgagcccggagaaatccgtgcagatccagaatgcgctgggctcggacatcatcatgcagctggacgacgtggttagcagtactgtgactgggccacgtgtggaggaggccatgtacaggtcaatccgctggctggaccggtgcattgcagcccatcagcggccggacaagcagaacctcttcgccattatccagggtgggctggacgcagatctccgggccacctgccttgaagagatgaccaagcgagacgtgcctggcttcgccatcgggggcctgagcgggggtgagagcaagtcgcagttctggcggatggtggcgctgagcacctctcggctgccgaaggacaagccccgatatctgatgggggttggctatgccactgatctggtagtctgcgtggctcttggatgtgacatgttcgactgcgtcttccccacacggacagcgcgctttggctctgccctggtgcccactgggaacctgcagttgaggaagaaggtgtttgagaaggacttcggccccatagacccggagtgcacctgccccacgtgccaaaagcacagccgcgccttcctgcacgcactgctgcacagtgacaacacggccgcgctgcaccacctcacggtccacaacatcgcctaccagctgcagctcatgagcgccgtccgcaccagcatcgtggagaagcgcttcccggacttcgtgcgggacttcatgggcgccatgtacggggatcccaccctctgtcccacctgggccactgacgctctggcctctgtgggaatcacactgggctgacctggcattgggagagggagggaggaaggaagggagggaggggctggaagatactgaaggattcctttttgaaaggttttttttattgtaacttacagagtgtgtctgtgtcttcttgaggaagtggcctgtctgggtccccctcccagtctgagcgtcattgcagtggaatatctccccttctcaccaatcataacacgtcactgtggcagcagcggatagctggaaaccacctgccagtgcccagcatgtagggcgtgcccctagagcgggagctgccacctgcttcctggggcccaggcccccccgccaccttggagggaggtactgttggcctctccttttttacagctgaggaagcaggcccagggaagggagggaacttgcccaaggtcatcaccatcaaagaaatggtatcttggctttaaggcatacactccc

SEQ ID NO: 60303 - DNA, 1444 bp, Homo sapiens
caagcccccggaagtaaaactgggtcctttaaaacggccccccccttttttttttttttcaattattaaatgtttggcactttattaaattaattaaataagctccaaaattaattacatacaaatcaaaggaataagaaacaataaatagtttattcagcaaacacctctctgcagcagccggcagctctgaggccgaggctggcgtcctgtggcagagggcctgtggattgccatgctcgctcccaggggtggctcaacagggacacaggtctactccttccacatcgggtttccggaacaacaactgaactctcattcattaccatcccattcattaccatttttttttacatacacgaaacacaccgcaatgtatagactaataagccaagagctttattgatgcagcaggcactttacaatgagcccaagagtgtccaccttctctgggaagacaggatgtctgtacaaactcttgggtttttttccacttcaaaaacacaagctctcccgtttaccacagcccttggatctgcacctgcccaaaccatccctcccccagtgcacacaggtgcatctgaccaacaccagccgccacgctggtagaccgtcaaaatgtcagttctgcagtactcggagacaaaggcatagactatcagatcctaaacaggatttaggaaacagacgattttcccctccaccttgaaaataaaatacatttcagcagatacatgtcctgaaatagtttacttgggagttcctaggaagatggtccattgtcaatcccttcttcaccagcctgggcatccagaattcttctcaaggtaacatgagtctttttattttttttaaacagtctttcttgctgtaagaactcttataatggagcctagtcctcctactgctaaggccttttcgtgccactggagtaacactgcgctgctattttctgtgggcttctcaaagcctttataaatgtacttcattaacaagtcaacgccgtttctgtccagtgactgcacagcctgctcaatctcactgctcttgaagtttgtgagcactttcagcaccacgccctgggctcgctccttcacagcttgattcttggtgttgacgggagagttccgcaaggctgcatggaatgcccgaagcatgtccccttgccgcaggagcccgtccacctcgctcgggtccgggcctggctccgccgccgccgccgccgcctcctcctgctcgtccacaaatttgttctcgtcaaattcgtcgatgtccacccggcggaagcgcgaggacagcgtgttccgggccatggcgggagctcggcgcccgctcagccggctccgctcgcggcccgacctcggctctgctccgctcgcaccggctcctgctcgggggcgggaagcggctgcccggctgcgaattcttccagtggcacgaggcc

SEQ ID NO: 60304 - DNA, 1780 bp, Homo sapiens
cggccgcgtcgactttttttttagactattttaaaagattttattagaggaaataatctagtagataactttcttacttccacaaaaacaaagtttctcaaggatacaaaccaatggatttatctgtgaactcggtcccagaatagaaactagcaaaaagtcagtacagtactcaaaaaatacttttgtggtatgaaaaaagggcaggtgcagatgtagaactgtaccatcttcagtttctgttcacaattgttttaaaacaattctcatctatccagtctgctctcccacgcctcaggatgaggggaaggccaatgggtcaatgctctgtggataggcccaagtagggatccaatctagggtaattccctgttccaccttaggctctgtcctctgaggggatttgccagggttggcacccacaatagttctccatttctctttagtctgaacttatgctgtaaacccaaggcctggcacaggggtatgcaggaaagtttgagtgaatcagtcacaacagctctagtacagtactgcatcgatatgctctggagacctgcagcctatttttcccagagaaataaagtggagtggagatcagaagccatggcttcccccctacctcctttggtcagtgcaggctctggctcaaatactgaagaaacatgttggccagttgcggcaagttctcattgttgggatgcattttagtgtacgaaataaactggcgacgaaggcgactcagttctgccatggtcaagggccgggtaaaccgcaagtgctctgtggtaccaggaagcgtgagcaagtccccggggacagcgctcttctgcgcttccatcaatccggccagtacttgactcgtgacctggtccaactggtgcagaaagctgccggaggcgaggggctgggactgcgtagactgatggggtggtggggcccggttctcaaacagggcagagcggatccccgccaggggcaacggctcctctaggcccaccaaagtgaataaaggccggtcccagcgattccgagaatcgggagcctcaaagcgcagcgttagggcctccaggagttcgggagagtaaaaggcaccggacccatgctttgcagatttctctgaatccggagtcacaagagctggagactccgcagccccggattcttctcgctccagttccttgggtacgtcggcctgggcacttccatttactacagagtccgcagtatgcagttccctgaggacgctgctgcccgccgcctgggctctcccgtcctcctcagcgcgtggccgccaactcacactgacgttccggccagggttctcgttcgcgcccgccacctgaggtcccgcgatcgggccgccgggccgtacgcagtagaccaggcagagcggggtgcgcgccgcccgtgccaggcagtagagctcgtaacggaaacctttgatgtagttaagcgagtccaggatgaccacgtcgtggcgactcaggcgccgttccacggaggctcgcagagctccacgcaatgccttctcacgggcagaatcgccgtacaccgctgggtcctctgcgcccaggacagctgcgtcgtccaccacgtacaccgcgcggccctcggcagccagcgccacgcgcaactcttcagcacgccggctcttgccgctgtacggcagcccgcaaaacaccacgagcggcatcctctcagggagcgaccattggcaaccgcgctgcgccaacttccgggttgtacgcgcctccgaccatgggatgctgtcacttgc

SEQ ID NO: 60305 - DNA, 1406 bp, Homo sapiens
tcgaccgagggccgcgcagtactgcgacggatacagggagggcaagggtttccttttggcgcttccctttggaccccggagtgaaaaactctaacgtccagatcagtggagagaaacgcagatttaggaccctgaggagtctttttcacccgtttcccgtcactcgctcaggcgcgccgagggcagtccttgtggggtcctcgtggccagccaagatggttgcccccgcagtgaaggttgcccgaggatggtcgggcctggcgttgggcgtgcggcgggctgtcttgcagcttccagggctaactcaggtgagatggagccgctatagtcctgaattcaaggatcccttgattgacaaggaatattatcgcaagccagtggaggagctaactgaggaggagaaatatgttcgggagctcaagaagactcagctcatcaaagctgctccagcagggaaaacaagttctgtgtttgaagacccagtcatcagtaaattcaccaacatgatgatgataggaggaaacaaagtactggccagatccctcatgattcagactctggaagctgtgaaaaggaagcagtttgagaagtaccatgccgcttctgcagaggaacaggcaaccatcgaacgcaacccctacaccatcttccatcaagcactgaaaaactgtgagcctatgattgggctggtacccatcctcaagggaggccgtttctaccaggtccctgtacccctacccgaccggcgtcgccgcttcctagccatgaagtggatgatcactgagtgccgggataaaaagcaccagcggacactgatgccggagaagctgtcacacaagctgctggaggctttccataaccagggccccgtgatcaagaggaagcatgacttgcacaagatggcagaggccaaccgtgccctggcccactaccgctggtggtagagtctccaggaggagcccagggccctctgccgcaagaaacagtgtgagctactgccacgctgaaaactacctgtgggttaaggatgtagttcctttgtaagggtgggcaggcctcgtaagaaagatgtagcagcatattcactatccgttaatccttctttctttgaggctggaacttgctctctctgcccctatttccttgtaaagagggagcacattgacttgggaatttcctccaggaaactcagggctgttttctcttcccttaggttggggcggacctttggacatataaaggaagcagttttagtatcagaaaagatttattagaaaattctcacgctgaactggtgtagcatgtggtgcagcattcagtgaaactggctggaggaaataggcttgtttccagagttgtccttatacaaaatgtataaaaagcagtttctggtgtgaaaaaaaaaa

SEQ ID NO: 60306 - DNA, 2900 bp, Homo sapiens
gagcgccccgacggcgcccgctcgcccatgccgagctgagcgcggcagcggcggcgggatgctggcgctgctggccgccagcgtggcgctcgccgtggccgctggggcccaggacagcccggcgcccggtagccgcttcgtgtgcacggcactgcccccagaggcggtgcacgccggctgcccgctgcccgcgatgcccatgcagggcggcgcgcagagtcccgaggaggagctgagggccgcggtgctgcagctgcgcgagaccgtcgtgcagcagaaggagacgctggccagcgcgagggccatccgcgagctcacgggcaagctagcgcgctgcgaggggctggcgggcggcaaggcgcgcggcgcgggggccacgggcaaggacactatgggcgacctgccgcgggaccccggccacgtcgtggagcagctcagccgctcgctgcagaccctcaaggaccgcctggagagcctcgagccgctgcccgcgatgcccatgcagggcggcgcgcagagtcccgaggaggagctgagggccgcggtgctgcagctgcgcgagaccgtcgtgcagcagaaggagacgctggccagcgcgagggccatccgcgagctcacgggcaagctagcgcgctgcgaggggctggcgggcggcaaggcgcgcggcgcgggggccacgggcaaggacactatgggcgacctgccgcgggaccccggccacgtcgtggagcagctcagccgctcgctgcagaccctcaaggaccgcctggagagcctcgagcaccagctcagagcaaacgtgtccaatgctgggctgcccggcgacttccgcgaggtgctccagcagcggctgggggagctggagaggcagcttctgcgcaagggggcagagctggaggacgagaagtccctgctgcacaatgagacctcggctcaccggcagaagaccgagagcaccctgaacgcgctgctgcagagggtcaccgagctggagcgaggcaatagcgcctttaagtcaccaaatgcgttcaaggtgtccctcccactccgcacaaactacctatacggcaagatcaagaagacgctgcctgagctgtacgccttcaccatctgcctgtggctgcggtccagcgcctcaccaggcatgggcacccccttctcctatgcggtgccagggcaggccaacgagatcgtgctgatcgagtggggcaacaaccccatcgagctgctcatcaacgacaaggttgcgcagctgcccctgtttgtcagtgacggcaagtggcaccacatctgtgtcacctggacgacacgggatggcatgtgggaggcattccaggacggaaagaagctgggcactggggagaacctggccccctggcaccccatcaagcccgggggcgtgctgatccttggacaagagcaggacaccgtggggggtaggtttgatgccactcaggcatttgtcggggagctcagccagttcaacatatgggaccgcgtccttcgcgcacaagaaattgtcaacatcgccaactgctccacaaacatgccgggcaacatcatcccgtgggtggacaataacgtcgatgtgttcggaggggcctccaagtggcccgtggagacgtgtgaggagcgtctccttgacttgtagccgccttctcctctgtccaggaggccgggatcaggctgttgccatggaagttcagggccatagactgccccacttaaactcttgtcagtctgggctcagggttcccagagctcattccccaggaatctctaagaccagggctggggcagtgtctgtcactggcttgtttgttccctaccaatattctgttgctgtttgaagtagtgccagggtcccctgggaagatgcccccaagacacctgccccaagtgggtggatatctgccttcctgctgcaagtggaggcaggtccagcagcccctcttcagagcccctgtaaatgctatcgcagcctgagtcctgccgccttccagttccttggtgtcccgtgcaccccttctgtctgtcccctttcatggctgtgcagccgtcccgctggagtggccatgtcccttgtgcattgagtgcatccccgctggtgactaagctcgcagcaagcggctaccccccgatctgcaaaagggcctctccctttgtgttctatacattgtgaatcttcccgtctgaagaacgcccagcctgcccagacaaagccccgccttccccaaagcagaggggctgtctgtgtctccagaaaggggacatcgggggggaggggggctcagaaaggagaagggctgtgatctccggtcccttcccccatcatccttccttagactgatgctttgactgaatcatcactagctatggcattaaaaggcctctcttctcatctggtgccaaaggttccgttgcagctttttacaaccatccggtgtggtttggaggatttgtttttttttttcccaacagaaaagaacagccattaaaagaaggctcccattttctgatgttccgccccactgggaaaagggggctcgttttaaattcatgttgattcttgtaagcactggactgtcttcatcaagtatttccctacagaactcctcaagaaaacagagatcatttggctagagattgtctgagtgactccaagctactcactgtattggacgggagtagtaatttattttaaagataaagtgactaagtggggaaatttataaagctaaatattatatattttatttttcatacatgtttgaagtgcaaatctgtggatattccatttgtaggaccaagtcgacatgcccatcctgacattgtatgctacgagaactcttctgatgatggaatttcgattaaagtgcactgaaagatgaaaaaaaaaa

SEQ ID NO: 60307 - DNA, 2263 bp, Homo sapiens
  misc_feature (1)...(2263): n = a,t,c or g
tgcacaacccctttcctcttcaactaagccaaacccataaaacgggggcgtaggtatgtcgggacaccaaaaagcagcagcagcagccagagggagtttaaactgcatctcaaaacaaaggcggcagagggcagcatttacagcaagactttcttactcaaactgtttcaagacaagagggagcagcacacttaaatatccacacatttcttcatttaaaaacatcacttctttatttcaaaggaaaaataaaagaccctcccaaccctgtccaaaaaaaacccaataataataataacaataataaaaaatcctattagaaaccataaggaagcactgagagtttgagtattacattcttcaagtatgctgttcggattttttatttttaggttggtaactatacacatataaaaaaaccttaaaagtgcggccaagggattttgcttaaaattaagtatttagagggctacttaaaaatactgtagtaggactgtgcagtgatcctttgggggatgatgctttcacttttgtatcctcgtcaaggttaaggggcaggttcaaaagtgatcatacttccaggattagcgtaagtggccaacttgggtgagaaagccagagagatccatgtgttcttccacggacaacgaaaatccaccccgaatccaaaaattcagacatggaatgtggtaggatttcacagtaaagttagtctgggatagggagaggtgatgagcccagacaaggcagggtgttaggtttaactggtttgccctcatcaggttttcgcatctttttagtgggttttagtgcagtccttcaagccacaatttagattgcccttcggtgtgctccagattgttggttcatattaaaggactgttttaagatttgcatcccaaggaaaatcatgctacataaaaatgatccaagattttcgcccaaaaaacttcttggataaaatctaaaaaatactattgcaattgcgtctcttgaagaaaaaaacattattctaaatgtaaacagattcactcaactctttttttgttgtagaaaacttcagagtaggtaagttgctgtctaactctctgctgcatgcactcgccagagggtagggaacaatgccttctgtgccagcatcatctaggggatgaaaagaaccgttccacatagctgaagagggcgtcccagtgcttccagagaaaggcaataaaaaccacaaggaataaagtgctgaacgtcctgttgcgagtcttcatgagggggaccacacagttggctacagtggagacaaagaccaaaaggactgccatgacagccaggaggatgttgatgagtttgcccagaaggttccgggcagtggcattctccagcccttctagctgcaccacctgctgctgctgctgctgcagctccatcttggagatgcgcgtctggcatgcctccagggcctcctggatgtcccgggcccgttcataggactgatacgcaattttttcttccatgcttgccagttcctgcttcaagttcaagatttcattctggtggagctctgttaggtcatttagctgttcttccaatcgttcacatctatatcgctcctcctgtaaggtctgcattattaaggaatagtccctctgataatgttccttgagagtctcaaaggattcctctagtctggcctgggtttcccggatctcctggatctcatgtagtagtgcatcaaatcctgagctctgcatgtccagggtgtttgttttggagctggatgctcctacagcgatgccccctgtggtgctgttggctcccactgagcctgaagtggcactagaacaatcttcttcactaccatattttgggctagactgaaagtttgaaatcactcccaaagccttccccgcatcatccacttgcccttcctctaaagagtccttcaggttggggatgttgtctgcactgccaaatttgttccgaatgagtgaggcaatctctctgggctttgagactacagcgcctgctgctgaatgggtggcctgggagaagctggaaaacccacctttgacactatccaccacaccttcactgaagccagtcacctttgctcgtacatccgtcagaccctggtgcgtgtccatgaagacatcctttggcagccgggggatcccattccgctctacctctctgagcttcctgtggtagagataaagtttcttttcagctggaggatgttggcagattgtgtcttccaaaangtggtactctc

SEQ ID NO: 60308 - DNA, 1485 bp, Homo sapiens
ttttttttttttccgcaggtctgaaatggactttaattggcttttgtctctagaattacccacccgttcctgcgctctacggttctccatgccccctccagtttgggggtctaaaccgaacaggagaggtgcaggggaccaggaggtgtcctggcacaaaggttcgggggtctccctggcaaggggtcccagggcctggagcccgaggcccagccaaaagcacacagcatcaaaacatgtttttagtgggaagctccaggccctgcccctccccgggggcctcgaggtcggggagcaggtgggcgtctgtctgcctccaggtcatggcagtgcaggcggtgagctgggggccggcaggggcgcggacagtgcggcgtggtcgaacagagggttgcgcacctccatttccccggtcggggccaggcccgggcactcgtacaccgtgaagtctccgtcctcattctcctcatccgaggaggccgtgtccagctccttgggtggctctttatgccgctccaggcacagcatctgttgccgttggtgctggtagtggtacatctccgcgctctgtgccagccgctggtccccaggcgagatccggggagctgcaggtgagccaggggccttcgcagtggcgtagtcggccttctgagtcaggcggatctcacgctgcagcctgcaccagcagagggaggctacggagagggcggctgcaccggccacacagaacgccaggatcagcacaagggcgaggccgtcgccttgccctccccggggctccaggggcgacatgtgcaccgggtcggatgacacaggggagcccagggaggtgtggggcgtgggcgtgggggttcctggagtggaggggaggcccagctccagcccctgcccccgtgccgagaagcccagggtggcaggctccgggagccgctgtcggtccttgggtaggggcggagttgagtgtccagactccttccgggcaagctcctgggccaggaagtcaatctcatcttccagtctgggctggggccggcccccgcctggaggccggcgcatcctgggcacacagagcccttgctggtcctcctggaagggctgaaggcagggcccacaggcatgtgcaccaggaggacaccttgcccgcctcttcagggcacagtccaggctcccgggacaggcggctacatccgggaaggaagcagaaggcagggccggctcacggccccgcagggctcggcccctgcacacggcagcgctgccccagccacccgcccccgtcaccccccgagctggccgggcctggttctggccattgttctggacatgcccttcctccctgacgccagggctcagaacccggaagcgaacagtcctaggacttatcagaactaccctgccccacccctccccagggtccacttccaggcctgatagagccctcagctcagaagctgcctcgtgccaagctaggcgaataggtaatag

SEQ ID NO: 60309 - DNA, 4289 bp, Homo sapiens
gcgcggggcaccacccgctcccccccccaaccctcctcagcagaagcagccggcgcgggtggcaggagtcagcccgcttccgaccgtaccccgcccgcctcccggggctcctgttctgtggccccgggaccctaaccagctcccggggcggttccctccgtctgggcgtccgagcgctgcccacatctttcattcctccctgcacctccttcccttcacttttgccccggctctctttctcctctctgtcctgctgtcgcctcctctcctcactccagcctccttccctggcttattctgcccaggaaagtttggaacccccgccccccctccccaatcaggtcaacctgactaggagtagggggagatgtaggaaggcctgagagttcggggggggggaagctggaagctggtttcccaaaaaatttccccccatcttctccatttaggggggggggaattttttttaatcctgtttttgacggagggggggggtgtttaggaaaaaggatgtgggaatggaaggggtagatgagtcaaccctctttcaagattccaacgggtggtgtgttacctgatccttttcgtgtgtggagttcagggggtcgggaggtttggcctttattcccacattcaaagttggaacctcccccaaattaagaatggagttttagtacccacttgtggcaggaaatcctggggggaaggggtccttttttcctttttcttttcttttttcccttttttttccttttggcaacccacacccttccacacacgctcaccccaaaattaaacaccaagatcctctaacttgtttggattgactgatgaagacataaagctctatgttttttgaggtggagtgagtggtttttcttcatttttaaatggccaaatgacagcttgacccagtttgctttccaatcaaagggcatttattttgaatgtctttttgtggcgcaagagccaacgcaaaaatgatggcggcttacaatggcggtacatctgcagcagcagcaggtcaccaccaccaccatcaccaccaccttccacacctccctcctcctcacctgcaccaccaccaccaccctcaacaccatcttcatccggggtcggctgccgctgtacaccctgtacagcagcacacctcttcggcagctgcggcagccgcagcagcggctgcagctgcagccatgttaaaccctgggcaacaacagccatatttcccatcaccggcaccggggcaggctcctggaccagctgcagcagccccagctcaggtacaggctgccgcagctgctacagttaaggcgcaccatcatcagcactcgcatcatccacagcagcagctggatattgagccggatagacctattggatatggagcctttggtgttgtctggtcagtaacagatccaagagatggaaagagagtagcgctcaaaaagatgcccaacgtcttccagaatctggtctcttgcaaaagggtcttccgggaattgaagatgttgtgtttttttaagcatgataatgtactctctgcccttgacatactccaacctccacacattgactattttgaagaaatatatgttgtcacagaattgatgcagagtgacctacataaaattatcgtctctcctcaaccactcagctcagatcatgtcaaagtttttctttatcagattttgcgaggtttgaaatatctccattcagctggcattttacatcgagacattaagccagggaatctccttgtgaacagcaactgtgttctaaagatttgtgattttggattggccagagtggaagaattagatgaatcccgtcatatgactcaggaagttgttactcagtattatcgggctccagaaatcctgatgggcagccgtcattacagcaatgctattgacatctggtctgtgggatgtatctttgcagaactactaggacgaagaatattgtttcaggcacagagtcccattcagcagttggatttgatcacggatctgttgggcacaccatcactggaagcaatgaggacagcttgtgaaggcgctaaggcacatatactcaggggtcctcataaacagccatctcttcctgtactctataccctgtctagccaggctacacatgaagctgttcatctcctttgcaggatgttggtctttgatccatacaaaagaatatccgctaaggatgccttagcccacccctacctagatgaagggcgactacgatatcacacatgtatgtgtaaatgttgcttttccacctccactggaagagtttataccagtgactttgagcctgtcaccaatcccaaatttgatgacactttcgagaagaacctcagttctgtccgacaggttaaagaaattattcatcagttcattttggaacagcagaaaggaaacagagtgcctctctgcatcaaccctcagtctgctgcttttaagagctttattagttccactgttgctcagccatctgagatgcccccatctcctctggtgtgggagtgatggtggaagataatgtactactgaagatgtaatgtagctttcccactggagtctgggatttgcaattctggaggttaatcatgcttgtactgtaattttactaatgaagttttaaattaacaaccactacttgtatgatatgaataatatttagaaatgttactagacttttaatcttgtaaagtggttgtgcttttagaagaaaaatattttacccagagttgcacatgttttatgaatttagtgcagctgttatggctcacctcagaacaaaagagaattgaaccaaatttgggagtttggggttttatgttttgtttttcttttctaaaatgaagtgagattgttcacacacacacacacacacacacacacacacaaacacaaaggacagtcatacattttgatatttgagccattcctaaagatttggggttttctaaaactaaagaatctaggaaccttgcctgcgaccaatcatggagccacgtgagctgatcgtggctgcacctggggggagggtagggaggaggggcatgccacctaatgatcaagccctataattagcttctcattaaagccgtgatggtgatgtgtgctgtctaaaatccaatgttgtgggtagagagaatgagtttgtgactaggagagactaaacttttgttttccttacccagtataaatatatatatatatatttaatctatttttattagaagtttttctgctctttcttacataaaagaaccccaagcatgcatctttcatgtgtgtaaataattcatttctgggctaatttcaaaagaatcccaatattgctgtatagaaagagaactagcttgcacattttaggtctgtgaaattttgtgagacttttcctgcactggacagtaaaaaaataataaaagacaaaaacaaatttaaaaaaaaaatttaagccacaaaaaaaggcacatagggaattatgtcaaatgtgtttgtgtccttaggcaaagctgtgggagtcttgaaatgtcacagtagtaaataacttattactttttgacaagttcttttttttctgttggaacactgaattcttctgtgcatatgtacatatgaatacaaatcgaaggcctctacctcctgggagttatacaacttgggcttgtttacctccacatgctgatgatgactattttttttttttttgagttcagtgtggagacttgaaacttgaatgtcccttccaacttttatattaaaaataaaaagacaagggaaattgaagatcatttttcacctgtacaaggaatactaatggatcgtcttaaaattggtctaggaaaaaaccttggtgtgtgttatggacaattaactgttaaagttattgtaagttatctgtatttagcagagtattttcaacttgagtgatctgagctgaatttgaagactattaataagttatgtttggaagttttaacctcaatgaagtaattatttgctgtgaaagaaacaaacattgaattactaaacaaagatggtgcaatatctttgttttttttttatgaggctcctgagaatcaacccaactgaagcatttcaattcacttgaatgagaaacgtgtttagtatcaaaagagcccaaaaagaccctggtgtgaaaggtacaatctcaaaggttggtcaattaccgtggcacactttctggtcactttgtacaatgtaaatttgaagtacagtggtgaaaacattaaatgtgacatttgaaaaaaaaaa

SEQ ID NO: 60310 - DNA, 3739 bp, Homo sapiens
  misc_feature (1)...(3739): n = a,t,c or g
tcttcgtctcccggagaagatggcggatcgcgcggagatgttttctctctccaccttccactcgctgtcgccgccgggctgcaggcctccccaggacataagcctggaagaatttgacgacgaagatctgtctgagatcactgatgactgtggcctgggcctcagctacgactcagaccactgtgagaaggacagcctctccctggggcgctcggagcagccgcaccccatctgctccttccaggatgacttccaggagtttgagatgatcgatgacaatgaagaggaggacgatgaggacgaggaagaggaggaggaggaggaggagggagatggggaaggccaggagggaggagaccctggctcagaggcacctgcccccgggccccttatcccctccccttccgtggaggagccccacaagcaccggcccaccaccctccgtctgaccacactgggggcccaggactccctaaacaacaacggaggctttgacctggtgcgtccggcctcctggcaggagacagcgctatgctcacccgccccggaggccctcagagagctcccgggccccctccctgccacggacaccgggcccggcggggcgcagtcgccagtgcgcccgggttgcgactgcgaagggaaccggcctgcggaaccccctgcgccaggggggacttcgccctcctcagatcccggcatcgaggctgacctgagaagccgctcgagcggcggccgcgggggacgtcgcagcagccaggagctgtcctcgcccggctccgactcggaggacgcgggcggcgcgcgcctggggcgcatgatctcgtccatctcggagacggagctggagctgagcagcgatggcggaagcagcagcagcggccgctcctcgcacctcaccaactccatcgaggaggcctcgtcgcccgcctcggagccggagcccccgcgcgaacccccgcgccgccccgccttcctgcccgtgggccccgacgacaccaacagcgagtacgagtcggggtcggagtcggagccggacctcagcgaggacgcggactcgccctggctgctcagcaacctggtgagccgcatgatctccgagggctcctcgcccatccgctgccccggccagtgcctgtctcctgcgccgcgcccgcccggggagcccgtgtcgccggccggcggggccgcccaggactcccaggaccccgaggcggccgcggggcccggcggcgtggagctggtggacatggagacgctgtgcgcgccgccgccgcccgcgcccgccgcgcctcgacccggccccgcgcagcccgggccctgcctattcctcagcaaccccacgcgtgacaccatcacgccgctgtgggccgcgcccggccgcgccgcccgcccgggacgagcctgctccgccgcctgctccgaggaggaggacgaagaggacgacgaggaagaggaggatgccgaggacagtgcggggtcccccgggggcaggggcacgggcccctcggcgccgcgggacgcgtcgctggtgtacgacgcggtcaagtacacgctggtggtggatgagcacacgcagctggagctggtgagcctgcggcgctgtgctgggctgggccacgacagcgaagaggacagcggcggggaggccagcgaggaggaggcgggcgcggcgctgctaggcggcggtcaggtctcgggggacacctcgccggacagccctgacctcactttctccaagaagttcctcaatgtcttcgtcaacagcacatctcggtcctccagcaccgagtcctttggccttttctcctgtctggtcaacggcgaggagcgagagcagactcaccgggctgtgttcaggttcatcccgcggcatccagacgagctggagctggatgtggatgaccctgtgttggtggaggccgaggaggacgacttctggttccgtggcttcaacatgcgcacgggggagcgcggtgtgtttcctgccttctacgcccatgcggtgcccggccctgccaaggacctgctggggagtaagcggagcccctgctgggtggagcgctttgacgtgcagttcctgggctccgtggaggtgccctgccaccagggcaacggcatcctgtgtgcagccatgcagaagattgccactgcccggaaactgaccgtccacctgcgccctcctgcctcctgtgacctcgagatctctcttcggggggtcaagctgagtctgagcggaggagggcctgagttccagcgctgcagccatttcttccagatgaagaacatctccttctgcggctgccatccccgcaacagctgctatttcggcttcatcaccaaacaccccctgctgagccgcttcgcctgccacgtctttgtctcccaggagtccatgaggccggtggcgcagagtgtgggccgcgccttcctggagtactaccaagagcacctggcgtacgcctgccccacggaggacatctacctggagtagcctgcccaccgctctgtctcctggccgtctgctccaggcgcagctggggctgaggatgtctcaagaggccaccatggctttggcaaggactggattggggggacatgggaccttacgcttgtgggggtctgcgggctgggaactctcgtcctcggtccccagggcgcagctgttggggctgcgggggagtggagcccccgtgcccctgcttttcctcagatccgttctttctctgtgttgtcctcctccttcccttcccagtctcccttttctctctcctggtgtctctgcccctctctgtgcctgcaaaccttatcctctattcttcactttggggtcagaacttcgggggtgtgggaggaggtgcggctctaggggaacaggtaatgtcggcttccaagtgatgccctcctgccactcccctgcgatttataagggaattttaatttttatagtgaatctcaagggatcatcccatccttgaccacagggacaagaggggccccctcgccccagccccaccccacatggagctcagggggaagcagggaggggttcccaaaagagccctgcggaggctaggagtggttcttgatgctcacctgaagcccctagacgctgctaggagggggggccctcctgggcccccaatacccctaccgcttgccgctgctagcgcacccctgcagtccagcgtgcatccaccccacgcacgccccgtgctgtgttcctgggccctgcccatggcctcaataaactctctgcttggtgtgacattggctgtttctagagggtgctaagacatggggccaggtgcccaggggctgcccattgtggtagggacagagtccccagtggcgggagtgttgtggcaatctcacccttttagctctttccgaaattgtgccgggggtccctgcggtgctgctctggggccttatctgaggtgccgtatctagaagcacccttgggaattctccctagatacactcgattggccacagaggaatccgaggctgtgcaatggggtgtcctttccacgtgcacggactgggggccagcacggctcaggtcagtgtgtagtgggggcatgaactccttgaagaacaatctggccgggcacggtggctcacgcttgtaatcccaacgtgtcttcaggtctctttccctccagccggcccttaagacggctgttggacgtgctcgngagtccttcgcctgtctgccttccacctctctgcagct

SEQ ID NO: 60311 - DNA, 1080 bp, Homo sapiens
gcttcagattcttttctgccatccaatgctgtttctatgtagctatcaaaatgcttcttaattcttttttgatgatcttcaggtgaaaaccacctgataacttggtatgatttttcctcctctttaatatctgggatcaaaaactttccactctgatgaagcatagtcacattatgaccatgctcttgaagaatctgagacacccggtccaacagtaggtaatggcttccacccagtgtagatattgtcaggattttggcagcctctgagagcaggaccccagaaagaaggaaggccactagaagcagcacccgctgcccaaccatgctcacttccacagaagcagcggatctcagcctgggctgcgcgccctgcgccgggctaaggactctgtgcgcgcctcagtactccaaaggcactggctgtgggcctaggaagaggaaatctggaaacctacagtctccatgcctgctcagccaagaaggagctcactgtgggcaccagagacagggacccaatgtggagacctgtgagcctgtgtccggccctgaactctcaagcacagggcaggcttcctgagcattgaagagaatatgtgggagaacaaaacagaaactgaaagaatatgcaaggtgtctttcttggatgttattccatgatagatagtaggggcaggagtgagagaggctgactaggtctggacatggaggctggaagagtcagggtgtgattcggagaggcgcatgagaaggaaggtggattttaaggctggaaatctgagggtcagtggtccaagtcactcagagacagaatcacagcatagcccttgctgatggcaaacaaaggaggacaagaggactggaaagaattctgctagcaggcaggagctagtaaggatgaatttgtagcaaaattagcaagtggaaaggatgatttttggccatttttcctgttcttcaagaaaacaggagataactagaaggactagagaatggggctgccagaactagtgggaagctccctagaaatggtgacatcgcccaccaaacagaccccgccaaggctgcacctggccttatg

SEQ ID NO: 60312 - DNA, 2957 bp, Homo sapiens; identical to SEQ ID NO: 58893

SEQ ID NO: 60313 - DNA, 1821 bp, Homo sapiens
cttcacctctgtgttttcttctagaagatgcattttgggtctgagaggagcattttcctggaaggccatcttttaaggcccctgcttgctgtcatagtgcagagcagaaacttgcacactatttagagagctcccttcccacctctctgcccagccttgggaccatgctgtcccaggttcaaggataaaaaccatcaggcccaagtgccatccatagtccatctccagagtcttcctccacaaactgggattcatccccgctgaaaaagcacaatctaacagcaagggaacaaaaaaaccatgctatcacataatactatgatgaagcagagaaaacagcaagcaacagccatcatgaaggaagtccatggaaatgatgttgatggcatggacctgggcaaaaaggtcagcatccccagagacatcatgttggaagaattatcccatctcagtaaccgtggtgccaggctatttaagatgcgtcaaagaagatctgacaaatacacatttgaaaatttccagtatcaatctagagcacaaataaatcacagtattgctatgcagaatgggaaagtggatggaagtaacttggaaggtggttcgcagcaagcccccttgactcctcccaacaccccagatccacgaagccctccaaatccagacaacattgctccaggatattctggaccactgaaggaaattcctcctgaaaaattcaacaccacagctgtccctaagtactatcaatctccctgggaacaagccattagcaatgatccggagcttttagaggctttatatcctaaacttttcaagcctgaaggaaaggcagaactgcctgattacaggagctttaacagggttgccacaccatttggaggttttgaaaaagcatcaagaatggttaaatttaaagttccagattttgagctactattgctaacagatcccaggtttatgtcctttgtcaatcccctttctggcagacggtcctttaataggactcctaagggatggatatctgagaatattcctatagtgataacaaccgaacctacagatgataccactgtaccagaatcagaagacctatgaaaagaaagttgtatgtgccacataaaactctgaatataaaagttgctgttctactattttaactactggcaaagccacttgcatttttcattagtagcaacaatagcaatttagtgattttccttttctgacattcaatttcaatctcagatcaaatactaataaacaattagaaatcttactttaaaaaacttataactcacttgtcttcattcataattttgttttcacctggtttaaagaatccagatattttactgcaaaagttcagatggaaaagtaattgacagtttcacctttgtctcattttatatgatttattacagtgtaagtttttcaagtggaatctagaatcaaaatacagggagagatatgaagacctattcagagtttcatctggggatgaaagctatggaagatgatgtacaaatgttattgatggagaaaatggttgggtgtgtcctttctggtgaccatgagaaaataatatgtcttgatgaagtcttttcattagtcactcttagaattctaaagtgctttgcacttttcaatatgttttgaatcattaggtaatttattctggatgatattctccaaaattcaattcagttattatattcatttagcattaagtcaaggagactgagaatgactcaagggacgtcatagtaccatagttttaaggaccaaggtgtgcccagaattcaagtttcacaaatcccaatg

SEQ ID NO: 60314 - DNA, 921 bp, Homo sapiens
cgtcgaccgaaggactctccgtttgatgcagacacaattgtaatggagatgtaaaacttcttagcaatcagatggataaattgtttgcttttcatttattcacatttcatggattgttacacttcctcgatgggagcattcaaaaactaatacaagctgagattatattgtctgacaattcaagtattttagttttagaaaacaatttcctatttaaagtaaaaagcaaacaatttatccatctgattgctaagaagttttacatctccattacaattgtgtctgcatcaaacggagagtccttcgtcctcagtatgattgttactggctgagaacatacggtgacctgtgttctgagtgcctgcttggaaaagacctccctgtcatctgccatactacgggacaaatcagtatctactcaaattcccacttccagaatgagaggactcatcaggggtttaggagtttgcaaagccttcaaaatgtatcgtgcttgaattttgactcttctgaaatagaataactgacaaatgctcaaaaaacaaacttgtttaacttttactgaaaaggctctcagtgaaaacttgttttgaactctactagtaaggtagaatattagtttttcttcccctccacaccagaaaaggcagttttctcttttttttttttctggcatgcagcatatataaaatgtgatctagaattgaaattgtaaaacagaataatcctcttaaagaaaatcagcctatgaacagtcagacttgtccttccatggaaaacataatctaaacttctttaaaaactggccatattttttcagtctgtaattccgaataatgaagatgggcataacaaatttttttgcttactagggaatgcgcaaaagggatgagatgggatacacaggttttaaaaaaaaaa

SEQ ID NO: 60315 - DNA, 2848 bp, Homo sapiens
  misc_feature (1)...(2848): n = a,t,c or g
ttttttttttttagttcaatatgattttatttaaaaatgtgtacagctgaaggagggatctgatcttttgttaaatgaaaccaattttcacggtatatatttggccattttagcttcgtagtgaataataccagaaaaggaagtttctgttcaagatcctcactccagcacactcagccaggtgcctgggcaagatgacacatttcctggtctgaagctcacaggccaatcctctcactgaagtgaaacaccaattctccaggcatacacacacatacgcacatcttattttcactgctctacacagggacctgagaatccttaattttaaagttgggaaaaacgtgaaaggattccttaactcattgtctgcgacaaatccaactacctgttaactcttaacaattgcaagtataaaatacttgaaatttacaagatgctccatttaatggaacaactcaaatgctaaaaaattaggtcaaataacatgctttaatatttttaaatgttacttaaaaacttatttgagacaagatacggcagcacatttcttggtattataaacatcacatactgacgactgcatacttgatggccaataagatttaaagaaagataataaaccatactggtatacaacaatatctgcagggaatgtcatgttttacattttgttaactgaaattaaacctgacaaaaaaaccaaagatctacaaaaccgacacccatgtcattttaaatgatgaggtagattgtttcctatgcagtaaagtgaagataaaaaaaaaatccatacaacttccaaatcctctttaaaaaaaaaaaaaagttgggttatagtcactttcacaaacaagacattcataaactataaggtggagaggtcatactcaggcaggttctgtacttgatgtgttacttggagattcaataatcagtcttgggtcaatcaactctttccaaaatacagtgatcttgctctcctgtgtcacagcgtactccactacctcggctccattttcattgtgataaactaaatcaaatttccccaggttctcctcaaaggcaggtaaggatgaaagaatttctatatctacttgctgggtctctggattgtggcttaatattcttccttccttgtagtcagagacatcaggagagtaactggatgttagctccaaaagcttaaatgcaatcttttctccaacttgaggggcagctgctaacagtggtaacagactatagtccttcttgggtgtctctactggattctggataatagtagatgaattttttaccacgtcatttaattgctgttgcctctggttgtcagtgcttctatttacaacacaggaaacaggatgccctcgtcctcgacctctcccccgcatgccccgtcccttagctcccttccaagaaaaaaggttctcttctctaccccatcctcttcctaaactagcagggagagacacactgggagaagcaccaggagcctgtccaccaccatttgagccagaacgcctccatccagcagcacctgcagtctgtgatgacagccctgggcctggacgacctcttcctgcaaaaaggcctactgtctttaagaaacccgcagcacactccggggtgctcgatgacatcaagcattggtcgtctgactctgcactagagtctgaactggaagatgttgttccagaggtcttgcccttgctgggggtaaggctaaagccaagttttatagccagtttgtctgcagttgtatttttggtagagggttcttcctttgataactcagttggtaatttctctgaggaatttctggcctccaaagtgactttgctgggaccatcactgatagattcatcacaagactcagactccgaggaggaactgggactctcttttgagcaaacgcttacactacctttccttttggctttaacaaggctgtttctagcagaaccttttggagaactacatctctgattggcccagtctttcactgcctgtactttcggagacttgggattcttagccttttttttatattcacatttctcctttttctttggtgattttcttttggcctcttcgttatcatcacccactgtgccacaggttgctttattttttctcttgttttttttgctgacagtctgatctgtgacagcttttggttccagatccaagaccttctcattattgttattgttctctcgactcttccaatgcttctttgaatatttgcaatctggttcagtttcttcaccctcctctaactgaaatgcccgcttctttgcttttctaagagataaattaatgtcaccattactgatgactacagaattctcagcaactcctctctcttctaatttaactctgaggcagtcgttgtctctcacaaggcgcgcgctctcggcggggggcaagagccccccctccaggtagaggcctaggaaggccccagaactgaagccgaagcgctggcggatgagactaatgagatctgtgacgactcggcatctgttcaagtcgaccagaagccagaaggccgtacagtgcggggtagctggcggcgggtaatcaaattgaagccgtagcctaaccgtctcggaagctgccatcttgcttggtgctcaacggaagccgagagataccacggngccaccgagaggcgtgctcgggcggctcgcccccgccggagcctttggcgtgtgccacctagtggtgaaaactggctactacaggctgcgtctaggcgagaactcggagcggtggtgatttcattcaatttttgtcacggcagggctgaggaagggaataagttgaatgctttattacatttcta

SEQ ID NO: 60316 - DNA, 1325 bp, Homo sapiens
aggcgccggagcccagcggctggcgccagatccaggctcctggaagaaccatgtccggcagctactggtcatgccaggcacacactgctgcccaagaggagctgctgtttgaattatctgtgaatgttgggaagaggaatgccagagctgccggctgaaaattacccaaccaagagaaatgtaggctgggtaccctgaatcaccccctgcaggatggactttctggtcctcttcttgttctacctggcttcggtgctgatgggtcttgttcttatctgcgtctgctcgaaaacccatagcttgaaaggcctggccaggggaggagcacagatattttcctgtataattccagaatgtcttcagagagccatgcatggattgcttcattaccttttccatacgagaaaccacaccttcattgtcctgcacctggtcttgcaagggatggtttatactgagtacacctgggaagtatttggctactgtcaggagctggagttgtccttgcattaccttcttctgccctatctgctgctaggtgtaaacctgttttttttcaccctgacttgtggaaccaatcctggcattataacaaaagcaaatgaattattatttcttcatgtttatgaatttgatgaagtgatgtttccaaagaacgtgaggtgctctacttgtgatttaaggaaaccagctcgatccaagcactgcagtgtgtgtaactggtgtgtgcaccgtttcgaccatcactgtgtttgggtgaacaactgcatcggggcctggaacatcaggtacttcctcatctacgtcttgaccttgacggcctcggctgccaccgtcgccattgtgagcaccacttttctggtccacttggtggtgatgtcagatttataccaggagacttacatcgatgaccttggacacctccatgttatggacacggtctttcttattcagtacctgttcctgacttttccacggattgtcttcatgctgggctttgtcgtggttctgagcttcctcctgggtggctacctgttgtttgtcctgtatctggcggccaccaaccagactactaacgagtggtacagaggtgactgggcctggtgccagcgttgtccccttgtggcctggcctccgtcagcagagccccaagtccaccggaacattcactcccatgggcttcggagcaaccttcaagagatctttctacctgcctttccatgtcatgagaggaagaaacaagaatgacaagtgtatgactgcctttgagctgtagttcccgtttatttacacatgtggatcctcgttttccaagaaaaaaaaaa

SEQ ID NO: 60317 - DNA, 2676 bp, Homo sapiens
tttcgttgcagcgaaaggaaatctcgctcttccgaaagtcctccagggcgagagaggaaagggcctaggtactgtgctggggtcgcacagccggccgagacagtgccgggacggggagccaggcttccgagtgcgcccggtcactgactcctccgcgctttcctcgtgcgcctgcagcccttggttcttggaaacgccggcgccttgttcagggctggtggggctggggcgcaaggtgcagctgacaatgcccgagaggagccgcagcctctggtggagttcggtcgggtgtgggggtagtcaaggaaagaagcaaagggaatacctcctctgaaaaatggcagaagcagttttccatgccccaaagaggaaaagaagagtgtatgagacttacgagtctccattgccaatcccttttggtcaggaccatggtcctctgaaagaattcaagatattccgtgctgaaatgattaacaacaatgtgattgtgaggaatgcggaggacattgagcagctctatgggaaaggttattttggaaaaggtattctttcaagaagccgtccaagcttcacaatttcagatcctaaactggttgctaaatggaaagatatgaagacaaacatgcctatcatcacatcaaagaggtatcagcatagtgttgagtgggcagcagagctgatgcgtagacaggggcaggatgagagtacagtgcgcagaatcctcaaggattacacgaaaccgcttgagcatcctcctgtgaaaaggaatgaagaggctcaagtgcatgacaagcttaactctggaatggtttccaacatggaaggcacagcagggggagagagaccttctgtggtaaacggggactctggaaagtcaggtggtgtgggtgatccccgtgagccattaggctgcctgcaggagggctctggctgccacccaacaacagagagctttgagaaaagcgtgcgagaggatgcctcacctctgccccatgtctgttgctgcaaacaagatgctctcatcctccagcgtggccttcatcatgaagacggcagccagcacatcggcctcctgcatcctggggacagagggcctgaccatgagtacgtgctggtcgaggaagcggagtgtgccatgagcgagagggaggctgccccaaatgaggaattggtgcaaagaaacaggttaatatgcagaagaaatccatataggatctttgagtatttgcaactcagcctagaagaggcctttttcttggtctatgctctgggatgtttaagtatttactatgagaaggagcctttaacgatagtgaagctctggaaagctttcactgtagttcagcccacgttcagaaccacctacatggcctaccattactttcgaagcaagggctgggtgcccaaagtgggactcaagtacgggacagatttactgctatatcggaaaggccctccattttaccatgcaagttattctgtcattatcgagctagttgatgaccattttgaaggctctctccgcaggcctctcagttggaagtccctggctgccttgagcagagtttccgttaatgtctctaaggaacttatgctgtgctatttgattaaaccctctactatgactgacaaggaaatggagtcgccagaatgtatgaaaaggattaaagttcaggaggtgattctgagtcgatgggtttcttcacgagagaggagtgaccaagacgatctttaacaattcaacctcaaatttctaatttcaccaacaactatttattgagggctaggtaaaaagttctttttgttgtaatcgtccattaattcataagttttaaagggcatggtgctcccagcaccagaaaactatcagtgtttttaaagataaattacacaagggaggagaaagatccctgtgctaggactgcagattctatacttgcgttggcctctaactctccaatccagagcctcctgcctctggcgtcagtcttttccctcatccactcactggggagattggactagatgagtcctgagaggacacttccaacaagagacatttattctctgattttacctgaaaatggtagtagtttacatttatacagtacagtttatgaagcactttcatacgcaggcatctcttgttacctacatctaagctgttcccgaaagagtgttacagaacacaacagtattgtacaatattcgataagcatatcttcactgcacttgttataaaaatgagtggtgaaataatgtttggagacataatgaaagcgattaacatttggcaaaatataataaagcctttttgtaattggtgagaaagtcatgaagacttaagttgcctcagggcatctggtggcaagaggagggagatgggtggctgggcatggtggcccatgcctgtaatcccagcacttgggaggccttgggaggccaaggcgcatggatcgcttgagcccaggagttggagaccagcttgggcaacatggtgaaacctcctctctactaacaaaaattatccaagcattgtggcacatgcctgtaattccagctgctcaggagactgaggtaggaggatcgcttgagcccaggaggaagaggttgcagtgagcggagattgtgccactgcaatccagcctgagcaatagagcaaggtcctgtctcaaa

SEQ ID NO: 60318 - DNA, 1330 bp, Homo sapiens
  misc_feature (1)...(1330): n = a,t,c or g
ccgagcggcggagtccgggacgtggagacccggggtcccggcagccgggcggcccgcgggcccagggtggggatgcaccgccgcggggtgggagctggcgccatcgccaagaagaaacttgcagaggccaagtataaggagcgagggacggtcttggctgaggaccagctagcccagatgtcaaagcagttggacatgttcaagaccaacctggaggaatttgccagcaaacacaagcaggagatccggaagaatcctgagttccgtgtgcagttccaggacatgtgtgcaaccattggcgtggatccgctggcctctggaaaaggattttggtctgagatgctgggcgtgggggacttctattacgaactaggtgtccaaattatcgaagtgtgcctggcgctgaagcatcggaatggaggtctgataactttggaggaactacatcaacaggtgttgaagggaaggggcaagttcgcccaggatgtcagtcaagatgacctgatcagagccatcaagaaactaaaggcacttggcactggcttcggcatcatccctgtgggcggcacttacctcattcagtctgttccagctgagctcaatatggatcacaccgtggtgctgcagctggcagagaagaatggctacgtgactgtcagtgagatcaaagccagtcttaaatgggagaccgagcgagcgcggcaagtgctggaacacctgctgaaggaagggttggcgtggctggacttacaggccccaggggaggcccactactggctgccagctctcttcactgacctctactcccaggagattacagctgaggaggccagagaagccctcccctgactgcatgtggaagggcacacagcagcaggcagggaggaggcggaggtggcaaataaacctgggagtagaggtcagtgaagagagctggcagccagtagtgggcctcccctggggcctgtaagtccagccacgccaacccttcctttagcaggtgttccagcacttgccgcgctcgctcggtctcccatttaagactggctttgatctcactgacagtcacgtagccattcttctctgccagctgcagcaccacggtgtgatccatatttgagctcagctgggaacagactcattcctaatgttgtaaaatacagcccgaactgcaagttgcttattgtttcaaaatccagtggatatcttgacctacgtggcttggaagataagtggttttcccaaaaaccgtgttattggaagcggttgcaatctggattcagccgattccgttacctantgggggaaaagctgggagtcanccattaag

SEQ ID NO: 60319 - DNA, 2193 bp, Homo sapiens
cctagttgaggctaacagtcagtatccagcctcaacattcagcagaggccccagatcagcgtctgagccaggccaacaatgaccaaggaggatgggatcctgggtgcagctcatcacaagcgtcggggtgcagcaaaaccatccaggctggacagtggctggacagttccaagaaaagaaacgcttcactgaagaagtcattgaatacttccagaagaaagttagcccagtgcatctgaaaatcctgctgactagcgatgaagcctggaagagattcgtgcgtgtggctgaattgcccagggaagaagcagatgctctctatgaagctctgaagaatcttacaccatatgtggctattgaggacaaagacatgcagcaaaaagaacagcagtttagggagtggtttttgaaagagtttcctcaaatcagatggaagattcaggagtccatagaaaggcttcgtgtcattgcaaatgagattgaaaaggtccacagaggctgcgtcatcgccaatgtggtgtctggctccactggcatcctgtctgtcattggcgttatgttggcaccatttacagcagggctgagcctgagcattactgcagctggggtagggctgggaatagcatctgccacggctgggatcgcctccagcatcgtggagaacacatacacaaggtcagcagaactcacagccagcaggctgactgcaaccagcactgaccaattggaggcattaagggacattctgcatgacatcacacccaatgtgctttcctttgcacttgattttgacgaagccacaaaaatgattgcgaatgatgtccatacactcaggagatctaaagccactgttggacgccctttgattgcttggcgatatgtacctataaatgttgttgagacactgagaacacgtggggcccccacccggatagtgagaaaagtagcccggaacctgggcaaggccacttcaggtgtcctcgttgtgctggatgtagtcaaccttgtgcaagactcactggacttgcacaagggggaaaaatccgagtctgctgagttgctgaggcagtgggctcaggagctggaggagaatctcaatgagctcacccatatccatcagagtctaaaagcaggctaggcccaattgttgcgggaagtcagggaccccaaacggagggactggctgaagccatggcagaagaacgtggattgtgaagatttcatggacatttattagttccccaaattaatacttttataatttcctatgcctgtctttaccgcaatctctaaacacaaattgtgaagatttcatggacacttatcacttccccaatcaatacccttgtgatttcttatgcctgtctttactttaatctcctaatcctgtcagctgaggaggatgtatgtcacctcaggaccatgtgataattgcgttaactgcacaaattgtagagcatgtgtgtttgaacaatatgaaatctgggcaccttgaaaaaagaacaggataacagcaattgttcagggaataagagagataaccttaaactctgaccaacagtgagccgggtggaacagagtcatatttctcttctttcaaaagcaaatgggagaaatatcgctgaattctttttctcagcaaggaacatccctgagaaagagaatgcacccctgagggtgggtctataaatggcctccttgggtgtggccattttctatggtcggagactgtagggatgaaataaaccccagtctcccatagtgctcccaggcttattagaaagagggaaattcccgcctaataaattttggtcagacccggttgctctcaaaaccctgtctcctgataagatgttatcaatgacaatggtgcccgaaacctcatttagcaatttttaatttctccccggtcctgtggtcctgtgatctcgccctgccgtccacttgccttgtgatattctattaccttgtgaagtaggtgatctttgtgacccacacccacaccctattcatacactccctccccttttgaaagtccctaataaaaacttgctggtttttgtggcttgtgaggcatcacggatcctaccaatgtgtgatgtctcccccggacgcccagctttaaaatttctctcttttgtactctgtccttctatttctcaaaccggccaacacttagggaaaatagaaaag

SEQ ID NO: 60320 - DNA, 1115 bp, Homo sapiens
gaggtttaacttcagcctagtgcacggaagacatggtaaatggtcatcgcttctcccttgaatggaccgagggcccccgactcccatagcactaccccataaagtctaggctcccgacttcggcattcaaggccttcagtgataaatccaggcccaccatccgtccccacaccacctttcacacaccccctgcccccaccctcgcaggcctcttattttagctgcacatgctctccctgcctccgaaatgcttgcggcctttcctttccatttattgacgcccttgtgttctctctgagcagcccttccctgtgtccctagctggagttcctcactccctcctcagtgtcctgaagcttcttgttagagctgctgcagccactgcgtgtgtctgacagcaagtctgcagcctctgcctcccttgcgggactgcaggtgacttgaaggcacagcctggttcccaggaggctggctttcgtgccactggccccagggctgaaggcaggccagctccagccacctgctgagtctcctaagtccagagtgtcagagacctcaagagactctcacccactgacccacctggggactctggaaatcgggatgtgaccagggaagaccctgtcacggggcctctgaattcagcctcatcccaagtccccactctatacttgtgtctgcagaacagcctgcttggacacagctcggtggaagatgcgagggcaacgatggagctctatcaaatctcccagagaatccgagcccgccgagggctgccccgcctggctgtgtcagactgaagccccatccagcccgttccgcagggactagaggctttcggctttttgggacagcaactaccttgcttttggaaaatacatttttaatagtaaagtggctctatattttctctacgccaaaaaaaaaaaaaggggggggccgtttaaaagaaccaatttttacgcccggggggggggaaggtaaaattttttttttggggccccaaaattaaattccgggggccgggttttaaaaacgggggggggggaaaaacccgggggttacccaaattaaagggtttggaaaaaaacccctttttggcaggggggggaaaa

SEQ ID NO: 60321 - DNA, 4114 bp, Homo sapiens
acggtacagcaagtcaccaagattttgcacagttgcccctctgttcttcgagaggacctgggtcaactggaatacaagtttcagtatgcatacttcaggatgggaattaagcatccagacattgtaaagagtgagtacttgcagtattcactaaccaagattaagcagagacacatttacctggagcgcctgggacggtaccaaacccctgataagaaggggcagacacagatccctaacccattgctcaaggacattctcagagtttcagaagctgagtttttggccaggacagcctgtacttctgttgaggagtttcaagtttttaagaagctcctggctcgggaggaggaggagtctgagagcagcacatctgatgacaaaagggcaagtctggatgaggatgaggatgacgatgatgaggaggacaatgatgaggatgacaatgatgaggatgacgatgatgaggacgacgacgaggcggaggacaatgatgaggatgaggacgacgaccaggaggaatagctgtgatggaaggactagagcgaaagggcccagagatatcaaggaagcttttcattctcttaaagcttttgggtcctttacttgaatcttctcaagttattttttattctaaaactggtctcttgatgaaaaaaattataagtcacctgagaggcagacagatcaaaccaaacaggaaacaggaaatgcatgtttgatctgttgtcacgtgtctgtggggagggccctgtcccatcctgaataagatacttatgttgagctattcacatcaaggggactcaatatatcaacaattggttttatttttttctcttttgaatatgttggtgataattccgtgacagttggaagatggggttcattcttccggttcaggaatcactatgtatttccttcttgtgataaaaataaaattacgagaaggcaatgtgaggttttagtacatcatagcactttattttatgaaaacatgtagcagattttccacaaaaatgcttatttttaatccaaaagtatattgcttcataatggtattcagtgcacagcagagtaaaagaagttaattcatgatgtactggttaattttgcatggcttcttaaggccagcaaaatgctggcagttttctttatctttgtgaagaacaggcccttcctgtttggggaagttggcttttatgtcagctcttggccagtggtcacttccaagcctggtgtctccggccctgtagtctgtagtgccagactgtgctggcctggagagtgctggggcaggtggaggccagggaatggtcccatacagttatctcccctgccctggttacagacagcttcgagaaccagaggagaagagcatagggtcatggagcaggtggggttaaaccagggccccaaggagcaaatccgtgaccccccaaattggttttggggggggggggggggcttgtcaccttagggaactcaatgagtccgaagaacaatttgaaatgttgggaaaagagaagaggaatttgatgtcagccggggtgatccctgaggtagaggcctgtctctgatggcatgagctctaagagggtcctggaggattggtacatcctagaacattccagttagccctcttttaggggaaactggcataggattgatgcagaaggcatttttgatgatgggaccaaaattcaagtctccttggtagcattctaggatcaactagatcctaggatctggtagattgtaggattctagtgggtagaggccaggggtgctgtgaaacatcctgcagtgcacaggatggtcccacaagagaggatgatccggcccagaatgtcagtgctgagcctgagaaactcatctaaggcctggtccacaacagtaatgtgactgttcactcgtgacaacttcagatggtaaatggacttaggatcgtattattttatttaaaagaaaaataaggagctggtttttcagccgggttcctttcccctatgcactggaatacccctggtaggtgtgagctgcatgcaattgtggggattcagcactgaaatctaggtgcttttgttttctccagcagcctcgtcttacagcgtgactgcaaagaaaaagacttttgttttgcaaaagaaaagcagctcggtgactccgtccacatcgccacagttgagtcagatggcagtggcagtcctttgccagtggaaggagttcctgctaaggggaggtgcaggaggtgagctgatacctgagtggggcccttgcctgttgggttctctactggaggacagtgggcacagcaaagattcccttacttgtacctggcagcccacacgcaatggggaaaagggagagtttgtctttattgccttgcttggccataggcaaaactgtttggaaatgagacatttcactgtgccagtgttttcattttctcttccattgtggcatcccggtcactgccaccctccctagaacctaggctgttgttgtacccagtcggaggactaagtagaatcctcagtctgcactttgttagatgatcagtccatcccggtttcattagcagatgggtaattcagcaactcaggattgcttctttcattttgatacagaaatctttatgctcctgacagttttctgattctattattactaatttccttgggtggactttgagtattttcaaggaagccatttgagtttttaaaagaagccacatgggaaaagctgtggtggcctctttggaatgtttcaagaacgaactgtaattcctgagcaccaggaagtctttttacttgatatttaatgtggaaaacatcccaatgggcaagtcctgtgacagcacttgggactcaggagccagttcttgttgacacaaggcttctaagctaacactggagcatattagcatttgctgtgtggcaccaagcttgggactcaggagccagttcttgttgacacaaggcttctaagctaacactggagcatattagcatttgctgtgtggcaccaagcttgggactcaggagccagttcttgttgacacaaggcttctaagctaacactggagcatattagcatttgctgtgtggctgaggggcttgaggtcctagtagggagtagaaagtttcctagtaggattcacctacttttccagtgatatcactcgatcttagcatctgctagtaatgctgtagcttacatggacaaacagtgacaggtcccagggcggcaggaagtccgcagtacgcgtttgtgaacgtggtttctctcagttcacccagtgacccttcgctgagctcgagacccttcattgagctccaccttctgctctcaagtgggtctggagcctggggaacagctcgggagtacaggtgaaacttctcgaattgcctgttccttctttctgaaaatgacaaattgcagaatacacagacacatgcacatgaaattttaataaagataaaaagcctaaaatatactctaactcttcaaaaaacatttttatgaaagaggaaaggaaggaggccctctttgtggctggaatgctggctctgagcagagtcagggtgacgcggcagggcgctggctttccagctgggtcagcggtcgtgaggctcaacacgagaggaggtggggtggctgctttggttgtaacattagcagggggaagacagctgcttagaagcatggtgggaagcagatgtggtgaagtgccgtactgttctgcttacaaagatggggatgtctaagatcgtgtttactacctgatagcctaaaacagtatcacttgagtcatggactaaaaggaaccttaaacattgtccagcccagcccaggtgtccatctctgttgcactgagacttgtaaggcgtccttgctgcttcgtggcagtgtgccttagctttccaagcaggggtctgaatagctttttccatgaaaattcaggggtctttctttgatacccttgtgaacttgtcattcaggggatggcttccactgtttaaggctgaagcctaggtgatctcatagaacagggttcaccaaataaggcccatgggccaatttggccaccacctgttattgtaaataagttttt

SEQ ID NO: 60322 - DNA, 3661 bp, Homo sapiens
aattcccggttcgacgatttcgtcaggtcgggagtgagaaggaccggcctgggctgactgctctcccctcgcgcctagggagccggtcggagagcgcgattggggtgcggagccccgacgctgccctgccccggatttcattccgcggcgggggctccgcgagcggaattccggcggctgccgtgactccagtgcaacgtgacgacagcatgtacgatccctgaatgggcccgtgggcatatttagtcattcatttttgatcaggagaaagaagacagccatcatttgaaaggtaaagcttcagcgactgaaggagtgtggactttttgaatttcaagaacagtaaagttggaacacagcagagggtgtgtaataaaatacagattggaaagaagactgatgaagaaaaataacagcatgattcaggcacaccattgagttctttgggatgcccgaaagtgtctggttgggaaacatgaaatagaagacgagaacctgcctcagcaagcgtacctgagaatacttttaaaggaacctgttgataaatgcaaaacagtggctgttgcaggtgatggaactgtactggaacaatgggagaagctggtagcttataggaagccaagatgaccagaatgtttttaaataatccaaggaagaatcctgctcaaaaatgaggtgaattaatacttgggcgctcaggaaccctggacagctacatgaggtgtttaaaaactgccctgaccatcttgccaaacaagtctctgctcatgaggccccacaggatgaacgagccgaggcaggacagtgtcctgccctgtcggaacagtgactgctgacctgccaagagagagctggggactgcctgctgtctgccagtacaatgaaggaagtggtttattggtcacccaagaaggtggcagactggctgctggagaatgctatgccagaatactgtgagcctctggagcatttcacaggccaggacttgatcaacctaacccaagaggatttcaaaaaaccccccttgtgccgagtctcctctgacaacgggcagcggctcctggacatgatagaaaccctgaaaatggagcaccatttggaagcacacaagaacggccatgccaatgggcacctcaacattggcgtagacatccccacccccgacggcagcttcagcatcaagattaaacccaacgggatgccaaatgggtataggaaagagatgataaagatccccatgccagaactggagcgctctcagtaccccatggagtggggcaagacttttctggcctttctttatgcactttcctgtttcgttctcaccacagtgatgatctcggtcgtccacgaacgagtacctcctaaggaggtgcagcctccactaccggacacattttttgaccattttaaccgggtgcagtgggccttttctatttgtgaaattaatggcatgatccttgtaggactctggttaattcagtggctgctcttaaaatacaagtctattattagcagaagatttttctgcatagttggcacgctgtacctgtatcggtgtattacaatgtatgtaactacactcccagtacctggtatgcatttcaactgttctccgaagcttttcggagactgggaagcccaactgcgaagaataatgaagctcattgctggaggtggcttgtctatcactggctctcacaacatgtgtggggactatctgtacagcggccacacggtcatgctaacacttacctacttatttatcaaagagtattcccctcggcgactctggtggtatcactggatttgctggcttctcagcgtagttggaatcttctgtattctcttagcgcatgaccactacactgtggacgtggtggtggcatattacatcaccacgagactcttctggtggtatcacactatggccaatcagcaagtgctaaaggaagcttcccagatgaacctcctggccagggtgtggtggtacaggccatttcagtactttgaaaagaatgtccaaggaattgtacctcgatcttaccattggcctttcccctggccagtagtccacctcagtaggcaagttaaatacagccggctggtgaatgacacataacagctgtacaaagtggggaaaagacaaattgtccgaagtgctaagaactccatgagagaagatgccataaaataaacacctccctaatcctattatctttcaatggttaccttgacttaacctattgagttacctggtcagcactgtgatctttttttctctccaaaggacctgcgttggacaacaataaagaaaaatttaacctatcatgcactgtacacatttcctgttcataagtttgggatttacataacccgcaaccaccatgttcctttgtatatgatgcagcagcataaatgtaagcttttatatcataagttctggtctttccagtcacatctggaaataaagcgtattattttcttgggaaaacatacttttcatatctcttgccccaaagattgggctgtaagccattttctagcaaatgtctctatgaaggtttctaagtacctgaatggggtttgattctgaaatctttctacctgttgcaccgatattcaaataaaaatgatagacacagaaaggtttggtaactttgggttttgtaaaatcagcaaaggcagtgtttcaaaaagtgcaaaaaaaaagattctgttataaagtgattttctaagtatttcctaactttatttttcaaaatgatgttatgaacaccaaatttaaagatttttaacatgtcagagagaagagagttaaaatttaaaaatgcatcttgggagagaaatttgtctatgtttctagtgcctttcttgtcttgattgtatggtcagtaggcaatcttaaatgtttttatttaaaataaagtattccttgaaaatataaatatatgtatacactactaaattttgcatttatagctaaattgaatcagaagactgcttatggttttaaaattgcaatgacttaaataatgaggttgttaattagagtcagagcctgttcacatattgtgatcaggtagcaatgacatgtaccacttaaattattttatcgtcgatttggtagttcgattttaactactcaatgaaaacagccatgaatatcttttcttaaagagagttttgaaaatgatcacttacctaaaacttgaaagctatgaattagttatccatactctcatgacaattttgttggtgaacaacaaaaaagagatctatttctttaaaagatatttgtgcagaaactgcatgtaactctaagttttactcctaacatacatatgtttggggaagtattctattctatacttgccaatgtggagaacaaaatagttttttaagaatgaagaagtatatatatccattctgtattttacgtgcagcagaattatcttccgtaggatttttttgtgtattcacaaggtgatatttgtattgtaaaacaataatggtgaaggaaataaaaaggcttttaaaattttgtttgttttaaatctttgtaaagttattattccagagagtatactggtatcttacagcttacctagatcataaattaatcaaaatgcactttttaataaaaactgatacttaaaat

SEQ ID NO: 60323 - DNA, 2363 bp, Homo sapiens
ttttttttttctattgattgcatgttgaaatcttactttggatatattggattaaataaagtatatcattaaaatttttaagcttatgtgcctatgaaaaacttccaaattacacagttggatggcgttatatttctcttggacagcagtggtctgaaagatgacaaaaatcacgatacgtttgaatcacgccatgtctttagggaaaagaagaaagaagagtttcctttcgtatcgcttaggggttcctcgcaagaaccatctgacagagaaaagccctggctcccgccccagtggcttctaattctggtccccgcgcccagaaagccgggaacgggcaagcctggaaaggcgttttgaaaggaaacaggatcccccgagtataggatgcgtttctgcctcacaaaagtcccttgggggtggggggacggcagcggctgaggcgcaggaaagaggagagcacacggggagtggcccttggaaccaggcgcgcaaaacctcagcccctaggctccatttccaggttcgcgggtgacctccccaagatggccgccgcctgggggcgggcctccacgctgcacgggtgttgattgggtgagacgactcaatggtgagcaatgattggttcacacggcgcaagctgggcggaaccggaagatggtgtgagccacgggctgccgggggcctggggctcggcgtcggtccccgggggatgtggagagctggcagcatgtcggccgagctgggagtcgggtgcgcattgcgggcggtgaacgagcgcgtgcagcaggctgtggcgcggcggccgcgggatctcccagccatccagccccggctagtggcggtcagcaaaaccaaacctgcagacatggtgatcgaggcctatggacatgggcagcgcacttttggcgagaactacgttcaggaactgctagaaaaagcatcaaatcccaaaattctgtctttgtgtcctgagatcaaatggcacttcattggccacctacagaaacaaaatgtcaacaaattgatggctgtccccaatctcttcatgctggaaacagtggattctgtgaagttggcagacaaagtgaacagttcctggcagagaaaaggttctcctgaaaggttaaaggttatggtccagattaacaccagcggagaagagagtaaacatggccttccaccttcagagaccatagccatcgtggagcacataaacgccaagtgtcctaacctggagtttgtggggctgatgaccataggaagctttgggcatgatcttagtcaaggaccaaatccagacttccagctgttattgtccctccgggaggagctgtgtaaaaagctgaacatccctgctgaccaggttgagctgagcatgggcatgtccgcggatttccagcatgcggttgaagtaggatctacaaatgtccgaataggaagcacgatttttggagagcgggattactcaaagaaacccaccccggacaagtgcgcagcagacgtgaaggccccgctggaggtggcacaggagcactgagccagggaatactgagagcactaactatgcactaacctagattttcatttcgatattccctgtgtcccagcgcagtcctgctctcctgtgacctgtggagagcactaatgatcacgtgtgttgatggaaaccatctgtgcttagtctctgacataggaagcttgcttcaggcaatggctttggattgagtttgagaaattcaaacatttctgcagaacagataccaaatcaatagctaggaatcatgttcaatattgaattctgcccaggagcatgaactgatccatgaatgccttttccaggttaaaatttggtcactgatgcctataatcgtggaagtcagagggattcccctttttcatctcattttaataggaaaattccttatggttaacatctccctacaaactcctactacgtcgtctaaattgctgctctggaataaggtgatttctgcccccagattcttccctagccggtagatacgtgaagatattcccaactgtggaatggcagtgtaggtagcttcaggaaatggctcaggttaattctcaaaacacaaattgttgctggccaggcatggtgactcatgcctgtaatcccagcaatttgggagacagaggcggaaggatcacctgagcctaggagttcaagaccagcctcagcaacagcaggagccccaccccccgtctctacaaaaaaatttaaaaattaactgggcatggtggctgaggtggaagaatggaagaatcacttgagcccaggagtttgaggctgcagtgagctatgattgcaccactgtactcctgccttaaaaaaaaaa

SEQ ID NO: 60324 - DNA, 1452 bp, Homo sapiens
caggcgcttccgccaccatggcttcacgtggggttgttggcattttcttcctctctgctgtcccccttgtgtgtctggagctccggcgtgggatcccggatataggaatcaaggattttcttttgctttgtggccggattttgctactgcttgctcttcttactttaattatttctgggactacctcatggcttaactcatttaaatctccccaagtttatctgaaggaagaagaagaaaagaatgagaaaagacaaaaacttgtgagaaaaaaacaacaagaagcacaaggagagaaggccagcagatacatagagaatgttttaaaacctcaccaggaaatgaaattgagaaaactggaggagcgcttttatcaaatgacgggtgaagcctggaaattaagcagtggtcacaaacttgggggtgatgaaggtacaagtcagacatcttttgaaacatcaaacagagaagcagcaaagagccagaacttgcctaaacctttaactgaatttccgtctcctgctgaacagcccacatgcaaggagattcctgatttacctgaagaaccttctcaaacagcagaagaagtagttactgttgctctccgatgtcccagtgggaatgtcctgaggagaaggtttttgaagtcctacagctcacaggtcttatttgactggatgacgagaattgggtaccacatatctctatacagcctttctacttcctttcccagacggcctctggcagtggagggaggccagtcgctggaggacataggaataactgtggacactgtactcatcctggaggagaaggagcagaccaactaggaaagaagggagagctccctgtttgcatgaagtcagttatgctatgaccttctggcacaataaaggcttcactttcaaatcacaccataccttgattgagctcatggcagtaaactttgaacattgatatccatgggaataggattagaaaaggattgctttctatatataataatctgtggactgtgccattttacagtgtaccaaatgagaatgaggttgaaatgtatgcagtaaggtactcagtaattaattggtattttttcccagctgacatgatttctcagtgttagaaaacaaacccttagaactttcctttctgcctcttcaatccatcttaccacacaatatttcatgattcaaattcttcaaagtcttatacgcaggaatgtttattctgctgtatttctgtggaaattaaaaacttggaaaaagcttcaaaagctcttggaggctttaaagttctttctgttgggtgtgcattacagtttacttaactgatgtttggcgatttatataattttggcctgttattaaatgttacaaagttccaaatgaatcagtattttaaaaaataaaactatgaaagccttaaaaaataggtgaatttttaaaaaaaaaa

SEQ ID NO: 60325 - DNA, 1316 bp, Homo sapiens
gcggccgccaacgccgcccggactggagccctgacattgctgcgctctgggggctccaggcagcccgtatcggggcctttatttctcgtcggcggcgccctgcaccgcgcctcgcaaagccaaacaccagagcaccctagaaggtttaactaaaagaatgctcatgtttgacccagttcctgtcaagcaagaggccatggaccctgtctcagtgtcatacccatctaattacatggaatccatgaagcctaacaagtatggggtcatctactccacaccattgcctgagaagttctttcagaccccagaaggtctgtcgcacggaatacagatggagccagtggacctcacggtgaacaagcggagttcacccccttcggctgggaattcgccctcctctctgaagttcccgtcctcacaccggagagcctcgcctgggttgagcatgccttcttccagcccaccgataaaaaaatactcacccccttctccaggcgtgcagcccttcggcgtgccgctgtccatgccaccagtgatggcagctgccctctcgcggcatggaatacggagcccggggatcctgcccgtcatccagccggtggtggtgcagcccgtcccctttatgtacacaagtcacctccagcagcctctcatggtctccttatcggaggagatggaaaattccagtagtagcatgcaagtacctgtaattgaatcatatgagaagcctatatcacagaaaaaaattaaaatagaacctgggatcgaaccacagaggacagattattatcctgaagaaatgtcaccccccttaatgaactcagtgtcccccccgcaagcattgttgcaagagtaagtatatttaggtctacccagcatttgcatagtagtgtgcatcttggaacctggagcagaagcacaagatttcacacgtgtgatgtggtgtggatgaccaggaacggcttgtgatctgtggccgccactggtccagtaccactggtcaagatgggagaatctctccaaaaacaatatgctgttacactgacaacgttatgacaaaagttacatcaagttttcatggaatcagtcatccatgattttgcaccttaccacatgaattatttttgttttttttccattcttccaggctatgtatacttagtttttccattatgagaatccttgtatagattaaacttggtgttctgtggatcatgtaaagttttcatgtggacacacatagtccttacagagtgtatagtatcctgtagaattgctatccagtaggaaggctgtgcagtgttggcagcatccat

SEQ ID NO: 60326 - DNA, 1806 bp, Homo sapiens
tcgatgctccacgtaggagctggctcggctgccggctgcggtcagggccaccgtataaagagggcggcagacccgagcgcctaggactcgccgctgcccgcgccccgccgccgctgctgcccccagccccggccccaggcgtcccagccatggtccgcccaatgctcttgctcagcctcggcctcctggctggtctgctgccggcgctggccgcctgcccccagaactgccactgccacagcgacctgcagcacgtcatctgcgacaaggtggggctgcagaagatccccaaggtgtcagagaagaccaagctgctcaacctacagcgcaacaacttcccggtgctggctgccaattcgttccgggccatgccgaacctcgtgtcattgcacctgcagcactgccagatccgcgaggtggccgccggtgccttccgcggcctcaagcaacttatctacttgtacctgtcccataacgacatccgcgtcgtgcgtgccggtgccttctacgacctgaccgagctgacctacctctacctggaccacaacaaggtcactgagctgccccgggggttgctctccccgctggtcaacctcttcatcttgcagctcaacaacaacaagatccgtgagctgcgcgcagggcccttccagggagccaaggacctgcgctggctctacctgtcggaaaacgcgttgagctccctgcagcccggggccctggacgacgtggagaacctcgccaaattccacgtggacaggaaccagctgtccagctacccctcagctgccctgagcaagctacgggtggtggaggagctgaagctgtcccacaaccccctgaaaagcatcccggacaatgccttccagtcctttggcagatacctggagaccctctggctggacaacaccaacctggagaagttctcagatggtgccttcctgggtgtaaccacgctgaaacacgtccatttggagaacaaccgcttgaaccagctaccctccaacttccccttcgacagcctggagaccctcgcccttaccaataacccctggaagtgtacctgccagctccggggccttcggcggtggctggaagccaaggcctcccgcccagatgccacctgtgcctcacctgccaagttcaagggccagcacatccgtgacacggacgccttccgcagctgcaagttccccaccaagaggtccaagaaagctggccgccattaaacaggttctgacccagccagtcctggtgactggcctctgccttccaccggagagactactgaccttctcacctccacccataccttctccccacagcctttgttgatgcacagagctgcctacacctagacacgtcctggcagggggcctcgggcactccactaccaacccagctccacccagcagtgtcctggggagaaggaaggctgagcctctccccagccttcatgccttccccaccctccagctcctcttggagaagctgttgctgagaccccccccccccccccaagtcaatcagaaccacaacaggttggtcatcaggatggccacccctcccaggatcatccttcctctgttcctctttccctgccacgtggaaacaatcatcagatccttgccccaccccttgcttccagaaagggttttaaagcccatgccccaactctgccagcccccacctgccaggacgttctagcaggacatcggtgctttgctgtccatcttcccatgctgcaatttcttcctgagatttctataaatataaatgtatgtatgtattataagaaaaaaaaaa

SEQ ID NO: 60327 - DNA, 2036 bp, Homo sapiens; identical to SEQ ID NO: 59607
  misc_feature (1)...(2036): n = a,t,c or g

SEQ ID NO: 60328 - DNA, 521 bp, Homo sapiens
tggatcaattctcataggagccacagcgcggagactgtgaaacatggttccaaaactgttcacttcccaaatttgtctgcttcttctgttggggcttctggctgtggagggctcactccatgtcaaacctccacagtttacctgggctcaggggtttgacgtccatcagtaggaaccagctccaatgcaccaatgcaatgcgggtaattaacaattatcaacggcgatggaaaaaccaaaatacttttcttcttgcaacttttgctaatgtagttaatgtttgtggtaacccaactataacctgccctcataacagaactctcaacaattgtcatcatagtggagtccaggtgcctttaatgtactgtaacctcacaactccaagtccacagaatatttcaaactgcaggtatgcgcagacaccagcaaacatgttctatatagttgcatgtgacaacagggatcaacgacgggaccctccacagtatccagtggttccagttcacctgcataccatcatc

SEQ ID NO: 60329 - DNA, 4493 bp, Homo sapiens
ttttttttttttacgggattgcaatgtattcctttttattaaattataaaactgttgtcaatacatgtgcttttggaaatagtgttttcctcaagtatctgcttttgtgcagcacttgggtttaaacaaacaacaaatttcgataccaacttcttgggcttcaagctattgagcacttatagccaaactatcaagtatagttatgatatagacagtccaaatttatggaaaatattacaaagacaaatgccttgaaaagatgacacagtgcagggaaaactacagctattaagctggtataaaaacttagtcaaaatgttttagtccattatggctctgcctaaagcttcaaaggaagaaaatttaagacacttctcatccaaggcacttaaaagagttgcaataaagtacttctttgaatttagtttgagcccaacagtattttttattcctttttcacattctgactcacactgaaacagtccttgaaggcagctattaatgaggaaaaatagttattgcttcttaatatacatattacaagtacgcaaacagaatacagatttcggtccactgaagcaagtaacaggatctgactgcagtgttctgcttaattctgaacaaaaagccacagactcctctaacccagtcccacaaatagagccctcagttctgaatttgcaccagctgtcccctgggttctccatgaggacacacgagctggagtcccaccacgtctccatggtgcattctaactggagaagaaccatcccggcggcctggcaggagtggctagtctgatgccatgcaggcaggcctgggagagtccgtgctcagacatctataattctgtgtcccggtatcgggcagactggccatagtaaccgcgcttggagtgttctgacagctgctggcggtactcctcctcctcggcatcactgccataacttcctctggtatcctgataaggtctggaaggagctttctgtggctcagggggtctggaactcgtgtgctggggcgtgccagggtctggcttgtgcgttttgattggaactgcatagatatcaggatgcttctgggcaatttcgatccttgcattctgtgcttcctggagctcctgcattctctgtaacctggccttgtgatccatcttctcaaatattttgactttgcccaggactgatttgggagcattatcttgctcctcactgctctctcccacctcctcaccctcttgaggagggatgggagtggagggcttcagtatagaccgcccaaaggtaggttttgctgcaacaggaggaggataacctttggtagatgccccaggagtttcattaccagcaacggcagaggggtttgacttatattcataggatttggagaagtcataggattcttctttgttctgggttttggccttgggcggctctggcttgaatgctgggggcgggctattgtccctaagttgatcgctgctagcagccctcctcatctgagctcgtggctctgggctgggtttccttatgctctcctcgtgctgcaccggctccgaggagcgggtgatggacgacaccagcggctcctcggctggctcatccagctcattgtcagtgtaggcgcctccttcaccgtccgtgtcttcaaagtcactgatgaggcggctgtcgcaactcagatagtctgcgcccatggcagttaagtaggacatgcggtcttcggggtcatcatccatcccttccatctttccttcagagacccaaaccgcttctccttgctgatgctgaatagtgtcctttaagctgccaaaccagctatcattggctgaatttaggttgattgtagctgtaaaaaggtgtgcacacgtttttttaagcttgttggcgtgatcaaataactttcgagaactattgttggacgttgggtctaacctttgtctcatggtgttgacaccttgtctggagtctggcgtgaaagaaatcacaattgagaaccactgggtgtaattcaacaggtccacagctttcggagtcacatccagtagtgcatgcttatcctgttcaataacttgcctcacggtatttaaccggaccactccagtggatttctcagatcctgcatcttttggttccgttttagcagtttgaaaccagtcaggtaactcattagccaatttttccattgctatatcagctatggggccgaataagaccacaggtctcttgaaaccagcttctcgcagcaaaaccctctcataagctgggaacttggtgctgacagacacaacagctgtgaggtcttcccgacttttcctcaggttcttcttcaccccagacctctggccacgcattctccagaaatctgcccggtccccagcgttgtctctctgggcattttgaacactggccatttgttcagctctgctcttgttggggattaagcctttctccaactcgttcccaatcctcacagccagccagttgcccagcttgccgtcatacagtgtgtctaccactcggaagacctcccctctggtgaaggccaggctctgtggagtttccttctcacattcaaagtggcttcttataaaaaacgaatcccctctgccacaagccaggatgtctctatacacatcggctcggctctgagctaaaatggtcaccatttcacctttagggatttctaacaggtagagaacggcatcctcccgcactaatcctctgaaatcctgtgtgttcaccttcagaatctggtctccttcttgaaggccctcctgctccgccgaggtcccttcttgaatgccagcaacaaatatcccgacatcattgccaccagccaaccggaggcccacgctgtctcccttcttgaaccttaccattttggtattagggccatatattgcttcatcttcaggactaggacgaagaaaagttctcggggctgcttttggttgaggagctgggggttcctcttggtatctgggttccttgttggtctctgggacaactgtgcctgcaatatcccctgtggacttaaagggagtgggtgtcgcacccatcctggacaatctgctcggcgtgtcctctctggaacttggcctttccttcagcttctcacttgaggaatgataatcataatcagaatactgatgacgtctctcctctggagaaaatgatcgggttgactctatttctgaaatatcttctatttctgagtcactgtcatttaatgacgggatgttgatgagggtctgctggctgtctctcaacaccactagctgtagttttcctcttgacttttctatcaattttcgagcatccgttaaagacatgttctcagttacagtcccattgatcttgagaattatgtctccttcgtgaaggttgccatctttagttgccagacccgttcgggtcatttcctttacgaagatctgactcccaagccggagaccatactcttcgttcgctctgcttttcatcaggaggaccccgatgggccccggccgccccctaggctcggggctggggctccgtgagtgcgggtgctcgcggctgcggcttcggggtccccgagagcgggcatcgtggcgggccccgcgcctgtactccgggctgtaggcccgctcgtagtctgggtcgtaggcccggtgataggctcgctcgtagtcctggtcaatgctccggccgcggctgcggtcacggtcccggtcccgggatggcccaaagtcgtggtccaggccccgctccaggctccggccacggctgcggtctcgggtgcgcgcatggtcttggtccaggccccgctccaggctccggccacggctccggtcccggctgaggtcccgctcccggctccgggcccgctcatggggacgccccctttccgggctgtcctcccagctgcggctgcgccccccatggctgttcagccggctcctctcgctgtagccactccggaaacttctgccatcaaactcgtccatcacctcaaaagcccggtcatcctgatccaggggagggctggcctgaagtgcggccacctggaccttccggggcctcttgaccacaatagcagcgaccttcccactttttctgagctgctgaactgcaaacgaatgaagcacatcctccatgggggtgccattgaccatgaccactctgtcattttcttggagcagcccatcagcaggcccacccgggagcacatcagaaatgacaattgacgtttctccattttcaaagtgggggttgtctctgcctccggacactgcaattccaaatcctcttttggaatccttttgtagggtcacagtgtactgttcccatatcagctcttccatgcctggggcgcggagccaacctgacagctcccgccggggtggaaacccgcggtctcctcgcaccggcatttcggacacaggtcccgcgtaggcgcgcagctccggaccccgcttctgcttctgctcctgctcctactcctcctgggca

SEQ ID NO: 60330 - DNA, 1854 bp, Homo sapiens
  misc_feature (1)...(1854): n = a,t,c or g
atctctactagaaatacaaaattagctgggcacggtggcacatgcctgtaatcccagcactttgggaggccaaggcaggtggatcacctgaggttgggcgtttgagaccagcctgaccaacatggagaaaccctgtctctactaaaaacacaaaattagccgggcgtagtggcacatgcctgtaatcccagctacttgggaggctgaggcaggagaattgcttgaacccgggaggcagaggttgctgtgagctgagattgcgccactgcactccagcttgggcaacgagagcaaaactccatctctaaaaaaaaaacaaatgacattccttaagggccagggacctttattgtttagtcccaacatatttggggatttgggggcgatagccctactttgaattgaaaacaatttgagggttaactgcttgcaaactgtcatgggtctcagtctccaacctctgtggactgtaggggagtcaggcaccatttggcctcctccccagctctgtgatgtgctgcttctctagactgcaggcaccacctgtgtgaaccggacatgaaactggtgtggcctagtgccaagctgttgcaggcagctgcaggtgcatctgcccgggcctgtgactctgtcaccagcaatgtactgcctttactgctggaacagttccacaagcacagtcagagcagccagcggcggacaatccttgaaatgctcctgggtttcttgaagctgcagcagaaatggagctatgaagacaaagatcaaaggcctctgaatggcttcaaggaccagctgtgctcactggtattcatggctctaacagaccccagcacccagcttcagcttgttggcatccgtacactgacagtcttgggtgcccagccagatctcctatcttatgaggacttggagctggcagtgggtcacctgtacagactgagcttcctgaaggaggattcccagagttgcagggtggcagcactggaagcatcaggaaccctggctgctctctaccctgtggccttcagcagccacctcgtacccaagctcgctgaggagctgcgtgtaggggagtcaaatttgactaacggagatgagcccacccaatgctcccggcatctgtgctgtctgcaagccttgtcagctgtatcaacacatcccagcatcgtcaaggagacactgcctctgctgctgcagcatctctggcaagtgaacagagggaatatggttgcacaatccagtgacgttattgctgtctgtcagagcctcagacagatggcagaaaaatgtcagcaggaccctgagagttgctggtatttccaccagacagctataccttgcctgcttgccttggctgtgcaggcctctatgccagagaaggagccctcagttctgagaaaagtactattggaggatgaggtgttggctgccatggtgtctgtcattggcactgctacaacccacctgagccctgagttagctgcccagagtgtgacacacattgtgcccctcttcttggatggcaacgtgtcctttctgcctgaaaacagcttcccgagcagattccagccattccaggatggctcctcagggcagaggcggctgattgcactgcttatggcctttgtctgctccctgcctcgaaatgtaagtgagcacatttgggaagtactgttatttaaccttgacaaggtgactccgggctgaaatttgccacaggctaagctgatcttttacttcccccaccagagaagttagttctcatccgtcccggtccctgctgccactatgtactggttctcttggagttcaagtcggacgcgtgggtcgacgtnaattccggagagggac

SEQ ID NO: 60331 - DNA, 6026 bp, Homo sapiens
tggggccaataggaagatggcggagtccgtagctgccgctgagctccaggcttctgggggtccgcggcacccagtgtgtctgttggtgttgggaatggcgggatccgggaaaaccacttttgtacagaggctcacaggacacctgcatgcccaaggcactccaccgtatgtgatcaacctggatccagcagtacatgaagttccctttcctgccaatattgatattcgtgatactgtaaagtataaagaagtaatgaaacaatatggacttggacccaatggcggcatagtgacctcactcaatctctttgctaccagatttgatcaggtgatgaaatttattgagaaggcccagaacatgtccaaatatgtgttgattgacacacctggacagattgaggtattcacctggtcagcttctgggacaattatcactgaagcccttgcatcctcatttccaacagttgtcatctatgtaatggacacatcgagaagtaccaacccagtgaccttcatgtccaacatgctctatgcctgcagcatcttatacaaaaccaagctgcctttcattgtggtcatgaataaaactgacatcattgaccacagctttgcagtggaatggatgcaggattttgaggctttccaagatgccttgaatcaagagactacatacgtcagtaacctgactcgttcaatgagcctggtgttagatgagttttacagctcactcaggggggggggtgtctctgctgttctgggtactggattagatgaactctttgtgcaagttaccagtgctgccgaagaatatgaaagggagtatcgtcctgaatatgaacgtctgaaaaaatcactggccaacgcagagagccaacagcagagagaacaactggaacgccttcgaaaagatatgggttctgtagccttggatgcagggactgccaaagacagcttatctcctgtgctgcacccttctgatttgatcctgactcgaggaaccttggatgaagaggatgaggaagcagacagcgatactgatgacattgaccacagagttacagaggaaagccatgaagagccagcattccagaattttatgcaagaatcgatggcacaatactggaagagaaacaataaataggagactttagcacacttcacttgtttctagaagtccagaattttggacctccacgtgaaagaactgttcttacctctgaactgggggctcccataagggataattttcctcagagtagcaaagtttctcttattagagaaatcttgtgactcagatgaagtcagggatagaagacccttggacctggcaggttaatgctgattattccttggcctttcccttgtatttatgcaaggaaggatatactgagctgatactgttccaagcctacaacttcaagttttatcatttgaactcaagtacttttgctgctgaggaatggaatcaaaagaacgtagtctcctggtgaccacctcagatctctattattaggctagatgtatagcctctactcccccagcttcttgctcttgaccctgcactgtaagttgcccttctattagcagccaaggaaaagggaaacatgagcttatccagaacggtggcagagtctccttggcaatcaaccaacgttgctatgaaatatgcctcacactgtatagctcattataggacgtcaggtttgttgaaaaaagtgggcaagacatgattaatgaatcagaatcctgtttcattggtgacttggataaagactttttaattttaactttgttctaagactgcttgtcatgatttcaaattagaaaattatataattgcaaacagcttcacttctcctgttcaacagaggcttaaggccagatgtccaaacttgtctcaataaggaggtgatattttactaaagtttcccacgtgcacatactgactaaatacagagctaggcccagtttgtattgtactctgaacttaatgcaaagtctccttggtgattttcgcaaagtccgtggatttgggtcagaggcacatttcatacataacagcccttataaacgtttgccctgcctccacattttacagtatcttaaaacagtacatttctttcaaagaattttatctctatgagtcagtactccaacttaggggggtcccacattggtgggaccaggaggcatcagcatcaaccgggggaattggttcaacttacctcttataacctatgaactcagaaaccctgggggtgggctgagcagtctgttttagaaagccctccatgtgattctgatgcatagtagcctatgacataattccagaccaggtgaatctcaagatactaatcctcacatcatttgccttctcatatttccctcgtcttgaccatctggtgcctgttatgcagtttaacattctgcagcaataaaagtgttttattataaagtattaattttaatgttctatacttagtgggaaccactggtctcaaaatttgaagctattctttaagaggagaacattcgcaaaactcaagcatacttggtttttctctgtagtacttttgaatgctttatcttccttacagaataacttgtcttccttatgcttcaagctccaaaagggtaaggaagaagtcttaatcatttttgtattccttgcacaggacctagcaaataattggtactcaatgtttgctggatgaatgaactaaattcccatacggccactttatggaaactaactgcctaatcgccactttcattataaacaaaggaaaatgaagataagactgcaacagaggccaggtgcagtggctcacgcctgtaatccccagcactttgggagcccgaggcgggcagatcacttgaggtcaggagttttgagaccagcctggcccaacacggtgaaacctcatctctactaaaaatgcaaaaattagctgggtgtggtggcatgtgcgtgtaatcccagctactcaggtggctgaggcaggagaatcgcccgaacctgggaggcagaggttgcagtgagtcgaaattgcaccattgcactccagcctgggtgacagagcaagactccatctcaaaaataaataaataaataaataaatttaaaaaaagactgtgacagaaagggtttagagaaatgtgctaaagagttacaattggcaaatttaaaattatatgttaaactataacctcatttgtatcatattcatttattctcaatacctgggacatttaaggcattcaataatgaattaaagctgtgccttattttggtctgcattaaaggagtggtctaaattttacaagatatattttgcatcagaaaatcaaacttcagcagtttaacatgctggcatccatcaccaaggcatgaagcaacacatttgctaatgattcctaatcactacagtgctacatcatttacttaataaatactgattcagtacttatatatacagatagtctgatggatgagtaaccacagtgatgttgttcaggacatgatgtaaagttgaaaggtgcatattgctatgttttaaaggctgcctttacagtagaagcagcaaagtgtgcttaatggactgctgtcctctgatgaccaagcaaatgcaacaaatgaaatatgcacaaggctgtccttggacagtacttgtttgctttgctcacaaaggagaaaaggaaagaaacaattgaaaatatgtatatggtgaaagtatgtgagtccgagcagaaataacaaaggcaaaaggatgaggagagatggagtaagtctagagaagaaaataaatggatgagatagagagctgtctaagcaaaaaaggtgtcagacctctgatcttataaataagacacttcaaaagtagcaaaaacagttttaagaaggtgactaatagataaggtgtgttgtgtttagctatttcctgttaggtattagtaatgggttcccaatgacctgagccaaaaatgaatcaagttaaatgaaaactgacatctgatatgagcatatattattagtctattcaagcacagttttgaagttagcaaacatctaaatcctcacatctctacaaggtaggtcaaagtatgattcttctcagttgtacaagataaatggctgtataacatgtctagtcatagttaagacaacaattggggacagtgctttggtctgattgccatgccagcatcatattttatctgtgaagggtggcttggttgtggaaaactataaaaactggatgcaaaagtaaaatgcaaccttgtttggtgacgtccagttcctctggaattaggaaaaaccacttgtgtttaagaacaggagtcaaatcaatttttaaggaaacagattctaatacaaaaaccttttctgttgggtctagtaggtctggacaaaacatctccctcttttccttttatattttcctcatcctcttcttgcagcgctggttgaaaacaggggaggaccccatgaggctgtcagtggagtgggaaccatagctgctatctgagtcatcagggctctgaggaatcccagcttcactcatgcctgacataggctcctcgaagacatcactgcccagcacaccatgcccagagacattgccttcttcactttcttgaggctccattttcacatgggccagattccaaagaggagaagcatttacctctgcacttgaagcctgtggtgaagcttcaacctccaggttagatgggaagcgttcgctctgagccccaagcactcccataggcagtgactggtctccagaagcaaggtcagcctccagctcctcactgacaggaaaagtgatgtcgctcacaggttcctccttgatcttcacaggtttagcgtcctctgtggccttctcaggattgacaatcctttcatattcttcagagagttgcttactaatctgtagcatgtaactgtgatagtccttgatgcggtgctgccagaacttctggagggagagcacactgccaatacccacttcatggaatacctgctccatcacatcaggaaaaggagtctgtcccagccgggcctcccggtccacagcaaaacgcagcaacttggtaaacttaaggcaatactcatgtgccacatcagttagggtctccaggacactctcattagcacagtcaaagcccgcgtgggccaggattgtggccactgcctggtagaggagctgccgacaggagtgccagctgagttcagtcacaggttcccctttcccacgataaaagtcactctctgggtcactgtgccggatctggaatggtgcattgggattcttacaatctaaaggcaggaggtcatcagggagaggaggtgacccagggcacgagggaagaggttcactctcttcagtttttacaccttctgtctgctgctgattctgggcctgagctgtggcaataaggttgcgaagacgtcggttgtgctgaatcaactgaatcgtatggatggtgagactacatggctctgaggggatgtccagcatagtggggggcttcggcttgttggctgagggttggtgcaggggtgggtcatggacttccaccagacggaactcccgtgggagcaaatcgaaggaacttctgttggtctggcttgatgatattggtatctctccccagtatctttgcagattcattgtccatatgtctcttcaagttcaacaaacatttatcaaatgccaggcattctgtgtcggtcaaagactgataatgtgagatccttgcctttaccgaaaggagcacgaagaacaggcacggagcccaaggaatgcccaagtccctccaggggtttcctcggtcacggtccgccggcgcaggcgccaatcacagggtcctgaggtcgcctgacgttcagggcagccggaagacggggaggtctggacctgaaccgagacaaggaggtaccacactattcactgctgcgtcgcagagcgggctgggcggctgtctggacctcgagaggcctgaggcaaggatcgcgtcag

SEQ ID NO: 60332 - DNA, 1735 bp, Homo sapiens
cagccaggtcggccgcccccaccaggtccagttccagagcccaggccggtcggccgggcccgcgtgccctcggcgggctgcgcagagcgcgggagcggtttggggctgggcatgctgggagcccctcgggcaacggccgccgccgccacagccacacagccgccgccactgcgtccgtccccggtgagcgccgctgacgcgcggagatgaaattcccggcctcggtgctggcgtccgtgttcctgttcgtggccgagacaacggcggcgctcagcctgagcagcacctaccgctcgggcggggaccgcatgtggcaggcgctgacgttgcttttctcgctactgccttgcgcgctcgtgcagctcacgcttctcttcgtacaccgcgacctcagccgcgaccgcccgctcgtactgctgctgcacctgctgcaacttgggccccttttcaggtgttttgaagtcttctgcatctactttcagtcaggcaacaatgaagagccttatgtcagtatcaccaagaagaggcaaatgccaaaaaatggcctctcagaggagattgagaaggaggtgggccaggcagaaggcaaactaatcacccaccgatcagcgttcagccgggcgtcggtgatccaggctttcttgggctcagccccccagctgaccctacagctgtacataagtgtcatgcagcaggacgtcactgttggaagaagtctcctcatgaccatatccctgttgtccattgtgtatggagccttgcgctgcaacatcctagccatcaaaatcaagtacgatgagtatgaagtcaaagtgaagcctctggcctatgtctgtatcttcctgtggaggagctttgagattgccactcgagttgtagtcctggtcctctttacctccgtcctgaagacctgggtggtggttataatactcatcaacttcttcagtttcttcttgtacccctggatcctcttctggtgcagtggttccccattccctgagaacatagagaaggccctcagtagagtgggcaccaccattgtactatgctttctaactttactctatactggtatcaacatgttctgctggtctgctgtacagctgaaaattgacagccctgacctcatcagcaagtcccataattggtaccagctactggtgtattacatgataagattcatcgagaatgccatcctcctcctcctgtggtatcttttcaagactgacatctatatgtatgtgtgcgcacctctgttggtcctgcagctgctcattgggtactgcacagccattctcttcatgcttgtattctatcagttcttccacccttgcaaaaagctcttttcttccagtgtttctgaaggctttcagaggtggctcaggtgtttttgctgggcctgcaggcagcaaaaaccctgtgagccgataggaaaggaagatctacagtcatccagagatagagatgagacaccttctagcagtaaaacaagtcctgagcctggtcagttcttgaatgctgaagatctctgctctgcttaatgggacccaaggtctcagagcacaggcatattattttctgggtttgatactcgttattcatacaaataatgagccctacacagggaacaaggcaggaagttagctgttaactccttgtgagctgcttctctttatagagctcttgggtatgtagaactgtatgggaagaagccaggaaaacctctgagtgttgg

SEQ ID NO: 60333 - DNA, 2547 bp, Homo sapiens
acttggtttcgcttcgctagtcccagaggcccagagtggctcgcctggagtctctgtggcgcggtttcctgtacctgccttgggatccggagggaggaagctgggacacccgggagtcaggaaatggactcggtggcttttgaggatgtagatgtgaacttcacccaggaggagtgggctttgctagatccttcccagaagaatctctacagagatgtgatgtgggaaaccatgaggaatctggcctctatagggaaaaaatggaaggaccagaacattaaagatcactacaaacaccgagggagaaatctaagaagtcatatgttagaaagactctatcaaactaaggatggtagtcagcgtggaggaatttttagccagtttgcaaatcagaatctgagcaagaaaatccctggagtgaaactctgtgaaagcattgtatatggagaagtcagcatgggtcagtcatcccttaatagacacatcaaagatcacagtggacatgaaccaaaggaatatcaggaatatggagagaagccagatacacgtaaccagtgttggaaacccttcagttctcaccactcctttcgaacacatgagataattcacactggagagaaactctatgattgtaaggaatgtggaaaaaccttcttttctctcaaaagaattagaagacacatcatcacacacagtggatatacaccatataaatgtaaggtgtgtgggaaagcttttgattatcccagtagatttcgaacacatgaaagaagtcacactggagagaaaccctatgaatgtcaggaatgtggaaaagccttcacttgtatcacaagtgttcgaagacacatgataaagcacactggagatggaccttataaatgtaaggtatgtgggaaaccctttcattctctgagttcatttcaagtgcatgaaagaattcacactggagaaaaaccctttaaatgtaagcaatgtggtaaagccttcagttgttccccaaccttacgaatacatgaaagaacccatactggagagaaaccttatgaatgcaagcagtgtgggaaggccttcagttatctcccctcccttcgactacatgaaagaattcacactggtgagaaacccttcgtatgtaaacaatgtggtaaagcctttagatctgccagtacctttcaaatacatgaaaggactcacactggagaaaaaccttatgaatgtaaggaatgtggggaagcattcagttgtatcccaagtatgcgaagacacatgataaaacatactggagaaggaccttataaatgtaaggtatgtgggaaaccctttcattctctgagtccatttcgaatacatgaaagaactcacactggagagaaaccttatgtatgtaaacattgtggtaaagctttcgtttcttcaacatcaattcgaatacatgaaagaactcatactggagagaaaccctatgagtgtaagcaatgtgggaaagccttcagttatctcaactcctttcgaacacatgaaatgattcacactggtgagaaaccctttgaatgtaagcgatgtgggaaagcctttagatcttctagttcctttcgactacatgaaaggactcacactggacagaaaccctatcattgcaaggaatgtgggaaagcctattcttgccgtgccagctttcagagacacatgttaacacatgctggagatggaccaccttataaatgcatgtgggaaagcctttaatgctctgggttcatgtcagatacattaaaatactcactgaagagaagccctatgaatgtaagtaacgtgggaaagcatgaaattctgtcagtgccttttttaatacatgaaagaattctagagagaagccatatacatgtaagtaacatgggaaagctttcaatcattttagttcctttcaaatacatgaaagaactcatcatggagaaaaccaaacaaatgctttttggaaaggaacccatatttgagagaaaccctgggtaaagggtgtaggaaaggttttgtcatcacacaaccctgtcacacatgaatgtgtagtggagagaaccttggtaaatgtaaagagtgtgggagagcctttagtcattttagttccacttgaagccatgaaagaacacacaaaagagaaaagctcttgaatataagcaatgtccacacgtttttagccagcccacatgctttcaacaacatgtaagaatgtaccctggatcaaaacactataaatgtgaaaacctacaaggaaggttttccattatacttttaaagtcatttgagggctctggctctgtggctttgtgggttaaagtacttgtctggcaaacaggagatgctggatttcaatcccagcagggcctcactagttgaggtattgaatttgaacagatgttttggctctggctgggtgtggtggctcacacctgtaatcccagcactttgggaggctgaggcaggaggatcacttgaggtcaggaggtttgagaccaagtgtgcaaaacatagcaagacctcatctcagaaaaa

SEQ ID NO: 60334 - DNA, 1566 bp, Homo sapiens
ttttttttttttgagaaaagccggcataaagcacttttattgcaataataaaacttgagactcataaatggtgctgggggaagggtgcagcaacgatttctcaccaaatcactacacaggacagcaaaggggtgagaaggggctgagggaggaaaagccaggaaactgagatcagcagagggagccaagcatcaaaaaacaggagatgctgaagctgcgatgaccagcatcattttcttaagagaacattcaaggatttgtcatgatggctgggctttcactgggtgttaagtctacaaacagcaccttcaattgaaactgtcaattaaagttcttaagatttaggaagtggtggagcttggaaagttatgagattacaaaattcctgaaagtccattagaaaaaccccaggatgaaaaaaaaaaaaggccacaaagaaggcttcagaggtccctgctggcccagggacagatacctgtagtgtccagcattgcagtgaacatgatctactttcaaaggcagagggtttaaggggagggtgggtgggaatggtggaggcaaaggctctccccatccccacctcagttttaggtagggcttttaatttaacccaaagacatctctcaacttggagagtaattcagtcctcaacagcgcctcaaatctgctatggctttgcagcgcagcagcaagaatgtttaatatataatagataaaaatttcatccaaaaaattaaaataaaatattcttgcaaaccccccccccaacaccaattcctattctaatgttaacctaccacttgtgctgttaatacttgaccatgtacttaattggaaacctatatccaaaagactgaaactgaatcttcaccccaaaatgaaaacaaaataaaatgagtaacttgaggtttatggcatatagtttaggtaaacacacatacgaggagaaaggggaagaggaaacagaggtgtcggaagcaaagctgagtgacagaacacattcagtcagggcagatgtctatacaaagtggagtggaacatcaggaaaagctccatatggactcatgtgcacatgtctggaggcaccagatccctccatggcagatccaagaacagggagctaagggaggaggccattcctgtcattccagttttagaagctccacatcgaagacgagagtggcatgtggtgggatgatgcctgggtgcccagtggcaccataggcataatctggagatatagtcagtttggctctctgacccacactcatctgggcaaccccttcttcccagcctcggatcacctcctgcttgcctagcataaacttaaagggcttgtttctgtcccgggaggaatcaaatttctttccatcttcaagcatcccggtgtagtgcaccacgcaggtctggccgcgcttggggaaggtgcgcccgtctcctggggagatggtttccacctgcactcccatggcggcggcggacgctgagcgggcgggcggcgcgacgggcggcgtggaccaacagcgacctggcggcggttccacggctctgcctagtacctcggcg

SEQ ID NO: 60335 - DNA, 432 bp, Homo sapiens
ttctatggccagacccgcacatcgtggcgcatgcaaaaggcgtgcacttaccccacatagtgggggggatgttgacgaatgttggcttagtgcccagggttccctctcaccctaaccctctccccggtggggcgaggggactgaccgagcgcgttgatagcatttgtaggccggataaggcgttcacgccgcatccggcactctttcagcaacatggttagcggaggccaagatgtttgattcactggcaaaagccggaaaatatttaggtcaggcggcgaagctgatgattggtatgcctgattacgacaactatgtcgaacatatgcgggttaaccatcccgatcaaacgccgatgacctacgaagagtttttccgtgagcggcaggacgcgcgctacggtggaaaaggcggcgcgcgctgctgctaaat

SEQ ID NO: 60336 - DNA, 437 bp, Homo sapiens
ctttgatcacgggctcgccccaaccgaccacgccttcatcggtttcaattttcaggaacatccagcggggaggtaaacgatacgtggtaattttggtgattttcattgcactgcctctcgatacgccttaacaaatgctgctgcctgctgcgcggtgcgctctacggattgcccggcgcgatagagatcgctgcctaagcccgcccctgcacaacctgcgtctatccactgcgccaggttttctggcgtcacgccgccaacggcaaagactgcgatgtccgatggcaataccgcttttaacgctttgatgtattgcggaccaaaagccgatgacggaaatattttcagcgcctgcgcgcccgcttcgagcgcggtaaaggcttcggtctccgtcgcgcagccggggcaggcggtcatcccgtagccccccgcccggc

SEQ ID NO: 60337 - DNA, 726 bp, Homo sapiens
agatctggaggaaaggggccccttctgccaggcttcctccctgggtcacaaactcacatctgcctggactcccactgctgtctctctctttctctctctctcccctctttttaactgtccactaggttttatggataactcctgagagaatgtcccagtctgcttaccatcacattgatcccgcccaccagcattgaggctctgcactgtctcccctcccttgcctgtccaaagccccttccacccgggaccgtcgcccctttacactcaggggtactggtccatctatgccatgctgagagctgctgccatgaaaagacccctggatctcaccccctccagcagctacctcttctctttctagagaaaccacctagaaggacttcctacacacaccagccccacctcctctttcctgttgtctcttaggcccaaggcccaccacagtgccctttgccccccacagtcacccctgccagggcaccggcggccagcacttgctccaccaacccttcctccagaagagcttttttgggagggatcctggagcccgatcctggtccccctcccatcatcctaacctcctcctgtctttcttctccatctgtaggatcttcccaggcaaagtcacctgtaaatcacatccatacccaagaagctcccaaaatctcacttccagcccagacctgaatactgggtcagctgacaccttatctggagcatcac

SEQ ID NO: 60338 - DNA, 363 bp, Homo sapiens
tctgcgctggcttcctgactttaatatcctgtaataaagaaaggttgccctgctggacaaaattaaacgccactttgtcgccggttttaatttcactcattttcgtctgcggggtgatggtaaagcgcatggtcatctccggccagttcacggcagcaatcggatcgtgatggatggtgatttttttgctttccagatcgataccctttaccacgccagtggcgctaataacctgtggttgtgcttcgctcatggtttcatgatgatgttcgttagcctgggcattaaagccaataacggtaaacagactgaacattgcgacttgcagtgcttttttcatttattctctcaggaaggccgcca

SEQ ID NO: 60339 - DNA, 1669 bp, Homo sapiens
cacgaccggtcttgagttcccgggtcgacgatttcgtgccacctctgcctgagacctccggtcgccgcaagaagctggagaggatgtacagcgttgaccgtgtgtctgacgacatccctattcgtacctggttccccaaggaaaatcttttcagcttccagacagcatccacaactatgcaagccatctcgaacttccgcaaacacctgcgcatggtcggcagccggagggtgaaggcccaaacgttcgctgagcggcgcgagcggagcttcagccggtcctggagcgaccccacccccatgaaagccgacacttcccacgactcccgagacagcagtgacctgcagagctcccactgcacgctggacgaggccttcgaggacctggactgggacactgagaagggcctggaggctgtggcctgcgacaccgaaggcttcgtgccaccaaaggtcatgctcatttcctccaaggtgcccaaggctgagtacatccccactatcatccgccgggatgacccctccatcatccccatcctctacgaccatgagcacgcaaccttcgaggacatccttgaggagatagagaggaagctgaacgtctaccacaagggagccaagatctggaaaatgctgattttctgccagggaggtcctggacacctctatctcctcaagaacaaggtggccacctttgccaaagtggagaaggaagaggacatgattcacttctggaagcggctgagccgcctgatgagcaaagtgaacccagagccgaacgtcatccacatcatgggctgctacattctggggaaccccaatggagagaagctgttccagaacctcaggaccctcatgactccttatagggtcaccttcgagtcacccctggagctctcagcccaagggaagcagatgatcgagacgtactttgacttccggttgtatcgcctgtggaagagccgccagcactcgaagctgctggactttgacgacgtcctgtgaggggcagaggcctccgcccagtcaccatcaggccactccctctgcaccgggacctggggctgggccgcctcgtgctccccgggactgtgtggctccggtctcgcctggagccacttcagggcacctcagacgttgctcaggttccccctgtgggttccggtcctcgctgcacccgtggccgcagaggctgcagtccctgggggccgggaggatcccgccctgtggcccgtggatgctcagcggccaggcactgacctgccatgcctcgcctggaggctcagctgtgggcatccctccatggggttcatagaaataagtgcaatttctacacccccgaaacaattcaaagggaagcagcatttcttgttaactagttaagcactatgctgctagttacagtgtaggcacccctggacccggccgcgcagctggtggactgtaggggctcctgactgggcacaggagctcccagcttttgtccacggccagcaggatgggctgtcgtgtatatagctggggcgagggggcaggccccccttgtgcagagccaggggtctgagggcacctggctgtgttcccagctgagggagggctggggcgggggccgggcttggaacgatgtacgataccctcatagtgaccattaaacctgatcctccaccgcg

SEQ ID NO: 60340 - DNA, 1520 bp, Homo sapiens
gcgaccgcggctgtgccctctcctactcctcaccgcgcgagcgcggggaaccagtagccgcggctgcttcggttgccgcggtcggtggtcgttatggattctccatgggacgagttggctctggccttctcccgcacgtccatgtttcccttttttgacatcgcgcactatctagtgtcagtgatggcggtgaaacgtcagccgggagcagctgcattggcatggaagaatcctatttcaagctggtttactgctatgctccactgttttggtggaggaattttatcctgtctactgcttgcagagcctccattgaagtttcttgcaaaccacactaacatattactggcatcttcaatctggtatattacatttttttgcccgcatgacctagtttcccagggctattcatatctacctgttcaactactggcttcgggaatgaaggaagtgaccagaacttggaaaatagtaggtggagtcacacatgctaatagctattacaaaaatggctggatagtcatgatagctattggatgggcccgaggtgcaggtggtaccattataacgaattttgagaggttggtaaaaggagattggaaaccagaaggtgatgaatggctgaagatgtcataccctgccaaggtaaccctgctggggtcagttatcttcacattccagcacacccagcatctggcaatatcaaagcataatcttatgttcctttataccatctttattgtggccacaaagataaccatgatgactacacagacttctactatgacatttgctccttttgaggatacattgagttggatgctatttggctggcagcagccgttttcatcatgtgagaagaaaagtgaagcaaagtcaccttccaatggcgttgggtcattggcctcaaagccggtagatgttgcctcagataatgttaaaaagaaacatactaagaagaatgaataaatttacgtgatgagctctacaaggccaaaaattttttttcttatctacctgttatattgtgctaatttttctatgtatgtgatgtgaaatgaagactatatatatggaatggaggtgacagaaagaaagaaattctttgtttgagggagacttcccctttctggattgtatttgtagagtgttacgagtgtatcatgtgattatgctttaccggtataagagattctgttgtgattatttgaatagttttatattaataaaagaagacaaaattttttaaatgttagaaaaagcagatctgtcattgcaaagtaacaaaaattttaagcttttaaaaatgtagatttttcatatttttaaaatttgaatctatttgagctttagttcagcagaattaaatttttacttgacattatcattaaaattgctaggtatggagaacaattcctattttattttgaacactgagaagagtaaacttttcctaaaacactttatattataaatgaaaataaattgctagcttatattttagatataaacatcatatt

SEQ ID NO: 60341 - DNA, 2691 bp, Homo sapiens
tgctgctgacactcgctcccaggctgcacccgccgcccttggcgcttcatgtacatgtgtctattcaggccttgcggaggcgcccagaagagcatccaacacggctgccggggaaagaccgcccaccatgcccacggagaccctacagacaggtagcatggtgaagccggtcagccccgcgggcaccttcacctctgctgtgcccctgcgcatcctgaacaaggggccagactacttccgcaggcaggccgagcccaaccccaagaggctcagcgccgtggagaggctggaggccgacaaggccaagtacgtcaagagccaggaggtgatcaacgccaagcaggagcccgtgaagcccgccgtgctggccaagcccccggtgtgcccggctgccaagcgcgcactgggcagccccacgctcaaagtgttcggcaaccacgccaagaccgagagcggcgtgcagagggagaacctgaagctggagatcctgaagaacatcatcaatagctccgagggctctagctcgggctcggggcacaagcacagctcccgcaactggccgccccaccggtcggaagccactgacctgcaccgtcactccttcgcggagtccctgaaggtctaccccacgcagggccgcaggagcccgcaggagggcggctcccacgtgggcaggagactgctggagcagtcagccgagtccttcctccacgtgtcccacagctcttcggacatccgcaaggtgaccagcgtgaagcccctcaaggccatcccctgcagtagctctgcccctcccctgcctcccaagcccaaaatcgcagccatcgcctccatgaagtcccccgaggccgaccctgtggaaccagcttgtggagtcagccgaagaccctccctccagcggtctaagtcagacttgagtgacagatatttccgagtggacgcggacgtggagaggttcttcaactactgtggactggacccggaagagctggaaaacctgggaatggaaaactttgcaagggctaattctgacataatatccctcaacttccgcagcgcaagcatgatcagctcagactgtgaacagtctcaggacagtaacagtgaccttagaaatgatgacagtgccaatgaccgcgtgccgtatggcatttctgccatcgaaagaaatgctagaatcatcaagtggttatatagcatcaaacaagctagagagtcacagaaggtctcccatgtgtaagacagtgcgtggaaaggagggagcgtgggtctctgtgcttacgcagttgtgaaggttgtgaggtctccttgaagtgttgtgagcttctccactctttgtgttgcttgttgtgcaatgttttcaagttgcatgcttgtcaacatggggactgacctggcttccacgtcaccatcgctacagagcctggctgaacacgcgtcatctgccaaaagtttcaggccagaatctaattagggctttgctcgtaagcaaaactgtttacatgaaaatggtatacaacttcttcgatatttatgtggttcttgtgtttttatatcccgcgctattgtgtcttaattaaaagttttatcaactggcttttaagttgagagcagaatctttttgaaataaaaagccactttgcctacatgtgagactattccagtgggacagtaaatgggatctgctaccaaacagataatgactgaccgaacatagaaccaggctgggttttctgtggaataaagtggtgagcctgacgttaatcgtttacatgttgaaattctcttgccacttagtgaagcagtcattggggtaacaatgctacgttttgtgtccgattcagtgtgtaaacgttggtggttctatgtaatactgaccccaaggaaagacgatcagatacaaagaaagatggttaaatctaggaggttgggtgtttgggggttttgttgatgttgttctgattgggataattcagaaattcctaatattatctttcgacagaatgaccaccctaaaacaaatactgaatgccttttaaaaaaaaaaaagggggggggttggggttttttttttttttttttttggtcgagaactactaatttcatgctatttctttctctctccctttgttgttatttgatttgggggaagggagtgaggcttgtgcagatttgagctatctgaagacatgaacagaagtcaaataccagccatatcagtagagccttccattcaaaagtgaacacacttggtagctgaaccatatctgagcagcgtgattctgttgtcttgcatatgttattctctcaggctgtggatctttgttacagctctaggaaactgtagaaatacaatgctatgtagcttttccaccccatggtctctagtgctgcctatcaacttgtccccttttttcccaataacctgtcttccaggtggtacagttagctgtcactcagctgacaccatgatgtggcagcagagagggaaacctacaagtggtttgcctcattgcctttgccacatctgaagttctcagcagcactaccttagacttcatgagctaataggaaactttttatggtgtaaatgctgtaagactttgtacatacttcagttgttatgaaatctttaaagaaaaaaagaaaaagttacgctaataaattgctgtggtgcaggcaaaaaaaaaa

SEQ ID NO: 60342 - DNA, 1561 bp, Homo sapiens
  misc_feature (1)...(1561): n = a,t,c or g
atatgacaaggacgaggacccctattctagccagttaaagctggacagaatttttaaaagcaatgaagccagttccttggatatatccacgggctttgctttgagaaggaactgagtaggcagtgagaagagtcgagtgaagcctggcccgtgagtgcctcaacaactgagatgaacgtcgactcgcttgcaggcaagttgtcactcagcagcgatctgaactatatcctgggttccagaaaaggcagaggttcttaccgaaagcaggggaggaagccgcagcccaaggaggtcgtcacttgccgggaaggtggctcgggccaggctgcactcaaaacccgtgctctgtccacactgctacggggccagagccaaggaagcttccacttcttcccccagacagccccaacagcggctaccccaaggagccagcagccttgtgtcctgggatccccagcccctgcagaatgacccaccaggatctgagcatcacagccaaactcatcaatggaggtgtagcagggctcgtgggggtgacctgcgtgttccccatcgacttggccaagactcgcctgcagaaccagcatgggaaagccatgtacaaaggaatgatcgactgcctgatgaagacggctcgggcggagggcttcttcggcatgtaccgaggggctgcagtgaacctcactctggtcactccagagaaggccatcaagctggcggccaacgactttttccggcggctgctcatggaagatgggatgcagcggaacctgaagatggagatgcttgccgggtgtggggctgggatgtgccaggtcgtggtgacctgtcccatggaaatgctcaagattcagctgcaggatgctggacgcctggccgtccatcatcagggctcggcctcagcaccctccacctccaggtcctacacaactggttcggcttccacccacaggcgcccctctgccaccctcattgcctgggagctgctccgcactcagggcctggctgggctctacaggggcctgggtgccactctcctcagagacattcctttctccatcatctacttcccactgtttgccaaccttaacaacctggggttcaacgagctcgccggtaaggcgtcctttgcacattccttcgtgtcaggctgtgtggcaggttccatagctgcggtcgcagtgacgcctctagatgttctgaaaactcgaatccaaaccctcaagaaaggcctgggcgaggacatgtacagtgggatcaccgactgtgccaggtgagagccagtgtcccctcaaatggtggctgggacaggttcctctgcgtgggtgtctgcctagaccagatttagagaccaacttgaattgctgggctctgggtttctttgaagtctgtctttccctcacctctcaaagaaaacagaatgtactgggagcctttttcttcttcctggcatccctacagcatctctcaccaaagattctagccacatcaagcctgtttccaaggccttgacccanctgcataagtaaccaacctgcatgcacctagcgggcgaggcaca

SEQ ID NO: 60343 - DNA, 2512 bp, Homo sapiens
ttttttttttttggcattcttgacattttaattagagcagaaataaactactaaatattttatttctaagcaaaacagagctccagcataaatcctgtttgtctgagaaattcacaatacattttagaaatccaatggatacattcaaaatgttatctaataaataacaaggtcaggtctactccaaatctaagaatctgatttaaacataaggggccaaaaaactaccagggcttttttttttttggtggttataaacaatacttgatatttaagcaacacagtcacactgctttaaacttagttgcagagatctacaatttattattattttcagtgttagagctagagggtaattttttcaaagatggcactcaactccacttatttacctgtcaacaaatacagaactgaactgttagccataagcactttacaaacagactcaggaaactatgcagtagacaatgacatagcttaaccagactctgaaaaagagatacatattttgattcacacttgtacaaagagaacagtcatgtctgcatgacttaaggttccctaaacacaactgttttatgttttagacccctggagtgtgccagtttaccacatcagggaggaatcaagggatgtgtgtgctccttctaaagaaccaagggcaagtggggtgggggtggctacagggaacgctctgggcaaaagagctgcctcaggtttttgtgggaatgaaaattacttgttgcagttaagcaattcctagggtttatctagtttgaggttcaaaacaaaggagagaattatttccttcctcgagctcttcccaaagcaatatgcacatctcataatcaaatctcaagtagtacaaagagataatcaattatctaaaaatttaatttacatacatgttggcctggattaaaaacaaaaaagttagtttccataaatagcagactttagtgctgtatgacccaatgactaaaaataaaaccaggaagtttttactaaaagctcaaggataaaaatgaacactggctggctattgaactccacatctgacaataattactgacagtttaaaaatgtatatccaaaatataaccctcaagaggaccaggtttatttgtccgacagagcagctcaaaatgttgaggcatcatttgtttggattatgatgggttattctcgaagtttatttatttagaaggggaaagtgattatagaaaaatacttggaaataatttgccaatgaagttgcagattctaacaataatccacatcttagatttttaagtgtgtagtttcatagtttaaacaaattctgtcaaagaactattcaatatactttatcactttaactttccatgaaaaccaaataaaaatcacatccgaatgatttacttctatgcttttatctgattgtatacatatgatgtactacgcatccaagtacaagaggcagttatcttctctgagaggtgcaagagttgttctttcatgaatgccctctaatagtgaaaccagcaatttttatatatgcattcatgtgcatatacatgtacttcaaaaagcaaagcgtcatctcttcgtccattgttaacttaatggtaagaatgggggccaccaggcattggtggagcaccagaaggtcctgaaggcacttggaaaggattactgggagtaggatagagtcctggtgtgggatacgatcctgtaggggcaggatatggtgctggtggtccccaggctcctggtggaacggtgccccatggaacaggtggtgctgccccaggggcttggggaggaggaggagcgggatatgggcctggagatggatatggcatattaggggtaggatactgccctcccattcctggcgcccaaggtccagaagacatggatccccatggacctaaaggaccagctgcagctggatctgtgggtgcaccatatggtctgggtagctctggaaagggcatatttggtgtaggatatggccctgtggggccagggcccggcacagttggggctggataaggaccaccaggtgggggacatgatggtccggaaggaggaaagggtgctgggggtcctggaggtggtccggtgggaggcacggagggatacattcctgttggtgctggtccaaaaggcacagtggagggtgttgcacttggtgggagtccagatggcactgaagatggagcactcggattattccaagggttggagcctggccagccttgaggaggttggccaggttttgtattgctcacagcagaggttttggcaggggagtgttcaggtagtgcatctgccaacgaaaattcatcagacattttcccggcaatatccgagaccgcagtagggtctagaagcggcgatgggtccgagggactgggccctgaagacgcgggcgcagcctgactgacggcagctagagcagcggcggcaacagcaccagcagcgcgcggctcctcctgacgcgatagtcgacccggaaattcggaac

SEQ ID NO: 60344 - DNA, 1248 bp, Homo sapiens
agggcaagtgccaggggggcacaaggctgggcatgtggctggcatgagacggtgtctgagtaatgtcaggcacctggaggcattgaccccaggaccttggaccccagacctctgaccgtggggcagccagcgtccaggtaccccaacccctgccctgggtccggcgtccccccattagtgagtcttggctctacttatagcatctgacaccagaggggccgaaaatagcccctggagaagggggaggagggggctatttaaagggcctgggaggggagagagaatgaggagtgatcatggctacctcagagctgagctgcgaggtgtcggaggagaactgtgagcgccgggaggccttctgggcagaatggaaggatctgacactgtccacacggcccgaggagggctgctccctgcatgaggaggacacccagagacatgagacctaccaccagcaggggcagtgccaggtgctggtgcagcgctcgccctggctgatgatgcggatgggcatcctcggccgtgggctgcaggagtaccagctgccctaccagcgggtactgccgctgcccatcttcacccctgccaagatgggcgccaccaaggaggagcgtgaggacacccccatccagcttcaggagctgctggcgctggagacagccctgggtggccagtgtgtggaccgccaggaggtggctgagatcacaaagcagctgccccctgtggtgcctgtcagcaagcccggtgcacttcgtcgctccctgtcccgctccatgtcccaggaagcacagagaggctgagagggactgtgacttgggctccgctgtgcccgccctgggctgggcccttcctggctaggactgtggaggggagctgctggccatggctgctttgtagtttgcccagagttgggggctaggggaggggggagccagaggccaggatgcctgagccccctgagttcccaaagggagggtggcagagacagtgggcactaagggtggagagttgggggccagcacagctgaggaccctcagccccaggagaagggacaaaaggtactggtgagggcaagaggtgcctgggaggagtggccctgatccaggaaaatgtgaggggaatctggaacgctctaggcagaagaagctgggagggagggggaggtgaaaagggcagaggcaaggatggtggggcccccagcaccctctgttagtgccgcaataaatgctcaatcatgaaaaaaaaaa

SEQ ID NO: 60345 - DNA, 1860 bp, Homo sapiens
cgttgctgtcgcactcggctgccggaggccgaaggccagctattacttctctactgaggccaactgtgagccctggtgtgtttcattggcaggagaagaggctaattaagtgaaactgaaaggtccctgactatggctccccagagcctgccttcatctaggatggctcctctgggcatgctgcttgggctgctgatggccgcctgcttcaccttctgcctcagtcatcagaacctgaaggagtttgccctgaccaacccagagaagagcagcaccaaagaaacggagagaaaagaaaccaaagccgaggaggagctggatgccgaagtcctggaggtgttccacccgacgcatgagtggcaggcccttcagccagggcaggctgtccctgcaggatcccacgtacggctgaatcttcagactggggaaagagaggcaaaactccaatatgaggacaagttccgaaataatttgaaaggcaaaaggctggatatcaacaccaacacctacacatctcaggatctcaagagtgcactggcaaaattcaaggagggggcagagatggagagttcaaaggaagacaaggcaaggcaggctgaggtaaagcggctcttccgccccattgaggaactgaagaaagactttgatgagctgaatgttgtcattgagactgacatgcagatcatggtacggctgatcaacaagttcaatagttccagctccagtttggaagagaagattgctgcgctctttgatcttgaatattatgtccatcagatggacaatgcgcaggacctgctttcctttggtggtcttcaagtggtgatcaatgggctgaacagcacagagcccctcgtgaaggagtatgctgcgtttgtgctgggcgctgccttttccagcaaccccaaggtccaggtggaggccatcgaagggggagccctgcagaagctgctggtcatcctggccacggagcagccgctcactgcaaagaagaaggtcctgtttgcactgtgctccctgctgcgccacttcccctatgcccagcggcagttcctgaagctcggggggctgcaggtcctgaggaccctggtgcaggagaagggcacggaggtgctcgccgtgcgcgtggtcacactgctctacgacctggtcacggagaagatgttcgccgaggaggaggctgagctgacccaggagatgtccccagagaagctgcagcagtatcgccaggtacacctcctgccaggcctgtgggaacagggctggtgcgagatcacggtccacctcctggcgctgcccgagcatgatgcccgtgagaaggtgctgcagacactgggcgtcctcctgaccacctgccgggaccgctaccgtcaggacccccagctcggcaggacactggccagcctgcaggctgagtaccaggtgctggccagcctggagctgcaggatggtgaggacgagggctacttccaggagctgctgggctctgtcaacagcttgctgaaggagctgagatgaggccccacaccaggactggactgggatgccgctagtgaggctgaggggtgccagcgtgggtgggcttctcaggcaggaggacatcttggcagtgctggcttggccattaaatggaaacctgaaggccatcctctttctgctgtgtgtctgtgtagactgggcacagccctgtggccggggggtcaggtgagtggttgggtgatgggctctgctgacgtgcagggctcagcccagggcatccaggaacaggctccagggcaggaacctgggcccaggagttgcaagtctctgcttcttaccaagcagcagctctgtaccttgggaagtcgcttaattgctctg

SEQ ID NO: 60346 - DNA, 1471 bp, Homo sapiens
ttttttttttttactattcgttaggcttttatttttctctatgttctgcagtaactaaggaaaatcatggtaaatgtcaatcttcacacaacagcagacacaaagggtttcagaaacgtcagatatgaagaaatcctccatccttcttcaacattttactgggtatttcaacttcaaaagaacagcttatttctataagtgctgtacaagatcatagattatgatggaacgacttcattttagaacgttagcaaaactgttatactaaatgtcaatgacaggaaacaaagaaaaaaatttgttcaattatatttttaaacatattgttattctcaacaaacggaattttaaaacgaatacaattttccattatcaaaagcaaacactctatttcgcagttgaacaatgatcactgatcacaaatatcaaatacagtgtcccccgcccccaatcgacatcattttcaacttaggaccctggcatctactccttggggtacctgtgactctcttttacacccccaagggtctgcctcagatctacttaaggggcggaataacccctagcacctgaattgaggatagcctcaacctctgcatcatcgtccgaatcccagtcataattacaaggccagtctttagagcatcggttacgaacccttgccacaaaatgcatgactttcagtttgctcgattccacgtgtgctcggggcccccagaagaactcatactccaccggactgctacggggcaccggtttataaatcaggtaccctctgcgcacaaactcttctgtgacgatcttcttcggatctccaaagatgctgtgctgacgtccaggctgcattcctaacttccccagcactttccagaccagagcttccttggcgctgttgcccatgatgaagatgagcgctaatatagacatcaggagacttttcttggtgccctgaaaattgctccggggcactgaaggcttttgtgcttgggcagtgctcgaggcttcttcaggggtggtagaggcctcctctggagtgctcgggtcttcctcggggccgctcaggtcgtcttcgggggtgctcgctaccacagaggcggccataggggtctcggaggcctctgaggcctggattttgcgattgttgcggttctcttctgcggctctcgcattacggcggcgccgactctttcgtccccgaggcatgtctcctgctagaggctcaaagcttacagcagtcctagggaaggatgcttgtagcctcttcaggaagcaacagctttataccgtaagaagctgctgccgctgaagctaccaatgtcaatagagtctttgtagcaataaacaagccgttctcagctacaaagggtagttcccacgccagctgacttgcgcgagcagccgccgccagcacttgccgcagctgcaagcccgcgagaaagctcagcaaaattggccccgcctctcctgccac

SEQ ID NO: 60347 - DNA, 1842 bp, Homo sapiens
ttttttttttttattgcacatcactcctttcattatactcgatactggaaaaaggatttagtacagttatgctcagatgaacactggacccatgtggcagggtccaagcaactagaacatgattcagaaatcagtggaaagataccacttggacaggaccaagagggcatttcactgccgatgaaacacaggcaggaagggattcctaatacacacacccaggaagcaactcctgccccctcaagaggtcaagcgcagcctgatcctatattggtatgaggaatggccttattttcctggttgacccaccatgtgggaactatttcaaccgcccacaagaaaccccagaagggttattgttttgtattatatatactatacttttttaataaaagtaaattaacacataacgaaattcaggattgatcccaacctagagccagatcctctggggtcagggaggaaacagttgtcacatcaccacgcaggttacattcgtcttccactggaatgactagagcccccaggcagtaggcagtgacctgactgcagaagagcagaggacagactccgctcatggggacagacaggctctgttgcttctcctcactggtcatggcttagcatggttcctccccaaagtccttagtaaacaaagcactcgcaaaaacccaagtcactacttttaaactctgttggataaggggagcttttccatagcttagactgagaacctgtgctctagaactgctattctgactagattgtatgaagggagtgggtgcaggcgacaaaatggctaaaatgaaaatgggagccactggtccccgtctgcagctacaactcaagatgtctacagatgtggtcagtgtgacatgtgcaggtgggaggggcagagggacaagacgggcagggagggtgctcctggggacagtatcctccccgccggccttcacttcttggccttgccctgggcagccacagcttccatggctttgcgcaccgtctcttcatcccccagaaactgcatgggcttgataggcttcaagttcttgtccaattcatagacaatgggaataccagtcggcaggttcagctccatgatagcctcttcagagagaccctccagatgcttgacaatgccccggaggctgttgccatgggctgcaatcagtacacgtttcccctccttgatctggggaactatttcttcattccagaagggcagagctctggcaatagtatccttcagactctcacaggagggtagctgatcttctgtgaggtctgcatacctgcgatccttactgatgttgctgtagaaaggatggtcgggctccatcggaggtggtgggacatcataggagcgcctccagatcttcacctgggcctcaccatgctttgcagcagtttctgctttattgagaccggttagacccccatagtgccgctcattgaggcgccaagtcctcaccactggcagccacatctgatcaatggcatctagcactgtccagagggtccggatcgctctcttctgcactgaggtgaagcagatgtcaaactcatagccagcatctcgtagcgcctgcccgccgcgcttcgcctcctcgtggcccgccgggctcaggtcggcgtcgtaccagccgctgaagcggttctccaggttccatgcgctctcgccgtgccggatcagcaccagtttgtaggcggccatggcggcgggctggggatgcggcaccgactgggattagcagattccggagtagcagcccgccccgtcggccgcgcctgcgcgctcgcaccgctcagtccggctcccgcgcaagttctcgcccaaat

SEQ ID NO: 60348 - DNA, 3789 bp, Homo sapiens
tttcgtgctggagctgcggatttagattgtcactgccacctcggtcggtgcttacttcgctgccagctggtcgtcgccatgaacccggacctgcgcggggagcgggattccgccagcttcaacccggagctgcttacacacatcctggacggcagccccgagaaaacccggcgccgccgagagatcgagaacatgatcctgaacgacccagacttccagcatgaggacttgaacttcctcactcgcagccagcgttatgaggtggctgtcaggaaaagtgccatcatggtgaagaagatgagggagtttggcatcgctgaccctgatgaaattatgtggtttaaaaattttgtgcaccgagggcggcctgagcctctggatcttcacttgggcatgttcctgcccaccttgcttcaccaggcaactgcggagcagcaggagcgcttcttcatgcccgcctggaacttggagatcattggcacttatgcccagacagagatgggtcatggaactcaccttcgaggcttggaaaccacagccacgtatgaccctgaaacccaggagttcattctcaacagtcctactgtgacctccattaaatggtggcctggtgggcttggaaagacttcaaatcatgcaatagttcttgcccagctcatcactaaggggaaatgctatggattacatgcctttatcgtacctattcgtgaaatcgggacccataagcctttgccaggaattaccgttggtgacatcggccccaaatttggttatgatgagatagacaatggctacctcaaaatggacaaccatcgtattcccagagaaaacatgctgatgaagtatgcccaggtgaagcctgatggcacatacgtgaaaccgctgagtaacaagctgacttacgggaccatggtgtttgtcaggtccttccttgtgggagaagctgctcgggctctgtctaaggcgtgcaccattgccatccgatacagcgctgtgaggcaccagtctgaaatgaagccaggtgaaccagaaccacagattttggattttcaaacccagcagtataaactctttccactcctggccactgcctatgccttccagtttgtgggcgcatacatgaaggagacctatcaccggattaacgaaggcattggtcaaggggacctgagtgaactgcctgagcttcatgccctcaccgctggactgaaggctttcacctcctggactgcaaacactggcattgaagcatgtcggatggcttgtggtgggcatggctattctcattgcagtggtcttccaaatatttatgtcaatttcaccccaagctgtacctttgagggagaaaacactgtcatgatgctccagacggctaggttcctgatgaaaagttatgatcaggtgcactcaggaaagttggtgtgtggcatggtgtcctatttgaacgacctgcccagtcagcgcatccagccacagcaggtagcagtctggccaaccatggtggatatcaacagccccgaaagcctaaccgaagcatataaactccgtgcagccagattagtagaaattgctgcaaaaaaccttcaaaaagaagtgattcacagaaaaagcaaggaggtagcttggaacctaacttctgttgaccttgttcgagcaagtgaggcacattgccactatgtggtagttaagctcttttcagaaaaactcctcaaaattcaagataaagccattcaagctgtcttaaggagtttatgtctgctgtattctctgtatggaatcagtcagaacgcgggggatttccttcaggggagcatcatgacagagcctcagattacacaagtaaaccagcgtgtaaaggagttactcactctgattcgctcagatgctgttgctttggttgatgcatttgattttcaggatgtgacacttggctctgtgcttggccgctatgatgggaatgtgtatgaaaacttgtttgagtgggctaagaactccccactgaacaaagcagaggtccacgaatcttacaagcacctgaagtcactgcagtccaagctctgaagtgtcacaaggacaagtttaatctgcttcagaaagcgcctgtgtgcaactcaaattttgtggaatctttttcgaattcaaatagctatagagcaaatgataaattgacccctttttataaatggagggaaaaaatgaacagatttcagagattaaatgaaaaaaagcagatgttttaagtgcaattaacactgaaagagacctgttaaaccattcagaaaaagcttaagaaatgcgatatgacttccttttgtaatgctgctgatcccagtagactatgacttttgataattagcagaatttaactactgagtagttgattattttcacattttaattgctaatcactggctatataagtgtttttaagcaaaggtatttttgaagtggtgtagaacccttccaagctttcctgctcagtgttctaccagacttaccctggggcctggcttaaaagcaggattgaagaaaagggactgggggaaggaaacttattggaaaacttgatgcgaatgagtttctgcttggcacagtctctgcctgcttgctctcctttgctgatggattgcatttatcaaactattcatgctagcatttttccaacgagggaacttattccgcacgggcctactgtaggaccattgtctcgtgtaattaggaattttccatttgaaggattgctaaattgtcacagtagtaggaagtatagggaaacctctcagctgtggcactgttgtagctttggagtgcagagtgtaactctgggacaatcagatttcacatattctgtcatcttggcataagccattaaaagcttggagattactgtatttggcattaaaaaaaaatgtcacttaggtcagcactcccagacgtagcacagaaaaaccctttgacacaaaccatgtgttctgatttttggttcaaaaaatattgaaactgtgagttgttttttttttaacaactgggaaaaaacaaaaacaaaaaactatagttagaaaaatggaagttccataggttctatttcttactctatgtatggctttgttttcagtctatttctaggagctttctctgaatcgctaattgtcctttcagttgaaatctaatttatacaatcattctatacttaaaggttaaatacatcttaattaattttttcttaaagtcaatgtaagtcactttgttttgtttttttttaatctacgccatatgcctcatgaaaccagctgttctagaatcagtcctgagaatatggcttaattccatggaaacataactcctatcttgggacctgacataatatctatctatcctggggaactggtaatatgagacttataggttacagcagaaatgctacatgttgacaaaagccttaatcgttccactgggagaactaattgataattgtgttaagattgaagattaaccctgtgttaatctcacttgagtctatcctgacagtagttcagattctggaaaatgataaactgacctgctagatgtagaattgtttcaaaattagtgttgaaataccttgttcacagatgaatatctgggcaggatctgagggtgtttggaatgacaccccccaatccagttgcatagatgggatgtctttgcaggtttgaggagatcatcgacctgcagagccccctttgacccagtacctcacgttttatttaaaatctaaatctggggccaggcgtggtggctcacgcctgt

SEQ ID NO: 60349 - DNA, 1897 bp, Homo sapiens
cgacccacgcgtccgctgcggggcaagatggaggcgctgattttggaaccttccctgtatactgtcaaagccatcctgattctggacaatgatggagatcgactttttgccaagtactatgacgacacctaccccagtgtcaaggagcaaaaggcctttgagaagaacattttcaacaagacccatcggactgacagtgaaattgccctcttggaaggcctgacagtggtatacaaaagcagtatagatctctatttctatgtgattggcagctcctatgaaaatgagctgatgcttatggctgttctgaactgtctcttcgactcattgagccagatgctgaggaaaaatgtagaaaagcgagcactgctggagaacatggaggggctgttcttggctgtggatgaaattgtagatggaggggtgatcctagagagtgatccccagcaggtggtacaccgggtggcattaaggggtgaagatgtcccccttacggagcagaccgtgtctcaggtgctgcagtcagccaaagaacagatcaagtggtcactccttcggtgaagacctcactgttcctggctcttcatcctcttcaaaaaatttgcatgtctgctgtgaattttcatctagttccccaatcgatgctctcagggtcatctcggggatcacagggatccttaaatctccattctgtttgtggttgccccctcaacctcccctacacccttcctattctttttcattcttcttgcagttctgggagtaaagctcccagcatatttagataatagggcaggggaagcaccctctttctttctagactggattatgctcacatgctcccttgccctgacatttttgtaaattctgtgccctttgctgtagctacacttcagattaaagtaggagaaagaatgtgctgagtgttttcctccctttgcctctacctggccctcatcccaacagcccagcaaggggagagagaaagagaattcttttctatagaacgagtgggggcggggatgggtagggatttatccaatctaagccctaaccccacttagtgacctcagtgttttcttccattccttcttactgccctgtcctctgccttggaagaggctttgggaatagttcatagggaagggacaacatggaagaaacagcgatttaaattgtattgaacagggcatataaaatgcattctgtaccctgatctggcatatagcttcaaaactgcagtggcgagtgtccatctcttagttagctaccttaactgtccacccttactacctgtgggatcgttgcctggtttgtcttctctgtgtcctggagcaaagccagttcctaaaactaaaactccattctagtcttgggaagaaaagtttctactcagaactggggaaggagtggaacttatgacttgggcctctaggctgtctctgtcccctcagctccccgacatgcatttactctctgccgtgggtctgcagtcgctgcaacctaccctctctctgcctcagccttacacccaagcagtaggtctgtgctctccctgtctctaggtcgctgagagaggtgcttttcttcataaaacctttggggtttggatttccccaggaagatggagaatggaatactcactcttgggtctaatctttccccttgacccagaacttcctccccacaaaaatgcctttaaaaaccttcctgagacttaagcattctgccccacttactaactgccagttctccagcactgaggtggggcagataacggggcatatttaagggggcatctttgtgtaaaagatgcatggagtcaggagaaaaccaccttcataaactgctctgtgcaaagaggaataaaacattttttccaaactgaaaaaaaaaa

SEQ ID NO: 60350 - DNA, 3589 bp, Homo sapiens
gcggcggcgcgagcggcgtgtcggcggcggttccagcatgaagaggagagctggcctggggggcagcatgaggtcagtggtgggcttcttgtcccagcggggcttgcatggggaccccctgctcactcaggactttcagaggagacgcctgcggggctgcagaaacctctacaagaaggacctcctcggccacttcggctgtgtcaatgccattgaattctccaacaatggaggccagtggctggtctcaggaggagatgaccgccgggttctgctatggcacatggaacaagccatccactccagggtcaagcccatacagctgaaaggagagcaccattccaacattttttgcctggctttcaacagtgggaacactaaagtgttctctggaggcaatgatgagcaagttatcctccatgatgttgaaagcagtgagacattggacgtgtttgctcatgaagatgcagtatatggcttgtctgtgagcccagtgaatgacaacatttttgccagttcctcagatgatggccgggttctcatttgggacattcgggaatccccccatggagagcccttctgcctggcaaactatccatcagcctttcatagtgtcatgtttaaccctgtggagcccaggttgttggccacagccaattcaaaaggaaggagtgggactctgggacattcgaaaacctcagagttctctcctgcgctatggtggaaacctgtccctccaaagtgccatgagtgtacgattcaacagtaacgggacccagctcctggccctgaggcgacgcctgccccctgtgctctatgacatccattcccgcctgcctgtgtttcagtttgacaatcaggtttacttcaactcatgcaccatgaaaagctgctgttttgcaggagatcgtgaccagtatatcctttcgggctctgatgacttcaacctgtacatgtggagaattcctgcagatccagaagcaggtggcattggtagggtggtcaacggagccttcatggtgctgaaagggcatcgatctattgttaaccaagtccgatttaatccccacacctacatgatctgctcttctggtgtagaaaagattatcaagatctggagcccatacaagcagccaggatgtactggagacctcgacggtcggattgaggacgattcccgctgcctctatacccatgaagagtacatcagccttgtgctgaacagtgggagtggcctgtcgcatgactacgccaaccagtcggtccaggaagacccccggatgatggccttctttgactcactggtacgccgagagatcgagggctggagctctgactcagacagtgacctcagtgagagtactatcctccaactgcacgctggggtcagcgagcgctcaggctacactgactcagagtcttcggcctcattgcctcgctccccgcctcccacagtagatgagtctgccgacaacgccttccacctggggcccctgcgggtcaccaccacaaacacagtagcctcaactccaccaacacccacgtgtgaggatgcagcctctcgccagcagcgtctgtctgctctgcggcgctaccaagacaaacgcctcctggccctttccaatgagtccgattctgaggagaatgtctgtgaggtggaactagacacagatctctttccccggccacggtcacccagccccgaagatgaatccagcagttccagcagctctagcagctctgaggatgaggaggagctgaatgaacgccgagcctctacctggcagcggaatgccatgcggcgccgacagaagacaacccgagaagacaagcccagtgccccaatcaagcccaccaacacttacattggagaagacaactatgattacccccagatcaaagtggatgacctctcctcctccccaacctcgtcccctgagcggagcacttccacgctagagattcaaccaagccgggcatcaccaacttctgacatagaatcagttgagcgaaaaatttataaagcttacaagtggctccgctactcttatatctcctactcaaataacaaagatggagagacctccttggtgaccggggaggcagatgaagggagagcaggaaccagccacaaagacaacccagccccttcttccagtaaggaagcctgtctaaacatagcaatggcccagaggaaccaggacctgccacctgaaggctgcagcaaggacacttttaaagaagagactcctagaactcccagcaatggcccaggccatgagcacagcagccatgcttgggcagaggtgccagagggtacctctcaggacactggcaatagcggctctgtagagcacccttttgaaaccaagaagctcaatggaaaggccctgagcagtcgggctgaggagccgccttctcctcctgtccccaaggcatctggctccactctcaacagcgggtctggcaactgtcccaggacccagtctgatgacagtgaggagaggagcctcgaaaccatctgtgccaaccacaacaatggacgcttacaccctcgtccccctcaccctcacaataacgggcagaacttgggggagctggaggtggtggcctactcttccccaggacactcagacactgaccgtgataactcgtccctgacagggacactcctacacaaagattgttgcgggtctgaaatggcctgtgagacccccaatgctggaacaagagaggaccccactgacaccccagccacagatagtagcagggctgttcatggccacagtggcctcaaaaggcaacgaattgaattggaagatacagattcagagaattcctcctcagagaagaaattaaaaacatgataaatacaaagggaaaacaaaaagctacaaaagtagccttacaaaaaaaaaaaaaattgtttagtgaatacagaggaagggaaaaacaagttttaagggcacatgaaaccagggcctgaaattttgggtctgatgctgctcccttctatccaacattcaacaacgggtctgaatgtctagctggccattggtttgtgctgtgttaagaaaggggaaaaaaaaataacccaagtgactcctttctagtgagacgtgagcgtagtgtgccgcgcaaggctctgtggaagtaaatctttgttgagacgttcgacttgttcttgtgtaccgcacaatggcacgtgtgcgcttattgtcttataagaccttccttttagttctccatcagaaaggacctatgaatttgtactttttgccatctcaccctgtttacatgccataggtgttctggtctggatgatgggtgcctgttaaatcaggttgtgctgccagtgagttgtagatttatgctgggaagaatggagaatggaaacaggccttcagcccattggctgcgctggagaggaaagcatggttcctttcttaaagaaatcttccatgttttctctaagtaacacttctttattgagcatttaatgtggacatactataaaaaagaatttttaatgctaatgagaggtttagcacttaagatcagattcaagagaatataggttcctgataaa

SEQ ID NO: 60351 - DNA, 676 bp, Homo sapiens
ttttttttttttgaagagagcagattctctttattgagatacgggacacagcgaagggtggagagacggaacagccccccagcctcagccctctccacgggggccggatgccagagatgggagaagggattcagtctctcgcccgggaaacccagtcccacagagggcgccggcaagggtgggacgcgacctgggtgacacggtgcagggagtctttaaatagaggaggggctggagcggggaaacgcgccggggccctagcgcaccatgtattccttgcgcttattgagccgaacttggcagaaagagaagcctccgaggaggaggtaaaggcctgcagcgatgaaacagttgtagctgacttgctcgtaaaggttgtatatgttctgggggccattctcaaaatctttctccgtgaagggaacgtcctcaatcaacacagcggaatggacattgaaaaatattccgagcattatcaacatgatcactccccaggcgctgaggacgatgccgcaggcggccagcttcggcccacagcacaggagcgacgccataaagaagggagtcggggatcgccgaggtgcaagcgggctcggaaagcggtgggagaaagcccaggatgccctcgcccacgcgtccgcccacgcgtccgcccacgcgtccgcccacgcgtccg

SEQ ID NO: 60352 - DNA, 5381 bp, Homo sapiens
ccacaccttaggggaaagaaccacctcctagagtaaagactactctaggcagggtgtggtggctcacacctgtggtcccagaactttgggaggccaaggtgggcgaatcacgaggtcaggagtttgagactggcctggccaatatggtggagccccgtctctaccaaaaatataagaattggctgggtgtggtggcgggtgcctgtggtcccagctgctcgggaggctgaggtgggagagtggcttgagcctgggaggcggaggttgcggtgagccgagatcgcgccactgcactccagcctgggtgacagagtgagactccatctcaagaaaaaaaagaaaaaaaaaaaaaagaatggagatactagaggttgcacagtgctgagaaatatgaggttctgacctagccagagtggagagaactttttaacatcataggcattcaattgaaaaaccacaccttaggggaaagaaccacctcctagagtaaagactactctaggcagggtgtggtggctcacacctgtaatcccagaactttgggaggccaaggtgggcgaatcacgaggtcaggagtttgagactggcctggccaatatggtgaaaccccgtctctaccaaaaatataaaaattagctgggtgtggtggcaggtgcctgtagtcccagctactcaggaggctgaggtgggagaattgcttgaacctgggaggcggaggttgcagtgagccgagatcacgccactgcactccagcctgggtgacagaccgagactccatctcaaaaaaaaaaaaaaccaaaaaccaaaaaccaaaaaaccacccaggggtcttgttaaaatgcagatgttgaatcagtaggtctggtggtgcggcctgagattctgcatttccagcaagctcccaggagatgccagtgctggtgggtagaggtagggagggtcctgctctgcagttatctgggtgtcttattacgactcctttaccctcctcctttgctaaggactgggagacttctccactgcctgggatgctggccccggcagctggccctgcctttgacagtgaccctgagatctccgacgtggatgaggatgagcccagggggtctggtgggctctgcggatgttgtctcccccagcggccactcagatgcccagaccctggccatgaatgctgcaggagcagctggatgccatcaatgaggaaatcaggatgattcaggaagagaaggagtccacggagctccgcgcggaggagattgagacgcgtgtaaccagtggcagcatggaagccctaaacctgaagcagctgcgcaagcgtggttccatccccacctctctgacggacctgtccctggccagcgcgtccccaccactcagcggccgctccacacctaagctcacctcccgcagtgctgcccaggacctggaccgaatgggggtcatgaccctgcccagtgacttaagaaagcataggaggaagctgctgtcgccagtgtctcgggaagagaaccgagaggataaagccaccataaaatgtgagacttctcctccttcctcacccaggacgctgcggctagagaagcttggccacccagccctgagccaggaagaaggcaagagtgccttggaggatcagggcagcaaccccagcagcagcaacagcagccaggactccctgcacaagggcgccaagcgcaagggcatcaagtcgtccattggccgcctgtttgggaagaaggagaagggcaggctgatccagctgagtcgggatggagccacaggccatgttctgctaacagactccgaattcagtatgcaggagcctatggtgcctgccaagctggggacccaggcagagaaggaccggcggctaaagaagaaacaccagctgcttgaagatgcccgcaggaaaggaatgccctttgcccagtgggatggtcctactgtggtctcctggttggagctctgggtggggatgcctgcctggtatgtggcagcctgccgggccaacgtcaagagtggtgccatcatgtccgctctgtcggacacagagatccagcgggagatcggcatcagcaatgccctgcaccggctcaagctccgcctggccattcaggagatggtgtcattgaccagcccctctgccccacccacctccaggacttcttctgggaatgtctgggtcacccatgaagagatggaaactctggaaacatctactaaaacagacagtgaggagggcagctgggctcagaccctggcctatggggacatgaaccatgagtggattgggaatgaatggctacccagcctggggctcccgcagtaccgcagctacttcatggagtgcctggtggacgcccgcatgctggaccacctcaccaagaaggacctgcgggtccacctgaagatggtggacagcttccatcgaaccagtcttcagtatggcatcatgtgtctgaagaggctgaattatgaccggaaggagctggagaagaggcgagaggagagccagcatgagatcaaggatgtgttagtctggaccaacgaccaggtggttcattgggtccagtctattgggctccgggactacgcaggaaacctgcatgagagtggtgtgcatggagccttgctggccctggacgagaacttcgaccacaacacactggccctgatcctccagatccccacacagaacacccaggcacgccaagtgatggaaagagagttcaataacctgttggccttgggcacagaccggaagctggatgacggggatgacaaggtgtttcgccgcgcgccctcctggaggaagcgcttccggccgcgggagcaccacggtcgcggcggcatgctcagcgcttccgcggagaccctcccggcgggcttccgtgtgtccaccctggggaccctgcagcccccaccggccccgccaaagaagatcatgcctgaagctcactcccactatctctacggacacatgctctccgccttccgggactagccatggcccccagggctggcttcctccttctgggtttcacaggctcctctggccctgacccctcttgctcgttccccttccttccgcagctcctagtctcgtccgtgactttccggttgccctggatctcagaatatattcgtccaccccctcggcaccccattaccccgagtcccaccgtgtgtccgttgtaagtccggtggatgtggctggggtttcctggtattgtggaggcacccaggttgtccatgcttgggattctgggggaaggagagaagggcagctcagggtggatgtgaagccacccttcctcttctggacccagcctggtctgcactgcaacctccaccaggaccaggatcctgggccacaggctgggatggtccttccaagaaagggtcatttcagacgcagccctgcttgggctattcaatcttagggtgtctatccacgtctggctgtgccaaatggtctggcagctggttttggcatccccagcatcaccactcttccaacccatcaccgtgactgcagttcctgcccccattctcttggggtcagggaggggctgggaagggctactgaaggccccattctcccacaggatggtgaggctgggaggaggaagactgaggtagagattccaggccctggcataagctgaatcccaaatttgggtttgggaagaaccagagagaaatggatccctgagctctgagccaagggtgaggatggggaaactctaagctcccacctaataagaagcataggcagaccagccagagggagagccaatggcctctggtagccttaagcccaaaaggcagtgggaatgtcccctgccccaaccatcgggtggagcttctgctgggctatggggaagggaggttgtgcggatcttgactctagggcagaacagatctaaccatgcattgctagctctgctctcagcatcccttccccttctctcctcctctgcctcacttctttagtaatcccaaccctataaaaatgagcctaatgggtggattgaatatacattgagcccaaagtcaagtttggggaaaaggcagactaaggcctcctttctctgacctcccaggaagaaaatagcttctcctacagtgattcatgtcccaggtccaggaaatccaatcttggtgaaggcagccactctcttgcttgtccccaaatcacctaaccctcatccagggctattttggtgggcagggactgcctcctcccggaattcctaagatccgcccagctgccaccattttcattgctttccccagcagcatgatgggaacccaagctgagggatacaggtcctgatttggtaggaatattattcccaagaaatacccgctcctcacctactccctcatcctaccaaggtgcctgaaaatgttcaagacttatgttcagggtgggatgatggaaccgagggcttcatcaaagtgagaggaaaggaaaagcatctggcatgtgtttcttggataggggccagtgcagtgccatcctacaggtggctggagcagctgctttgcaacctgatcaccttgagttctgagcagggactaggcttgcaggtgagataatggggccagggcacccagtccagaaggagcaattggcacctggggcagtgccaggggctttaaagcccgcttgcttcctttttcggtagagggagaggcccatcactggtgtggtggggtgggctctcccttaggcttgggcaaggcagccacctgcccttgctctcccttagtgttccctggcctccctgccatcaggttgctgggagtggagatggagggattattgagcagaaaatgagttggatggagataaacagctcccatccctgggtaatggatggtaagatgatggagattcctaagattggtggagttgggcaatgcatagccatctgactccttcagggtgctcttgatgggctggctgtaagggagactcagtcccagcctctccccctcctaaaaactccctgcccactgttggccccatgtccgtaaaggcagcagctgtgccaggatagctgggtccattcagagcaccttgagaagtgttgcagggaggtgttaagaagagaaatctgtgcaaacagtgatggaaggctgttgtcttggtgtatcccttgcctcatagtcaatatattttttttttggcgagtcaccagtgacccgagccctccacaccagcctcctgtatctcatcaggtcccttctcagtactgtatttgctcagtgcatcaggaatgggtgtatgggtgtgtgtgggtgggtgtgagtgtgggtgtgtacgtaccaataaacaacctggttttaagacaatgtaaaaaaaaaaa

SEQ ID NO: 60353 - DNA, 1308 bp, Homo sapiens
tttcgtggcaccgagaggcctgcatgggcgtgtgtagcatgtgtattttcagagcccgacacttgaggagactgttgctcaatttaagaaagcacagctattggaaagccaggaaacagacccagagaggcggatgcatgtgggagcaaagagctttgggcagcctttaagctgaggaagtggagaggctggcggcgatgcgttctgactccctcgtcccaggcacccacaccccacccatccgcaggagaagtaagtttgccaacctgggaaggattttcaagccttggaaatggaggaagaagaaaagcgaaaagttcaaacacacgtcagcagccctggaaaggaaaatatctatgaggcaaagcagagaagagctgataaagcgaggagtcctgaaggaaatctatgataaagatggggaactctctatatccaatgaagaggactccctagaaaatgggcagtccctgagctccagccagctgtctctgcctgccctgtccgaaatggagccagtcccaatgcccagggatccctgctcatatgaggtgctccaaccgtcagacatcatggatgggccagatcctggcgcccctgtgaaattgccttgtctgccagtgaaactgtcgcctccgctacctccaaagaaagtcatgatctgtatgcccgtgggggggccagacctctcactggtgtcctacacagcccaaaagagtggccagcagggtgtggcccagcaccaccacactgtcctgccctcccagatccagcaccagctgcagtacggcagccacggccagcacctcccctccaccaccggctccctccccatgcacccctcgggctgcagaatgatagacgagctcaacaaaacgctggccatgaccatgcagaggctggaaagctctgagcagcgggtcccctgttccacttcttaccacagctctgggttgcactcgggtgatggggtcaccaaagcaggacctatgggccttccagaaataagacaagtgccaactgttgtgattgaatgtgatgacaataaagaaaatgtgcctcatgagtcagactacgaagactcttcttgcctgtatacaagagaagaggaggaagaggaggaggacgaagacgacgacagctcattatacaccagctccctggccatgaaggtctgcaggaaggactccttagccatcaaacccagcaacaggccctccaagcgagagctggaagaaaagaacatccttcccaggcagacggatgaggagcggctggagctgaggcaacagattggcaccaagctca

SEQ ID NO: 60354 - DNA, 1139 bp, Homo sapiens; identical to SEQ ID NO: 59780

SEQ ID NO: 60355 - DNA, 2773 bp, Homo sapiens
acgcgctgggccgcgggcagcgtcgcctcacgcggagcagagctgagctgaagcgggacccggagcccgagcagccgccgccatggcaatcaaatttctggaagtcatcaagcccttctgtgtcatcctgccggaaattcagaagccagagaggaagattcagtttaaggagaaagtgctgtggaccgctatcaccctctttatcttcttagtgtgctgccagattcccctgtttgggatcatgtcttcagattcagctgaccctttctattggatgagagtgattctagcctctaacagaggcacattgatggagctagggatctctcctattgtcacgtctggccttataatgcaactcttggctggcgccaagataattgaagttggtgacaccccaaaagaccgagctctcttcaacggagcccaaaagttatttggcatgatcattactatcggccagtctatcgtgtatgtgatgaccgggatgtatggggacccttctgaaatgggtgctggaatttgcctgctaatcaccattcagctctttgttgctggcttaattgtcctacttttggatgaactcctgcaaaaaggatatggccttggctctggtatttctctcttcattgcaactaacatctgtgaaaccatcgtatggaaggcattcagccccactactgtcaacactggccgaggaatggaatttgaaggtgctatcatcgcacttttccatctgctggccacacgcacagacaaggtccgagcccttcgggaggcgttctaccgccagaatcttcccaacctcatgaatctcatcgccaccatctttgtctttgcagtggtcatctatttccagggcttccgagtggacctgccaatcaagtcggcccgctaccgtggccagtacaacacctatcccatcaagctcttctatacgtccaacatccccatcatcctgcagtctgccctggtgtccaacctttatgtcatctcccaaatgctctcagctcgcttcagtggcaacttgctggtcagcctgctgggcacctggtcggacacgtcttctgggggcccagcacgtgcttatccagttggtggcctttgctattacctgtcccctccagaatcttttggctccgtgttagaagacccggtccatgcagttgtatacatagtgttcatgctgggctcctgtgcattcttctccaaaacgtggattgaggtctcaggttcctctgccaaagatgttgcaaagcagctgaaggagcagcagatggtgatgagaggccaccgagagacctccatggtccatgaactcaaccggtacatccccacagccgcggcctttggtgggctgtgcatcggggccctctcggtcctggctgacttcctaggcgccattgggtctggaaccgggatcctgctcgcagtcacaatcatctaccagtactttgagatcttcgttaaggagcaaagcgaggttggcagcatgggggccctgctcttctgagcccgtctcccggacaggttgaggaagctgctccagaagcgcctcggaaggggagctctcatcatggcgcgtgctgctgcggcatatggacttttaataatgtttttgaatttcgtattctttcattccactgtgtaaagtgctagacattttccaatttaaaattttgctttttatcctggcactggcaaaaagaactgtgaaagtgaaattttattcagccgactgccagagaagtgggaatggtataggattgtccccaagtgtccatgtaacttttgttttaacctttgcaccttctcagtgctgtatgcggctgcagccgtctcacctgtttccccacaaagggaatttctcactctggttggaagcacaaacactgaaatgtctacgtttcattttggcagtagggtgtgaagctgggagcagatcatgtatttcccggagacgtgggaccttgctggcatgtctccttcacaatcaggcgtgggaatatctggcttaggactgtttctctctaagacaccattgttttcccttattttaaaagtgatttttttaaggacagaacttcttccaaaagagagggatggctttcccagaagacactcctggccatctgtggatttgtctgtgcacctattggctcttctagctgactcttctggttgggcttagagtctgcctgtttctgctagctccgtgtttagtccacttgggtcatcagctctgccaagctgagcctggccaagctaggtggacagacccttgcagtgatgtccgtttgtccagattctgccagtcatcactggacacgtctcctcgcagctgccctagcaaggggagacattgtggtagctatcagacatggacagaaactgacttagtgctcacaagcccctacaccttctgggctgaagatcacccagctgtgttcagaattttcttactgtgcttaggactgcacgcaagtgagcagacaccaccgacttcctttctgcgtcaccagtgtcgtcagcagagagaggacagcacaggctcaaggttggtagtgaagtcaggttcggggtgcatgggctgtggtggtgttgatcagttgctccagtgtttgaaataagaagactcatgtttatgtctggaataagttctgtttgtgctgacaggtggcctaggtcctggagatgagcaccctctctctggcctttagggagtcccctcttaggacaggcactgcccagcagcaagggcagcagagttggg

SEQ ID NO: 60356 - DNA, 1858 bp, Homo sapiens
gaccggccgaattccggtcgaccacgcgccgcccttgcggccggctctacgttccctgttctcgcctgcagctccgccatggctcctaaaggcagctccaaacagcagtctgaggaggacctgctcctgcaggatttcagccgcaatctctcggccaagtcctccgcgctcttcttcggaaacgcgttcatcgtgtctgccatccccatctggttatactggcgaatatggcatatggatcttattcagtctgctgttttgtatagtgtgatgaccctagtaagcacatatttggtagcctttgcatacaagaatgtgaaatttgttctcaagcacaaagtagcacagaagagggaggatgctgtttccaaagaagtgactcgaaaactttctgaagctgataatagaaagatgtctcggaaggagaaagatgaaagaatcttgtggaagaagaatgaagttgctgattatgaagctacaacattttccatcttctataacaacactctgttcctggtcgtggtcattgttgcttccttcttcatattgaagaacttcaaccccacagtgaactacatattgtccataagtgcttcatcaggactcatcgccctcctgtctactggctccaaatagaccatgtcagcttcaccccctggctttgtgtctatgggtggcctgtggtatatggaaaagtagcagggtggtcagggtgggagacacaagatgtttttatagtctagagcctttaaaaaacccagcagaatgtaattcagtatttgtttattggctgttttttgacagattgttgaaattaaatgaattgaaagggaaactcagagtactaggacgtttattaaaaggaaaaaaatgtcttgcaatgtgctgtaatcacaagaggagaaaataacttgtttccttgatctgtcagaggtcacagtaacctgggccgagctgttattatttattatataatagtagtaggaagttaataactggttctctgtgttccaagcacaatattacaacttcttttgaaccgtaaatatcagaatgaatcctcttcccaggggattgaacagaagcttaatgtttacaagtgtttgaatttgtgatctgaaataacacaaaattaaaaacatgatttctctaattttccaactagaggaagagaaacttgtggaaaagttctttttttttcttttttttttcttaaaaaagggcagccaaggtagtaacctaaaaatagtgcccaggcatatgagagttgtcctacgaggttaaagaacacactgttccactgtatggctttggccctgagtggccagggaggtcaacttgaccctgccatgttggtttgacttactaagacacaggaatcattgttttccttgaccagggtctcacaccctggaggaatgttaagtaagagaaagaacctctttcctgaatattgacatgtaaaagaccaaagtaatttttctgaacttctgcaattctgagaactctccaaggaatttacagtgattttagtgcttgtcagcatttttccatgaggactttcatacatttgactctttagttcacaggttcccattgattgtgagcaagatatttatctctttagcccttggggatccagctgagagcaatctcttgcatttttttacccgtgtatgtacagatatcatttcttgtgtatgccatgacttgaaaaagtttgggaagctctttagcaatatcagctaaaaggatatgaaatcacaggtgatagcagttgtcattcagtaatttcccacaagcagcaccccaaaggaaatatagtcctaatccttactatccacttctaaaatttaag

SEQ ID NO: 60357 - DNA, 3235 bp, Homo sapiens
tctaccgctgcgagaagacgatagaagggggaacaaaccaacatttgagccaggaataactagagaggaacaatggggttattcagaggttttgttttcctcttagttctgtgcctgctgcaccagtcaaatacttccttcattaagctgaataataatggctttgaagatattgtcattgttatagatcctagtgtgccagaagatgaaaaaataattgaacaaatagaggatatggtgactacagcttctacgtacctgtttgaagccacagaaaaaagatttttttttaaaaatgtatctatattaattcctgagaattggaaggaaaatcctcagtacaaaaggccaaaacatgaaaaccataaacatgctgatgttatagttgcaccacctacactcccaggtagagatgaaccatacaccaagcagttcacagaatgtggagagaaaggcgaatacattcacttcacccctgaccttctacttggaaaaaaacaaaatgaatatggaccaccaggcaaactgtttgtccatgagtgggctcacctccggtggggagtgtttgatgagtacaatgaagatcagcctttctaccgtgctaagtcaaaaaaaatcgaagcaacaaggtgttccgcaggtatctctggtagaaatagagtttataagtgtcaaggaggcagctgtcttagtagagcatgcagaattgattctacaacaaaactgtatggaaaagattgtcaattctttcctgataaagtacaaacagaaaaagcatccataatgtttatgcaaagtattgattctgttgttgaattttgtaacgaaaaaacccataatcaagaagctccaagcctacaaaacataaagtgcaattttagaagtacatgggaggtgattagcaattctgaggattttaaaaacaccatacccatggtgacaccacctcctccacctgtcttctcattgctgaagatccgtcaaagaattgtgtgcttagttcttgataagtctggaagcatggggggtaaggaccgcctaaatcgaatgaatcaagcagcaaaacatttcctgctgcagactgttgaaaatggatcctgggtggggatggttcactttgatagtactgccactattgtaaataagctaatccaaataaaaagcagtgatgaaagaaacacactcatggcaggattacctacatatcctctgggaggaacttccatctgctctggaattaaatatgcatttcaggtgattggagagctacattcccaactcgatggatccgaagtactgctgctgactgatggggaggataacactgcaagttcttgtattgatgaagtgaaacaaagtggggccattgttcattttattgctttgggaagagctgctgatgaagcagtaatagagatgagcaagataacaggaggaagtcatttttatgtttcagatgaagctcagaacaatggcctcattgatgcttttggggctcttacatcaggaaatactgatctctcccagaagtcccttcagctcgaaagtaagggattaacactgaatagtaatgcctggatgaacgacactgtcataattgatagtacagtgggaaaggacacgttctttctcatcacatggaacagtctgcctcccagtatttctctctgggatcccagtggaacaataatggaaaatttcacagtggatgcaacttccaaaatggcctatctcagtattccaggaactgcaaaggtgggcacttgggcatacaatcttcaagccaaagcgaacccagaaacattaactattacagtaacttctcgagcagcaaattcttctgtgcctccaatcacagtgaatgctaaaatgaataaggacgtaaacagtttccccagcccaatgattgtttacgcagaaattctacaaggatatgtacctgttcttggagccaatgtgactgctttcattgaatcacagaatggacatacagaagttttggaacttttggataatggtgcaggcgctgattctttcaagaatgatggagtctactccaggtattttacagcatatacagaaaatggcagatatagcttaaaagttcgggctcatggaggagcaaacactgccaggctaaaattacggcctccactgaatagagccgcgtacataccaggctgggtagtgaacggggaaattgaagcaaacccgccaagacctgaaattgatgaggatactcagaccaccttggaggatttcagccgaacagcatccggaggtgcatttgtggtatcacaagtcccaagccttcccttgcctgaccaatacccaccaagtcaaatcacagaccttgatgccacagttcatgaggataagattattcttacatggacagcaccaggagataattttgatgttggaaaagttcaacgttatatcataagaataagtgcaagtattcttgatctaagagacagttttgatgatgctcttcaagtaaatactactgatctgtcaccaaaggaggccaactccaaggaaagctttgcatttaaaccagaaaatatctcagaagaaaatgcaacccacatatttattgccattaaaagtatagataaaagcaatttgacatcaaaagtatccaacattgcacaagtaactttgtttatccctcaagcaaatcctgatgacattgatcctacacctactcctactcctactcctactcctgataaaagtcataattctggagttaatatttctacgctggtattgtctgtgattgggtctgttgtaattgttaactttattttaagtaccaccatttgaaccttaacgaagaaaaaaatcttcaagtagacctagaagagagttttaaaaaacaaaacaatgtaagtaaaggatatttctgaatcttaaaattcatcccatgtgtgatcataaactcataaaaataattttaagatgtcggaaaaggatactttgattaaataaaaacactcatggatatgtaaaaactgtcaagattaaaatttaatagtttcatttatttgttattttatttgtaagaaaatagtgatgaacaaagatcctttttcatactgatacctggttgtatattatttgatgcaacagttttctgaaatgatatttcaaattgcatcaagaaattaaaatcatctatctgagtagtcaaaatacaagtaaaggagagcaaataaacaacatttgg

SEQ ID NO: 60358 - DNA, 765 bp, Homo sapiens
cctttttttttttttctggtttaaatcatttatctccatgtagagatttgagtacaaaaataaacggcaacaaaacagaaggagtgtgaaatccggggatccacagggcttctgtcctccaccttccatgcagctgggggctgcatcctctgtggggtggcttcatcctctgtggggtctgtggggcctgctccaagtcatcagcattccatgcccacctggacctggtcccagactttcggggaagccctcagcctggggctcctggcacccccgttgcggctggggaagagaggtgtggaatccccagagaaagggaaggaaaggcatgaggggccttccctggggggaaggtcacaggctgggggctaagatgacggccaggaggctcagggccagccccaggctgagggcactgtgggcgagggcggtgcgggtgggtgcagcgttgtgcagcttctcattgcacaggtcctcctggcagcactgggtggagctggtgccgctgctgacctggccttgcagggtgtagctgggtgtgcacgactccgcacagtccttcttcaccagattccccctcagaggctccactgtgttcgtggtcttgcagaagcgagagctggccgggcagaccacagaatgcttgcagttgctggagctggtgcacacgtggcagcgcagggtaagggctggccctgtagccacagccagggttcaaggacacaatcgcggcgcgtgggcgaccggaattcgggcggtcgaagg

SEQ ID NO: 60359 - DNA, 1544 bp, Homo sapiens
cgctgcaggaattcggcacgagggcacgcgggactgctacgaggtgctgggcgtgagccgctcggcgggcaaggcggagatcgcgcgggcctaccgccagctggcccggcgctaccaccctgaccgctaccggccccagcccggagacgagggccccgggcggacgccgcagagcgccgaggaggctttcctgctggtggcaaccgcctacgagacactcaagtcctcctgcatatgcccaagaggattgggagtggaatggacaccagcagaagcaccacagttattcctgtagagattagaaacaaggagcttattgccctgcttgtcaaggctcaggacagacaggaggaagaaacaagtataaaggttttggttttggaaagaagttggaatctccagaccctgggaccttaagatccacaaaattgctgaaagaaaaagtactaccttattgaaaggatgaagaaacacgaaaagattatgattacatgctggatcatccagaagagtactacagccattactaccactactatagcaggcgcttggcccctaaggtggatgttagagtagtgattttggtcagcgtgtgtgctatttcggtgtttcagtttttcagctggtggaatagctacaataaggcaatcagctacctagccacagtgcccaagtaccgtatccaagctacagagattgccaagcagcagggactgctcaaaaaagccaaagaaaaaggcaaaaacaaaaagtccaaagaagaaattcgtgacgaggaggagaacatcataaagaacattataaaaagtaaaatagatataaaggggggctatcagaaaccccaaatctgtgatcttctcctgtttcaaattatcttagctccttttcacctatgctcatatatagtttggtattgtcggtggatctataattttaacatcaaaggcaaagaatatggagaggaagagagattatacattatacgtaaatctatgaagatgtcaaagtctcaatttgatagtctagaagatcatcagaaagaaacttttcttaaacgagagctctggatcaaggagaattatgaggtctacaagcaagaacaagaggaagaattaaagaaaaagttggcaaatgaccccagatggaagagatacaggagatggatgaagaatgaagggcctgggcggttaacatttgtggatgactgaagattgatggaatgctactatgccaaaccttaattgtgatattattttcataactgaattattttagaaatgtatcaattgactgctgctcagcagtaactaaaattcctcaagtatttgattaaacagaataatgtcaaaatttaaaccttcccttaaaactttatacataagacatttatgattgttcaatttttataatctatttgtggattttgttaaaagatttcacatgaagatttattagttgccatttaaaatttttatatgtttagttaaaagatttgacatgaaaatctattagataccatttaaaaattttaaaaaaaaaaaaaa

SEQ ID NO: 60360 - DNA, 1194 bp, Homo sapiens
tttttccttaatttgggggaggatatattccaacttgggggaagggtgaaggcattttagctctggagctcaatcatgacatttctagagagttctgcagtgcccccgcattggcttcaaggcccccccccacgcctcctcccctcctcccggcaaacgccccgctccccgcccccggagccccgcggacgctacgccgcgacgagtaggagggccgctgcggtgagccttgaagcctagggcgcgggcccgggtggagccgccgcaggtgcagatcttggtggtagtagcaaatattcaaacgagaactttgaaggccgaagtggagaagggttccatgtgaacagcagttgaacatgggtcagtcggtcctgagagatgggcgagcgccgttccgaagggacgggcgatggcctccgttgccctcggccgatcgaaagggagtcgggttcagatccccgaatccggagtggcggagatgggcgccgcgaggcgtccagtgcggtaacgcgaccgatcccggagaagccggcgggagccccggggagagttctcttttctttgtgaagggcagggcgccctggaatgggttcgccccgagagaggggcccgtgccttggaaagcgtcgcggttccggcggcgtccggtgagctctcgctggcccttgaaaatccgggggagagggtgtaaatctcgcgccgggccgtacccatatccgcagcaggtctccaaggtgaacagcctctggcatgttggaacaatgtaggtaagggaagtcggcaagccggatccgtaacttcgggataaggattggctctaagggctgggtcggtcgggctggggcgcagagacaactgcaaggcttctaatggccaatgctggaacaatgacagcaaggaataaataaagtgatatttaattataacccaaagcatactacagctgttcatgatcccatactgacataaataaattgttgaataaattaataaatggagaagaaacaaaccttccaggcagaagaattccaaataatgtatgtagatgctgcacactgagagagataaagcatagctccccactcctaagtgtgggctacacatagtcactttctgctcaagagtacaggatggaaaaaaggaaaaaaagagtaacattccaatcacctgcaccattcaggtgatcgaggtcct

SEQ ID NO: 60361 - DNA, 835 bp, Homo sapiens
ttttttttttttagggaaaaaaaaaaaaaccccttcagtttcctggtgtgatcctggttaaaatggatgatttttcattgaaagttttgctgattaacaattaaagtgggatgatatgtgggcaaaatcacttatgaaagtagaagcaagaatcagttggtttgctaccacataaagccatgctgtattttggtcaaactgtgtaaactggaaaaattcacatcatttctgagtttaatcactttaggatatattcacattgttttggtgaatttgctgaattgaattgtttttctttctcaaatctgtgatctcttttctttatcctgtttctttgttcctttcgtttgctttcttatttttcttttgttccattcttttcttacttttttcccttttccttttttggggaggctggctagtagtgtgtgagaaaagaatagaagtgaaatttgcataatgaatgtaaaagggaaataaaagtcttttgaaggtagctatactagcacttttgatcatcttcagggcccacaaaaatgttgtcaagattttaaaggtttataattctgcttaagctctagtttggacttaggtatcctaactatgttggaggtatttgcattgtttaaagttaggataaaagcaagttcctcctgtgactgcaacgtcttactgattgggacagttgccaggaggataccaacttgatagcagagggggttttatgcaaacgcactcacctccgccttggggaatgaaagggtcacttctgcatcatcactagctagttttctagtgttagagaggcttacaaatgtttgccattctcataagt

SEQ ID NO: 60362 - DNA, 4194 bp, Homo sapiens
tttcgtgctgctctcgcgatatttgcgcgagcctgcttccttctttcctcccttgccagtctgcctgtcttcctccccgtcttccctgcccggcctcccccttcttcccccgctggccccctccccggagggataatatggtctccggcgatggacgccccaaaagcaggatacgcctttgagtaccttattgaaacattaaatgacagttcacataagaagttcttcgatgtatctaaacttggcaccaagtatgatgttctgccttactcaatacgggtcttgttggaagctgctgtacgaaattgtgatggctttttaatgaagaaggaagatgttatgaacattttagactggaaaaccaaacaaagcaatgttgaagtgccctttttccctgcccgtgttcttcttcaagattttactggaataccagcaatggtggattttgctgctatgagggaggcagtgaaaactcttggaggtgatcctgagaaagtccatcctgcttgtccgacagatcttacagttgaccattctttacaaattgacttcagtaaatgtgcaatacagaatgcaccaaatcctggaggtggtgacctgcagaaagcaggaaagctctctccacttaaagtgcagcctaagaagcttccctgcagaggccagactacctgccgaggatcttgtgattctggagaactaggccgaaactcaggaacattttcttcgcagattgagaatacacccatcctgtgtccttttcatttgcaaccagtgcctgaacctgaaacagtgttaaaaaatcaagaagtagaattcggcagaaatcgagagaggcttcagttttttaagtggagttcaagagtttttaagaatgtggcagggatccctcctggaactggaatggctcatcaaataaacttagaatatttgtcaagagtggtttttgaagaaaaagacctcctcttcccagacagtgtagtcggcacagattcacacataacgatggtgaatggtttagggattctggggtggggggttggaggcattgaaacagaagcagttatgcttggtctgccagtttctcttactttaccagaggtggttggatgtgagttaactgggtcatcaaacccttttgttacatccatagatgttgttcttggtattacaaagcacctcaggcaagtaggagtggctggaaagtttgttgagttttttggaagtggagtttcacaattatctatagttgatcgaactacaatagcaaacatgtgtccggaatatggtgctatcctcagctttttccctgttgacaatgtgacattaaaacatttagaacatacaggttttagcaaagccaaactcgaatcaatggaaacataccttaaagctgtgaaattgtttcgaaatgaccagaattcttcaggagaacctgaatactcccaggtgatccagattaatctgaattcaatagttccatctgttagtggtccaaaaagacctcaggatagagttgctgtgacagatatgaaaagcgatttccaggcttgcttaaatgaaaaggttggatttaaaggcttccaaattgcagctgaaaaacaaaaggatattgtctccattcattatgaaggaagtgaatataagctgtctcatggatcagtggtcattgctgcagttatcagttgtaccaataattgcaatccatctgtcatgcttgctgcaggtcttttggctaaaaaggctgttgaagctggtctgcgtgttaaaccttatataagaacaagtttatctccaggcagtgggatggttacacattacctcagttcaagtggagtattaccatatctaagtaagcttggatttgaaatcgttggctatggatgttcaacttgagtgggaaatacagcacccttatcagacgcagttttaaatgcagtaaaacagggtgatttggttacctgtggaattttatctggaaacaaaaattttgaaggtcgtctttgtgattgtgttcgtgccaattatcttgcctctccacccttagtggtagcttatgccatagcaggcacagtgaatatagattgccagacagaacctttaggtactgaccccaccggcaagaacatttacctgcatgatatttggcctagtcgagaagaagttcatcgagtagaggaagaacatgttatactatccatgtttaaagcattaaaagataaaatagaaatggggaataaacggtggaattccttagaagcaccggattcagttttgtttccatgggacttaaagtctacttatatcagatgcccttcattttttgataaacttaccaaagagccaattgcactccaggctattgaaaatgcccatgtcttattatatttgggagactctgtcacaacagatcatatatcacctgcaggaagtatcgctaggaatagtgctgccgctaagtatttgacaaacagaggccttacccctcgtgaattcaactcttacggagctcgaagaggtaatgatgctgtaatgacaagaggcacttttgcaaatatcaagctttttaataagtttattggaaaaccagctcctaaaacaattcattttccatcaggacagacgctagatgtatttgaggctgcagagctgtaccagaaagaaggtatcccactgattattttagcaggaaagaaatatggttcaggaaactccagagactgggctgccaaaggaccgtatttactgggtgtgaaagctgttttggccgaaagttatgaaaaaatacacaaagatcatttgattggaattggcatagctccacttcagttccttccaggagaaaatgcagattccttgggcctctccggtagagaaacattttctttaacatttcctgaagaactgtctcctggaattacattgaatatacagacaagcactggaaaagtattcagcgtgattgcttcgtttgaagatgatgtggaaataacattatacaaacatggaggattattaaactttgtggcacgaaaattctcatagtatctacttaccatagatacctttcataactggtaactgcaaagccttttgtgctggacccaggaatccttaccatggagcagcagatagtcccagtatactcacttatctcatccatggatgtaaatgatgatgaatcaacatagtaactgaaatgaaatcttcttgattttaaataatatacgaatggtgctattaatattgctaaaatcaacgtgtgaagtgtgttgtggaagagacctgtaagtatgggggggggcgatattttatcagaccattttgtaaataaaggcagaatttgtgttgaagattcttatatgaataaccttcctggatttgtttagttttgcaccaataaaactgtgtactactgtttgttggtttaagagtagcagattgaaatataagaagccagattagactctaaaattgtggccattgggaatctcatttataaatggaccttttaagtatattaattcctcttcagaattgagctgggacacatttgggcattcttagtttgtcatataaccaggtttatccttagtctaactgcaagggatagaacctgccccaggtcaccaatccattctggtccaatcccagcccaaggttcccttcccacatatgaagatggaccatggcaggatacaactgattgtgtggcaccatgtattagcagtgggaatatgtatcacatatgatgcagcctttcatatttcagcagtttgccactgtgactgtctggcaagcccccagatggcgttatattaattggattagattattttgctcaccttatgtaatactgtaacttcctataacctaatattttcggtatcattaaccaaaatttcacactcatagttgctaaagagaatgttattcaatcattaaactctgaactgatttcttctatacatttaaattatccaccctcaataatacgggtgctcaaccctatgcattttttaagtgttgctatttcttaattaaattgatttcctgtcattttgaatcatttatcacctgcgatgcatgattctattaattttgttatgttactgttttaaccaaagctgaccgtaaggataaaacacttaagttgttgcttgagactatatatcctcaatatgcatgtctgcccag

SEQ ID NO: 60363 - DNA, 985 bp, Homo sapiens
ttttcataaccatgctgtgtttttatttttagttgtcaaatgatcctttattgaaattttttccttcgtagttcatagctagctggatatttacttgcaccactgttgatttgatgtcatctatgatgtcaggaggctggcgcccatcaacattggagctcacagactgggcagtctccaagatctctttacgggtcccagagagttctgtgactaaggattggtgctgcatctgtcatgcaatcttgacagtgtcatgaaaaatggcatttccactgtgcttgattgttttgcttctttctgtctctggttccttgagggctttgatgctcacggcagaggcagaaagtaccacctcagtctgagcctgtctgttctgaatggtcagtttcattgtaatcctttgactcttctggtgacctgtggccttgggaatgtcatcaccaacttattttggagacaggtccagagggttgatcttaagggctagggcagacatggtacccagttttccaccagggcacctggcaggtatatgactgatctcattggggttgaacttgggcagcatggcagaggtggctagatgaacccagatgtagtatgactgaagaaatgtgcactttggcttcctccaagccaagaggcccatgctgttggttttcctttctgtgttacatattggcatgggccacttggtgggggtcccttttgctgagttttaagtgaggagcagaacacagtctttttcttcttttgggattcctttctttcaatttatctactacttgtgatatcagccctgaatggagaagccaagatacataaaactcacttttcccctttaatctctatcttttcttcccctgacattcccttggtttggaaaggaaaaacaccccatcttttctgtgcagtagggacacctcttacatcaaaggtcatttctctctaccaatagctttagaattcaggttcattgttc

SEQ ID NO: 60364 - DNA, 851 bp, Homo sapiens
tttttttttttgcaaatcagcagatttattgaggccaccagcgccactggggagcagcgcgcgtgtgcggagggggtggggcctccccagggtccatgaagtgctcggcccttcccaggcatgcagtcctgcgcagccggagggggatgcgcagggactgcgctgtgggcgccgatggtcagccatggtcagtctgtccgcagccagctgcccttctcctccacctccttggtcactaccagcagcacctctcacaggccctgggccagcgcagccgccaggaaggccctgactccgtcctcatcccccagggcctcgggcgcccgcagcttggagtccaggttgtagtagacaccgtccacctggcgcagggccacccagtgccgccggcgcagcggcagtgacagcagccccagcgacacgggcgagggcaggttcaggatcagccccagtacctggggcagggccagctgggacaggggcctcctcctgtcccaccacacggcggccaggcccagcccctgcagagcggccatgatcacattgacatcatagttgccggtgcccaggaggctgcgatgagggttcagccgggagtctggggccaacctcttgcagatctcatcggcagcctcctggctaaagagctgctgctgcagaacgttgttgagggcgtggacagcacacagctccaggcgctgccgttcgtggtacacggtgggtgggctcggctgtgctcccggggcctgggacatgccgtcctcggctcctgcccgcctgcctctccgctccaccgagccaggggtttccgcatccccttcctgggcggcggctcgcgatctagaactagt

SEQ ID NO: 60365 - DNA, 893 bp, Homo sapiens
ggaaggggggcccccggaggtttttttttatgggcccccccccttttttttaattatattttttttttttttttttttttttttttttttttttttttttttttttttttttttttttttttttttttttttttttgcatttttaatttaggtttgttttatttaagtttaatgttaattccatgctgtgtttcagtaagaacaatacagattctgtatctgtggctccagtcagatatccagtagtacaaattagcttcaagttacacatactgaacaaaagaggttgagcgagcgaaggaggggaggagtgaggggaaggaggtagggggagggggaaggagaagaaacaaaagaattgaacaggcatgcaggcttttccataccaccttcaacgctaacctgcttcagtgggagagtaaagtaggcaagaatgagcagccacggattgttgaactgttaccagcaccatgcttttcagcaacatttcagcggagttggaaacattttttacagcaaaaccattacaacgaagtccctccccaaaccacctttaaccatctcaagctaacacccaattacttgcaaacactggtataaaacacagtttaaacaattagaaaaatgaaaactgataccacttatgcctctatagtgtgattaacctctctcttagatgcttgcatcacctataagtctaatggctttcaaatgtaatttccatttgctaatggtgatcttgccacatctggcacggagacgacacagtaatgctgaaaaagcctctatgtagtcctgttagtgtcttaaagaacctaaaagctgggaccagtaaaatccacagaaattcactcttgcctttaagaacttttgaaaactgtttaaaaaaaaaa

SEQ ID NO: 60366 - DNA, 3365 bp, Homo sapiens
attacgcgaacaaatcctttccgcaagagctgagggacctgggtgcaacgcattctggaaattgtagtctctgggcgctcccggctgaacacctccctgcggtctgtgcgagaaagagccagaagcccccaggggagggcgaagaggagggcggtggagtacgctctgcgcgcggtgcgccatggaacgggtagttcgcggtgcgcgccccatcgcgctcccagatggggaaccggactactctacccgagaggccgcgcgagcggggcgagggcaagccgcccggggcctcgaacaaatcaaatcgaagcaaagaaactgccggctttcaaaatcctcctcctccgccatcatccgccgcggtgcggagagcaggtggtgctggaagcgcgtgaggccgggagctcgagagagctaacagactagccggctggacatctggaccgctggatccggaggtggcgaccccggcctgacccggaccctaaatccgtccccgccccagagggcggaggcgcgcgctcgattcccccaacgcggcggcgccgcctgtttacgtctgcagatctccaggggagcccaccagcctagtcaacatggcctcggaagacattgccaagctggcagagacacttgccaagactcaggtggccgggggacagctgagtttcaaaggcaagagcctcaaactcaacactgcagaagatgctaaagatgtgattaaagagattgaagactttgacagcttggaggctctgcgtctggaaggcaacacagtgggcgtggaagcagccagggtcatcgccaaggccttatagaagaagtcggagttgaagcgctgccactggagtgacatgttcacgggaaggctgcggaccgagatcccaccagccctgatctcactaggggaaggactcatcacagctggggctcagctggtggagctggacttaagcgacaacgcattcgggcccgacggtgtgcaaggcttcgaggccctgctcaagagctcagcctgcttcaccctgcaggaactcaagctcaacaactgtggcatgggcattggcggcggcaagatcctggctgcagctctgaccgaatgtcaccggaaatccagtgcccaaggcaagcctctggccctgaaggtctttgtggctggcagaaaccgtctggagaatgatggcgccactgccttggcagaagcttttagggtcatcgggaccctggaggaggtccacatgccacagaatgggatcaaccaccctggcatcactgccctggcccaggctttcgctgtcaaccccctgctgcgggtcatcaacctgaatgacaacaccttcactgagaagggcgccgtggccatggccgagaccttgaagaccttgcggcaggtggaggtgattaattttggggactgcctggtgcgctccaagggtgcagttgccattgcagatgccatccgcggcggcctgcccaagctaaaggagctgaacttgtcattctgtgaaatcaagagggatgctgccctggctgttgctgaggccatggcagacaaagctgagctggagaagctggacctgaatggcaacaccctgggagaagaaggctgtgaacagcttcaggaggtgctggagggcttcaacatggccaaggtgctggcgtccctcagtgatgacgaggacgaggaggaggaggaggaaggagaagaggaagaagaggaagcagaagaagaggaggaggaagatgaggaagaggaggaagaagaggaggaggaggaggaagaagagcctcagcagcgagggcagggagagaagtcagccacgccctcacggaagattctggaccctaacactggggagccagctcccgtgctgtcctccccacctcctgcagacgtctccaccttcctggcttttccctctccagagaagctgctgcgcctagggcccaagagctccgtgctgatagcccagcagactgacacgtctgaccccgagaaggtggtctctgccttcctaaaggtgtcatctgtgttcaaggacgaagctactgtgaggatggcagtgcaggatgcagtagatgccctgatgcagaaggctttcaactcctcgtccttcaactccaacaccttcctcaccaggctcctcgtgcacatgggtctgctcaagagtgaagacaaggtcaaggccattgccaacctgtacggccccctgatggcgctgaaccacatggtgcagcaggactatttccccaaggcccttgcacccctgctgctggcgttcgtgaccaagcccaacagcgccctggaatcctgctccttcgcccgccacagtctgctgcagacgctgtacaaggtctagactcaaagcctctcccatcccttggcctggaccagtgagctggggagggactcggatgaactgaggcgcagcctacgccattgccttggacaggactctggccacaggcagggcgggtctgtgtcccatgtgtcctgtcagtcccctgagtatgtgtgtgggtgtggcgcatgtgcaggtctgtgcctcctgtcgggatttgggttttaacgtcttctgctggcccagccctgctctgttgtggggagttggcccccaggggaaagggctgtgagctgctccgccattaaactcacctccacctgagggcgctctgctgatctccgcctgggccctgatggccgtccccacccacctgccttccggcccggctccctggcggagccagaacccaaggagttgcccgcgtgctgtccttcccctctgtgttgtgattgggttgtttcctgccctgcctggggctgcttctcgtcaccaagccctggtcctgcggcagctgtcacccctaccatccataccactgtgctgaccgctcagcctgaagagcagagaatgccatgggtgggactgtgggggtcggatcgtggggttgttggcagagggcaaccctgggccccacaccgtgtggacaggcagacaccagattgtccaggagcaggagctgctgggactgcgctggccccggacctagtgggccttctcctggctgctgagatgtcgtctgtgactggcctggctggagggggagtgttgacaacccaaagctgttctccagtctggggagggagaggcagggtccccaatgtccgagctgcatctggacgctgctcttaaaggacctcctggggcaggggagcggtagggtctggactgggcagatgctgtatgacctccctgagcacccgtgactgccccatgctttcccctttgtgctctgtgtgtgtctgggctgtgcccgggggcttcacaaataaagtcgtgtggcagcttcagagaaaaaaaaaa

SEQ ID NO: 60367 - DNA, 396 bp, Homo sapiens
ggcacgaggacttttcagtggaaaccccttacaggccaagagagagaggcatgacatatttaaagtgctgaaggaaaaaacttctaccctagaatagtatatctggtgaaaatattcttcaaacatgaaggagaaataacgacttcataagacagagaagtcgagtaatttcatcaacaccagacctgtcccacacaaatgctaaagggagttcttcaatctgaaagaaaaggatgttaatgagcaataagaaatcatctgaaggtacaaaactgactggtaatagtaagtacacagaaaaacacagaatactatattaataacaataattatggtgtataaacgactcatatcatgaaaagatgaattgatcaagaataataactacaacaactt

SEQ ID NO: 60368 - DNA, 360 bp, Homo sapiens
ggcacgagcaatactctcctattccaaactccatgaggcattcttcaaacgacgacgacgctactatcacaagcctgtggcgcgaggtgaatgtctaggactctggttgagaaaccctcagaaggctcatggacggctacccatggtcccaaaggctctttgaccatggtcagacgctgtgctctgcctctgccatcatgggcaaccccagagcctaggcacatggcacgaaggtgctgacttccttgggagatgccataaagccacctgatgatctcaagggcacctttgtccctctgagtgaactgcactgtgacaagctgcatgtggatcctgagaacttcaagctcctgtgaaatg

SEQ ID NO: 60369 - DNA, 1348 bp, Homo sapiens
ggcacgagggcagtgccctcacctgggccagccactaccaggagagactgaactccgaacagagctgcctcaatgagtggacggctatggccgacctggagtctctgcggcctcccagcgccgagcctggcgggtcagtgtgtggaggggagggactgggtggaggggaaggcaggataatgcagtggggggcatggtggagaggggaaagggccccttgactgaggggctctgctcccaggtcctcagaacaggagcagatggagcaggcgatccgtgctgagctgtggaaagtgttggatgtcagtgacctggagagtgtcacttccaaagagatccgccaggctctggagctgcgcctggggctccccctccagcagtaccgtgacttcatcgacaaccagatgctgctgctggtggcacagcgggaccgagcctcccgcatcttcccccacctctacctgggctcagagtggaacgcagcaaacctggaggagctgcagaggaacaggtagggctatgagcccctcgggccacccaccccatcttcccttctcctggcctccccgcattgggtggtagccagcttcaaaaacccctggaccaccctcagcagctgctagctctgcttctaactctgtcctggggctgttgccctggtgtgggctcccaggtggggacaggagacctgctggccagcccccgcccactctcctcccccatccacactgtgaaacaaggacagaaacaaagggcctcagccacgccaagacgagaagcagcagcgcatactgctgtaactgccttggacaagcagaaaaaggctcctcttgaatgcgcctgtgggcccagctacttgggaggctgaggcaggaggatcgcttgagccctggagattgaggccgcagtgagccgtgatcacgccactgcactccagcctgggcaacagagagagaccctgtctctaaaaaataagaaaaaagaaagagagaaaaagccttttctccaccttgccctgtctcagggaagaaggaactgcccttctccccgtggggacctggctgcctgctctgacaggtacctgtcatctgcccaccatgggcttctgggacctgctgtagcccctgccacccactgctgcagacccacccactctcagcttagctcaaaagctgttctctaactcatttctgagaataactgaagggctggagttgcagttggcccagctgtctggaccagatggggaaacaagcccagcagggcaagatgattggtctaaggtcgcagccaggtgacagctgggtcacttctcctcccactgtcactgctgcctccatctgacttg

SEQ ID NO: 60370 - DNA, 5272 bp, Homo sapiens
ggggagcacggagctgcagccggttgggccggtgtactttcccgctctggaaaggaagagaaatggaagtgagaaagttgagcatttcctggcagttcttgatagttctggttctgatcctgcaaattctgtctgcgttggattttgacccatacagagtcctaggggtcagccgaacagccagtcaggctgatattaaaaaggcttataagaagctcgcccgggaatggcatcctgacaaaaacaaagatcctggagcagaagacaagttcattcaaatcagtaaggcttacgagattctttcaaatgaagaaaagagatcaaattatgatcaatatggagacgctggagagaaccagggctaccagaagcagcaacagcagcgagagtatcgcttccgccatttccatgaaaatttttattttgatgaatccttttttcacttcccttttaattctgaacggcgggactcaattgacgaaaagtatttattgcacttttcacattatgtgaatgaagtggctccagatagcttcaagaaaccctacctcatcaagatcacctccgattggtgctttagctgcattcatatcgagcctgtgtggaaagaagtcattcaagaactggaagaattgggtgtaggaattggcgtggtccatgctgggtatgagagacgcctggcccatcacctaggggcacacagcacgccctctatcctaggaatcattaacgggaaaatctccttcttccacaatgcagttgtccgtgaaaatctgcgacaatttgtagaaagtcttcttccagggaacttggtggagaaagttacaaataaaaattacgtcagattcctctctggctggcagcaagagaataagcctcatgtccttctgtttgaccaaacgcccattgtgccactgttatacaagttgactgcctttgcatacaaagattatttatcatttggatatgtatatgtgggtttgagagggacggaagagatgacaaggcggtacaacatcaatatctacgcccctaccctcttggtctttaaagaacatataaacaggcctgccgatgttatccaggcccgaggtatgaagaagcaaatcattgacgacttcatcacccgaaacaaatatctattggcagccaggctcaccagccagaagttgttccatgaactctgccctgtgaaacggtcgcatcgacagaggaagtactgtgtggttttattgactgctgagactaccaagttgagcaaaccctttgaggctttcctgtcctttgccctggcaaacactcaagacacagtgagatttgtgcatgtctacagcaatcggcagcaggagtttgccgacaccttactaccagacagtgaggcgtttcaagggaaatcagcggtgtctattttagaaaggcgcaacacagcaggaagggtggtgtataaaaccctggaagacccttggattgggagtgagagtgacaaatttatcctcttgggctatctcgaccagctgcgtaaagatccagctcttctgtcctctgaagcagtgcttcctgacctgaccgatgaacttgcccctgtttttctccttcgatggttctactctgcttctgactacatctcagactgctgggatagcatttttcacaacaactggcgggaaatgatgcccctgctgtccctgatcttctctgccctcttcatcctcttcggcactgtcatcgttcaggctttcagcgactctaatgatgagcgagagtcaagccctccagaaaaagaggaagcccaagagaagactgggaaaactgagccaagcttcaccaaagaaaacagcagcaagattcctaaaaaaggctttgtggaggtaactgaactcacagatgtaacatacaccagtaacttggtacgtctgaggccaggccacatgaatgtggtcctcatcctgtcgaattctaccaagaccagcctactacagaaatttgctttggaggtctacacatttactgggagcagctgcctacacttctccttcctgagtctagataaacacagagaatggctagaatacttactagaatttgctcaagatgcagctccaatcccaaaccaatatgataagcatttcatggagcgtgactacactggttatgtactggctctgaatggccacaagaaatacttctgcctcttcaagccccaaaagacagtcgaagagggagggaagccataggggtcgtgcagtgatgttgactcttccctctacctgggtgaatctcgagggaaaccttcctgtggccttggatccaggcccatcaaaggaaagttgagcaagctctctttatggatggaacgcctgctggagggctccttacagaggttttatatcccatcatggcctgaactagactgagaggattttccaaagagatttgaactcttcagactttttaacatgcccctgtgaacaggtattttcaggactcaaactaccacaatgaacagagtatagattttagattgctcttctagaaccatggctagaagaatctttcctttgtcctgttctaacctaggaatgaaaaacaccaccagtttgaatcgcctaaatgaaaatcttttcctctgggtgttatttttccccactgaatgccacaccattgaaaatagactgctcatcccctcttcctttcttgtccttgtcccatgctcaccccaccctcctgtcctgtgtcttggagaagcacagggctccaccctggcaagcggcatctggcggaccctcatgagcctgttcgtgcaggccaggtcattggcccctttcccaattccggccctgctgtgctgctgccatggcgcatgctcctaactctgaacaacccacggcagcttctagccccgcatctggaaaaaggcccctttccaagcaatctcacgtttactggttgttctgggagtaagtggctaaatgtatattttgggggtatcccccaacaacagtttgttggccacaggttgaaaaggaaaggaataaacgggagttctgcatgtgagttctcaagaaaaggaaagggaggctgagcagtggctgaagcgatgcagccttgagacacgctgtgagcatcccatccgccgccccagcgctgctggtagccaggggaggggtctgcacagcgagaagtactgtgatgactttgagccgttgacatgtatgtcttcagatgcctttctgcctctgtcgattttagggtatggatattaggagccataacttgtaatcttgttctctgaacgtagagataagctgctataaagccagtagatgttaaactgaagagaaattattcccacctgctatgagtcaggcttaaggaatctcttcaatagtgtctctttagtaaaataccaaacatgtctttgtatcaaggaacttaaaatttctcaacaattgtattttgaacactgttaccctaaaagtgctgtctcttcaagtcatcttttgcaggaagtgagccaagatttgttctagactcccattttgcaaaaggcttactttccacttctgggctgtattttgatgtctcatcttcattgttttcactcttaacttagagctgcttcaccagtattggggtcagactggccatcagcacctgagcgtgctgagctccaggtatagtggaccccagggtgcctcataccagccagttagagagcataccttttatttttcagggcagaatgaccagtggttctgagtttgagtttggacagcttcaaagagtggtccgttcaaatgtcaaagcaaggtgcctttggtggctttgtgaagggtgaaaatcagtgatgggacatttactaagtatttctttttttttttttttttttttagttgttgagacagagtttcactcttgttgcccaggctggagtgaaatggtgcgatctcggttcaccgcaacctccacatcccaggttcaagtgattctcctgcctcagcctcctgagtagctaggattacaggcatgtgccaccatgtaattagcccggctaattttgtatttttagtagagacgggatttctccatgttgatcaggctggtcatgaactcctgacctcaggtgatctgcctgcctcagcctcccaaagtgctgctgggattacaggcgtgagccaccactcccggctaagttagtatttctttaatcttaatgctttaaactaagccacttggatcctgaataatttaaatcttgagctacattggtaagtaataaattatttaaggccaggaattcctgtagttttcatggagtctgtagctttattaaaaaataaatcactgccaggcttcattcttccatatgatcctctaaaaatggacacttcctctgaatgctgtatctcatggcacctggtccaactagaaatggtcaaggaattcatttggctccttgatacatcagtcctcaatattactttctaggtattttatggccagattgcttatatgagtggtcttttggtttggtagtaggtttttatttttaatttctgtactaatgaaattcctgactttaatttctgaaaaccaaaaactctccaagtgtatttatttatattttttttaatagagacgaggtcttgctatgttgcccaggctggtcccaaactcctggcctcaagcagtccttccaccttggcctcccaaagtgctgggattatcaatatgagccaccatgccagatttgttcatttttaaacatttttatctcttcaagtcatcttttgatcttttaaaaagcaccttcaaacagctgcaccttccatttgcactaggaaatgaaggtagtgatgggattggcaatgttcctggcagatgtttcagcccaaaagctcttctacagaccggtttagagctggtgccctatgagaatattagggagcttttattttaaattgaactttacccttgtccatgcaaggcattcctcctgaatgcatccatgaatttgtttacttttgcgtcaaacatatgagccattgtcatgctcagcctgtgccaccattggctctgtctgatgtaagtaatcatacaagacctgattttgggttctaacacagtgggtctttggactattcaacattggatggtttttagagatgggttcttctggttgatacagactactgcattgcgtttagcagatggggtaaaactggcctaaaacaagtctttgcagaatacatgccaatttccaaaaaaaaaa

SEQ ID NO: 60371 - DNA, 2018 bp, Homo sapiens
ccagagctctggtggccacctctgtcccgccatgctgctcaccgacagtggccagggcccacagcaccaagaggcttgggccacaaagtaaaggtgcatcctgtctggagcttgtgctggcccggcgagtggagcccagagcccatcccccactaccaacatcccccagattgctgcctgcctggccgaggaggtgctggtcaagatgtgttagtgaggagctagacaagatgagcacggtcgcggagcctcgccggccgccatgtggagctgcagctggttcaacggcacagggctggtggaggagctgcctgcctgccaggacctgcagctggggctgtcactgttgtcgctgctgggcctggtggtgggcgtgccagtgggcctgtgctacaacgccctgctggtgctggccaacctacacagcaaggccagcatgaccatgccggacgtgtactttgtcaacatggcagtggcaggcctggtgctcagcgccctggcccctgtgcacctgctcggccccccgagctcccggtgggcgctgtggagtgtgggcggcgaagtccacgtggcactgcagatccccttcaatgtgtcctcactggtggccatgtactccaccgccctgctgagcctcgaccactacatcgagcgtgcactgccgcggacctacatggccagcgtgtacaacacgcggcacgtgtgcggcttcgtgtggggtggcgcgctgctgaccagcttctcctcgctgctcttctacatctgcagccatgtgtccacccgcgcgctagagtgcgccaagatgcagaacgcagaagctgccgacgccacgctggtgttcatcggctacgtggtgccagcactggccaccctctacgcgctggtgctactctcccgcgtccgcagggaggacacgcccctggaccgggacacgggccggctggagccctcggcacacaggctgctggtggccaccgtgtgcacgcagtttgggctctggacgccacactatctgatcctgctggggcacacggtcatcatctcgcgagggaagcccgtggatgcacactacctggggctactgcactttgtgaaggatttctccaaactcctggccttctccagcagctttgtgacaccacttctctaccgctacatgaaccagagcttccccagcaagctccaacggctgatgaaaaagctgccctgcggggaccggcactgctccccggaccacatgggggtgcagcaggtgctggcgtaggcggcccagccctcctggggagacgtgactctggtggacgcagagcacttagttaccctggacgctccccacatccttccagaaggagacgagctgctggaagagaagcaggaggggtgtttttcttgaagtttcctttttcccacaaatgccactcttgggccaaggctgtggtccccgtggctggcatctggcttgagtctccccgaggcctgtgcgtctcccaaacacgcagctcaaggtccacatccgcaaaagcctcctcgccttcagcctcctcagcattcagtttgtcaatgaagtgatgaaagcttagagccagtatttatactttgtggttaaaatacttgattcccccttgtttgttttacaaaaacagatgtttcctagaaaaatgacaaatagtaaaatgaacaaaaccctacgaaagaatggcaacagccagggtggccgggccctgccagtgggcggcgtgtgctagcaaggcctgccgggtgtgccgcagtcaccacagggttctgagaacatttcacagaagtgcctgagacgcggagacatggctggtgttaaatggagctattcaatagcagtgacgcgctctcctcagccaccaaatgtccctgacaccctccccagcccccacagataacatcagctgaggtttttttcagtatgaacctgtcctaaatcaattcctcaaagtgtgcacaaaactaaagaatataaataaaccaaagaaaggtgaaaaaaaaaa

SEQ ID NO: 60372 - DNA, 995 bp, Homo sapiens
ttttttttttttaaagttaaagattcttttattaataaattctccctcccctccaaactctccccaaaataaatatctcctccccgctttggggagttgggggggtctgtatcttagggccagccctcctagtgggccagccccctagtgttaaaaataggtccctaaccccccagggtgacccccgtggtggaatttcaggacatctgagtgagtggggcctagtgtcaagtctgccccccaagtcagcctggcccccagggcctctaggaaggagggcacccccctcccctgtgcaaatgctgcagttccttagtcagtgtcagctgttttgtgtgagccagcgtgaggctccctttctgttctggagccagaggcagggcaaccagacaccttggaaggttcccctgaaccctgggcccaggcctcagaggtgattcaccgccccccaccccccttgtggttggaggagcttggctcccgccgcgtctgggaggcagagactggctctagaatggatgaatgaatgatgagtgggcgagccccggctggcagggggcacattgtcactggatcagcgccacagctgggcagccctctccgccggtctcctctatgggggtggtgaacttctctctcctgcggcatcgtctccagaccaaaaagccagaaagcagccccagcacgaaggtcaggctcagagcgcccccaaggatgggccaaagcagccggaagggggcaggaggtgctgcagcgcagcccaggcagaagtcgctgtgcggtcgcgccctgcaagacgcgcagtccatgcacttgtccaggtccgcgctccaggagctgccgcgggagcagggggcggtgcctggcgcttgctccccggccacggagcgcagcaacgccagccagagccccagcacgaggagccgcagcaaccggcgcagcgagccccgagccatagtgcacgtcctgcctcgtgccgaattcctcagcgcgga

SEQ ID NO: 60373 - DNA, 338 bp, Homo sapiens
attatgagctcgtttttctctcttccggaagctcagctgaagcagtatgggtagcgtactccaggagcactgcaagtccctctacggtgttctccaggactgtaggaatctcatctgcaggtgcaggtcaagcccctccttgagcctgaaacctgaagaggagctctttcatcccatgcaaaggaatcaaccacttcctgatcatctgctccaggctgctcctgggctgtagcctcatcagcaattgcctggagtggctccgcccgagcctgcagggccaccaggagaatggcagcaaggagggcaaggctccttatggctggggtcacagatcctca

SEQ ID NO: 60374 - DNA, 5941 bp, Homo sapiens
cccttctcctgtgggacaaccagggaccgcagctccccgctccccaggtgtgggggctccgacacgaacgcctctgctcgcagggcggtgagcgcagatcccacgggtccctcggtcgggggtcgaggctgcttccgtttccatcccggacccgacaatgggcgggaaaaagaaggctttacacgactacgcggcggagttcaccgacctggtggtgaagcacctgattgagcacagtgactctggggacacgtctgtggtggagaccctttactgcagggcctgcgagctgcccgtgcgcgtgcggagggaccgcatcctggaacacctgtcctcgggcaggcagcacggcctgcggacgcccattctcatgtaaatgtcagtgccaacgctggtgtttcaggagtcatcccagcgggctgcgggctattttaggattctctgccctgcaaacgtttccaaagtacgtggacaggccgcctgatgacactacgtttacgggatctgctagtggcttgcctacttagggagtaaaccctgtgaagtctcgcagttttgttaaagtgtgcgtggccacctgaatgctgccttatcacaagccagatacatactggtctgtagggtaactccccactgttgatcctctgagatgattgtggactgggtgctgtgagtcctgccactttgtttaagtgaatgtgtcttttgtccagctcagccgcctcggatctcgctgccaccagccttactgcacacccgtgccacccgcccttgccccgtcagcctcagcctcagctcattctctcaggcagtcccagcattggcacggtacctcctcccgctgtgggccacacgtctctgctccctgtcaaccctcctgccatcagcaccaccaccagcgacttgtctgcccgggaggatgcaacaccatctgcctccaccggccacctttcagtgtttcctgctttccaagtaaagataccagcagtgccctcagagcagaccagccagagtttttctgaagcctcccacagggtgctccccggaggaggcccgagatgctctcgtgactttggagccggggtggctggccaccttggcctgggcatctttggggtgggcttcgggagcccggcactgctgcagagtgtggtggatgagaacagctgctgcttgctgtacgtggtggaggaccagctgtgtgatgtggagcaagccttcagagctgagcatttgggccaacaccagagtggttcgggaacaggatgcagacattgtcctcaacgaccagcggcactttgatccggttttccagttcttgcacaagcaagtttgtgtcagccacgccctggggaggatccactggatcaccgccgtcactgcctgttcccggcggcctctccggcttccctaaagagagcaggtgggactttctacaacgctgctgtgcacgacgtggatgccgtatgcatgttgctgggggaagccactccggacactgtgttttctctgggacatgtcttctgcccagatatggccgccttaaaagatgcagatgctgttgtgatcagcatgaagtttccctgtgaggccgtggttagcgtggacatcagccagcactgcacagacagctgcgaccaggacgtcagccagcactgcacagacagctgcgaccagagactggaggtgacccttgcccttttccacccttcgccagtccactgtgaaaagctgggttgattgtgcgggttagatagaggtcatcagccgggttgattgtgtgggttagacagaggtcatcagccaggttgattgtgtgggttagatagagatcatcagcctggtagattgtgtgggttagatagaggtcatcagccaggttgattgtgcgggttagatagagatcatcagccgggttgattctacaggttagatagaggtcgtcagccgggttgattgtgcgggttagatagagatcatcagccgggttgattgtgcgggttagatagaggtcatcagctgggttgattgtgtgggttagatagagatcatcagctgggttgattgtgtgggttagatagaggtcgtcagctgggttgattgtgcgggttagatagaggtcatcagccgggttgattctacaggttagatagaggtcgtcagctgggttgattgtgcgggttagagatcatcagccgggttgattgtgcgggttagatagaggtcatcagccgggttgattgtgcgggttagatagagatcatcagctgggttgattctgcaggttagatagaggtcatcagctgggttgactatgtgggttagatagaggtcgtcagccgggttgattgtgtgggttagacagaggtcatcagctgggttgattctgcgggttagatagaggtcatcagctgggttgattgtgtgggttagatagagatcatcagctgggttgattgtgtgggttagatagaggtcatcagctgggttgattgtgtgggttagatagaggtcatcagctgggttgattgtgtgggttagatagaggtcatcagctgggttgattgtgtgggttagatagaggtcatcagctgggttgattgtatgggttagatagaggtcatcagctgggttgattgtacgggttagatagaggtcgtcagccgggttgattccgcaggttagatagaggtcgttagctgggtgtgtgggtcccaaggcgtgctgcagatggagaatcagaattccttgggcatcaccgggcggggcatgtccctgtcccttcgctcccagacccaggctagccgctaccaggactcctatcgagagctcttcagacactttttcagaacccttaaaggtgggtgacgttttcaggaggaacctgggatgtcctgatgctcaatgggtagatgccttccaggctgcagtcagtgcagatgatatgccaatttcagggggaaaattgcattccagataccgggatcagatttgaaattgtccatctcagtgatcatttacgttgcgtgtacttgagggagattctgagagatgctcctttggggttctgtgcgtgtaccatgttgcctgacacgtcctgagaaatcttcttaaactctgagtttataaaataactacttctgaactcctgagatctagtggataccatgtatcctggaagataggacactttctaccctctgtcagtcctgggggtgactgggaaccagagaggttgagcagaattcctggacctgggtggggcttgtccaagaggggcaggtgggcctctctaggatcagtgtcccacccagaggccagtggccccttcacatgccccaacaagaggaagactgtctggctccgcagtgttgggttttgtcctgaatctgtgcaaatgtgcagggaaataacctcctgaaatcaccaaagagcagttcctcagggccttccgggtgaccgtggccgtggagcagtcgtggtgaaaccggtcagctgtggacctgccctgcgaatcggcagaggcctccgtggtgaagacagaagctccgtgaaccaactcgaggctggagccaagatcctgcctgatatccagttgcctgtttcacttgttactgttactgggagagggagacaaaacctcatggcaatcttgtcctcactggagactcagaaggggaagcattgggaaaccatgtatgtttcatttctggtttaaccaggcttttcaggatgggacttcagaccaaggacacaagttgggcttgcttaggtgttttgtgttgtgcgcaggcctcagagatgctcttccggtcagagttcccttggcagggccttggaggcctctggttggctctctcaggaagagggcaggtcagggattgggcggtgtaaattgactcagaaacctgcggtttcagcttttctgtggcaaacagggccgagggctggtgaagctgttaaggctaaatgtcgcatgcatgaggcgggctgcaggcctccttaggccttttttggggtaattacaccagtatttaaaaacatttttttttgtttgttttgagatggagtcttgccctgtcacccaggctggagtgcaatggtgcgatctcggctcactgcaacctccgtctcccaggttcaagcgattcttctgcctcagccttctgagtagctgggattacacgcgtgtgccaccacgctcggctaatttttgtatttttagtagagatgggatttcaccatgttggccaggctggtctcgaactactgacctcgtgatccacctgccacggcctcccaaagtgctgggattacaggcgtgagccaccatgctcggcctaaaaaacaattttcttgaagaatccgattttgtgcatagtaatgacacagcaccattcctgagaaataggaaatatatgtgtgtggtatgaaaagcccatattctgttcttgtcacctgaatctaggcttcctctttggatgtgaacgcgggaatgaacagtggctgttttccacccaaaggggcgtggagaccttttggaaacgggctttctcctttccattttgcagccgggggcgggtggaaaccttccttcgaagggtagtgccttggggagcagcagacctgctctgagtccagcttagctttccaaaattctgtgtggaacttactggagatgtttttatatatttgaaaataatggcctgtatttctcacgctatacttaaaaaaaataactaaccttttaaacaaagatattcaaactcacccttgtgctgaaagcactcacatttctgtgttcattcctgaaagggcgttttagagtccccgtttctacgttctatgtggcaccctcttgccgagggaacatccagaatccctccacttcctgtctagtttgaggcctcaacaccttcatgatccagagtcctgcggctatgagggggtgggcccaccaccgcccagccctccttggtggacgtggggacaggtaggagcctagggaaaggggtgggcgggctctggtgtgacggcgtgagcgctagccaggaaggtggggccagggctgggcatggcacctcacctgtgggggaactcggcggagcttcctggcggcatctccccctcttgccttggtcctttctatctttgttttaggccaatttctaaaaagactgaggcctccttcaaggttgaacagatttctagagccttgtttttgctgtgacaagtccctagtccctgttcacaactctgaaaccaagaaacctgagaaccaagagaactgaaatgaagcccgttggtctcagcctggcttgagccaacatgaggctctctgctgccttttgttttcttaggttttgctgagaaacgggagtgcgttctgtgtcggtgtttgtgacgccctgagaccctgcttggcctagctaaagtccagaaggcctgggccccacagggcttggatgagggctcatgggcctgtacttcaggaggcctgagaggcccggtcagtcccatgaggctactcggcttggcccgcaggtcctccgaggcacagggcagagggacaccccagggacccatcagactcacgacacagagaaactcaagtggggtgccagggccggccacagaggccacgggcttcctgcctgtgacgagccgccctgtttgtctgagccctttggagatttaggttgagtcatgagaaccggtcattggaacatacactttattatgttacaaaaacaaaaatccccactgaaacacagctaaaaaaataacacattttcccaagattacattaccaaaaacagttgttatgtcattggagggcgtccattaatactgctcggagaagcacgatcttacacgaaaaacacggatgggatttcgttttcacctttaaagcttttaaagtgctttaacttggtaaaaa

SEQ ID NO: 60375 - DNA, 816 bp, Homo sapiens
gggggcagatgtgtgaggatcactgcagtccaggagttcgatgtttcagtgagctgtgattgcaccactgcatatcagcctgggtgacagagcaagaccctatctcaaaaatacagaaaaatcatcaaccacttgcagtcgtcgtagaaatcaatcattccctccagttatgtccctgacccacaggcttcatttgtgcaagtactggggctgtgctgtcagtaatgtgtgccgcttctgggaaggacgtccattgcccttgatgattgtggtaccatacacactgcctgtttccttgcctgttggttcgtgcgtgataatcacagggacaccgatcctcacttttgtcaaggacccacagctggaggtgaatttctacactgggatggatgaggactcagatattgctttccaattccgactgcactttggtcatcctgcaatcatgaacagttgtgtgtttggcatatggagatatgaggagaaatgctactatttaccctttgaagatggcaaaccatttgagctgtgcatctatgtgcgtcacaaggaatacaaggtaatggtaaatggccaacgcatttacaactttgcccatcgattcccgccagcatctgtgaagatgctgcaagtcttcagagatatctccctgaccagagtgcttatcagcgattgagggagatgatcagactcctcattgttgaggaatccctctttctacctgaccatgggattcccagagcctactaacagaataatccctcctcaccccttcccctacacttgatcattaaagcagcaccaaacctcaaaaaa

SEQ ID NO: 60376 - DNA, 3039 bp, Homo sapiens
ttttttttttttgtctttatcatttattatttttatttggacaacatatatacatatgtacaaaatacctactgtcagaatcctcttttataatttcatttgatttacaaaaacgggacagcaaaataacttaggtcactaatactgtacaaaaataaaactgattaaacagttgtaaagatcagtatcttacagtgttacagatcatctgatgtgaaagaacatctcaatctatccgagtgatgagtactgtgctaaatctatctgcaaactgacaaactaatcagtttctgtaattgtaactaccaaatagaattctcaagagaagcatgatgtggagctaaaccttaaagccagggcatcattccacaatggtgaagggctttcttcttccctaaccaaagagaggagatatcttaactctaaaactattaaattttccagaatatgacaactacttacagtattagataaaacaacttttctttctttttaaacacctgcaatagtctttcaaaaattcagtttggttaaaaaagtaaacaaaaattactatcctgcatttggattttcataagttaaatccatggtctttttaatataaaaagtaattgtttcatagttttagtgttcaatgaactctagtagtcctatttgaaccatatcttgatatagtaaatctaattagaatgctggttcctgttttgtgacattttaaaacaggatttaatcacaaagaataaaaaggcttgagtttatacgttacattactataacatataagagaatatcaaatgtgtgtttgtcaacaacttgaaaaggcaagtaacaacttttttgggaagtaaattgtgcatttttttaaaacaagttgctgcatttatatccatctaagtgcttgacaaaagccacatttagatttactcctgaaactataaagattgtctttcactgactttgctttgctttctttcgtttctttctgtgagggaaagatgactttttacaagttagcaagttgctaggcaaccccaaactcctcactcactaaaaggcagcgtgcagagtatcataagcagaaccattccatgagctcagtgagaaataggcagcctaacctatttcgtatggaagaacagatgtccttaaaacttattttggacacagaaattaaaatttggtttaaaataagtgtttcaaaaatctgaaacagaggtagaaagtgttctttatttttcctgacatgttttctcgtgagaaaacactttcctttttatcccatggactgctcccagtccctaatgttaaaagcagttctctttatagaactactaatacaactacgttggttaaacaaaaaaacactgtgctagtgatggctgttgtattggaagttggagtcagccgtgacccgcgcccactgcaggagcccacactgattctgaatcagaaacgagtatgggtcaggtgaaataggtaggcaccctatgtttacacatttcagagcgcaagtataaactagagtgcaccatagctccctgttttaaatatcagataaaatcatcagaaagcgttacttctgaagaaaaaaaaaatgtaaacatttcccccatgatcactgctgactcccctcatttgaggtcttaactacgaaaactcagttcacttttctggcctcataaaggccacagttaagttttcaggtaaatggcatagatggatgtagtggtttcagccattatagacacctagatacaagatatattagtggtgaggctattgatgtaaaagatacagtgatgtgatttcattcgtagtattccatgttgcctgcattctccacaagggacgattttgcagagtctcctctgaaatcattgtggtattttcccttggtgttcactagttataggggttgatttttctgttcctatttcagctccctttccttctacataactcttgcacctgagagtgggagttttgtaggaacacaggaaggagaccaacaaacctttttccccaaaaaataggtgtttccagatctcattactgttatgcacacattcaaataaaacccaacagagtcaaaagctctctcccctagtggcattaggatacaataatgatgttaactaaaagcataggaaaatttggaaaagttaatagagttaaaattctgttggttcttttctttttcttttgcaaaacactaccctccttctccttcagcatctgttgtgtatattctgccctcacatctctgccatgatttcttagggaaacgtgtatattgtaaaataagcagattataacgtggtgccaaacagaacatctgcttctatcctcaaagcatgtatcttaacttattcatcctctgcattagaaaataaaagtgcacgcttatgttcaaaaaagtacaactcatacaaaagcaaaggtttaaaagttctgtacttagtgtaacctttcaaaggtttgtcttgattagtataaattcagactctgcttacccattgactataagtaactgttttttgttttcaagtctttagatgacagatcatgctggagtagatgtgctcttgcttgcataaagacagctgtgctatggcgtttttttttttaatctcaaaagttaacgtgattcaagagagtggttttgctaaacaaactgaagcacactcgtcattacattaaaaggtaagaaaacaattctgagagacagcaagcataaagggcccagaatcactgtgcgaggccacaggtcaactcacccagcggacatatgtacaccagtgttgaatctttaaaattctaccccagaccagtgtctctcctgaacatagaggcaaaaatcctccactaaatacaagcaaatataatccaacaatgtataaaaataattatacaccaagaacaagtgagactcataccaaatacgtgagattgactgagcactgaaaaatcagatgatgcaacccatcagattaacaggctaaagaagaggaaaatgatataactttatcaatctatgcg

SEQ ID NO: 60377 - DNA, 4474 bp, Homo sapiens
tttcgtcttcgcttgacgatttcgtaggggaggaggccgagtgtttcctggcgcattcccggccagcccgagtgactcactcggccaaggaaactcccagggcccgcccaggacccccaagccgccgcggacgcagcccaggatggcggcccaggtgactctggaggacgcgctgtccaacgtggacctcctggaggagctgcccctgcccgaccagcagccctgcatcgagcccccgccatcctcgctgctctaccagccaaatttcaacactaactttgaagacagaaatgcatttgttactggcatcgcaagatacattgaacaagccaccgtccactctagcatgaacgagatgctggaggagggccaagaatatgctgtcatgctgtacacctggaggagctgctcccgggccatcccacaggtgaaatgtaacgagcagcctaacagagtggaaatctacgagaaaaccgtggaggttctggagcctgaggtcacaaaactgatgaatttcatgtacttccagagaaatgccattgagcgtttctgcggggaagtgaggcgcctgtgccatgccgagaggaggaaggacttcgtgtcagaagcctacctgatcacactgggcaaattcatcaacatgttcgctgtgctggacgagctgaagaacatgaagtgcagtgtgaagaacgaccactcagcgtacaagagggccgctcagtttttacgtaaaatggcagatccacagtccatccaggaatcgcagaatctgtccatgttcctggccaatcataacaagatcacacagtctctgcagcagcagctcgaagtgatttctggctacgaagagctcctggcagatattgtgaatctgtgtgtggattactacgagaacaggatgtatttgacgcccagtgagaaacacatgcttctcaaagtcatgggatttggtctgtacctgatggatgggagtgtcagtaacatctataagttggatgccaagaaaagaataaacttatccaaaatcgacaagtacttcaagcaactccaggtggttccactatttggggacatgcaaatagaactggcaagatatatcaagaccagcgcccactacgaggaaaataaatctcgatggacgtgcacatcctccggcagcagccctcagtacaacatctgcgagcagatgatccagatccgcgaggaccacatgcgcttcatttcggagctggcgcgctacagcaacagcgaggtggtcacgggctcgggccgccaggaggcccagaagacggacgcggagtaccgcaagctcttcgacctggcgctgcagggcctgcagctgttgtcgcagtggagcgcgcacgtgatggaagtgtattcctggaagcttgtgcaccccaccgacaagtactccaacaaggactgccccgacagcgctgaagagtacgagcgtgccacgcgctacaactacaccagcgaggagaagtttgccctagtggaggtgatcgccatgatcaaaggcctgcaggtgctgatgggcaggatggagagcgtgttcaaccacgccatccggcacaccgtctatgccgcactgcaggacttctcccaggtgacccttatggagccgctgcggcaggccatcaagaagaagaagaacgtcatccagagtgtcctgcaggccatcaggaagaccgtgtgtgactgggagacggggcatgagcccttcaatgacccagccttgcggggcgagaaggaccccaagagcggctaagacataaaagtaccacgccgcgccgtgggaccctccagcactcagctttacatggtgagaaccatgctagagtccctcattgcagacaaaagtggttccaagaaaaccttgagaagtagccttgaggggcccaccatattggacatagaaaaatttcatcgagagtcattcttctacactcacttgataaatttcagtgaaacgctgcagcagtgctgtgacctttcgcagctgtggttccgagagttcttcctggagctgaccatgggcaggaggatccagttccccattgagatgtcgatgccctggatcctgacggaccacatcctggagaccaaggaggcatcgatgatggagtacgtgctctactccctggacctgtacaatgacagcgcccactacgcgctcaccaggttcaacaagcagttcctgtacgacgaaattgaggccgaggtgaatctatgttttgaccaatttgtttacaagctagcagaccagatatttgcctattataaggttatggcaggaagtttgcttcttgataaacggttacgatcagaatgcaagaatcagggagccacgatccacctcccgccgtctaaccgctacgagacgctgctgaagcagaggcatgtgcagctcctcggcagatcaatagacctcaatcgtctgatcacccagcgcgtctcagcagccatgtataagtccctagaactggcgattggacgatttgaaagtgaagatttgacctccatagttgagctggatggcctgttggaaatcaaccgcatgacccacaagctgctgagccggtacctgacgctggacggcttcgacgccatgttccgggaggccaaccacaacgtgtcagcgccctacgggaggatcaccctgcacgtcttctgggagctcaactatgacttcctgcccaactactgctacaacggctctaccaaccggtttgttcggacagtgttaccattttctcaggaatttcaaagagataagcagcctaatgcacagcctcagtatctgcatggatccaaggctttgaacttggcctactccagcatttacggcagctaccggaacttcgtgggacctccacactttcaagtcatctgccggcttctcggctaccagggtatcgccgtggtcatggaggagctgctgaaggtcgtcaagagcctgctgcaaggcacaatcctgcagtacgtgaagacgctgatggaggtgatgcccaagatctgccgcctgccccggcacgagtacggctctcctggtatcctggagttcttccaccaccagctgaaggacatcgtggagtacgcagagctgaagacggtgtgcttccagaacctgcgggaggtggggaacgccatcctcttctgcctgctcatcgagcagagcctgtctttagaagaagtgtgtgacctgctgcacgcggctcctttccagaacatcttgccgcgagtccatgtgaaagagggggagagacttgatgccaaaatgaaaagactagaatcaaagtacgccccgctgcatcttgtcccactgattgaaagactggggacccctcagcaaattgccatcgcaagagagggggacctgctgacaaaggagcgcctctgctgcggcctgtccatgtttgaggtcatcctgacacggatccggagctttctggatgaccccatctggcgcgggcctctgcccagcaatggggtcatgcatgtggacgagtgtgtggagtttcacagactgtggagtgccatgcagtttgtctactgcattcccgtggggacacacgagttcacagtcgagcagtgctttggtgatgggctacactgggctggctgtatgatcatcgtacttcttgggcagcagcggcgttttgctgtgctggatttctgctaccatctacttaaagtccagaaacatgatggcaaagatgagattattaaaaatgtgcctttgaagaagatggtggagagaattcgcaagttccagattctcaatgatgagatcatcaccatcctggataagtacctgaagtcaggcgacggggagggcacgccagtggagcatgtgcgctgcttccagccgcccatccaccagtccctcgccagcagctgagggcacgcgctgcactccgtaactcaacatggcatgcctttctctccgtaaactatttagtgagatttttagggactatttttcagtatctctgtacctgttaaagggggtgcttttcgatctaaaaacttaattttataaaattgacttatttttctagactaaaattgtatatgcttttggtaattaggaactcttgagaatattggctgctgattgttgccatcacgttcctacaaaattgtttttctatgggatgttctggcagctgtgtcataaaatgctgctgggttcattcattcattccataagaaacttaataccagcaaatgcattaaatcccttgccagttaccattaactataactatttagcttttgtttagggatctttctgatggtcttttatgagcaatcttagttctaagtcattgttcccatcccttttttgtgtgtttcagaaaatagtgaacttgattcccctgcttccactaaatccagttgtgacaaaatctaacgtgacatcagatcgaaaggttatagaaataaaactaatgagatctaaaaaaaa

SEQ ID NO: 60378 - DNA, 1919 bp, Homo sapiens
ggggaggcgcgtcgcgaggcgagcgtgcctccttttgtgcgagcgccggcggctcggcttctcgaaggagaagaaactgaggcctggaatttgattaactcattcaaggttacccagttggtaattcatttgcacacctgttagcaagaaacagaagttgaaggactggaacaagtgaactaggaaagagggaacgccaatccaaggatagaaggacaaggacagaatcaccagcactggctgaaggtaccttaacatggggaatcttcttaaagttttgacatgcacagaccttgagcaggggccaaattttttccttgattttgaaaagtggcagatgcccagcctacagagtctgagaaggaaatttataatcaggtgaatgtagtattaaaagatgcagaaggcatcttggaggacttgcagtcatacagaggagctggccacgaaatacgagaggcaatccagcatccagcagatgagaagttgcaagagaaggcatggggtgcagttgttccactagtaggcaaattaaagaaattttacgaattttctcagaggttagaagcagcattaagaggtcttctgggagccttaacaagtaccccatattctcccacccagcatctagagcgagagcaggctcttgctaaacagtttgcagaaattcttcatttcacactccggtttgatgaactcaagatgacaaatcctgccatacagaatgatttcagctattatagaagaacattgagtcgtatgaggattaacaatgtaccggcagaaggagaaaatgaagtaaataatgaattggcaaatcgaatgtctttgttttatgctgaggcaactccaatgctgaaaaccttgagtgatgccacaacaaaatttgtatcagagaataaaaatttaccaatagaaaataccacagattgtttaagcacaatggctagtgtatgcagagtcatgctggaaacaccggaatacagaagcagatttacaaatgaagagacagtgtcattctgcttgagggtaatggtgggtgtcataatactctatgaccacgtacatccagtgggagcatttgctaaaacttccaaaattgatatgaaaggttgtatcaaagttcttaaggaccaacctcctaatagtgtggaaggtcttctaaatgctctcaggtacacaacaaaacatttgaatgatgagactacctccaagcaaattaaatccatgctgcaataacaattctggaataagcacctgctgtagacagaagacagtattctgcaatgactgagaatgcagttttttagtgattgcaattactatctcatttattcttgcttttatttctttcctctgttcctcttccctcttttttaatcatgttcttaagacttcttttctgtgccaaaatcagtaaagttacactctgaagggatatcatcctttcaaacgggccatctaaggcagctaattatgcattgcattggggtctctactgagaaaaattctgtgacttgaactaaatatttttaaatgtggattttttttgaaactaatatttaatattgcttctcctgcatggcaaaactgcctattctgctatttaaaaaccctcaatgactttattttctactgccgcctttttcatgtgcaaccaaaatgaaaatgtttaaattaactgtgttgtacaaatggtacccaacacaaactttttttaaattagtaatacttttgtttaaagttttaagtttgcattttgactttttttgtaaggatgtatgttgtgtgtttaacctttattaactaacgttaaaagctgtgatgtgtgcgtagaatattacgtatgcatgttcatgtctaaagaatggctgttgatgataaaataaaaatcagctttcatttttctaaaaaaaaaa

SEQ ID NO: 60379 - DNA, 1864 bp, Homo sapiens
  misc_feature (1)...(1864): n = a,t,c or g
tttttttttttttaaaacaatgtggtactggtgtattgacagtaatgtccacgaaacagaatgaaaacccccaaattacattaggtttacactgggagttagcaaaacaaaagggcagcattaaccgacatacagcacgtgggaggatggtggaaaagctggacatgactcactggacatttcaactgaaaccacagaggttcttgaaaatgctggagaattccctgattgccttatcagttacaaacccaaattcagaatcatgtgacagctggatacattcaactgtacgtacaaataatgatcaaaaaacacaaaagttgggtagtggttaccatagcttttactgtagttattcattaagctattcaactgttctgtgcagtttgatgttttattttacaataaaaagtcaaaaaaaataagcaaaaagataaactggaaaataagacttacatctcatatatatggacaaaggaccaattacctccaaacataaacagctcctagaaattactgcaaagatcaacaacccagtagaaaaatgaatgaagttcccagaacagaaaacacaagtggcccttcaaaaaaatgaagagaggctcagcctcttatggtaagacaaagagacaggattttaaaaacctaggcctcttcctagagttcccttaaatatctaggccagatcatttttacttcctggcttagaccctgccaagggctgcccagctactcaggtgtttgtgtccttgtggactcaagtcatattgtcctgatcttttggctgagtacggttttctcctccagcaaagacaatttggaggatgtactaagcatgaagcgctacttcctggcccccatctctcttcgcacagtgttccatcatccagccatgaaagcacagctgagtgatccaagaggcagttccaattgttgactaacgtgtacctgcctatgtgagtgtgtcctatgggaactcaggccttagaatggtttcaaagtagtggctttcaaaattactgtttgcctcttcaaacttcacacctaaggaaaatggaaacatgcagagcagggacacagaaggggcattagctggcgtggggtaggggcaagagctaattgtgaaggaagaaggcctgagatcacgtagccatgtcggagaacagctgtgctcgctgccctgcctctttgcgcgcatgtcaggcagccccaggctccagctgcttgagtttctcttggagtccccggagctggcttcgaccccagtcaatgcggttctggaggctggctatgtctgcggccagctgcaggccatcccggaagcttgcttgagcctgacgtagactgtgaggaactaggattccaaaccagttcagggggtcctgaggggcctcagaggactccggttctggggtcttagtggggcccttgcgcctccgcagacctgcttcgcgaggccccacctcctctggggcgtggacaccagctctcaccaccttgaacttctggagtccctcctgggcctcgctggcgtggaggcagacctggggctccatgtgggaagcatactgcaggggccctaccgacttggcgcccatcgcgtagcgagccttggcgagcgagagccagccctcctccacccgggcgttcaacaccgttcgtttcccctccagctcctccaggtccccaagcagctgcaggaccagcgaatccagctccgctcgcaggtcaagcgccgccatggacacacctccagatctggagccaccttcttccttgtcaccctccgcagtttggcaggacanccaataggcacacgagatcctccatcaaggggcgttcccagtctggggatccccanggc

SEQ ID NO: 60380 - DNA, 1910 bp, Homo sapiens
aagaacttctgcaatccttttcatgaaatgatatacaaccacttcctgttgtgtcacacttgcctgcagtaacatgctgtaaggtttgtggcataggagcagtgggccataccatataatcaaggtgtcacatcccggtggctggacatgccctcttgggcttggcagatgccagtggatccatacaactgctccgcctggtggaatctgaggtcagtgacttgcacttgttctgtggggcagaagggacctgaatagagagggttggggaggaggctgtgctgatacagacatttttctaaaacgatctctcttcaatggtgagctatatataaacgttctaagataatgtggagtctatttttaagttgtattgcgttctacatccaactccaagaggaagtcacctcatgtgtcaccagcagaagggctgaagtgacaggatgttcattgacctgtcagtggatctgaaagttctctaaggagagcctgggcaagcattcttaggttgatgctggggcccagagtagcagtgagcatcctgtgtgaagatggcatttctcactgattattggaaaagcactagaagagccacgtgctggagccattgtccagccttgccctggaggagcagtgtctggctttgtccctagattggtccactgggaaaactggaagggccggggaccagcccttgaagatcatcagcagtgactccacagggcagctccacctcctgatggtgaatgagacgaggcccaggctgcagaaagtggcctcatggcaggcacatcaattcgaggcctggattgctgctttcaattactggcatccagaaattgtgtattcagggggcgacgatggccttctgaggggctgggacaccagggtacccggcaaatttctcttcaccagcaaaagacacaccatgggtgtgtgcagcatccagagcagccctcatcgggagcacatcctggccacgggaagctatgatgaacacatcctactgtgggacacacgaaacatgaagcagccgttggcagatacgcctgtgcagggtggggtatggagaatcaagtggcaccctttccaccaccacctgctcctggccgcctgcatgcacagtggctttaagatcctcaactgccaaaaggcaatggaggagaggcaggaggcgacggtcctgacatctcacacattgcccgactcgctggtgtatggagccgactggtcctggctgctcttccgttctctgcagcgggccccctcgtggtcctttcctagcaacctaggaaccaagacggcagacctgaagggtgcaagcgagttgccaacaccctgtcatgaatgcagagaggataacgatggggagggccatgccagaccccagagtggaatgaagccactcacagagggcatgaggaagaatggcacctggctgcaggctacagcagccaccacacgtgactgtggcgtgaacccagaagaagcagactcagccttcagcctcctggccacctgctccttctatgaccatgcgctccacctctgggagtgggaggggaactgagcttgaaatcatgaagccccttcccacaaggaaaccaggagggagactgcgagtgagtgcccgggaccacctcatcagagatgcttactgcagccctgcaggtgcctgtgcactgatggaatccacagtgtagtcagaaaagctgttgacttctcttaaatcagcttccctgctgggcccctgaaagtggactgggtgattctgtctggcagagagtggggaaaagacgcggtttccagcttgcagatttgttaagtttctcaggcagattttgactttcagcctttcatacttgtttaagcaactatttgtattaaatgaagttttttgaaaaaaaaaa

SEQ ID NO: 60381 - DNA, 1978 bp, Homo sapiens
acccctgcagtaccgttgcggacttccgcggtaccagcccggcattccagaatagacccacgcgtccgcccacgcgtcctcggacgcgtgggcaaaagtttatctctttctttagtagctttgctcctataacttgcaagagtctgtttattaccaacattgtcctcttgactaatatgtaggattttggaagtcctccctccatcacatcaaaatggttttgctaatggacatgttaacagtgtggatggagaaactattatcatcagtgatagtgatgattcagaaacacaaagctgttcttttcaaaatgggaagaaaaaagatgcaattgatcccttactattcaagtataaagtgcaacccactaaaaaagaattacatgagtctgctattgttaaagcaacacaaatcagccggagaaaacacctattttctcgtgataaactaaagctttttctgaagcaacactgtgaaccacaagatggagtcattaaaataaaggcatcatctctttcaacgtataaaatagcagaacaagatttttcttatttcttccctgatgatccacccacatttatcttcagtcctgctaacagacgaagagggagacctcccaaacgaatacatattagtcaagaggacaatgttgctaataaacagactcttgcaagttataggagcaaagctactaaagaaagagataaacttttgaaacaagaagaaatgaagtcactggcttttgaaaaggctaaattaaaaagagaaaaagcagatgccctagaagcgaagaaaaaagaaaaagaagataaagagaaaaagagggaagaattgaaaaaaattgttgaagaagagagactaaagaaaaaagaagaaaaagagaggcttaaagtagaaagagaaaaggaaagagagaagttacgtgaagaaaagcgaaagtatgtggaatacttaaaacagtggagtaaacctagagaagatatggaatgtgatgaccttaaggaacttccagaaccaacaccagtgaaaactagactacctcctgaaatctttggtgatgctctgatggttttggagttccttaatgcatttggggaactttttgatcttcaagatgagtttcctgatggagtaaccctagaagtattagaggaagctcttgtaggaaatgacagtgaaggcccactgtgtgaattgctttttttcttcctgactgcaatcttccaggcaatagctgaagaagaagaggaagtagccaaagagcaactaactgatgctgacaccaaagatttaacagaggctttggatgaagatgcagaccccacaaaatctgcactgtctgcagttgcatctttggcagctgcatggccacagttacaccagggctgcagtttgaaaagtttggatcttgatagctgcactctttcagaaatcctcagactgcacatcttagcttcaggtgctgatgtaacatcagcaaatgcaaagtatagatatcaaaaacgaggaggatttgatgctacagatgatgcttgtatggagcttcgtttgagcaatcccagtctagtgaagaaactgtcaagcacctcagtgtatgatttgacaccaggagaaaaaatgaagatactccatgctctctgtggaaagctactgaccctagtttcaactagggattttattgaagattatgttgatatattacgacaggcaaagcaggagttccgggaattaaaagcagaacaacatcgaaaagagagggaagaagcagctgccagaattcgtaaaaggaaggaagaaaaacttaaggagcaaagctactaaagaaagagataaacttttgaaacaagaagaaatgaagtcactggcttttgaaaaggctaaattaaaaagagaaaaagcagatgccctagaagcgaagaaaaaagaaaaagaagataaagagaaaaagagggaagaattgaaaaaaattgttgaagaa

SEQ ID NO: 60382 - DNA, 2474 bp, Homo sapiens
agtaaacactgaccctttccccctttgctgctacctaggcagatgccagccccaaacctcatccctagtggaggccttgctgatgtggaagtggccagggccctcatggaggctgggcagaagcccaagagcaggctctaaagctgccaaacccggcagccctggtccccggaggctcttgccagtctgacagtgttcttggcactgctcagaggtcccagcagctggggttccccctcagcccgtgagcagccatgtccaaccccagcgccccaccaccatatgaagaccgcaaccccctgtacccaggccctccgccccctgggggctatgggcagccatctgtcctgccaggagggtatcctgcctaccctggctacccgcagcctggctacggtcaccctgctggctacccacagcccatgccccccacccacccgatgcccatgaactacggcccaggccatggctatgatggggaggagagagcggtgagtgatagcttcgggcctggagagtgggatgaccggaaagtgcgacacacttttatccgaaaggtttactccatcatctccgtgcagctgctcatcactgtggccatcattgctatcttcacctttgtggaacctgtcagcgcctttgtgaggagaaatgtggctgtctactacgtgtcctatgctgtcttcgttgtcacctacctgatccttgcctgctgccagggacccagacgccgtttcccatggaacatcattctgctgaccctttttacttttgccatgggcttcatgacgggcaccatttccagtatgtaccaaaccaaagccgtcatcattgcaatgatcatcactgcggtggtatccatttcagtcaccatcttctgctttcagaccaaggtggacttcacctcgtgcacaggcctcttctgtgtcctgggaattgtgctcctggtgactgggattgtcactagcattgtgctctacttccaatacgtttactggctccacatgctctatgctgctctgggggccatttgtttcaccctgttcctggcttacgacacacagctggtcctggggaaccggaagcacaccatcagccccgaggactacatcactggcgccctgcagatttacacagacatcatctacatcttcacctttgtgctgcagctgatgggggatcgcaattaaggagcaagcccccattttcacccgatcctgggctctcccttccaagctagagggctgggccctatgactgtggtctgggctttaggcccctttccttccccttgagtaacatgcccagtttcctttctgtcctggagacaggtggcctctctggctatggatgtgtgggtacttggtggggacggaggagctagggactaactgttgctcttggtgggcttggcagggactaggctgaagatgtgtcttctccccgccacctactgtatgacaccacattcttcctaacagctggggttgtgaggaatatgaaaagagcctattcgatagctagaagggaatatgaaaggtagaagtgacttcaaggtcacgaggttcccctcccacctctgtcacaggcttcttgactacgtagttggagctatttcttcccccagcaaagccagagagctttgtccccggcctcctggacacataggccattatcctgtattcctttggcttggcatcttttagctcaggaaggtagaagagatctgtgcccatgggtctccttgcttcaatcccttcttgtttcagtgacatatgtattgtttatctgggttagggatgggggacagataatagaacgagcaaagtaacctatacaggccagcatggaacagcatctcccctgggcttgctcctggcttgtgacgctataagacagagcaggccacatgtggccatctgctccccattcttgaaagctgctggggcctccttgcaggcttctggatctctggtcagagtgaactcttgcttcctgtattcaggcagctcagagcagaaagtaaggggcagagtcatacgtgtggccaggaagtagccagggtgaagagagactcggtgcgggcagggagaatgcctgggggtccctcacctggctagggagataccgaagcctactgtggtactgaagacttctgggttctttccttctgctaacccagggagggtcctaagaggaaggtgacttctctctgtttgtcttaagttgcactgggggatttctgacttgaggcccatctctccagccagccactgccttctttgtaatattaagtgccttgagctggaatggggaagggggacaagggtcagtctgtcgggtgggggcagaaatcaaatcagcccaaggatatagttaggattaattacttaatagagaaatcctaactatatcacacaaagggatacaactataaatgtaataaaatttatgtctagaagttaaaaaaaaaa

SEQ ID NO: 60383 - DNA, 1605 bp, Homo sapiens
  misc_feature (1)...(1605): n = a,t,c or g
ctcaattccgttgctgtcgctcccatgcatcggctaatagcccggagacaagcgatgttggcaggggcagcagtgatctgaaggcttgaccagaactgggaatctgcttccaagatggttcacttacatggctattgacagcaggtgaagcaaataagcaacatgtaagatgtcagaaatgcttggaatttggacattggacttatgaatgcacaggaaaaagaaaatacctacataggccctcaaggacagcagaactaaagaaagctttaaaagaaaaagaaaacagattattattgcaacaaagcattggagaaaccaatgtagaaagaaaggccaagaaaaaaaggtctaagagtgtaaccagttccagtagcagtagcagtgacagttctgccagtgattcttcatcagagagtgaagaaacatctacctcttcctcctcagaggacagtgacactgatgaaagctcctctagttcctcatcctcagcctcctccacaacctcttcctcctcctctgattcagactcagattccagctcttccagtaagcagtagcaccagcacagatagcagctctgacgatgaaccaccaaagaagaagaaaaagaaatagagttgctccattcatattggaccgatggactgaaaacattgatgtgattcttgaaagggaatttagaatatgttaaggccaagtaggttaactggtgaacatttctagaattcaaaagtttctaaatgttttacattgtaagagcatagagaatatttaataatggcttatagagagagacttttatttgaagggtgaatcttgttttttttatctttaaaatatatctctagaacttaaagctgaaaatatgcgtatctgtttgtgtgatgaaactatcttttctctctgtgaaataaatgccatactttgttatatatgttagtggtatgtatcagacatattttcaggatggtgcgtcaggatatctggcagtggatttctaatgcttttggctgtatgttatgtaagatttaatatgttgttactgtaagcttaggagttttcctactattaataaatgtgctctatttttacatttatgttcagaaagttatctgactttttgtcctaagtggtatgttcaaggagcctattaatatatttatagtttttgaatgctgtaagtttcaaattgctgtgttacgtcattcattttcttctggttccttaagtttttcaagttatccttttctgaggaaaattattctagaggaacctaaaaagggacaaaaaaattgaaacttcttaggagtctaatcttggtgccttctgttaaaagtcagtgtatcagaaaagaaagcagccatgtaagaggctaacttaagtagaagtgctagaaatatctttgtgtattaacatgcaataaaaggtaccattcaaagcagggggaaaggtagggaaggaaggaggtaatttttactggaaaattaggggcantgttgggtcgccttttatttaaaagcttttttttaaggctttcataaaggattgcnttttgcccattttttggaaanatgggntttataggtttgtanggggnacccg

SEQ ID NO: 60384 - DNA, 805 bp, Homo sapiens
ttttttttttttaaaaacaacaacaaaccactttaatggacacataaaatccctgggggtctcattgcaatgcagatttggattaaacagtctgggtgggtcctgagaccctgatccccttgcttttcacctatggccacattttgagaagcaaggccactcaaagggcccccatctgtgtgaatcaacccctgctccatctgcccctataaatgacaggagtgggggtgtccccaggtctgagcctggagggggttgcaggcttcctccaggcatggaagtggagtgagaggaggctgtagttaaacgggttactctgtcagcagacacagaggagaccagaatagcttttatttcacatgaagctaaggaaggaagtcgagaggacagggctggttctgtgggcgctgccctggcaggtgcaccacctccaactgctgggctccagctccagggctcagaagccatctccgagaaggtcgggagcggggctgaagggtcccgggggcaggttccaggccagctcctccagcaggcccagcaggcctttcacctctgtccccaggtgatccacggtcttctctaccatctcctccatgacatctagacggcgttgcacagccatgtgtctgtcacacgctgtgctctgagctgagtctcctcgcggagggctgaagggttcggcagcggccaaagagcccgcggcgcggagcagggccagtccggtcagcgcgcagagcaggggccgcatggtgccggcctggccgagcgcagcgccgcgtctgcccgcagccgcccttcccgg

SEQ ID NO: 60385 - DNA, 1134 bp, Homo sapiens
gctgaggcccagcatggccggcccgggccccaccttcccgctgcaccggctcgtctgggcgaaccggcatcgcgaactggaggccgcactgcacagccaccagcacgacattgaacaggaggacccccgcgggcggaccccactggagctggccgtgtctctgggaaacctggagtctgtgagagtgctccttcgacacaatgccaacgtgggcaaagagaaccgccagggctgggcagtcctgcaggaggcagtcagcactggagaccccgagatggtgcagctggtgctccagtatcgggactaccagagggccacgcagaggctggcgggcattccggaactgctcaacaaacttcgccagcccagggtcacgtaggaaagagagacggccaggctcacgtgggagagactggaccctttggaagagaagccttgccagctttgggcctcctgaagaatgcagattacctggagcagggacttcaggttgactcggtggattatggcctgaaaccctggaatacttgctactacgcacccttctggaagcacacggaggggcctggctggcagagcatactatctcataccccctaccccaggagcaggctcggagggagccactgtgccccctttacagagtaggactctgagacccagtggaaacaaaggctcccccagggctctgcacaggctcatggccaggttgaggctggccctccacctccaggtgcttacagcctcattgtctgaagaccactgtagtgccccacttggcccaccctctccagggcagagtggttgggcgtagctgagccatagcagtgcgtcaagacttgatgaagggccaggcgttgtggcttactcctgtaatcccagcgctttctgaggccaaagtgggcggatcacttgagcccaggaggtggagaccagcctgggcaacatggtgaaagccgtctctacaaaaagtacaaaaattagctgggagtggtggcacacacctgtggtcccagctactcgggaggctgaggtggaagaatcacctgagcccagggaggcagaggttgcagtgagccgagattgcaccactacactccagcctgggtgacagagcaagtctcaaaaaaaaaa

SEQ ID NO: 60386 - DNA, 1828 bp, Homo sapiens
cagctattaaaatttagaaactactatagttaaaattttgcaattattagcaaaagaacaaatagataaaattagagaacccagaaacaggctaggtgtggtggcttacacctgtaatcccaagtagctgggactacgggcgcataccaccacacctggctaatttttttatttttagtagagatgaggttttgccattttggccagggtggtcttgaattcctgacctctggtgatccacctgctttggcctcccaaagtgctgggattataggtgtgagctaccacacccagccttgtgacagtgattcttatctcatagtgcaaaagatggcatttggatgggagataatagttcagaaaagttccattctacagcaactcacaatttgaggaccatagttctaagaaatatccacaaagtcagttgaactatgatttttagctacttggcatataaagttttgctggtaagtaatgacttaaatccataacttttcaaaaacataagccttacttcaaaagcattatttgtacattgtagaaaattagaaaatacagataatcatctgcggtaactttcccaaaaaagagaaaatacagataaaatattaaatgaaaatattcttaccacctacaggcgaccaattttaatatctccataagtcttccccagctctatcttttgacttaaataggatcatatttaactattgtcttgtaacttgccattttcatttaataacctccatccttccgtgtcaaaataatttttcacctcttctcttacttagtctatattcagatgtaaattgttcatctcttatatttcccataagtgaaagttagtcctagacttgaagcctttattagctgtaagttcagcaaaatgcctttcagagccagtttgtcaaagccagcatccagtctggagaatgcacctggcatatggttgtgtcctttaattccctttcaatctagtggagttctttttttcatgatactgactgaagagattgcacagttttggttttaagtacagagacgtagtacatttcttaataataaatgtttaacttttgtgtgttttaacctaatttgtttttttatttttaaatttatattttatttcagcaaaacaagctatcgatcagggaagatctccagttataatagataacactaatatacaagcttgggaaatgaagccatatgtggaagtggtaaatatgaaacatgagaaagtttttattttttattcttgtcaattttttcacattctaaaattttggctggttggatcttgattattaaaacatttgtcctttgttttctaaagaggtttgttggtttgcttagtttttaaaaaaattgtgaatgatgttttttaaggaacatgttcatcttgttaatttttgtttgtttttttgagacggagtctcgctctgtcacccaggctggagtgcagtggcaccatcttggctcactgcaagctccgcctccccagttgaagcgattctcctgcctcagccacctgagtagctgagattataggtgcctgcccccatgcccagctaatttttgtatttttagtagagacagggtttcaccatgttggccaggctggtctcgaactcctgagctcagcccatctgccgtgctcagcctcccaaagtgctgggattacaggcatgagccaccacgcccagcctcatattgttttgactttccttaaggatagtaatcttaaggaattactattccttgagaatagtaatcaaaatttatccggttaaatagtcttaactgttataaaccatattatttt

SEQ ID NO: 60387 - DNA, 1097 bp, Homo sapiens
cgtggaattcagcactttgggaggctgtggcaggcggatcacttaaggccaggctggtctcaaactcttgacctcggataatctgcctgcctcgacctcccaaaatgctgggattacaggcgtgagccaccacgcctggccttttaagtttctctgtaaattaatagtgagacatgaatcatttattgcaggtagccttaggttaggtgctgtggaggatagggcataaatagagatggctcctgccctttacgaagcatcagtctgttggggcacatgaggcatgtacttgaataactctagtacaaggtagaatattgttagtggcttaaggaaaatttggacaaactatgggagatgagacaaaggaggaaaagtaatcctgcataactgtaggcattagaaacagagactccccttgctttatctctaaattagaatcacaaatgcgtaatcttttcagggtaaaaatgtgtcatctttaaagtctgtttcagatatattttaaattactattttaaatgaattcatatggaaaagtcgtgggagcttaaggccttgtttaaaagggaaaaaacaactgagtctttttagattaatcaaaaactatcctcttcctttggagaggagagagtgtttgtcacacgcggaatgaagtgccatgttctttgaggcacgatttgtatgccatggggaggagggagtccgttcaagagaatggattccctgacaagctacgtttgccagaatattccaagacatgttttagaagctacctatggcattaacatcataacgcctagagaggatgaagatccccaccgacctccaacatcggaagaactgttgacagcttatggatgtaagttgtgattcatcagaaaatgtgaacaaaagtaacagtatacctaatgaatagaaataagaatagtaatagtactagaattgctgttctgcaaagatacacatttataatatttcttcagcatttttcaagccatctttcgtctctgtgggccttgcctacaaagtaacctaaagtgcaaaaagcttttaggacgtttgctgctttgatggtacccacgtgcagcacaggg

SEQ ID NO: 60388 - DNA, 1522 bp, Homo sapiens
gcggccgccacctctccccagcccaggagacggctgcggagccgcagccgcccagaccgcgcagcgcgggaggcaggttccgcacgaaataaatcagaatgagttatgcagaaaaacccgatgaaatcacgagaagatgagtggatggaaaagctcaataacttgcatgtccagagagcagacatgaaccgcctcatcatgaactacctggtcacagagggctttaaggaagcagcggagaagtttcgaatggaatctggaatcgaacctagtgtggatctggaaacacttgatgaacgaatcaagatccgggagatgatactgaaaggtcagattcaggaggccatcgccttgatcaacagcctccacccagagctcttggacacaaaccggtatctttacttccatttgcagcaacagcatttgatcgagctgatccgccagcgggagacagaggcggcgctggagtttgcacagactcagctggcggagcagggcgaggagagccgagagtgcctcacagagatggagcgtaccctggcactgctggcctttgacagtcccgaggagtcgcccttcggagacctcctccacaccatgcagaggcagaaggtgtggagtgaagttaaccaagctgtgctagattatgaaaatcgcgagtcaacacccaaactggcaaaattactgaaactactactttgggctcagaacgagctggaccagaagaaagtaaaatatcccaaaatgacagacctcagcaagggtgtgattgaggagcccaagtagcgcctgcgcttgcgtggtggatccaacaccagccctgcgtcgtgggacttgcctcagatcagcctgcgactgcaagattcttactgcagtagagaactctttttctcccttgtacttttttttgacctggcatctttttatagggaaaaatggcctttgtaggcagtggaaaacttgcaaggaaagctgccgtctctttggcagtctgatgcagagcctgcactctggcactcgctgaagaatctggaaggttgcggtttgctcttccagtgttcgggggcctctggctgctgaaggattcggtctaccacggagggctgtgctgttaggctgcatcccactcaaaatacaggaaaagcacgaatcatgattctgctttctgttagcttaggcagacattgggccttcacctacaagtttttccttacccctgtggtttttgtgtttttttttttctttttccataggaaagaatatataaatttgtaaatcctaattcaaagatggctcatgtgtgagggcattgagtttgatttgttttccctttggtctgggttgtgtggcttttgggggatgcgtgtgagggggctatgtgttttttaattttttaaatatatattttggtgctgtgtgtggtaagagacttgttcctagtggatcaatgaaccatctcttctgggcagttttgttgaaaataaaggtttctctttgatttcaagaatgaccaaaaaaaaaa

SEQ ID NO: 60389 - DNA, 2183 bp, Homo sapiens
ttttttttttttgggatgcagcactttctttattgcccatccagggaacagccaagccagctccatctgcattctggctgcagcgtgtacattaggggactcaggggccacagtgtgggaccgtgcacactggcaaggcactggcggatgctggcaggccagtggacatggatagatgagaatgacaactcacagatgtcctagcttctgctggcccagctgccagccactggccatcacccttttgcccagcatgtgtgcattgtcacccaaaacatcttgaaacttcccattagtgaggcattcaacaaagaagtaagctaagtgagtaggaaacagtgtttcctggaatataccgcactctgcctgaaataggaaaactatgtttgccgggaagcagcagcagcaggaaagaagttataccaaaaacgacttgtacaccacagacattataacccgtttcctcaaagaaacagtcatgttctgttgggtattatggacaggtctctggaaatttatctaataaagaccaacaaacttcccccagcagtgcctctgagtaccgtgtgaattctggtgtcttgtggaagtcagggtgccttctttgcatccaaagctttgagggagctgggaagctttggttccattttaggagggctgtgtgatggtgacaaaggtgttctggtcatttctgctctgttctccgttctgtgaagtgaggtggatgtaatgtgctgtgggatggggtgctccatatgtgtgtgtagcctttactttccaacttagttttttgcatctctcttgtaccgatgagccatacctctcagccttcatttggtcccaggcctgaccctttgctttcatcgtcagcttttctgtcctgctcgggcaggattaactctgttcttgccgcggatgtcaccatcactctggagtccagcccagtgcccacaggcccgatcagttcaccctcttccttctcttcaggggagaaactttctcgggcatcaaaaaacgtgattgtttcttcttgaagtttttgttcttccagctctgccccatcttcggtgcttttgcttttcttggtaggagatgaggagaaccctaatttgggaaatcggaaccagcctgccttctcctgttttttaggcagttctgcctctggtcgtgcctcaggctgtgtttgaatgggagcagatctctggacgtcatttttggaatcaacacctgtctcatcaacagaagaggaaaacccaatgtttggaagccaaaaccagagcagaccagattttttactttctggtttgtcttttggagccctgccttcatctgccagtggtgtggttgcctcttggctatcatcagggggaaactcaagaatttctgctggctcctcatctgaacagctgtctgcaagctggtggccagaaggaacttcaaatgtgagtgtttgctgtcccagtacattgacgctggaagagatcatctcaaatggttctccagtgtcaggctggagatctccagaaatggagtctactcctggggtggcttgtatgggagcctcttctgtgccctcctgagtcctagagtgttgagtcattgttgtgtacactctagcctgcgtgtggggctctgggattttcacttttaataaggaaaatccgtacgaaggtgtttgaatctctgacgtggggatctctgattcccgcacaatctgagtggaaaaagtcctgggtactgagagatctacaaactctggtgtcactatgctgtgtatagtgacctcttgactttcaacctgagcaccctgaatatgcactctgacctttgaaattgggggagcttccaaaggcaggttaaggtccacaggctgctccccagggaccccagcacctgccttcaggatgctggctccccagagccccggactttccttacaaagggctgtatcaatattggcctctggacactgcacttccctcacagtggggatgaacacatcatcctctgagctgggggcagcgaaggagaaccttggtaccattaatttggggaatttgacagttaggacagaatcttcccacagttgatccacattaaccacagaaatctgggatggcatatcagtacttgaagctttcaatttaagtggaccttcaggctgggaagaccatttctctgcc

SEQ ID NO: 60390 - DNA, 2301 bp, Homo sapiens
tttcgtgaatatgtggtagggaccaaggcgagtttgaggaatcagagcttgatgctactgtacagaactggacaggttgggccggcagtggtggggccaaagggctctgtgctctaggagctaagccagcagcccccgagaggggacttggctgggcctttcctatgggcaaggcccagtgctcttcctgcccaccagggaccatggagcagtggcaccctatggggctatgatccctaggcctgggcctgggcctgcctgtggcccagagctaccctgggagtgtcagtgctagcagcacagctacctctggtggcaggagaagagaggcccagcacagcagcaggccaggccttcctgtccaggtctgcatggagcactcggtgacccagagcagggactggaggcacccccagccctgccccaggccacagcaggacaggccgggacaggcctcacccaaggccaaggctggcatcagccaatcattcagagctgaggccctgggcctagcctgcccttctcaggggccaataccaccccagccctgcccttggcctcactttttcccagcaataagtggggttcaccacccgcctcgggaatactttccccttctaaatgggacttgctgttacctcaggaggctccttagtgcaaatatgaccctggtcagggctttgccaccgttgaagccctgcagaaggtgcaatgtaggggttctggggccacagaggagaggccacttcccaccaggacccccaacatgaagtctaggcctcaggggctcccgcccttcttcctccagcagcgggaactgccactgctctcccaggccctgttctggaggctaaccttggttcctggagagtgtgcccctccaccctccctccagcagccctgatcacaccatgagagccaggaacgggtcaccctgctgaagatcactctgtgccctgggggaggagccaagccctcaccccacaaggggcaggtgggggcttggttgctgacccggcccaagtccccacagagcaccttctgtagctccagcttgtctccctggcttctctttgaaggagaaaaatgtaaaatatgcactgagaaagccagccccgcctgcttagtcagccccggcagcagggcagccatgggaactcaggaaaagcaggaaccctttccaaaagcccagagatgccctgggctcagatctgtaattctcccaggagctgtgatagagcaggccacacaaagtccctacgcctccctgctgcctcccccagatgcatgtgatggcatcaccattccccaaattgaatatcagcatgcggcctgaccagggactctttagatgcatgaatttatttatatgaaggctctcacagagacacacacagcacttcagtagcatttgcattcctggttaaagaatcaccaatatttaaaataaaaactttcctgaaattgggactgtcatgttatccagaagggctggtacatccgcccaccatgtccccctgctgggtcaggagccaacacaggaccctgcgtgtgagcgtgcctgacatctcacgcacggccactccagagccggtccctgtccttggaaagctgtgaagccttgcgttgagttccttctcgatactgacggctccgtgctgacattctgagctctggagtcacaccagcgcaggggcgtggaggaactgaggtttggaaggaatgccaggtctcgcacagcttggcctcgagaaggtgagaggaaggcaaaggccagggaggggacccagagaggcctggcacacaaggcccaagcaccaccgtcaacacagcccagtccatacagaaatgggtttcatgcctgaaaagctttttacagaaagatgccgcctgtagccagtgacagccgcaaccctacaggcctcagttccttgcagaggtgaggggtagagagtcagcctctctcccttccagcagcgacccagcttccctccacttccaggtggtgctgggctcaccaagggagcactggtgggtgctctgaaaacccacaggatcccacctccaggcccacctgggtcccatctcactctcttcttctttcaccaattgctaacatagaccttgttgggatcacgatggcttcacaagccagctgttgggtttgctatgtcactgtggctcagtcacatccctgcgtgtatactgtctgcggggcacatatgtatccatttagagctaaaggaatcagtgtacactacagctaatcctaataaatccgatgttttcggaaaaaaaaaa

SEQ ID NO: 60391 - DNA, 1130 bp, Homo sapiens
tttcgtctggcggccgggtaagggtctgagtggatctcctgccaggccagagcgccttcgggggccgcggcggaaggccaggagtttgcagccagggcgccgggtttgtggtctgcagtgtcgtgaggctgaggtgcagcatgtctagactgggagccctgggtggtgcccgtgccgggctgggactgttgctgggtaccgccgccggccttggattcctgtgcctcctttacagccagcgatggaaacggacccagcgtcatggccgcagccagagcctgcccaactccctggactatacgcagacttcagatcccggacgccacgtgatgctcctgcgggctgtcccaggtggggctggagatgcctcagtgctgcccagccttccacgggaaggacaggagaaggtgctggaccgcctggactttgtgctgaccagccttgtggcgctgcggcgggaggtggaggagctgagaagcagcctgcgagggcttgcgggggagattgttggggaggtccgatgccacatggaagagaaccagagagtggctcggcggcgaaggtttccgtttgtccgggagaggagtgactccactggctccagctctgtctacttcacggcctcctcgggagccacgttcacagatgctgagagtgaaggggggtgagttgtctctcttggaggcagttatggctacagccaggttgtgttttgtaaaagtattatcaatggaaaattcaaaccaagctgctgcaaatgatttttggaacaggtaagagtataataaatacagaagagttgaaacaaaaaacccatccaatttatgtcattcagacaaatgtagatgttaatagcagttattgcttgcatctgttatcttagtttattacatagttatgatatattatttgggcatttttctgtgttatcacaaggacttgataagcattgtttgactttgttcctttccttgggtggctgagctggtatacggagatgtctaagcacgaagcatgctcctccctgggagtcaccctcttcccacaggggagccttgcctgtgatcctttgcatttttacaggtgggaggtggatgtcctgagttctcagtggcccaggagggctgacg

SEQ ID NO: 60392 - DNA, 1396 bp, Homo sapiens
caaaaatattacgttgcaagcccgcgtaaactttgggcccccgaagggttctttaaaacgggcgccccttttttttttttttgtattctaatgctatttattatcacaataaataattcactgcaaatgactgcatgaaaaatgtgggttccagagcaccatgtataaaatgatcccatttatgtagaactgtaaacatacatccacacactgacggacaggtacatatgcatgtttggggaggggtctggaatgatcacccaagtggacagggtgaggggtggtttcctgtattttttacaataagcatttatgacttttacaaaatcaccaaagctatcactttttccatttagaaaacacaaaattatttttaaatagagacttgacgtcatttgacacaccttggttttctctcggagagcacagatgccgcagacaagaggagcggacccgcctcccagactcctgcctgccccgtccctcccccgcaggtggcactggtgagccgggaaggggctgccagccccaggatgcctcgcacagcccgggctggaaacccctgcccctgcttcctcgcacagtctgtcattctagaaggctctctccaaaccactcttccaaagagggtcatgccagggaacagcagcgaggtcattttccagtcatcccacaggaagccagtgagccccactcccactgccgtggacctccaggcctggcttccttctcttccctgggttacctgctcaggggtttctcagccaggccagcatgtctatcaggcggcatccagcatccaatcacagtgacaagaaccttccggaacaccctgcaaactgtggatgcccacgggtggccccattatgccttgagcagggcaaccttttggtccagaatggagtcttctctgatgttgtagggctgggtccctggctcctgcctcaggtgcttctctgcttcttccagggtagagaagtactggaaccccttcaggtcagcggacagcaggacacggagaacggggacctgcaggcccacaaaggccagggcgacgccctgcttctggaagtcctggaggagctcgccgagtcccagcaccacagtgtagtcgatgctgcagacatgggtgcactccaggaccaggcagcgtggcggggacacttccagggcccggcttaggatctcctcccgcagagcctccatggcagggaaggacaggccgctggccggctgcaggaccagaaccggcccctctgacaccttggtctcaggcctggctgcagagtgcaggagcatgagcagagacaccagggccccggccaggatgccgtactgcacctcccagaagcacagcaggaaggtcacgcacaggggcagcaggtccagcctctcc

SEQ ID NO: 60393 - DNA, 2659 bp, Homo sapiens
tttcgtgccggtcagccgcagacactcacccagctccgcgagctcagccgctcagcgagtggggtagcggggaccgagacggacggtagccgtgccagagcccggggcgctctcggatgcggcaggacaagctgaccgggtctctgaggcgcggggggagatgcctgaagcggcagggcggcggcgtgggcaccatcctgagcaatgtgctcaagaagcgcagctgcatttcccggaccgcgccccggctgctgtgcaccctggagccgggagttgataccaagttgaaattcactcttgagccatctttaggtcaaaatggttttcagcagtggtacgatgctctcaaggcagttgccaggctatccacaggaataccaaaggaatggaggagaaaggtttggttgaccttggcagatcattatttgcacagtatagccattgactgggacaaaaccatgcgcttcactttcaatgaaaggagtaatcctgatgatgactccatgggaattcagatagtcaaggaccttcaccgcacaggctgtagttcttactgtggccaggaggctgagcaggacagggttgtgttgaagcgggtgctgctggcctatgcccgatggaacaaaactgttgggtactgccaaggctttaacatcctggctgcactaattctggaagtgatggaaggcaatgaaggggatgccctgaaaattatgatttaccttattgataaggtacttcccgaaagctatttcgtcaataatctccgggcattgtctgtggatatggctgtcttcagagaccttttaagaatgaagctgccggaattatctcagcacctggatactcttcagagaactgcaaacaaagaaagtggaggtggatatgagcccccacttacaaatgtcttcacgatgcagtggtttctgactctctttgccacatgcctccctaatcagaccgttttaaagatctgggattcagtcttctttgaaggttcagaaatcatcctaagggtgtcgctggctatctgggcaaaattaggagagcagatagaatgttgtgaaacagcagatgaattctacagcaccatggggcgccttacccaggagatgctagagaatgatcttctgcaaagccatgaactcatgcagactgtttattccatggctccgttccctttcccacaattggcagagttgagggaaaaatacacctacaacattacaccgttcccagccacagttaaacccacctcagtttctggacgacatagtaaggccagagacagtgatgaagagaatgacccagacgatgaggatgctgtcgttaatgcagtggggtgtcttggaccttttagtgggttcctggctcctgaactgcagaagtaccaaaaacaaattaaagagccaaatgaggagcagagtctgagatctaataacattgcagagctgagtccaggagcaatcaattcctgtcgaagtgaataccatgcagcttttaacagtatgatgatggaacgcatgaccacagatatcaatgcactgaagcggcagtactctcgaattaaaaagaagcaacagcagcaggttcatcaggtgtacatcagggcagacaaagggccagtgaccagcattctcccgtctcaggtaaacagttctccagttataaaccaccttcttttaggaaagaagatgaaaatgactaacagagctgccaagaatgctgtcatccacatccctggtcacacaggagggaaaatatctcctgtcccctacgaagaccttaagacgaagctcaactccccgtggcgaactcacatccgagtccacaaaaagaacatgccaaggaccaagagtcatccgggctgtggggacaccgtagggctgatagatgagcagaacgaggccagcaagaccaatgggctgggggcagcagaggcattcccctctggttgtacagcgacagctgggagagaaggcagcagccctgaaggcagtaccaggaggacgatcgaggggcagtctccggagccggtgttcggagatgctgatgtggatgtgtctgcagttcaggcgaagttgggagccctggaactgaaccagagggatgctgcagctgaaactgagctcagggtgcacccaccctgccagcggcactgcccagagccgccgagtgcacccgaagaaaacaaagccaccagcaaagctccccaaggcagcaactcaaaaacccccatctttagcccttttcccagcgtcaagcccctgcggaaatctgctactgccaggaacttgggattatatggccctacagaaagaaccccaactgtgcactttcctcaaatgagtaggagcttcagcaaacccggcggtggaaacagtggcccctaaaaaaccgatgatgtctcccccgaaactttggatctggactccccctttcccagtagtataagggttgcagctgaatggctctaaaagagttttatttgtccagtgaaaatgaataggttcagggatgagccacagcccataaaaaatgggaactggaagttttataataggagttagaacagggctgttttcccagctacctgctaactgacgaagtggattcttgtggcaaaataaatattgtggttttatagtgaaaaaaaaaa

SEQ ID NO: 60394 - DNA, 1257 bp, Homo sapiens
ggccttcctaaccttccatcatccccagctagatgtatgcccgggacagggcctctgttctccagctgaaccataccctggctgtgggggcatctgtcctgagcttggctggtgtatctcacaatgcaaagacatgctggctggcgggacaggtgggcaggactgaccctgaggaggccttgcctgcagggtctttgtcccaccatttggtggagtatcacacggttctctgaggtccggggcctcagctgtttaagtttaccggtattactgagctcggcatttggagagggagctctgaagtgtctggggaggtaccgctgtgcgtggggtcaggtgtttccgtaccacagcaggagcagggcccgcccgcatcccagctgtgggcctgccggtcaggtcgggcacctactacaaaccgtagtggggtggaggctgctggaggtgggagtgaggagatgagggcagggtctcaaacagtcctgactcacagggcctggaaacaagtcctatgtgggcctggggcctggggtcctcatcctccttgttggtctactcaggcccagcccagagctgtgttccctgtctcaggtcaagcagtggcagacgcaaggctttctgtgggcccccaagtggtaggagggagagtagcagagcatgggttactggaagccgggactgctagggctggtggccagggagctgcaagagtgaggctcagctctggctggttctgcccttacccctcctgcccgcctgagaactgcacaccctgcccgctggccccaggacctgcactcccaatcctgctgtcttctccttccctgtgccctgaacaaggacctcactgcccgccttcccctcccaccagcccccttgggccaggcagggtgaggccaaattgctcttggcccacaaatgggtgatggtcagatatgtgaatcaagctcctttctctagctagtgtttgatgtgcacgtgtgtgtgcacagtgcgtgtgtgcacacgcacacctgtgcactcgtgtgtgtttaagaaaggaaaggatttgggctggggagcaaaagataatgtgaaactgttggtggactctctggtgaggggtgggcagaacttgctgctactagagttcttgggttctccatgatgttcaccctggggctggcccactgtgtcctgaatgtttatgttattttttgttttattttttaaacaaactgctgtttttatatacctggaatctgttgttggcttcaa

SEQ ID NO: 60395 - DNA, 1565 bp, Homo sapiens
  misc_feature (1)...(1565): n = a,t,c or g
ttttgccttattattccacccctttactttgcctttgtggacacaactcccgtgcaggccgcgctccacggggctcccggcggcccaggggagaagcttcgacaacaggacagtttttagtcacgtggcctgaccgtttgccatttaaggattacagcaaatgattctatttgtaatttctacccttcccattgcctcccccccaaaaaaaactgtacatgagtttacaaacatattaacatataaataatgagaaccgtcctggtgggagcctcctccgttgtctctgctggagatgaacactgaggggcgctgtaaccacacagactgcctgtgacatcgggagtctcacggcagctgtcctgggcccgcagctggcttttttggcacctccaggttcaaccaccagtctgtctctgctgtgcccagggtagagcccgggggctgtgagtatgtgtggctcccctgcccgtcatcgctctggctcaagctcatgctggaagggacgcttcctctcccgacagtgcttcttgtgggcaggccagtccttctgctggcactgggagccgcagtaccgggccacctggcagcgcccacagatgttgaactcccggagctgcttctcaatcactgtgcagggagggtagtggcactcatagtaggtgcaagagttctcctcctcttccactacatccccgttggcattataataccgggtcacatttaggacaggaaactgttcttctatagggtctgtaggcagctgctgaattgcaagccaatacaagctttgctccctctgcttgctggaggtctcttcagccttgggccgccagccccacggcaccagttgcaggttgtccaggcgattgtccacggtcacagcgttgaggtgcaccacctggaagcccggggccacgcccccccggtgccgctccctagaaacagacagcaaaccctgcatctaacccggcatcgctgcctcccaccctcacagacatttctggtcaggtaccaaagtccttccaggaagaaatgtcagccatgtgatctgatcgggcccctggtcctttggatgagggtacctcaggcggaaggtgctgagagaaacccaagcacctgatctgtggcccaatcaggacagggacacagggaggacccggcccctggtcttcagagcacagacagccaaagctggaacgcaaaaccacctaagcagatggcctcgagacagctccccatctgagtggtccctaccatgcgcaccggggggctcggcaaaacccagcaaggggagcaacctccgtccctccagaggctgccagtcctgggcaagctcccagcagaaagtccacttggtgtttgaagtgcaacatacaaatcattcgttcctttgggttagtggtgaaggacacaaaaataactgcgagattcagggaaggcaaggcagggcttcagcggggcagaaggctccagacgccctgtgccatcggagctcacccaggagcccagcgnacgcgtgggtcgncccggntntttcggtagactatcgggcgtcagacacc

SEQ ID NO: 60396 - DNA, 1759 bp, Homo sapiens
ttttttttttttgaaaagggagtttcactcttgttggcccaggctgggagttgcaaaaccagaatctcggctcactgcaacctccgcctcctgggttcaagagattctcctgcctcagcctccccagtagctgggattacaggctcatgccaccatgcccagctaatttttgtattattattattgttttttagtagagacggggtttcaccatgttggccaggctagtcacgaactcctaacctcaggtgatccacccacctctgcctcccaaagtgctgggattacaggcatgagctaccacacctggtttggagagtcttaattaaggaaatttccctaatgttcatttattttctaaatccagaccgtgtttcagaataatccttacttgagagtagccattttcttgcctgtacttgtcagaactagaggaaatagccaagactaatgaaaaagattactctaacccttaaaagacttttaaattcactactagagtggtcattttaaaaatacatccatgttttaacttatttgagccttctttatgagtaaatgattcctccttgttctgtctttcaaaccagctaaatatttgtcacaaaagtgcttttttctcactgttgcctattttcatatatcaggttttaaatagttttaattttttaataaaattttctctacgttctatatgcaattgttatatatctatttgaatagctgaaggactaaaatacttttttaagagataacttcaggaaaccattatattttactatctgcatgctgttaactgtggtacactgtgaaatatgttgattacaaacccattcattacatagtataaggaattcacagtatattgactatatagtgtctaatgatcttgggcagatactgtcaaacttacaatatctatatagatgtaggtctttttaaatttacctagtcattcttctatcatgtatattgatgctgaaagaggaactggtcagctcctctggacaacaaattcttagtctataatattaggagacatcttctgttttgcaaatgtctgtgaatctgagcaacctggcattctgcttactggccagaaagctggcgggtgacatttgtaacatttcctctttgagactctgagttcacctagagaagtctaagcataacagctttctttcccagcacgagcctttatagctctctttagctcaaccactctgtccatccagccaatggatgtcccttcccctgtaccccaatttcaagcttattttaggaagccttgaactaccatgtatcctggctcctagctgagtttattagaggtatggagcagtgcaacttaaactcaagttgcacttacattttgaattttaaaatgatggttttatctgttgtgtgaagtggttcacccttgaggaccaggagcctccatatcctgactgaaaaccttttctgagacttagagtaacagtacttttggttccttgagttctcctgtctccagataccaaatgaccttgacttttctgccttgtgaattcgtagtccaatcagctgaaattaaatcacttgggagggacgcatagaaggagctctaggaacacagtgccagtgcagaagtttctccaggtggcctccctttccaacaatgtacataataaagtgtatgcactttcactaatatttttggggtgagagtctgtttcggcctgtattgaatgtctgtggatttccgttttcagaagtagta

SEQ ID NO: 60397 - DNA, 1499 bp, Homo sapiens
acacaagctctggcggaccgtggccatggcgggcgctgagtggaagtcgctggaggaatgcttggagaagcacctgccgctccccgacttgcaggaagtgaagcgcgttctctatggcaaggaactcaggaagcttgatctgcccagggaagctttcgaagctgcctccagagaagactttgaactgcagggatatgcctttgaagcagcggaggagcagctgagacgaccccgcattgtgcacgtggggctggttcagaacagaatccccctccccgcaaatgcccctgtggcagaacaggtctctgcccttcatagacgcataaaggctatcgtagaggtggctgcaatgtgtggagtcaacatcatctgtttccaggaagcatggactatgccctttgccttctgtacgagagagaagcttccttggacagaatttgctgagtcagcagaggatgggcccaccaccagattctgtcagaagctggcgaagaaccatgacatggtggtggtgtctcccatcctggaacgagacagcgagcatggggatgttttgtggaatacagccgtggtgatctccaattccggagcagtcctgggaaagaccaggaaaaaccacatccccagagtgggtgatttcaacgagtcaacttactacatggagggaaacctgggccaccccgtgttccagacgcagttcggaaggatcgcggtgaacatttgctacgggcggcaccaccccctcaactggcttatgtacagcatcaacggggctgagatcatcttcaacccctcggccacgataggagcactcagcgagtccctgtggcccatcgaggccagaaacgcagccattgccaatcactgcttcacctgcgccatcaatcgagtgggcaccgagcacttcccgaacgagtttacctcgggagatggaaagaaagctcaccaggactttggctacttttatggctcgagctatgtggcagcccctgacagcagccggactcctgggctgtcccgtagccgggatggactgctagttgctaagctcgacctaaacctctgccagcaggtgaatgatgtctggaacttcaagatgacgggcaggtatgagatgtacgcacgggagctcgccgaagctgtcaagtccaactacagccccaccatcgtgaaagagtagccggcttcagtgcctgccttggggtgaggaagacacctctgccccagtggattagcaagtgtggcaggcttaacatgtccaggttctccccaataacattgtccaggtggttttaaaattcccaggcagggggagagtggcatggggagtgacttcttaatgggtaaggggctgcttacttctggggtattggaaatgtttggggactaggtagaggtgaatgtactaaatgccactgaatttgtatacttcagaatgtttgttatgtaaattttacctcaactaaaaaaaaaaaatgcccaggtaaaaaaaaaaaaaa

SEQ ID NO: 60398 - DNA, 2261 bp, Homo sapiens
tttcgacgagttttctgcgcttccttctccctctctccagacgtcgtggtcgttcggtcctatgtcgcgccgggccctccggaggctgaggggggaacagcgcggccaggagcccctcgggcccggcgccttgcatttcgatctccgtgatgacgatgacgcggaagaagaagggcccaagcgggagcttggtgtccggcgtcccgggggcgcagggaaggagggcgtccgagtcaacaaccgcttcgagctgataaacattgacgatcttgaggatgaccctgtggtgaacggggagaggtctggctgtgcgctcacagacgctgtggcaccagggaacaaaggaaggggtcagcgtggaaacacagagagcaagacggatggagatgacaccgagacagtgccctcagagcagtctcatgcaagtggcaaactccggaagaagaaaaaaaaacagaaaaacaagaaaagcagcacgggagaagcatcggaaaacggactagaagatatcgatcgcatcctagagaggattgaggacagcactgggttgaaccgtcccggcccagctcccctgagctccaggaagcacgttctctacgtggagcacagacacttgaatccagacacagaactgaaaaggtattttggtgcccgggcaatcctgggggagcaaaggccacggcagagacaacgtgtgtaccccaagtgcacatggctgaccacccctaaaagcacctggccccgctacagcaaaccaggtctgtccatgcggctgctggaatcaaaaaaaggcctctccttctttgcgtttgagcacagtgaggagtaccagcaggctcagcacaagttcctggtggccgtggagtctatggagccgaacaacatcgtggttctgctccagacgagcccttaccacgttgactcactcctgcagctcagcgatgcctgccgctttcaagaggatcaggagatggctcgagacctcgtagagagagcgctgtacagcatggaatgtgcgttccaccccctgttcagtctcaccagtggggcctgccggctggattaccgcagacccgagaacaggagcttctacctggccctctacaagcagatgagcttcctggagaagcgaggctgcccgcgcacggcgctggagtactgcaagctcatcctgagtctcgagccggatgaggaccccctctgcatgctgctgctcatcgaccacctggccttgcgggcccggaactacgagtacctgatccgcctcttccaggagtgggaggtgggtgcgagcctggctcatcggaacctgtcccagctccctaattttgccttctctgttccactggcgtatttcctgctgagccagcagacagacctccctgagtgtgagcagagctctgccaggcagaaggcctctctcctgatacagcaggcgctcaccatgttccctggagtcctcctgcccctgctcgagtcttgcagtgtgcggcccgacgccagcgtttccagtcaccgcttctttggacccaatgctgaaataagccagccccctgccctgagccagctggtgaacctgtaccttgggaggtcacactttctctggaaagagcccgccaccatgagctggctggaggagaacgtccacgaggttctgcaagcagtggacgccggggacccagccgtggaagcctgtgagaaccggcggaaggtgctctaccagcgtgcacccaggaatatccaccgccatgtgatcctctctgagatcaaggaagccgtcgctgccctgcccccggacgtgaccacgcagtctgtgatggggtttgatcctctgcctccttcggacacaatctactcctacgtcaggccagagaggctaagtcctatcagccatggaaacaccattgctctcttcttccggtcactgttgccaaactataccatggagggggagaggcccgaggaaggagtggctgggggtctgaaccgcaaccagggcctgaacaggctgatgctggctgtgcgcgacatgatggccaacttccacctcaacgacctggaggcgccgcacgaggacgacgcttagggggagggggagtgggactgagcgtccgcagaggtgaccgaaaagccgtatgatgatgttcccgatttctctgttggtcggagtcggccagttgcctgaagtagggaagctgagtgtgtcgctccctggtccactgtttctcctataaatgtaaatgggtcacgcaaaaaaaaaa

SEQ ID NO: 60399 - DNA, 945 bp, Homo sapiens
ttttttttttttcaatttcgttaaatgaaattgtattttgcccacggcggcttctgtttgatccctggggacagaggggagcaagggaggggagtggcagggggaggcccaggtgtggggctggagggggtactggcggcagcgggaaggcagtaggcttggtcagggtagtagtgcgctgcgcctcaggaggcaaaggtgccccagcctgggcaggccctgggaccagcccaagctgagcagcgccgcccctgggctggctctcagagcctgggctaacgtggagcccgccacgtcgcttggcactcagaggcccctgcttcttgttggctcacgtaggccacgctcaacacgtagcctgtgccacacccttcgaggcccgggtaggagggcagaggggctggtctgggctcttggtggacccctgctggtgctgcctgcctcctcctcccccacgtgggactcaagccaagggtcagaggcgcttccgctgctgggagcaagggaggagagtaggggtggagcagcctcccctctgcgtgggaacccggcctgtgtaagcagtagcgggacagggtggccggagtgatgccttggggcctgcggggaggagtggaagaagtggatgggctggctggctgtggcttgcatggcactggcagcccagcctggcttagaagtctggccggtccttcttcagcttcttatagtcagtggaaactgcaaggaacttgtattggtcattggggctcaggcggttccagggctccgggttgttctttctgtcccagctttaccagacgtcggggctgcgaagggcgagtcgcagcaagtaaagcgcagcgctgcccatgcccaggcagattaagccgatcatcgggatgatccccggatgtcttttgatctgccggtagaagcggccccaagatctgccctgtgccgaat

SEQ ID NO: 60400 - DNA, 713 bp, Homo sapiens
ttttttttttttaaaggtttgcatgtttatttataattacaatttacattactccaacagaggagcccccttgctatgttctaattcttagccattaagtcctacaaaaataaacccaagcttttacagtaacttaatcaatacagaactaaagcctttatagctattagaggggtttagttaccaaggtgcttattttcgacaaaatgccctgtcactcagaggacgcatgcgtatactaaagttctgacccatcgactcatgcaacaaatgtagaccccaccctccctccacccactgttacaacacaaacacaaaacaacgatgtacaacagaggggaaatatgctcttggtcaactgaccttgcagaaaagactggcttgtttccaagtggatgagaacgccagtgtgtggccagagtccagcaatgactgaccggcccaggtcagaggctggcagggaccacagaagggccaaggcgctgccggggctcatcccaggctccaaccccaacctggaagcttgtggacaccaggctctgtgcagcagctccgtggctagcgtccagggcccctggccactactcccaaatgcttctagtccacccacccctggccagccccaaccttgacatcactgtggatgccatcagggtggtctggttcacttatacaacatgatccatgggaaaaccccttccgtgcctcgtgcc

SEQ ID NO: 60401 - DNA, 715 bp, Homo sapiens
caggcccaggccaaccgtgcactgctgcaaatgggctcttaagctggagacggcgatggagaccctcatcaacgtgttccacgcccactcgggcaaagagggggacaagtacaagctgagcaagaaggagctgaaagagctgctgcagacggagctctctggcttcctggatgtgaaagagcttatgctgtaggcaacagaagccctcaagacttttgaggaggcctagaagagtcccataattcaatgcagttcctctcgctcatctttgcctcctgctcctcaaccacccccttacctctgactcagtgctgtacccttccctatacacctccctcttcctctcctcccaccacaggcccagaaggatgtggatgctgtggacaaggtgatgaaggagctagacgagaatggagacggggaggtggacttccaggagtatgtggtgcttgtggctgctctcacagtggcctgtaacaatttcttctgggagaacagttgagcagacagccacattgggcagcgcccttcctctccaccctcccagacctgcctcttcccccctgctttccacctcaccccatttattccttttccataaaccccaacccttgcccaccccacccccacccccaccaagggcgcaagagtagcggtccaagcctgcaactcatcttttcattaaaggcttctctctcaccagccaaaaaaaaaa

SEQ ID NO: 60402 - DNA, 2044 bp, Homo sapiens
ctgctattccattctcccatctactacctatctgttcttcaggccatccactcatccattcttctgtcccaggtacctagacacttgtcttcccatccgtttgttagttgatccactcctcattcagccctcccatgggcctggcatgtagccgagcaccctggagagggcagactaagaagacatggtccgtccctgcctgtgaggagttcaggtctctgaggaggaggaagcagtgaaactgggctttacacatggcctgagaacagcttaggcctgaacataaggaacagcttggagtggaggggacacagaggaaccctcactatcatgcatgccaacccaaccactgcctgccctttcccttctggatttagctcgtgtctccaggctcctagtcctgtaatccagggacccatcagcgagggattcagggaagcagaggcagctctccaggaaggaggaaaatccctgcctcttccagagagactcccccattgctgtctcttgtgtgtgtcatgcacaaggaaggcttggttgtgtgccaggataaggggcacaagggcctcgggtgtggccagagaccccatgcttaagcttttatggtataggtcaggctgcaggggtttgagggcctcagttgtatatcagaatcttcagagcactgcgatgttcaggggtgagtcaggtctgtagatgtgcacggggtcttctgaagggtcagtttctgtaatcactttcaggtgtgtcagggccttgtgcagtaacagtgcacacagaagttagtgtttctgtgggctaagggttgtagctctgtatcaggattctgggagtgggtctggatttctggtgtgtggacttaagaagctgtgtcagacttgggggaggggcgttcatgtataactgggttcacataggccaagactcccaggtgcattttaggcagagcctcaggtgtgttagaggtcccaggggcagagaggctataggtgctgtcagaggccttggggacatttagggcagagcctcgagtgacaggtcctgggacagtgggagccaagggcaagtgctagagttgcagtgaatttagagcaaagcctcagctaagtgacacatcccagggcagtaggggatctatctaggttcgtgctgggcctcaggtaagtgacaggccttaggacaatgggggctgtggcatgcgtcaggttacctgccttgatatgggatcgtgacaggcccctccctatgtgcaggagacaagcagcccaagaaacaggagaaaaacccagtgttggtgtccccagagtttgtggatgaagctctgtgtgcgtgcgaggagtaccttagcaacttggcccacatggacatcgacaaggacctggaggccccgctgtacctcacccccgagggctggtccctcttcctccagcgctactaccaagtggtccacgaaggggcagaactcaggcacctcgacactcaggtccagcgctgtgaggacatcctgcagcagctgcaggccgtggtaccccagatagacatggaaggggatcgcaacatctggatcgtgaagccaggagccaagtcccgcggacgaggcatcatgtgcatggaccacctggaggagatgctgaagctggtgaacggcaaccccgtggtgatgaaggacggcaagtgggtggtgcagaagtatattgagcggcccctcctcatctttggcaccaagtttgacctcagacagtggttcctggtaactgactggaacccacttaccgtgtggttctaccgcgacagctatatccgcttttccacgcagcccttctccctgaagaacctggacaagtgagcccctctgctcgcctcccacgagctccctgcctagttggggagctggcaagcaaacaggcgattacagtgcaggggactcgcgcagcagcgctaggctccacacacagactgcaggcaggcaggccctcatcctgccagctgtccttgcatccaacagatttttttttaacagacagggggcggtctcactctgttc

SEQ ID NO: 60403 - DNA, 2660 bp, Homo sapiens
aattcccgggtcgacggcggcgccggccatggaggagacgcagccgccgccgcagcctaagctgcccctgtgcgacagcctcatgatctggctgcagacattcaatactgcctcaccttgtcaagatgtcaaacagctgactagtggagttgccatggcacaagttcttcatcaaatgtgagtagtggtcagactctccctgaaaagcattgtaaacccaatacataccaaggaagaaaacttggacttgaattccaaaggttgttgcaactttatcttacccagtgacatattcaggaatatggcaccaaggcattcttgcagtgatgcagcttggtttaacgaatcttggttaagccgaattaaagaggatgttggggacaactggagaataaaggccagtaatgtaaagaaggtccttcaaggaattatgagttattatcatgagtttttggggcagcagatttcagaagcacttatccctgatttaaaccaaataaccgaatgttcagatccagtggagcttgggaggttgctccagcttattttaggttgtgcgatcaactgtgaaaagaagcaagaacatattcaaaatataatgacactggaagagtctgttcaacatgtggtcatgactgctattcaagagttgatgagtaaagaaatattgagctctcctccaaatgatgctgttggagaattggagcaacagcttaaaagagccttggaagaacttcaggaagcactagcagaaaaagaagagctgaggcaaagatgtgaagaattggatatgcaggtgactacacttcaagatgaaaagaattcactggtttctgaaaatgagatgatgaatgaaaaacttgaccagttggatggctcttttgatgatccaaacacagtggttgcaaaaaagtattttcatgcacaattacaactagaacaattacaggaagaaaacttcaggcttgaagctgcaaaagatgattaccgtgttcactgtgaagaacttgaaaagcagctaatcgaattccagcataggaatgatgaattgactagtcttgcagaagaaacaagagccctgaaagatgaaatagatgttcttagggctacctctgataaagcaaataaactggagtcaacagttgagatatatcgtcagaagctacaagatctgaatgaccttcgcaagcaggtgaaaactttacaggaaaccaacatgatgtatatgcataatacagtcagcttagaagaagaattaaaaaaagcaaatgcagcacgtacacaattagaaacatacaaaaggcaggttcaagatcttcatgttaaactttcctccgaatccaagagggcagacacactagcgtttgaaatgaagcggcttgaagaaaaacatgaagctttacttaaggaaaaagagagactaattgagcagcgtgatactttgaaagaaacaaatgaagagcttcgatgttcacaagtacaacaggaccacctaaaccaaacagatgcatctgctacaaaaagttatgagaatcttgctgctgagattatgccagtggaatatagggaggtgtttattcgactgcaacatgaaaataagatgcttcgcttacagcaagaaggctctgagaatgaacgtattgaggaacttcaggagcagctagaacagaaacaccgtaaaatgaatgaactggaaactgagcagaggctgagcaaagagcgtattagagaattgcagcagcagattgaggacctccagaaatctttacaggaacaaggttccaagtctgaaggcgaaagttccagcaaattaaagcagaagttggaagctcatatggaaaaactcacagaggtccatgaagaattacagaagaaacaagaactcattgaagatcttcagccagatataaatcaaaatgtacaaaagatcaatgaacttgaagctgctcttcagaagaaagatgaagatatgaaagcaatggaggaaagatataaaatgtacttggagaaagccagaaatgtaataaaaactttggatcccaagttaaatccagcatcagctgaaataatgctactaagaaagcagttggcagagaaagagagaagaattgagattctggagagtgaatgcaaagtagcaaaattccgtgattatgaagaaaaactcattgtttctgcgtggtataataagagtctagcattccagaaactggggatggaatctagacttgtgagcggcggtggtgcctgcagtgacactggtgcgtgcactcctgcgcggtctttcttagcgcagcaacggcacatcaccaacaccagaagaaatctctctgttaaagtccctgctacaacatctgattaaactgcaaaaaaaacaaaacaaaacaaaaaaaccacataaaatagaagtgtccttaaaatattttgtacctttcaactaactaccagattgaaaaagagtttatgatgcgggatatcaggtattttaaaatcaacatgcatcaaattaattttgccagttgactttaaaaacaaattatagaattagccatctctctgagggagcacatttgaataattggagatgcagttatacacacatttcaaacaaacatttgtcttttgagagtattataatttcaaattggccttgtatattt

SEQ ID NO: 60404 - DNA, 1880 bp, Homo sapiens
agcctccactccctgtctgaaaccagaagactggatcaaggggttcccactggctcctccagcaagacctcgtctttgcttgtcctgctcagatgctggtcatcctgggcatgtccccagtgtggactctggactgggaagggggcaggcccctttggacctgcagttggcctcagcagaaggccttgccttgtgtatgtgactccatatcccgggagcagttgacctttgccaaacactttacagttctggaggaggaggtaacatagatgcctgggcctgatggtggggccatacccatgtgtcgcctctcactctggcagcctcagaggccccttgctgctggctcccatctccctcccatttgcagaccaggaaggaagagcaagctgtacaaagggaagcagagcctggggtgggtgtgagcagggtgacccctcatctgaaaggcccaaaccagggggaagcaccagcctcagtgcagccccctcctgaccccacctagaatggaagcctccacctgcagccccaggcctccctcccccggggtctccacctcaggggagacttaagccagaggtgaacattcatgtgtaggaagaggccgctgcagggtggcatcttagggtaggggaagtgtgctgaggtgggccttccatgggcatggccgttgcctctctgccagccgctggtgcccaccagctggctctgcagcacattgccctgaggggcctgccactctcctgaggagcagcccacctgctgcccgtgaggagggggagaagggttagacaagcctggaggacaaaacagcgggagtgtgggggtgccatggtgttggaggggcaggcctttttgagccaatcccaccataatgtgaatatgccagtgactgctgcgctgtgctggtctctaggcctgaactaggtgctggcatgtctgggtcgtcttttgaaaagctcacttcaagctcaccctgctcctacctatcataagggcttattcttgtgcactttatcttgggaccaaaactgcctacccaccccttcccgccctccccctgccagaggcctggtgccctggcccagcctgtggcctcagcatctcataactcatttgctttgtctcccggatgatttccgtcatgctcccaaatgcagcttcaggtgagccaaggggtctgctcctgtggcggtgcagtggcaaaggatccagatagcctagggtgagggtgacagagggacagtgggctatgccactaggccctggtctggctttggaaagacctgtgaggggaaaccttcacccagcacccatgccccactctgctgaggccagaggaagggaggcctgaggggcagattggttcatgcctggggtggaggctaagcctggacacagtcagggcggggctggccagctgtgcgagaacacaagccacgcctgcgatggtgctgcacccctggtgtccctgcctggccctcctctggtcacttcaaacatgccctcaggcttggggatgcccttcttccattcccagacagcagtgtgagggtgcagggaccaagatgtcaagctggccgtggagtcgagctggccgacggacccctttcacctggttatgagccgacttctttggtgttctggcctctggcctgggaaaagggcaggagcctagaggaggaaaaaggctggtggacagacccagggtggtcttcaagcctggcccagtgagagtgaggcccccgcacgcaagcctcagccactcccaggggcctttgcagcgtctttttaacctcagaaaatttctcaatctatgtgatttgtgtaatactaatgagctttgggcaataaatacgggatttaaagcaaaaaaaaaa

SEQ ID NO: 60405 - DNA, 2317 bp, Homo sapiens
  misc_feature (1)...(2317): n = a,t,c or g
tttcgtgcggcgagtgaggccccggtcttcctcctcgtcctgccgcagggccagaacccctgacggtattcagctgcgcgtaagtctggccggtgccatctgtctccgcaatgccccccaagaaacaggctcaggccgggggcagcaaaaaggcggagcaaaaaaagaaggagaagattatcgaagacaaaactttcggtttgaagaataagaaaggagcaaagcaacagaagtttatcaaggctgtcacacatcaagttaaatttggtcaacaaaatccacgtcaggtagcacagagtgaagctgaaaagaaattgaagaaggatgacaagaagaaagaattgcaggagctaaatgagctgttcaaacctgtagttgctgctcaaaaaataagtaaaggtgcagatcccaagtctgtagtatgtgcattcttcaagcaaggacagtgtactaaaggagataagtgtaagttctcccatgacttgactctggagagaaaatgtgaaaagcgaagtgtttacattgatgcaagagatgaagaacttgaaaaagatactatggataattgggatgagaaaaagctggaagaagtagtgaacaagaagcacggtgaggcggaaaagaaaaaaccaaaaactcaaatagtgtgcaagcatttcctggaagctattgaaaacaacaagtatggctggttttgggtatgccctggagggggtgatatttgcatgtatcgtcatgcacttcctcctggatttgtgttgaaaaaaaaaaaaaagaaaaaaaaaaaagaagatgaaatttcattataagatctaattgagagagagcgttctgccctaggtccaaatgttaccaaaatcactctagaatcttttcttgcctggaagaaaaggaaaagacaagaaaagattgataaacttgaacaagatatggaaagaaggaaagctgacttcaaagcagggaaagcactagtgatcagtggtcgtgaagtgtttgaatttcgtcctgaactggtcaatgatgatgatgaggaagcagatgatacccgctacacccagggaacaggtggtgatgaggttgatgattcagtgagtgtaaatgacatagatttaagcctgtacatcccaagagatgtagatgaaacaggtattactgtagccagtcttgaaagattcagcacatatacttcagataaagatgaaaacaaattaagtgaagcttctggaggtagggctgaaaatggtgaaagaagtgacttggaagaggacaacgagagggagggaacggaaaatggagccattgatgctgttcctgttgatgaaaatcttttcactggagaggatttggatgaactagaagaagaattaaatacacttgatttagaagaatgacaccaaacacatcgctgaaaaaattaagtcagctcagcacgagttgaaattgactacattaatttctttccacctagaatcaacaggatgtttatttcctatgctgattctggaggagttaacctcctgcaaaaaaggcatcttgtccctacatcttctcttctgactttggctacatctcatagtaagttcagagtagttcatgataaattgaaaatataatggtcattgcagaaaatgattgatgttgtaactgtccacccaagtaagaagtgtatctgcctttccatcttttggttttcatttgggcatgtgctattaccagaaacaacaaacttatatttaaaatacccttcatttgacacagtttttaatgagtgatttaatttcctctgtatttgtatgtttagaagactgcctaaaacatgagcactgtacttcataaaggaaactgcgtatgcagattcagtattgtgtatctttggacaattagatggacatttaaaatggaacttctttatctgacaggatcagctacaatgccctgtgttaaattgtttaaaagtttcccttttcttttttgccaataaagttgtaaataaagaccatcatacattaaaatccaaaaaaaaaaaaaagggggggcctttttaaagaacccttgggggggccaaggtttccgcgggcatgcaaggtataattttttcccttaagggggctgtttttaaacccaagttggggtttttgggaaagaaccctttcttttgggggggcacatattggaccaccccccctccagagtgtaaagcctgggggggaaaaaaaaatttttaaggggcaaaaggggaaaactaactgccaatccctgccagtaagaaaatagggcncantgcangaacccaaaaatggccggaaggccactcttt

SEQ ID NO: 60406 - DNA, 1075 bp, Homo sapiens
ctggtgttagggttctttgtttttggggtttggcagagatgtgtttaagtgctgtggccagaagcggggggagggggtttggtggaaattttttgttatgatgtctgtgtggaaagcggctgtgcagacattcaattgttattattatgtcctacaagcattaattaattaacacactttaataggtatgttcgcctgtaatattgaacgtaggtgcgataaataataggatgaggcaggaatcaaagacagatactgcgacatagggtgctccggctccagcgtctcgcaatgctatcgcgtgcatgccccccagacgaaaataccaaatgcatggagagctcccgtgagtggttaatagggtgatagacctgtgatccatcgtgatgtcttatttaaggggaacgtgtgggctatttaggctttatgaccctgaagtaggaaccagatgtcggatacagttcactttagctacccccaagtgttatgggcccggagcgaggagagtagcactcttgtgcgggatattgatttcacggaggatggtggtcaagggacccctatctgaggggggtcatccatggggacgagaagggatttgactgtaatgtgctatgtacggtaaatggctttatgtactatgtactgttgagggtgggtaggtttgttggtatcctagcgggtgaggggtggctttggagttgcagttgatgtgtgatagttgagggttgattgctgtacttgcttgtaagcatggggagggggttttgatgtggattgggtttttatgtactacaggtggtcaagtatttatggtaccgtacaatattcatggtggctggcagtaatgtacgaaatacatagcggttgttgatgggtgagtcaatacttgggtggtacccaaatttgcttccccatgaaagaacagagaatagtttaaattagaatcttagctttgggtgctaatggtggagttaaagactttttctctgatttgtccttggaaaaggttttcatctccggtttacaagactggtgtattagtttatactacaaggacaccccaaaaaaaaaa

SEQ ID NO: 60407 - DNA, 820 bp, Homo sapiens
ttttttttttttaccaacagtacacttttaattaaggacctgtagctgtgcaggatgcaaacagctgggcatcagtgactttcctcctgcccccggtttgtccctgatggtggcagaagatcccagctgaccacggcccctttctctggggtcagagggagaagacaggcgcagtcagcaggggcagctgttgcaggtgggagggttattttcccacaggaacaaaggtctccatgatgatacggggtctctatagtcatgttgagagcctaatggcccttggcataattgctggtgtcggggtagaaggtgtcttggagtttgctcaagtggttgagagggagggaggtgccatagacttggaggaactggcacgaagccaaggatacaaatccaggcagggctgtggggcaggatagagagcagggccttctactgaaggagtgactcaggaaggaggaggggaaggtaacaagcccctgggcaggagccctgtggccgtgggatcattttaaattgagaccagagagtgagcagtccagggcagctataaccttggctagaaagggcagaggcagatgggcctgctccatctcgcctcttaagaaggtgggcaggacggagatgccacagtggatgccacagctgccacagcctcctgtggagaccaagcaggaggcctggctctcagccatgcaggatggaaagaaagattctattccaggaggggagctgccctggaacgccccaaggacagccaggacccactgttcattcaggattcccgcattttctcctacgggagctaacgccctcgtgc

SEQ ID NO: 60408 - DNA, 2622 bp, Homo sapiens
atatcttgtaaccaccatacgccaagcttggcacgagggcctcactgtccctagtagttgggattacaggcacatgccaccatgcccagctaaatttttaatatttttgtagagatggggtcttgctgtgttacctgggctagttatgtgagtttctatattagacatagtctcaagtttcaggtagggtttaaagtagagacactggtcagtatttcttttttggggggaactaggagagcaggagtagaagtgagatgttaagatcttatggcactaaagacttactattctgttcctacatactctgttaggatcagatagatgttatagaaatgccttttgtttctcctgcccttcttgatgtcacagttttttgtacttccagctgtctaaaggcatgaatctcctcttggagcattctcccagacccttctttagaagagtctatactaagttcttggtgccctcttcggcagccaagggtgaaggccccatagaggagaggatccaaaggagcattgaggaggcccaagaggaaaaggatgtggctcaggctgggagggacttcagttagcatggtgggggagaaccagtaccacatacccagtaggtaataaggtgtccagcagaggatgaaggtcagcaagataagcagggccagtctcagggcccggagacgaacacggggacaattgtcaaaggagcgggggagggcaaattcaccagcaggggctaggaatttagaaaatatactgtaattcagacactcagcttctgatctgagtatagggtgaattgatggaggggcatagctagtgagacagagctcgcctcctacaaggaggagaatgttgcaaaccgttttccccttcccaacctgggactatatgatttcttacccccagggattatgatagaaatatgaagccaccaagtctagacttgatggtgttcaagaataaataatactgattgcctccctagtccttgtccagctaactcagctgtttataattgaagggattcaacaaaattatctctagcatcaggtgctagacatggttagaatctcaccatggtttagtgactggtagatagctattaggtaggtagataaataaatgatgctagaggcaacaggtctagggttaaggattaaggcctgggaattggagtctcaccatggctccccttccttgtctggggcctggacacactgaggacaatgcggctatagcagatggccatggcagtcagtggcagcagaaagaggcagcagaaggtgaagaggttataggtggtctcttgccattgagccttgaagctgcctttggtgacacactgagtgaaagggactgggccagctcagtggaccgtgtggaacaggaacagctggagtggagttgaggactattagaactggttcccctcaccacccaacctacccacctatgtcatactgtctcctcccaattcatccttaattccaagtgaagcagcacagtgctgagaaacagttcatccatggtgccatgttaaagaagttggaaatatatcttgaaaatcctatcttccttttaggcttgaatatgatgctgaacagtaagtttgttaaatcttggaacttaaaacaatcctgctttctcaagtactattctaacattgcgctttataagggatgatatttctaccacctcactcatatttttagctgaaatgattttcctggtatgtctgttattttgtggaaaaagaaatattgtgtaaaatgggtgctgccaaaattccaggccattttgcagggactctgaagtgacctttagtagtaatagtcttatgtgcagtaactataatggtaaagaatgttaaataataaaatttaacattttccaaatgctattgggctgcccctccccctttttgttaaattgctgggttttccaactgaatcagtaaaaactatttctgtttagagctacaaggttaaagtgcctgctttccagtaatggagattgagtcactattaatttgataaaaggtaagctcagtaggcatcagattcctagatacaaggcatttgggaaagtgattttagcagacatgagggacatttaggaaagatgaatagtttcagcctaagagaattttgtgaactgtttggagttacgatcaggctactctgagctagttgggaaatggtctttcctcttcccatctcttgcattcatatatttctaagttttttttttttgtttttgtttttgtgctctgcctaaaaagggcttgaaaattgtgaggagtttaaaaatagtcaaagctggctgggccgcgggggctcacgcctgtaatccccagcactttgggaggctgaggcgggcggatcacgaggttaggagatggagaccatcctggctaacacagtgaaaccctgtctgtactaaagatacaaaaaactggccgggcgtggtggtgggtgcctgtagtcccagctacttgggaactcgggaggctgaggcaggagaatgacctgaacccggggggcggagcttgcagtgggcagagattgcgccattgcactccagcctgggcgacagagtaagactgtctccaaaaaaaaaa

SEQ ID NO: 60409 - DNA, 2151 bp, Homo sapiens
ggacactgtaggccacgtggggcggaacggaaacctcgcagggtcagaccgtagcgacgcgggaagtccggacgcagtagctccctgaagcggaggcgaaggggagtttaagccccagcggcggcaatggcggagaggcccgaggacctaaacctgcccaatgccgtgatcaccaggatcatcaaggaggcgctcccggacggtgtcaacatctccaaggaggcccggagcgccatctcccgcgccgccagcgtcttcgtgctgtacgccacatcctgtgctaacaactttgcaatgaaaggaaagcggaagacgctgaatgccagtgatgtgctctcagccatggaagagatggagttccagcggttcgttaccccattgaaagaagctctggaagcatataggcgggagcagaaaggcaagaaggaggcctcagagcaaaagaagaaggacaaagacaaaaaaacagactcggaagagcaagacaagagcagggatgaggacaatgatgaagacgaagaaaggctggaagaagaagaacagaatgaagaggaagaagtagacaactgaaaagggcgggagactgtggcaccttggaaggtaccacttgaaatgagacgtgctacgtgtttctgtgaagcttttccatgctgggcagagtagtctcaggcaaaagtgcctgaaaagatcagaataaaaactgactagaaataccgtcaaaaccagcacttaccaaactcagagcatctgagtagcagaatcctgttttgcttcatcaatctgaaggttatggccttttgacaagagggattctgaacgactaaattagtcagtttgctcgcttttgtttacttaaatgtatggttagatggtttttgatctgcagtcttccctagtcccccaaataagtaataataacttccatgctgcctgctgtgttccagatcacagaggcagccaaggctcaggaaaaactggggctttgcttatggtcagcctatgtttgattgcacagtctttgacaatagtagcttactaagactgctcagaatgagtaagctttaggaaactactaaaatgctgtgggagaataacaaaatccgttctctctcttcacttgacagaagcattaactgaattttgtttttcatagacccacttggcccaaaacctttctatattgcctgtagatgatcggcctgctggtgtggtagtaatctgatcacagatattcttaaatcagcagtgtggaatggtattagtcaaacatggtgccagtgtcttttacaaaaacagatggcatagtgtcagatgtaccttactctctgctactgtacagctttaggatttgtcatcacctcccggaaggtgtaaaaccccaggcttcctcttcttgtagtccatctcccagacttgtgactatggcttttcattcttcaattcatgacgagtgccaaacttgattttctctaggcacgagctttctccctctgtgcctcctgcttcctttctctctcctgcctctcctctgctccccatcccactttctcatctgcctccttttctcacttctgtcagtctgtaagctttgataacctgcttaatactccaaagtgtgagttcctctgatctcttgattccttagttctaatctcacgttttgtttttaagagatggagtctctcactctgtggcccaggctggagtgcagtggcatgatcatagctcattgcatccttgaaatcctgggctcaggtgatcctcccgcctgagcctcctgagtatctgggactacagatgcgtgccaccaagcctggctaattttgtctcatgtcttctaaaaattattttgtgaagccccttcacaaaaaaccttaagggaaatctgatggtgctcaggaatctaactctccctaaaccatcctctttaactgcttctaaaatatctctgttggcctttcttagcctttttctgtttccattcagtgctccaagcgctttttgtttctaagttgagtgcttggggtttgacaggtagtgacgtgtagtttgacactgttaacttgttaaatacagtgaaaagtttgtgagtgaagaatgctgagaagattgtaatgctttgtacaaataaaagtcttgttaaaaaaaaaa

SEQ ID NO: 60410 - DNA, 911 bp, Homo sapiens
  misc_feature (1)...(911): n = a,t,c or g
ggcacgaggcataatgtggtcaagagcagcagtcaaaaataattggtttcttttcccatgggatgagaaagtgcgttccttcccctatcacagtgtcctgaatgccatggaattggtcgaagatgacagacagctctctgtgcagcatcacattgtagaaggcagagttccccacacctcctgcagaagctaaggacagggcagacttggcagctgtgtttccatctgctggacccactcacgcctgcgtccactccaaccccccacatgaattccgtccctttatcattgatttctgatgcgaaaagtcactttgattagtgaagtgttgctttatgtagatttttaggcacacatctgttagataaaacgaggattgcctgtagagaaagcaaataaaagcaaagtccctcttgttgaaactggtgtgggagcccttgaacctcatgcagctggcctccctgctctgaccgagttccctgagggacttctccaaggaggaatgtgtgagaagcactgattttgagcactctttcatgtggacaaatttcactttatttacaatgtaaacttaaatttaaattctgtctnnnnnnnnnnnnnnnnnnnnnnnnnnnnnnnnnnnnnnnnnnnnnnnnnnnnnnnnnnnnnnnnnnnnnnnnnnnnnnnnnnnnnnnnnnnnnnnnnnnnnnnnnnnnnnnnnnnnnnnnnnnnnnnnnnnnnnnnnnnnnnnnnnnnnnnnnnnnnnnnnnnnnnnnnnnnnnnnnnnnnnnnnnnnnnnnnnnnnnnnnnnnnnnnnnnnnnnnnnnnnnnnnnnnnnnnnnnnnnnnnnnnnnnnnnnnnnnnnnnnnnnnnnnnnnnnnnnnnnnnnnnnnnnnnnnnnnnnnnnnnnnntctgtcttttctgcagt

SEQ ID NO: 60411 - DNA, 863 bp, Homo sapiens
tcgcccacgcgtccggggcagcaaaggccttttggggtagcaaaggtgggatgtggaaggccaggggagcccgggggcgagagtgggggcagatggaggctcgggaagatcagtattgaggaccatgtaggggggagggggccgggaagggacctggctggggaatgagaaaacctggggccatcgtcaacccagagacttgggtttgcaggtgaagggtatcgggccgtccatccctctagcatgcttctcacgacttgcatctttacccactagacttctgcactgacccaggggctggagcgaatcccagaccagctcggctacctggtactgagtgaaggtgcagtgctggcgggcagcaagtgtgaagacagaaaaagatggagccattaacagtcatctggggacctggagaatgatgagcaggcagccagtgccatctctgagctggtcagcacagcctgcggtttccggctgcaccgcggcatgaatgtgcccttcaagcgcctgtctgtggtctttggagaacacacactgctggtgacggtgtcaggacagagggtgtttgtggtgaagaggcagaaccgaggtcgggagcccattgatgtctgagcctgccggagggcgagggtcggagaagcggattgggtcctgggcctctgtgatgaggcaggcacacctgtcggtcttggcttgctgctagaactagggccttctgctcgcccacctcccacccctacctggacgggcccaggcttggggactctgagctgtgttaaggagaacaagggcaaggagacctccctttgtgctccctcactccctaataaacatgagtctgatgttctccaaaaaaaaaa

SEQ ID NO: 60412 - DNA, 2106 bp, Homo sapiens
  misc_feature (1)...(2106): n = a,t,c or g
ggaattcgcgagcgcagggcgcatgactggcaggcagctccacctgcagccctggtgccggtatccactaggtgaagccagctgggctcctgagtctggtggggacgtggagagtctttatatctagctcagggattataaacacaccaatcagcaccctgtgtctagctcaaggtttgtgagtgcaccaatcgacactgtatctagctgctctggtggggccttggagaacctttatgcctagctcagggattgtaaatacaccaatcagcaccctgtgtttagctcaaggtttgtgaatgcaccaatcgacactctgtatctagctgccctgatggggacgtggagaacctttgtatctagctcagggattggaaacgcaccaatcagcgccctgacgaaacaggccactcggctctaccaatcagcaggatgtaggtggggccagataagagaataaaagcgggctgcccgagccagcattggcaacccgctcgggtccccttccacactgtggaagctttgttctttcgctctttgcaataaatcttgctactgttcactctttgggtccacactgcttttatgagctataacactcaccgcaaaggtctgcagcttcactcctgaagccagcgagaccacaagcccactgggaggaacgaacaactccaggcgcgcaatgaacaactccaggcgcgccgccttaagagctgtaacactcaccgcgaaggtctgcagtttcactcctaagccagcgagaccacgaacccaccagaaggaagaaactccaaacacatctgaacattagaaggaacaaactccagatgcgccaccttaagagctgtaacactcaccgcgagggtccacggcttcattcttgaagtcagtgagagaccaagaacccaccaattccggacacattttggcgaccatgaagggactttcgcctattgccaagcggtgagacaatcgctgagcagtgagaccatcacctattgccgagcggtgagaccattgcctatcgccaagcaaatcgaggccatcaagctacagatggtcttacaaatggaaccccaaatgagttcaactaacaacttctaccgaggacccctggactgaccagctggtcctggcacttcccctggcctagagagttcccctctgaaggacactacaactgcaaagccccttcttcgcccctatccagcaggaagtagctagagcagtcatcggccaaattcccaacagcagttggggtgtcctgttgattgaggggtgacagcatgctggcagtcctcacagccctcactcgctcgctcactctcggcacctcctctgcctgggctcccactttggcagcacttgaggagcccttcagctctgtatctagctactctgatgggtccttggagaacctttatgtctagctcaaggtttgtaaacacaccaatcagcagcctgtgtctagctcagggtttgtgaatgcaccaattgacactctgtatctagttactctggtggggccttggagaacctttgtgtcgacactctgtatctagctaatctggaggggatgtggagaaactttgtgtctagctcagggattgtaaacgcaccaatcagcgccctgtcaaaacagaccactccgctctaccaatcagcaggatgtgggtggggccagataagagaataaaagcaggctgcccgagccagcagtggcaacccactgtgggtccccttccacactgtggaagctttgttcttttgctctttgcaataaatcttgtactgctcactctttgggtccccactgcttttatgagctgtaacactcactgcgaaggtctgcagcttcactcctgagccagtgaaaccatgaacccaccagaaggaagaaacgctgaacacacctgaacatcagaagaaacaaactccagacgcgccaccttaagagctggaacacttaccgcaagggtccgtggcttcattcttgaagtcagtgagaccaagaaccccccaattccggatacagtgccactgcactccagcccaggcaacagagcgagattctgtctaaaaaaaataaattatgtnanatatggg

SEQ ID NO: 60413 - DNA, 2385 bp, Homo sapiens
ttgaaagtcagaaaccttaatcccaattatgtagtgctacattcttttcatctactttaatgtttgtaaatatacacataaagctttgtctccctgcccacctggcctagtcattttggactctgtacctcaaagccataaataatatttcttctattagaagagaagcactttcagtgtggaaaaaaatctttatttcaaagtaaaatgcacaaagtctcatacagcagataaaatcagtgttactgctctcagatgttaaggttagcaacctttctggcatatgctaattcatcatgaactcccaatagctgaactgaatggcttttaagtacagctataaggtctcatggtataattccttttgttgatgccagtgacaggattttaaaagctacattccattaaaaattaaaaatacagcagcttttccaggggaactagatcccaaaattgtacccagaactcttgtctaagatattaagttaaatatcttgcatgtatatatcattatagtaaatcagtattcttgacaaccacagtgtaagaaattaaactttggctaattgttttccccatcatgaaatcagtcttttgctgtcttcataaataaattatgaccaaacattacaaatactttatacatgtttactgatttacagagaatatttaataatcagaactcaccagtttcaatagtattgtacattaaattataagcaatataaccactgctacaaaagttatctaagttaatccaagataaaaactgtgtctagagtttaaatacattgaaatagaaaaaaaaatagaaattagaaaatagtcttcaagttctgaaaatctagaagaattctccaacatctgctctcttatctcgacatttgcttctagctttggttcgagctttgaaggctgcagagttatataaatgcctttcgaaacgagaaatcttcatcgttttaagcgttgcagcatcaagcatcactgggggtccaagttcaaatacatttcgaaggaattcatttgactgcaagtggtactgcatccctgatccaagaacctccttaaaggtgtcataggtgtgtttttttacccagcaatcaatatacatgcgttcaggaccaaatttaatggtttctgttggaaaatcccgttcctccactgccctcaggacatctctgaaaactgaccgctgctttctcttgtccactttggcccggtgtttatttccatctgttgccaaggccctaagcatctgcgtcaaggactccatgtcttcataaaaaaagtcactctctattcctctggccaattcaaagagaagtgccaaagattcaccagcagctattctcatgtttacatcatcacaagagaggaggcttggaagcttatggaaatgcatctcaagctttttcttcacttcattgattgggcatatggtcagcagtagtgtccatgcaagaagagagctgatatgaagcactgtattaggagtgctgcaaataacagtagtgtctttctctttgagataggatttagtgaagatattttccaaacattccagagttgagtatagttcagtaatgtcatctgtggcaataaaacagcaaacaccaaagcaagttgcacaagtttgcctagcctgcatactagctgacccatcacaaatgattttctttaggattggtccaagagttttcaaaatctcttcactttcaattccagggcccagctgaatacaaagaacagatgctaacgctgcagctgcacgttgctcatcactcttaccttttttcaggcagcgttcaatgctatcagttaaagtcattctcctttccagaataaattcatacagcatttttgaagccagtgcatttttaataccttcaagagctgcttgccttgtcttcgcactcttatccagggttaggtcaattaatccctttctcttgtactctaggtcttcttgagttccttcctcatcaaggacttctggtccccatcttcagcaaaaactggaaggatcgctataaccactgcaatggctcatagtttcaattgatgcatcttcatcactaaaaggctgaacatttcgatgctggccaccttgtgatcggcttctgagaattaaatgggatgtccacgtaaagttcttcgcataatgttggcacctagtgatcaccaataaatgttaattttatgtaacagtgctaccagataaagcagctggcatcagcccaaagcctgaccagttcaggctgttggctcaagtgaaaataagtaataaaggaacatcaaatactgggaggaattacacacatccctttggaacaacctttaactatgtagaccttgaatgaaccaggagccagaaggagtgca

SEQ ID NO: 60414 - DNA, 776 bp, Homo sapiens
ttttttttttttagaaagccaaagtcttttattaaaggtcccgactggttttcccactgtatttccatgccagccagggtccagggacagcctctcgggaggtaccgggtggctgggcctggggcccggtagcacagcgcttaacggtatctgcctgctccactccacggggccagaggcaccagcacgatgccgccccgactcggctctgcggtggcccctgtgggcctgcccttcctttagctccagctgctgcccgcggcatccccgctcattcccgctgcgcagctccgcgcttgctatctaagatctccctccagttgtcactccaggagagcagccgtctccttgtcgggggcaggaccaggtgccgattgtggcagcaggtgaacaagatgtgctcccagcttggggtctcctcctggcctcgaactgtgtccttgtcatcaatgagcaggtcccccaagaccaccgtcttgtcccttgtcaggataattcgttctacgaactggggccccaggtgctgctccacccagcggtactgtgtagaaaacacagtctgtgagtagggcctgatggaagccggaattcagggatagggagttggctttaagcccttgagagccccccacccccaccttctgggtttctggtggtttctttttaaaatcaggatttaggcagctccacgtgcggagtaggggcggagggggcgtcggtcaggggcacgcgcccaaaggctcctccccagggtgcgctgcccgcgggttccaggg

SEQ ID NO: 60415 - DNA, 1584 bp, Homo sapiens
tttcgttggccgtacggtcgctgtgggcgggccggctgcgggtgcagcgcctactggcctggagtgccgcgtgggagagcaagggatggccgcttccattcagcactgccacccagagaactgctggtgaggactgccgttctgaggaccctcctgatgagcttgggccccctcttgctgaacgagccttaagggtaaaagctgttaaactggagaaagaagtccaagatttaacagtgagataccagagagctatagctgattgtgaaaacataaggaggcgaacccagagatgtgtggaagacgccaagatatttggaatccagagtttctgtaaggacttggtgggggtggctgacattttggagaagactacagagtgcatttctgaagaatcggagcctgaggaccaaaagctcactctggagaaggtcttccgagggttgttgcttttataagcaaagctgaaaagtgtgtttgccaagcatggcctggagaaactgacacccattggtgacaaatatgacccccatgagcatgaactcatctgtcatgtgccagctggtgttggggtgcagcctggcaccgtggcattagtaagacaagatggctacaaacttcatggccgcaccattaggcttgcccgagtggaagtggcagtggagtctcagagaagactgtgaagaggccatcaggaactggatgttctcccagagcgcagtcacctatgtttcttttatttattaaactaggtttgtattgtacatgaggtacttcatgtgatatgttttggatttagtcatattggctttatttctaagatattctattgatttaatgtgacctgtttggtctcatcagaagtcttaccattgggcatttgaacagtgtgacaggtgttccaatggcctttatcaaaacatgtttaggaaaattggtactgtgataaatttgaatccaaaatccttttaactatgggttttcaactacatgtttcttcctagcggtctctataacaggaattgtgtagtatcttgtattttgtggaaaaaggagatggtagggattggttcaacatttgggtacttagaggataaagcttcgtggtcgtataaatttagatcatttggattgatttttatacacatagattttcaggactttaccttttgttttgtttttttccttttagccatcttttgttcttgtaatcccaactagataggctttatgctcacatcattgtcccatacccacccctttctcatccccatttgcaggggctaaaggtctagatgagacttggaaggcaaggagcatcgaaatttgagatacccaggaccctttcaagcaagaatggccaaaaagccttgtgctgtctttgctcttcaaattattttcagcctccttgtcatataatcatttcaggcaaactgaggcaaccactaacagctaatgacccagatggctctatttgggtaatttacctacaacttattccaccagcctttactcctctgcccttttgtcaattttaccttataatcctttattaaaatgatgggaggtggtgatcaggacaaa

SEQ ID NO: 60416 - DNA, 1094 bp, Homo sapiens
aattcggcacgagggacggtccagctttagctctctgctcgccgccgccgctgtcgccgccacctcctctgatctacgaaagtcatgttacccaacaccgggaggctggcaggatgtacagtttttatcacaggtgcaagccgtggcattggcaaagctattgcattgaaagcagcaaaggatggagcaaatattgttattgctgcaaagaccgcccagccacatccaaaacttctaggcacaatctatactgctgctgaagaaattgaagcagttggaggaaaggccttgccatgtattgttgatgtgagagatgaacagcagatcagtgctgcagtggagaaagccatcaagaaatttggaggaattgatattctggtaaataatgccagtgccattagtttgaccaatacattggacacacctaccaagagattggatctgatgatgaacgtgaacaccagaggcacctaccttgcatctaaagcatgtattccttatttgaaaaagagcaaagttgctcatatccccaatatcagtccaccactgaacctaaatccagtttggttcaaacagcactgtggtaggtggtaggtggtagggtgaggggatggtttgtgcttaatttgttttgaattaaatctgtgtatgtctgatgtaatcacaatctgcacataacattcatcattgaattttctatgccaagtcattaagtggcatttggaaagtagattcttcatcttttatctgtaatttaaaaaattgaggcataattgacattcaataaaatgcacagctcttaatggttcagtttgatgagttttgagaaatgtatataaccaacacccaaatcaagatacagatttttaccatttcagaaagctcttttcatttcccaatggagtgtgttttactgtgtgtaatttattcatctataaagttggttaaaaactatctatgagatactttatttttcttagacaggtatgcacctgtagtcctagctacttgaaaggctgaggtgggaggatcgcttgagcccaggagtttgaggctgcagtgagctaggatcatggcactgcactcctgcctgg

SEQ ID NO: 60417 - DNA, 1574 bp, Homo sapiens
  misc_feature (1)...(1574): n = a,t,c or g
ttttttttttttatttacaaagatttattacagcacgggaggggttcaggcctggagtcagggaagaaggggaaaggggcagagcagctgggggacaaggaaaacctggcgccccccgctgtgtgccccaccggggacataaactaggcggcattcctggcatcaaagcacaaaacgcaacaaagaggtctctgccagtccatcttccaggcacccaggaggagcaagggtgattaagggaagattcccaaaatgttgaggctatggagaaaaacgccttagtcctggaccctggtagaagccggtgagagaagtggtgacttggaatcctccataggaaagtgggtagaaaaggatctaagggtacctcaaggttctcaggacctcctttccccagatcttagggtcctgccctgtgggtctcctgtgtccaggggagaggatctggggagtagaattgtgaagggcaaatccctgttcccggttttctggattttccaatgtgggctgtctcacatcccacctcccgctgggtgaatggaggaatgactggcaggggtgggcatcaggcagcaagtgcccaggttctctgggtatcagccaaaggtgggcaaacaagcaaacacagaccagccttagtcttctagaagtcagaagccgcagccctagcaggcgaggggaagagcacaaaacagggtgaggatagagtgggtttctggggaacagcgatgtcccctccacttcctcctgggagatgcaggctgggtgcctatgtgccaggctcagagggggaagggcgctgaggttcctccccaggctcacttagtgctgggtcttccacttggtcctcagagcctccatctctctcggactcatccagagggggtgggcgctcccagggcccttccagaccctggccacaggttgtcttttgcccagcagactgcctgatgaccttcaggacttcagcctggctgtcctcttcttcttcctcttcttcatcatcctcctcttcctcctcatcttcctctcttggataacccagctcccgaagctcccccagctcatcctcctcctctgaggcctggttctcattcaaattgctgatagactgcaggtgagactcagcaatgcgctgcacagctttcagcgaaggtggtgtgtaggcacaggggttgggtctcttcgacttgagatggtgcccctctcctgaggctctctggtggggggaggcttcctcctctggtgaggagtgctctgagagccggaacagcatggcaggcgttggtctcctgcgccggatctaagatcagctcaagggcttcaaacaagctggatccagcttttcagaaggagactgagccagcgcactgcaggcaccccccacctccagctgaggctcagggacccaaaggggcctgggggacctctctgggggccttggtttgggcttcttttccagtctctgtaaggctgcagaactcttcnccgcacgcgtgggtcgncccnnnnntcgagaccggtacgaagtcacccgcnngnnatgcggagctcctaggcggaaaancaccgct

SEQ ID NO: 60418 - DNA, 1157 bp, Homo sapiens
cagtggcccgattggggtgacaggcgcccaaatggccaagtggctacgggactacctgagctttggggggcggaggccccctccgcagccgcccaccccggactacaccgagagcgacatcctgagggcctaccgcgcgcagaaaaacctggacttcgaggacccctattaggactccgagagccgcttggagccggaccccgcgggccctggggactccaagaaccccggagatgccaagtatggttctcccaagcaccggctcatcaaggtggaggctgcggatatggccagagccaaggcccttctgggcggccccggggaggagctggaagccgacactgagtatttagacccctttgatgctcagcctcatcctgcacccccggatgatgggtacatggagccctacgatgcccaatgggtcatgagtgaacttcccggcagaggggtgcagctctatgacaccccttatgaggaacaggacccagagacagcagatggacccccttctgggcagaagcctcggcagagccggatgccccaggaagatgaacggccagcagatgagtatgatcagccctgggagtggaagaaagaccacatctccagggcgtttgcagtgcagtttgacagtccagagtgggagaggactccaggctcagccaaggagctccggagacctccgcccagaagcccccagcctgcggagcgtgtggacccagccctgcccctggagaaacagccgtggtttcatggccccctgaacagggcggatgcagagagcctcctgtccctctgcaaggaaggcagctacctagtgcggctcagtgagaccaacccccaggactgctccttgtctctcaggagcagccagggcttcctgcatctgaagttcgcgcggacccgtgagaaccaggtggtgctgggccaacacagcgggcccttccccagcgtgcccgagctcgtcctccactacagttcacgcccactgccggtgcagggtgccgagcatctggctctgctgtaccccgtggtcacgcagaccccctgacagtgaccctcggcccccttttgagtcctcgggcccagaattgtatcccaaagccctcccatggcctagaaaataaataagtttatgtttaaaaaaaaaaaaa

SEQ ID NO: 60419 - DNA, 1349 bp, Homo sapiens
cagtctccttctctaccacaataattagctggtggtggtggcatgtgcctgtagtcccaacactcagaaggccgaggtatgaggattgcttgaactttggaggtcgaggctacagtgaaccaagatcgcgccactgcactccagcctggatgatggagcgagaccgtctcaaagaaaaaaagttttcctggcgattcttacacatatatgagcttttaaaagcatatatttaaataacattttaatgacaaaatttgatgctctcaagtatcaaaatggaaataccaacagcaaggtttccagggatgtccaacaccacagagcagggaggcctggctgggcctccactgttgaggtcatcatggtgcttccgctttattctgattaacttttggttacacacattgaaaaatgacctaagagagttgttttgagtggcgctttttctcattgtacagctcctgctagcagtttactgcaacactgatttctctggaacctctcagtttccagtcatcattagggctgttactagcaaggacctacaagccagcctcaaaatgtgagagggctgccgacagtcttcctgtggttagctgccacagtgcccagggaccatcttccctctcctcctcccccactgccagctcctgttccagccgcatcagttcctcatttgagagatcttcttcatgggactgcagcaactggtccacagcagcctcagcaacctcttcaaaggccacatttctggcaagggtcacaatgtttttttgaagctgtgcaatgttatctgcctgggaaaaacgctgggcctgaacacactcaggccaaatcttcttccacatgctgttcattagtgctggtttgagctcctcccatgcgatggccatgtccacagcatccatgatgctgtagtttctccaaaattccctgatcatagctgtgtcctcaccatccgctgcttctaggatgtgctgaaaagtccttctcagataatgagctttcaaggtcgagattacaccttgacacgtggtccggattgagtcagctgtactgtcatgaaggtattatactcttggaattcttttttttctttttttttttggaaacggagtttaactcctgttgcccaggatggagggcaagggcgcaatttgggttaaccaaaacttccgcctcccaggttaaagaaattttcttgttttaccctcccagaaagctggaattacgggcctgcaccaccaccccgcgttaaatttttttttttaataaaaacggggtttttccatgttgggggtgggcttgaactcctggacctaggggaaccccccgttttgggcttccaa

SEQ ID NO: 60420 - DNA, 1346 bp, Homo sapiens
  misc_feature (1)...(1346): n = a,t,c or g
cggggtggcttagcgttgataacagaagattctgagatgggtgagaagtggtccacacgtggccactgtcattcctctggcataatggacttgggctcaggaggtcaagccctcttcaaggagcatgagctgaaattgctaaactttgggagttttccgtgacacccttcaaagtgctcacggtgtggcatggatcagctggggagggttgatgtggttttgccctgtggggtatctatctgtgtacttttgtctgagggaggcaactggggccacttaggccggcaggtgcccactgtgattggttgacatgataccaagcaacaggatcatccagtcaccttcaatgcagggaggatggctgacaggctccctgggtgacacttcatgcaatcagatgtcgagttggactgtgacatagagccatgtggccacactaaattcccccccacccttcccctgtccacaaccgtcattgtctgttcttgccatccagtggccactgcctccaccatggctgaggctttctctaagacaacctctgaggaagaccagagcatccaggagcccaaagaggccaactccatgacggcccagaagcagaagaagtgagggcttcgaggctcccgtaggcgccatgccaacagcggcggagatatcttcggggacagctttgccgcctatttcccccgggtgctgaagcaggttcaccaggccctcagcctttcccaggaggccgtgagtgtcatggattctatggttcgtgacatactggaccgcatcgccaccgaggctggtcacctggcccactactccaagtgcgtgaccatcacctcccgggacattcggatggccgtgtgcctgctgctgccggggaagatgggcaagctcgctgagtctcagggcacgaatgccaccctcaggtacaccaaaagcaagtgagctatctcaggagcgcccgagcacccgggaaagccaaatgctctgttcagaaccaccacacgtggccctaaagaccagtggcctgccaaggaggggaccccactggagattggggtgggtggcaccgttctggcttggggagcatgtggcgtgtggccttctgcggtttttcaagcatttttcccacagtgcaaaacactgtcaactccaatacatctgtagtgcaatatgctccaaggaaaagtagggggtgtttccgtaatcgtgtttcatgtcctcagtttcctaaatgggccgttttatcagntatctttctaggntatctttggggggatattatcaatgtactgatgtttacccttttcactctcattctcctacaactggatggnggaattntccag

SEQ ID NO: 60421 - DNA, 1155 bp, Homo sapiens
ggaattcgctttctctgtttttcatattttggaaaatatccctctttaatctcttgttttttgaaagcctaaagatgccaggtaacaaatgttgcactctagaaccgtcaccttttttatataactttatagtagtttcttccacatttattatgaccttatgaattagctcagtaacattgctctgacaggtatcactaattaaatattgttcaaaaattctgtgaagcattctgcctcattaatgtagcatcattggtgaggctttataatttttttcatctgtctgcgcagtatgttttggttttctaatgctagcaagagctacatgcaacatatcatttgcctgggctgccagcagctgtgcatcttttgtaacctgtacgtaaaataaccattagcagccagaaatgttaacacattaacctcctcttaatgtataattatggatatatgggataactgttagcatgctcagctcactgctgaagaatttatcatctctttgtatacaggcatttgatgtatgcactaacctccctaaaatcatatgctgctttgttttgttttgcatggcttttaactaaactcttatccaacagatgctgagcaggaattactctcagatgacgcttcatctgtttcacaaattcagtctcaaactcagtcaccgcaaaatgtccctgaaaaattagaaggtactcaatgtaatttcccacatagcattcactgagttagtcttgagtctgtccctctgtgttttgttttcacgtgaggaagttgaatacctcatcacagtaagttttccatattttacttatatctcccaataattacatattttatatcattaaaaatggggcgctacttttgttcagcatttatattgatttaccttaatctgaattttggcaacccgcagttcttaagaatttgtggaattagccgggcgcggtggatcacacctgtagtcccagcactttgggaggctgaggcaggtggatcacgaggtcaggagatcaagaccatcctggctaacacggtgaaaccccgtctctactaaaaatacaaaaaattagctgggcgtggttgcaggcacctgtcgtcccagctactcgggcgacagagcgagactccgtctcaagaaaaaaaaaa

SEQ ID NO: 60422 - DNA, 1608 bp, Homo sapiens
ctgaattcacgggtccacccacgcgtgcgctgaggatggtgctggggagttatcaccggttttgtgggcagggctaacagtctggacccctgtgcgacccaaggagagactgaaaaggcccccgactgaaaagcaggagcgagggcctgcctcgagcacccttgggatggcagggccatgggcccgactgcaaagcctcctggggagccggaagagccagcacaggcggcaggcacggagccacccaaatgggctggcatgggcgggagggaggcacacctgcctgcgggggacaggagggtgagccctgagaccctgcggaggcctccacaggccgccccagttgccatcatctacaggggtcagagacaggcctgccacctcccttttctgaaaagatgcctttgggtgtcatgccctggggtggcactggaagcctgggatggaaccaggaacctgggactgtgcggggacccccctcacaccccttcaccagctggcttcctgccctccctgttagccatcaccctctggtcaccaaggtgctgtgcccggccctgggctggatgctgggaacccagagtgaattcgaagtggcccggcccaggggagccaacgtgtggcccaacatggacgctcaggacagctgggagacggcaccggccgggcccagggcagtgccagagtgcccacagaggccagccctgtcccactgggcttcacctgctcgtgctgcctttccctagagccctgggggcttcctaggaatgtgccgcacccgccgccctgctgccctggcattggcctaggtgggcgctgcagctccatggccccacagaggccgcttgtccaggcagggagggccgctcagggcgggtaccatgcctgctgccctctcacaggactgccttcagggcatccggagcttcctgaggacacaccagcaggtcgcctccagcctgaccagcatcggcctggccctcacggtgtccgccttgctcttcagctccttcctgtggtttgccatccgctgaggctgcagcttggaccgcaagggcaaatacaccctgaccccacgagcatgtggccgccagccccaggagcccagcctcttgagatgctcccagggtggacccacacattgtctccactccgaagcagttgctattggtccaagaggatgctcgggtagtcttcggtggctgcaggagagcgatgctgcgcctctgcccctctcctgccacctggctgcccacagagctctccagggcagaagtcgcggtgggctcagtgggtgccctgagcggggtctctcagactgacgtcaggccttggtgggctgcactctcacctggaggctccggggaagcatctgcctccaggaccattcaggctgttgacaagtcaactcctcatggctgtaggactgaggttcccaagtccttgtccctggtcctgtggtccctccaccttcaaaccagcaatggtgcattgagcaaattgtggtcaaatatacatcacatcaaatttaccatcttaaccattgttaagtgtatggtttgtggcattaaatacattcacattgttgtgcaaccatcaaaaaaaaaa

SEQ ID NO: 60423 - DNA, 1235 bp, Homo sapiens
ccgccctgctatgaggacgccctctacttcccggagctcattgtccactttatgacagctgtctgtcatggggatgggcagggtgctctctgagaccccccacgggccccagagtggccccctccccaccattccaccatgggcttagatgcccgagtgattgttgtccaaaacaggcgggaaaacagaccagccacacacaaggggcaggggtgagggtgggggtgggggtccttaaacagactaaaatgcagttacctgtggtcattttggaggaagtggaagcctaagaatcgcccccagcatggcttcatcccccaagatggccgatgatctggcctgaaggcctctcacaaagggcaggagaagaagcttccagaaaggctgggatggaggaggagtcctgcggccagctgttgcctgcagcagaggctgcctgtggacacttccctaccggggctgaggccatgctgggagcccccccagtgacgcagaagcacaaattggaggcttggggccatgcccagccaggttggcttccctggggctgaaaagctggctgtggtggcaccatggccttggccctgctactcacccaacattcccatcctcccctgataggcccctcctccttgcctgccctctctcccgctgctcagggccagtcactccccccacatgcagctacccctacaacctggggttccttctcagggcctcacctggtccccacatcccctggcctctgctcctgcctcccaaagtccatgtttgcctccatcagccacacacacgcagggacgcccgttccttgccctcccggacttatctactcttcactttcctgatgatccatggggcccaggcctagagggcatccgaggggctgggccttggccacagcctcttggatgatgtccttgctccaccacgcaggcccttgcttctcccatcaacgagtcttggcccaggggacactgaccctcccccagggaggagagaggagttccttccctttcaacgagggcttccacgccctctaaggggtggcggggaagggaggaggctgaaaaaatgcagattaaataaaggtatggaatggaaggcctgtgcattcctgggtcatgggtctaaggcctccactgcaagcattatgggcccccatggttcagggcacgatgaggggttctgggaagggactcaaaattgggctccagcgttcccaggaaccaaga

SEQ ID NO: 60424 - DNA, 2132 bp, Homo sapiens
ttttttttttttctgtttatgacactttattgatgctgggggggtggggaggagacctggagaaatatgtgggggcaagagtccccaggtggggacagggaaagtgttgaagcctggccactactgggcagggaagacagagttgccactgtatgcacaggggatgagcagctgccggtactccaggggcaggtgccgctccactagcacgtgcagtgagacttggtcagtgaccaggccctgccgccgcatcagcagctccaggtcctctggcttcacagtcttgcggccagcatgagcagcaaatacctccagatcatcacaaagatgctggaaatatttatctaggcacttctccaccatctcaagagccttcctctccatggggcatcttgggcatagaagctaaagagttttcacatagtggctcagtcccagccttgtggggatcttgccggggccctggggccggtggtccggggcctagggggatgcctgaccaacagaggctctgcaggctctgaagataagactgcagcaccaggcgctggggctggctcaagaaactgatgatgtcgcctggcctggagagactcaggggtgctggaggccgactctggacttgctgccctgccagaggcatcctcatcccctgaagatgctcctggcccgtcagcctcagcagtcccctgggatccctctgcttctgtcacctctgtgtgtccctcagcctcttctaccctgctgggtccttgtgctcctgttgcctccatttcactcacactcacaccttcttcttccatctttttctctgcctcttcaactccatcgtgtaagggctctacttcatcttctccagagacaccactgctggtgctcaggaagcccagagcaaaggcattgacctcctctgcctctcctgccagaaactgggctggtttcccagggcctgagtgaaggggagagaatacaggccggagacgcagcaggccaaggctgcatagctcagagaagggtaaagatggaccagcagacccagtcctgcccactgaggaaagacaaagccagaggcagcaccaggacatggatctgaagtctcctggcccaacatggactctgctcttggatgaaggaggcagccacagccagggtgctctaggggcacagaggggcttgaggaaggaaaactaccattgtcaactctcacccaagctaaatttggctccaggccaccagtgccacacactcactattcttctgcagcccaggcccactgctctgtgtcttgcgaccggcagcctgctcagcgtcttcagccccagtgtgaggcgtgcagggcagggagtgatacacgttgggggagccaaccatgggctgagagaacggctgggtgtcctccaacacaatgtttggaggagccagggaagtatctcgcagatcccgcaaaaaggcacccacgtctacagctcggcgggctggaggtctgcgggccaagccaggcctctgcactgactgtggctgaagaggtgtggcaaaggtcaggttgagggatctggtgagggaagaggcatcagcattcccttgaggctcttgggagagagacagcccctggtccactccctgctgaaacactgacagtctcagcctctgtttcctcctgccaggggccagcagacctggagccagggttgtggggggctcgagctcaggaagttgcagctccaggctgccgcaactgctctcttgtctggagggttggaccgcctgcggtgctggcactggcttcactaccgactcaggcatcaggatggaagattctggggcagttagtaggatgttcttcagcagcgtccgaggtgtctgttcctccaagtgcccactggcctgaatatgggccgatctgccaacagacctggctccatgggaacgccctctggctatcgtccttgtttggccactcaacttcctgggggaagccgtttcaagcagggctctccgggctccagcccgagcactccggggtcgccgcggggtgcgcgggtccgctgtatccagcacgcgtcgcagcagcgtgcgcggcgtggagtcgctgtcagggttgtggtcagccatcgtctcggccccggacgaaa

SEQ ID NO: 60425 - DNA, 591 bp, Homo sapiens
atcgagaatatagtccctgtggtggaattcgtggtgggagctcagggtctcccagcaccctgccgccctctgctgggctctgcctgacaccggcgaggctcagtctgggaggaggtggagcccagcgaagtgtagccaagcagggacaaggagagaccgcagcctcgtggaaaaccgggactggaggcaggaaacaggtagggagggaagggggtggccgcaaactggggtgggttggggaaggtgcgaaaggacgacgccccgtagcctaagggcagaatttcaggggggtggagggtgcagagtgaaggggagggcattgcagtgcgcgcggtaagggtttctcatctcacctgagtgtggcgttcgattcactggcagcaggaaagacggggatcagagaagagttaccactggcgcccagcttccctggcctgatccccagccccctcccacacctgtccatgctgaagaccggggagagcagaagcctgcgtttctgaggggagggtgcctggggataagaacaaggtgggtctgggggtaagggggtcaggacttattttcttcttcgatttttcataggacaac

SEQ ID NO: 60426 - DNA, 2940 bp, Homo sapiens
ggtggaattcggatccccacgccggcagcaccaaggcctctgggtcagcttctttaagggcaagcgcccttagagaagcagcacggaagcaaccaatcaactggtttctccaattagcccccaagtggatcagcctgctgaactgtcggctagggttataggtggttctgagtccttccggaagctgccgaatcttagaagtcgcgccactgttgtggcgatggaagaaggcgaagctctacagaaaccattttggttgagggaagagtggttttaaagttaatttggaaaggagccggcaagcaaccttcagtcggtgtgcggtttttacagttgaactgtttccagccgctaattatgattgttttagcggttcgtcatctgaaaactgcattctgcacggcggtggtggggggaggacgaggatggagaagcctgggcggacatatttattagctgcggtcctaagtcacgtgtgacattctgtatccagtctatcggttatcccaaggagaacgccctgccggaatggccaatcgccttgagatgtccccgccctattcgccatcttaacataggggcattccccacagctgcaggcaccagtggaagcgtcttaaggggaccatcttggttgagggcggaagtgaggactgtgtcgcgctggaggagcccacagattctcccggacccacgtggaagcggcactcaagatgctgcgccgcgaggcccgcctgcgccgcgagtacctgtaccgcaaggcccgggaggaggcgcagcgctcagcccaggagaggaaggagcggctgcggcgcgcgctggaagaaaaccgcctgattcccactgagttacgccgagaggctctggccttacaggggtccctggagtttgatgatgctggaggtgaaggtgtgaccagccacgtggatgatgaataccgatgggcaggagtcgaggatcccaaggttatgatcactacctcccgagaccccagttcccgcctcaagatgtttgcaaaggagctgaagctggtgttcccgggcgcccagcgaatgaaccgaggtcgacatgaagtgggggcactggtgcgagcctgcaaagccaacggcgtcaccgatctgctggtcgttcacgagcatcggggcacacctgtggggctcatcgtcagccacctgccctttggtcctactgcctacttcacgctgtgcaatgtggtcatgcggcatgacatcccagacctgggcaccatgtcggaggccaagccccacctcatcacacacggcttctcctcccgcctgggcaagcgggtctctgacatcctccgatacctatttcccgtgcccaaagatgacagccaccgggtcatcaccttcgcaaaccaggacgactacatatcattccggcaccatgtgtataagaagacagaccaccgcaacgtggagctcactgaggtcgggccccgctttgagctgaagctgtacatgatccgtctgggcacgctggagcaggaggccacagcagacgtggagtggcgctggcacccttacaccaataccgcacgcaagagagtcttcctgagcaccgagtgagcacactcaccactcagtcaggacatggacttggaactcaggatggggctgtcatagacagacccaccagtaggaactgtcacagaatggcctgctgaactgggatgtggaactgtggcgggtggagaggtctgaataaaccgtctgtgtcatggccccgcctgcctctgagtggtcaggccaagtctgcagggcaaagcccatgggatccctttgggtggggacctgatggctgtgggacgtgcttgggcctggagtcagtgtgggggttaacagagagagagatttgatgctaacgtcccctcaagagtgagggtcatatgagctcttcagcaggcagatgtgggtagcagggccagcctgtgtcaggggcagcccaccaagttaactcactgagtggaagccgccagtgtgccaacgcggaggggacaggccacacccagtgctcagcagctgattcctcatgtaagtggcatcatgtggtatttgttttgtgtctggcttatttctattaacataatgttctccaggttcctccatgttattgcaaatgataggatttctttccttgtaaaaaataacatgccacattttcttaccaatccgtccaccaatagacacttaggtcgttttcatagtttggcagttgtggaaatgctgcagtaaacatgggagtatagctatcttttgaagataatgatttcatctcttttttatatgtatacccagaagtgggattgctgcatcaaatggtggttctatttttaattttttgaggaaccgccatactgttttccataaaggctgtactaatttccattctcaccaacagttcactagggttcccttttctccacattgttgccaacattctttatcttgtgttttttaataacagctatcctaacaggtatgaggtgatctctctcattgcggttttgatttgcatttccctaacggttggtgatactgagcatttttgcatacaccgggtcatttgttctttgttgttgacttgagtcccttatatagtttggatactgctgtggcctgaatgtttgtgtcccccaaaaattcgtatattgaactctcatccctaaggtcaacagtttagggaagcgattaggtcctgaggactctgccctcttgcatagaattagtgctcttataaaagatgcccgagggagctcttttgcccctcctgccatgtgaggacacagctagaagctaccatctgtgaaccaggaagcccccctcaccagacactgaatctgctggagccaccatcttggacttcccagcctccagagctgtgagaaataaatgcctgttgtttaagctaaaaaaaaaa

SEQ ID NO: 60427 - DNA, 1451 bp, Homo sapiens
ttttttttttttgaagttcaaatgtatcaaattattaaaaatgcagcatttttcacatgagctttaaagatgtggaagatggggtacaattaaaaccatgagagttgtgcagggaacagccgtagggcctgtttgcaccttcagatattgcctgctcccaaaaattcagacccccagatgcagggcaagacaataagaaagggtgagtgcaagcaaggagagcctcctgctaagaggctgaggtcccctctggttccaaggatgggatgtcagccttgaccttccggggtctgcagtggccagaggctgcctgtcgccccttcctcctccccttcttgggcactgtgggagcttctgggtcctgctggaggctggtcccctcaggccgctgggttgcagtcctcttaggaaggtctctctttgcccttcgtgtcctggaaggggccttgcttggaggcaaagcgtcctccactctgtcctcaggactcagctgtgtggccttggatttctttttgcgggacttgcgccctgcaggacactggtgttggagttggagggtcctatcctgcccaggggtgactcccagggttgcagggggatagggtggagaagggtgctgtagcccttgcaggcgtgaagtcctttctgctctcttagcctattacattaggagtagcttacctttgggtgccaacggtccaggatccccctaaaatgggatggggataattcaggaatcagcctgggttggcacaggggcggtattccttggagaggcaggactcacacacacccatccagatcagtgtagcttctcccttaggaagcctctaggacatcccccatgttagagtccacatcagcaaagctgctctgcccttggctactttcacttgggctacctgccttgggctacttccactagctgcaactctgggacgcatgggtggggagggatgtgaccctcaggaacagtgtggtccttggagggtctagacagaccctgagcatcaccaccccagttattgtgaccccacgtttccacccatcagcctcctggggtctctgcctgtgtgaacagtagggcccaacctggaaccagatggtacggccatgccggtcctgcagggagctcatgcctggcatgccatagcagcgcagccaggctcgaaaggcagcaaagtcctcctccccgctctctgacccgtagcctttgccccctgtgggacagaggaacaggcagagatcagagggcaggctcaggttgggaggagtggggagcctggttagacctggcccagacctcagctacacaagctgatggactgagtcaggggccacactctccctcctctggtgatgtgacctcagctggtttcttcccactcggccatgggtttcccatcctggagtgggattaagaatccttgtcctggccctgtgcagtggcc

SEQ ID NO: 60428 - DNA, 2727 bp, Homo sapiens
cggacgcgtgggcggccaccaggaccccagccaggccacggggacaacaggcagcagcgtcagctgcacagaggagaaaaagcatagcaagtcacagcaactgaaaaagatttttcaagagtatggcactgttggcgtgtcattgcacattggaatctcattaatttccttgggcatattttacatggttgtgtcaagtggtgtggacatgcctgcaatcctgctgaaactcggatttaaagagtccctggtacagtcaaaaatggcagcaggcacaagtaccttcgtggtggcctatgcaatccacaagctgtttgcgccagtgagaatcagcattacgctagtctctgtgcccttgattgtcagatattttcgaaaagtgggattttttaaacctccagctgcaaaaccttaatgaactcttcagtcgtacacactgaaaacctatttcttctaaattacatgatttggattggttttagggttttagggttgtagggtttcttttggagaggtagggggctaattgctatgttctcatggataaactttgccagcaaaaatcaggcttttgaacaattttaattttttgcctcataaattttgtgaatgctattcattatagggcttgtatatataatctaaaatgtcagcaaggcatcggagatgggttaacatctcaaaacaaaatagcctacaaatgttccttgtgggagactttggcgagggtctgtgggtaaaagcaccagggggttaatcttggctcagtttcctaaaaagcattgattaatttaactggcttttaaatatccccttccgctgatatttgttgtcagctgcctacagtttaatatgcagcgttcacaaaacagctgccagtgctacaattaatgaagcaaaacttaatatgtaatcacaatctaaattagcatcaatactttgacattcattacattggtttgggggaagaaaagtagttctggtatgtttcattgatccccagataccttccaatctggacatgatggggctgattccagatggtttttctgaaatttcattaaggtaggtcagcgtcatttgtctctgtttaggtaaaatataaaaaccctgcccagtagcagtggcatcgcttggttcctgatgcccatgttccagaggaattcggataccacaaacagctaagacaatctcagcttttcttagacaatcttctatctcaaacttcagacattccagaattgtcatgatgtttacactgtctgagttaaaaatcctgttcaagaaaaaaaaagattttgtatcacttcttaaaaaggaatattcatagcacttgtcacaaatagaaggcaaccatgagataatacaagccagggagaggcttgtattacatgacaggtgtaattagtctgctgagccagctttacccaatgaagggcatatgtgttagagagattagctaagagtagaaattcgagcatagaggccaggtgcggtggctcacgcctgtaatcccagcactttgggaggttgaggcaggcgtgtcacttgaggccaggagttcgagaccagcctggccaacatgatgaaaccccgtctctactacaaatacaaaaattagccgggtgtggtggcacacgcctgtagtcccagctactggggaggctgaggcagcattgcttgaacccaggaggtggaggttgcagtgagccaagatcacaccactgcactccagcctgggcgacagagggagacactgtctccaaaagaaagaaatcccagcgtagatccaaactgagacactgaggcttcgtccttatagtagtcaggagcaggcgattgaagtaattctgtcctgcggggttcagcatcatgcacgttccccctgggccattctctgatgcagggcacttgctccacactctgggaacccagattcaccagtctgccctgtcacgtagttgaaggagttgcatttatctttctggctcctaattcctttaaaattacatttgttgcagaacctccacaaggctaaataaaattacatttgtgaccatcagagaactgaataaaccattaactggccatcctggttttgcagagatcaggttgttgacagttcctggttgacccacagctacccatgtcagttatctccactaacatatccaagaatctttgtaggacaatttctccacctgcaaggtctttcaggtagaactcttcttttaaggcaattagcccattgccaaaaggttttactgtcttaaagctgtctttctgagatctaattccaaggacttctccacagctaagtgagatgcctcacaccattaggtgatgctttggacagaacagagtattttcatcttgtgtttaaagcaattccttggcttcggctcctcaccactttctatgccagtctcccatttatgtccctagtaatgcctatgcaaaaaaaaaaaaaggaaaaaaaagaaacccgggggggaaaccctacgggttaagggcttaaaatctccaactttggttaggagtaacaggagcgtgctgagcgggcaagcaataaaacaaatcataccaaaaagccacattgctctctcctaagccccaaccccactccactcctgtggccaggggtccaaacagaaaataaccggagaagacaaggaggtcaaaggatcagggaactaagcattatgtgaattcaccagcaagatgtac

SEQ ID NO: 60429 - DNA, 1555 bp, Homo sapiens
ggaattctgagaatggatatttatataattttagagtgaaagaagcctttctttgtgtgacacctatggaaaaaaacagaaagaaaggatggatggaatttgactgattaaaaatgctaaactcctatatagtaaaaaataacaaaccaaattgagaaaacaatatatgctacaaaaagtatagatctcaaatacatattaagagcttaaacatcactacttttgggacatttccatgatctacaatccccttctcaaccaagtgtttccatttcattctttccttattgaacgttttcattattgcttgtttaattgcctgtttatccctattaaattggaagtataagaaggcagcaaccatgtctattttgcttattggtgtatccataacacctaacacagtgctacacaaagcaaatgctgaaaacatacttattgaatgagtgaataatgaatgaataaatgacattttataattcaaggagaatcaaactttccaacagaaaattggaccaagaacacaaactggcaatgcacaataaactaaaataacctactaataataaatatgaaaaagtgttttaatatactagtaataaaaaatgcaagttaatatgatatattcctttttatatgtcagaaaggcaaacggtataaagaattaaaattcccagggacaaaaaggaagtacagaaataaacctcttacagagtcaacaggaatgtaaattgattccacctttctgaaaaaatattttggtaatatagttttcctgcatgcctagtaattccactttagggaaattctcctttaaatgggtcagaaaataaaatgagctaagatgtatttattcattattcaaaaagtatatgcaagaaaggatgtttatagcagcattatttggataagcagaaaaatgtaaataagcctactttatagggttggttaaatatggtacatcctttcaatggaatactgtgtaccagttaagaataagcaccatatgtgtatttattgaaatgtacgagctatattgttagatgaaaaaggaagttatagaggaatatttatagtacgatccctttttaaaaatatatgtatgcatgtgtgcattaaagagtctgaaaggatacttgccaaagtgtaaaagcatttatctctgggaggtgagatttggagcaattatattttctttttgcatatctgtaacttctaattttccacaatgagcatgtagtgtctgtaaaatttttcagggaataaacaatgatgttcacaatatatattaaatgaaaaacacatgttataaaacagtatgtatagtatgacacaatatttgtaaaaaagaaaattatatataaatatatctatgtatgtatatatatgcataagaaagctagaaggacatacactaaaatgttaatagtagttatgggtagtgggattatgggtgattattttttctttttgcttttctgtgttttctaatttttctacaatgaacatgtattacttgtgtaataaaaactaataataaaagttttaaaaaatg

SEQ ID NO: 60430 - DNA, 789 bp, Homo sapiens
ttttttttttggtagttaaaacagaaggtttcaataaaatcgacagtctgataacataatacccaaaagtccaagtttccattgaaaatcattcatcataccaagaaccaggaaaatctcatactgaatgaaaataggcagcaagcacacactggcaataaaatgagagaagcgctgggattgtctgacaaacattttaaagcaagcaagcctgatgaaaatgatttagcgagtaattatgagcacacttgaaataaatggacaagtagaaagtcttagcaaataaatacaagacttaagggagaaccaaatgaagtattagaagtggaaaaatacaaccaccaaaataaaaagtctggcacataggctcaacagcagaatggatggtgcagagcaaggaaatccatccactgccaatgaaaaagtagaaattacacaatcttagcagggaaaaaatagactcggggagaaagtgaatagaacctcaggcacctgtgaaactacctcaaaaggtctcactttcatgttgtcatctatgtctggaaggggaagaggaagaggacaagcctgaaaacataaagaagtaaatggctaaaagcttcccagagttggcaagagacataaacctatatgcttaagaagctgtgaggaccccaaataggataaaacccaaagaggtctatggcaagacacgtgaaaaaataaaatgttggaaactaaagacaaagaaaatatattgaaagcaacagagaaaggtgacaccttacctagaaaggaaaaacaattccg

SEQ ID NO: 60431 - DNA, 1344 bp, Homo sapiens
actctgttgaccaccgtgaagttcaggtcttaagccaaagcatgccactcactccgcaccaggcagtgctacgtggagagaggccctacatgtgtgttgagtgtgggaagtgctttggccggagttcccacctccttcagcatcagcgtatccacactggagagaagccctatgtgtgcagtgtatgtgggaaggccttcagccagagctcagtccttagtaaacacaggacaattcacacaggtgagaagccctatgagtgtaatgagtgtggaaaagcctttagagtgagctcagatcttgctcagcatcacaagatacatacaggagagaagcctcacgaatgtcttgagtgtcggaaagccttcactcaactctcacatctcattcagcaccagcggatccacacgggagaaaggccatatgtgtgtccgttgtgtgggaaagccttcaaccatagcactgttctgcggagccaccagagggtacacactggggagaagcctcacaggtgcaatgagtgtgggaaaaccttcagtgtgaagaggacactgctgcagcaccagaggatccacaccggggagaagccctacacgtgcagcgagtgtgggaaggccttcagcgaccgctcagtcctcattcagcaccacaacgtgcacaccggggagaagccctatgagtgcagtgagtgtgggaagaccttcagccaccgctccacactgatgaatcacgagcggatccacaccgaggaaaagccctatgcatgctacgaatgtgggaaggccttcgttcagcactcacacctgatccagcaccagaaagtgcacagaaagttgtgacccatggctgacacaagaatccattctcacagaaactgcatgtggaaccacaagcagccttcagcccaagagaagtctctgttaactctataggaagcttttctttggcgattcagtgtcacaaaataactccagaaagaagcacttagcgtgctgttcctgtggaaaaacttcagagactacctgttttattttcctcaacatcttgaagttatgttggagagtaatcatacaattgtagagaattttggtaaaaaacagccataattctttaacattagtttatttgaactaagggaatttaaggcataagaaccattatcccaataaaatcttacattccaaataaagttctttttctaagaacattacatgcccttcctaaatatcaattaaccatactaattattgcacttaaaatttgaaagtcggactatttttcagtattctcttaaaagactaaagtattgtatggataaagtgatataaaaagataaaaaaaaaa

SEQ ID NO: 60432 - DNA, 1151 bp, Homo sapiens
  misc_feature (1)...(1151): n = a,t,c or g
ttttttttttttacaagatgccacttgcatgatgctgtgggtgccttttcattgcaatgcctccatttcagatgtgagaaagttctgggcctgtagggcatttcaagcctaggtgtgtatgggggaggaggggatagatgttcatctatgcaccagatcctcagatccccgaggtgggttgcggggaaggcccagggagctgatggataaagccacagcttcagtcctggcagagttcactgccaggaatggctgctgactgcggggcactgatggtgggcagccagggccgaggtgcaaacttcttcccacaaggagttccaggtgttcagtggcagccagttcctcagttaatgggtcacctgctgctgcggccactctctgttgatgcagtaagccggttgaggggcgtcaaggggctggacaggacaccccgcaaactttccagccattcctgctgttccttctcactggggcaagtgaggacaaatctccgctctggggtgacaatggtgagtccggctttccagcgatttcctcggatgcccttgggcaggtcttcgtaggcttcatatccctgctccttgttcccaagaaaaacctggccctgctcgaaggcatccagtgggttcttgtaatagagcagcctccgctcatggcaatccagggcgaaccaccttttcttgaaaggttctttctgctttggcccagtcttttccatgaagccttgtttgaggtagttcctggtgaggaatggcacgagctcagactctgggagttcaggaaaggccatttttaggtactgcagacgggctgcacggagggcattgaaccagtccactatctccttcccactttcatgatacacaaacaggttcctggtgtggccatctctcctgtaggtgatctgcagcccatgggggtgccctatcttctctgtctggaaggtggcattcaagtccttaatgctgatgacagctttggggcttttaccctgttcctttgtgaagtacttcaggaggccttctcttgccagaagtacaaacttccttctcagaaactgtgagttgtcccttcctcgcttccacaggaatccttctcgggaattccaccacactgactatggtctacgatctcaatnnnntcnccca

SEQ ID NO: 60433 - DNA, 2654 bp, Homo sapiens
cgggacctgctgacacgctgacgccttcgagcgcggcccggggcccggagcggccggagcagcccgggtcctgaccccggcccggctcccgctccgggctctgccggcgggcgggcgagcgcggcgcggtccgggccggggggatgtctcggcggacgcgcgctgagtgaatcatggatgagctgcactaccaggacacagattcagatgtgccggagcagagggatagcaagtgcaaggtcaaatggacccatgaggaggacgagcagctgagggccctggtgaggcagtttggacagcaggactggaagttcctggccagccacttccctaaccgcactgaccagcaatgccagtacaggtggctgagagttttgaatccagaccttgtcaaggggccatggaccaaagaggaagaccaaaaagtcatcgagctggttaagaagtatggcacaaagcagtggacactgattgccaagcacctgaagggccggctggggaagcagtgccgtgaacgctggcacaaccacctcaaccctgaggtgaagaagtcttgctggaccgaggaggaggaccgcatcatctgcgaggcccacaaggtgctgggcaaccgctgggccgagatcgccaagatgttgccagggaggacagacaatgctgtgaagaatcactggaactctaccatcaaaaggaaggtggacacaggaggcttcttgagcgagtccaaagactgcaagcccccagtgtacttgctgctggagctcgaggacaaggacggcctccagagtgcccagcccacggaaggccagggaagtcttctgaccaactggccctccgtccctcctaccataaaggaggaggaaaacagtgaggaggaacttgcagcagccaccacatcgaaggaacaggagcccatcggtacagatctggacgcagtgcgaacaccagagcccttggaggaattcccgaagcgtgaggaccaggaaggctccccaccagaaacgagcctgccttacaagtgggtggtggaggcagctaacctcctcatccccgctgtgggttctagcctctctgaagccctggacttgatcgagtcggaccctgatgcttggtgtgacctgagtaaatttgacctccctgaggaaccatctgcagaggacagtatcaacaacagcctagtgcagctgcaagcgtcacatcagcagcaagtcctgccaccccgccagccttccgccctggtgcccagtgtgaccgagtaccgcctggatggccacaccatctcagacctgagccggagcagccggggcgagctgatccccatctcccccagcactgaagtcgggggctctggcattggcacaccgccctctgtgctcaagcggcagaggaagaggcgtgtggctctgtcccctgtcactgagaatagcaccagtctgtccttcctggattcctgtaacagcctcacgcccaagagcacacctgttaagaccctgcccttctcgccctcccagtttctgaacttctggaacaaacaggacacattggagctggagagcccctcgctgacatccaccccagtgtgcagccagaaggtggtggtcaccacaccactgcaccgggacaagacacccctgcaccagaaacatgctgcgtttgtaaccccagatcagaagtactccatggacaacactccccacacgccaaccccgttcaagaacgccctggagaagtacggacccctgaagcccctgccacagaccccgcacctggaggaggacttgaaggaggtgctgcgttctgaggctggcatcgaactcatcatcgaggacgacatcaggcccgagaagcagaagaggaagcctgggctgcggcggagccccatcaagaaagtccggaagtctctggctcttgacattgtggatgaggatgtgaagctgatgatgtccacactgcccaagtctctatccttgccgacaactgccccttcaaactcttccagcctcaccctgtcaggtatcaaagaagacaacagcttgctcaaccagggcttcttgcaggccaagcccgagaaggcagcagtggcccagaagccccgaagccacttcacgacacctgcccctatgtccagtgcctggaagacggtggcctgcggggggaccagggaccagcttttcatgcaggagaaagcccggcagctcctgggccgcctgaagcccagccacacatctcggaccctcatcttgtcctgaggtgttgagggtgtcacgagcccattctcatgtttacaggggttgtgggggcagagggggtctgtgaatctgagagtcattcaggtgacctcctgcagggagccttctgccaccagcccctccccagactctcaggtggaggcaacagggccatgtgctgccctgttgccgagcccagctgtgggcggctcctggtgctaacaacaaagttccacttccaggtctgcctggttccctccccaaggccacagggagctccgtcagcttctcccaagcccacgtcaggcctggcctcatctcagaccctgcttaggatgggggatgtggccaggggtgctcctgtgctcaccctctcttggtgcatttttttggaagaataaaattgcctctctcttaaaaaaaaaa

SEQ ID NO: 60434 - DNA, 1205 bp, Homo sapiens
  misc_feature (1)...(1205): n = a,t,c or g
cctcagtctcccaagtagcagggattacaggcatgcaccaccatgcctggctaccttttgtatctttagtagagacagggcttcaccacgttggccaggctggtctcgaactcctgacgtcaagcaatcccccagcctcggcctcccaaagtgctgggattataggtgtgagccactgcacccggcctccaagccagcatctttaatcttacagatgcgtgcccctggttctctaaaaaggcttgaaaagtttagtcttcctgaagttcccctacgtcccaagtaggacacagagagaagaacctactccagaaatggactggtccagtcacagtcacccccactttaatccgcaggcagcctggaacagtctagaggagatttgtataaaaagtagataccaaggctggcgtggcagctctgtggcagtggctgggttggtgggcactacagtcaggcaggcagccatggccactagtgtcacggccccagtgagggcccctggcttcgctcacggatgtggtccaagatcaggtcggtggctcgatccagcaacagaggcagcagctcctgctcagcaggggagaagcagcccagcacatgggcctgaaccgcctcagggtgcgccgggcgcccgatacccacccgcagccttggcattgcattggagttgaggcagctaatgcaggaacggactccattgtggcccctggcactgccccccagcttcagagccagtctccccaggggcttgtccagctcatcatgcaccaggtagacttcctcggcagtcagcccaaacagctccgcagcccgggccacgctgcgcccgttggcgttcataagccgccgtggccggagcaggaccagttgggcatcccccagcggggccagggcgaggtcggcggcacagtgccggtcgcgcgtccaactctccgccacacccagccgccgcgccagctgccccagcaccgccatgcccacgctgtgtcgcgtgccgggcagtccgggattccccaggccagccaccatccaccgcttccccggggggcgaggntccaaaacacatcggctcatggctctactcagccgctgtccggcacccaaaaaaccgcccggcctcatgctgcccccattcgtacgcgatgggtccccccgggtnttccggngcngttcccagtacatcgggaccccggatncacttt

SEQ ID NO: 60435 - DNA, 2362 bp, Homo sapiens
ttttttttttttacaaaagagtaaacattttattatttgtacatgaatcagtttggtctgaggatacacaagcatctggctaactcataaaagtagcctgaagtgattgataggagagtgtttgtagtcatttccatttgctgccacatcccttacattatctacttgctaagcactgagaggcccagaatggacacatcaaactgtcaggaggaacatatgggacactggcacctgcaatggtttttttaaaagcagagaatgcagagcagttcacagactccacttcaaagccaggggtgtgtgggaggtctcccggggaagagctctgcacaacaggtttccctgggggggccagagggcctctcggggaggaacagaaaaaaaccagccaggagtgctaccgaccagcctcagccagaatgctgtcagaacaaggccccaaacatggcctggcctcagtgatctggggatgaacggtgtcacaagggaaccacctgaagggtgggcagaggcccccgtggaggagccacatactcttcctctctcagcagccgcagcaggatgttttttttattcttgggccagctgtagacatgagtgttctgaagccaggtgggcacatgctccttcttagcatttgggaagagcacagggatgaatctgaaattcatgcttccttgttttatgaactcaatctgcatcattcgatgaatgtacttagtatgtaagccatgctcatcctcgtccagctgcgactcagcgccttccacgtcctgtttgtatttggggctgattgctacgattatcatcacggtcttatccctaaggtagcgctccatccatttaatgatatcaatgcctcggattctatcctcaaatatgtcaattgcagtttggaagccatttaccaacaaaaagttcacgaatttcaccacctccatagctgtgtccatcgaataagtgataaagactttccgcaattcttctggcaaattgcttgtttttagagttcctctggctggagggttgctagggggtctaggcacagcagctggggacggaggctggggaacctgtggtctcagctctgcagggcactccaaggactccccaggagcaccagctctattaggtggctggtgatgtggctggtcctggtgccttggaagccccggaaaggagcagtctctctgtgcgggcctctcttcttggtcccaggggctgggataattcaggataaccttctgcacagggtgcaggcctctcacactggctccaggcaggggctgcccaggcagagccggctggatcacttgctggtaggctgctcgagggtagtcatggccatatggcacctggtgatcgggacttccaggacaatggtaatgatagttccatggagcatgtggggaaagattgggaggcagcatctgtgcacatgctggatacctctgaggttcaaactgagggaactccctggacctgagaggtctggggaggtcctgggggtaacacacggaggtgaggggcaggggcctttccagctgcctgatgcccaggacatcctggggctgggaatcatatcccgtgtctatggttggcagatccaggcctgctcggttcctgtgaggctggggccgttgcaccatctcctggctaccgcccaaggagtctgctgaggcattaggtaaactttggtctgatttgtctgagtcatggccagtgtcaggagaagccgctgaaagctgagataccagccattgattacgtttttccataaatgaaaactgatgctctgcagggagggctccaaccacagactcagacgcaggctcgctgactgcagagcacccagaagggaaagctttgcccaggcctgggtgtctcctgcagaaactgtcttcactgtcctccagaacttgagtgcgcaggcaggtgacctgccgggatacaggccgctggtgatttgcaagtttcagggttgagtgagcttgagaaaagtctccggaggaattgtgaagcattgtgggtgcagacaagctgttgggtgccatgttccttatatttggagcaggtggttctgattcctcttccggggaatattctgggattggtttcagcaactgacttgggtatggttctgattcatcaacctccacaggaatgcttcggttcattctagtttcttagatccaccacggacagacagactgggcccggagggtagtcggctctcggcggcttctcgtctccctccaccttctccgggcccaggtaagtagaagaacaggctctgaagcaggaagtggaagctgtatgcaaatttctacggagcctaggaagcctctgctcaaaatct

SEQ ID NO: 60436 - DNA, 1267 bp, Homo sapiens
  misc_feature (1)...(1267): n = a,t,c or g
ttttttaaatttcaaaatgcagaatttattttagcaaccaattttcctaacctccccaatgaataataaattaaccaacgaaagaggagcaaaaattattccatttattatagaaaattgttaaacatctttctataataaatcatgagtaaagtcaaaagtaaaaactgaatgtataaacaaattggagctgaaagacaaggagaacaagatttataggatgtggtcaaagcaatgaaacggaagagttccctgattccccttgcagggcgtgcgacagggnggtgtggctcacctgttcagtagccccctctgcagaaaccccttgcgagagggggagcacgcagatgggcaagtgcagaggccggggtgagggctttgggctctggctctgcggtagcgtctagaggtgggtgcctgcaaccccagtgttacaaagctctttcagcttggccaccacagacagctggagtgttaaccagctcaatggaccttctgctttttcacaagggcaaaggaccaggggacagctttctgtattccgagctcttttccagaatccaggaaaaatcgggtcacacacggacttgaaggatgaatgcgaggttttattgagtggtggaaatggctttcagcaggatggatggggagctggaagggtggggatggatgaagtgggaaggtgatcttcccctggagttgggccgcccaggggctggactccgctctgactgccccgagccaaacatctctcggtgtccagacgtccctcctcttctctctttctctgctacgtcgttttgccgtcagtcggcttgcctcgtatctcctcacctgctggtatgctctggaggttggggtttggggtttatatgggggcaggatagggggcgtggtgggtcaaaaggcaactttttgggccccaaacagaaacgcctcttctcatttagggccgcgggtatccaggcttgagggtggggccttagccagggaaccgccctcttctactcagtatttccgtctcctgttcgtgtcagcaatacacagaagaaaatccattccttatctcactaaatgcagaaactactgggagtgaggctgccataaatctcttctggagaattttactggccataaagaagacagagaagaccgcttgcacctcgcccgcggctccggaagcggctgcggccccgaccggaaagcccccagcatcgcccgaaggaatcgcgactggcatgcggctccggcccggcctcgggtacca

SEQ ID NO: 60437 - DNA, 1135 bp, Homo sapiens
  misc_feature (1)...(1135): n = a,t,c or g
ttttttttttttctgggtgcaagaggtttatttgggagccatcccaggaagcccaaggcgggggagtggggaagagagggaagggagagcccccgcaggaagtacatgaatgagtgggttactgctgcgggcaactgggactccatcctgctgggcatcctctgagagtttatgtagaatacacttcagaattgtcctgctcaaggacaatgaagctgaggtcctgctccttattgactcagggttgctgctcctggggacattaaccccccaacacttctagcttgcccagtgcactgactgagcacacagctgtggccaccagagaacctctttgggctgtgatacaggaaaccatcggtgtgcatggtaactctctagcagtgtccttcatgccgggacatggggacacgggcaggcactgctggcatctgctaaccccggaggcccatacttcagaaccggtcagctgggccaaggcctctctaaggcccagcggctctcatgggcaaatgtcaggtgacacagagtcagagaccctggccaaggactccccatccggagaggtcccagagggaggggcgaggtggcctctggggggagctgggcggtggggcaggacttgactcaggacaccaccctctcctgcagacactgggccaggtgcctgtgccgaaggacccggggcatcgcaggggggaagggggaggaggggcaggcagcgagggctgcccggagtgctcggaaggctccctgccccaccaggtggactctggcagggcccacgctgccccagaaccgcagggacttgtagcggggagaggcttcctgaaggcagtggtccagcttgtctcgattttcctctgacagattcctcagccccctcagcgccacaaacacctcgtagtggggagcagagcccgcagaggaatccagaatgctgctctccacacagccatggtccagcagcttggcccccgcccactgccccactgcccggcccagggcctcagagaacaggtcttcaccaatatcttcccctcgcacactcagggtctggtccagcctgcagatgaacctgacgactggacactgatgtaggaattccncgncnctgngctagtgaactacgatg

SEQ ID NO: 60438 - DNA, 2204 bp, Homo sapiens
ttttttttttttggattcacactggtgtctttttattggattttccgtgggcaacctgggtgcttcgagctccgctctggggcagtgggagctgcccatcctctcccagcgccttataacaactgggtcctctgctcctgggctcaggctgctgccttgagataaacccagttttcccactgccttcttcttcacttgtgccaggctgcccagccaggggcatggcccgggtgtcctgggtagcaggcactagttcagagccccctggcagcagtacctgcctgttgtaggcccctgtcgactccacagtgtacacaacaccatgggctggcctacagcttggtgttgaggtggaagaagtggggcgctgcataggttgtgactggtggtgcgtgccaggcagatgaggccgggcaaagtctgtggcggagggcactgtcgaaggacgttggggggaagtgcatcaggccagcggccatgggcgaggggcctgcggtggccaggaagtgggccgggaaggccgggatgaccagggggctgaaggggagtgcagcctggcccttcaaggggcccggggtgccagtgaagttcagcgggcagtgcagcatggtgcccctgtaggcctctgggggcacaggccccagggctgggcccagaaggcaggagaccaggccggaccctgcaggtttggccccacacttcttggcatccgcctccttaagaaagggagacacggcccgcagtctcttcccactgtgggcagcaccctcttcctccaggctgcgcttgctgcccaggcctgggctactggggaaggtgggcgggagcgtggggctctcggctgggaccttggccatgggggacacccagcaggctttgggcttggggtagaggatgccctttctggagccacctttatggaacgcagaagggcggttagcgtctccgccccacaccagctggggctctttcactgacagcccctctttgccaggaggccccaatagcaccccatctttaagtctagagaagaagtccctggggtgctggctgacaggcttcagcacctcggtggggtgggtgtagaagcagcccttgaagatgggggctgccgggcaggggcctgcctgcgcctcctctctgaggctgccacctggggcctgcaatccctcctgaggggtcagccggtgcctggagttctcagtcagccctttggggctctggggactctctgggaggtgaacagctggggacgcctggggctctgccccatggcggcagccctcctcctggcactgcaaggcctccaccttgctcacctgggccaggagcttctttttggccagtggtgacatgatgccgtgtgtccccttgcagtagaagctggataggagccgcttgtaggcctcaggacagccgctggcacccacaaaggacacagaagacccagaggccaggccctgctgttctgtgctgttcctggggggctcctggctgggaagtggtgctgggtcagcagcatctgctttggtctttcctggcatcatctggtccatgcgccgctcctccttggccttcttcggcctctcggtggccccatcatcccccctgttctccttagccatcttgtactgtttcctgggcttggaggtgggcagcggcttgtcatcctcccccttcaggtgccgcacgtatggcaggaccagcctctagtagtggcggcgcgtgcacgtggccccgctggtgctgcctgggctgccccccagctcgttgtacacgttcttccagaggcggcgcccggtcaccagctcataggcccccagcttctccactgctttgtagatcttccacaggttaatctgcttgaagccgagatggggcaccctctcgatgggcgtgtgtcgctccttcatgaacttgtagaggctgaccaggaaggcctgctcctcctcccgctcctgctcctcctcccgctccccgcctgcctcgggggagtcctccagcgagatggggttctggattccgttctgcttgccagcaggtttgggggatgcaggtgggtctagggcgtcaccctccgtggactgcttcctgttccctttgacaggggctgccatggcccggagaggtccctcggcaaacgccccgagaccctcagcgcgcggctgtccggaccggctgcgtgggtctgcccggaaatatcg

SEQ ID NO: 60439 - DNA, 959 bp, Homo sapiens
ttttttttttttccaggctcaatattctttattgataagcattagtgaaccccttgccctgggagctcagccagtcctgctctcagattcctggccttaggtgggagagcatcttttcctcatggatcaactgtccatgtctgactgtgcctaacttgccagatcatgggtcagggagacaggcagcaggtattggaaggtgatggccaggtccttttccccagtgaccactctccatctagaagcactctgcttcagctgcgcaggctcttccggggactctgggagcctgctggttagatggaggagttgagcctctgacacctccaggttctgcctgccaagggttcctccgcagccgggctgagctgagcaggagcaatgggctctcgcttctgtcctgaggttcttgggtggtgagcaagagagctaagggcaggaggtcttacgtggtgcctcataggggatagagatgccagagactgcactggaagcgggggtctccggggtgggtcttcagcacctgccacacctctgggggaggctccaagcccatctgcttggcccgacaccagcgctgcagccgtgtgatcccggtgcagggcccgtactgccaggccaggtcaaactgcctcagcagctccagctccgcttcctcctcgtcgcggggctggggctcctcccctagctcgggtgccagctcccccttgctgtgcccagcgggcccctccctcctcttcacaaccgggtaggaatcagtgatgagccgcttccggcccatggcggccacccaggcaggcagagaaggaggcaactgcggggaagaggagagaccggccagtgggcgcgagaaagacagctgctgagagagacagacggggccaggccagcggcgggcagacaagatgatccagccgaattccaccacgctggtctagatgtcgtcagtgggtttcaat

SEQ ID NO: 60440 - DNA, 1663 bp, Homo sapiens
ctctggccactgaaaaacttctcactataaagcatgtattcaaggattaccaatgcaaatgggcagcaattaacctggagaccccatgcctatggcagtctcaagaacggaactagagatgctatgtttgaaaatcgacgcatgattaaagcgatacttctggaagcatgcagggcaggcggcccggccatgacgcacagactctgtacagccctgcagacctcagccaccatgctaacaggcggacacttttaccatgcaatcaagggcacgggatcagctgctttgggaagacttatttccaccccctccagtctctcaggctggagcgcagtggcgtgatctcaactcactgcaacctctgcctcctaggttcaagcgattcttctgcctcagcctcctgagtatgtgagactacaggcacgcaccaccacgcccagctaatgtttgtatttttagcagagatggagtttcaccatattggccaggctggtctcgaactcccgatctcgtgatctgcctgcctgggcctcccaaagagctgggattacaggcgtgagccactgcgcccagccaggaagactttcttcatggcaaacagtgggttctttcaggggacatttctgtaatgtacaaaagaacctgcaaaaacaaaagcacctagggagacagaagactgggaaaggcccatgaagggcagagctctctcagtaatggaggaaactaataggactgctgctaatggagccccaggtgagccctgggattgcaaggccaccgctggcacaggcaaccatgcttgtgtggaggtgcaggcgtgagcccttctgcaagggggctctctgccagcacccatgcagggctcagaagggggcctggctgtggatcttgctgggttccagcagcacagaggcccactggcctctgacgcaacatacgcctggggaagtgtgcaggcccagcggagacagaactgccaagagtctggactcacggtagtcttcagactcgtccaggatctcggacctgatgatctcctcgatcacgtcctccagggtgaccaggcccaggacctcgtagaaggggtcgccttcaccctcgttgttcaccttctgcacgatggccaggtgggacttccctgtggggggaggacactcatggaacagcttgctgggccccccccagtttgattcatctcccctggtataggcccaccaaaaggacacggctaacgttcatgctcctacaacgtgccaggcacagagccacactcttttctaggtttttacttaagactcccagcgtgattatgagaactggccttattttcacacaggttgaaaatgaagcagtgggctcatgcccatctgcacaaggccccccaggcagagctggcagagctgggatccagctccaggtccgtgcacctccatgacatggatgcagtttagacaaggatgcctccctccagtggagaacacaaatgcctcacacatcagccagcctgcacatgcaggctaacaagggcactgactctggaaacacaggctctcctgcgacagtccacacggggcagctgagtggggccacccagcctgactgtccttgggaggatttcctaagtctttttcttcttaaagtaaatatatatgctgtccatcct

SEQ ID NO: 60441 - DNA, 1237 bp, Homo sapiens
  misc_feature (1)...(1237): n = a,t,c or g
ttttttttttttgccaaagaaaacagaagctctttatgccaaatcacaaggacagacaggggaatgtgggggatggacaggagggagggcctgggcaggctgcctgccttttggcaccttgtgcccaggcgagttcccggacccatccaggagctcttagttcgttcagtcaattccttgacatttgatgtgcctggctcagaactgggtgctggggacatctaggtgcataaagccaggttgcattctgacaggagagagtcaagccaaccggccaggacaggcctgctgctttattcacagatttagatgtcgttccatctgctctcgaagtttgaatttctggatctttcctgaaatggtgagggggtagtttgtgacaaacacgatgtacttcggaatcttgaagtgagagatcttccctttgcagaaagcttttatctcctccaccgtggtctcctccccgtccttcagccgaatgcaggcacaaatctcttcccccatccgatcgtccttcactcccaccacctgcacttcctgcaccttcgggtgtgtgtgaaagaagtcctcgagctctgcggggtagatgttctcaccaccccggatgatcatatccttagagcggcccacgatcttgcagaagccctgctcattcattgtggcgacatctcctgtccaataccacttgtcctgatccactgcttcctctgtcttctgaggctcaccccagtagcccagcatgacgcagtaccctcggatgcacagctccccgggcgtgttcagctttgccagcgtccctgcctccatgttcatgatccgggcctccgtgtgaggcataattctgcccacgctttctgccttctgctccacagtgtcctcagggaagtgcgcgaatgtcacgggactgttctctgtggttccataagcaacctagagggtccagaaagggtgtttgaagagggctcagcacgtgcagagggatcaggtgagctatctgaggaaatgggaaggaattcataaaagaaaagggaaagtggagggcagccgaatggtggaaacagagacatcattggtaggggcctggggtcaggaggcagaggtgctgggagtgagcagactagatctctgcagggccacagatctgaaagaaaattgagagcagggacaccattctcttccagctggagctctctcgaattccncgncnctgcctagggatgtcagctatngggcgcct

SEQ ID NO: 60442 - DNA, 1830 bp, Homo sapiens
  misc_feature (1)...(1830): n = a,t,c or g
tttggctgcattgacatcgaaacagcgtggtggaattcccaaggcgcaagatggcgctgctttttgcacgttctttgcgcttgtgccgctggggagccaaacgattgggagttgcctccacagaggcccagagaggcgtcagtttcaaactggaagaaaaaaccgcccacagcagcctggcactcttcagagatgatacgggtgtcaaatatggcttggtgggattggagcccaccaaggtggccttgaatgtggagcgcttccgggagtgggcagtggtgctggcagacacagcggtcaccagtggcagacactactgggaagtgacagtgaagcgctcccagcagttccggataggagtggcagatgtggacatgtcccgggatagctgcattggtgttgatgatcgttcctgggtgttcacctatgcccagcgcaagtggtacaccatgttggccaacgagaaagccccagttgagggtattgggcagccagagaaggtggggctgttgctggagtatgaggcccagaagctgagcctggtggatgtgagccaggtctctgtggttcacacgctacagacagatttccggggtccagtggtgcctgcctttgctctctgggatggggagctgctgacccattcagggcttgaggtgcccgagggcctctagtatgtccattactggagtccctaatcacgcctttggccagcctccttttgaaagtgtccgaagcctttttactttgcctcaagcaacctctagctcccacaattcagtgttgggtcctctgtgcaatatcatgatcatcttcctcatcccctaccttgtgaaagctaggcatacagccaaaccctccttttccccacccaccaacactactgccaatttcctaggctaccatgggtgtatcttccttgacctgcttccttcagtccctctgcctccctttgcccaggcctttctcagactgtattccatcctggggtcttatcattcagctttgtttgaatttattaatcaccatgatacctctccctccctttgtccacatgtaacttgttcttggggctctaccagatggctgaagagtaaatcctttctacctctggctgaaggagtggtgcagtcaatgacttggccctttttctacagcacatttagagtttgggctctggctccctcagtaagtgctttattaactcagtgtgtcaaaatgaaaacagagccctccttccccagtagctcagtgccacagaccttcagccccacacagctgtagctatccttaccctgagtccatctaccttaaatctgtacctctgacacccagccagtctgtcataatcattatcccagttataaccttgaccaaaggggaagagagacacttgggggatatctaggggatgagtgctagaaactatttatttatttttgagacagagtctcactctgtcacccaggctggagtgcagtggcatgatcttggctcactgcaaactctgccttttgggttcaagcgactctcgtgcctcagcctcctgagtagctaggattacaggtgtgtgccaccatgcccgtctcatttttatatttttagtagagatggggttttgccatattggccaggctggtctcgaactcctggcctcatgtgatcagcccaccttggcctcccaaagtgctgggatttcaggcgtgagccaccacacccggccaaaactgtttattcttgagaagttccatcttcatttcttgccacagttgggaactttcccgaggaagggaagggaggccttgagggttttnggacaatgttgttttg

SEQ ID NO: 60443 - DNA, 1470 bp, Homo sapiens
ggccacgttcccgggtcgacgatttcgtcgggggatgagacacaggggagccgaccagatgagggggacccagaacggaaggagagtcaggctgggaaacaaggtaggagaagagggtctgtcaacatgggggcctccggagggtgtcagtgggaggagggggcaacaggacacctgaaggatggaagggtcaggaggcagacacctgtaagaattgctctcctttactgagcacctcccatgtggctaagcagcctcctgtcactcaacaccctgcgaccccatacatttactgtccccaatttacagatagggaaactgggcccagagggaccccgaggtcctagaaaggacagaagcggtgccatgccttagctggggtcagctctgacagtctctagagtctgtgctcttgaccactgtgccatcctcccccatcactgggtgtccggggtgtggatggtggtgatgttggaggcagagtccctcagcactccacgccgtagcggtcgaagttgcggagcagcaggccgatctccaggtgcacggtgccaccagcagctgtgtgcaggcgatagcggtcggccccactgtagatggtgtccccatgcagcagctgcggcccaccacccacgaaagcccgtgccaactgttctcgccaactgcccaggggccgccacgtggggcaggccagctggtgggtgcccgggctactgggcacatggcaaaatccatagcctgcaagctggcagcggccaaagctgtcctgggaccacacctggaaatggagccggggccagccttgaagacctttggtggcgaagtgcaggtcgatggggtgggaccagtaagccatgtcccctatctgcggggtgtccacttgcgtttggccctcccgcacgcctgacaggagcttccatgccgcccctgtgtgaatgccccacttgcagaagaggctactttccgagaaaccgctggcccctatgatctgcccgatcacgtgcacctcagccatggcccttagcgcacttaacggttaggagaggagaaagcggcaaccggggttgtagttcatgggcttgactgcttcttttctccgcgggcgccgaccaggcctggctcgcgcctctcccaggacccgcctggctgcgagatatgtaagccgcgatacttccgcgaccgcgctcgtcttggtttccgtggttgttgctggggcaacagcaggctcctcccctagctttgtactcgctctgcgcgctactaattggtgctagccgtctgcggggggcggggtgaagctgtgatggacattttcctcctccgctccattttgggaaaatagcgtctctccagctacggcaaagggttccgccattttgggcgtggctaggaagctgccatgttgagtgtggctgaggaagtttgagtgcagtttctcccagataccttctttaccaaaaaagcaaatcc

SEQ ID NO: 60444 - DNA, 880 bp, Homo sapiens
aagctcccactgatgctctctggaccagcgtggtggaattcggctggcagtgcgggcagagcccggctgagaggggcggccctggaggagacggaggcggcgggtgggcccgaggcgcaagaggaagatgaggacgaagaagaggcgctgccgcactccgaggccatggacgtgttccaggagggtctggctatggtggtgcaggacccgctgctctgcgatctgccgatccaggttactctggaagaagtcaactcccaaatagccctagaatacggccaggcaatgacggtccgagtgtgcaagatggatggagaagtaatgcccgtggttgtagtgcagagtgccacagtcctggacctgaagaaggccatccagagatacgtgcagctcaagcaggagcgtgaagggggcattcagcacatcagctggtcctacgtgtggaggacgtaccatctgacctctgcaggagagaaactcacggaagacagaaagaagctccgagactacggcatccggaatcgagacgaggtttccttcatcaaaaagctgaggcaaaagtgagcctccagacaggacaaccctcttcatcactggtggctgagctttttcccagcaggaatgggtcctcgaatcatcgtgcctctttcacagaaaggacgttgtggtggcctcaccccaggcatgcccaacaggaactgtcagcataaacctgggggccctcaggactaggacagggtgagccagtgctccctcctttcatgtacttggcctgagactgacctctccctaggtccaaatgccctagtcacatggcagacccacggcctggcccactgtataaaataaacctgtttgcttcttagtttgaaaaaaaaaa

SEQ ID NO: 60445 - DNA, 2034 bp, Homo sapiens
agcccactatgcttggatcctatacagcgggcgcttgggcgcacttgccgggtcaccttgtcccggaggagaaatggcttccctgaggcaagtgtaacctacattcccagcccaccagcctgacgcccagccagggagagagtaccatggatggcatcattgaacagaagagcatgctggtgcacagtaaaatcagtgatgctggcaagaggaatggtttaattaacaccagaaacttgatggccgagagcagagatggtctggtgtctgtttacccagcgccccagtaccagagccaccgggtgggggccagcacagtgccggccagcctggacagcagcaggagtgagccgatgcagcagctgctggaccccaacaccctgcagcagtcagtggagtcccgctaccggcccaacatcatcctctattcagagggcgtgctgcgctcctggggggacggtgtggccgccgactgctgcgagaccaccttcatcgaggaccggtcgcccaccaaagacagcctcgagtacccggatgggaagttcattgacctctcagctgatgacataaaaatccacaccctgtcctacgatgtggaggaggaggaggagttccaggagctggagagcgactactcaagcgacacagagagtgaggacaatttcctcatgatgcccccgcgggaccacctgggcctcagtgtcttctccatgctctgctgcttctggcctctgggcatcgcagccttctacttgtcccatgagaccaacaaagccgtggccaagggggacttgcaccaggccagcaccagctcccggcgggccctattcctggcagtgctgtccatcaccattgggactggcgtctatgtgggcgtggccgtggccctcatcgcctacctctccaagaacaaccacctgtgagcttcctgcgaatggagggggagcacccggggccaggtctgtgtggacgtggaggaagcaggcataccgcatgatgctgtacagtacaaatgattgccaaatgatgccacgaagccctgggatttcctacccatggatttattttgtttttatcctttaatttcatgttcacagcactgtgtagagcaccagacagacgggcactgctaatccttccaaaggaaagctccaaagatcccagcccgcaaggctgtctctggatggattctggtggatgaatggcaacgcggctctctgcagcctgccagtgcccagagtgccaccgcattagcaatatacaaacagtccaaaaaagtgtttattttttatggaatacggtgcaataggcagaggacaagggacacatcactcttctgtctgtgggccctgctggagtcctttgtgccccccggagtccacacgccttccctgcaagacgagaatggggctgggaagaaagaggcaacaccacggctggcaggagccccgctgcactgctctgcagacccattggcctgaccctgagaagcagagccagcaaagcccgggacctgcccctctttctttcccttcacaccaccccagcctcaggatgtcaagccacctccggaacgtgtctacactccacagctaccccgcagcaatacgcactcttgggacctcgctgatctaggatggggaggcaggccaccgcccctcccaagactcctcaagaaagagccccgcggttgctccggaaactcgaggcactgcagctatgggcactgcctcagcctaaagacacaggggcgcctcccaatcaccgcgctggcggatgctcaccccgtcataagcagaaactagtgatcctggaaatgagatgggccttactctgtcgactaaatgaatagctattttcttgtcattttttaaagtgcaactcttgcttcatgctgcttaagttaccagatgaatgctgagaaataagtaatcacagacattttaataccatttcattgctgttttacgagtgttcattacttaacaaaaaattatcttttagctttttcgcttaagacttttctttctgatg

SEQ ID NO: 60446 - DNA, 1755 bp, Homo sapiens
ttttttttttttattggactgtaggtttttattaaaacaaacatttctcatagctctaagcaaagcattagaattcatcaagcggactcacatcttttctctgcacagagagggctgaaaagggagagaaagtcccttatgtatgtctagatttggtaaagcgaaggatttcagcgaatgagtcactgaggctatacacgtttgcaaattgtaaggcactggcgggcagagagcacagataaaggacttctggggtcccccatcctgtccagcaacctcccagctcacaccttagcttctaccaagaagggtgaacacagcatccctgctatcttcactcagaccccagaagacacaggaaaccgcacagctccactcccaccataacttattaggagataagtcacattttatcaacttgccatcgcgcctcctatagattatacttcggtaaacccaatctgtataaattcctttgtactttgtgcactttaaatgccacgattgtgaatcacacaagcattgcccaatttgttgaaagcatttttactggaacctcaaaggcccaccatgtggggagcaattattttttaatacccactgggcaggacacgccggtgcccccaaggccgcagtagccattggggttcttgctcaggtactgctggtggtagtcttccgcatagtagaaagtctgtccctcccggatgtcggtagtgatggggccgaagccgtgctctgaaagaaccttttggtagttctctttggagctcagggctgcctccatttgcttggcagaggtcgggtagatggccgagcggtactgagtgccatggtcgttcccctggcgcataccttgggtcgggtcgtgattctcccagaagaccttgagcagttcctcaaaactcatgtgttctggctggtacaccactcggacgacttctgcatggccagttttttctgagcagacttctttataagtaggatttgaagtatagcctcctgcaaaaccaacttgagttgaatacactcctttcaagacccagaatttcctttcagctccccagaaacatcccattccaaatacagccatctgtgttccctctgggaaaggttcgactgttctgttgccattgacatgatgtttggatttcttgtttgcccttcaagcgaagtctggtgtcttcagcttgcctttctggtcttcagtgttgtcactaattggttctgaacacattccgaaggatgtctttctgatttgatttgaaagcaggtttgtattgatgaacaaactttattttgtagaaaattaatattccctctaattagaaatttgccttgccatcttctatattaatcctgtctctcatggtataatcatacatgcaaaaaaatcaaatatagtatttcccaaatgcatggacactatggaagcttcgttttgaaaaaggcttttatttcccttaatactggtgactaaacgtcattgtatgtaccaacactttcaaatagcccaagagacttaaaaagccttctaagtttgaaaaccaaaaagttctgagtttttctgtaccccaggacggttttctttcctgaagctcaagccgagaaagcagacaaaagaagctgatttgactgagctgtgccaagtcttgcctttttttctttcctcagctctccctctgcctctctctctccctctttctctctctcactcttttgctcccagtatggccctcgtgccaagaatggcgt

SEQ ID NO: 60447 - DNA, 1044 bp, Homo sapiens
  misc_feature (1)...(1044): n = a,t,c or g
ttttttttttttcaatgaatcaacatactttattagacccactaagtgccaggggaggggcctgtgccctagagccaggttacagggctcacccgtagattcagtctggtctctccccatcatgcctctcacttccagtctgggcttctaataggagggccccgacttcttccctcccagtcattctctcgaatggagaatctttcctcattccagggacaccaaggctcaggaaggggcctatccatcatcagtagagccagacaagctctcccatcggacgtcctgtggctgggcccagaaatgggtgccgctgcctgtgggactgcccttccgggaggaccagggtgtcttcagtgctcttggcctgcacgtggaggagagtaggcagatgtctggtgctctttaagctcaaaggcatcatggccctctcggaagcagcgggcacagaagaggtccccatcgcagccagcgcagcgtagggtggcatcctcattgcagatgcagcaccaggggagctcctcttcctcagcctcaggcctggggtccacatcctgggcctcaggctctgccccgcggggttgcgtccagggtcgagaagcctgctctgcagggatgttaaagccacttgcctcatccagggcagcttcttcagtgagctgcggacagggtgaagatgtactactcccctgcttcaggcccaggccctccatctcccagtatttctgtgcactgtggacttagcttctcaaactcatctttttctttacttgtggcctgtggctgctgattccctatctccagggaccagtgggcaggtctgggtctgggtcacaggagggggcccaaagagaacaggagcttcacagttactgtccacccagccccagagtagaggtggggcaatgaggtggagacgggacaaggggtggcaggtgggtaatccaggcccacctgctgcaggactctttggatggctgtctcctcatcctcgtcgtcatcactgtctggnagncgnaagtccncgcgatgcctcagtctcat

SEQ ID NO: 60448 - DNA, 1912 bp, Homo sapiens
ttttttttttttttagccttgaaatgtttttaatagaattggtctagtaatcgttcaggatttcggtgatgggccctccctgtctggacactgccaacccacagctggaggggcacttaaggcacgtcattttgtgattagaattacacgaaatttgattaatattatagctgcaaaattaacatacacaattttcactcataatttaaaatattttgatgaaattctttgctttcacaatagaagatcaatggtacacagtatattgaactctgtaacaaaattatttttgagaaaatacagaagtgagaaatagtgatttcctcaatttgtttatagtctatcacaaagtaggccaaagttcagtattaaatagatatcctaataaaagtttttacaagttttcctaaggaaatacattcataagactgtttaccttctgtttgacagcagtgacaggaacgtggggatccccactcatgacgagtccctagcactcagcccctggcacccacagccccggcgcgctccgtcacctggtagggagcagcctgggctgccgtgagtgaggtgttctcactctggttccgtgtttgtgtttagcctgtgcaattctcgtcaacacagaacacctgcctgcccacccccggtgctgaagaccgaccagtcaaggaggtgttggtgggagtgttgtgttcaccatgtggagatcaggcggcgattaccgcatcttctttgctgactttggtaaccgggtgtccagggaggagcgatcgggagtggccaagcagttgcctggactcagcttctgactctgcagctgggagtcagatgcaggcccaagggtccaggggagttgttcagcgcctggaatcgccatgcactgcgcggtggaccgcacgacgctcctgctctgttctcccaggcacagacaggcacttggaaggcagctttgctcctctggccacccggaaacctcccagcagttcagatgggacaaactgggggcctgtcagaacagccacttgtgccgggaaggccaggccccggcctgctccgatgaacgtcaggacggtggctgcagcagggaaccagggctggccttggatctgtccagtagggtcactgactgggcagggcttgctgcatagaggatggctgcattttgtgctcagagttggttgaaatggctacgaagtgtggagaataaccactgaatcccaaaaagtcactgcgcttgatctgatccaagtaacagtgactgcagttagggtcgagagcttctccgaagcagcggtcatgcaggcttttgtgtggctgacgcttccctttttcacaacagtaaaaagctatcaatgggaaattgtggacttttcccaccagggactcaatggggactcaatgtgcaatattcagtcaacataaaactctttaagaactcctcctgactggtgactgtcaacacttgatctgaaacgtgaatagtttaattttcctgagcaaggagctgcgagtctagctttagaaaagcccctaggagtgtccacctccaccacttccaccgtgcaggcaggtttcaggtgggttggaccctgtgggacttgccgtctgagggatggatggactccgagcaccctccccggctcagcacccgcggcctccgcccactcaatggactgtgcctcccagagcttgggctggatggtctccctgcagaggaccaggagctctgtccaaggcctcgccctgggacgctggaaggggtgggaagggtcaggggtccggggtctaggacaggctcaggggtctcagcaggttctccttggagggcctgagcctggtaggggggcggtgccctgggcccctccatgccccctggtttgttaagggggacagagcagctgctacgaaa

SEQ ID NO: 60449 - DNA, 1026 bp, Homo sapiens
ttttttttttttgagaaacatcagggactttaatcacatcccgcagctctgggaacctgcccaggcgctgatgctgcgcacagcccacccccattccctccctcccgccctcctggccctggccagctcagctctgtccggggtcggagagggggtcctgaggcagcagcagcccagctccagagtgacaggcaggggctgtccagctgagtctccgcccccacgttgccctggggcaggcccagctgctgtcagtgctgcttgagacactaagcagcatcttccaaggacaggttggccaagtgtgggggctccaaacaccttaaggctggcaataccaggaaggccggggcggctctgtgtgtcccaggccaggagaaggcagaggagcgtggtctcatgctcgtgtcctgtttgtgccagttatttatgtagttcaggaggccctggacagctgacttccactgcgccgaggactcgcagttatagccaaagcaggcgacgtgcgagtctgtgcagttgttgcaggagatggtctcgtactggaagatgccacagcggtgctgacagtcgatgcggctttcgatgatggcgttctggatgaggtgcacctgctcccggaagatgtttcgcagctcgttggggaaatacccggggaagtacatcttcccctggtacagctgatccatcatctggtacactgctgtcgccacttggtccagcttctcccgggtgatcttggcggggatggccaggtgcagctccttcatcgtgtcgtcgctccagtcggtgagcagcgcccctgacacggggatgtcgcccacccaccaggacttgaagttcacatggtggcggtagaaggagaacttcttggagaagttgctgtggcagtgcagacagccgtgggccagcgccgccgtcaggcacaccaggcacagcagcagggccatgcccgtcccggcccgccgccggccaaccaacgacgctgctcgcgccacacccttaattccaccacgctgggtagat

SEQ ID NO: 60450 - DNA, 685 bp, Homo sapiens
  misc_feature (1)...(685): n = a,t,c or g
ttttttttttttccaaagaagccccattttattacagagaaaatacaaagccgtttcctcacagggaaaagtacagtttcccttctccagggtgacagatgagccttttccgaagttctcagctttctcttctatcgaaacttcccatgtcggttaaagtgtttgtagagatagcggatgcgtttattaaggttgtgcaggtcatcagcgaacattctacttccaaccattttcctctttcggatacaacgttgcaattcattccctttccaacctcgaagccatatgggccccctgatcagttctttggggtgcttttcaaagtttcccaggatcccgatgttgtcatacactccgaacatggcccttttctcgttccaacgatcaaccactttggggggcgggagagtgagccttataccgatcaatctaggcacaccaagagagaagcttctgcacgccagaggcacccagtcccacaggcgcctacctgccccggataagaggttccctgccatttctctagtctccccccttcaacagcacaccaaataagcccaagaagatgacaggaaccgtccccgccaacttcacacgagtactaaggcgaagacagccatcttgggccttacccaggaattccaccacactgacatagacatcgaaantcaaannnnncccctcg

SEQ ID NO: 60451 - DNA, 1222 bp, Homo sapiens
tttttttttcagcccaaactcatgttctcaactttattccccatcccagtggtggctcttctgtacagtggagaaagaagggggaccccaccagggctatggagagacagtagaggcaggactgaaccgtcagcaaagattaaaaggatgacctgaggctggcaaccacaaaaccaagaagccagcgggggctgccccttccaagtctcaccaatgacccagagcaggttccagagcccaaaggcccaaaagtgcaattcccaaaagccaaggtctgggagccatcaaggagctcccagagatccagcgacgctcagagggcaagggtgtctttgatgagcctgcgcatggtggtggtgactgaggtgcccagggcatcagtgatctggaaggagatcttgtacaggtagggctgcacgtcccgcaagcctgtgtcaaacacgttatccacctccgactgtgtgggcatcttgggcaagtactcatgccgattcatcacctccacgatgttgatgatcttctcgcagagtttctcacccaccttctcccggcagatctgccgctcctgctccgtggccagggctaccacatgcaccttgaccgtccacacttcccatgggatgcactcgtctgagaatggccagcgagacttcttcttctggtagaactccaaggacatctgccccagcccatcgccaccagagttgcgcagtgcatccttgaactccccaacaaccttgcgcagggcacgatccagttcctcagaagagacacgcacataagtgaagtcgatgaagtcacagtcaacatcctgggtgcccacggtgccaatggagtaggtgccctccttcttgtagtggaacttgcctgtgctgcggtgcagaagcaccgtgtgcagcacagccagcatggcctcctccacctgccgcccctccaccgacacctccagcacctccgagcgacagttcatcctgcacccagtaacccacaccaaggtgtggaactaggataaagacaggggatcttcaccctacccaagggccacccttgagtgtagagtttggagcacggattcctcaagctcggctcatgcccttcctcctcctcctcacgccctggtgcgacctccgcaggtacgcttcaacctccgcacggcgctgagccacaagagaccagctcccccaaccacagtccacgaccagcctctcagatgccaccactc

SEQ ID NO: 60452 - DNA, 1858 bp, Homo sapiens
ggaactccctgtattgaggaagaaattagactagttggcttcaaagatctaggggaatgacatagaccgcatttatgttgcatacataccactacattctattcccatgctcatggcaggccttactaatcaatcatagaactttatccctgtgagaccatcatatattaaaggcagccagcaccacccatgtgtgtgcaagaggaaatatatttgccattcccaatactagatgtttagagtgttaggctactgccactccaagcagccttgaatgccagaattaatcccatctgtctttgtgtcctctgccagccactaccagtggtttaacacccaacagcatgatccccgaaaaggagcggcagaacatcgcagagcggctgttgagggtcatgtgtgccgacctgggtgcactgagcgtggtcagcgggaaggagttcctgaagttggcccagaccttagtagacagtggtgcccgctatggggccttctcggtcactgaaatcctgggcaacttcaacacgctggcgctgaagcacctgccacgcatgtacaaccaggtgaaggtgaaagtgacctgtgccttgggcagcaatgcctgcctaggcatcggtgtcacctgccactcccagagtgttggccctgactcctgctacatcctcacagcctaccaggccgagggcaaccacatcaagagctatgtgcttggtgtgaagggtgcggacattcgcgacagcggtgaccttgtgcaccactgggtgcagaacgtgctgtcggagttcgtgatgtcggagatcaggacagtgtacgtgacggattgccgggtgagcacgtccgccttctccaaggccggcatgtgccttcgctgctcagcctgtgccttgaactcggtggtgcagagcgtgctgagcaagcggacactgcaggcccgcagcatgcacgaggtcatcgagctgctcaacgtgtgcgaggacctggcgggctccacgggcctggccaaggagaccttcgggtcgctggaggagacgtctccaccaccctgctggaactcggtgacggactcactgttgctggtgcatgagcgctatgagcagatctgcgagttctacagccgggccaagaagatgaacctcatccagagcctcaacaagcacctgctcagcaacctggcggccatcctgacgccggtgaagcaggcagtcatcgagctgagcaacgagagccagcccaccctgcagctggtgctgcccacctacgtcaggctggagaagctgttcacggccaaggccaacgacgcaggcactgtcagcaagctctgccacctcttcctggaggcgctcaaggagaacttcaaggtgcacccggcccacaaggtggccatgatcctggacccgcagcagaagctgcggcctgtgccaccctaccagcacgaggagatcatcggcaaggtctgtgagctcatcaacgaggtgaaggagtcctgggccgaggaggccgacttcgagcccgctgccaagaagccccgctctgctgccgtcgagaaccccgcagctcaggaagatgatcggctaggcaaaaatgaagtgtacgattacctgcaggagcccctcttccaggctacccctgatctcttccagtactggtcgtgcgttacccaaaagcacacaaaactcgccaagctcgccttctggctcctggcggttccggccgtgggcgccagaagcgggtgtgtaaatatgtgtgaacaagcgcttctaatcaaacggaggcggctgctcagtccagaagatatgaataaactcatgtttctgaaatccaacatgctttaagacttgacttcgggggaaaaaaaaaa

SEQ ID NO: 60453 - DNA, 2578 bp, Homo sapiens
tttttttatattcatacatatttattcacacaccacacacatataatttcatgtacattgtttgaatgtcccaaactttggagtttaaacatatatacacataagtttattttctcaagtcttactttgcatgtagaaaattttattcttgattgatcgagtaaggagaaagtgtttatctgggcatagagaaaagggacagatagcaaaagggaatatgatgatactataacattactttcactaattgtcttcaacctcattttgattttacagatttggcctctgagtgattttggatttttacgtgccagccctaatggccacagattttctgatgattagtaagcatttattcttttgacttgattattgtctccttttcatgtgaatttattactcccgttgaaaccgtgtacttaccaataaactatttgctattcagttttagttgtttttaattgttaaatgtaaagaatattcaacacacattctgccaagttctgttagttcaaaatatatggataaaaatgtaacccaaaaaagtcatctaaattttatgatacaaaaatattgtgggagggggaacctggatgactacctcacttttgaattcttgttcttataggtataatgaaactaatctattcttcttaaatatacctcatactttagcagctacatttacaagtcagagtagtaattattcgtatttataagttcaacctgacaatgccaggtttgataaaaagctgctagtctacatgctcagcccactcatttgaaattaagtaaaaatgtttctaaaggatcccttaaagttctttaaatgagttctgacttttactgtacacaaaatattaaatacatagaaaaatgcatctttaagggcatatgccatctgtagttggctatagtcaataatactttataaaagttcatttcagcatagcagcagtgcaatggccctgtcttcataaatacaggcattaatactatatctttttttatttattttattttatttttttttgagacagagtcttgctctctgtagcccgaggctgctaggcagtggcacaacctcggctcactctgcctcctgggttcaagtgattctcgtgccccaggagacggaggttacagcgacccgagatcatggcactgcactccagccggcgcggacagagtgagactctgtcttagaaaaaagaaatcaaaattaaaagcttccatttccttaaattacatttaaatttgaagatggcagtgtttacaagctttggaaatacggaccaagattggaggcaacactttctacagttgccactttgtctttattaactttgaaataaccttatgaatatccataaccagccttccttatggaagaactggcctcacattattcacaaagattttaggtgtacaacagccccataactttagcaactagaaacgttatcggttagaccagaaacttagtaactataaaggaatatgatgatactgttacccactgaaaagaggagacatgctcatattaagaaaattcttattttgtgtcatggaaaaaaatgacataataaagttctcagatgggaattcaccaaatataatcaaatctatttttgtgacaacttgtaaatataaattataaatacaaataaataattatattcattctctattaatctgaggtggtctctgcttgataattgtatattttctttgcaaataatcgggctgacaaataatccatttccttgaatgaacaaagctcaacggcttctcatcatgtctcaataccacagttaaagcatttcaagttgtgaacaattttagttataatgaaggagttctataattagtgaacatgtatcacaagaaatcaggctaacttcttccgcttcatccttggaaacactgtattttccaccacatctgcaactcagataaaaagagtgatcacttaggctcctgatcgtggaaattttaagtgtgtcattttcctgggaagttgaaatgcttgtgccctttgacttaaagaatctctgatccattggtcattccattttactgtctctgagaagtaacttcattccaagacatttcttcaagatatacttgagcatctactggtcctacatttcttagatcatcttcacaccgctgcaggtcatactctctttttgtctcttcatttcctagaattttccatgcttgatcaatttcgatgaacttctgtacacattcctccactgttcctgctggtacatctgtactttgtttatctggatgatactcaaatcttcagagggaggactccagaatctctgtttcaccaagctctccaagcaactgttacgcgtgctaaaatttgagaagcacactgtttgccttgactgcttaaaacaaggaattcatgggcaagtcagaagatgagtgcttcacaaaaattttcctgtgacagatgcgtccttccaagtatgtacaccaaaaagagggggaaaaaatccaataaccattaatatgagtttttgatatttttgttttaggtctgatatatttgcagatg

SEQ ID NO: 60454 - DNA, 1040 bp, Homo sapiens
gcatggaattcggcacgaggagctgtgtcaccactgtgggtccctggttgtttcctcaccctgtccgtgacgtggattggtgctgcacccctcatcctgtctcggattgtgggaggctgggagtgcgagaagcattcccaaccctggcaggtgcttgtggcctctcgtggcagggcagtctgcggcggtgttctggtgcacccccagtgggtcctcacagctgcccactgcatcaggaagtgagtaggggcctggggtctggggagcaggtgtctgtgtcccagaggaataacagctgggcattttccccaggataacctctaaggccagccttgggactgggggagagagggaaagttctggttcaggtcacatggggaggcagggttggggctggaccaccctccccatggctgcctgggtctccatctgtgtccctctatgtctctttgtgtcgctttcattatgtctcttggtaactggcttcggttgtgtctctccgtgtgactattttgttctctctctccctctcttctctgtcttcagtctccatatctccccctctctctgtccttctctggtccctctctagccagtgtgtctcaccctgtatctctctgccaggctctgtctctcggtctctgtctcacctgtgccttctccctactgaacacacgcacgggatgggcctggggggaccctgagaaaaggaagggctttggctgggcgcggtggctcacacctgtaatcccagcactttgggaggccaaggcaggtagatcacctgaggtcaggagttcgagaccagcctggctaacatggtgaaaccccgtctctactaaaaatacaaaaaaaaagtagccaggcatggtggcgcatgcctgtagtcccagttactcaggagactagggcaggagaattgcttgaacctgggaggcaaaggttgcagtgagccgagatccgtgccactgcactccagcctgggtgacagagtgagactccgcctcaaaaaagaaaaaaaaaaaagtctcgacggtcga

SEQ ID NO: 60455 - DNA, 4580 bp, Homo sapiens
  misc_feature (1)...(4580): n = a,t,c or g
gtggactagagccagggtaaggggatctgctagaagttggtcttccgccaggactagagtttcctcgcggtatatgcctccgtggcctccggaggaccatgtcattagactttggcagtgtggcactaccagtgcaaaatgaagatgaagagtatgacgaagaggactatgaaagagagaaagagttgcagcagttactcacagaccttccccatgacatgctggatgacgacctctcctctccagagctccagtattcggactgcagcgaggatggcacagacggacaaccacatcatcctgagcaattggagatgagctggaatgagcaaatgctgcccaaatctcaaagtgtaaatggtcccagttgtcaaggtttggaaccgtataataaagtgacatataaaccttatcagtcttctgcccagaataatggctcaccagcccaggagataacaggaagtgacacattcgaaggcctgcaacaacaatttttaggagctaatgagaactctgcagaaaatatgcagattattcaacttcaggttcttaacaaagcaaaagagagacaactggagaacttaattgaaaagttaaatgaaagtgaacgtcaaattcgatatctgaatcaccagcttgtaataataaaagatgaaaaggatggtttgactctcagccttcgagaatcacagaaactctttcagaatggaaaagaaagagagatacagcttgaagctcaaataaaagcactggagactcagatacaagcattaaaagtcaatgaagaacagatgatcaagaagtccagaacaactgaaatggctctggaaagcttgaagcagcagctggtggaccttcatcattctgaatcacttcaacgagctagagaacagcatgagagcattgttatgggcctcacaaagaagtacgaagagcaagtattgtccttacaaaagaatttggatgccacagtcaccgcacttaaagaacaggaagacatttgctctcgtctgaaagatcacgtgaaacaactggaaaggaatcaagaagcaatcaagttagaaaagactgagatcattaataagttgacaagaagtctagaggagagtcaaaagcagtgtgcccacttgttgcagtccgggtcagtacaagaggtggctcagctacagttccagctgcagcaagcacagaaggcacatgctatgagtgcaaacatgaacaaggctttgcaagaagaattaacagaactaaaagatgaaatttctctctatgaatctgctgcaaaactaggaatacatccaagtgactcagaaggagaattaaatatagaactcactgaatcgtatgtggatttgggtattaaaaaggtcaactggaaaaaatccaaagttaccagcattgtacaagaagaagacccaaatgaagagctttcaaaagatgagttcattctgaagttaaaggcagaagtacagcgtttgctgggtagcaactcaatgaagcgtcatctggtgtctcagttacaaaatgacctcaaagactgtcataagaaaattgaagatctccaccaagtgaagaaggatgaaaaaagcattgaggttgagactaaaacagatacctcagaaaaaccaaagaatcaattatggcctgagtcttctacttctgatgttgtcagagatgatattctgctgcttaaaaatgaaattcaagttttacaacaacaaaatcaggaacttaaagaaactgaaggaaaactgagaaatacaaatcaagacttatgtaatcaaatgagacaaatggtacaagattttgaccatgacaaacaagaagctgtggataggtgtgaaaggacttatcagcagcaccatgaagccatgaaaactcaaatacgtgaaagcctattagcaaagcatgctttggagaagcagcagctctttgaggcttatgagagaactcatttgcaactgaggtctgagttggataagttgaataaggaggtgactgctgtgcaggaatgttacctagaagtgtgcagagagaaggataatctagaattgactctcaggaagaccactgaaaaggagcaacagactcaggagaagatcaaagaaaaactcattcaacagcttgaaaaggagtggcagtctaagctggatcaaactataaaggcaatgaaaaagaagaccttagattgtggcagccaaactgaccaagtaaccaccagtgatgttatttccaagaaagagatggcaattatgatagaagagcagaagtgcacaatccagcaaaacttagaacaagagaaggacatagccatcaagggggctatgaagaaactcgaaattgaattggaactcaaacattgtgaaaatattaccaaacaggtagaaatagctgtgcaaaatgctcatcagcgatggctgggagaactaccagagctggcagagtatcaagcacttgtgaaggcagaacagaaaaagtgggaagaacagcatgaggtctctgtgaacaaaaggatatcatttgctgtttctgaagctaaagagaaatggaagagtgagcttgaaaatatgaggaaaaatatacttcctggaaaggaattggaagagaagattcattctcttcagaaggaacttgagttaaagaacgaagaagtccctgtggtcatcagggctgagttagctaaggctcggagtgaatggaacaaagaaaagcaagaagaaatccacagaatccaagaacaaaatgagcaagattaccggcaatttttagatgatcaccgaaataaaattaatgaggtgcttgcggcagctaaagaagactttatgaaacaaaaaactgaactacttcttcagaaggagacagaattacaaacttgtctagaccagagtcgtagagaatggactatgcaggaagccaagcggatccaactggaaatctatcagtatgaggaagacatcctgactgtacttggggttcttttaagtgatacccaaaaggagcacatcagtgattctgaggacaagcagcttttggaaatcatgtcgacttgttcttcaaaatggatgtctgtgcaatattttgaaaaactaaagggctgcatacagaaagcatttcaagatacacttcctctgcttgtagaaaacgctgacccagaatggaaaaagagaaatatggccgagctctctaaggattctgccagccagggcactggccaaggagaccctggacctgctgctggacaccatgctcagcccttggccttacaagcaacagaagcagaagctgataagaaaaaggtccttgaaattaaggatttatgctgtggacactgcttccaagaacttgaaaaggcaaagcaggaatgtcaagatctgaaaggaaaactggagaaatgctgtaggcatcttcagcatttagaaaggaagcacaaagctgtagtggaaaaaattggagaagagaataataaagttgttgaagaattaatagaagaaaacaacgacatgaagaataaattggaagaattgcaaacactttgtaaaacaccaccaaggtcattgtcagcaggggccattgaaaatgcttgcctgccatgcagtgggggagccttggaagaacttcgtgggcagtacattaaagctgtaaaaaaaattaaatgtgacatgcttcgttatattcaggagagtaaggaacgagctgcagaaatggtaaaagcagaggtactgtgagaacgtcaagaaaccgcccgaaagatgcgcaaatattatttgatttgcctccaacagattttgcaggatgatggaaaagaaggggctgagaaaaagattatgaatgctgctagcaaacttgctacaatggcaaaattactggaaacacctatttctagtaagtcccaaagcaaaactacacagtcaggtatgtcaaagtgagtcgccaaatggtttttctatcttttcttctttagctatttaatattttcagtatgaagaaggcagggaaggtaaggagtgagagttaatttgtgaagttttgtatgttttacttaaactagaagtttacgcaaaaagagtacacagtttccaatttaagtaggcagactgagcatgcccatcagtttcctattgctgcttccatccctcgaaatgatagaaaagattttaaacagccaaataaagaatgagacaaagaagaaattataagtgggttttaaaaagttgcagtgggccaggcatcatggctcacacctgtaatcccagcactttgggaggctgaggtgggaggatcccttgatcccaggaatttgaggttgcagtaagctatgattgtgccactgtactccagcctgggtgacagagtgaggccctgtctcaaaaaaaaaaaaagggggggggctttaaaaagaaaaagtttttatccccggggggggcagattaaaatttttttttaggggtccccaaattgaatttcgggggccctgttttaaactgtggagagagggaaaaccccgggttttccccaattaagcctgttaaacacaaacattnttaacaccgcanggatttgtgttgggtgtcaagataatc

SEQ ID NO: 60456 - DNA, 763 bp, Homo sapiens
atttcctggtctttccgtggcgtctgttccaacgtcagtgcttcctgcctccagccggggtcagatcagagacagacagttggacgggagcccagcagtcctggcgggggatgtggggcaggccctgaccttgccgggactgtctcctttctctcaggggttcccagggacccagcccccacctgccagcccctccaccgtggctgtcctccgtgcctctcggccggacacctcacctggcctccaaggcacacctgcatatctgggaggccggggctgacggtgtaggctgggccacccagaccttctttctcaccctggccacaaaggggcctgcctggggaggggggttggggactccccagtaactctgccataggccagtacccaccatagctgctaatacctaccaacaccctgctgcagtaagtgacctgctgaacacagaagcactggaagaagcgtgtgcacaggcccctgaactcaggagggaaacaggcatcagagacacatagcagcatcgacctggccatacccagagaccaggctgtgctcagcgtccccggaccgtcctcctgggctctcaacacctggaccctcccagctgagatttcattcataaatctgacccccagagggctgtgcctggcaagaaaggtcagcgaggctgtccccagtcatccgggccgaagacagaatttaagggagctgcaaagagtaccctggggtggcagccatgtgcctgggaggcccctggtgccag

SEQ ID NO: 60457 - DNA, 2434 bp, Homo sapiens
ttttttttttttggggagaaaattaaaccttatttatttttaaaatcaaaccactaggaaaatatatcacagcctggaaacagcaaacggacaggctatattataatttcaagtaataagttggtgaaaattcaacgaagttgctatcaaaacaataaggtgccatgctggggcaggaacactgccagctgcacaagccccaggcaaaaatggtatttggtaatgggggctgtctctcctttgctctaagggagtcagctcatcctagcccaagttgcttactttttctcccttgaatttcctgttgccaggggtttgtctcaattgggctctgttaattcagggggctaagtaggcaatgctaggtgtaggctttcattccatatgttctaataaaaccaggttttcccaaatccagtacttcatttactctgttgtaatcaagtagccaactgctcctcttttactgttcattcctagatactagtatatatcacaatcaaaacccccttctcttcaaggggaaagtgttactgcaagattgtcctgtcattttgttacacacagcctcaggggccatcagccagtaattctgcttcccataattagtgtgtcatcacctctcatgtttctgcacagtctccaggctgaaagatgcagcatgtaataattttaagaaatgtacatccacatcttgatgaccagaaatggggatccacaaggaacatttcaaagttcttatccaaactagtctacctcccagttccacatcttaaaatcaacttgtatgcccttgtataaattaccccaaatcaagaaaacaaagacccagaaaactttctttcccttctaagttagtgacctcattgattttgtttcacagcttatggaagatggtggggtgacacttttggtaaacaggatgttggcaacaaagagaaaatatctctcctcagactccaccaactctaacctgccagcctgttagtacctgtgtagtaagaagagtctggtaccttggagggctctggcttgttacaggggagagccttactgccaggacaagcactggccacaggaaataataagctctaaaactctcctgtaatatctctgactcgatttagcaccacttttttccatttcattttttagggactgaaacataaaataaccagtgtccagaggcaagtgacatatgccttacgcttgtggccatccttcatttcttcattcgtaaactttgcttaaaagactaaaattcccaattccttataaaaaatatattcttgccctcagccctgatggccactggcaaatacttttattttccaattgataagagagcctccttcatcttcttggtcatagttgggatgaggtgcatgtggtcatccacacacttggtcacacaactgtccagctgctgcttcacctgaagctccttactcccagcatctattgaatctttggctttgtcgttgcaatgcatggtgcaccgggccaggcggtcctggaacttctccagctcactggtgaccaaagcctgggcttgagccagaggcacatggcagcgctcgatgcactggtgcacctgcttcatggaggcctggctgtcctcacaacagctggcgctgcaccggaacatgagaccctggggagaaagggcagagaggttaggtaggaaagtctctggggacagagatgactatggagcactacaggagttagaaggccacgtggatatttgctcctctctctccaccctctgctttcaccttccctgagaatagacaccaggaccttaaaaccaccactggggaaaattatcctcaatgtctagtgtagtgtttcatggtgtccttgctgctagctcatcggcacctgttgcaccgatggttgggtgaacagaggttcgcccgagtgggtgagggtagggtggtctgacgaagccaaattctgaaaaccaggagcctcttccatggggttcagaggtcagcaacctagcaatacaaattccaccagagggcagccgacccactaatcaatgactcaaggggcactatctgggaaacgcatactccgtgagagaagcaggaccgaaacacacagaggcattgcggggctcagagaagaacagtgtagaaacccgcgctgtgtgaagcgaggttgggcgcaagagaagcaggcatgacctggccaacggggaggccggaagtcctcgcctttctggtctttcacgttggcagcgcctctgctgggcctcgggccgctcacctgcatcttccggatgttctctctttccagactcttcaccatggactccaccgcctcctgcacccggagctgctgcagctcagccatggcgaccccgcgctgccccgcggcgctccgcgccggcgcccataggaattccaccacgctggactagaaa

SEQ ID NO: 60458 - DNA, 6164 bp, Homo sapiens
cgacctctgtcaagggcctgtgggtccctgacccctgggtgagcgagggcactgctcccatgggcctgggcactgtgccatcctccagtgggaaacaggaggtccccagggtctgagagaaccatgcagtccaggtgtgaaaggggtcctacaaggtcagctgaccatagagaccttgggaccaccaggaaatcgtgggggccctcagccaggggatggggtcagggctccttgagcctgttccgcccatctagctcccctttaaccccagggaagaagtagctcaggtggagaccctgggtctgcatgggggtcacgtgagctgcctgtagccagcaggggggagggctgggtgctgtcctgaggatgcaggtgcaaatggccatttctgggccacctgtgtgtatcagcatctgcagaggggcctggggtctggctcctggggttggcagccccaggggctctgccatggctgcccaaggtggtgatatttcctgtctgcctgttgggtgtggggcagtgccaccctgtcccatcccacctcatcagcacagaatgaagctggtcctatactcatcacctgtgcacatgaggaaactgaggccccaagaggggagcccaaggtcatattactggggatctgtgggctggcgtctgagcccagcactgtggcttcaagcccacatctgccctaggagggcccaggaggccctgtgatgtcattcccccgtgatgtcattcccccatgacatcattcccctgtgatgtcatacatgtgacgtcattcccgtgctgtcaccacatgatgtcatcccctgtggtatcacctctgtgatgtcaatacctcttttaatgtcatccccatggtgtcattccccccatgatgccatccccccatgatgtcagtcccccatgatgtcaatttcccacaatgtcttcccctgtaatgtcaatactccctttgatgtcatccccgtaatgtcatcccctgtgatgtcattccctcatgatgccagtgtgatgtcatctctgtgatgtcattccgtgatgtcaccccccatgatgcaattcccctgcaatgtcatgcccctgtgatgtcatcccccggtgatgtcatccccccatgtgatgccagtctcccatgatgtcccccctgtgatgtcattcatgtgacatcatcccgtgatatcattcccgtgatgtctcccccatgatgtcattccccatgtgatgtcaatttcccacgatgtcacccctctgacatcatcctctgtgatgtctcgcccatgatgtcatcccccatggcgtcattcttggtcgtggggggttgtggatcccctcctctcccctcccttggggtcttcctggctggtggggagaggtggcctggcctgggtgccacagcagctgctctggaaggtgcccgggctcttgggggccttggcccacgccatcccctggactgtgcggcgccctccagggcccagcttctgttgggtgttgggcacaagtcagaatcaagtgcatctggccagatgctgccagggccaaggatgcagctgcctgtggcctggccttggtgtagagccagagtcttgagcaggggctgaggggacccagatggtggggaggctccggagcatgtgaccagggaccgtcctgctgtggacagacctcctgggctgagtgttggtcgggaccgggccatgcacctagagatgtcctttgaccagtggggagggtctgggggtgagtgtggctgtgtcccttggctactgggccagtgtagtccagggcactctagggactccctgtgttctgacttgaatggagctattggggctgaaggggcaatggccctgtgtctcctcggagcttgcaggtcctcttggaggcccagagagagccagaggagggcagggtcactgctgcctcctcatggtatggaattgactgagcccatgctgggatctggaggccccaaaggaatgaggcctgtggccaggggccggcccaggagctggggtggctttcgggggagaggcccgcagtgctgggaggtaagtggtgatgtgcttggcagcctcagtgctcccttaggagggtctaggaccccacctcgaatcttcctgggctatgcagagccaggaagagaggccaggtggccttggtgggtggcattagatgctccagccctgcctggaactcccttgggggtcgggccacagccaagaagagtgctgttttgcctgtgctaaggccactgtacgtgcagagctggacccagaacctcgtccaaggcccccggcagtctcaccaggaggtgtttagagctggccacgtggagtggcatacctccggggggcgggggggctgtgagagggcagtggtgtgggcccttggtctgtgcctcccacaggacagctgcttcaatagcatctgtgccccctcctgcctgtagtccacccaccactgacccctggacttggctggcggattttcacaccttctcctgggggcaggtctcagcttgtccccaacccagtcagagccagtctcactccctgcctcaggcaactgtgtatgttttaatttttatttatttatgtattcatgagatagagtctcactctgtctcccaggctggagtgtagtggcaccatttcggctcactgcaacctccgcctcccgggttcgagccattctcctgcctcagcctcctgagaagctgagattacaggcgctcgccaccatgcatggctaatttttgtatttttagtagagatggggtttcaccatgttggccaggctggtcatgaactcctaacctcaggtgacctgcctgcctcggccttccaaagtgctgggattacaggcatgagccaccgcctgtaattttaatttttaaccaaactgagaacttgaggattgaatgcaggtaacgggtggtgttcatgtggatgtggattccatgaaagagggctttgtcctcactgtcggttctccacatgtaggtcctttgactcagcaggccttaggcctagtccacaggtgctgagtgaacagccccagcgtctgacagctccttagcttggggtgcacaggcagctgaagcagtaggatggcagctcagacttcccagggccccacgtgtgcagggctggcctcccagcaccaccaggcagggccggcctcccagcgccaccaggcagggccctgtgagtgtcccctccctgacacacaccttgtagagaggctgggcctgggcaggctgctctgctgcaccacatcccattctcaagagggtcccaggtcccaaaggaagcctgtagcccagtggctttctggaggtttgcatggctggcaagcctgggccggctgctggagaggcatcaggacaggagcaactctgctgactgctcccctcagcgagctctaagagtctttgggtgggaggcacatcacatccctgtcactcctggctggccctggaatgcctcagcccacacaccccactccagccagggctgtgggaactgtgtctgctcaggtacaaaaggctttgtttgttcttggacctcttggttctggtctgggcttcccacctcccatgctgtgagcccccacgggctgggaccgcagcttgccatgtgtctctcagtggcaccaagtggacgctcgaggcttatgttgagggagtgagagccaggataggccactgggcgtgctgggagcccacacaggcagggagcccagcgggaggtgccctgctcctgccagccccggttaccccagcaggctcggcacccactcagagcccccatttctgctccccaggcactccctgtgtgcctacctgcccttgtccttgtcctgggccagcttggctcctgcctcccagctctgaggaggcctctgcaggtagccgacctccctggacgagggggcagctgcctcctctcacctgggctcaccctgagccaagtcctctcaacccaggataaatggcctttctgaaggcccagagagcatgcctgccccagtgtgggagctgcatccgctccccacctgacagtgatggccaagagcccagtgttcctggagggctcccaaactctggacctgtaggggggtcagggcagtcgctggtccctaagggaaaagcgtgaccctcggccccaggtggctgaacccgtcactgccagggcgagctgtcacctctgtgagctgataaggccttgcttttaggacctctaatctctgcaagaacccaagctggctctgcctgtttctcctgagcagctcgcagtgttcaccacactccagcacgactcgggacaggcacgtgcgcccctctgcaccagctggagtccctcaggacacctggctggagctgatgggcatgggcgggtgtgtgcgagcatgagcccgcaggtctgtgagcttcgtctccctttccttcttcgcagtgtactaatggtcacttgatgtgcgctggctgttttatccacctactagcagatgcccggctgaaggaggagcaggccacgtgccccaattgtcgttgtgagatcagtaagagcctctgctgccggaacctggccgtggagaaagccgtgagcgagctgccttcagagtgtggcttctgcctgcgccagtttccccgctccctcctggagaggcaccagaaagaggaatgccaggacagggtaacccagtgcaagtacaaacgcatcggctgcccatggcacggccccttccatgagctgacggtgcacgaggctgcgtgcgcccacccgaccaagacaggcagtgagctgatggagatcctggatgggatggaccagagccaccgcaaggagatgcagctgtacaacagcatcttcagcctgctcagcttcgagaagattggctacacaggtgaggcgccccgccgcctgctgcatgccacacaggtgtgggttggggggctggcagccaggagtctgggggcagcaggctctgggcactgggcactgacagcgccggacagccgggctctgggacaagctcccggtggacaggtggacacctcggtcgagaagacaggccggagactgagtggaaggaggggccgaggcagaccccaggtgcacacctgtgtggctctcacagcagccccgcccacctgtcctcgccaccctggcttcaccacccctgcaaggtggcatctcactgtggggctccagagcctcaagacagtcacggtctaaccagaaagtgggcaggtctcagggggcctgggagctaggggcctgcccctcggaccctggggcaagaagagcaccctgccgagtgaggtcctacctgcaggcagtcactgccccggccatgggcctctcaaggctggcacgaagccattcagggagagggctccacaacaagctgagggtgcccgactcaaactgtagaaccgggagtggacacccacagacgcccaggctggatgcgtgcgcaggcacactggatctcgtggctctctgggccgctgccaccgcctttgaacgtgtcggggagcaggagccaggccagagtctggcccagaggacagcgagaagcacctgttgatgctggggccactggaggaagctccatccctctactctcagcccgcaccagggcggccagctcagagcaccaggcgtggcgcaagcagggtggtcgtgggcagccagtcccgccctgctgcctggactgtgcccagcgggatgtgggcccgagcaggccagagaggccgagggcctggggtctctgcggcagccacagcccgtggtgagtagcagccttagctgtcctggagataccggggcctcgtggagtctaggcaggctggggcactgtggctgtggccgtggccaggtgagaagccccattcgcgcaggaaagactggccacctgggaacccacgcctccacggagggacttgccggccacaggctgtgggctgcccaagaggactgtgcaggcagggctgcctgctgattggcagctccggatcaggcccggtgcctgcagacctggtgctcccctcgggcagggctgggtgccgcagccgcctgctggcttttctggcagctcctctgtatcagaaccaataaagtgcacttgttctcggaaaaaaaaaa

SEQ ID NO: 60459 - DNA, 973 bp, Homo sapiens
cccggtcgacgatttcgtcgcgtgagcagctgcagcggcagaggcagcatccagcggcggcgccagcagttccagtccgttgctttactttttgcttcaccgacatagtcattatgccgaagagaaagtctccagagaatacagagggcaaagatggatccaaagtaactaaacaggagaaacacttcctcttgagtgtcatcgtgcccaggggacttgggatatgtttcactgtgcttacctggagaaggtgatgggaatcatacattatagtcattcaacaaagtaagcccacaagacggtctgccagattgtcagcgaaacctgctccaccaaaacctgaacccaaaccaagaaaaacatctgctaagaaagaacctggagcaaagattagcagaggtgctaaagggaagaaggaggaaaagcaggaagctggaaaggaaggtactgcaccatctgaaaatggtgaaactaaagctgaagaggcacagaaaactgaatctgtagataacgagggagaatgaattgtcatgaaaaattggggttgattttatgtatctcttgggacaacttttaaaagctatttttaccaagtattttgtaaatgctaattttttaggactctactagttggcatacgaaaatatataaggatggacattttatcgtctcatagtcatgctttttggaaatttacatcatcctcaagtaaaataaatatcagttaaatattggaagctgtgtgtaagattgattcgagcattccatgcacttgcttttaaaatttagtccctgtgcatactgtgggtgtttttactgtgcatatttgaatttttcatgcagtttttctagagcaataatcagtggtgcttttgtacctaggttttatgtgattttaatgaaacatggatagttgtggccacctgctgactatttgtggtttaaaataaaaggtaaaaatgtctgcagaaaa

SEQ ID NO: 60460 - DNA, 2956 bp, Homo sapiens
  misc_feature (1)...(2956): n = a,t,c or g
gcgagactttgtctcaaaataacaataagaagctgggggagcttggattgaaagggaggaaaagatgtattacattttctcttgttttctagtgagttattctccccacctcagaagtaccagcttttggtgtatcatgcagattctctctttcatgataaggaatatcggaatgctgtgagtaagtataccatggctttacagcagaagaaagcgctaagtaaaacttcaaaagtgagaccttcaactggaaattctgcatctactccacaaagtcagtgtcttccatctgaaattgaagtgaaatacaaaatggctgaatgttatacaatgctaaaacaagataaagatgccattgctatacttgatgggatcccttcaagacaaagaactcccaaaataaacatgatgctggcaaacctgtacaagaaggctggtcaggagcgcccttcagtcaccagctataaggaggtgctgaggcagtgcccattagcccttgatgccattctaggcttgttgtccctttctgtaaaaggggcagaggtggcatccatgacaatgaatgtgatccaaaccgtgcctaacttggactggctctctgtgtggatcaaagcgtatgcttttgtgcacactggtgacaactcaagagcaatcagtaccatctgttcactagagaaaaaatccttattgcgagataacgtggacctattgggaagcttggcagatctgtacttcagagctggagacaataaaaactctgtcctcaagtttgaacaggcacagatgttggatccttatctgataaaaggaatggatgtatatggctacctactggcacgagaagggcggctagaggatgttgagaaccttggatgccgccttttcaatatctctgatcagcatgcagaaccgtgggtggtttctggctgtcacagcttctatagcaaacgctactcccgggccctctatttaggagccaaggccattcagctgaacagtaatagtgttcaagctctgctacttaagggagcagcacttaggaacatgggcagagtccaagaagcaataatccactttcgggaggccatacggctcgcaccttgtcgcttagattgttatgaaggtcttatcgaatgttacttagcctccaacagtattcgagaagcaatggtaatggctaacaacgtttacaaaactctgggagcaaatgcacagacccttacccttttagccaccgtttgtcttgaagacccagtgacacaggagaaagccaaaacattattagataaagccctgacccaaaggccagattacattaaggctgtggtgaaaaaagcagaactacttagcagagaacagaaatatgaagatggaattgctttgctgaggaacgcactggctaatcagagtgactgtgtcctgcatcggatcctaggagatttccttgtagctgtcaatgagtatcaggaggcaatggaccagtatagtatagcactaagtttggaccccaatgaccagaagtctctagaggggatgcagaagatggagaaggaggagagtcccacggatgccactcaggaggaggatgtggacgacatggaagggagtggggaagaaggggacctggagggcagcgacagtgaggcggcccagtgggctgaccaggagcagtggttcggcatgcagtgagggggcggcagctccatggccgcagtggcctgccctgctctgagcacttccgtggactgaaggaaccgtaggagcctgctctcagaaggacaatgattcagcatgtgattgcagcaggggtctctgccccctcgctcccaattcctagtcgtgacttcatttctaaaacagagcctgaccaaccttccatgtatctccatcctcccctgctccagccagggaggactgagggagtgccccgagacccacgcacatgttggggcttctgggccaagagtactttttatataactaatttctaaatccaaaagctcaaggaatagacagtgttctgtgacatggattggtttgaaggagttacccaccatcccagcacgataatgtcatctcccaagttggatggcagcacgatctggccctagggagcttcctgttcccagaagtcattgtcctgggctatccagatgtccctagtaaatcttgcttccttctgcaatgttagtaatgccttaagctgacagttgctattttgcagaacagttttcctctttgcttagctagtaacttgcctctgagcctgggctgatctgagaaacaggtgtgacaagagcatgaaccagaggtgcacctggggcagttccctaataaaactggtttgtacagtcatggtgttggggtgatcagaatggaagcccttttcaaaatagactcttagtatttttgtcttattcgcaatgccattgattcagccccagaattatttgcccagaaaatagactttccttnccccctggtgttgggaaccccaggagggttggaaaaagctcaggaaccctgagctggttcatctgtttgccatattgggtaggttaatttcccctggagcctgagagtctttggcccagatttccagctgcggtctcccctggctcttttgctgcagctgtgagattggggtctggttccagcagtctgtcactggtcagcctgagtatcacaccctgagctctggggctgggagtttcttccccacaccctctcccttgtgccttaagttgcgatggctctgagtatacaattaatcggaggtgaggggtgggtgtcacagctaatcccaaattcaaaaattagtccaaggtgctgcaaaatataaatttgatgtcagtagaaagtcgtatcctaaaatgtaaaaactgtaagtgtacagtagttaatgagctcagaacatctgataactgcaatttaaaatgggcaaaaagttaaaaaa

SEQ ID NO: 60461 - DNA, 971 bp, Homo sapiens
ggaccaagcatgtttggggctgtaacttcttttctgaggcacaaatgcccacccaagattattagaggaacgagggcagtgggcaggaaggtgagacgctgactttagaaatagctggtgattacagatttaattcatgttattaactccctgccttttacctcctccctcctcccttggcacaactgccagatggatgtggctggaagtcagaggacattctcgtgggttcgtgggcctagggtacaaatgacctcagcgtgacagcaaacaggacagagaagaccaggctcttactcaggaatccaccagccaggagaatgacaatgttgaacaccggaaccctgatgatatctgtcacatttgtaaggttgatttcagagtcaggagtggagacatcggcagttgacttgggtggagcttgggtcacagttctgggggtggtatagagtgggcacaaggccttagtggtggtaggaggaatcttatacacattctgggtagaattctcattggagccaggggtccctgaaaaacccttggtcaccaccaagcggatgcgatcgaacagcatgtgaggctccttgggaggctggtagatcacacactgatacagtccagaatcttccacttgaaggttgaccattcggacgcgcagtaaaccatgatcatggtagtcttctagtatgatcctccccacttggactggatgggaattctttgaaggcctctctgtgcatgccagggtcttgggcatctctccgtcccttattatctgccaagctttctggctgctggcaaacttctctagcgtgtagtcacatttcacatccagggtctgcccctctttcagttcatacttttcctcagttaatttagttgcagctcggagttctgagacaaagagcatccacagcagcccccagagcctggtcttcctcatccttcctgtgcaccagctccaactgctg

SEQ ID NO: 60462 - DNA, 1471 bp, Homo sapiens
  misc_feature (1)...(1471): n = a,t,c or g
ggaggcaggagatgggaaagaaaagtgtaattttgaatatgtagttggtaactattctcttactttgttctttgaaaaataggaactaaatccatgaaggattttcagttttactgtgtctgccttatagatcccacacctgcctcctgcaatacacacacacacacacacacacacacacacacacacacttaaactcacacacacacactctttctgtgaggacccagtaaacaattgctttatttttctatcagcacaattccaaatctattcgtgccccttagcccatctggctgtcagatccacaagagaaaaaggcttaatacccacaacagagccttgtttattacttatttatctccctccacccttgttcccgatgggatttcaggcggcttactgagatggacaatacggccagataacatcattcctgaattccttagcagggcacacaaagtcctttgtgagctgccagaatctatttccccagcctcgtccctgctgcctccctgccaactccccgtgcaaacacacattccagcaaccccccacgctgccttagttacccgaatggtccattgcgtttcctctcatgcctttgtggcgttttatatgctgatctctctgcctgatgagcccctccctgggcagtcctacccctctaagctggagttcaagcatgacctcctctgtgaagccttccttgatttcccgggcagatacagacatttcttctctctgctcacttaccacttaaatgtgcatggttccccctctaaatggaagctccatgaagccagagaccttctctttccagctatatttcccttgtgtctgctactggaaacatggaacgccgaggaggcagccttgacataaatgatgggcattgtggcaccggcttgggcagtgaaatgaatgcggccctcatgcatcggagacacacagacccagtgcagctccaggcggcagggcgagtgcggtgggcccgggcgctgtatgactttgaggccctggaggatgacgagctggggttccacagcggggaggtggtggaggtcctggatagctccaacccatcctggtggaccggccgcctgcacaacaagctgggcctcttccctgccaactacgtggcacccatgacccgataaactcttcaggggacagaagctttttgtctggagctgcccacaagaaagagggcaaggaaaaaaggctggactccatgactatatatacatacatctatctacatctgcctgtgtacacacacaactttttatactagtaatttattggcaattgggctggtaattagttgatgcaaaagggaactcaggtggagaataatattgacacttgcttttctgcccccctcaggggtgtgtggaaggcagtgggggagttgggaggggggcagggaaatgaaatggagttttgtcctggcnnannaaaaaaaaaa

SEQ ID NO: 60463 - DNA, 1287 bp, Homo sapiens
ggaggcaggagaacggaagctgggagcagggaaagccttttgtcctgagcttttctggcaagggactttgcatattggttttgcatctcatttacttctccattggttcaggataaagatggggaatcccctcctctccaaacctgcccccaaacccttccttcttgaaccagaactctcctctccccggtactccttcctggaccgcgctggaagccctggcggcggcggcccatggggcccttggcgctgcccgcctggctgcagcccaggtataggaagaatgcgtatcttttcatctattacttaatccagttctgtggccactcttggatatttacaaatatgacagtcagattcttttcatttggaaaagattcaatggttgacactttttatgctattggacttgtgatgcgactttgccaatccgtatctctcctggaactgctgcacatatatgttggcattgagtcaaaccatcttctcccaaggtttttgcagctcacagaaagaataatcatcctttttgtggtgatcaccagtcaagaggaagtccaagagaaatatgtggtgtgtgttttattcgtcttttggaatctattggatatggttaggtacacttatagcatgttatcagtcataggaatatcctatgctgtcttgacatggctcagtcaaacactatggatgccaatttatcctttgtgtgttcttgctgaagcatttgccatctatcaatcgctgccttattttgaatcatttggcacttattccaccaagctgccctttgacttatccatctatttcccatatgtgctgaaaatatatctcatgatgctctttataggtatgtattttacctacagtcatctatactcagaaagaagagacatcctcggaatctttcccattaaaaaaaagaagatgtgaagtacagcattccagtgtgacacgagaaaagacaggctgtggattcagtgcagtaaataaaacacaggaagtattctggtggaaaaattccttgtgttttgataaaaatccattacatgaaataactgcacatacccccaaaactctagacataacaggctatgtttttcacacattgtatttttaagacatatatattctccataccctgcttcaccaaaattcctgcttcatttggattttatacaagttatacttacattgtatgaagtctgattattttcctgtaagtttaatgaaaaataggagattagctgcaatagattcaatttaattaaaaaaccaaacttgaaa

SEQ ID NO: 60464 - DNA, 1318 bp, Homo sapiens
  misc_feature (1)...(1318): n = a,t,c or g
ttttttttttttcctgtctgtaaccatcagatttaattttaaaatttattaggcagtaggcaaacagatgttggggtagatgacctaaaagggttttcttttggaataatattttttaaaaaatcaaataactgttatcactttaagttgcatgagcctgaagctgcacctggagaggaatttaattttcatgacatgcaaaactgattaggcagtgaactctttcctcccgcttcccctgaacacatttataaacttcaacgggggtgaattccatctaatactttgaaaaccatttctcatctcacagtttacccaaatcatgtgcatgactgcaagaggaaataaacaagaaatctttaagcatagataagccacaatggatagttaatcttgtacagacaatccagcattaaggctaatttgatcttttaaacattttatgggaaacagctgttgagttttctctagaaaagcccacaaggttccataaccccataggcatacagcctcgacaggcagggctccatcaggctcctcttgaactgggcactccttcacggaaggcaggaatgcacgtgtcttcacttcctgctgctctgcacgcacgtcacgatatctggcagaaggtggtttctgttttccttggtgacattaaacaccttcacatcctttctgtttctgatttcttctacaagagccagtggctttcctttaggaactgggattgtgccaaggattatagtccctggggtagacagcgtctgacgaacagcttgaatgaaaagctgactgaagagctccatcttcccaatctcatcgatgacgcacactctttgccctgggccactgctgcagtcggcattcctcaagacgggtagtgccaactgctcaaaagaagtcaggtcgaccacatactgcccaactcggcattcacgttttccaggtggaggctctaacccaactctcgataaaggcccccgggtgccggacaacgtgacgacatcgaatcctattcttctccctccctgtctgacttcttcggtataaaatccatcaacaggcacaccagaggattttaaaacctcactggctttatggatcaatgttgtttttccaactcctgggggccccgttaggaacacgtgccgggccatgctggtgggcgggggtaggggttgcggtcaggggagcagtccaggttggggtcgcaattcaggtcaggtccggaccagggtcgcgaccggacgcgtgggtcgnccggggttttccgatggttctaantcagcgttcggataaatcccccgggctcctttcg

SEQ ID NO: 60465 - DNA, 2114 bp, Homo sapiens
tttcgtcgggctggaggggccgggactgggcagcgcctaaagcgccccatgccgcttaacgcggtctctcatagccgctcgccttcctttcacttcctgttccttcagaaagcgctgtgccttggaccaaccttacttcttactattgacagctcagctaactcctattcatccttcaaaacccatctctggtggtttggctttgaatgacagcaagaactctgtctttaatggcttcattggtagcgtatgatgattcggactcggaggctgagacagagcatgcaggaagttttaatgctaccggccagcagaaagacacttctggtgtggccagaccacctgggcaggattttgcatctggtacactggatgtgcccaaagcaggggcacagcccacaaagcatggctcctgtgaagacccagggggctatcgccttccattggctcagcttgggagaagcgatcggggatcttgccccagccagaggctacagtggcccgggaaggagcctcaagtcaccttccccatcaaagagccttcttgttcttctctgtggacgagccatgttccagccagccacatgcccctggcagctgcccgctttaagcaagtaaaactctccaggaactttcccaagtcatctttccatgctcaaagtgagtctgaaaccgtaggtaaaaatggcagctcttttcagaagaaaaaatgtgaggactgtgtggtaccctatactcccagaagactaagacagcggcaggcattaagcacggagacaggcaagggtaaagacgtggagccacaggggccccctgcagggcgtgccccagcccctctctacgtgggcccgggagtgtctgagtttattcagccatatttgaatagccattataaagaaaccacagttccccggaaagtgcttttccacctgagaggccacaggggccctgtcaacaccattcagtggtgtccagtcctttctaagagccacatgcttctctccacttctatggataaaactttcaaggtatggaacgccgtggactccgggcactgcctgcagacctactccctgcacacagaggcagtgcgggccgcccggtgggctccctgtggccggcgcatcctcagtggtggctttgacttcgcgctgcacctaacagaccttgaaacaggaacccagctatttagtggtcgaagtgactttagaatcactaccttgaaattccatccaaaagaccacaacatctttttatgtggaggcttcagctctgaaatgaaagcttgggatataaggactggcaaggtgatgagaagctacaaggcgaccatccagcagaccttggacatcctgttcctccgggaaggctccgagttcctgagcagcacagacgcttccacccgggactcagctgaccgcaccattattgcctgggatttccggacctctgccaaaatctccaaccagattttccacgagaggttcacctgccccagcctcgccttgcacccgagagagcccgtgttcctggcacagaccaatggcaactacctggcccttttctccactgtgtggccctaccggatgagcagacggcggcgctatgaagggcacaaggtggagggctactcagtgggctgcgagtgctccccaggcggtgacttgctggtgacgggcagcgccgatggccgggtcctgatgtacagcttccgcacagccagccgagcatgcacactgcaggggcacacacaggcctgtgtcggcaccacctatcaccccgtgctgccctccgtcctcgccacctgctcctggggaggggacatgaagatctggcactgagctttttgtcactgaaccttcccgatgccagctgggctcttggactcccctcttcctcaagggtagatgagaggaacgagcacagaggttggctgtgggtcctgggtaccaccttctgagcctcagtttcctcatctgtaaagtggggagaaaagtctgtttgcctcaggagtgtgaggactacactagtgaaagcgcctggcgggcagccggcgatgcccaataaatgtgtgttttgctgtttgttaaagtgatttcagcaaaaaaaaaaaa

SEQ ID NO: 60466 - DNA, 1534 bp, Homo sapiens
cgacgatttcgtggcgagtccggggcaggaagaacgcacggatggagacaacaggaaggaaagagaccttcctggtcacacttgggccacaggagaacaggcagcggcccaggaggatccagggtcctgatggtggttgagaagctggttcttagtgatcactcagaaacgtcggcctggccttgtggggtcagaccttgcatctcagtcagcccagggagaagaagaagatggtccacacccaagtgcagggaacatcgtggcagtcggctgggtgcctgcgtccaggcgaggacacctcccgcatcagggaaacacacgtttctggagtgaggaggctgaaggcagggcccagaggagagctgagccatggaaggaggtgtgtgcatggatggtgagctagagcaggtgcaggtgcctcagggaggatgtgtgggacgaactgactcagggaaccataagaaatgctttcaccaaacaggagaaacctgaaggtctgggtccagagcctcagatcttacactggcagcacacagggacacaacagttggactggcagcaacagggcttgcagcagctggactggcagcacacggggacacagcagctggactggcagcagcagggcttgcagcagctggactggcagcaggatgatccacagcctgaggagcagcaacagggcttacaacagctggactgggagcagccacaagaaccacatccccccttggaacccccacaggagccacagccccccttggagcccccacaggagccacagctggtgcaggaacaggctggcacccaggagcacacgggcttgcagcagcagacaggcacataacatctggagccacatcccccacagctggagctgcagcccccacagccagagccacagcccccacggccggagccacagcccccacagccagagccacaacccccacagctggagccacagcccccacagccggagccacagcctctggagcagccacagcagcccatggttctggtggattgagggtggagcaggtagaggagcaggtgagagggaggtgcaggtgtggagctccctgagcctgggctctttatatacctgtccagatgtcaggcatgacacagggtccctttcttgtgactgtttacactatttttccagagctctatttttttcctctttgctagtgacttccttctggctcagttgagcatctactttctttgttttctaaatttgtctttttccccatttgttttggcccctacaattaaaacctcagctccaggctgtctggttcttcctgcaaagctccagggtgctggtcacctgctctctgctgaccacatgtgaccaatgggcaacagcctctgcccacgtgctctaatctttcctgtgttgactccctcaataatattaattttacatttttagatttcaaaattatccacgatctttatactcatgccagtctcagctttccgggtgtgttagaccattctttgcattgctctaaagaaatacttg

SEQ ID NO: 60467 - DNA, 1544 bp, Homo sapiens
caacgatttcgtgtggattttttccaaatttccccacagctgttatcaaaacatgcaaatgagattttccaacaggatcttaaacaaatctggaggagttaatgccgaagcaaaataatcagcacgtttgaagtgactgcgaaaaagaacttctccgtcagtcacctgctagacctggaggaagccggggacatggtggcggcacaggcggatgagaacgtgggcgaggctggccggagcctgctggagtcgccgggactcaccagcggcagcgacaccccgcagcaggacaatgaccagctgaactcagaagaaaaaaagaagagaaagcagcgaaggaataggacaaccttcaatagcagccagctgcaggctttggagcgtgtctttgagcggacacactatcctgatgcttttgtgcgagaagaccttgcccgccgggtgaacctcaccgaggcgagagtgcaggtgtggtttcagaaccgaagagccaagttccgcaggaatgagagagccatgctagccaataaaaacgcttccctcctcaaatcctactcaggagacgtgactgctgtggagcagcccatcgtacctcgtcctgctccgagacccaccgattatctctcctgggggacagcgtctccgtacagatcctcgtccctcccaagatgttgtttacacgaggggcttcataacggattctaacggaagacactgaaaagcgccatggctacttattctgccacatgtgccaacaatagccctgcacagggcatcaacatggccaacagcattgccaacctgagactgaaggccaaggaatatagtttacagaggaaccaggtgccaacagtcaactgaggaaaaaataataattacacaggccctaaggaagaaatcaaaaaccataagacacctatcctgctctgttatttcttcatctgctggggggaaaaagtaaattacaaacaaacaaacaaagcagaactaaaatattgggaccatggcagagaaaagcaggagaggagcaaaatgaaaattagttaacaaatgttccgtcgctccctctgggataccaccaccacttgtttctgtgtgtgtttattttgtttttctttcattcatgctttgcttaatgtactccaggcttcttcagctaggttcagcccacccacccccatgcttgtaatcccagtgctttgggaggccaaggcaggtggatcacctgaggtcaggagttcgagactagcctgttccactgacatttcttagacattcagcaaaacccccaccttaacctcttttctttcttgagggttggtcctgtccccacctccaccctcccaccccctggaagaggaagggcccgggcatcagtggctagtccaaataaaatatgggcttggggatggaatgggtggtggtaagttcacagagtgtagttagatcccaactcccatgacctctggcttcagtggtgggtggggcagggcagatgaaagggcttcagtgggaacctctgagagcattttcctgttcccaat

SEQ ID NO: 60468 - DNA, 2968 bp, Homo sapiens
atcgtgaccgtgagagaagaagatggggcccctgcagtggcgccgcctggtgtggtggttagtcgggctaacaagcgcagcggcgcggggccgggaggcagcggtggcgggggagccagaggggcggaggaggaaccgccgccgcccctacaagcagttctggtggccgatagcttcgatcgccgcttcttccccatctccaaggaccagcctcgggtcctcttgcccctggccaatgtggcattaattgactacactctggaattcctgactgccacaggtgtacaggaaacatttgtcttttgttgctggaaagctgctcaaatcaaagaacatttactgaagtcaaagtggtgccgccctacatctctcaatgtggttcgaataattacatcagagctctatcgatcactgggagatgtcctccgtgatgttgatgccaaggctttggtgcgctctgactttcttctggtgtatggggatgtcatctcaaacatcaatatcaccagagcccttgaggaacacaggttgagacggaagctataaaaaaatgtttctgtgatgacgatgatcttcaaggagtcatcccccagccacccaactcgttgccacgaagacaatgtggtagtggctgtggatagtaccacaaacagggttctccattttcagaagacccagggtctccggcgttttgcatttcctctgagcctgtttcagggcagtagtgatggagtggaggttcgatatgatttactggattgtcatatcagcatctgttctcctcaggtggcacaactctttacagacaactttgactaccaaactcgagatgactttgtgcgaggtctcttagtgaatgaggagatcctagggaaccagatccacatgcacgtaacagctaaggaatatggtgcccgtgtctccaacctacacatgtactcagctgtctgtgctgacgtcatccgccgatgggtctaccctctcaccccagaggcgaacttcactgacagcaccacccagagctgcactcattcccggcacaacatctaccgagggcctgaggtcagcctgggccatggcagcatcctagaggaaaatgtgctcctgggctctggcactgtcattggcagcaattgctttatcaccaacagtgtcattggccccggctgccacattgagccaggtgataacgtggtgctggaccagacctacctgtggcagggtgttcgagtggcggctggagcacagatccatcagtctctgctttgtgacaatgctgaggtcaaggaacgagtgacactgaaaccacgctctgtcctcacttcccaggtggtcgtgggcccaaatatcacgctgcctgagggctcggtgatctctttgcaccctccagatgcagaggaagatgaagatgatggcgagttcagtgatgattctggggctgaccaagaaaaggacaaagtgaagatgaaaggttacaatccagcagaagtaggagctgctggcaagggctacctctggaaagctgcaggcatgaacatggaggaagaggaggaactgcagcagaatctgtggggactcaagatcaacatggaagaagagagtgaaagtgaaagtgagcaaagtatggattctgaggagccggacagccggggaggctcccctcagatggatgacatcaaagtgttccagaatgaagttttaggaacactacagcggggcaaagaggagaacatttcttgtgacaatctcgtcctggaaatcaactctctcaagtatgcctataacataagtctaaaggaggtgatgcaggtactgagccacgtggtcctggagttccccctgcaacagatggattccccgcttgactcaagccgctactgtgccctgctgcttcctctgctaaaggcctggagccctgtttttaggaactacataaagcgcgcagccgaccatttggaagcgttagcagccattgaggacttcttcctagagcatgaagctcttggtatttccatggccaaggtactgatggctttctaccagctggagatcctggctgaggaaacaattctgagctggttcagccaaagagatacaactgacaagggccagcagttgcgcaagaatcaacagctgcagaggttcatccagtggctaaaagaggcagaagaggagtcatctgaagatgactgaagtcacactgcctgctcctttgggtgtgattgagtgccctcctggctcctgggctgggacaagtgaggaactagctgcagagggatgagtgaccaccatccaggctgagactgaaaggagcagaggctggaactacagtattctttcccctgctagcaaccatgtgcctcccatcctgactgtggagttgggatgtggaagtggggctggaacaaagcttctgcctagggaggagctaagcaggcccggcagttggaggaaggccagaggaacagctttgtgctccggctttccctcagggaacagcagagagcagttggctctttctgctgcttgtatatgttaatattaaaagagagagtggtgtatttggtttgtctccatccctgactaatcagccagtgaagtatgtgaccagaatcacatgatagcctttccttaacacctgggggagagggaggacgggtgtgccacccactaggtggtactgtggtaccttgctaattaacctttcccatggctcatgggtagtggagggcggaggttcttttccagcctctgtggaccaacttgtgatcctggggtggtgtgcctaagcccgtttccatagagtcccattttgaacacttttctgccaaaggattatgttgccaaccatatgtaaagcccagttcctttcacatgccttttccagttgatctggtactcgttctgtcaggaagctgggccacgcttcatcagaaataaggaaatcagctcaaggtcacatgactct

SEQ ID NO: 60469 - DNA, 1375 bp, Homo sapiens
atgatcacttccagagtagaaaactatgaatgtgggatagccttctgaaaaagccacaaatttatgaaacattagagaattcttccaaggtgacaaattatataatgaaaaagctgttaccagaaactttcagcagacatcttattgataatatttaatcagcattctcattgaaatctgaaacaaggtatcttccatcagcataacaacacaacacttgagctcctagccaatgtattaagtaaggaaaacaagtatcaacgaagaactataaaaataacttttatacaagaaataattagaaaatgtgttgatagaaaacctaagaataaacacaacaatgagttaggtctttatcaagttataaaatatgttgaaaggcacaaaagaacacctgaaaaatgatattttgtctgaaaagacttgacattgtaaaaatataatttctctcccaaatcactaagtttaatatacttctgaagtttacatcagttttattttaaggaacttcacaaacttatccaaaaattttatgtggaaaagtaaagaaacacaaatagctgaaacaaacttgacaaagcaagtagagaagacacactctattattagatatatcatgtacttatttaaagctgctgtcatttaaacaatgtattaccaagtgaataaatcaagcagtagtaagatagtgagcattcatacaaaaatccaagaagatacaggaattctgtgtatgacagtgctattgaaatcactggggaatgaatggcttatttaataaatggaaggttcataggagaaaaattttagctttctactttatatcatatacaaaaataaaatccaactaaagaccagaatataaaaagcaaaattttaaaactatgatgaaagtagaatccgttactttagggtaacaagatttctttaaaaaacatgtaaacatggaatagtctgttgaattttggtgtattggcctcacaggcacccacaaatgtacacaaagagatatatatcactgtgttcctgaatcatggtttgtattgcccaaaattggatataacaaatttttatcaattgtggaatagatgaataagtgtgatcatttctgtgataaaatacagaatttagaaacaaaatctacctatagttatatggatagattacaatatataatattgagagaaaaaattaaaatgcacaaaggaacacagtataacatttgtataatttaataagatcttgcaaagaacagtactgtgtattggtcatggatccatatatgacttggttgccttttgggatgtgggaaaggtttggtgggagttgttatatttatctgtaatatttctttaataaaagagtgaaagcaaat

SEQ ID NO: 60470 - DNA, 1728 bp, Homo sapiens
aaggctgttgaactttattttctcggtacgtgctgtggctgtgtggggcattggcaccccaggtggccctcaggatcctcagccaggcctgactgcccatgtggtgtctgcgggggggcgggctgagatgcactgcttcagcatcatggttactccggaccccagcaccccaagccgcctcgcctgccatgtcatgcacctttcgtcccaccggctagatgagtattgggaccggcaacgcaatcggcatcggatggttaaggtagacccagagaccaggtacatgtcccttgctgtgtgtgaacttgaccagcccggccttggcccccttgtggctgcagcctgtagtgatggggccgtaaggctctttcttttgcaggattctgggcggattctgcagctccttgctgaaaccttccaccataagcgatgtgtcctcaaggtccactcctttacacacgaggcacccaaccagaggcggaggctcctcctgtgcagcgcagctactgatggcagcctggctttctgggatctcaccaccatgctagaccatgactccactgtcctggagcctccagtggatcctgggcttccctaccggcttggcaccccctccctgactctccaggcccacagctgtggtatcaacagcctgcacaccttgcccacccgtgagggccaccatctcgtggccagtggcagtgaagatggatccctccatgtcttcgtgcttgctgtggagatgctacagctagaagaggctgtgggagaggctgggctggtaccccagctgcgtgtgctagaggaatactctgtcccctgtgcacatgctgcccatgtgacaggcctcaagatcctaagcccaagcatcatggtctcagcctccattgatcaacggctgaccttctggcgtctggggcatggtgaacccaccttcatgaatagcactgtgttccatgtgcctgatgtggctgacatggactgctggcctgtgagccctgagtttggccaccgttgtgcccttgggggtcaggggcttgaggtttacaactggtatgactgaggtatcctgcggtggctggcgtgctgggcatggggcctgctcacagacagcatggagcagggaagggctgtctgtgcccatgctcagcatgccttgaggggaggaggtggtggccgtgggttcctgatgtcggtgcaggagctgaaggtgagtggagtgctgccaagaatatgcccgactccccatgacaagacagaactttgtaacaaacagtaccaatttattttggccgtgggtttttgctttttttccagttgatgactttgtgaacattcccaggtattggagcctctgtggccttaaatgtggctcagtggagggagacccagcatagccaggccagtatggagcacctcacgcacagctctcagaagctgcaggcggacgaacatctgaccaaagaggtgtggtcgaggctcctgaaagagaaagggcctgctggtctcatcctctgcttcctttgcctttaccctatacctctctgcacgtcccaccccgttttgctgtgtgctcacccccaggatgtgtacccggttgtagtaggagctgaaatccatgctgagctgtaccaggaacttgcatatctagagacagagactgagtcactggcccatctctttgctcttgtgccccaggccagaataaagaatagagtgtagagtgtc

SEQ ID NO: 60471 - DNA, 1653 bp, Homo sapiens
cagccttactgaacatctttccttctttcagccaactgctcactcgctcacctccctccttggcaccatgaccacctgcagccgccagttcacctcctccagctccatgaagggctcctgcggcatcggaggcggcatcgggggcggctccagccgcatctcctccgtcctggccggagggtcctgccgtgcccccagcacctacgggggcggcctgtctgtctcctctcgcttctcctctgggggagcctgcgggctggggggcggctatggcggtggcttcagcagcagcagcagctttggtagtggcttcgggggaggatatggtggtggccttggtgctggcttcggtggtggcttgggtgctggctttggtggtggttttgctggtggtgatgggcttctggtgggcagtgagaaggtgaccatgcagaacctcaatgaccgcctggcctcctacctggacaaggtgcgtgctctggaggaggccaacgccgacctggaagtgaagatccgtgactggtaccagaggcagcggcccagtgagatcaaagactacagtccctacttcaagaccatcgaggacctgaggaacaagatcattgcggccaccattgagaatgcgcagcccattttgcagattgacaatgccaggctggcagccgatgacttcaggaccaagtatgagcacgaactggccctgcggcagactgtggaggccgacgtcaatggcctgcgccgggtgttggatgagctgaccctggccaggactgacctggagatgcagatcgaaggcctgaaggaggagctggcctacctgaggaagaaccactaggaggagatgcttgctctgcgaggtcagaccggtggagaagtgaacgtggagacggatgccgcacctggcgtggacctgagctgcatcctgaatgagatgcgcaaccagtacgagcagatggcagagaaaaaccgcagagacgctgagacctggttcctgagcaagaccgaggagctgaacaaagaagtggcctccaacagcgaactggtacagagcagccgcagtgaggtgacggagctccggagggtgctccagggcctggagattgagctgcagtcccagctcagcatgaaagcatccctggagaacagcctggaggagaccaaaggccgctactgcatgcagctgtcccagatccagggactgattggcagtgtggaggagcagctggcccagctacgctgtgagatggagcagcagagccaggagtaccagatcttgctggatgtgaagacgcggctggagcaggagattgccacctaccgccgcctgctggagggcgaggatgcccacctttcctcccagcaagcatctggccaatcctattcttcccgcgaggtcttcacctcctcctcgtcctcttcgagccgtcagacccggcccatcctcaaggagcagagctcatccagcttcagccagggccagagctcctagaactgagctgcctctaccacagcctcctgcccaccagctggcctcacctcctgaaggcccgggtcaggaccctgctctcctggcgcagttcccagctatctcccctgctcctctgctggtggtgggctaataaagctgactttctggttgatgcaaaaaaaaaa

SEQ ID NO: 60472 - DNA, 932 bp, Homo sapiens
cattgccctaccggaaaacgggaggagggagctggcgagtagaagcacctgcgtggtgtgcgggggtggagcgggggctggagggagagttaatgatttgccacaggctcatttcgcaacttaaccaagggtcagcttcccgtgaccatgtaccagctgcgtcctctgggccacgctccacttgcccgcttccacccggaaagccccccaggctgagtgcggcatgatctccatcaccgaatggcagaagattggtgtggggatcaccggtttcggcatcttcttcatcctctttggaacactcctgtactttgattccgtgctcctggcctttggaaacctgctgttcctgacgggcctgtccctcatcattggcctgaggaagaccttttggttcttcttccaacggcacaaactcaagggaaccagcttcctcctggggggtgtggttatcgtgctcctacgctggcccctcctcggcatgttcctggaaacctacggattcttcagcctctttaagggctttttccctgtcgccttcggcttcctgggcaatgtctgcaacatccccttcctgggtgcgctgttccggagacttcaaggcactagctcgatggtctgaaaaacagagatgagctccttgaacttggatcattggttgaagggggctaagagggaagaatgggaaccaccccctcagtcccctgcactgactcactccccgacatatcccggacctccccaagtccagaaggaaaggaatggagctgagcaactgacgtcaaatccccaagtcgactcaagaggctgccaggaagcagagatgcagaccccaaggagactgggctggggctggtatcacaccctcactctatatttatgggaggaaaagtgaagattaaattcccaagttgtgcgtgtgaaaaaaaaaa

SEQ ID NO: 60473 - DNA, 1009 bp, Homo sapiens
atactcctgctgaccccccatcctcccgccccgggtctgacgggggagtgcccgtggctcgggctcactcccactatctctacggacacatgctctccgccttccgggactagccatggcccccagggctggcttcctccttctgggtttcacaggctcctctggccctgacccctcttgctcgttccccttccttccgcagctcctagtctcgtccgtgactttccggttgccctggatctcagaatatattcgtccaccccctcggcaccccattaccccgagtcccaccgtgtgtccgttgtaagtccggtggatgtggctggggtttcctggtattgtggaggcacccaggttgtccatgcttgggattctgggggaaggagagaagggcagctcagggtggatgtgaagccacccttcctcttctggacccagcctggtctgcactgcaacctccaccaggaccaggatcctgggccacaggctgggatggtccttccaagaaagggtcatttcagacgcagccctgcttgggctattcaatcttagggtgtctatccacgtctggctgtgccaaatggtctggcagctggttttggcatccccagcatcaccactcttccaacccatcaccgtgactgcagttcctgcccccattctcttggggtcagggaggggctgggaagggctactgaaggccccattctcccacaggatggtgaggctgggaggaggaagactgaggtagagattccaggccctggcataagctgaatcccaaatttgggtttgggaagaaccagagagaaatggatccctgagctctgagccaagggtgaggatggggaaactctaagctcccacctaataagaagcataggcagaccagccagagggagagccaatggcctctggtagccttaagcccaaaaggcagtgggaatgtcccctgccccaaccatcgggtggagcttctgctgggctatggggaagggaggtttctcgg

SEQ ID NO: 60474 - DNA, 1533 bp, Homo sapiens
ggccgcggtggcactgcctgatgctcggcccagtgtgccggtgccccgctgggtgacagtggactcccagggcgcagcatgagcaggtgacagactgttggctgaaggtgagggtgtccaccctcccaggcacacgttccagggagcacggcactcaagcagggccgtcagactgggctctggtgcccagaagctgtgcaggccggagagaagcactaccacccttcctgcgcgctatgtgtcaggagcggccagatgtttgcagaaggcgaaaagatgtatcttcaaggttcctccatctggcatccggcgtgtcgacaagcagccagaactgaagacagaaacaaggaaaccagaacttcctcagagagcatcatttctgtccctgcttccagcacctcagggtctccgagccgtgtgatttatctgttgtttatagtggtgcagacacgtcacatcaacagccgacagttggggcttgccagacacccaggcgggaccctgcagagtttgcaaataacggcacggatctgtgtacatcaacacgcacgctctcccagcgtgttccctaaaagaagcaagttaagggccaagcttggtggtgagatcctggactacagggacttggcagcccttcctaaaagtaaggccatctatgacatcgaccgccccgacatgatctcctactcaccctacatcagccactctgcaggggacaggcagagctacggcgagtcccctcagttgctctcgccaacgccgaccgagggggatcaggatgaccggtcctacaagcagtgccggacctccagcccaagctccactgggtcggttagcctcgggcgctacactccgacctcacggtcaccacagcactacagccgtccagctgccaggcgatcggatggggaggatggaagcttggaccaggataacaggaagaagagcagctggctgatgctcaagggggatgcagacacaaggaccaattctccagacctggacacccaggccttgtcccacagcagcgggaccgacagagaccctctccaaaggatggcaggggacagctttcactcacaatacaagatctatccgtatgactccctcatcgtcacaaaccgaattcgcgtgaaactgcccaaagacgtggaccggacgagactggagagacacttgtcgcccgaggagttccaggaagtgtttgggatgagcatcgaggagtttgaccgcctggccctctggaagaggaatgaccttaagaagaaagcccttttgttctgacggctgccagcctgccccactggtgtgtgccgggcgccgaggccaggggcccctggcgagaaccgcacacacccctcccacacaccttgctctggcttctctgtgtccatggggtgggcgggagggggtcccccagcaggtgcggcccctgcacctgccggcgacactcctgccggtagtttagggccgagacggctagcttcacgccacccttccccgctgtggcttggtgtcagggataggctgtaa

SEQ ID NO: 60475 - DNA, 1153 bp, Homo sapiens
ttttttttttttgggtgtgcaaaacttcctctttactgttcaactccttacaacttgcataaaggcgtcatttctacctcagagctgggggaagtcataattagtgtaccacccatgtgctgggcacagtgaattttaatgcctcccctttagaggagaggttatgataatgtgaagacccccccccaccacaaaggttgtccggcactttggtgcaaaaaggattggtccaatcttgtgctggcttggggtacagaaaggcactgaagttggtggctcaaactcctctgggctggggtggggcagaggtgaacagggaagtaagtggtttgggacaggcaggtttggatgtgggcttgggttcttgctgacggaggtagttggtcctgcgtgggggatggggtggtaagggcagcttgagcctcaggctgggtggatgctgctgtgctggcccccatctgcccagctcaccagctcactgctctggaaccacagctggatctcccgctgggccccctccacggagtcgctggcgtggatgacattcctgctgatgtggacgctgaagtcaccccttatggttcctggggcagcctcagccgagtcggtgtgtccaatcatggccctcgaggcgcggacgacattgtacccttcccagaccatggccaccacaggcccagagctcatgtagcggatgagggcagggtagaagggcttcctccgcaggtcctggtagtgctcggcaaggacgctctctggtgcctgcagcatcttcatccccaccagcgtgaagccccgcctctcaaagcgctggatcacgtccccaacgagccgccgttgcacgccatcgggcttcaccgccaccagggtccgctcccgggtccaggagggccctccttcctatagtcccaggctgctccagagccaagctaccctccggcatcgggtccctggtttccagaggagcccagaccctgtatgtcccacagaatctggacagagccaaaggggctccgccaggccaggaggaaaagttaaccccagcaggcggctgaagcccacgggaggaagaccccctggttggtttgttcccccaaaacccagtttgcagggcgccttgtgtagcctggggctctgctgcggctggtgcggg

SEQ ID NO: 60476 - DNA, 1127 bp, Homo sapiens
tttcgtcctgggtcctgagtttgagaaagcagagcctcgccccagcaggtactcacagccagagtgcgggggccccagcaggttctcacagccagccggtgggtgcacctcagagcacaggggcccagagccaggccactccttcagggccccaggtcgcttgctgccagttttggcctgtgagctcactggcctcagtgccaggtaaggacagccaccttcctgggaagaagaggtgaccccgggtctggtggatttcccacaggggccgtcagaggatgtccacagaggcagagcccttggggcctgtgggctgggttgggctggtggatgtggggcctgggacttctccagaagcttacttcctgctgcatgctttgccgactgtccttccacctctaagtgtccatcgtgcctgtgggggctgctgcaggctcctgctccgtcagcccacctgctgctgcgctgctctgggagcgagctccctcatggcatctggaacgctctcctgtcctccctgtgctcagggctggagagagggtggcggggctgcgggctccccgggccttctgggcccagccctgccacctgggcccacctcctctcactgtctctggctcacgcttcccgggcctggagctgggacctgcccataggcatctgaagacacgtcagcctcagccggggggagcccttgcttgacgctctctggcctccgggctgcctctcgcgcccgctctgggcccgctcttcttctcatgatgtctttcctttcacctcctgcgttgtctgacatcgtcgctctcttcataaattgtagcgttttatgttttcgttcataggagtgttttatttgatttttctttattttaaattattacatttaagttctttttattttatgctctaggttttgaagtttttctaatttcttaatttttttgttgttttttgttttgttttgtttttgtttttatgtactgtattttcagtgttttaaccaaacagttgtggctactcatggtgaggaatgaccgctaagagtttgggttctttcagtgcatttggaggtcactgctacacgttgatgtttagcagcttgagaggtttgcctttagtgtccacag

SEQ ID NO: 60477 - DNA, 1092 bp, Homo sapiens
tcttttggccgaagcggcctacggctgcgagaagacgacagaaaggggggaaccttgacaagcagcatggctgcaggttgctcagaggcgccgcggccagcggcggcttctgatgggtctctggtagggcaggctggcgtcctgccttgcctagagttgccgacttatgccgctgcttgtgcgctggtgaacagtcgctactcatgcctggtggccgggccgcaccaaaggcacatcgcgctgtcgccccgctaccttaacaggaaacgcaccggcattcgagaacagcttgatgcggagctccttcgctattctgagagccttttaggtgtccctattgcatatgataacatcaaagttgtgggagagcttggagatatttatgatgatcaaggacacattcatcttaacattgaagccgattttgttattttctgccctgaaccagggcagaagcttatgggtatagttaataaagtgtcttctagccacattggctgtttagtacatgggtgtttcaatgcctccattcctaaacctgagcagttgtcagctgagcagtggcaaaccatggagataaacatgggtgatgaactagaatttgaagtatttcgtttagactcagatgctgctggagtattctgcattcggggaaaactaaatatcacaagtttacaattcaagcgctctgaagtttctgaagaagttacagaaaatggcactgaggaagctgctaaaaaacctaaaaagaagaaaaagaagaaagacccagagacatatgaagtggacagtggtaccacaaagctagcagatgatgcagatgacactccaatggaagagtcagccctgcagaatactaataatgcgaatggcatctgggaggaggagccaaagaaaaagaagaagaagaaaaagcaccaggaagtttccaggaccaggacccctgtttttcccaaggccagttgacttcccagtggttaccaaagtgaccataaaaagaaaaaaaagaaaagaaaacacagtgaagaggccgaatttaccccacctttgaaatgctcaccaaaaagaaaagggaaaagtaattttctttag

SEQ ID NO: 60478 - DNA, 1491 bp, Homo sapiens
ttaattaaatttaatcccagggaaattagatgtcgaatttgaacacctaactttccatgtactctctcatttttgtcggaagtgtttctatactctaatgcctttacaaatgtgatttttctcttagctcgtttgaagtatgagaattagagtttttggtctcgcattcacctgctacatctaggattgcccactgtcatgactcccagggaaaaggtcctatcttaggcttcctcctccctactttcctctacatgggtcagcactgtaatgtaggctaaggatataggtaagggcattgctccctcccccctacacttcaagggagttcacaggtctaatggggggagttcaggaaggccagagtattaatatccccatctgtgtcttttgccttccatgaacctgggttttgagccctctcttgtaaaatgggcacagtaatattacctacctcagggagttgtgaggattaaacatgaagtgctaagcatagtgcctggtacaaagacagtactcaataagtgctacctaaaactagtattcatagcaatactgttaggataaagaattatcatatatgagatagttccaaatttttgtttttttaaaaaaaaaagagttttataagttcaagataatattttcttacttcaaagaaacaatctcacaacgagggaatggtaagaatcaggagagattactaacctggcagaggagctatcacaatcacaaaggtggtttttccagggcacggctcatccattacactccagatgtgctgacccctgccatttccccaaatgtgggaaacccaactgcacagtttgtagtagtgggtgactgtgttcatgcgctcccctgaaaacaacaacaacaacaaagaatcagaagagatactaggctgtctaattcctaaatccaaacctgatatttctaagtaagattataagaatttttattgcattttctgaatttgcttttgcataagttatgttatttttacagggtctatattactattatttcttagaataatactaattataaaacaaaattctgtatatcacatttaaatgtaatttaatagaattataatcacaagacaagaccaaactttgttgataatcctcagtaattgcgaaaggggtatatacatgtaggccagcatacatgcataaactacttcttattgctagtctaattgatccatatgtagcaaatacagcagttcagcaatatcttgtgcttacagggtcctaagcagaggtgatgagtcaagtgtaaatatatatatatatttttttatttttcatggcaattgtatattagtaacctggggagaaaaggtttattgacaaccactctgatccatctgctgctatttttactgctaatttggtgcacattaaaaagaatgatcatgaaaagatattactttgagttaaaagtatatatatatatatatatatatatatatatatacacacc

SEQ ID NO: 60479 - DNA, 1976 bp, Homo sapiens
aatttcccgggtcgacgatttcgtgcaaccctctggaggcagcgcgcccgcgggcagcctcgttgtggctccttgggctctgttggcggcggcgctagcttcggagtctcccgcgcgcacctcagccgcctcctagcggcgcggcgctcgctcctacgcctaaaatgaccaatgtgtgatttcagtggaataaatggcgtccaaagtcacagatgctatagtctggtatcaaaagaagattggagcatatgatcaacaaatatgggaaaaatctgttgaacagagagaaatcaaggggctaaggaataaaccaaagaaaacagcacatgtgaaaccagacctcatagatgttgatcttgtaagagggtctgcatttgcaaaggcaaagcctgaaagtccttggacttctctgaccacaaagggaattgttcgagttgtatttttcccctttttcttccggtggtggttacaagtaacatcaaaggtcatctttttctggcttcttgtcctttatcttcttcaagttgctgcaatagtattattctgctccacttctagcccacacagcatacctctgacagaggtgattgggccgatatggctgatgctgctcctgggaactgtgcattgccagattgtttccacaagaacacccaaacctcctctaagtacagggggtaaaagaagaaggaaattaagaaaagcagcccatttggaagtacatagggaaggagatggttctagtaccacagataacacacaagagggagcagttcagaaccacggtacaagcacctctcacagcgttggcactgtcttcagagatctctggcatgctgctttctttttatcaggatcaaagaaagcaaagaattcaattgataaatcaactgaaactgacaatggctatgtatcccttgatgggaagaagactgttaaaagcggtgaagatggaatacaaaaccatgaacctcagtgtgaaactattcgaccagaagagacagcctggaacacaggaacactgaggaatggtcctagcaaagatacccaaaggacaataacaaatgtctctgatgaagtctccagtgaggaaggtcctgaaacaggatactcattacgtcgtcatgtggacaggacttctgaaggtgttcttcggaatagaaagtcacaccattataagaaacattaccctaatgaggacgcccctaaatcgggtactagttgcagctctcgctgttcaagttccagacaggattctgagagtgcaaggccagaatctgaaacagaagatgtgttatgggaagacttgttacattgtgcagaatgccattcatcttgtaccagtgagacagatgtggaaaatcatcagattaatccatgtgtgaaaaaagaatatagagatgacccttttcatcagagtcatttgccctggctccatagttcccacccaggattagaaaaaataagtgctatagtatgggaaggtaatgattgtaagaaagcagacatgtctgtacttgaaatcagtggaatgataatgaacagagtgaacagccatataccaggaataggataccagatttttggaaatgcagtctctctcatactgggtttaactccatttgttttccgactttctcaagctacagacttggaacaactcacagcacattctgcttcagaactttatgtgattgcatttggttctaatgaagatgtcatagttctttctatggttataataagttttgtggttcgcgtgtctcttgtgtggattttcttttttttgctctgtgtagcagaaagaacttataaacaggtgggtataatgtagacttccgaataagaatattttatcgttttcataatattaaaagtattcctgaagtactttattatttcattatatcatttttacctaattattttttttttttgcttttatagtacctaaccaaataaaatcttaacaattc

SEQ ID NO: 60480 - DNA, 6248 bp, Homo sapiens
gcggccagactaggcccaagccgcggtctcgagtaggcccgagacggccgggccgaggggaatgttgtggaggaggctgcgtctgaagcacggttgagcggctggcgccgcgcggacccagcggaggggctgcgaggggaaggcgagcgaggttcccggcggtacggggactatcccagaattttacgcgcgtcgccgtaggggccggaactaccggacgagcctccgctgaggcgcttcgcagtcccggagctagcccggctgccggcgtgtcgctggggctgagctccgcgggcgtggagtccttgcagcccaaagcatgaggaggtccctgtaggattctggactgaagacgttcttgtcaggtttggggcgtgaggaggttcctgtcagttggggaagcgttaagattcctctatcgtccagagaggacgcgtgctgccgcctcccgcccctcttgacacgacgaacctggccggccgcagaacgctccagggccgagcgaagatggcctcggtgccggtgtattgcctctgccggctgccttacgatgtgacccgcttcatgatcgagtgtgacatgtgccaggactggtttcatggcagttgtgttggtgttgaagaggagaaggctgctgacattgacctctaccactgccccaactgtgaagtcttgcatgggccctccattatgaaaaaacgccgtggatcttcaaaggggcatgatacacacaaggggaaaccagtgaagaccgggagccctacgttcgtcagagagctccggagtaggacttttgacagctcagatgaagtgattctgaagcccactggaaatcaactgaccgtggaattcctggaagaaaatagcttcagtgtgcccatcctggtcctgaagaaggatgggttgggcatgacgctgccctcgccatcattcactgtgagggatgttgaacactatgttggttctgacaaagagattgatgtgattgatgtgacccgccaggctgactgcaagatgaagcttggtgattttgtgaaatactattacagcgggaagagggagaaagtcctcaatgtcattagtttggaattctctgataccagactttctaaccttgtggagacaccgaagattgttcgaaagctgtcatgggtcgaaaacttgtggccagaggaatgtgtctttgagagacccaatgtacagaagtactgcctcatgagtgtgcgagatagctatacagactttcacattgactttggtggcacctctgtctggtaccatgtactcaagggtgaaaagatcttctacctgatccgcccaacaaatgccaatctgactctctttgagtgctggagcagttcctctaatcagaatgagatgttctttggggaccaggtggacaagtgctacaagtgttccgtgaagcaaggacagacacttttcattcccacagggtggatccatgctgtgctgacgcctgtggactgccttgcctttggagggaacttcttacacagccttaacatcgagatgcagctcaaagcctatgagattgagaagcggctgagcacagcagacctcttcagattccccaactttgagaccatctgttggtatgtgggaaagcacatcctggacatctttcgcggtttgcgagagaacaggagacaccctgcctcctacctggtccatggtggcaaagccttgaacttggcctttagagcctggacaaggaaagaagctctgccagaccatgaggatgagatcccggagacagtgcgaaccgtacagctcattaaagatctggccagggagatccgcctggtggaagacatcttccaacagaacgttgggaagacgagcaatatctttgggctgcagaggatcttcccagccggctccattcccctaaccaggccagcccattccacttcagtgtccatgtccaggctgtcactgccctccaaaaatggttcaaagaagaaaggcctgaagcccaaggaactcttcaagaaggcagagcgaaagggcaaggagagttcagccttggggcctgctggccagttgagctataatctcatggacacatacagtcatcaggcactgaagacaggctctttccagaaagcaaagttcaacatcactggtgcctgcttgaatgactcagatgacgactcaccagacttggaccttgatggaaatgagagcccattggccctattgatgtctaacggcagtacgaaaagggtgaagagtttatccaaatctcggcgaaccaagatagcaaagaaggtagacaaggctaggctgatggcagaacaggtgatggaagacgaatttgacttggattcagatgatgagctgctgattgacgagagattgggaaaggagaaggcgaccctgataataagaccaaaatttccccggaaattgccccgtgcgaagccttgctctgaccccaaccgagttcgtgaaccaggagaagttgagtttgacattgaggaggactatacaacagatgaggacatggtggaaggggttgaaggcaagcttgggaatggtagtggcgctggtggcattcttgatctgctcaaggccagcaggcaggtggggggacctgactatgctgccctcaccgaggccccagcttctcccagcactcaggaggccatccagggcatgctgtgcatggccaacctgcagtcctcatcgtcctcaccggctacctctagcctgcaggcctggtggactgggggacaggatcgaagcagtgggagctccagcagtgggctgggcacagtgtctaacagtcctgcttcccagcgcaccccagggaagcggcccatcaagcggccagcatactggagaaccgagagcgaggaggaggaggagaacgccagtctggatgaacaggacagcttgggagcgtgcttcaaggatgcagagtatatctatccttcactggagtctgatgatgatgaccctgctttgaaatctcgacccaagaaaaagaagaattcagatgatgctccatggagtcctaaagcccgcgtgaccccaactctgccgaagcaggaccgtcctgtgcgtgaggggacccgggtagcctctattgagacaggtttggctgcagcagctgcaaagctggcccagcaggagctacagaaggcccaaaagaagaaatatatcaagaagaagcctttgctgaaggaggtagaacagcctcgccctcaagactccaatctcagtctgacagtaccagcccccactgtggctgccacaccacaacttgtcacctcctcctcacccctgcctcctcctgagcctaaacaagaggccctgtcaggaagtctcgctgaccatgagtacaccgctcgtcccaatgcctttggcatggcccaggcaaaccgcagcaccacacctatggcccccggtgtcttcttgacccagcggcgcccttcagttggctcccagagcaatcaggcaggacaaggaaagcgtcccaaaaagggcctggccacagcaaagcagagactcggccgtatcctgaaaatccacagaaatggcaaactacttctgtgagccctcctgtgtcccacccctcacccctttacccccattgccttctccattgtcaactcttggggcactcctggatcctatctgccctggacaaggtgctgaggtgcattgtcctgctttcttgggacttaccaaaggcacggacccctccaccgactccttctagttcccttccccactttcactagagcatcctgcctgccttctccactgaggagcaggtaaatgggagaggtttccagctgactagaaccctcttttctactcgtccaaaccactcccgtcacctgccttgtctgttctttattcttcatcccccgctagagctggaaggcaggatgaggagaggtatgaaggagcctgagccatgaagtgggaagcccagtgcttgacactttctgcaactctagccctatatccagaagcctgcccacctccacccattctgtttgccccatttccccagtccagtggacatgccccacctccagacttgctcatgggagaaggctgtggtctctgccccctcttgccaaatgcttcatggaaatgaagaggaaggcctagagcctccttcctgccccactgtgggccatttccagaagtggcctagaaatgccaacttcacttacctttcaaaagaaaggtgattcctatcacttgtcaaggtagggagaggtcagatgcccaagcctttgaccacggttttgtagcctgttggaggaagctacttttagctggctacacatgaggccacttgttttagggtgagctccagggatttgcctggattttgaaatcatgtagaacattatccacgtggctgtggctgtggctgtggctgggccctggcaggtggaaaaccatctcccagaaacctgaaagcacctgccaatgacgcagataaccctggccctacagcctgcttgctccgcctataccacagagcacagcctggacattatggagggtgtggcgggacggcccacacctggggtcctccatcgggaacttttcatgcttctttctccacctgaggtcttggtctgaagaagacctcaggactcacatcttcactcctgggcctttgcacttccagacgacaggtcatcgttcaagcagaatgcagacaggccattcacgagcccaagttgaagagaagagacgcccatccgtgaaggagcagaccatccatccgatcctccccttcccctgtccttccttcgtggattgtctccattgtccagacagtgcccccacctcccaccgccttgcctcactggcaatctggactcgatggagaacatccccccacctccatttggcactacccaagtggagtgtacccttgccctttccacctgtaccacccactccaacctcaccccagcttgcccaatgcttctggggaatttaatagctaccatgcaggccacagggaatttgtgaggcttcttttgtcatctttgtatctccagtttgtctttcttttctccatagccctgcctctactttccttccttgggaatcaggggttcctttagcccatttgctttctctaccttggggaccccaggggccaagcagttctccatctagtcacaccaaaggcaaaaagcctggctacctcccccctagcacgtgagtccctactcccctcccctctgtttctgcccagctttgcttattttggggatttcaaggcagcagagggtagtgaggggagagcaggagaagcctctgtcctgtataggcaactgcctgactatgcggtgactgctgtaaccaagatcaggtccccagcccttttgtccattaacaccccttcttgatctttcaaaggcagctaattgctagcaaatccccccgattccggccttttccctctatttctttgttagaagttttctgtggagctgaaacccagcctctgtttgactgggtttcatttagcttagttgggttcttagagccccctgtttgttgttttgtgttgtttccaatgaaaagcaagtttaccctcagagttatgcttttccaaagaggctgatgtctttgtttttgttttttttaatgtttcaggttctaagtgaagtgagttggggaggggttgggagtgttagtaatcaaggtttagaacaccatgagatagttacccctgatctccagtccctagctgggggctggacagggggaagggagagaggatttctattcacctttaatatatttttacaaaaaaagcaaacaatttaaaaacaagcccaccgcttctgtacatgtctaaatatatttttagaagtgggtaggattgtgaatttctgatgcagggcctttttataaataggttagggtagcatcattcagacttctctgttgtttttgtccctgtctttttcttatgttgtgttactaatgtaatttatattttttttagatcctccctttcctatagagataaaagtgatttatcttggcaattgctttgcttggcattctttttttttgtgatgagggtggtggtgtggtgcagggtctgggagtgctgccttctccttgtactctttgtctctccctcagcaagttgtcaggcatttccctggtgctcagccttatgcttgaagtgggaagggtattcccaccctcaggagggacacgcttcacac

SEQ ID NO: 60481 - DNA, 2085 bp, Homo sapiens
agaaaggccaattttctttttattttttatgactcacaacctatatgggttaatgtatcacaatactatctccattttctcttttatgggcaaaaagtcattagataatctgcctaagtataatagaaaaatattaagctagattaagaaaaatatttggataaaatatgtgaattaagtgtaaaatccttttggataaaatatgtgaattaagtgtaaaatccttaatattcccaaggcttgggcaggtcacctctttgagaaaaatgaggtggttaaggtcaaatctgtaggaagaaaatgcattattttgaaaggagtaacaattgctttaaaatttaatttacaggtgcaattatttgtgaagtctgaaactaataactatttcagaattttaaagaagaaaatggctaatatagacaggattactaattcaaggtattccaagtttttgttaataaagaccagccacttttaattagagatccaagtcttaatgtaaaaatcaggctttccaaagtctcattaacagatatattaaaggcgactattttatgacttactgaactaaaaaaaagagtcaaggtgacctcattaaagatatgtcgttcatttattctgaatcttatattgatagataataccagaagatttcagcatagcagataaaatacagcaaatcctaaccagcacaggttttagtgacaaacgggcccgttccatggacatagatgacttcatcaggtaattacatttttgttttcctaagtgtttacatttctttactgtgacaccttcagattggagattttaaaggcttttaagcggtataaggtgctacctgggagagttattgcatagcacttccatggcatggaatagtatttggtgtagaagatggaggctagttagctgcagcagaatgaacattttctttaagaacagtagtaaagaacagtccgagccagaaagattgccctttgtgttaatgtgggtgtgcaggttcccaatgtgggttgtgcaggttcctcccttcctgctccttccccaactctcattcatagtcttagtcttaatagcttatccctccaaaatagtccataaggtagaaaaatcataatacatgtaactggatctgatttttaaaatttccttactgggaatagctgttgttaaatcaatcttaagcatacaataatgccagttagaatcctacctggttatccatttaggaataatacagttttgtagcctgaagcaagttctacacttctcaagtaaaaagctgtcataattatctaggtaatttagaccaaaatttgttttgcttgaattaagcaagtaagtcttatgaaaacagaataaggcttcaattaattacccaggtaattactaacctgtacttactgtttttaatcattaagatgttaactttcagaaggtcttgcctatttagccaattcacttttaaagcttccatgttctagaggctgaataaaaaatgagagtagattgttctaaaagtcattggtttgactttttctaagctggaaacacagttctatataactaagacaaatggagtttatattttattggctggctagcagtactactgagtcattttagatgttaatcctaggcattgaatactattcataaatatctactttgcttttttagaaatttatctggacctgtttctatgggccagcctaaacataacctcaggtctaaagagaaatattttctctttttcttcattttcactaaatttcctcaaagttattgggcatgtgcagtttactaactagaatctattaagtacataggtatctacagagagaaacaatgtgtatttaatttgaatataaacaacagctcaagagaggaagaaggggcatgtaagattggtttttcatctgacttctgccaattccaaacagcttcttgttcagttaccttgaaacaaatgccagtgagttcttaggcctgggataatgaaagtctaagataattttagtcaaattcattacgacataaaggctctaatgaaagaggcaccaacatggcatggttttaacc

SEQ ID NO: 60482 - DNA, 957 bp, Homo sapiens
tttcgtggggaagaaaggggcgaggagaggatgtggtgacgctggggggcaccgtggtggcggagggggcctcgccaaagggaggctttggcggggagaagtggccgaggagagtgggggggctggtgacatcagcccctcggaaaggatcggagcggtgctggagaatctggtaaaagcaccattgtgaagcagatgaggatcctgcatgttaatgggtttaatggagagggcggcgaaaaggacccgcaggctgcaaggagcaacagcgatggaatataatatccctagatgatggctacagtttctcatcttcccggctatgtcctatcacaatttgcatgctggaattgctcggtcttaggaacttctaataagaatactattctgttatctgaggggggaggggggatggggcccctgctacctgaccttaaacgatgattgaaaaaacgaaaaatggactgaaatccttaattggcagaaatgtagtatgacaactatccaaaaaggcatctctataagaaatgactaattgacaatctgctgtaccaaaagttggcatttgagcaagatatgacaagtccttagtgagcaacctactgtgtactagatgtcctgctaaacccttgaaccctactaataccttggcctgcacgtctctctcactctgttctgcaagtcaatataagtattaacattcgtgataaataaaaattctctgcatgtttcagcaatccctgtatctcgcgtctgtcttctgtcttccttcctttgtctgtcttttcccaccaaagcacaaggattaaggtggagacctgaatagcttcccccaccacttagttagctgaagcggggggaggggaggagctcttaaaaactgaacgcatcccatctgctgtatacatagaagggggaggaggaggaaccaagaccctaaaagtacttccagccttt

SEQ ID NO: 60483 - DNA, 2468 bp, Homo sapiens
cataacagcccggatctaacaccctcctccccctcacacaggcaccatggcatgccccctccaagcttgccagagctcagaataaccctgagaaccacgcagcaggatggcaagggctccgcttggggtcctgctcctcatggggcttctcggtacggacaggggctagaggggcaattggacacacacagatactgacatgaagggactgggaagacaaagacagagaccaagatggagacttagacacagtatttcgttcccaggcacagcataattggtttaggagatctgatactgatagtacactgcctcagaggcctgtgaggacccaggggaggcagaggggagagaggtgctccagcctcttcattgccaatgacccttccttcttgaccccatcgcaggcaggggtgtggggaagaacgaggaactgcgtctttatcaccatctcttcaacaactatgacccaggaagccggccagtgcgggacgctgaggatactgtcaccatcagcctcaaggtcaccctgacgaatctcatctcactggtaagctacccccaccctcatcttaagccaaaaatcccacttctggccccaaccgctgagctctgtcctaaagctcacttctggccctgaaatctcacttcaatcatccccatctcccatctgcagaatgaaaaagaggagactctcaccactagcgtctggattggaatcgtgagtcaaatctggggaatggtgtgaggtcttgtccagggcaccccttttcccccaaacccctcccaggcagcgccaggtgggagatgcagggcacgcggccttccatcccccaccccttaggattggcaggattaccgactcaactacagcaaggacgactttgggggtatagaaaccctgcgagtcccttcagaactcgtgtggctgccagagattgtgctggaaaacaagtgagaaccgggccagacgccaggctggagggaagccggcctggggtgcgggctggacttggttggggaagggggtactctgagagggtgcagacctgtgcaaaaagctcggtttccccgagcccacagtattgatggccagttcggagtggcctacgacgccaacgtgctcgtctacgagggcggctccgtgacgtggctgcctccggccatctaccgcagcgtctgcgcagtggaggtcacctacttccccttcgattggcagaactgttcgcttattttccggtctcagacgtacaatgccgaagaggtggagttcacttttgccgtagacaacgacggcaagaccatcaacaagatcgacatcgacacagaggcctatactgagaacggcgagtgggccatcgacttctgcccgggggtgatccgccgccaccacggtggcgccaccgacggcccaggggagactgacgtcatctactcgctcatcatccgccggaagccgctcttctacgtcattaacatcatcgtgccctgtgtgctcatctcgggcctggtgctgctcgcctacttcctgccggcgcaggccggcggccagaaatgcacggtctccatcaacgtcctgctcgcccagaccgtcttcttgttcctcattgcccagaaaatcccagagacttctctgagcgtgccgctcctgggcaggttccttattttcgtcatggtggtcgccacgctcattgtcatgaattgcgtcatcgtgctcaacgtgtcccagcggacgcccaccacccacgccatgtccccgcggctgcgccacgttctcctggagctgctgccgcgcctcctgggctccccgccgccgcccgaggccccccgggccgcctcgcccccaaggcgggcgtcgtcggtgggcttattgctccgcgcggaggagctgatactgaaaaagccacggagcgagctcgtgtttgaggggcagaggcaccggcaggggacctggacggctgccttctgccagagcctgggcgccgccgcccccgaggtccgctgctgtgtggatgccgtgaacttcgtggccgagagcacgagagatcaggaggccaccggcgaggaagtgtccgactgggtgcgcatggggaatgcccttgacaacatctgcttctgggccgctctggtgctcttcagcgtgggctccagcctcatcttcctcggggcctacttcaaccgagtgcctgatctcccctacgcgccgtgtatccagccttagctcgcaccgacttcaatttcccacccatctccagtaggaaattgattttgaaaaagtaggctgccgccaccacggcattatgatcccttccccctgctgatcaatctgcagtttgtgaacttcacaagaatggtgtgtgcccgttccctggcgtgtgtaggcctggccgcagtccaggggtcagcaggaggaaagggttcacataggctctcaagtgccagtcttccagaaagcaaggactgccctt

SEQ ID NO: 60484 - DNA, 393 bp, Homo sapiens
tttcgtgagctcgcgtgcaggagtcactgggtgtgcgtgcgtgtgttatgggtttgattccagagcaggttgcacattggtcctgggtggctcgcaggctcaggtcgtgcttgggcgtcctcctcctaatcgtttccgaagtagcagcagcagcaccaccaccagcagcagcagcagcagcagcaccaccaccagcagcagcagcagcagcagcagcagcagcagcagcagcagccgccgcggcaacatcgagctcagcggcacagcaggcagaactgtgcagaagcgagcaccgtttggggagtccggggggcgggtaagagggaggagggggaaagcctgtcttggtctttgggattattttttttccccttccttccctctctctctctt

SEQ ID NO: 60485 - DNA, 651 bp, Homo sapiens
tttcgtgctgctgcttcgccacctgctgcttcgccacgaaagagttcccgtgccgtgggagcaagtctgggacctctggtcggaacggagagtcgcagctgtgtgttagggctaggatggctccgttatgcgcgtgaggcaagtgaccttgcgtgtaaagggtgaggaatatgaggctgcggcggggcggaggggcgcgagcttatacttatgtttatctgacagaagaaatgttatgatcacgaaggtggtttttccagagcaaggcttagcagttttactgtggatgtgctgacccctgtgatttccccgaatgtgggaatcttgattacataatttgtggcagtggggaactgtgtctgtgtttttccctgggttgttgtcgttttaaaagtggattttgtttgctgtggaagcatatacaaggcgttagtataaactaataaacaggtctttgttcccatctgtaacttactttcaaagtaaagattttgccaggtagtggttggttctcacgcttgtaatctcagtagtctgtgagatgcattgataactttatgttaataccgctcgagctctggagtttgatgtcagtgtggtcaaatatggtggacccgtctctactaatctcttaacttttttttttgttct

SEQ ID NO: 60486 - DNA, 1478 bp, Homo sapiens
tttatttattttttttagcattagtcttccattgcaaccactgggctccctttgaacccggcccaatctttggtcccagcattttcccactccagtgtatccagggtgttccaggtgagctggggaaggaagtgagcatcggcctcagctgcagatctcttggagcagcggcatcatggcagacaggccctggatgtgctggatttggtacccgtagccctcattaatgctccggagctcagccagcaggcctagcaacttcgcatacagaaaccgatcccggggccttcgctgctggcccttgatgtagctttgcagagtcagtgccatctcctcttgcagctgatcaatctaatctctctgggtaactccaggtcggtctgtaagatagggagcaggagagaagagggccatggcagccaagagcacatactcaggctcttggagctgcagttttcgtagtgttccatggaagtgaaagagcaactccaaaaactctacctggaaccccacacgggctccatcttcaattgtgtagcgaagaggcccgcagaggaagttttgtgtttggagacagaaagtggtattgagtacgatgtgacagatttccacagctgctcccttgagaagggagatctggtcttcaatgggcagggaacggaagacgggcaggtccttagtaaacttgatgacttgcagtaccatgaaagtgttgatgtctgcgaagtgtgtgaccagaggcagcacaggggccagggtgggcaagggctggtgatggatgaacagatgagctggaggcctaaactgcacaaactgttcaaacatggtgcccatgtggcgggtgtgggcccccaggagtgtccggatcagctcttcttgctccttactcagttgcacaggtgtttgctgtgcccgccgctgggcctgctttgctcgccgcaatgccagggcttctgccgacagtatcatgtctttcctcatgccagcatctaagcacttctgcaacctgcaggctgggcagtggcgcctctgagtcttgctgacttcacagcttccagcaaaggggcaggtgggaccaatgcttttgctgactgttctcctgaagaaacccttgcagccctcacaagtcagcgcattaaagtggtagcctgtggcttggtccccacataccacacagttcctcagctcatcttccctactggccatgacgtcacgtgttggggtggctgtcacagactcctgcttctcttaggcagcatgtcacctgcaggccacagaatctggtatggaatgcctctccccaaactcccacgctgttgctggttttcctctgatctcaggagttgccagtgattggagttaggattatcatccctcctgctgcccagcagtggtcagtcatttttcatgagggatggactaggaaaatgaagtgtctattataaggagagttcctgtaacttaaggagcaagctcac

SEQ ID NO: 60487 - DNA, 2035 bp, Homo sapiens
  misc_feature (1)...(2035): n = a,t,c or g
ttttttttttttacacaattctctagtttatttgtccgaaataaatacaacctgagaacatccatttcaatgtccccaaacactatttatcccctgaaaaagcagcttaaaatatgggtgcacattttgcagcttatgttctttggttaggctctgaagggtgtttgttctgggctgggctaggctgggcctagctgtagagacacacctaagttccgttctctgtttggaggctgcacccagcctgagtccccaccagtcccctccaagagccctgatgctgcttccggagcacctgtcttcattgcctctcccttctgcagcctgaaaggagggatgttcaggactctgcagctctgtgtccagcccttgcagagagctttgtcctctgacatcagctaccacacaggctcattctcaactggcacagaaagggttacttctgaccctacagcagcttacccagggcaaagtgagagaaactgaagcacagctggtatatgggtttaaagtactctccctttaaccctgccaggaggctgagagtccctaaaaaatacagaaggggacactgcctgcctactccagttattccctggggccctgggccactagggagcaggaggacggggaggccacaggccaccctttgtctcctctttgtgggtgaggctcagaggattgggtccatgttctcctggtctgaggctgcctcatcatcatctggggactccagactgaggctcctgccccgccgcagggtggcatagaagtgcagcacacgggggtcacagcgaaccgccatggggtcaaagtccagcacacgtaggccctgcaggctgcgggcccgagaaagggccacataggcctggccactggcaaacacacggcccagagaaatctccacacaatccagggtcatgccttggctcttgtggatggacatcgcccaggccagctggaggggcagctgctgccgactgaggagctggcccccggtggcctgcaccgtccagcggtcagcgtggatgacctcagtgactccacacaggaaccgcacctggggtagccctctcccttctgcctcgaacccaactaccacccctcgggcaccattcaccaggccccgagacaccgataagtttttcaccagcatcacctgggcccccagctttagttgaaggagctggctaacaggacactgggcatccagggtactggccagctcagggttgctgtccatagcctcaaatctgtgtaccttacctggcagctcctgaagccgcctctcgttggtgagggccacatcatcctggtgggtgcagagcctcgtggccacaatcccatctcgccccaccttgtgggaagctgtggcctggagctggcgggtcacctcatctgaacacctgcctaacctcacggcctgcagtaaaaaaaagaaggtttggtttgcctgcctcccccccttggtcagctccagggtcactggcacacccctttttcaggttttggactggaaacaaaaccgtgggggctgggagcccttggtcacaggtggcagctgcaaaaagtccccccagatgatgagctggatccctccgaatggcttgttttgctgccggacagctttggccccggcctccagtttgtcaaacaggtctgcctccaccattgagatctcgtcaatgaccaaccgctggcagttcagccagccctgccgcacgcctggcctttgggccagggccacacactgggctagaggagcctggcctgagccgatgcctgcaaaggcatggagggtggtgcccccgatgtggcaggctgccaccccagtgctggcagtggcctcagtgcctgtggggggcagtgagcccaggattcgctttagcagatatgacttccctgttcctgcgctcccagtgaagaagatgctctggcctttcagggcggccctcagcacagcagcctgttcctcagaaagctgtggcttggctcgtgccgaattcntacaggccggtgcaaggggnnntccatt

SEQ ID NO: 60488 - DNA, 1027 bp, Homo sapiens
cgatttgactataaaaatatgccaacatcaatgatgacacaaatgttagaattatctggcttagcttgcaaagcagccatcataaaaatactccaatgaacaattaaaacattcttgtagctaatgaaaatttatttggaaagcttcaacaaagaaataggaagtcataaccaaaaatagaagataaaagagtcaaatggaaaattttgaactgaagaatacaataaccaatataaaaaactcaatgcatgggcagaatggaggagacagaggaaatattggtgaactggaggaaacaatataaattgaccatctatacaacagagagaagatagagtgaaaaaaagatgaaaggaacctcaaagaccttcgagattatagcaaaaaaaaccaaaataaaacaaaaccaaaaaccaacaaacagacagacaaaaaattaacctttgcattccctgagtcctagaagaccggaagatggcagacctgaaaaacattctaagaaataatggctgaaatgtgtttaaatttagccaaagacataaatatacagatttaagaaactgagtgaatcccaaataggataaactcacagaaattcatagcaagacactcatagtcaaacttttgagaactgaagacaaaaaagaaaaacaaaaagtcaatccagatgtccttcaaggggaagatgattaaaccaaccgtgatacatgcatgctaatagaaaaaaactactgatgcctggaaccacctggatgaatctctaaagaattatggagagtgacaaaaataattttaaaatgttacatagtatattggtttatttatataacaacatgattgaaataacaagatcatagaaatggagactcattaggggttaaggagggggaaggataagaaggaagagggagtggccataataggcagcacgaagtattcctgtgccgatagaaatatttcttatcttgacagtagcaatgtcaatatactgtttgttacactacagctttgcaagatgttagcattg

SEQ ID NO: 60489 - DNA, 1220 bp, Homo sapiens
ggcacgaggagattttcaacacttatgggcaaatggctaactggcaactgattcatatgtacggttttgttgaaccatatcctgacaacacagatgacacagctgacattcagatggtgacagttcgtgaggcagcattacagggaacaaaaactgaagctgaaaggcacctagtgtacgagcgctgggatttcctatgcaaactggagatggtaggggaagagggagcctttgtgatagggagggaggaggtgctgactgaagaggagctgaccaccacactaaaggtactgtgcatgcctgctgaggagttcagagagcttaaagaccaggatggagggggagatgataaaagggaagagggcagcctgacgatcacaaatattcccaagctcaaagcatcgtggagacagctgcttcaaaacagtgttctactgactttgcagacctatgccacagacttaaaaactgaccaaggtttactcagtaataaggaagtctatgcgaaactcagctggagggaacagcaagccttacaggttcgctatggtcagaagatgatcttacatcagttgttggagctgacaagttagcagtttccctgttccctgaaggaacagcaataagaactttattctaagctaatactcattgatgtttgaaaaagaggaaaatttggatctttcttttgcttactaaacaccaagaggaaaagtagcaaagttggtgtgctaggattaactcaggtaagggtgatgtgttttaggattgagaacagcagacttgggaatcactgctaattgttacttaaagcatgttacagctgttttgttctcagttttaaccaaagccagtggacatacggtagtaataagtaagtcttgttgtgtttcagcatttaataatagactttggaggtagacccctggtttaaatctaagtctagtttgaggaagtcacttaacctttattgaaaagactctggatttaataagctgtgtaactggtactcgatagttacccaaagttcagtctagatggcacaaaccacctctcagggaataaaccctaagacatcactcaaggaggacttcaattatttaattttgaactgttttgtcctctctggccataaaacttgacagtcatgaaaggtaaggcaaattttaagtgggttaagtttttaaatacgtatctactcattttctttaaaaaaaaaa

SEQ ID NO: 60490 - DNA, 1437 bp, Homo sapiens
ccagtctcagcttactgcagcctctgcctcctaggctcatgtgatcctcttacctcagcctcttgaataggtgggtctacaggcacccaccaccacgtccagctaatttttggatgtttttgtagagacggggtttcaccatgttgcccaggctggtctcaaactcttgagctcaagtgatactcctgccttggcctcccaaagtgttggaattacaggggggagccaccacactcagccttttttctatttcttaaggctcagtgatattactgtactactaaggaaaaaaagacaagttaatgagtctgaaagagtgtgtaaaaataggttatttcagcatctttaatggcttgagatacaaagtacatagttttaaaatattgagtacatcctatagggagataaggatataaagatgaataaactaatttcatatttatgatacactagtatcagttcagaatatgattctttatatataaatatttaaaagattgttcatcaaaacaaatgtcataaaatatttggtggtacagttttaataaagtagaatcagattcttctgtgaaatgaagtataaagctgatatcgtaactaataacctgtataataccttgcattattcctgtttccaatgaagtcagtgtagtctttacatctggggctagagacagaacagaggttctctttcagacacatctctgaggttgtgcttttgtagatttttttcctcaaacctatccttacctttctttttaatttgattttgctttaattgagggacaagcagggatagcattgttatattagccaatggacagataagattctatcatacatgttctataaacttaatggtacttccccagagtctgtagcctatatatcttttatcacttctctaatctcattctagctgggtagggagagactaatttttgaatcaatgagaaattcagtttggggattccaagtaaagtaagcagtcgttactattccttaaattttatgcaaaattctattttacttaatgtgttacttattctttgcaacaggaggtggtataacagacagaaatctacaaaggatccttgagggttcaggtgctacagaattccactgttctgctcggtctactagagactcgggaatgaagtttcggtaaaaatgtattcttcgattcaaataagaaggatgagattaatttttactttctcccaaatagaaaaactttggatgggggcatgattaatcaatggaatattgtgactactacataagtattgtagttgtttttgtagttgaaaaacatttctaaaatggttcttgtcctgtcttaaataaacaggctctttgaacataggtgaaccttgccttgtaaaggcattgctgaacttagaccagttaatagtaaacaaattctgcagttgagct

SEQ ID NO: 60491 - DNA, 2002 bp, Homo sapiens
cccggacctgcccacgctgcgtgccaagttgcagggactgctgcagttcctgagggatgccctgtccatttccaatgcacataccgtggatttctacacagaatccgtgtgggaggagctggtcgacttgccaccggagacagtgctggctgcgctgaggaagtcagcgtcggagacggaggccctgccctcagagacgcgccccctagtggaagcagagtgggaagcaggtatgactgattttcccaaaatattttgtgaaacttctcagaagttggtgagtgtggaagcctttgctctggctgcgaaatactattctgtacaaaacttgggaatatgtactccttttgaacagttgcttgtagcccttcgaggaaatcaaaaccagagaattggtgaaaatcagaaggcagttgagtttatgaatatgaagaaatctcatgaagttcaggcaatgtcagagctgattagcagtattgctgactactatggaataaagcaggtgattgacttgggttccggtaaaggctacctaagctcttttttgtccttgaagtatggcttataagtttatggaattgattcttcaaataccaatactcatggagctgaggagagaaacagaaaattgaagaaacattggaaactctgtcatgctcagtcaagattagatgtcaatggactagcattaaaaatggcaaaagaaaggaaagtgaaaaataaagttaaaaataaagctgatactgaggaagtgtttaacaacagtcctacaaatcaagaaaagatgcctacctcagctattttgcctgatttttctggctctgtaatttctaatatcagaaaccaaatggaaacccttcattctcagccacatcaagaagaaaatttgtgttttgaaaattccttttctcttataaaccttttgcctattaatgctgtagagcctacttcttcacagcaaatacccaacagagaaacatctgaagccaataaagagagaagaaaaatgacatcaaagtcaagtgaatcaaatatatattcacctttaacctcttttatcactgctgattcagaactccatgacattattaaagatttggaggattgtttgatggtgggtctccacacttgtggtgatctggctccaaatactttgcgaatatttacctccaactctgaaatcaagggagtttgcagtgtgggttgttgctaccacctcttatctgaagaatttgaaaaccagcataaagaacgtactcaggaaaagtggggatttccaatgtgccactatttaaaggaagagagatggtgctgtggtcgtaatgccagaatgtcagcatgtttggcattggagcgggttgcagctggccaagggctgcctactgaatcactcttctatcgtgctgttcttcaggatattattaaagattgttatggcatcaccaaatgtgatcggcatgttggtaaaatttattccaaatgttcttcttttctggattatgtcagacggtctctaaagaagcttggattagatgagtccaagctgccagaaaaaattataatgaactactacgagaagtataagcctcgaatgaatgagctggaagcttttaatatgttgaaagttgtactggctccctgtatagagactttgattcttctggatcgactttgttacctgaaagagcaggaagatattgcatggtctgctcttgtgaagttgtttgatcccgtgaaatctcccagatgttatgctgttattgccctgaagaagcagcagtgatttccattgaagcaaattattagatgtatttctctatgagacctgttgctgagattgcttttctaaacatatatgtcctgttatacaaaaatttttaaatgactgttatgtattttaaataataaaataatggctaacaacagaaggttataatccatttttccattgtcaaagcatacattaataaaagaagaacctgtcataattttaaaaaaaaaa

SEQ ID NO: 60492 - DNA, 1110 bp, Homo sapiens
gctttcctgaatgctgatgaccttgacatcttagaagaacagttgttgtttaaaggtgttgagtcaaatatccattaaattaggtttgtcagatatttcctcgaaattagattcagcttatgcattttttggaaggaataccacagaagtgatgttgttttctttctgttgcatccaatcagatgatacaggattttgatttgttccattactgttgacatgaattttgaacatttgataatgccagtatcagccagatttttccattgtaaagtcattcctttgtcctttgtatttaataagtatgtttagggactttgagactatgtcaatgtcctgttcttcatcaaaattccactcactcattcttagtattcattgacgtttactgatcgaactaattattattatgatagttgccaaatgttggtttttctaattcaatcatttctttagtgtttattagcattctactataaggaaaagcactatcttctccccatttattaattcacatatttacatcagcttggagttattgatttctattttattaaatagtttataattgattaccatccttatttattttaatgctcaaattgtcccaaattatggccaaagaaagctccttcaaactggttgctacgtccttttgacatggcccatcattctttaaacacattttacatctggcacaataacgtgctacatacccatcttgtatttttcctgccccatctttgaaatcagccattctcaaggggttccttcttaatctggctgttgttgtgttggaactcctggtaccatcttagaaccttaaggagacaagcgaaccaagccaataagctttccatgatgctgcttagagttaaacagagcccaggtactaagttatgtcatggagacagtgaactaacctctggactgcttgctacatgagacaattgattttcttattttctatgtagggtggtacatttcctcattttgagatatttcttcaacatatagcttttcattagtggggattttgtcaattataaccaaaaacaatgtgacgggatacccaagatgtttcatgttgtagcttgggtgaattacaca

SEQ ID NO: 60493 - DNA, 1049 bp, Homo sapiens
  misc_feature (1)...(1049): n = a,t,c or g
ttttttccttttagtaaaaaagttttatcatagcaaaaaatatgtatttataaggactgtcaggagggataggctatttccaatatcacagttttttttgttggtgccttgaaaagataagatttattactcaagagaatgaaatccactgataggttcacagaaacatgttccatctacagcgtaaactggaagatttttctggaagtggctgttggccgacgccaggtgtttgaataaagacagcagcatcttggtgttatactcaggaacagcttacccccttccatagggtaaaaagtggcttcttaggtctgcaagaattcgggttgtactcgggctactttccggaattctttagtgtgggtcttagggcactacatctcacaccagctgatgggaaccatctggatacctgactcactgtgggctaccaccactcccagctcgttctcggcggtggttagcaggtagttggactgtgcatcacctaaggagatcactttggccaagacaatgtcacctgggcggaaactcttataaatttcaaccttgtctttttcagttgctcggacatcttccttgcggatagttcctcgaaaagagttcttaagaggcatggaccccacatacaggatgtgtactttggcaaagcgtgaattgatgctagagaccttacaggttacaatagctcccacatctggcagtaactgggactctgtttctctcactacagacaccactggaagcgcgccattctcgctgctcttcatcagacagccggcaagcgacgaaaagatgtagccgtggcgggtgtaggtgccgctgcccgggctgccctcctccaagttacacagacgttcgccggggatgcagtatctcacaggtggcgccatgattgccgctgtcccaaaaccaggatgaaagcgaagtcgctttctcattggccaaagccaggcacagttccacagtaagacccgtgtcaattggtactccgnnnccnngcgagcggacgcgtgggtcnncacggaaattcggtcgtcaggtcc

SEQ ID NO: 60494 - DNA, 1053 bp, Homo sapiens
tttaggaaagacccttttattggggtggacacggagcacgcactagtccatgataaaaataaaatgactcaagagaaagatcccaagggccgacttctccccaacgtgcgtgcacgctgagtgaggcctgggcatgggaaagttccgggcgaagcgtgggacaagaccgagtctcaatggcctggaccggtgttgggggggagaaggccactcggctgtcctggtaggtcaggccaccccgggcccgcccctgtcgcccggccacagtaaagcccccgctagagactctcacagacacactctggttctctggagaactgggggcaggaatcggggaactggcccgatggaaggcgggggtcggggggacaatgttgttttttttaaaaagcatctaccaacatcacactactgggtctgatgtcccctttaaccaacgcttgatagcaggttacagcataaataaaaactcaaggaaaataaatacatcggctcctatgaggttggaagtggtgtggaacgcagggtgtggatgggccggcagggaggcgggcgggcggggtgcttacacatggcgggcaggcgggtgggcgaccgaggagcagacctggcaggaggcgcctgtggagttgagagtcttaagtgtcctcgtgcatgtctgggctgtcggtccgcgccaccttgcggggaggtgcggagctctcgccttccagctccacttgctcctggtctctcttcttggcagcgttctttttgtcccattgctgatgcaggtagcgcaggaggatgtttgtcttttctgtcacgatgatctgttcagacgggtactcgcgggtaggcaggtagactgagggccgtcggttcgaggctttgcacacggagtccgcgtgaaatcgactaaaattgcttttgttgtagacaggcagtcctttcaaaaaatctgccatcttctgtttcctccgtcgccgcctcggccgccgcctcagcctccaccgccgccaccagagccgccttcttagccgccgcctcacagtaacttccagccacggcaca

SEQ ID NO: 60495 - DNA, 2433 bp, Homo sapiens
ggacccatggctgcacgtgtaaaccatcgctggagtgtcctcctcgttggccatggcacaggtcaccccagcctgtggggccaaggcgcaagacctgtcggagaacagccaggcaaaagcacagagaattttgctctgtgactaccgctgccgccgccagttccctcacagcccctttgggggatttccttgctgaagccagcagaaagcccagcagtcccagcgcccctcttgccgccgtcagagctgcagtgatgccccaccagcacctcagcgggagccgctgcccacacccctgccccctcccctcagccttccaggaagcgaaggccagacacagggaaacagaaacatgttgcccttttatttgcgtttctcagaatactgtacaaagggagtaaaaatcctattcacactttgcttagaaagattttaaggtgaaagttccctatgatacacggggtgggagatgcagggtcaggagggagaaaacaggcccagtgacctctcctgttcccttggacccctggaagaggacacagggacccacaccttttcaaaattaacactgcccctagtccaactggggaggggagaaggctccagcccaggctcaggctcccggcctcactttcttctctgcaggctgagacagtgcctacaggccacgtcttgccccttcctctgtgctgcttgagcagggatcctacaggactctcaccacagaccccacatggggtggcctcacaacgccacatgtggctgccacatgagaggccctgcccagtgccagtctgtatgaggaagttaaggggtgagggcctgcagaggaccacagcacccatcgtttctgtcacagcttccccatacccccgcaggagtcagggccaagttggacctgtgcttacaatgactcacgggccttttccccacctgtctacccaacagccaacccaggagttaaacccacagcagcctccctcccctattactatcacattctgtgggtaaattaaccctccaagcctgcttccctccctgcccacatcccaaaggagattgggtctagcttctgtccctacccctccctcccttacaccagtcctctgctgctatgtggccccattcttctaagtctcgactcactagctctcctacagctccccaacctccaccaggccaggatggcagcagccctggccccctcacctctggaaccaagccatctacactctaccccatctttccccaacctgaccctccccactcccaaccaggacccacggtgggttgcagagaagctgccaaaagcctgggacttggattagacagctccctacccagaaaggcaaagacccatcccacacttgcttccatacacaaaagcacacactgcgtggcatcgaaaaaacctaggaatcacagtgaaacaatccagaagccgtaccgccctctgctccctatgcaggggttaaagtgctttggctgcctgagggcaaacaagtgagcaggggtttttcccctggcctcctgtcgcaactgcgtggtccatgttcagcccaggagcccagcccattccatgaccaactccatggagtctctattcaaaaagcaaaaggaaaagatcaaaaaattcagaaaaggtcagagcccagggggcctaccccaaccccactacaagctactccaagttggctactgggggaagcgaggggggaaattaggccagaggctcaacccccatctctggcagtgtccagaggcttcttctttctgtcttcagtgttgcagcacatgccttttaccctacccctcccctgccaccctgggcaggggaaggggctgcactctcagtacttattgattccaaaaatccggactccgtggagctggggcagcttggggataagcacgctcatcagggacacggtgttgagcacaaaatggatctggtcgtacttagtgtagaagctggtgaggaagtacagcacgatgggtgtgatggtcaagaacttccgagaggccgtgaactggaccccataatccatctgctcccagtgggttagcagcctcgccttgccctggtccggggtctcaaagggtgtccccttcaccgtgtgcaggaagatatacatgcccatgttgtgaatgaggttggtgagggtccagacgacagggacactcacaaacgggatgctcagcagcacgatgtggaggagaccgatggccagcacgtaggagagccagatgccacggctgttcatcacccgcgtgttggggttcacctcgctgtgcgctgtgcccacattcatcctgctgcccctctctgcgtgtggggccgaagatcaacggcccgggaacggttcccgggagcgggggccgctgctgctccagcagctgtaacaacccgcggctgcagcctccccgacgaaa

SEQ ID NO: 60496 - DNA, 1699 bp, Homo sapiens
atatagaagctgaggaaaatgtctaacacaaaatttggagaataagaaattagataggtcatgtaagtgaatgtaagtatagtgctatgggcatataaggggcatggatgaaacatcgaaaagttggaaatataatacgtccagacaaccaagtggcatgggtgttatactgtaagaaattttcgagaatcctatctgcaactccatgagggtaggatacgaagatagctgaggtaagtgaaggtcaggaagggtaagtcctgaaccaaactgccactgctagtaagcggcagagctgggattggaactaggggctgtctggcttcagatctttatccttaaccaccatgttatacggggactaaagagtgccggtgagttgtgaacccagacccttccccagccacacctggcaacaccccctgatctctgggaccacagctgggttgtagggaaagaatggagtctcctaaatggtgatttttctttatttccccgcaccttcaatctcatggcatggtctgcaggaaacctcagagtcctgccaactcgcaggcttcgctgatcgcatggcacctgggcaccccgccaaagagctgaaactcccaaggctcagccaggactctccagctgtggtgtttctaaaagccgttctgggtgagatgtagagccgagttttcccagtcgctcagtcctcctcccgtgaggacaacactgcttgctctcctggcttgcctcacccatccaggaaaaggtggggaggggctctaggcagcggcctctcctggttgaaagaaactgagacctgggccttccgtccagtttaacctggagcaggcctggcccctgggcaggctcagagcaggtcccccattcagcaaatgagggtatcctcctattttgccaacatccatcttcaccgacttggcctgaacccattctgagtacagagggacacccatgacagaaatcccaggtcaactctgctggaagccactgtgctggaagaggacttctttcactttgtccacgatggtccccacttcagccatggccccgagaccttcatctccgcacaccagcttcttggccacacaggggatctcgacatagccaaaggccttgagctggtctacctgctgcgctgtgatcgggtgctcccacatggcggtgttcatggccgggcagaagagcaggggcttgctgcggtcccaggcccgcatgacgcaggtaagcaagttgtcacagatgccactggccaccttccccagagtgttggcatcaagaggagccaccagcaggaggtctgcccacctccgcaggtcaatgtgcagaactgggtcagagcggctcttccacatctcccattcatcagcgtcgctgtagagggtgacaggaatgtcctgggggctgtagaaatgtttggctctctcagttgtgaccactgctacttccagcccaggaatgtccaaaagctttgacaccagaagaggcaacttcagggctgcgacactccccgtgacacccacaagaacatggaattttctctccatcaagggtgcagcagctggacaggaggcctttggttccatgtggggtctggtggcttcaagttctgggagcctgccaggcctgggctctataaagctgtcgggatttaggatccgcgccaggcgcgtctcggggccccacgcgtccg

SEQ ID NO: 60497 - DNA, 4729 bp, Homo sapiens
cggcaggctagctgtcggagacggcaagcacggatcgggcacggccggcgggtcgcagccgggctggaggccggtcggaaccgagcgggcaggaggccaccgctgcagcgcgggccccgcagaggaaggaagccggcgggcggggtgaagctcgtgtgtggagtgccacggtacaatcagacgacagatggacagtgtgacaaaagtgtcagaaaggattgggcctcgctgtgagagtcagcctggattcaaagtgttgacaagttgctgaaaaggaagccagtgagaggactgtggcacgcagaggaagtggagccctgtcttcggtcacaccattgatggaggacagatggacagccgtatggccagtcacctctcctcttaaacctttggagagaggtcctttgtcctctgctggacacataataggaattctaacacattctctgaattcacttttcataaaaacgtaaaatcagactgctctgtacaaccaggctcaactgttgcatggtagcagatttgcaaacatgagtgctgaggggtaccagtacagagcgctgtatgattaaaaaaaggaaagagaagaagatattgacttgcacttgggtgacatattgactgtgaataaagggtccttagtagctcttggattcagtgatggacaggaagccaggcctgaagaaattggctggttaaatggctataatgaaaccacaggggaaaggggggactttccgggaacttatgtaaaatatattggaaggaaaaaaatctcgccttccacaccaaagccccggccacctcggcctcttcctgttgcaccaggttcttcgaaaactgaagcagatgttgaacaacaagctttgactctcccggatcttgcagagcagtttgcccctcctgacattgccccgcctcttcttatcaagctcgtggaagccattgaaaagaaaggtctggaatgttcaactctatacagaacacagagctccagcaacctggcagaattacgacagcttcttgattgtgatacaccctccgtggacttggaaatgatcgatgtgcacgttttggctgacgctttcaaacgctatctcctggacttaccaaatcctgtcattccagcagccgtttacagtgaaatgatttctttagctccagaagtacaaagctccgaagaatatattcagctattgaagaagcttattaggtcgcctagcatacctcatcagtattggcttacgcttcagtatttgttaaaacatttcttcaagctctctcaaacctccagcaaaaatctgttgaatgcaagagtactctctgaaattttcagccctatgcttttcagattctcagcagccagctctgataatactgaaaacctcataaaagttatagaaattttaatctcaactgaatggaatgaacgacagcctgcaccagcactgcctcctaaaccaccaaaacctactactgtagccaacaacggtatgaataacaatatgtccttacaagatgctgaatggtactggggagatatctcgagggaagaagtgaatgaaaaacttcgagatacagcagacgggacctttttggtacgagatgcgtctactaaaatgcatggtgattatactcttacactaaggaaagggggaaataacaaattaatcaaaatatttcatcgagatgggaaatatggcttctctgacccattaaccttcagttctgtggttgaattaataaaccactaccggaatgaatctctagctcagtataatcccaaattggatgtgaaattactttatccagtatccaaataccaacaggatcaagttgtcaaagaagataatattgaagctgtagggaaaaaattacatgaatataacactcagtttcaagaaaaaagtcgagaatatgatagattatatgaagaatatacccgcacatcccaggaaatccaaatgaaaaggacagctattgaagcatttaatgaaaccataaaaatatttgaagaacagtgccagacccaagagcggtacagcaaagaatacatagaaaagtttaaacgtgaaggcaatgagaaagaaatacaaaggattatgcataattatgataagttgaagtctcgaatcagtgaaattattgacagtagaagaagattggaagaagacttgaagaagcaggcagctgagtatcgagaaattgacaaacgtatgaacagcattaaaccagaccttatccagctgagaaagacgagagaccaatacttgatgtggttgactcaaaaaggtgttcggcaaaagaagttgaacgagtggttgggcaatgaaaacactgaagaccaatattcactggtggaagatgatgaagatttgccccatcatgatgagaagacatggaatgttggaagcagcaaccgaaacaaagctgaaaacctgttgcgagggaagcgagatggcacttttcttgtccgggagagcagtaaacagggctgctatgcctgctctgtagtggtggacggcgaagtaaagcattgtgtcataaacaaaacagcaactggctatggctttgccgagccctataacttgtacagctctctgaaagaactggtgctacattaccaacacacctcccttgtgcagcacaacgactccctcaatgtcacactagcctacccagtatatgcacagcagaggcgatgaagcgcttactctttgatccttctcctgaagttcagccaccctgaggcctctggaaagcaaagggctcctctccagtctgatctgtgaattgagctgcagaaacgaagccatctttctttggatgggactagagctttctttcacaaaaaagaagtaggggaagacatgcagcctaaggctgtatgatgaccacacgttcctaagctggagtgcttatcccttctttttctttttttctttggtttaatttaaagccacaaccacatacaacacaaagagaaaaagaaatgcaaaaatctctgcgtgcagggacaaagaggcctttaaccatggtgcttgttaatgctttctgaagctttaccagctgaaagttgggactctggagagcggaggagagagaggcagaagaaccctggcctgagaaggtttggtccagcctggtttagcctggatgttgctgtgcacggtggacccagacacatcgcactgtggattatttcattttgtaacaaatgaacgatatgtagcagaaaggcacgtccactcacaagggacgctttgggagaatgtcagttcatgtatgttcagaagaaattctgtcatagaaagtgccagaaagtgtttaacttgtcaaaaaacaaaaacccagcaacagaaaaatggagtttggaaaacaggacttaaaatgacattcagtatataaaatatgtacataatattggatgactaactatcaaatagatggatttgtatcaataccaaatagcttctgttttgttttgctgaaggctaaattcacagcgctatgcaattcttaattttcattaagttgttatttcagttttaaatgtaccttcagaataagcttccccaccccagtttttgttgcttgaaaatattgttgtcccggatttttgttaatattcatttttgttatccttttttaaaagtaaatgtacaggatgccagtaaaaaaaaaaaatggcttcagaattaaaactatgaaatattttacagttttttttgtacaaaggacttggctgttaccccagggttaaaaagttcataacaaattttttttggactgttttgttgggcagtgcctgataagcttcaaagctgctttattcaataaaaaaaagaaatgaaaaagatatatgaatatgacaaagtattgctgagtccaacaatgttgttttaagactcttaaaatacgggtacctgggcaatggttaattttccataaaagaattgtgaacttcttgaaatctaggggagggggaatgtagtgaagggatgtatcaagtggggtggtgggagggggaggcaaggttatatgcactttctcatgatttacagagaagtgaataactgcaaagtgaagttgcttcttctacttcagtcttctctcactttgatttgctagttgttatcaattaatgacaattacaaacctactgtatctctaatacagtgtgactggtcaggtatttcagttcttaggaaggaagtgccaagtttgtttttgggttcctggaacagcgctcacctttgtttagaacactggtttaaagggataatcatctctgtcacattagactatccatcatgaccagcaaatactcattttaggaaaaaaaaaagcatgatctgaaaaatacttttggtggtatgttggttaccctcctagctttccatttggtttagaacataaagcaaatagacacagtcatactgtcactgctctggactgtgtggagctcgctaaagtcatggtcattgcaggaatccaagtggcagtccttctcattcattctaatcattgtatgtgcttcactacgggggggagaaggaaacgttagcatcatgtttcccatttagggcaggagtgagaggtctctcttcctgatttagatatgcaaaagctggtatgttcagtaggaactgtacatgtgttgggaggcataaagactaattagcaaccataatatggtcactaccctaatagactaaatgaaatcttg

SEQ ID NO: 60498 - DNA, 2137 bp, Homo sapiens
tttcgtggtgtgagtgggaggcggcggcgctggtggctgcagctgtggtgaggcgcgaggcggcgcactcgacggctgactggagcagcggtaaaggcgaggatggagaccgaaggatataagtcaaagagtacagcagaaaatgtctactgaacggacttcttggacaagcctgtccaccattcagaaaatagccctgggccttgggatcccagccagtgcaacagttgcctatatcctataccgcaggtatagggaaagcagagaagagcggctgacatttgttggggaagatgacattgagatagagatgcgggttccccaggaggctgtgaaactcatcattggccggcaaggagccaatattaaacagctgcggaaacagacaggtgctcggattgatgtggacacagaggatgtatgcgatgagcgagtgctgcttatcagtggttttcctgttcaggtgtgcaaggccaaagcagcaatccatcagatcctgacagagaataccccagtgtctgagcagctttcagttccccagagatctgtgggcagaatcatagggagaggcggcgagacaattcgttctatctgtaaggcatctggagccaaaattacctgtgacaaagaatcagaagggacattactactatcaagacttataaaaatctcaggaacacagaaggaagtggcagcagccaagcatttgatactggagaaagtttcagaagatgaagaacttcggaagagaattgctcattctgcagaaaccagggtcccacgcaaacagccaatcagtgtgagaagagaagacatgacagagccaggtggagctggagagccagcattatggaaaaacaccagttctagcatggagccgactgcacccctggtgactcctccacccaaaggaggaggcgacatggctgtggtagtgtcaaaggaaggttcctgggagaaacctagtgatgacagctttcagaagtctgaagcccaggccatcccagagatgcccatgtttgaaatccccagtcctgacttcagttttcatgctgatgagtacctagaagtctacgtttctgcttctgagcaccctaaccacttctggatccagatcgttggctcccgcagcctgcaattggataagcttgtcaatgagatgacccagcactatgagaatagtgtgcctgaagacttgactgtgcatgtaggagacattgtagcagcacctttacctacaaatggttcctggtatcgagcccgggtcctcggcaccttggagaatgggaacttggacctctattttgttgactttggagataatggagattgcccactgaaggacctcagggctctcaggagtgacttcctaagccttccatttcaagcaatagaatgtagtctggcacggattgctccctcaggtgaccagtgggaagaggaagctttggatgagtttgatagactcactcattgtgctgactggaagcctctggtagccaagatctctagctatgtccagactgggatctcaacttggccaaagatctacttatatgatactagcaatgggaagaaacttgatattgggctagaattagtacacaaaggatacgcaattgagcttcctgaagacatagaagaaaacagagctgtcccagacatgttgaaggacatggccacagaaacagatgcctctctcagcacgttgctcactgagaccaaaaagagctctggagagataacacataccctgtcctgcctcagcttatcagaagctgcttccatgtctggtgatgataaccttgaagatgactacttactctgaagtctgggcttcagtttgctcagccatctgctttgctgtgatttggcataggaattggtgcatggaggagaggagtgtatgataaaggatccatgcagtccttcctttattacacatatagtctggcttgctgtggaccaaattaatattctcctcccatcagactacaaaaaaattggactaccacgctacaagtgtgtctcccccattccacctccggatccctccccaaccctccagtgtttgaatactgctgtgttacttccaggccgttcaacgtcaggctcagtcccctctaccagtcatgat

SEQ ID NO: 60499 - DNA, 1200 bp, Homo sapiens
  misc_feature (1)...(1200): n = a,t,c or g
tttttttacatttggaaaaataaaactttattaaatcaaatgaatgagtatgtctgtttcctaagaaagacaatgataaagaatttggtggaaggtataataggggtttgttgactttgcttttagcctcatggtagttggtagagagcatgattagcttttttctgtatgtgactgcttcttcattgctgcagcttcagttttgaattgatgtctggactgccagcggcgtccattattccagacgcggccaaaagagggcagccagcctgcactggtcctggagctgtgatcaaagttggccccaactcggtctggggggagttttttcaacttctgtttttccttttctttaagaaattcttcataggatggtcctatttcttggttcccagcaatgtattcttcatcttggatcatccagggaggtgtggcacctgagtggatgttaccaactcctggtatatcctgatggccaatgaatgtcagagatggtcctgtctccatccagtcaagctctggagctggtggcaggtccaaatttgagggctgctgtaagctggaagctacttggctgttcatccctttccagcttctaggtgctgaagagccctcttctgggtctggcactgcctgaggctctaagacagaccgaaccacctcctgtcggctctgctccacctcacggatctgagctgccatctccttgatcactttatcctccttttcttcataggaatccaaacctttcaccatggatttcttgaatcgcgcataatcctggggagtgaccagaaacttctctttcatctggacctcagctttgttctcccaccagaatttgttggttgctttcttgtgctctgggctggccagatgctccagcagccccccgtacagcaccgtcaggtttccatggctcaggtgttcccgcacctcacagccgcagcacaggcaccagcagcatcgctcgtgttcgggcacatagcgctccacctgagcggcgcggatggccttgcgggccgcctccacctggggcaggagcctctccaaagcctccttcagctgccgctggtgcttgcggctgtaaacgtgcccgcgaccacagaagaaggtctggcggcacagagggcagcgctgcgccggcgccatagcccgggtacccggacgaaatcgtcgacatgatanntnnggcggggt

SEQ ID NO: 60500 - DNA, 721 bp, Homo sapiens
  misc_feature (1)...(721): n = a,t,c or g
tttcgtgctaagggaggactcagggccagaaaaagtgcccagtgatggaggagactgccctgagaggtggtgagcccccccgtcatggaggtgtgcaagctaacagcagggtcattcaatccgggagccctggattggatgtgtctcagacatggcagaaggattcctttatccagggccttgtggggaggccctccctgttgccaactgagtcgagggctggtggaagaactggtgattggacaggaggccttgaaaacttcccgggcagggggtgcctctgggtctggctttggcggagtggctcctagggaggagctggcctggggacatgccactggtggtgggttcctgggccccctctggagatgtgatcagtgagttcattccccccaggcctcacggtgcccggcttgttccaggagctggccaaggtccctggatgggctgaagtccttgtgcccatgttgtccactgtccacctgcgcctgcctgccgttgcccagaaagaggcctaatgagttccttgagaggcgtgtttaccaggcctgtgttcccacgggcccttgggactctctcagctggntcctccctttcctcgtggtggcccagcctggctttgtgtgcctggagcgggtgtgtccacacactctcacacttgcactttcatgcacgtgtctggccgcctcagctctggtcttggggctttgcctgggagaag

SEQ ID NO: 60501 - DNA, 712 bp, Homo sapiens
ttaagacacatcttcagtcacttctctctgcctgtgtctcaggaagaccagctcctcctactgtcttctgtgctagggatcacttccttgttgagtggggccggagttttaagaggatcttctgctcctcttcatctggtccgtttccttccaaggcccccgagaggaaggcatgcggtgggccctactggtgcttctagctttcctgtctcctggtgagtacgctgcctacagagaggctcacaggttgggttttgttttgttttcttcttgaaaggggtgccatacaaaggaatacctcattgtattttgtgttgttcccattgcagccagtcagaaatcttccaacttggaagggagaacgaagtcagtcatcaggcagactgggtcatctgctgaaatcacttgtgatcttgctgaaggaagtaccggctacatccactggtacctacaccaggaggggaaggccccacagcgtcttctgtactatgactcctacacctccagcgttgtgttggaatcaggaatcagcccagggaagtatgatacttagagcagactccgggacacaccaacacacatgatcctcagtccttttaataaagcacgttcaacccttctcagagtgaccttgagtggttgcctccatgagtccaacatctgcagtccctcagctggaggcctgagacgaaatcgtcgacccgggaattcc

SEQ ID NO: 60502 - DNA, 478 bp, Homo sapiens
taccgttctcggaattcctgggtcgacgatttcgtcccggagtgatcctggcagccggtggggaagacaaggagggtttgagcatggcagaaggaaacaccctgatatcagtggattatgaaatttttgggaaggtgcaaggggtgtttttccgtaagcatactcaggtatgtggcctgcaggctttggggtggtaacctaggttgtgggcataggaacaagggacgtgttcttgacaaatgtgaactaggagccgctggctatttggtagctgcatggcaaagaggtagtttgtagagcaatgagtatgaaaatgctgtgcaatcggtaaaacatggtgtaaatggaagatcaccctgctgttattattagtcagtggtgcctgagcatctagatacacatattaatgagcttctctcttccaagggaaatagagggcttccccagtgctcgccgttgtggcatcatcaaaccaagt

SEQ ID NO: 60503 - DNA, 2176 bp, Homo sapiens
acgtcgacgatttcgtggaggagggaagtgagatggcggaaaggaaaactgcttaaatgatttttaaagatcttgagtcacagtgaagcaacccactggagtgagcattgctgcatttggagagtcagatgccattttgttgtactcctgtttgatcaagtggccagtttaactagatactagctttgaagaagttctgtattggcccctggaatgtgacagttcataccacattgaaaaggctttgtgaatgccggtccactgatggctgaactgcaggtctctccccagtggaaagccccagagatgagccagatctgcctcagctgtggccatccgtcagcgtaagggccgcgatgggcctcttggaacattggtgtgttcatctgcattcgatgtgctggaatccacaggaatctgggggtgcacatatccagggtaaagtcagttaacctcgaccagtggactcaagaacagattcagtgcatgcaagagatgggaaatggaaaggcaaaccgactttatgaagcctatcttcctgagacctttcggcgacctcagatagacccagctgttgaaggatttattcgagacaaatatgagaagaagaaatacatggaccgaagtctggacatcaatgcctttaggaaagaaaaagatgacaagtggaaaagagggagcgaaccagttccagaaaaaaaattggaacctgttgtttttgagaaggtgaaaatgccacagaaaaaagaagacccacagctacctcggaaaagctccccgaaatccacagcgcctgtcatggatttgttgggccttgatgctcctgtggcctgctccattgcaaatagtaagaccagcaataccctagagaaggatttagatctgttggcctctgttccatccccttcttcttccggttccagaaaggttgtaggttccatgccaactgcagggagtgccggctctgttcctgaaaatctgaacctgtttccggagccagggagcaaatcagaagaaataggcaagaaacagctctctaaagactccattctttcactgtatggatcccagacgcctcaaatgcctactcaagcaatgttcatggctcccgctcagatggcatatcccacagcctaccccagcttccccggggttacacctcctaacagcataatggggagcatgatgcctccaccagtaggcatggttgctcagccaggagcttctgggatggttgcccccatggccatgcctgcaggctatatgggtggcatgcaggcatcaatgatgggtgtgccgaatggaatgatgaccacccagcaggctggctacatggcaggcatggcagctatgccccagactgtgtatggggtccagccagctcagcagctgcaatggaaccttactcagatgacccagcagatggctgggatgaacttctatggagccaatggcatgatgaactatggacagtcaatgagtggcggaaatgaacaggcagcaaatcagactctcagtcctcagatgtggaaataaaaacaaaacacctgtatggctgccattctcttcagccctcgctctcccctttccacagcctccacccctgacccccatcctcttttcctacctctctgtttggtttagaaattgctcaataagtcatttggggtttggcatcctgcccagccacttcccaaacatgaagacctctctgttgctttatgttggacatgccccatagccatcccaacgtcctccccagtcctctcctggcaccagcaccttagaagttgttggcagaaggcacttaaactgtgggagaagtgtgcacacctttgagtcccttccctcaaggttaaagctcctgtcagactctcagaagggtctgtgggtgttgtatattaggcaaacaggggaaagcttagaggtccttctatatgtgttaataagctgtttctaagtgtttaaatttgaaaagcatcatgttctcatgatttatgggaatgaagcaagtactgaaatcaaattaaatactccctgggtcctgggtcagtttgaccctagccctggggtgaggcaagccccctcctatgaggatgagcaaaaatactactctcttcgccctgagttgctttctggatctggggcttcaggacttgctgcttcagacagcctt

SEQ ID NO: 60504 - DNA, 3229 bp, Homo sapiens
  misc_feature (1)...(3229): n = a,t,c or g
cgtatatttgtaccatgacgaccgcccgaattcccggtcgacgatttcgtgccgccgggagctgccacgtccgagacctgttcagctaccgccgcaatcatggtgagtgttggtactgaggaggcctagcagggtgaaggccacggtcgcggccttcacgggttcctcggccgtcctgagtcccaaatcccaagctggagccgttcagctcccctccaccgcttagagatttggggggctctggccccgtccttgcggaccattccgaggggagtccagaggtgaggccgaggaacctccctgactttgcggggcgcgccgctcctgcgtctcctgccagtctcccttccttcttttcggtcaacaattgaaaacaaaacgaggaacagcagaggagctactgtataccgagccctcagcattgttcgtaatctccgcctgctaacagccttgtgaagaaggtgtcagtaattaacactgtggatacctcccatgaggacatgattcacgacgcccagatggactactatggcacccgcctggcaacctgctcatcagacaggtccgtcaaaatctttgatgtgcgcaatggagggcagatccttatcgccgacctcaggggtcatgagggtcctgtgtggcaagtggcctgggctcaccccatgtacggcaacatcctggcatcgtgctcctatgaccggaaagtcattatctggagagaggaaaacggcacctgggagaagagccacgagcatgcgggacacgactcctcagtgaactcggtgtgctgggccccccatgactacggcctgatcctggcctgtgggagctcggatggggccatctccctgctgacttacaccggggaaggccaatgggaagtaaagaagatcaacaacgctcacaccattggctgcaatgccgtcagctgggcccctgctgttgtacctggaagcctcatagaccacccatcggggcagaaacccaattacatcaagaggtttgcatcaggtggctgtgacaacctcatcaagctgtggaaggaggaggaggacggccagtggaaggaggagcagaagctagaagcgcacagtgactgggttcgagatgtggcctgggccccctccatcggcctgcccaccagcaccatcgccagctgctcccaggatggtcgtgtgttcatttggacctgtgatgatgcctcaagcaatacgtggtcccctaaattgttgcacaagttcaacgatgtggtgtggcatgtgagctggtccatcacagccaacatcctggctgtctctggtggagacaataaggtgaccctgtggaaggagtcagttgatgggcagtgggtgtgcatcagtgatgtcaacaagggccagggctccgtatcagcatcagtgacagagggccagcagaacgagcagtgacaagacaggtggggcctggctccccacccgccagctccaggactgccccttcctgggccaactaaccaaacaactgggaagagcccccaactccaacaggattattttcccaggaggagttacagatgcagccacagattgatcatctgccttaacgtgatcggagatgctttgtaatctactgtccagctgaaagcactcatgttacgaggaagaaactacaagtgatgttcaaatctattttgggtcatttttatgtacctttgggttcaggcattatttggggggttttgtttccaaaggaactaaataaagtcatattgcttataaaaaaatgacccaaaatagatttgaacatcacttgtagtttcttcctcgtaacatgagctgtttccagctcggacagtagattacaaagcatctcagatcacagttaagggcagatggatcaatctgtgggctgcatctgtaactccctcctgggaaaataatccctgttgggagttggggggctcttcccaagttgtctggttacgttggcccagggaaggggcagtccctggaagctggcggggtggggagccagggccccacctcgtcattgtcactggctcgttctagctgggccttcctggtcactggatggctgatacgggagcccttggcccctttgttgaacatcactggatggcacaacccacttggcccatcaacttgactccttccacaggggtatctttattgtctccatcagagacagccaggatgttggctgtgatggaccaagctcacatgccacaccacatcgttgaacttgtgcaaaaatttaggggaccacgtattgcttgaggcatcatcacaggtccaaatgaacacacgacccatcctgggagcagctgggcgatggtgctggtgggcaggcccgatggagggggcccaggccacatctcgaaacccagtcactgtggcgcttctagcttctgctcctccttccactggccgtcctcctcctccttccacagcttgaatgaggttgtccacagccacctgatgcaaacctcttgatgtaattgggtttctgaccccgatggggtcgtctatgaggcttccaggtacaaacagcaggggcccagctgacggcatttgcaagccaatggtgtgagcgttgttgatcttctttacttccccattggccttcccccggtgtaaagtccagccagggaagatggcccccnatccgagactacccaacaggcccaggaatncaggaccgtaagtccatggggggcccagcaacacccgaagttcaacttgaggagtcgtgtccccgcattgctcgtggctctttcttcccagggtgccgttttcctctctccagataatgacttttccggtcataggagcacgatgccaggatgttgccgtaccatggggtgagcccaggccacttgccacacaggaccctcatgacccctgaggtcggcgataaggatctgccctccattgcgcacatcaaagattttgacggacctgtctgatgagcaggttgccaggcgggtgccatagtagtccatctgggcgtcgtgaatcatgtcctcatgggaggtatccacagtgttaattactgacacctctggactcccctcggaatggtccgcaaggacggggccagagccccccaaatctctaagcggtggaggggagctgaacggctccagcttgggatttgggactcaggacggccgaggaacccgtgaaggccgcgaccgtggccttcaccctgctaggcctcctcagtacca

SEQ ID NO: 60505 - DNA, 2093 bp, Homo sapiens
aaaaactccgatggcaatgaacataaaaaggaggtgacagaagaatacattcagtttaattccatttattattctttaaggatacatacatggagataaagtgatgaaagacaagaaggctatggtcaacacaaagttcagtacaggggttccctctatcagacagggatagagataggttcaggaaaccgcacacggtacctcaaaggaaaggcaataaggtgggtggtaggcacacaggggtttgtttattgtcattattattactctttatactttagcatatatattatatgtgtatatacatatctatattccattgcatgtatgaaattttttaaaaattcaaatggcttataacaaaaacaaattatgtataatgtctcaaatggtgaatcacagcctggaggctcttaatttacctccactctatcattgaaccctggctaaaactgctgctttgtttctattcccctcatacttgagagtagagatattgccctgctctgacaacacttaccacattttaggggcttgatccatgctgacagaaaggatgaacaaacaaacctgacatgtatttctagaagaactaggaaaactctgaagatttgaatcacaagtaggcagtgatcattttggtttcacacatttctgcaaacctacagctcgttccctctgatcacttcctccaccctccttctgttctggtgcgtagggcttgaaatcgttcagtgctgagatcaacctcaaacaatgccttcagaaatactgttttcttctgctttctgatgtggctgctacaaaggtaataggggccgcagccactctgcccttgtcttctgcacccaattcagagaacatggccaccagcctgtggcttcagtgtactcaggagatcagtcatccatttgaaccaccccaccccacccaggggctgagtgatttaactccatcctcagtcctgatcactgtctgagatgaatctgtggtgtcctcccaacaccctcgtgcaggacctcatgtctggctccttgaatgatcacacgatctgtttgtatttttacaatttaatgtgctgctttcatgcatgaggttcacaggcaagagtaaaatcacagcctctcaattaaacagaactaaaattaagagaggtgtgaaaaatggcagggaacaaacactccattttcagaatatgtgttttctggaatttattctcctttatgctgaatataaaatatgtgatttcaccaatgctttaagagacaaacacatacaagttgaaatctgaaaacaataattatatggagcaaagtgcagcctgacacttaacaaaagctgttaaatgaaaagtatctctagaaaaagcaaaacccctatagtaaaatcaaacacaacagaaagaagctttggtacttttcaataacgggagacaaaaaaaagtttagtttattattaaattcatgtaatataaaaacatctatgtggaggtattgaattaaatctataaaacagaaacaaatctagaatatattagaatctgaggtgaaaaaataccttgctttcctcttctttgattgtaataaaacaccggaatttggaaaaacaagtattttcccaactaaattttcttgtggtctgtactcacctagcaggatggcactccatattttatctaattttaaaatggcataagttgatttttagcagcacatttcctttgctccagcaagcctactacaggaaataaaaattctgtcttgaaatgcccttgatatgaaatctatgcctacaattcccatccacttctttcctagtattttaagactgtgattatcaaaatctaaaggcagctagttaaagaagggaacaagaaaatcattattatatgtttcaaaatcagctgataacagaatacaagtaaggaccccatattctctgagctaagtgtggtcccagagggcaacatcttggtactctgtggagcctgggtaccatgtaaatgccacacactgtgctgctgccccactcataacaagtacagcaccactcgagactggtctcctgtatttctttgctgatcaaaaaaaaaa

SEQ ID NO: 60506 - DNA, 803 bp, Homo sapiens
ttttttttttttgccaatggaacaggacatcatttaattgcctctagggtcctcctgggagagggactgcggggcctttggcagagctctggctgatggaaccaacagaggtgcccatcagccagtgccaggcaggatggcggccccaatgcttggctgggggcagccagcatttggggctgttgcttaagacaatttctgagactaatgggtaaggaatgttgcctttagatggaggagaggggactacatttagagaggagggaggagaagtggcctgcattgggggagggactctaaggttaggttaggaatgacagggagttggtcaaaaggtccttcatggccaggtgaaggctggggggagtgtggtgatggagtccagcaggggaactctggacaggcttgactcaagccagcttcaggaactcctgcagcgtgttttgttccacagcctccacgaagagctcatagtccccacagtactggtccccgttgacaatctggggtggggtggccttggggttgcctgccaaggctcgcatctcatccctcagggcgttgtcctgggagatgtccactagctggtattggatgcgcttcccatccaggattcgggtcacctcgctctgctgggacttgatttcgcgggagccggtgaccgacgtgctgtagacgcgcaggccgctcatgctgggggtagacagacgggccggcgggcagagggcggcggtagcggcagctgcactgccgggagacgacgccgccgccgtgctcgggagcggtttccttcctgcacgaaa

SEQ ID NO: 60507 - DNA, 1043 bp, Homo sapiens
tgtaagtttgtggaaattgccccacgaccatgcgctgacagtcaatctacaagatgtggccactgcggctgcacacgaagctgcccgaggaggcggcagggaaggtgaggccctcagggaaggggaggcccaggcaccagggcccccatgccggggcaggccgtggggaagggcagggactcacagcatggcagccgagggctccgggcagccgtcccgggcctgcttgaaggccaggtcggtgaactgcagcgcgtggtgctcccctaagtccacggggcaggaacgcagcaccccgccacgcagccgccagagccgcacactgccctgcccgcacgacgccatcctgcaaggaatgaggactgagcactgccgcagctcgcagcgccctgacccaccgggagacgcagagacgcacagccaagccagggggaggtgctcgggcctcggcccccactccgggcccagaccctctcccaacatcgtggatgggcggctgcatcacctggtttcatcaaaaaaggtgacccggaaggcctggacgtcaaagtcagtgtgcgcctttgccagaacgaccacctcgccaccgaggcccacctggccggtgccccaggccaccaccatctgcaacaagcccaggctgagcccgcacggcagggccagtcggggccacctcgattctgcaaggcccagccgagccccacccggaggtggcttttctctcatgcggagaccagcctctgagcgtgcggccgtggagagtggaaggaaaccagcccctccatcttctcatcctgaagctttgggacttctacagagacccgcaatgctgagcactgcaacccattcgcagagaagtacaaacccccccgcaagccggaaggtggataaaaagcagctcgtggctgggcacagtggctcatgcctgtgatcccagcactttgggaggctgaggtgggaggactgcttgagccctggagtttgagaccagcctgagcaatgtaatgaaaccctatctctacaaaaagttaaaaaaacaaaaa

SEQ ID NO: 60508 - DNA, 762 bp, Homo sapiens
attccagtgtggtggaattcgaattattgaggggaagctgagaggcatagagggcatggactgtggagaggtggtgagcgcatgggctggtttggcccaggcaactcagcctccttgaggggccctcatggtctctcccaacccacatgccatgctgaccgtggtggtagaagtggagtcggggaggggttcaggaacaaaacttcacctttgacagtcctgggccctgatgctgctcaggaggcagagcaggagctgctggcacgtgtccaatccacactgggctctctgggccgagggtacagtgtggccctgttgctccgggggagggaaacagaggcaccccgacttgtgcctcagctgctgcagatgctgtttgaagaagctctgcccctcagctgctctgatcctgtgcttagcactcttagcctggtgcagggcctgctgtctgctcactctcaccatgtcctgcccagggcctgaccctcctgaggggcccgggacccagcgtgtgtggcaaggggctctacggatcctacagctcccaggagccccagactgccccctgctgcgggtgttggctggtgaagttgttggtgaggaggcggagggctctttgccctggattgtctcatggctcttggaaggaaacaactacagtggcctacttcttcgcctggacccccaaggtggccagggggagagtgtggagttctttgggaagctctgagatctgtccttaggcctgcctcacccatcacg

SEQ ID NO: 60509 - DNA, 2735 bp, Homo sapiens
ttagattcagctttgggaatttgttccaggaactgcatcatccagcccaaaagcaaaagaggaaaatgcataagccaggatacctaaatgttcctttatttaaacttgaaaatgtgactgcaaaaggagtcaagaagtttagtactcaacacatttcttctttgtagaaataactgctcaagaagataaattgttacctaacagttgattgatgaatatgaaatcagagcaagaggggctaattagagaaattactagctagggctatttacccaaaccatctatccagactgtagacatagaatcaccagatggctaggatcctggtgcagctggttcccctttttccttaccctgaatgtcattaaggatgcattgccaaatgctgcccctctggcctgatgactacactccatattggtcacctgccttctttttcctacagtcttcctccagacaggcacgccatacaaccgactacacttgggctcactgaatgaatcacattcttctgctgtgcctcccagagatttcatcaaagcacccgcagtggccttctggaggctcctcaaactctccactcaatgtttcctgaaagtgtcgtgtttctcacctctagattgttattctcatcagttacatgtgggtttcacaaatttatttctcagaatgcaagtctgtctcttatatcctcgggaaacacacctttatatcccagttagtactgacaaaaattaaactagggactggccaaaaacagtgcctttcctcactttaatctcactaaagtagataagactcaagttattttgttcttgcaatggcattgacaaatgtttgcaccaaaaaccatgttgaagttcattaaggaaactgtgatccaagatccaaggtcaaaaaaacaaattcatcaattcagcacaccaccaactcacaggctaagcatcttactgctaattcattgatgctgccatttgtcaagtgccaaattgaattattgatttgtcaataatttccttccgttggttacttatatagtatattgcaattcttgttgctgaagtcagctacactttttctatttgaaaaacaatttcttgcatttgggatttcaggtatagtgattgttacaaatatgaaggacttgaattaacagcaagttttcaagtaaaactttacttatgtataactgaatgagttcttaaagacatttactaacaattttccacaaactaaaaatttataaaacaataaataaaatagactttaaaaaaaagcgtgtcacacagctgcttgttttttgtttgtttctttgtttgttttttagtagtgaaatggtgaaaaatcagacaatggtcacagagttcctcctactgggatttctcctgggcccaaggattcagatgctcctctttgggctcttctccctgttctatgtcttcaccctgctggggaatgggaccatcctggggctcatctcactggactccagactccacacccccatgtacttcttcctctcacacctggccgtcgtcaacatcgcctatgcctgcaacacagtgccccagatgctggtgaacctcctgcatccagccaagcccatctcctttgctggctgcatgacatagacctttctctttttgagttttgcacatactgaatgcctcctgttggtgctgatgtcctacgatcggtacgtggccatctgccaccctctccgatatttcatcatcatgacctggaaagtctgcatcactctggccatcacttcctggacatgtggctccctcctggctatggtccatgtgagcctcatcctaagactgcccttttgtgggcctcgtgaaatcaaccacttcttctgtgaaatcctgtctgtcctcaggctggcctgtgctgatacctggctcaaccaggtggtcatctttgcagcctgcatgttcatcctggtgggaccactctgcctggtgctggtctcctactcacacatcctggcggccatcctgaggatccagtctggggagggccgcagaaaggccttctccacctgctcctcccacctctgcgtagtgggactcttctttggcagcgccatcgtcatgtacatggcccctaagtcccgccatcctgaggagcagcagaaggtcctttttctattttacagttctttcaacccgatgctaaaccccctgatttacaacctgaggaatgtagaggtcaagggtgccctgaggagagcactgtgcaaggaaagtcattcctaagaggtgtgacatttgaactgccagcctcagttgtcacgtggactcttgatgcccaattattgcctcaatccagaaaagtttacttctctttatctgtgctttactgacagaagggcaagtcttctctcgttttttgcagataaaattttagatgtgttgcattcattgggtttctatgagatgtggttttatcagacaattttttcttttatttcacaattactttaatatctttgaccagcaaatatctccaccctccagggagaggtagtagcttctagggaaaccatcttggagagggtcctgtcttcccctgaggtgggctttgaatccagcactcttccccttggagggtcacttggaaccagctaacttttcagggtcctttcttcccagttctgctcatacatctgtcatgtaacactttagtgttctatatttgcatagctgtatccttccattagtttg

SEQ ID NO: 60510 - DNA, 2538 bp, Homo sapiens
tttttttttttaatcaaagtacttatggtgtcaatgccaaagcaacgaagaattcccctttttccttcactattgacagcttcagtttctgtacttactgtgtcatcctatccattcccttccctgagcctgggactgctcttccaagggagactaggagtgaagggaggagtcctcccaaagttaccctttaagcttgataattagctccatagccatgctaaagcatgactgtagatccccaagtccctgacacattttcttctaagaaactggttagccaagaaagtaaagacgtaagccctgaagatggcaaaagggtgtcataatctcccaaagtcatctgtataggatgcttcatttaaccctttttcttttgcagacaaaggggttaaaaatctcttctttctaccctatatctttaaagagggattgacaagccccaaatttcccttttatggaaaaggccccagggtttctgggccaacaattcacttttttcagtctcttaggtcctcttgcatgcctgagaatattgagtattcggaatctcctaccagcccttggtaaatgaccctaccaggtggaatagtttgagctttatctgctcttttttaatgggatagaggggaaggcaacacgtcttattttatcaaaaattgcaaagctacacgctctttgtggagaagcaccaaaaggaaaaccttagtttgaaaggattcattgtaaataaaaatagtaactcagccctccattcagggaggagaaaggcattttaaagctagtatattgaaggtttcccccttgacttcagtgttgaatggctcttgcaaggacttcttgaaggttttttttctcactagccagtgtttggccgacaggttgcacctctgcctgagaagatgcctgaaagagaaaaggcagcatttgttacaggcataatgttgtagaggaagaaacgacaacagcagtcccctgcattcattttagaaccaagatgacgtctcacagttgctctgataaaaacacagggactccctgctcttagcatacctatagtgctcacctagaaaatctatgagttaagcactacaaacattttgttgtaggagcgacgtacgacagtccaattgcagaattatgaaaagcattggcagtagcaactctgtggtggacacacccacctttgctctcctagctccttttctgtcattctgtttgactttctcaagggagcaaaagaaagttgtactaccagttaagtctccaaggtgtctttaacccctccatccccctagcctttttggaagggagtggtgtgggagatatgtggagaccctttgtgcagggcaggggtggtggtgcaaagttatcagtaactctgggtttctctaagcacttggtgctgtcagagatgcttggagatggagtaccaaatgagctggggagaagatcctgcagaacaggggtggccaggtcatggccccatactggaaaagtgtacctgtgcagaaataaagtaggtgtacagataagttgtgctgctcttgtcttgggatggcagggttggtggtgaagaaagtgccatagaaatggcagcacagaggcaccctcatcctcagcaggcagcaggggtgaacagtaatggaaagcaccgcagtgagccttcatcatcataggaagacgagcagctccttttttagtaccattggctgtcttcttccagtatctcatttgtttaaataatagttcttggctcaacaagcttctaagtagtggccaactgttacaacagggttggtgggcaaattttctttttgagttcctccacttaccaggttaaaccccttcacatgggtgctccattgccgccatgggctttttgtcagggataagggtgcagccagccagcatgtccagagaggccaagatagagtcatacaggcgatctgcgtggctctccagctcaccagactgctttgcgatcctcccaaggacatcctctaaaactaacaatgaggttcaaagaaattaaaccagaaataaaacccatgcaagtgttgtccagtaagcattttcaaaagaacatacaagggtatagtattttacacaaagtaggacctggcagtagtttctgaatgtctgcccttttttaacagtgattctccagggacttctgttgcactggagaacctatgttgttaacttctgattaaagctaagaaaagaactcactgactccactttgaaattacgtaattcacagaagggcacagagatattatggttttctgatggctggtattacctgactttagaggtaagacaggtatctctgtaagggcacatccagatcctcttgggcataaggcttaaataaaatgacatgccaaggttcagatgcttacccctggtaccaggtctatcagtttctattggctgggaagaatgttatttcacatgggtggtctgtaatagatttgggagtgcttgagaccctttgttttgtgggcctcagtgaacagactgaaaacctcg

SEQ ID NO: 60511 - DNA, 1820 bp, Homo sapiens
ttttttttttttagggataatgcttttatattagtttttctataacaagaaaaatcagctttgagatttttatcatttttttccttagaaaagaataaaaaataaaggcacccggaacttcccccacaggcctgaagaacaaaggtgtctcctaggtgcagctgggtccttcctccctggctcagcccagccccatcacctctgcttcactcctgccccaaggccccagcagcacccagggggctctcccatcctgcctccactgggcttgcccattggaaaagtgcctgtgtcctgccagggcgtggcagggagggactcttagcagagtgactgcccagcacctggaggagcagggtgggccaggccaggccagcagtcctgaaggctcctgtccccataggatgggaaaggaataaaagccagcttttgtgagttccagagggtggcaggcacctggccacagagcatggatacccttgtgtcttctccagggaacggacggacagatggacagggcagacggcgagctgctatggctgattctggctggggcaagagctgtctgtggcataggctttggagggctgttcgcacatgacttgtgcatgtgtgtgtgtgtggtgtgtatgcatacgcatacacatgtcagcagggggagggaatgggtgcctgtgtgtgccagggcaggggcagacccttccctgcatgattcagagggcgtggcagcggtagtgggggtgtgacagagactgtggtggtttggagggtagttgtgtgtggctgagctgggtgtttgagggtgtgatgtgtgtgcatgtgtctggccgtgggacacgccgtgggaaggggtggggatatgagactgtgtcagcccgtgtcatgtgggatgcctcatgtgtgcagctgggtgtgtctgtgtgagcacggcagagtggggggctcacagcacacaggcgtgtgctgcagaaaagagtccggcggtccatcatcctaggtcacatctgcatcaccttgtcactatcttgtttcctcttcctcaacctcatcctcttcctcctcctccttttccttccccaagcggccacggtccttggaaatgtcaccaaactctaagttgccttcaatgtccaagacctgcaggtgcttcagcctccggaaggcactgtccaccacggagcccacagccagcttgttaaacctgagaaagatccccttgaggttgggcgtggagtcgaaggcattggcgggcaccgcactaatcttgttgttctgcaggtacaggtactcaagtgactcggggagcccctcggggatctctgtgagctgattcccggcgatgtccagcagctgcagatgggcgaggtccacccaggcacgggggcccagggctcggctgcgcagtcggttgctggtgaggtacagctcacgcagctgagccatgcccgccagcgcccctcgtgccaaggcagccagctcattgcgcttgaccttcagcacatggacatttcgaggcagcccaggtggcagcatgtgcagccggttgcccgacaggtccagcgagcgcagcaggcgcagcttgcggaaggcgtcgcggtgcacctgtgggctggtgatgcggttgtagctgaggttgagctcctccaggaagtaggtggtggcaaagtcttcgcggccaatgcctgtgatctggttgtgcaggatcatgaaggcgcgcacgcggcgaggcaggccactgggcacgcgctacagcgcgttatagtacaggtgcgccgtgtgcaaccgcttgaggccctggaaggcccggacgagtgggtcgg

SEQ ID NO: 60512 - DNA, 542 bp, Homo sapiens
  misc_feature (1)...(542): n = a,t,c or g
cccgggtcgacccacgcgtccggtattctgctgttgttgagtggagtgtcctgttaggtcaagttggcttatagtgttatactaatcttctatatccttactcattttaattctatcaattatctattattgagagttaactccaactataattttggatttgtatatatgttcttgctttgtttcttcatgctttctcaaactctgtttttaggtgcataaacatttaggattgttacctcttaatgagttgagtctttattactatgaaacaaccccttttaaatcttataatattctttgctgtaaaatttacttttatattaatatgatcagctccagctttcttttatttaatgttagcatggtatagttttttccaaccttttgcttttaacctgtttatgttcttatacttaaaatgcatttcttgtaggtagtatatgattctgccgtccgtatctcacctaatcntganctctcgctaatacctaactgagtactccaatggatctgaccatttccacgggcctaaaacgccc

SEQ ID NO: 60513 - DNA, 5406 bp, Homo sapiens
tttcgtgccgagagaccgcatcgtcggctcggaggctgaggggctgccgcggccgggagcgcccctcgcctcgctcctcgctccgcttggtgtcatgtgattctctgagggagcagctgcgtgagtggagatgctttcagtggtggagaatggactggacccccaggctgccatcccggtcatcaagaagaagctggtgggatccgtgaaggccttgcagaagcagtacgtgtccctggacacggtggtcactagtgaagacggagatgccaacaccatgtgcagcgccctggaggccgtatttatccatggcctgcacgccaagcacatccgagctgaggccggaggaaaaaggaagaaaagtgcccaccagaagcctctgccccagcctgtcttctggcccctcctgaaagctgtcacccacaagtgagatttagctggagaggttttgctttgcagaggagcagcagactatgggacacttggcttttcctccccggctgttcaggaagccaacagaggtgccctgtgttctagcataaagagaggacacatcatctcagagttggagcacctgacgtttgtcaacacggatgtgggccgctgccgggcatggctgcggctggccctgaacgatggcctgatggagtgctacctgaagctgctgctgcaggagcaggcccgcttgcatgagtactaccagcccaccgccctgctccgggatgctgaggagggcgagttcctccttagcttcctgcagggcctcacgtccttgtccttcgaactctcctacaagtctgccatcttaaatgagtggacgctcaccccattggccctgtctgggctttgcccgctttctgagctggaccctctctctacctctggtgcagaactacagcggaaggaatctctggattccatttcccattcttcaggctctgaagacatcgaagtccatcactcgggccataagatacggaggaaccagaagctgactgcctcctccctcagcctggacacggccagttcatcccagctgtcctgcagcctaaactctgatagctgcttactccaagagaatggctccaagagtccagaccattgcgaggagcccatgtcctgtgactcagacctgggcacagcaaatgctgaggactcagaccggtctctgcaagaggtattgttggaattcagcaaagcccaggtaaactctgtgccaaccaacggactgagccaagaaacagagatccccacaccacaggcctcgctctccctccatggcctcaacaccagcacatacctgcactgtgaggcacctgcagagccccttcctgcccaggcagcctctggaactcaagatggtgtccacgtgcaggagccgcgtccccaggcgcccagccccctggacttacagcagcctgtagagagcacctcaggccagcagccttctagtactgtcagcgagacagccagagaagtgggccaagggaatggcctgcagaaggcccaggctcatgacggagctggtctgaagctggtagtttcctcacccaccagtccgaaaaacaagagctggatctcagaggatgacttctaccggccttcccgggagcaacccctggagagtgcttcagaccacccaatagcttcttacagggggactccagggtcaaggcctggtctccacaggcatttttctcaagaaccaagaaaaaactgctccctgggggcgttagaccaagcgtgtgtaccttccccaggaagaaggcaagcccaggcagccccatcccaggggcataagagcttccgggtggtacaccggagacagatgggactgtccaacccattccggggtctcatgaagctgggcaccgtggagcggcggggggcaatgggcatctggaaggagctcttctgcgagctctccccgctggagttccgcctctacctgagcaacgaggagcacacctgtgtggagaactgctcgctgcttcgctgtgagtctgtggggccagcccatagtgatgggcgctttgagctggtcttctctggcaagaagctggccctgcgcgcctcctcccaggacgaagctgaggactggctggaccgggtgcgggaggccctgcagaaggtccggcctcagcaggaggatgagtgggtgaacgtgcagtacccagaccagcctgaggaaccccccgaggcgccccagggctgcctctctccctcagacctgctctcggagcccgcggccctccagggcacacagtttgactggtcgtccgcccaggttccagagccagatgccatcaaggagtccctgctgtacttgtacatggacaggacctggatgccctatatattttctctgtccttggaggctctgaaatgtttccgcatcaggaacaatgagaagatgctgagtgacagccacggcgtggagaccatccgggacatcctgccagacaccagccttgggggcccatccttcttcaaaatcatcacggccaaggctgtcctgaagctgcaggccggaaacgccgaggaagccgccctgtggagggatctggtccgcaaagtcctggcatcctacttggagacagccgaggaggcggtgaccctgggcgggagcctggatgaaaactgtcaggaggtgctgaaatttgccacccgggagaatggcttcctgctgcagtacctggtggctatccccatggagaaaggccttgactcccaaggctgcttctgcgcaggctgctcccggcagatcggcttctcctttgtacgacccaagctctgtgccttctctggcctctattactgtgacatctgccaccaagacgatgcctcagtgattccggccaggatcatccacaactgggacctcaccaagcgcccgatctgcaggcaggccctgaagtttctgacgcagatccgggcccagcccctcatcaacctgcagatggtgaacgcgtctctgtacgagcatgtggagcggatgcacctcattgggaggagccgggagcagctgaagctcctgggggattacctgggcctgtgccggagtggcgccctgaaggagctcagcaagaggctcaaccaccggaattatctcttggagtctccgcataggttccgtgttgctgacctccggcagatcgcagatgaggtatatgaaggattcctcaaggccctgattgaatttgcctcccagcatgtctaccactgcgacctgtgcacccagcgcagcttcatctgccagatctgccagcaccacgacatcatcttcccctctgagtttgacaccacagtcaggtgtgccaagtgcaagaccgtcttccaccagagctgccaggctgtggtgaagaagggctgcccccgctgtgctcgctgacgcaagtaccagcaacagaacgttttcgccttaatccccaatctgttgaccccgctctgaaagccggggttgagtgtggctcagccatcccggctgggtttcctaatcagcccaggatactcaccgtgtcacagctgtgtcccccttgtcagggaagaccctcaagatgtggccagagcaccggcctcccagaggaaagcccaggaagtccccgtggtgtcccctggccctccccccacccctctgctgcaggaggcgtggccaccaccagatgctccctgtctggggcaggcagggccgtttactcaccaggccctggctcaccagcgtcccggcgcctccgttagggctggccaaacactgtggaaaggggacttggggaacattttcaattccacattcctgattaaaaggtctggttttttaaggtgggtttttcccattcatatttcaacagaaagtatttttttattcttgaccctacgtgagtcacccatgaaatccagacattctcacccccagcggatgcacaggagccactcaggcctggcttaaaggtagcgggtggctggtgggcaggccactgctgggacagggtctatgggcccacccagtgcctttccttggccctcactgccagtgccaaaccgcccctcagcagggcagggccagtcctggcgaccccggttcctctgtgtcctctttactccccaccccagtgcgtctcgcctgctgagcccaccgctttctcagcgtcagagcccctagctcttctctagcctggggccttggccccattaggagaaggagaaatgactggaaaccagcactgtcagcactttgagccctcctcggtttatggagggtcgccgtcttgcccacccccgatccccgtgcgctcctcacccctctacagacaggggcgctgctgcagatgctccaggcccaccttggtgggtgcccggggtcacactctctgcctgactgacccctgccagggcacagataggcaggaccccagagagggcaggcagccacgccctgcactgtggagaagtgacctggtcctaagctgtgcagggcgtgcgggggaactgccctgtggatgcagccaccacctcacaaagccatgaattcccaaagcatcactgaacttgcccagccgggacactggagactgaagaagttccccggagcaggactgcctttgaaggggccttggggctggggtgggagtctggaattgttttcaaagtgatggtcagaccctccaggcttcggggaaatgtgggtttgctggtctctctgtcgccttcccccacctctcctggacctagcaggccctcagtcctagctgtcttacctgcgctcagcttggagtcaggcctcaggtggagagccgcatgtcactgtcagagatgagcccacccccacccttccctgggggcgattagctgctgagtcacccacccagccttggagctggatgcctgtgcagcagaacagaggcaacggtggcaggcaggtggaggctgcgcacagcttctcccggtcatggcacacacctgtgcccagacgccaatgcctcctaagccaggagctgggttatgcacccgccatggccccacattaacgctcccaccacaagccccagccctagtcagagcccctcattgccccccatccctgagtgggcaggagccctggcccggggagggcttgggcctgtgaggattctcccccgaaggtgccctcggaggcaccaggtttgaggccctgggggccccgttccccagaagctgccagtgctctcagatgcattgactcttcccgcctcccctccctcagaaaggtagtccccacactatttttaaaatgttctcttatgcaatacactgttcctagtgaggcagggctctggccctgaggagtctttgcaatgtattgaaggaattgctcccgtgtgagttttgactgattttgcagtaaggacctgatctttctcaaaaaaaaaa

SEQ ID NO: 60514 - DNA, 1026 bp, Homo sapiens
ttttttttttttgcgaaaatagtgggaatatatttgaaaagacaagtcactatgatgtttacagtacaacctcagggcccctccgcacttggtttgcgacactccggaggcgttttgaatggcctacaacaccttccagagaggcggtctgggcctgatttggtctctttcaaatatcaaaataaaaacttttgacgtacacattgcacccaagtaaaaactaaacaatagagcaaaacaaaccatggatcttcaagatacttatggagagaagggtgagaaggaagccctctcaccctttgacccaccttcacaggcacgacgctgtgagaggacacgtgcgtcccaggcctgggttgggtcggtgcatgagggtgccctggccagggcagcggctctgcagccccagccctgagcatccccgtccggcagcacagacctcaggcttgcagcccggcaggggaggcagggagagcgccgccatgcaggtgcccgtgccctcgacacagccatggtggggcttccctgaccccgtctgtcccacccaatacccccattaaaaaaaaaaaatcaaggaagcctgtgttcacattacaacacaaaaatagcaccagaaacttcagagtaacattgcaaataggtggagcccagagctccgtacagcagggaggctctagagggcggccatggaggctgggagggaacgaggagggcccgcgggagctggcacaggggcggtttcttcccagttccatacgggaacccggttcctggggtcaaggtgtgctagagatgggcttttctcccgcagcgcaaatggaggctggcatgaccctgtggtcagagggaggaggcatgaccctgtggtcagagggaggaggcatgaccctgtggtcagagggaggaggcctgttgtgctcttgggggaccaggcggctcagaagcaacccttctaagtagtgagcactgccttcccccacgtggtttctaaggtcactttggaattccagcaacagcagcaagact
